United States Patent Application Publication US 2013/0267429 A1 - sequence listing, part 26

SEQ ID NO: 624738 - DNA, 57 bp, Artificial; identical to SEQ ID NO: 200014
  Synthetic oligonucleotide

SEQ ID NO: 624739 - DNA, 55 bp, Artificial; identical to SEQ ID NO: 142574
  Synthetic oligonucleotide

SEQ ID NO: 624740 - DNA, 52 bp, Artificial; identical to SEQ ID NO: 211586
  Synthetic oligonucleotide

SEQ ID NO: 624741 - DNA, 55 bp, Artificial; identical to SEQ ID NO: 190465
  Synthetic oligonucleotide

SEQ ID NO: 624742 - DNA, 55 bp, Artificial; identical to SEQ ID NO: 221193
  Synthetic oligonucleotide

SEQ ID NO: 624743 - DNA, 55 bp, Artificial; identical to SEQ ID NO: 142860
  Synthetic oligonucleotide

SEQ ID NO: 624744 - DNA, 60 bp, Artificial; identical to SEQ ID NO: 177135
  Synthetic oligonucleotide

SEQ ID NO: 624745 - DNA, 53 bp, Artificial; identical to SEQ ID NO: 194697
  Synthetic oligonucleotide

SEQ ID NO: 624746 - DNA, 55 bp, Artificial; identical to SEQ ID NO: 211262
  Synthetic oligonucleotide

SEQ ID NO: 624747 - DNA, 55 bp, Artificial; identical to SEQ ID NO: 142407
  Synthetic oligonucleotide

SEQ ID NO: 624748 - DNA, 55 bp, Artificial; identical to SEQ ID NO: 154210
  Synthetic oligonucleotide

SEQ ID NO: 624749 - DNA, 53 bp, Artificial; identical to SEQ ID NO: 164859
  Synthetic oligonucleotide

SEQ ID NO: 624750 - DNA, 55 bp, Artificial; identical to SEQ ID NO: 164306
  Synthetic oligonucleotide

SEQ ID NO: 624751 - DNA, 55 bp, Artificial; identical to SEQ ID NO: 182891
  Synthetic oligonucleotide

SEQ ID NO: 624752 - DNA, 59 bp, Artificial; identical to SEQ ID NO: 239515
  Synthetic oligonucleotide

SEQ ID NO: 624753 - DNA, 55 bp, Artificial; identical to SEQ ID NO: 189385
  Synthetic oligonucleotide

SEQ ID NO: 624754 - DNA, 59 bp, Artificial; identical to SEQ ID NO: 200003
  Synthetic oligonucleotide

SEQ ID NO: 624755 - DNA, 55 bp, Artificial; identical to SEQ ID NO: 242846
  Synthetic oligonucleotide

SEQ ID NO: 624756 - DNA, 52 bp, Artificial; identical to SEQ ID NO: 169906
  Synthetic oligonucleotide

SEQ ID NO: 624757 - DNA, 55 bp, Artificial; identical to SEQ ID NO: 245443
  Synthetic oligonucleotide

SEQ ID NO: 624758 - DNA, 55 bp, Artificial; identical to SEQ ID NO: 191035
  Synthetic oligonucleotide

SEQ ID NO: 624759 - DNA, 56 bp, Artificial; identical to SEQ ID NO: 212540
  Synthetic oligonucleotide

SEQ ID NO: 624760 - DNA, 55 bp, Artificial; identical to SEQ ID NO: 187705
  Synthetic oligonucleotide

SEQ ID NO: 624761 - DNA, 55 bp, Artificial; identical to SEQ ID NO: 258910
  Synthetic oligonucleotide

SEQ ID NO: 624762 - DNA, 55 bp, Artificial; identical to SEQ ID NO: 147049
  Synthetic oligonucleotide

SEQ ID NO: 624763 - DNA, 55 bp, Artificial; identical to SEQ ID NO: 233564
  Synthetic oligonucleotide

SEQ ID NO: 624764 - DNA, 55 bp, Artificial; identical to SEQ ID NO: 242847
  Synthetic oligonucleotide

SEQ ID NO: 624765 - DNA, 55 bp, Artificial; identical to SEQ ID NO: 183272
  Synthetic oligonucleotide

SEQ ID NO: 624766 - DNA, 55 bp, Artificial; identical to SEQ ID NO: 203820
  Synthetic oligonucleotide

SEQ ID NO: 624767 - DNA, 55 bp, Artificial; identical to SEQ ID NO: 245400
  Synthetic oligonucleotide

SEQ ID NO: 624768 - DNA, 55 bp, Artificial; identical to SEQ ID NO: 249755
  Synthetic oligonucleotide

SEQ ID NO: 624769 - DNA, 55 bp, Artificial; identical to SEQ ID NO: 233563
  Synthetic oligonucleotide

SEQ ID NO: 624770 - DNA, 50 bp, Artificial; identical to SEQ ID NO: 261989
  Synthetic oligonucleotide

SEQ ID NO: 624771 - DNA, 55 bp, Artificial; identical to SEQ ID NO: 238482
  Synthetic oligonucleotide

SEQ ID NO: 624772 - DNA, 55 bp, Artificial; identical to SEQ ID NO: 203819
  Synthetic oligonucleotide

SEQ ID NO: 624773 - DNA, 54 bp, Artificial; identical to SEQ ID NO: 164769
  Synthetic oligonucleotide

SEQ ID NO: 624774 - DNA, 54 bp, Artificial; identical to SEQ ID NO: 247797
  Synthetic oligonucleotide

SEQ ID NO: 624775 - DNA, 55 bp, Artificial; identical to SEQ ID NO: 248466
  Synthetic oligonucleotide

SEQ ID NO: 624776 - DNA, 55 bp, Artificial; identical to SEQ ID NO: 201288
  Synthetic oligonucleotide

SEQ ID NO: 624777 - DNA, 55 bp, Artificial; identical to SEQ ID NO: 199260
  Synthetic oligonucleotide

SEQ ID NO: 624778 - DNA, 55 bp, Artificial; identical to SEQ ID NO: 164304
  Synthetic oligonucleotide

SEQ ID NO: 624779 - DNA, 60 bp, Artificial; identical to SEQ ID NO: 257986
  Synthetic oligonucleotide

SEQ ID NO: 624780 - DNA, 55 bp, Artificial; identical to SEQ ID NO: 254692
  Synthetic oligonucleotide

SEQ ID NO: 624781 - DNA, 55 bp, Artificial; identical to SEQ ID NO: 195179
  Synthetic oligonucleotide

SEQ ID NO: 624782 - DNA, 59 bp, Artificial; identical to SEQ ID NO: 141915
  Synthetic oligonucleotide

SEQ ID NO: 624783 - DNA, 55 bp, Artificial; identical to SEQ ID NO: 207572
  Synthetic oligonucleotide

SEQ ID NO: 624784 - DNA, 60 bp, Artificial; identical to SEQ ID NO: 239492
  Synthetic oligonucleotide

SEQ ID NO: 624785 - DNA, 53 bp, Artificial; identical to SEQ ID NO: 245405
  Synthetic oligonucleotide

SEQ ID NO: 624786 - DNA, 55 bp, Artificial; identical to SEQ ID NO: 156672
  Synthetic oligonucleotide

SEQ ID NO: 624787 - DNA, 55 bp, Artificial; identical to SEQ ID NO: 154209
  Synthetic oligonucleotide

SEQ ID NO: 624788 - DNA, 50 bp, Artificial; identical to SEQ ID NO: 246953
  Synthetic oligonucleotide

SEQ ID NO: 624789 - DNA, 55 bp, Artificial; identical to SEQ ID NO: 148556
  Synthetic oligonucleotide

SEQ ID NO: 624790 - DNA, 55 bp, Artificial; identical to SEQ ID NO: 215535
  Synthetic oligonucleotide

SEQ ID NO: 624791 - DNA, 55 bp, Artificial; identical to SEQ ID NO: 242849
  Synthetic oligonucleotide

SEQ ID NO: 624792 - DNA, 56 bp, Artificial; identical to SEQ ID NO: 187353
  Synthetic oligonucleotide

SEQ ID NO: 624793 - DNA, 54 bp, Artificial; identical to SEQ ID NO: 199606
  Synthetic oligonucleotide

SEQ ID NO: 624794 - DNA, 56 bp, Artificial; identical to SEQ ID NO: 237974
  Synthetic oligonucleotide

SEQ ID NO: 624795 - DNA, 55 bp, Artificial; identical to SEQ ID NO: 183257
  Synthetic oligonucleotide

SEQ ID NO: 624796 - DNA, 56 bp, Artificial; identical to SEQ ID NO: 199992
  Synthetic oligonucleotide

SEQ ID NO: 624797 - DNA, 55 bp, Artificial; identical to SEQ ID NO: 190513
  Synthetic oligonucleotide

SEQ ID NO: 624798 - DNA, 51 bp, Artificial; identical to SEQ ID NO: 145048
  Synthetic oligonucleotide

SEQ ID NO: 624799 - DNA, 57 bp, Artificial; identical to SEQ ID NO: 177145
  Synthetic oligonucleotide

SEQ ID NO: 624800 - DNA, 55 bp, Artificial; identical to SEQ ID NO: 153342
  Synthetic oligonucleotide

SEQ ID NO: 624801 - DNA, 53 bp, Artificial; identical to SEQ ID NO: 258102
  Synthetic oligonucleotide

SEQ ID NO: 624802 - DNA, 55 bp, Artificial; identical to SEQ ID NO: 217883
  Synthetic oligonucleotide

SEQ ID NO: 624803 - DNA, 55 bp, Artificial; identical to SEQ ID NO: 153340
  Synthetic oligonucleotide

SEQ ID NO: 624804 - DNA, 57 bp, Artificial; identical to SEQ ID NO: 239481
  Synthetic oligonucleotide

SEQ ID NO: 624805 - DNA, 55 bp, Artificial; identical to SEQ ID NO: 221194
  Synthetic oligonucleotide

SEQ ID NO: 624806 - DNA, 54 bp, Artificial; identical to SEQ ID NO: 194050
  Synthetic oligonucleotide

SEQ ID NO: 624807 - DNA, 55 bp, Artificial; identical to SEQ ID NO: 183336
  Synthetic oligonucleotide

SEQ ID NO: 624808 - DNA, 55 bp, Artificial; identical to SEQ ID NO: 245408
  Synthetic oligonucleotide

SEQ ID NO: 624809 - DNA, 55 bp, Artificial; identical to SEQ ID NO: 257850
  Synthetic oligonucleotide

SEQ ID NO: 624810 - DNA, 55 bp, Artificial; identical to SEQ ID NO: 192004
  Synthetic oligonucleotide

SEQ ID NO: 624811 - DNA, 55 bp, Artificial; identical to SEQ ID NO: 199254
  Synthetic oligonucleotide

SEQ ID NO: 624812 - DNA, 56 bp, Artificial; identical to SEQ ID NO: 243230
  Synthetic oligonucleotide

SEQ ID NO: 624813 - DNA, 54 bp, Artificial; identical to SEQ ID NO: 253261
  Synthetic oligonucleotide

SEQ ID NO: 624814 - DNA, 55 bp, Artificial; identical to SEQ ID NO: 142572
  Synthetic oligonucleotide

SEQ ID NO: 624815 - DNA, 55 bp, Artificial; identical to SEQ ID NO: 245411
  Synthetic oligonucleotide

SEQ ID NO: 624816 - DNA, 53 bp, Artificial; identical to SEQ ID NO: 199252
  Synthetic oligonucleotide

SEQ ID NO: 624817 - DNA, 60 bp, Artificial; identical to SEQ ID NO: 257975
  Synthetic oligonucleotide

SEQ ID NO: 624818 - DNA, 58 bp, Artificial; identical to SEQ ID NO: 152990
  Synthetic oligonucleotide

SEQ ID NO: 624819 - DNA, 55 bp, Artificial; identical to SEQ ID NO: 249120
  Synthetic oligonucleotide

SEQ ID NO: 624820 - DNA, 59 bp, Artificial; identical to SEQ ID NO: 239200
  Synthetic oligonucleotide

SEQ ID NO: 624821 - DNA, 55 bp, Artificial; identical to SEQ ID NO: 155159
  Synthetic oligonucleotide

SEQ ID NO: 624822 - DNA, 54 bp, Artificial; identical to SEQ ID NO: 160201
  Synthetic oligonucleotide

SEQ ID NO: 624823 - DNA, 60 bp, Artificial; identical to SEQ ID NO: 147005
  Synthetic oligonucleotide

SEQ ID NO: 624824 - DNA, 55 bp, Artificial; identical to SEQ ID NO: 217884
  Synthetic oligonucleotide

SEQ ID NO: 624825 - DNA, 55 bp, Artificial; identical to SEQ ID NO: 207574
  Synthetic oligonucleotide

SEQ ID NO: 624826 - DNA, 51 bp, Artificial; identical to SEQ ID NO: 236500
  Synthetic oligonucleotide

SEQ ID NO: 624827 - DNA, 57 bp, Artificial; identical to SEQ ID NO: 266093
  Synthetic oligonucleotide

SEQ ID NO: 624828 - DNA, 52 bp, Artificial; identical to SEQ ID NO: 167348
  Synthetic oligonucleotide

SEQ ID NO: 624829 - DNA, 55 bp, Artificial; identical to SEQ ID NO: 160200
  Synthetic oligonucleotide

SEQ ID NO: 624830 - DNA, 52 bp, Artificial; identical to SEQ ID NO: 245412
  Synthetic oligonucleotide

SEQ ID NO: 624831 - DNA, 55 bp, Artificial; identical to SEQ ID NO: 174530
  Synthetic oligonucleotide

SEQ ID NO: 624832 - DNA, 51 bp, Artificial; identical to SEQ ID NO: 193848
  Synthetic oligonucleotide

SEQ ID NO: 624833 - DNA, 53 bp, Artificial; identical to SEQ ID NO: 240806
  Synthetic oligonucleotide

SEQ ID NO: 624834 - DNA, 54 bp, Artificial; identical to SEQ ID NO: 209590
  Synthetic oligonucleotide

SEQ ID NO: 624835 - DNA, 60 bp, Artificial; identical to SEQ ID NO: 208762
  Synthetic oligonucleotide

SEQ ID NO: 624836 - DNA, 51 bp, Artificial; identical to SEQ ID NO: 216808
  Synthetic oligonucleotide

SEQ ID NO: 624837 - DNA, 54 bp, Artificial; identical to SEQ ID NO: 245414
  Synthetic oligonucleotide

SEQ ID NO: 624838 - DNA, 54 bp, Artificial; identical to SEQ ID NO: 156668
  Synthetic oligonucleotide

SEQ ID NO: 624839 - DNA, 52 bp, Artificial; identical to SEQ ID NO: 240870
  Synthetic oligonucleotide

SEQ ID NO: 624840 - DNA, 55 bp, Artificial; identical to SEQ ID NO: 144441
  Synthetic oligonucleotide

SEQ ID NO: 624841 - DNA, 52 bp, Artificial; identical to SEQ ID NO: 211604
  Synthetic oligonucleotide

SEQ ID NO: 624842 - DNA, 55 bp, Artificial; identical to SEQ ID NO: 265700
  Synthetic oligonucleotide

SEQ ID NO: 624843 - DNA, 60 bp, Artificial; identical to SEQ ID NO: 224218
  Synthetic oligonucleotide

SEQ ID NO: 624844 - DNA, 54 bp, Artificial; identical to SEQ ID NO: 203514
  Synthetic oligonucleotide

SEQ ID NO: 624845 - DNA, 55 bp, Artificial; identical to SEQ ID NO: 156667
  Synthetic oligonucleotide

SEQ ID NO: 624846 - DNA, 55 bp, Artificial; identical to SEQ ID NO: 190515
  Synthetic oligonucleotide

SEQ ID NO: 624847 - DNA, 55 bp, Artificial; identical to SEQ ID NO: 233562
  Synthetic oligonucleotide

SEQ ID NO: 624848 - DNA, 59 bp, Artificial; identical to SEQ ID NO: 239448
  Synthetic oligonucleotide

SEQ ID NO: 624849 - DNA, 50 bp, Artificial; identical to SEQ ID NO: 200414
  Synthetic oligonucleotide

SEQ ID NO: 624850 - DNA, 55 bp, Artificial; identical to SEQ ID NO: 169909
  Synthetic oligonucleotide

SEQ ID NO: 624851 - DNA, 55 bp, Artificial; identical to SEQ ID NO: 253141
  Synthetic oligonucleotide

SEQ ID NO: 624852 - DNA, 55 bp, Artificial; identical to SEQ ID NO: 212799
  Synthetic oligonucleotide

SEQ ID NO: 624853 - DNA, 54 bp, Artificial; identical to SEQ ID NO: 185203
  Synthetic oligonucleotide

SEQ ID NO: 624854 - DNA, 55 bp, Artificial; identical to SEQ ID NO: 148554
  Synthetic oligonucleotide

SEQ ID NO: 624855 - DNA, 60 bp, Artificial; identical to SEQ ID NO: 203503
  Synthetic oligonucleotide

SEQ ID NO: 624856 - DNA, 55 bp, Artificial; identical to SEQ ID NO: 242851
  Synthetic oligonucleotide

SEQ ID NO: 624857 - DNA, 55 bp, Artificial; identical to SEQ ID NO: 194701
  Synthetic oligonucleotide

SEQ ID NO: 624858 - DNA, 57 bp, Artificial; identical to SEQ ID NO: 142429
  Synthetic oligonucleotide

SEQ ID NO: 624859 - DNA, 53 bp, Artificial; identical to SEQ ID NO: 190154
  Synthetic oligonucleotide

SEQ ID NO: 624860 - DNA, 55 bp, Artificial; identical to SEQ ID NO: 222662
  Synthetic oligonucleotide

SEQ ID NO: 624861 - DNA, 52 bp, Artificial; identical to SEQ ID NO: 201376
  Synthetic oligonucleotide

SEQ ID NO: 624862 - DNA, 55 bp, Artificial; identical to SEQ ID NO: 238055
  Synthetic oligonucleotide

SEQ ID NO: 624863 - DNA, 51 bp, Artificial; identical to SEQ ID NO: 209350
  Synthetic oligonucleotide

SEQ ID NO: 624864 - DNA, 55 bp, Artificial; identical to SEQ ID NO: 223427
  Synthetic oligonucleotide

SEQ ID NO: 624865 - DNA, 53 bp, Artificial; identical to SEQ ID NO: 257146
  Synthetic oligonucleotide

SEQ ID NO: 624866 - DNA, 55 bp, Artificial; identical to SEQ ID NO: 212798
  Synthetic oligonucleotide

SEQ ID NO: 624867 - DNA, 60 bp, Artificial; identical to SEQ ID NO: 194084
  Synthetic oligonucleotide

SEQ ID NO: 624868 - DNA, 56 bp, Artificial; identical to SEQ ID NO: 244432
  Synthetic oligonucleotide

SEQ ID NO: 624869 - DNA, 54 bp, Artificial; identical to SEQ ID NO: 233561
  Synthetic oligonucleotide

SEQ ID NO: 624870 - DNA, 55 bp, Artificial; identical to SEQ ID NO: 194702
  Synthetic oligonucleotide

SEQ ID NO: 624871 - DNA, 50 bp, Artificial; identical to SEQ ID NO: 150033
  Synthetic oligonucleotide

SEQ ID NO: 624872 - DNA, 55 bp, Artificial; identical to SEQ ID NO: 190517
  Synthetic oligonucleotide

SEQ ID NO: 624873 - DNA, 50 bp, Artificial; identical to SEQ ID NO: 176407
  Synthetic oligonucleotide

SEQ ID NO: 624874 - DNA, 56 bp, Artificial; identical to SEQ ID NO: 242663
  Synthetic oligonucleotide

SEQ ID NO: 624875 - DNA, 55 bp, Artificial; identical to SEQ ID NO: 245485
  Synthetic oligonucleotide

SEQ ID NO: 624876 - DNA, 55 bp, Artificial; identical to SEQ ID NO: 199249
  Synthetic oligonucleotide

SEQ ID NO: 624877 - DNA, 55 bp, Artificial; identical to SEQ ID NO: 142441
  Synthetic oligonucleotide

SEQ ID NO: 624878 - DNA, 58 bp, Artificial; identical to SEQ ID NO: 170799
  Synthetic oligonucleotide

SEQ ID NO: 624879 - DNA, 55 bp, Artificial; identical to SEQ ID NO: 183321
  Synthetic oligonucleotide

SEQ ID NO: 624880 - DNA, 55 bp, Artificial; identical to SEQ ID NO: 197072
  Synthetic oligonucleotide

SEQ ID NO: 624881 - DNA, 55 bp, Artificial; identical to SEQ ID NO: 254725
  Synthetic oligonucleotide

SEQ ID NO: 624882 - DNA, 54 bp, Artificial; identical to SEQ ID NO: 160404
  Synthetic oligonucleotide

SEQ ID NO: 624883 - DNA, 54 bp, Artificial; identical to SEQ ID NO: 188024
  Synthetic oligonucleotide

SEQ ID NO: 624884 - DNA, 55 bp, Artificial; identical to SEQ ID NO: 194705
  Synthetic oligonucleotide

SEQ ID NO: 624885 - DNA, 55 bp, Artificial; identical to SEQ ID NO: 151934
  Synthetic oligonucleotide

SEQ ID NO: 624886 - DNA, 52 bp, Artificial; identical to SEQ ID NO: 191211
  Synthetic oligonucleotide

SEQ ID NO: 624887 - DNA, 57 bp, Artificial; identical to SEQ ID NO: 239415
  Synthetic oligonucleotide

SEQ ID NO: 624888 - DNA, 50 bp, Artificial; identical to SEQ ID NO: 207955
  Synthetic oligonucleotide

SEQ ID NO: 624889 - DNA, 55 bp, Artificial; identical to SEQ ID NO: 148547
  Synthetic oligonucleotide

SEQ ID NO: 624890 - DNA, 55 bp, Artificial; identical to SEQ ID NO: 197073
  Synthetic oligonucleotide

SEQ ID NO: 624891 - DNA, 55 bp, Artificial; identical to SEQ ID NO: 220753
  Synthetic oligonucleotide

SEQ ID NO: 624892 - DNA, 55 bp, Artificial; identical to SEQ ID NO: 161140
  Synthetic oligonucleotide

SEQ ID NO: 624893 - DNA, 55 bp, Artificial; identical to SEQ ID NO: 222874
  Synthetic oligonucleotide

SEQ ID NO: 624894 - DNA, 55 bp, Artificial; identical to SEQ ID NO: 217885
  Synthetic oligonucleotide

SEQ ID NO: 624895 - DNA, 55 bp, Artificial; identical to SEQ ID NO: 242854
  Synthetic oligonucleotide

SEQ ID NO: 624896 - DNA, 54 bp, Artificial; identical to SEQ ID NO: 240565
  Synthetic oligonucleotide

SEQ ID NO: 624897 - DNA, 55 bp, Artificial; identical to SEQ ID NO: 155488
  Synthetic oligonucleotide

SEQ ID NO: 624898 - DNA, 55 bp, Artificial; identical to SEQ ID NO: 202390
  Synthetic oligonucleotide

SEQ ID NO: 624899 - DNA, 52 bp, Artificial; identical to SEQ ID NO: 149574
  Synthetic oligonucleotide

SEQ ID NO: 624900 - DNA, 52 bp, Artificial; identical to SEQ ID NO: 240846
  Synthetic oligonucleotide

SEQ ID NO: 624901 - DNA, 55 bp, Artificial; identical to SEQ ID NO: 187710
  Synthetic oligonucleotide

SEQ ID NO: 624902 - DNA, 55 bp, Artificial; identical to SEQ ID NO: 202389
  Synthetic oligonucleotide

SEQ ID NO: 624903 - DNA, 56 bp, Artificial; identical to SEQ ID NO: 150677
  Synthetic oligonucleotide

SEQ ID NO: 624904 - DNA, 57 bp, Artificial; identical to SEQ ID NO: 239381
  Synthetic oligonucleotide

SEQ ID NO: 624905 - DNA, 55 bp, Artificial; identical to SEQ ID NO: 188349
  Synthetic oligonucleotide

SEQ ID NO: 624906 - DNA, 57 bp, Artificial; identical to SEQ ID NO: 257964
  Synthetic oligonucleotide

SEQ ID NO: 624907 - DNA, 60 bp, Artificial; identical to SEQ ID NO: 239370
  Synthetic oligonucleotide

SEQ ID NO: 624908 - DNA, 55 bp, Artificial; identical to SEQ ID NO: 164336
  Synthetic oligonucleotide

SEQ ID NO: 624909 - DNA, 57 bp, Artificial; identical to SEQ ID NO: 239359
  Synthetic oligonucleotide

SEQ ID NO: 624910 - DNA, 58 bp, Artificial; identical to SEQ ID NO: 237281
  Synthetic oligonucleotide

SEQ ID NO: 624911 - DNA, 53 bp, Artificial; identical to SEQ ID NO: 246379
  Synthetic oligonucleotide

SEQ ID NO: 624912 - DNA, 55 bp, Artificial; identical to SEQ ID NO: 183117
  Synthetic oligonucleotide

SEQ ID NO: 624913 - DNA, 50 bp, Artificial; identical to SEQ ID NO: 165552
  Synthetic oligonucleotide

SEQ ID NO: 624914 - DNA, 53 bp, Artificial; identical to SEQ ID NO: 153596
  Synthetic oligonucleotide

SEQ ID NO: 624915 - DNA, 56 bp, Artificial; identical to SEQ ID NO: 242675
  Synthetic oligonucleotide

SEQ ID NO: 624916 - DNA, 55 bp, Artificial; identical to SEQ ID NO: 253833
  Synthetic oligonucleotide

SEQ ID NO: 624917 - DNA, 55 bp, Artificial; identical to SEQ ID NO: 164335
  Synthetic oligonucleotide

SEQ ID NO: 624918 - DNA, 56 bp, Artificial; identical to SEQ ID NO: 194259
  Synthetic oligonucleotide

SEQ ID NO: 624919 - DNA, 55 bp, Artificial; identical to SEQ ID NO: 160342
  Synthetic oligonucleotide

SEQ ID NO: 624920 - DNA, 54 bp, Artificial; identical to SEQ ID NO: 157262
  Synthetic oligonucleotide

SEQ ID NO: 624921 - DNA, 55 bp, Artificial; identical to SEQ ID NO: 174527
  Synthetic oligonucleotide

SEQ ID NO: 624922 - DNA, 57 bp, Artificial; identical to SEQ ID NO: 201974
  Synthetic oligonucleotide

SEQ ID NO: 624923 - DNA, 55 bp, Artificial; identical to SEQ ID NO: 174526
  Synthetic oligonucleotide

SEQ ID NO: 624924 - DNA, 55 bp, Artificial; identical to SEQ ID NO: 208220
  Synthetic oligonucleotide

SEQ ID NO: 624925 - DNA, 55 bp, Artificial; identical to SEQ ID NO: 203817
  Synthetic oligonucleotide

SEQ ID NO: 624926 - DNA, 55 bp, Artificial; identical to SEQ ID NO: 167480
  Synthetic oligonucleotide

SEQ ID NO: 624927 - DNA, 55 bp, Artificial; identical to SEQ ID NO: 187711
  Synthetic oligonucleotide

SEQ ID NO: 624928 - DNA, 55 bp, Artificial; identical to SEQ ID NO: 144266
  Synthetic oligonucleotide

SEQ ID NO: 624929 - DNA, 55 bp, Artificial; identical to SEQ ID NO: 199245
  Synthetic oligonucleotide

SEQ ID NO: 624930 - DNA, 55 bp, Artificial; identical to SEQ ID NO: 183124
  Synthetic oligonucleotide

SEQ ID NO: 624931 - DNA, 56 bp, Artificial; identical to SEQ ID NO: 152989
  Synthetic oligonucleotide

SEQ ID NO: 624932 - DNA, 53 bp, Artificial; identical to SEQ ID NO: 240816
  Synthetic oligonucleotide

SEQ ID NO: 624933 - DNA, 55 bp, Artificial; identical to SEQ ID NO: 245462
  Synthetic oligonucleotide

SEQ ID NO: 624934 - DNA, 53 bp, Artificial; identical to SEQ ID NO: 157360
  Synthetic oligonucleotide

SEQ ID NO: 624935 - DNA, 60 bp, Artificial; identical to SEQ ID NO: 208773
  Synthetic oligonucleotide

SEQ ID NO: 624936 - DNA, 60 bp, Artificial; identical to SEQ ID NO: 188016
  Synthetic oligonucleotide

SEQ ID NO: 624937 - DNA, 55 bp, Artificial; identical to SEQ ID NO: 153525
  Synthetic oligonucleotide

SEQ ID NO: 624938 - DNA, 55 bp, Artificial; identical to SEQ ID NO: 254721
  Synthetic oligonucleotide

SEQ ID NO: 624939 - DNA, 55 bp, Artificial; identical to SEQ ID NO: 156658
  Synthetic oligonucleotide

SEQ ID NO: 624940 - DNA, 53 bp, Artificial; identical to SEQ ID NO: 199742
  Synthetic oligonucleotide

SEQ ID NO: 624941 - DNA, 55 bp, Artificial; identical to SEQ ID NO: 144499
  Synthetic oligonucleotide

SEQ ID NO: 624942 - DNA, 55 bp, Artificial; identical to SEQ ID NO: 253139
  Synthetic oligonucleotide

SEQ ID NO: 624943 - DNA, 55 bp, Artificial; identical to SEQ ID NO: 164331
  Synthetic oligonucleotide

SEQ ID NO: 624944 - DNA, 59 bp, Artificial; identical to SEQ ID NO: 224163
  Synthetic oligonucleotide

SEQ ID NO: 624945 - DNA, 55 bp, Artificial; identical to SEQ ID NO: 148595
  Synthetic oligonucleotide

SEQ ID NO: 624946 - DNA, 55 bp, Artificial; identical to SEQ ID NO: 183141
  Synthetic oligonucleotide

SEQ ID NO: 624947 - DNA, 55 bp, Artificial; identical to SEQ ID NO: 245474
  Synthetic oligonucleotide

SEQ ID NO: 624948 - DNA, 55 bp, Artificial; identical to SEQ ID NO: 220731
  Synthetic oligonucleotide

SEQ ID NO: 624949 - DNA, 55 bp, Artificial; identical to SEQ ID NO: 205237
  Synthetic oligonucleotide

SEQ ID NO: 624950 - DNA, 55 bp, Artificial; identical to SEQ ID NO: 191033
  Synthetic oligonucleotide

SEQ ID NO: 624951 - DNA, 55 bp, Artificial; identical to SEQ ID NO: 209504
  Synthetic oligonucleotide

SEQ ID NO: 624952 - DNA, 50 bp, Artificial; identical to SEQ ID NO: 243421
  Synthetic oligonucleotide

SEQ ID NO: 624953 - DNA, 55 bp, Artificial; identical to SEQ ID NO: 222861
  Synthetic oligonucleotide

SEQ ID NO: 624954 - DNA, 56 bp, Artificial; identical to SEQ ID NO: 239498
  Synthetic oligonucleotide

SEQ ID NO: 624955 - DNA, 51 bp, Artificial; identical to SEQ ID NO: 209733
  Synthetic oligonucleotide

SEQ ID NO: 624956 - DNA, 50 bp, Artificial; identical to SEQ ID NO: 176200
  Synthetic oligonucleotide

SEQ ID NO: 624957 - DNA, 55 bp, Artificial; identical to SEQ ID NO: 164329
  Synthetic oligonucleotide

SEQ ID NO: 624958 - DNA, 55 bp, Artificial; identical to SEQ ID NO: 265957
  Synthetic oligonucleotide

SEQ ID NO: 624959 - DNA, 55 bp, Artificial; identical to SEQ ID NO: 168346
  Synthetic oligonucleotide

SEQ ID NO: 624960 - DNA, 55 bp, Artificial; identical to SEQ ID NO: 196166
  Synthetic oligonucleotide

SEQ ID NO: 624961 - DNA, 55 bp, Artificial; identical to SEQ ID NO: 240301
  Synthetic oligonucleotide

SEQ ID NO: 624962 - DNA, 52 bp, Artificial; identical to SEQ ID NO: 240303
  Synthetic oligonucleotide

SEQ ID NO: 624963 - DNA, 55 bp, Artificial; identical to SEQ ID NO: 254716
  Synthetic oligonucleotide

SEQ ID NO: 624964 - DNA, 55 bp, Artificial; identical to SEQ ID NO: 161139
  Synthetic oligonucleotide

SEQ ID NO: 624965 - DNA, 55 bp, Artificial; identical to SEQ ID NO: 245471
  Synthetic oligonucleotide

SEQ ID NO: 624966 - DNA, 55 bp, Artificial; identical to SEQ ID NO: 254715
  Synthetic oligonucleotide

SEQ ID NO: 624967 - DNA, 52 bp, Artificial; identical to SEQ ID NO: 183214
  Synthetic oligonucleotide

SEQ ID NO: 624968 - DNA, 55 bp, Artificial; identical to SEQ ID NO: 240285
  Synthetic oligonucleotide

SEQ ID NO: 624969 - DNA, 55 bp, Artificial; identical to SEQ ID NO: 152985
  Synthetic oligonucleotide

SEQ ID NO: 624970 - DNA, 55 bp, Artificial; identical to SEQ ID NO: 156692
  Synthetic oligonucleotide

SEQ ID NO: 624971 - DNA, 55 bp, Artificial; identical to SEQ ID NO: 168347
  Synthetic oligonucleotide

SEQ ID NO: 624972 - DNA, 55 bp, Artificial; identical to SEQ ID NO: 240280
  Synthetic oligonucleotide

SEQ ID NO: 624973 - DNA, 57 bp, Artificial; identical to SEQ ID NO: 237292
  Synthetic oligonucleotide

SEQ ID NO: 624974 - DNA, 54 bp, Artificial; identical to SEQ ID NO: 242856
  Synthetic oligonucleotide

SEQ ID NO: 624975 - DNA, 55 bp, Artificial; identical to SEQ ID NO: 207532
  Synthetic oligonucleotide

SEQ ID NO: 624976 - DNA, 55 bp, Artificial; identical to SEQ ID NO: 177233
  Synthetic oligonucleotide

SEQ ID NO: 624977 - DNA, 55 bp, Artificial; identical to SEQ ID NO: 169913
  Synthetic oligonucleotide

SEQ ID NO: 624978 - DNA, 55 bp, Artificial; identical to SEQ ID NO: 197075
  Synthetic oligonucleotide

SEQ ID NO: 624979 - DNA, 55 bp, Artificial; identical to SEQ ID NO: 240275
  Synthetic oligonucleotide

SEQ ID NO: 624980 - DNA, 53 bp, Artificial; identical to SEQ ID NO: 243169
  Synthetic oligonucleotide

SEQ ID NO: 624981 - DNA, 53 bp, Artificial; identical to SEQ ID NO: 247864
  Synthetic oligonucleotide

SEQ ID NO: 624982 - DNA, 60 bp, Artificial; identical to SEQ ID NO: 213180
  Synthetic oligonucleotide

SEQ ID NO: 624983 - DNA, 54 bp, Artificial; identical to SEQ ID NO: 160337
  Synthetic oligonucleotide

SEQ ID NO: 624984 - DNA, 55 bp, Artificial; identical to SEQ ID NO: 150672
  Synthetic oligonucleotide

SEQ ID NO: 624985 - DNA, 55 bp, Artificial; identical to SEQ ID NO: 151938
  Synthetic oligonucleotide

SEQ ID NO: 624986 - DNA, 55 bp, Artificial; identical to SEQ ID NO: 148583
  Synthetic oligonucleotide

SEQ ID NO: 624987 - DNA, 53 bp, Artificial; identical to SEQ ID NO: 148580
  Synthetic oligonucleotide

SEQ ID NO: 624988 - DNA, 55 bp, Artificial; identical to SEQ ID NO: 169915
  Synthetic oligonucleotide

SEQ ID NO: 624989 - DNA, 55 bp, Artificial; identical to SEQ ID NO: 152414
  Synthetic oligonucleotide

SEQ ID NO: 624990 - DNA, 52 bp, Artificial; identical to SEQ ID NO: 164991
  Synthetic oligonucleotide

SEQ ID NO: 624991 - DNA, 54 bp, Artificial; identical to SEQ ID NO: 169993
  Synthetic oligonucleotide

SEQ ID NO: 624992 - DNA, 55 bp, Artificial; identical to SEQ ID NO: 233560
  Synthetic oligonucleotide

SEQ ID NO: 624993 - DNA, 58 bp, Artificial; identical to SEQ ID NO: 150670
  Synthetic oligonucleotide

SEQ ID NO: 624994 - DNA, 55 bp, Artificial; identical to SEQ ID NO: 188347
  Synthetic oligonucleotide

SEQ ID NO: 624995 - DNA, 51 bp, Artificial; identical to SEQ ID NO: 255682
  Synthetic oligonucleotide

SEQ ID NO: 624996 - DNA, 55 bp, Artificial; identical to SEQ ID NO: 249084
  Synthetic oligonucleotide

SEQ ID NO: 624997 - DNA, 55 bp, Artificial; identical to SEQ ID NO: 154208
  Synthetic oligonucleotide

SEQ ID NO: 624998 - DNA, 55 bp, Artificial; identical to SEQ ID NO: 223434
  Synthetic oligonucleotide

SEQ ID NO: 624999 - DNA, 52 bp, Artificial; identical to SEQ ID NO: 161890
  Synthetic oligonucleotide

SEQ ID NO: 625000 - DNA, 55 bp, Artificial; identical to SEQ ID NO: 154207
  Synthetic oligonucleotide

SEQ ID NO: 625001 - DNA, 55 bp, Artificial; identical to SEQ ID NO: 183180
  Synthetic oligonucleotide

SEQ ID NO: 625002 - DNA, 55 bp, Artificial; identical to SEQ ID NO: 164326
  Synthetic oligonucleotide

SEQ ID NO: 625003 - DNA, 60 bp, Artificial; identical to SEQ ID NO: 257953
  Synthetic oligonucleotide

SEQ ID NO: 625004 - DNA, 55 bp, Artificial; identical to SEQ ID NO: 171666
  Synthetic oligonucleotide

SEQ ID NO: 625005 - DNA, 55 bp, Artificial; identical to SEQ ID NO: 184687
  Synthetic oligonucleotide

SEQ ID NO: 625006 - DNA, 55 bp, Artificial; identical to SEQ ID NO: 222686
  Synthetic oligonucleotide

SEQ ID NO: 625007 - DNA, 51 bp, Artificial; identical to SEQ ID NO: 153681
  Synthetic oligonucleotide

SEQ ID NO: 625008 - DNA, 55 bp, Artificial; identical to SEQ ID NO: 184689
  Synthetic oligonucleotide

SEQ ID NO: 625009 - DNA, 55 bp, Artificial; identical to SEQ ID NO: 245469
  Synthetic oligonucleotide

SEQ ID NO: 625010 - DNA, 55 bp, Artificial; identical to SEQ ID NO: 169866
  Synthetic oligonucleotide

SEQ ID NO: 625011 - DNA, 52 bp, Artificial; identical to SEQ ID NO: 201688
  Synthetic oligonucleotide

SEQ ID NO: 625012 - DNA, 54 bp, Artificial; identical to SEQ ID NO: 257844
  Synthetic oligonucleotide

SEQ ID NO: 625013 - DNA, 51 bp, Artificial; identical to SEQ ID NO: 157813
  Synthetic oligonucleotide

SEQ ID NO: 625014 - DNA, 53 bp, Artificial; identical to SEQ ID NO: 185568
  Synthetic oligonucleotide

SEQ ID NO: 625015 - DNA, 55 bp, Artificial; identical to SEQ ID NO: 156686
  Synthetic oligonucleotide

SEQ ID NO: 625016 - DNA, 54 bp, Artificial; identical to SEQ ID NO: 197441
  Synthetic oligonucleotide

SEQ ID NO: 625017 - DNA, 53 bp, Artificial; identical to SEQ ID NO: 141232
  Synthetic oligonucleotide

SEQ ID NO: 625018 - DNA, 55 bp, Artificial; identical to SEQ ID NO: 199240
  Synthetic oligonucleotide

SEQ ID NO: 625019 - DNA, 53 bp, Artificial; identical to SEQ ID NO: 185558
  Synthetic oligonucleotide

SEQ ID NO: 625020 - DNA, 52 bp, Artificial; identical to SEQ ID NO: 184738
  Synthetic oligonucleotide

SEQ ID NO: 625021 - DNA, 55 bp, Artificial; identical to SEQ ID NO: 184752
  Synthetic oligonucleotide

SEQ ID NO: 625022 - DNA, 55 bp, Artificial; identical to SEQ ID NO: 217888
  Synthetic oligonucleotide

SEQ ID NO: 625023 - DNA, 54 bp, Artificial; identical to SEQ ID NO: 188005
  Synthetic oligonucleotide

SEQ ID NO: 625024 - DNA, 56 bp, Artificial; identical to SEQ ID NO: 239893
  Synthetic oligonucleotide

SEQ ID NO: 625025 - DNA, 55 bp, Artificial; identical to SEQ ID NO: 156685
  Synthetic oligonucleotide

SEQ ID NO: 625026 - DNA, 56 bp, Artificial; identical to SEQ ID NO: 207666
  Synthetic oligonucleotide

SEQ ID NO: 625027 - DNA, 60 bp, Artificial; identical to SEQ ID NO: 170801
  Synthetic oligonucleotide

SEQ ID NO: 625028 - DNA, 57 bp, Artificial; identical to SEQ ID NO: 177193
  Synthetic oligonucleotide

SEQ ID NO: 625029 - DNA, 55 bp, Artificial; identical to SEQ ID NO: 151940
  Synthetic oligonucleotide

SEQ ID NO: 625030 - DNA, 55 bp, Artificial; identical to SEQ ID NO: 184758
  Synthetic oligonucleotide

SEQ ID NO: 625031 - DNA, 51 bp, Artificial; identical to SEQ ID NO: 241119
  Synthetic oligonucleotide

SEQ ID NO: 625032 - DNA, 55 bp, Artificial; identical to SEQ ID NO: 208101
  Synthetic oligonucleotide

SEQ ID NO: 625033 - DNA, 55 bp, Artificial; identical to SEQ ID NO: 164325
  Synthetic oligonucleotide

SEQ ID NO: 625034 - DNA, 55 bp, Artificial; identical to SEQ ID NO: 172770
  Synthetic oligonucleotide

SEQ ID NO: 625035 - DNA, 58 bp, Artificial; identical to SEQ ID NO: 150669
  Synthetic oligonucleotide

SEQ ID NO: 625036 - DNA, 53 bp, Artificial; identical to SEQ ID NO: 201996
  Synthetic oligonucleotide

SEQ ID NO: 625037 - DNA, 52 bp, Artificial; identical to SEQ ID NO: 192122
  Synthetic oligonucleotide

SEQ ID NO: 625038 - DNA, 55 bp, Artificial; identical to SEQ ID NO: 254659
  Synthetic oligonucleotide

SEQ ID NO: 625039 - DNA, 55 bp, Artificial; identical to SEQ ID NO: 164324
  Synthetic oligonucleotide

SEQ ID NO: 625040 - DNA, 55 bp, Artificial; identical to SEQ ID NO: 211272
  Synthetic oligonucleotide

SEQ ID NO: 625041 - DNA, 53 bp, Artificial; identical to SEQ ID NO: 166134
  Synthetic oligonucleotide

SEQ ID NO: 625042 - DNA, 55 bp, Artificial; identical to SEQ ID NO: 197079
  Synthetic oligonucleotide

SEQ ID NO: 625043 - DNA, 51 bp, Artificial; identical to SEQ ID NO: 221817
  Synthetic oligonucleotide

SEQ ID NO: 625044 - DNA, 55 bp, Artificial; identical to SEQ ID NO: 194672
  Synthetic oligonucleotide

SEQ ID NO: 625045 - DNA, 55 bp, Artificial; identical to SEQ ID NO: 191977
  Synthetic oligonucleotide

SEQ ID NO: 625046 - DNA, 55 bp, Artificial; identical to SEQ ID NO: 184547
  Synthetic oligonucleotide

SEQ ID NO: 625047 - DNA, 55 bp, Artificial; identical to SEQ ID NO: 166971
  Synthetic oligonucleotide

SEQ ID NO: 625048 - DNA, 54 bp, Artificial; identical to SEQ ID NO: 188450
  Synthetic oligonucleotide

SEQ ID NO: 625049 - DNA, 55 bp, Artificial; identical to SEQ ID NO: 254657
  Synthetic oligonucleotide

SEQ ID NO: 625050 - DNA, 58 bp, Artificial; identical to SEQ ID NO: 167780
  Synthetic oligonucleotide

SEQ ID NO: 625051 - DNA, 55 bp, Artificial; identical to SEQ ID NO: 150665
  Synthetic oligonucleotide

SEQ ID NO: 625052 - DNA, 55 bp, Artificial; identical to SEQ ID NO: 202388
  Synthetic oligonucleotide

SEQ ID NO: 625053 - DNA, 55 bp, Artificial; identical to SEQ ID NO: 144114
  Synthetic oligonucleotide

SEQ ID NO: 625054 - DNA, 55 bp, Artificial; identical to SEQ ID NO: 148575
  Synthetic oligonucleotide

SEQ ID NO: 625055 - DNA, 51 bp, Artificial; identical to SEQ ID NO: 186423
  Synthetic oligonucleotide

SEQ ID NO: 625056 - DNA, 55 bp, Artificial; identical to SEQ ID NO: 263308
  Synthetic oligonucleotide

SEQ ID NO: 625057 - DNA, 54 bp, Artificial; identical to SEQ ID NO: 240582
  Synthetic oligonucleotide

SEQ ID NO: 625058 - DNA, 53 bp, Artificial; identical to SEQ ID NO: 199236
  Synthetic oligonucleotide

SEQ ID NO: 625059 - DNA, 60 bp, Artificial; identical to SEQ ID NO: 221156
  Synthetic oligonucleotide

SEQ ID NO: 625060 - DNA, 59 bp, Artificial; identical to SEQ ID NO: 239217
  Synthetic oligonucleotide

SEQ ID NO: 625061 - DNA, 55 bp, Artificial; identical to SEQ ID NO: 162162
  Synthetic oligonucleotide

SEQ ID NO: 625062 - DNA, 51 bp, Artificial; identical to SEQ ID NO: 200096
  Synthetic oligonucleotide

SEQ ID NO: 625063 - DNA, 55 bp, Artificial; identical to SEQ ID NO: 184507
  Synthetic oligonucleotide

SEQ ID NO: 625064 - DNA, 55 bp, Artificial; identical to SEQ ID NO: 164322
  Synthetic oligonucleotide

SEQ ID NO: 625065 - DNA, 55 bp, Artificial; identical to SEQ ID NO: 184520
  Synthetic oligonucleotide

SEQ ID NO: 625066 - DNA, 55 bp, Artificial; identical to SEQ ID NO: 199175
  Synthetic oligonucleotide

SEQ ID NO: 625067 - DNA, 53 bp, Artificial; identical to SEQ ID NO: 207536
  Synthetic oligonucleotide

SEQ ID NO: 625068 - DNA, 55 bp, Artificial; identical to SEQ ID NO: 157114
  Synthetic oligonucleotide

SEQ ID NO: 625069 - DNA, 50 bp, Artificial; identical to SEQ ID NO: 165361
  Synthetic oligonucleotide

SEQ ID NO: 625070 - DNA, 51 bp, Artificial; identical to SEQ ID NO: 237129
  Synthetic oligonucleotide

SEQ ID NO: 625071 - DNA, 59 bp, Artificial; identical to SEQ ID NO: 170802
  Synthetic oligonucleotide

SEQ ID NO: 625072 - DNA, 55 bp, Artificial; identical to SEQ ID NO: 184521
  Synthetic oligonucleotide

SEQ ID NO: 625073 - DNA, 55 bp, Artificial; identical to SEQ ID NO: 190524
  Synthetic oligonucleotide

SEQ ID NO: 625074 - DNA, 55 bp, Artificial; identical to SEQ ID NO: 202809
  Synthetic oligonucleotide

SEQ ID NO: 625075 - DNA, 57 bp, Artificial; identical to SEQ ID NO: 256493
  Synthetic oligonucleotide

SEQ ID NO: 625076 - DNA, 55 bp, Artificial; identical to SEQ ID NO: 245459
  Synthetic oligonucleotide

SEQ ID NO: 625077 - DNA, 55 bp, Artificial; identical to SEQ ID NO: 157083
  Synthetic oligonucleotide

SEQ ID NO: 625078 - DNA, 51 bp, Artificial; identical to SEQ ID NO: 157741
  Synthetic oligonucleotide

SEQ ID NO: 625079 - DNA, 55 bp, Artificial; identical to SEQ ID NO: 184601
  Synthetic oligonucleotide

SEQ ID NO: 625080 - DNA, 55 bp, Artificial; identical to SEQ ID NO: 184611
  Synthetic oligonucleotide

SEQ ID NO: 625081 - DNA, 53 bp, Artificial; identical to SEQ ID NO: 191185
  Synthetic oligonucleotide

SEQ ID NO: 625082 - DNA, 55 bp, Artificial; identical to SEQ ID NO: 199174
  Synthetic oligonucleotide

SEQ ID NO: 625083 - DNA, 55 bp, Artificial; identical to SEQ ID NO: 161138
  Synthetic oligonucleotide

SEQ ID NO: 625084 - DNA, 50 bp, Artificial; identical to SEQ ID NO: 176769
  Synthetic oligonucleotide

SEQ ID NO: 625085 - DNA, 60 bp, Artificial; identical to SEQ ID NO: 224154
  Synthetic oligonucleotide

SEQ ID NO: 625086 - DNA, 55 bp, Artificial; identical to SEQ ID NO: 168350
  Synthetic oligonucleotide

SEQ ID NO: 625087 - DNA, 55 bp, Artificial; identical to SEQ ID NO: 184629
  Synthetic oligonucleotide

SEQ ID NO: 625088 - DNA, 55 bp, Artificial; identical to SEQ ID NO: 196177
  Synthetic oligonucleotide

SEQ ID NO: 625089 - DNA, 60 bp, Artificial; identical to SEQ ID NO: 176683
  Synthetic oligonucleotide

SEQ ID NO: 625090 - DNA, 55 bp, Artificial; identical to SEQ ID NO: 240189
  Synthetic oligonucleotide

SEQ ID NO: 625091 - DNA, 53 bp, Artificial; identical to SEQ ID NO: 223604
  Synthetic oligonucleotide

SEQ ID NO: 625092 - DNA, 55 bp, Artificial; identical to SEQ ID NO: 184630
  Synthetic oligonucleotide

SEQ ID NO: 625093 - DNA, 56 bp, Artificial; identical to SEQ ID NO: 193185
  Synthetic oligonucleotide

SEQ ID NO: 625094 - DNA, 51 bp, Artificial; identical to SEQ ID NO: 186496
  Synthetic oligonucleotide

SEQ ID NO: 625095 - DNA, 60 bp, Artificial; identical to SEQ ID NO: 239782
  Synthetic oligonucleotide

SEQ ID NO: 625096 - DNA, 55 bp, Artificial; identical to SEQ ID NO: 197081
  Synthetic oligonucleotide

SEQ ID NO: 625097 - DNA, 55 bp, Artificial; identical to SEQ ID NO: 148573
  Synthetic oligonucleotide

SEQ ID NO: 625098 - DNA, 52 bp, Artificial; identical to SEQ ID NO: 223703
  Synthetic oligonucleotide

SEQ ID NO: 625099 - DNA, 55 bp, Artificial; identical to SEQ ID NO: 157097
  Synthetic oligonucleotide

SEQ ID NO: 625100 - DNA, 55 bp, Artificial; identical to SEQ ID NO: 242859
  Synthetic oligonucleotide

SEQ ID NO: 625101 - DNA, 60 bp, Artificial; identical to SEQ ID NO: 199948
  Synthetic oligonucleotide

SEQ ID NO: 625102 - DNA, 55 bp, Artificial; identical to SEQ ID NO: 234185
  Synthetic oligonucleotide

SEQ ID NO: 625103 - DNA, 55 bp, Artificial; identical to SEQ ID NO: 169867
  Synthetic oligonucleotide

SEQ ID NO: 625104 - DNA, 55 bp, Artificial; identical to SEQ ID NO: 201291
  Synthetic oligonucleotide

SEQ ID NO: 625105 - DNA, 55 bp, Artificial; identical to SEQ ID NO: 157100
  Synthetic oligonucleotide

SEQ ID NO: 625106 - DNA, 54 bp, Artificial; identical to SEQ ID NO: 216607
  Synthetic oligonucleotide

SEQ ID NO: 625107 - DNA, 55 bp, Artificial; identical to SEQ ID NO: 249088
  Synthetic oligonucleotide

SEQ ID NO: 625108 - DNA, 55 bp, Artificial; identical to SEQ ID NO: 169868
  Synthetic oligonucleotide

SEQ ID NO: 625109 - DNA, 55 bp, Artificial; identical to SEQ ID NO: 184822
  Synthetic oligonucleotide

SEQ ID NO: 625110 - DNA, 55 bp, Artificial; identical to SEQ ID NO: 194674
  Synthetic oligonucleotide

SEQ ID NO: 625111 - DNA, 51 bp, Artificial; identical to SEQ ID NO: 169060
  Synthetic oligonucleotide

SEQ ID NO: 625112 - DNA, 50 bp, Artificial; identical to SEQ ID NO: 200347
  Synthetic oligonucleotide

SEQ ID NO: 625113 - DNA, 55 bp, Artificial; identical to SEQ ID NO: 211465
  Synthetic oligonucleotide

SEQ ID NO: 625114 - DNA, 57 bp, Artificial; identical to SEQ ID NO: 239771
  Synthetic oligonucleotide

SEQ ID NO: 625115 - DNA, 55 bp, Artificial; identical to SEQ ID NO: 202386
  Synthetic oligonucleotide

SEQ ID NO: 625116 - DNA, 55 bp, Artificial; identical to SEQ ID NO: 174519
  Synthetic oligonucleotide

SEQ ID NO: 625117 - DNA, 56 bp, Artificial; identical to SEQ ID NO: 179939
  Synthetic oligonucleotide

SEQ ID NO: 625118 - DNA, 55 bp, Artificial; identical to SEQ ID NO: 184778
  Synthetic oligonucleotide

SEQ ID NO: 625119 - DNA, 57 bp, Artificial; identical to SEQ ID NO: 237958
  Synthetic oligonucleotide

SEQ ID NO: 625120 - DNA, 55 bp, Artificial; identical to SEQ ID NO: 199173
  Synthetic oligonucleotide

SEQ ID NO: 625121 - DNA, 55 bp, Artificial; identical to SEQ ID NO: 245451
  Synthetic oligonucleotide

SEQ ID NO: 625122 - DNA, 55 bp, Artificial; identical to SEQ ID NO: 211466
  Synthetic oligonucleotide

SEQ ID NO: 625123 - DNA, 55 bp, Artificial; identical to SEQ ID NO: 199172
  Synthetic oligonucleotide

SEQ ID NO: 625124 - DNA, 55 bp, Artificial; identical to SEQ ID NO: 253137
  Synthetic oligonucleotide

SEQ ID NO: 625125 - DNA, 55 bp, Artificial; identical to SEQ ID NO: 184785
  Synthetic oligonucleotide

SEQ ID NO: 625126 - DNA, 55 bp, Artificial; identical to SEQ ID NO: 208109
  Synthetic oligonucleotide

SEQ ID NO: 625127 - DNA, 54 bp, Artificial; identical to SEQ ID NO: 141180
  Synthetic oligonucleotide

SEQ ID NO: 625128 - DNA, 55 bp, Artificial; identical to SEQ ID NO: 191137
  Synthetic oligonucleotide

SEQ ID NO: 625129 - DNA, 53 bp, Artificial; identical to SEQ ID NO: 185550
  Synthetic oligonucleotide

SEQ ID NO: 625130 - DNA, 58 bp, Artificial; identical to SEQ ID NO: 190165
  Synthetic oligonucleotide

SEQ ID NO: 625131 - DNA, 55 bp, Artificial; identical to SEQ ID NO: 202927
  Synthetic oligonucleotide

SEQ ID NO: 625132 - DNA, 55 bp, Artificial; identical to SEQ ID NO: 257839
  Synthetic oligonucleotide

SEQ ID NO: 625133 - DNA, 59 bp, Artificial; identical to SEQ ID NO: 199936
  Synthetic oligonucleotide

SEQ ID NO: 625134 - DNA, 55 bp, Artificial; identical to SEQ ID NO: 184831
  Synthetic oligonucleotide

SEQ ID NO: 625135 - DNA, 52 bp, Artificial; identical to SEQ ID NO: 184839
  Synthetic oligonucleotide

SEQ ID NO: 625136 - DNA, 55 bp, Artificial; identical to SEQ ID NO: 208108
  Synthetic oligonucleotide

SEQ ID NO: 625137 - DNA, 55 bp, Artificial; identical to SEQ ID NO: 245450
  Synthetic oligonucleotide

SEQ ID NO: 625138 - DNA, 55 bp, Artificial; identical to SEQ ID NO: 184787
  Synthetic oligonucleotide

SEQ ID NO: 625139 - DNA, 55 bp, Artificial; identical to SEQ ID NO: 148512
  Synthetic oligonucleotide

SEQ ID NO: 625140 - DNA, 55 bp, Artificial; identical to SEQ ID NO: 164321
  Synthetic oligonucleotide

SEQ ID NO: 625141 - DNA, 53 bp, Artificial; identical to SEQ ID NO: 202982
  Synthetic oligonucleotide

SEQ ID NO: 625142 - DNA, 55 bp, Artificial; identical to SEQ ID NO: 142570
  Synthetic oligonucleotide

SEQ ID NO: 625143 - DNA, 56 bp, Artificial; identical to SEQ ID NO: 209243
  Synthetic oligonucleotide

SEQ ID NO: 625144 - DNA, 50 bp, Artificial; identical to SEQ ID NO: 209797
  Synthetic oligonucleotide

SEQ ID NO: 625145 - DNA, 52 bp, Artificial; identical to SEQ ID NO: 223699
  Synthetic oligonucleotide

SEQ ID NO: 625146 - DNA, 55 bp, Artificial; identical to SEQ ID NO: 190526
  Synthetic oligonucleotide

SEQ ID NO: 625147 - DNA, 55 bp, Artificial; identical to SEQ ID NO: 187677
  Synthetic oligonucleotide

SEQ ID NO: 625148 - DNA, 55 bp, Artificial; identical to SEQ ID NO: 240184
  Synthetic oligonucleotide

SEQ ID NO: 625149 - DNA, 55 bp, Artificial; identical to SEQ ID NO: 197043
  Synthetic oligonucleotide

SEQ ID NO: 625150 - DNA, 54 bp, Artificial; identical to SEQ ID NO: 224360
  Synthetic oligonucleotide

SEQ ID NO: 625151 - DNA, 55 bp, Artificial; identical to SEQ ID NO: 197044
  Synthetic oligonucleotide

SEQ ID NO: 625152 - DNA, 60 bp, Artificial; identical to SEQ ID NO: 256312
  Synthetic oligonucleotide

SEQ ID NO: 625153 - DNA, 60 bp, Artificial; identical to SEQ ID NO: 257509
  Synthetic oligonucleotide

SEQ ID NO: 625154 - DNA, 55 bp, Artificial; identical to SEQ ID NO: 199169
  Synthetic oligonucleotide

SEQ ID NO: 625155 - DNA, 55 bp, Artificial; identical to SEQ ID NO: 215532
  Synthetic oligonucleotide

SEQ ID NO: 625156 - DNA, 55 bp, Artificial; identical to SEQ ID NO: 144906
  Synthetic oligonucleotide

SEQ ID NO: 625157 - DNA, 55 bp, Artificial; identical to SEQ ID NO: 184933
  Synthetic oligonucleotide

SEQ ID NO: 625158 - DNA, 60 bp, Artificial; identical to SEQ ID NO: 203492
  Synthetic oligonucleotide

SEQ ID NO: 625159 - DNA, 57 bp, Artificial; identical to SEQ ID NO: 224481
  Synthetic oligonucleotide

SEQ ID NO: 625160 - DNA, 55 bp, Artificial; identical to SEQ ID NO: 148511
  Synthetic oligonucleotide

SEQ ID NO: 625161 - DNA, 55 bp, Artificial; identical to SEQ ID NO: 249493
  Synthetic oligonucleotide

SEQ ID NO: 625162 - DNA, 54 bp, Artificial; identical to SEQ ID NO: 202924
  Synthetic oligonucleotide

SEQ ID NO: 625163 - DNA, 50 bp, Artificial; identical to SEQ ID NO: 256247
  Synthetic oligonucleotide

SEQ ID NO: 625164 - DNA, 55 bp, Artificial; identical to SEQ ID NO: 249090
  Synthetic oligonucleotide

SEQ ID NO: 625165 - DNA, 55 bp, Artificial; identical to SEQ ID NO: 169881
  Synthetic oligonucleotide

SEQ ID NO: 625166 - DNA, 55 bp, Artificial; identical to SEQ ID NO: 167481
  Synthetic oligonucleotide

SEQ ID NO: 625167 - DNA, 50 bp, Artificial; identical to SEQ ID NO: 151901
  Synthetic oligonucleotide

SEQ ID NO: 625168 - DNA, 53 bp, Artificial; identical to SEQ ID NO: 199167
  Synthetic oligonucleotide

SEQ ID NO: 625169 - DNA, 53 bp, Artificial; identical to SEQ ID NO: 246380
  Synthetic oligonucleotide

SEQ ID NO: 625170 - DNA, 59 bp, Artificial; identical to SEQ ID NO: 248460
  Synthetic oligonucleotide

SEQ ID NO: 625171 - DNA, 53 bp, Artificial; identical to SEQ ID NO: 245447
  Synthetic oligonucleotide

SEQ ID NO: 625172 - DNA, 55 bp, Artificial; identical to SEQ ID NO: 176405
  Synthetic oligonucleotide

SEQ ID NO: 625173 - DNA, 55 bp, Artificial; identical to SEQ ID NO: 242860
  Synthetic oligonucleotide

SEQ ID NO: 625174 - DNA, 55 bp, Artificial; identical to SEQ ID NO: 168353
  Synthetic oligonucleotide

SEQ ID NO: 625175 - DNA, 55 bp, Artificial; identical to SEQ ID NO: 184885
  Synthetic oligonucleotide

SEQ ID NO: 625176 - DNA, 55 bp, Artificial; identical to SEQ ID NO: 199166
  Synthetic oligonucleotide

SEQ ID NO: 625177 - DNA, 55 bp, Artificial; identical to SEQ ID NO: 245504
  Synthetic oligonucleotide

SEQ ID NO: 625178 - DNA, 54 bp, Artificial; identical to SEQ ID NO: 191136
  Synthetic oligonucleotide

SEQ ID NO: 625179 - DNA, 55 bp, Artificial; identical to SEQ ID NO: 202923
  Synthetic oligonucleotide

SEQ ID NO: 625180 - DNA, 57 bp, Artificial; identical to SEQ ID NO: 202007
  Synthetic oligonucleotide

SEQ ID NO: 625181 - DNA, 55 bp, Artificial; identical to SEQ ID NO: 184146
  Synthetic oligonucleotide

SEQ ID NO: 625182 - DNA, 55 bp, Artificial; identical to SEQ ID NO: 234184
  Synthetic oligonucleotide

SEQ ID NO: 625183 - DNA, 52 bp, Artificial; identical to SEQ ID NO: 148503
  Synthetic oligonucleotide

SEQ ID NO: 625184 - DNA, 54 bp, Artificial; identical to SEQ ID NO: 176439
  Synthetic oligonucleotide

SEQ ID NO: 625185 - DNA, 55 bp, Artificial; identical to SEQ ID NO: 223479
  Synthetic oligonucleotide

SEQ ID NO: 625186 - DNA, 55 bp, Artificial; identical to SEQ ID NO: 169869
  Synthetic oligonucleotide

SEQ ID NO: 625187 - DNA, 55 bp, Artificial; identical to SEQ ID NO: 202922
  Synthetic oligonucleotide

SEQ ID NO: 625188 - DNA, 56 bp, Artificial; identical to SEQ ID NO: 209241
  Synthetic oligonucleotide

SEQ ID NO: 625189 - DNA, 55 bp, Artificial; identical to SEQ ID NO: 218885
  Synthetic oligonucleotide

SEQ ID NO: 625190 - DNA, 52 bp, Artificial; identical to SEQ ID NO: 218345
  Synthetic oligonucleotide

SEQ ID NO: 625191 - DNA, 55 bp, Artificial; identical to SEQ ID NO: 184145
  Synthetic oligonucleotide

SEQ ID NO: 625192 - DNA, 55 bp, Artificial; identical to SEQ ID NO: 164318
  Synthetic oligonucleotide

SEQ ID NO: 625193 - DNA, 55 bp, Artificial; identical to SEQ ID NO: 254686
  Synthetic oligonucleotide

SEQ ID NO: 625194 - DNA, 55 bp, Artificial; identical to SEQ ID NO: 184135
  Synthetic oligonucleotide

SEQ ID NO: 625195 - DNA, 55 bp, Artificial; identical to SEQ ID NO: 245501
  Synthetic oligonucleotide

SEQ ID NO: 625196 - DNA, 55 bp, Artificial; identical to SEQ ID NO: 184195
  Synthetic oligonucleotide

SEQ ID NO: 625197 - DNA, 55 bp, Artificial; identical to SEQ ID NO: 202383
  Synthetic oligonucleotide

SEQ ID NO: 625198 - DNA, 53 bp, Artificial; identical to SEQ ID NO: 184203
  Synthetic oligonucleotide

SEQ ID NO: 625199 - DNA, 55 bp, Artificial; identical to SEQ ID NO: 160331
  Synthetic oligonucleotide

SEQ ID NO: 625200 - DNA, 55 bp, Artificial; identical to SEQ ID NO: 197049
  Synthetic oligonucleotide

SEQ ID NO: 625201 - DNA, 57 bp, Artificial; identical to SEQ ID NO: 168186
  Synthetic oligonucleotide

SEQ ID NO: 625202 - DNA, 55 bp, Artificial; identical to SEQ ID NO: 240178
  Synthetic oligonucleotide

SEQ ID NO: 625203 - DNA, 55 bp, Artificial; identical to SEQ ID NO: 153518
  Synthetic oligonucleotide

SEQ ID NO: 625204 - DNA, 55 bp, Artificial; identical to SEQ ID NO: 168354
  Synthetic oligonucleotide

SEQ ID NO: 625205 - DNA, 55 bp, Artificial; identical to SEQ ID NO: 234182
  Synthetic oligonucleotide

SEQ ID NO: 625206 - DNA, 55 bp, Artificial; identical to SEQ ID NO: 221207
  Synthetic oligonucleotide

SEQ ID NO: 625207 - DNA, 52 bp, Artificial; identical to SEQ ID NO: 240889
  Synthetic oligonucleotide

SEQ ID NO: 625208 - DNA, 55 bp, Artificial; identical to SEQ ID NO: 157060
  Synthetic oligonucleotide

SEQ ID NO: 625209 - DNA, 55 bp, Artificial; identical to SEQ ID NO: 183997
  Synthetic oligonucleotide

SEQ ID NO: 625210 - DNA, 55 bp, Artificial; identical to SEQ ID NO: 164317
  Synthetic oligonucleotide

SEQ ID NO: 625211 - DNA, 55 bp, Artificial; identical to SEQ ID NO: 254684
  Synthetic oligonucleotide

SEQ ID NO: 625212 - DNA, 52 bp, Artificial; identical to SEQ ID NO: 239703
  Synthetic oligonucleotide

SEQ ID NO: 625213 - DNA, 55 bp, Artificial; identical to SEQ ID NO: 144066
  Synthetic oligonucleotide

SEQ ID NO: 625214 - DNA, 57 bp, Artificial; identical to SEQ ID NO: 256290
  Synthetic oligonucleotide

SEQ ID NO: 625215 - DNA, 57 bp, Artificial; identical to SEQ ID NO: 239447
  Synthetic oligonucleotide

SEQ ID NO: 625216 - DNA, 55 bp, Artificial; identical to SEQ ID NO: 146362
  Synthetic oligonucleotide

SEQ ID NO: 625217 - DNA, 54 bp, Artificial; identical to SEQ ID NO: 164795
  Synthetic oligonucleotide

SEQ ID NO: 625218 - DNA, 57 bp, Artificial; identical to SEQ ID NO: 166094
  Synthetic oligonucleotide

SEQ ID NO: 625219 - DNA, 55 bp, Artificial; identical to SEQ ID NO: 254682
  Synthetic oligonucleotide

SEQ ID NO: 625220 - DNA, 55 bp, Artificial; identical to SEQ ID NO: 148499
  Synthetic oligonucleotide

SEQ ID NO: 625221 - DNA, 53 bp, Artificial; identical to SEQ ID NO: 166972
  Synthetic oligonucleotide

SEQ ID NO: 625222 - DNA, 59 bp, Artificial; identical to SEQ ID NO: 142661
  Synthetic oligonucleotide

SEQ ID NO: 625223 - DNA, 54 bp, Artificial; identical to SEQ ID NO: 202921
  Synthetic oligonucleotide

SEQ ID NO: 625224 - DNA, 55 bp, Artificial; identical to SEQ ID NO: 183957
  Synthetic oligonucleotide

SEQ ID NO: 625225 - DNA, 55 bp, Artificial; identical to SEQ ID NO: 169883
  Synthetic oligonucleotide

SEQ ID NO: 625226 - DNA, 51 bp, Artificial; identical to SEQ ID NO: 200107
  Synthetic oligonucleotide

SEQ ID NO: 625227 - DNA, 52 bp, Artificial; identical to SEQ ID NO: 186047
  Synthetic oligonucleotide

SEQ ID NO: 625228 - DNA, 57 bp, Artificial; identical to SEQ ID NO: 239692
  Synthetic oligonucleotide

SEQ ID NO: 625229 - DNA, 55 bp, Artificial; identical to SEQ ID NO: 147066
  Synthetic oligonucleotide

SEQ ID NO: 625230 - DNA, 55 bp, Artificial; identical to SEQ ID NO: 197050
  Synthetic oligonucleotide

SEQ ID NO: 625231 - DNA, 55 bp, Artificial; identical to SEQ ID NO: 148498
  Synthetic oligonucleotide

SEQ ID NO: 625232 - DNA, 57 bp, Artificial; identical to SEQ ID NO: 194748
  Synthetic oligonucleotide

SEQ ID NO: 625233 - DNA, 55 bp, Artificial; identical to SEQ ID NO: 249866
  Synthetic oligonucleotide

SEQ ID NO: 625234 - DNA, 53 bp, Artificial; identical to SEQ ID NO: 197485
  Synthetic oligonucleotide

SEQ ID NO: 625235 - DNA, 57 bp, Artificial; identical to SEQ ID NO: 239681
  Synthetic oligonucleotide

SEQ ID NO: 625236 - DNA, 60 bp, Artificial; identical to SEQ ID NO: 150702
  Synthetic oligonucleotide

SEQ ID NO: 625237 - DNA, 55 bp, Artificial; identical to SEQ ID NO: 148496
  Synthetic oligonucleotide

SEQ ID NO: 625238 - DNA, 55 bp, Artificial; identical to SEQ ID NO: 217891
  Synthetic oligonucleotide

SEQ ID NO: 625239 - DNA, 53 bp, Artificial; identical to SEQ ID NO: 237025
  Synthetic oligonucleotide

SEQ ID NO: 625240 - DNA, 51 bp, Artificial; identical to SEQ ID NO: 241135
  Synthetic oligonucleotide

SEQ ID NO: 625241 - DNA, 55 bp, Artificial; identical to SEQ ID NO: 148494
  Synthetic oligonucleotide

SEQ ID NO: 625242 - DNA, 50 bp, Artificial; identical to SEQ ID NO: 146538
  Synthetic oligonucleotide

SEQ ID NO: 625243 - DNA, 55 bp, Artificial; identical to SEQ ID NO: 254681
  Synthetic oligonucleotide

SEQ ID NO: 625244 - DNA, 60 bp, Artificial; identical to SEQ ID NO: 239659
  Synthetic oligonucleotide

SEQ ID NO: 625245 - DNA, 54 bp, Artificial; identical to SEQ ID NO: 159854
  Synthetic oligonucleotide

SEQ ID NO: 625246 - DNA, 54 bp, Artificial; identical to SEQ ID NO: 215529
  Synthetic oligonucleotide

SEQ ID NO: 625247 - DNA, 52 bp, Artificial; identical to SEQ ID NO: 237053
  Synthetic oligonucleotide

SEQ ID NO: 625248 - DNA, 57 bp, Artificial; identical to SEQ ID NO: 247288
  Synthetic oligonucleotide

SEQ ID NO: 625249 - DNA, 60 bp, Artificial; identical to SEQ ID NO: 233690
  Synthetic oligonucleotide

SEQ ID NO: 625250 - DNA, 53 bp, Artificial; identical to SEQ ID NO: 206423
  Synthetic oligonucleotide

SEQ ID NO: 625251 - DNA, 52 bp, Artificial; identical to SEQ ID NO: 197052
  Synthetic oligonucleotide

SEQ ID NO: 625252 - DNA, 50 bp, Artificial; identical to SEQ ID NO: 242466
  Synthetic oligonucleotide

SEQ ID NO: 625253 - DNA, 55 bp, Artificial; identical to SEQ ID NO: 144905
  Synthetic oligonucleotide

SEQ ID NO: 625254 - DNA, 55 bp, Artificial; identical to SEQ ID NO: 245492
  Synthetic oligonucleotide

SEQ ID NO: 625255 - DNA, 51 bp, Artificial; identical to SEQ ID NO: 167607
  Synthetic oligonucleotide

SEQ ID NO: 625256 - DNA, 54 bp, Artificial; identical to SEQ ID NO: 142462
  Synthetic oligonucleotide

SEQ ID NO: 625257 - DNA, 55 bp, Artificial; identical to SEQ ID NO: 188345
  Synthetic oligonucleotide

SEQ ID NO: 625258 - DNA, 53 bp, Artificial; identical to SEQ ID NO: 206424
  Synthetic oligonucleotide

SEQ ID NO: 625259 - DNA, 57 bp, Artificial; identical to SEQ ID NO: 150700
  Synthetic oligonucleotide

SEQ ID NO: 625260 - DNA, 55 bp, Artificial; identical to SEQ ID NO: 197053
  Synthetic oligonucleotide

SEQ ID NO: 625261 - DNA, 55 bp, Artificial; identical to SEQ ID NO: 191135
  Synthetic oligonucleotide

SEQ ID NO: 625262 - DNA, 55 bp, Artificial; identical to SEQ ID NO: 260018
  Synthetic oligonucleotide

SEQ ID NO: 625263 - DNA, 55 bp, Artificial; identical to SEQ ID NO: 218806
  Synthetic oligonucleotide

SEQ ID NO: 625264 - DNA, 55 bp, Artificial; identical to SEQ ID NO: 160328
  Synthetic oligonucleotide

SEQ ID NO: 625265 - DNA, 53 bp, Artificial; identical to SEQ ID NO: 154048
  Synthetic oligonucleotide

SEQ ID NO: 625266 - DNA, 60 bp, Artificial; identical to SEQ ID NO: 199914
  Synthetic oligonucleotide

SEQ ID NO: 625267 - DNA, 60 bp, Artificial; identical to SEQ ID NO: 237303
  Synthetic oligonucleotide

SEQ ID NO: 625268 - DNA, 58 bp, Artificial; identical to SEQ ID NO: 177112
  Synthetic oligonucleotide

SEQ ID NO: 625269 - DNA, 55 bp, Artificial; identical to SEQ ID NO: 197054
  Synthetic oligonucleotide

SEQ ID NO: 625270 - DNA, 55 bp, Artificial; identical to SEQ ID NO: 151903
  Synthetic oligonucleotide

SEQ ID NO: 625271 - DNA, 55 bp, Artificial; identical to SEQ ID NO: 154204
  Synthetic oligonucleotide

SEQ ID NO: 625272 - DNA, 50 bp, Artificial; identical to SEQ ID NO: 241649
  Synthetic oligonucleotide

SEQ ID NO: 625273 - DNA, 52 bp, Artificial; identical to SEQ ID NO: 161137
  Synthetic oligonucleotide

SEQ ID NO: 625274 - DNA, 55 bp, Artificial; identical to SEQ ID NO: 188152
  Synthetic oligonucleotide

SEQ ID NO: 625275 - DNA, 55 bp, Artificial; identical to SEQ ID NO: 187680
  Synthetic oligonucleotide

SEQ ID NO: 625276 - DNA, 55 bp, Artificial; identical to SEQ ID NO: 151904
  Synthetic oligonucleotide

SEQ ID NO: 625277 - DNA, 55 bp, Artificial; identical to SEQ ID NO: 191134
  Synthetic oligonucleotide

SEQ ID NO: 625278 - DNA, 55 bp, Artificial; identical to SEQ ID NO: 148490
  Synthetic oligonucleotide

SEQ ID NO: 625279 - DNA, 55 bp, Artificial; identical to SEQ ID NO: 184032
  Synthetic oligonucleotide

SEQ ID NO: 625280 - DNA, 55 bp, Artificial; identical to SEQ ID NO: 222677
  Synthetic oligonucleotide

SEQ ID NO: 625281 - DNA, 55 bp, Artificial; identical to SEQ ID NO: 184395
  Synthetic oligonucleotide

SEQ ID NO: 625282 - DNA, 55 bp, Artificial; identical to SEQ ID NO: 157052
  Synthetic oligonucleotide

SEQ ID NO: 625283 - DNA, 60 bp, Artificial; identical to SEQ ID NO: 239637
  Synthetic oligonucleotide

SEQ ID NO: 625284 - DNA, 55 bp, Artificial; identical to SEQ ID NO: 233615
  Synthetic oligonucleotide

SEQ ID NO: 625285 - DNA, 52 bp, Artificial; identical to SEQ ID NO: 186199
  Synthetic oligonucleotide

SEQ ID NO: 625286 - DNA, 54 bp, Artificial; identical to SEQ ID NO: 209592
  Synthetic oligonucleotide

SEQ ID NO: 625287 - DNA, 55 bp, Artificial; identical to SEQ ID NO: 197056
  Synthetic oligonucleotide

SEQ ID NO: 625288 - DNA, 55 bp, Artificial; identical to SEQ ID NO: 207537
  Synthetic oligonucleotide

SEQ ID NO: 625289 - DNA, 55 bp, Artificial; identical to SEQ ID NO: 257833
  Synthetic oligonucleotide

SEQ ID NO: 625290 - DNA, 60 bp, Artificial; identical to SEQ ID NO: 239015
  Synthetic oligonucleotide

SEQ ID NO: 625291 - DNA, 60 bp, Artificial; identical to SEQ ID NO: 142473
  Synthetic oligonucleotide

SEQ ID NO: 625292 - DNA, 54 bp, Artificial; identical to SEQ ID NO: 211513
  Synthetic oligonucleotide

SEQ ID NO: 625293 - DNA, 53 bp, Artificial; identical to SEQ ID NO: 208795
  Synthetic oligonucleotide

SEQ ID NO: 625294 - DNA, 55 bp, Artificial; identical to SEQ ID NO: 238076
  Synthetic oligonucleotide

SEQ ID NO: 625295 - DNA, 57 bp, Artificial; identical to SEQ ID NO: 147232
  Synthetic oligonucleotide

SEQ ID NO: 625296 - DNA, 55 bp, Artificial; identical to SEQ ID NO: 242864
  Synthetic oligonucleotide

SEQ ID NO: 625297 - DNA, 55 bp, Artificial; identical to SEQ ID NO: 207538
  Synthetic oligonucleotide

SEQ ID NO: 625298 - DNA, 59 bp, Artificial; identical to SEQ ID NO: 257497
  Synthetic oligonucleotide

SEQ ID NO: 625299 - DNA, 55 bp, Artificial; identical to SEQ ID NO: 157064
  Synthetic oligonucleotide

SEQ ID NO: 625300 - DNA, 55 bp, Artificial; identical to SEQ ID NO: 209498
  Synthetic oligonucleotide

SEQ ID NO: 625301 - DNA, 51 bp, Artificial; identical to SEQ ID NO: 165214
  Synthetic oligonucleotide

SEQ ID NO: 625302 - DNA, 57 bp, Artificial; identical to SEQ ID NO: 179723
  Synthetic oligonucleotide

SEQ ID NO: 625303 - DNA, 55 bp, Artificial; identical to SEQ ID NO: 259044
  Synthetic oligonucleotide

SEQ ID NO: 625304 - DNA, 55 bp, Artificial; identical to SEQ ID NO: 223465
  Synthetic oligonucleotide

SEQ ID NO: 625305 - DNA, 55 bp, Artificial; identical to SEQ ID NO: 249899
  Synthetic oligonucleotide

SEQ ID NO: 625306 - DNA, 55 bp, Artificial; identical to SEQ ID NO: 174518
  Synthetic oligonucleotide

SEQ ID NO: 625307 - DNA, 58 bp, Artificial; identical to SEQ ID NO: 159933
  Synthetic oligonucleotide

SEQ ID NO: 625308 - DNA, 50 bp, Artificial; identical to SEQ ID NO: 186961
  Synthetic oligonucleotide

SEQ ID NO: 625309 - DNA, 55 bp, Artificial; identical to SEQ ID NO: 164674
  Synthetic oligonucleotide

SEQ ID NO: 625310 - DNA, 59 bp, Artificial; identical to SEQ ID NO: 209328
  Synthetic oligonucleotide

SEQ ID NO: 625311 - DNA, 55 bp, Artificial; identical to SEQ ID NO: 169870
  Synthetic oligonucleotide

SEQ ID NO: 625312 - DNA, 55 bp, Artificial; identical to SEQ ID NO: 223468
  Synthetic oligonucleotide

SEQ ID NO: 625313 - DNA, 55 bp, Artificial; identical to SEQ ID NO: 234179
  Synthetic oligonucleotide

SEQ ID NO: 625314 - DNA, 51 bp, Artificial; identical to SEQ ID NO: 149870
  Synthetic oligonucleotide

SEQ ID NO: 625315 - DNA, 57 bp, Artificial; identical to SEQ ID NO: 238993
  Synthetic oligonucleotide

SEQ ID NO: 625316 - DNA, 55 bp, Artificial; identical to SEQ ID NO: 221172
  Synthetic oligonucleotide

SEQ ID NO: 625317 - DNA, 56 bp, Artificial; identical to SEQ ID NO: 253701
  Synthetic oligonucleotide

SEQ ID NO: 625318 - DNA, 55 bp, Artificial; identical to SEQ ID NO: 245490
  Synthetic oligonucleotide

SEQ ID NO: 625319 - DNA, 50 bp, Artificial; identical to SEQ ID NO: 165765
  Synthetic oligonucleotide

SEQ ID NO: 625320 - DNA, 53 bp, Artificial; identical to SEQ ID NO: 255432
  Synthetic oligonucleotide

SEQ ID NO: 625321 - DNA, 55 bp, Artificial; identical to SEQ ID NO: 238038
  Synthetic oligonucleotide

SEQ ID NO: 625322 - DNA, 55 bp, Artificial; identical to SEQ ID NO: 184430
  Synthetic oligonucleotide

SEQ ID NO: 625323 - DNA, 55 bp, Artificial; identical to SEQ ID NO: 249475
  Synthetic oligonucleotide

SEQ ID NO: 625324 - DNA, 55 bp, Artificial; identical to SEQ ID NO: 245486
  Synthetic oligonucleotide

SEQ ID NO: 625325 - DNA, 55 bp, Artificial; identical to SEQ ID NO: 174517
  Synthetic oligonucleotide

SEQ ID NO: 625326 - DNA, 55 bp, Artificial; identical to SEQ ID NO: 193551
  Synthetic oligonucleotide

SEQ ID NO: 625327 - DNA, 60 bp, Artificial; identical to SEQ ID NO: 150699
  Synthetic oligonucleotide

SEQ ID NO: 625328 - DNA, 59 bp, Artificial; identical to SEQ ID NO: 224306
  Synthetic oligonucleotide

SEQ ID NO: 625329 - DNA, 55 bp, Artificial; identical to SEQ ID NO: 205263
  Synthetic oligonucleotide

SEQ ID NO: 625330 - DNA, 55 bp, Artificial; identical to SEQ ID NO: 191132
  Synthetic oligonucleotide

SEQ ID NO: 625331 - DNA, 57 bp, Artificial; identical to SEQ ID NO: 256303
  Synthetic oligonucleotide

SEQ ID NO: 625332 - DNA, 60 bp, Artificial; identical to SEQ ID NO: 177131
  Synthetic oligonucleotide

SEQ ID NO: 625333 - DNA, 53 bp, Artificial; identical to SEQ ID NO: 203910
  Synthetic oligonucleotide

SEQ ID NO: 625334 - DNA, 55 bp, Artificial; identical to SEQ ID NO: 157067
  Synthetic oligonucleotide

SEQ ID NO: 625335 - DNA, 55 bp, Artificial; identical to SEQ ID NO: 164687
  Synthetic oligonucleotide

SEQ ID NO: 625336 - DNA, 55 bp, Artificial; identical to SEQ ID NO: 223470
  Synthetic oligonucleotide

SEQ ID NO: 625337 - DNA, 55 bp, Artificial; identical to SEQ ID NO: 217893
  Synthetic oligonucleotide

SEQ ID NO: 625338 - DNA, 53 bp, Artificial; identical to SEQ ID NO: 157399
  Synthetic oligonucleotide

SEQ ID NO: 625339 - DNA, 50 bp, Artificial; identical to SEQ ID NO: 256248
  Synthetic oligonucleotide

SEQ ID NO: 625340 - DNA, 55 bp, Artificial; identical to SEQ ID NO: 208111
  Synthetic oligonucleotide

SEQ ID NO: 625341 - DNA, 55 bp, Artificial; identical to SEQ ID NO: 157070
  Synthetic oligonucleotide

SEQ ID NO: 625342 - DNA, 50 bp, Artificial; identical to SEQ ID NO: 266314
  Synthetic oligonucleotide

SEQ ID NO: 625343 - DNA, 56 bp, Artificial; identical to SEQ ID NO: 141979
  Synthetic oligonucleotide

SEQ ID NO: 625344 - DNA, 55 bp, Artificial; identical to SEQ ID NO: 174516
  Synthetic oligonucleotide

SEQ ID NO: 625345 - DNA, 55 bp, Artificial; identical to SEQ ID NO: 155489
  Synthetic oligonucleotide

SEQ ID NO: 625346 - DNA, 52 bp, Artificial; identical to SEQ ID NO: 255553
  Synthetic oligonucleotide

SEQ ID NO: 625347 - DNA, 55 bp, Artificial; identical to SEQ ID NO: 157074
  Synthetic oligonucleotide

SEQ ID NO: 625348 - DNA, 55 bp, Artificial; identical to SEQ ID NO: 207539
  Synthetic oligonucleotide

SEQ ID NO: 625349 - DNA, 52 bp, Artificial; identical to SEQ ID NO: 246426
  Synthetic oligonucleotide

SEQ ID NO: 625350 - DNA, 55 bp, Artificial; identical to SEQ ID NO: 218886
  Synthetic oligonucleotide

SEQ ID NO: 625351 - DNA, 60 bp, Artificial; identical to SEQ ID NO: 247343
  Synthetic oligonucleotide

SEQ ID NO: 625352 - DNA, 55 bp, Artificial; identical to SEQ ID NO: 157024
  Synthetic oligonucleotide

SEQ ID NO: 625353 - DNA, 57 bp, Artificial; identical to SEQ ID NO: 237315
  Synthetic oligonucleotide

SEQ ID NO: 625354 - DNA, 55 bp, Artificial; identical to SEQ ID NO: 164686
  Synthetic oligonucleotide

SEQ ID NO: 625355 - DNA, 60 bp, Artificial; identical to SEQ ID NO: 224292
  Synthetic oligonucleotide

SEQ ID NO: 625356 - DNA, 55 bp, Artificial; identical to SEQ ID NO: 169887
  Synthetic oligonucleotide

SEQ ID NO: 625357 - DNA, 55 bp, Artificial; identical to SEQ ID NO: 223471
  Synthetic oligonucleotide

SEQ ID NO: 625358 - DNA, 55 bp, Artificial; identical to SEQ ID NO: 263319
  Synthetic oligonucleotide

SEQ ID NO: 625359 - DNA, 60 bp, Artificial; identical to SEQ ID NO: 237326
  Synthetic oligonucleotide

SEQ ID NO: 625360 - DNA, 55 bp, Artificial; identical to SEQ ID NO: 190491
  Synthetic oligonucleotide

SEQ ID NO: 625361 - DNA, 60 bp, Artificial; identical to SEQ ID NO: 159509
  Synthetic oligonucleotide

SEQ ID NO: 625362 - DNA, 52 bp, Artificial; identical to SEQ ID NO: 240908
  Synthetic oligonucleotide

SEQ ID NO: 625363 - DNA, 57 bp, Artificial; identical to SEQ ID NO: 216749
  Synthetic oligonucleotide

SEQ ID NO: 625364 - DNA, 55 bp, Artificial; identical to SEQ ID NO: 157025
  Synthetic oligonucleotide

SEQ ID NO: 625365 - DNA, 50 bp, Artificial; identical to SEQ ID NO: 203044
  Synthetic oligonucleotide

SEQ ID NO: 625366 - DNA, 54 bp, Artificial; identical to SEQ ID NO: 237337
  Synthetic oligonucleotide

SEQ ID NO: 625367 - DNA, 55 bp, Artificial; identical to SEQ ID NO: 148533
  Synthetic oligonucleotide

SEQ ID NO: 625368 - DNA, 55 bp, Artificial; identical to SEQ ID NO: 148532
  Synthetic oligonucleotide

SEQ ID NO: 625369 - DNA, 50 bp, Artificial; identical to SEQ ID NO: 201201
  Synthetic oligonucleotide

SEQ ID NO: 625370 - DNA, 56 bp, Artificial; identical to SEQ ID NO: 238971
  Synthetic oligonucleotide

SEQ ID NO: 625371 - DNA, 55 bp, Artificial; identical to SEQ ID NO: 242865
  Synthetic oligonucleotide

SEQ ID NO: 625372 - DNA, 53 bp, Artificial; identical to SEQ ID NO: 240799
  Synthetic oligonucleotide

SEQ ID NO: 625373 - DNA, 55 bp, Artificial; identical to SEQ ID NO: 164693
  Synthetic oligonucleotide

SEQ ID NO: 625374 - DNA, 55 bp, Artificial; identical to SEQ ID NO: 151907
  Synthetic oligonucleotide

SEQ ID NO: 625375 - DNA, 59 bp, Artificial; identical to SEQ ID NO: 238949
  Synthetic oligonucleotide

SEQ ID NO: 625376 - DNA, 55 bp, Artificial; identical to SEQ ID NO: 184461
  Synthetic oligonucleotide

SEQ ID NO: 625377 - DNA, 55 bp, Artificial; identical to SEQ ID NO: 184459
  Synthetic oligonucleotide

SEQ ID NO: 625378 - DNA, 55 bp, Artificial; identical to SEQ ID NO: 199162
  Synthetic oligonucleotide

SEQ ID NO: 625379 - DNA, 55 bp, Artificial; identical to SEQ ID NO: 190492
  Synthetic oligonucleotide

SEQ ID NO: 625380 - DNA, 55 bp, Artificial; identical to SEQ ID NO: 157027
  Synthetic oligonucleotide

SEQ ID NO: 625381 - DNA, 55 bp, Artificial; identical to SEQ ID NO: 184455
  Synthetic oligonucleotide

SEQ ID NO: 625382 - DNA, 51 bp, Artificial; identical to SEQ ID NO: 153683
  Synthetic oligonucleotide

SEQ ID NO: 625383 - DNA, 58 bp, Artificial; identical to SEQ ID NO: 177005
  Synthetic oligonucleotide

SEQ ID NO: 625384 - DNA, 55 bp, Artificial; identical to SEQ ID NO: 184265
  Synthetic oligonucleotide

SEQ ID NO: 625385 - DNA, 55 bp, Artificial; identical to SEQ ID NO: 148531
  Synthetic oligonucleotide

SEQ ID NO: 625386 - DNA, 55 bp, Artificial; identical to SEQ ID NO: 217848
  Synthetic oligonucleotide

SEQ ID NO: 625387 - DNA, 60 bp, Artificial; identical to SEQ ID NO: 257486
  Synthetic oligonucleotide

SEQ ID NO: 625388 - DNA, 55 bp, Artificial; identical to SEQ ID NO: 238045
  Synthetic oligonucleotide

SEQ ID NO: 625389 - DNA, 54 bp, Artificial; identical to SEQ ID NO: 207540
  Synthetic oligonucleotide

SEQ ID NO: 625390 - DNA, 55 bp, Artificial; identical to SEQ ID NO: 245484
  Synthetic oligonucleotide

SEQ ID NO: 625391 - DNA, 57 bp, Artificial; identical to SEQ ID NO: 239365
  Synthetic oligonucleotide

SEQ ID NO: 625392 - DNA, 55 bp, Artificial; identical to SEQ ID NO: 254797
  Synthetic oligonucleotide

SEQ ID NO: 625393 - DNA, 60 bp, Artificial; identical to SEQ ID NO: 233712
  Synthetic oligonucleotide

SEQ ID NO: 625394 - DNA, 57 bp, Artificial; identical to SEQ ID NO: 212490
  Synthetic oligonucleotide

SEQ ID NO: 625395 - DNA, 55 bp, Artificial; identical to SEQ ID NO: 148530
  Synthetic oligonucleotide

SEQ ID NO: 625396 - DNA, 60 bp, Artificial; identical to SEQ ID NO: 191219
  Synthetic oligonucleotide

SEQ ID NO: 625397 - DNA, 55 bp, Artificial; identical to SEQ ID NO: 260178
  Synthetic oligonucleotide

SEQ ID NO: 625398 - DNA, 55 bp, Artificial; identical to SEQ ID NO: 184274
  Synthetic oligonucleotide

SEQ ID NO: 625399 - DNA, 55 bp, Artificial; identical to SEQ ID NO: 199161
  Synthetic oligonucleotide

SEQ ID NO: 625400 - DNA, 53 bp, Artificial; identical to SEQ ID NO: 205259
  Synthetic oligonucleotide

SEQ ID NO: 625401 - DNA, 58 bp, Artificial; identical to SEQ ID NO: 166256
  Synthetic oligonucleotide

SEQ ID NO: 625402 - DNA, 55 bp, Artificial; identical to SEQ ID NO: 238046
  Synthetic oligonucleotide

SEQ ID NO: 625403 - DNA, 58 bp, Artificial; identical to SEQ ID NO: 238937
  Synthetic oligonucleotide

SEQ ID NO: 625404 - DNA, 55 bp, Artificial; identical to SEQ ID NO: 245481
  Synthetic oligonucleotide

SEQ ID NO: 625405 - DNA, 55 bp, Artificial; identical to SEQ ID NO: 188341
  Synthetic oligonucleotide

SEQ ID NO: 625406 - DNA, 55 bp, Artificial; identical to SEQ ID NO: 144903
  Synthetic oligonucleotide

SEQ ID NO: 625407 - DNA, 55 bp, Artificial; identical to SEQ ID NO: 254795
  Synthetic oligonucleotide

SEQ ID NO: 625408 - DNA, 51 bp, Artificial; identical to SEQ ID NO: 160547
  Synthetic oligonucleotide

SEQ ID NO: 625409 - DNA, 51 bp, Artificial; identical to SEQ ID NO: 187043
  Synthetic oligonucleotide

SEQ ID NO: 625410 - DNA, 53 bp, Artificial; identical to SEQ ID NO: 185745
  Synthetic oligonucleotide

SEQ ID NO: 625411 - DNA, 53 bp, Artificial; identical to SEQ ID NO: 203909
  Synthetic oligonucleotide

SEQ ID NO: 625412 - DNA, 55 bp, Artificial; identical to SEQ ID NO: 242867
  Synthetic oligonucleotide

SEQ ID NO: 625413 - DNA, 51 bp, Artificial; identical to SEQ ID NO: 192163
  Synthetic oligonucleotide

SEQ ID NO: 625414 - DNA, 55 bp, Artificial; identical to SEQ ID NO: 254793
  Synthetic oligonucleotide

SEQ ID NO: 625415 - DNA, 55 bp, Artificial; identical to SEQ ID NO: 191129
  Synthetic oligonucleotide

SEQ ID NO: 625416 - DNA, 53 bp, Artificial; identical to SEQ ID NO: 254791
  Synthetic oligonucleotide

SEQ ID NO: 625417 - DNA, 55 bp, Artificial; identical to SEQ ID NO: 157036
  Synthetic oligonucleotide

SEQ ID NO: 625418 - DNA, 54 bp, Artificial; identical to SEQ ID NO: 199881
  Synthetic oligonucleotide

SEQ ID NO: 625419 - DNA, 51 bp, Artificial; identical to SEQ ID NO: 142660
  Synthetic oligonucleotide

SEQ ID NO: 625420 - DNA, 53 bp, Artificial; identical to SEQ ID NO: 209620
  Synthetic oligonucleotide

SEQ ID NO: 625421 - DNA, 59 bp, Artificial; identical to SEQ ID NO: 190631
  Synthetic oligonucleotide

SEQ ID NO: 625422 - DNA, 55 bp, Artificial; identical to SEQ ID NO: 233613
  Synthetic oligonucleotide

SEQ ID NO: 625423 - DNA, 55 bp, Artificial; identical to SEQ ID NO: 225017
  Synthetic oligonucleotide

SEQ ID NO: 625424 - DNA, 55 bp, Artificial; identical to SEQ ID NO: 266664
  Synthetic oligonucleotide

SEQ ID NO: 625425 - DNA, 55 bp, Artificial; identical to SEQ ID NO: 219531
  Synthetic oligonucleotide

SEQ ID NO: 625426 - DNA, 51 bp, Artificial; identical to SEQ ID NO: 171891
  Synthetic oligonucleotide

SEQ ID NO: 625427 - DNA, 53 bp, Artificial; identical to SEQ ID NO: 210834
  Synthetic oligonucleotide

SEQ ID NO: 625428 - DNA, 55 bp, Artificial; identical to SEQ ID NO: 211477
  Synthetic oligonucleotide

SEQ ID NO: 625429 - DNA, 55 bp, Artificial; identical to SEQ ID NO: 199158
  Synthetic oligonucleotide

SEQ ID NO: 625430 - DNA, 55 bp, Artificial; identical to SEQ ID NO: 202380
  Synthetic oligonucleotide

SEQ ID NO: 625431 - DNA, 54 bp, Artificial; identical to SEQ ID NO: 197063
  Synthetic oligonucleotide

SEQ ID NO: 625432 - DNA, 55 bp, Artificial; identical to SEQ ID NO: 154200
  Synthetic oligonucleotide

SEQ ID NO: 625433 - DNA, 53 bp, Artificial; identical to SEQ ID NO: 192063
  Synthetic oligonucleotide

SEQ ID NO: 625434 - DNA, 55 bp, Artificial; identical to SEQ ID NO: 249095
  Synthetic oligonucleotide

SEQ ID NO: 625435 - DNA, 55 bp, Artificial; identical to SEQ ID NO: 184242
  Synthetic oligonucleotide

SEQ ID NO: 625436 - DNA, 51 bp, Artificial; identical to SEQ ID NO: 186596
  Synthetic oligonucleotide

SEQ ID NO: 625437 - DNA, 53 bp, Artificial; identical to SEQ ID NO: 190678
  Synthetic oligonucleotide

SEQ ID NO: 625438 - DNA, 55 bp, Artificial; identical to SEQ ID NO: 257827
  Synthetic oligonucleotide

SEQ ID NO: 625439 - DNA, 55 bp, Artificial; identical to SEQ ID NO: 157047
  Synthetic oligonucleotide

SEQ ID NO: 625440 - DNA, 55 bp, Artificial; identical to SEQ ID NO: 257826
  Synthetic oligonucleotide

SEQ ID NO: 625441 - DNA, 54 bp, Artificial; identical to SEQ ID NO: 242869
  Synthetic oligonucleotide

SEQ ID NO: 625442 - DNA, 55 bp, Artificial; identical to SEQ ID NO: 199156
  Synthetic oligonucleotide

SEQ ID NO: 625443 - DNA, 55 bp, Artificial; identical to SEQ ID NO: 184353
  Synthetic oligonucleotide

SEQ ID NO: 625444 - DNA, 55 bp, Artificial; identical to SEQ ID NO: 194679
  Synthetic oligonucleotide

SEQ ID NO: 625445 - DNA, 54 bp, Artificial; identical to SEQ ID NO: 260021
  Synthetic oligonucleotide

SEQ ID NO: 625446 - DNA, 55 bp, Artificial; identical to SEQ ID NO: 222676
  Synthetic oligonucleotide

SEQ ID NO: 625447 - DNA, 54 bp, Artificial; identical to SEQ ID NO: 233611
  Synthetic oligonucleotide

SEQ ID NO: 625448 - DNA, 57 bp, Artificial; identical to SEQ ID NO: 239364
  Synthetic oligonucleotide

SEQ ID NO: 625449 - DNA, 55 bp, Artificial; identical to SEQ ID NO: 245476
  Synthetic oligonucleotide

SEQ ID NO: 625450 - DNA, 56 bp, Artificial; identical to SEQ ID NO: 238893
  Synthetic oligonucleotide

SEQ ID NO: 625451 - DNA, 55 bp, Artificial; identical to SEQ ID NO: 168361
  Synthetic oligonucleotide

SEQ ID NO: 625452 - DNA, 55 bp, Artificial; identical to SEQ ID NO: 211478
  Synthetic oligonucleotide

SEQ ID NO: 625453 - DNA, 55 bp, Artificial; identical to SEQ ID NO: 153509
  Synthetic oligonucleotide

SEQ ID NO: 625454 - DNA, 54 bp, Artificial; identical to SEQ ID NO: 255277
  Synthetic oligonucleotide

SEQ ID NO: 625455 - DNA, 52 bp, Artificial; identical to SEQ ID NO: 168996
  Synthetic oligonucleotide

SEQ ID NO: 625456 - DNA, 53 bp, Artificial; identical to SEQ ID NO: 189110
  Synthetic oligonucleotide

SEQ ID NO: 625457 - DNA, 55 bp, Artificial; identical to SEQ ID NO: 209497
  Synthetic oligonucleotide

SEQ ID NO: 625458 - DNA, 55 bp, Artificial; identical to SEQ ID NO: 202379
  Synthetic oligonucleotide

SEQ ID NO: 625459 - DNA, 55 bp, Artificial; identical to SEQ ID NO: 254784
  Synthetic oligonucleotide

SEQ ID NO: 625460 - DNA, 60 bp, Artificial; identical to SEQ ID NO: 238882
  Synthetic oligonucleotide

SEQ ID NO: 625461 - DNA, 51 bp, Artificial; identical to SEQ ID NO: 186590
  Synthetic oligonucleotide

SEQ ID NO: 625462 - DNA, 55 bp, Artificial; identical to SEQ ID NO: 238049
  Synthetic oligonucleotide

SEQ ID NO: 625463 - DNA, 59 bp, Artificial; identical to SEQ ID NO: 192078
  Synthetic oligonucleotide

SEQ ID NO: 625464 - DNA, 55 bp, Artificial; identical to SEQ ID NO: 199155
  Synthetic oligonucleotide

SEQ ID NO: 625465 - DNA, 55 bp, Artificial; identical to SEQ ID NO: 218784
  Synthetic oligonucleotide

SEQ ID NO: 625466 - DNA, 55 bp, Artificial; identical to SEQ ID NO: 247399
  Synthetic oligonucleotide

SEQ ID NO: 625467 - DNA, 52 bp, Artificial; identical to SEQ ID NO: 190494
  Synthetic oligonucleotide

SEQ ID NO: 625468 - DNA, 50 bp, Artificial; identical to SEQ ID NO: 216983
  Synthetic oligonucleotide

SEQ ID NO: 625469 - DNA, 55 bp, Artificial; identical to SEQ ID NO: 148525
  Synthetic oligonucleotide

SEQ ID NO: 625470 - DNA, 59 bp, Artificial; identical to SEQ ID NO: 202672
  Synthetic oligonucleotide

SEQ ID NO: 625471 - DNA, 55 bp, Artificial; identical to SEQ ID NO: 169889
  Synthetic oligonucleotide

SEQ ID NO: 625472 - DNA, 56 bp, Artificial; identical to SEQ ID NO: 197894
  Synthetic oligonucleotide

SEQ ID NO: 625473 - DNA, 55 bp, Artificial; identical to SEQ ID NO: 184305
  Synthetic oligonucleotide

SEQ ID NO: 625474 - DNA, 55 bp, Artificial; identical to SEQ ID NO: 144902
  Synthetic oligonucleotide

SEQ ID NO: 625475 - DNA, 55 bp, Artificial; identical to SEQ ID NO: 221177
  Synthetic oligonucleotide

SEQ ID NO: 625476 - DNA, 55 bp, Artificial; identical to SEQ ID NO: 225018
  Synthetic oligonucleotide

SEQ ID NO: 625477 - DNA, 53 bp, Artificial; identical to SEQ ID NO: 193253
  Synthetic oligonucleotide

SEQ ID NO: 625478 - DNA, 55 bp, Artificial; identical to SEQ ID NO: 234177
  Synthetic oligonucleotide

SEQ ID NO: 625479 - DNA, 50 bp, Artificial; identical to SEQ ID NO: 209804
  Synthetic oligonucleotide

SEQ ID NO: 625480 - DNA, 54 bp, Artificial; identical to SEQ ID NO: 174801
  Synthetic oligonucleotide

SEQ ID NO: 625481 - DNA, 54 bp, Artificial; identical to SEQ ID NO: 201352
  Synthetic oligonucleotide

SEQ ID NO: 625482 - DNA, 55 bp, Artificial; identical to SEQ ID NO: 199154
  Synthetic oligonucleotide

SEQ ID NO: 625483 - DNA, 55 bp, Artificial; identical to SEQ ID NO: 208117
  Synthetic oligonucleotide

SEQ ID NO: 625484 - DNA, 53 bp, Artificial; identical to SEQ ID NO: 252953
  Synthetic oligonucleotide

SEQ ID NO: 625485 - DNA, 55 bp, Artificial; identical to SEQ ID NO: 217853
  Synthetic oligonucleotide

SEQ ID NO: 625486 - DNA, 54 bp, Artificial; identical to SEQ ID NO: 168850
  Synthetic oligonucleotide

SEQ ID NO: 625487 - DNA, 55 bp, Artificial; identical to SEQ ID NO: 249098
  Synthetic oligonucleotide

SEQ ID NO: 625488 - DNA, 55 bp, Artificial; identical to SEQ ID NO: 157048
  Synthetic oligonucleotide

SEQ ID NO: 625489 - DNA, 55 bp, Artificial; identical to SEQ ID NO: 148523
  Synthetic oligonucleotide

SEQ ID NO: 625490 - DNA, 55 bp, Artificial; identical to SEQ ID NO: 187684
  Synthetic oligonucleotide

SEQ ID NO: 625491 - DNA, 55 bp, Artificial; identical to SEQ ID NO: 220573
  Synthetic oligonucleotide

SEQ ID NO: 625492 - DNA, 55 bp, Artificial; identical to SEQ ID NO: 148522
  Synthetic oligonucleotide

SEQ ID NO: 625493 - DNA, 53 bp, Artificial; identical to SEQ ID NO: 142495
  Synthetic oligonucleotide

SEQ ID NO: 625494 - DNA, 54 bp, Artificial; identical to SEQ ID NO: 212878
  Synthetic oligonucleotide

SEQ ID NO: 625495 - DNA, 55 bp, Artificial; identical to SEQ ID NO: 242870
  Synthetic oligonucleotide

SEQ ID NO: 625496 - DNA, 55 bp, Artificial; identical to SEQ ID NO: 184309
  Synthetic oligonucleotide

SEQ ID NO: 625497 - DNA, 55 bp, Artificial; identical to SEQ ID NO: 245413
  Synthetic oligonucleotide

SEQ ID NO: 625498 - DNA, 54 bp, Artificial; identical to SEQ ID NO: 246212
  Synthetic oligonucleotide

SEQ ID NO: 625499 - DNA, 55 bp, Artificial; identical to SEQ ID NO: 148521
  Synthetic oligonucleotide

SEQ ID NO: 625500 - DNA, 55 bp, Artificial; identical to SEQ ID NO: 257824
  Synthetic oligonucleotide

SEQ ID NO: 625501 - DNA, 55 bp, Artificial; identical to SEQ ID NO: 157102
  Synthetic oligonucleotide

SEQ ID NO: 625502 - DNA, 55 bp, Artificial; identical to SEQ ID NO: 225020
  Synthetic oligonucleotide

SEQ ID NO: 625503 - DNA, 54 bp, Artificial; identical to SEQ ID NO: 221683
  Synthetic oligonucleotide

SEQ ID NO: 625504 - DNA, 52 bp, Artificial; identical to SEQ ID NO: 213021
  Synthetic oligonucleotide

SEQ ID NO: 625505 - DNA, 55 bp, Artificial; identical to SEQ ID NO: 151310
  Synthetic oligonucleotide

SEQ ID NO: 625506 - DNA, 55 bp, Artificial; identical to SEQ ID NO: 154199
  Synthetic oligonucleotide

SEQ ID NO: 625507 - DNA, 55 bp, Artificial; identical to SEQ ID NO: 142447
  Synthetic oligonucleotide

SEQ ID NO: 625508 - DNA, 55 bp, Artificial; identical to SEQ ID NO: 153508
  Synthetic oligonucleotide

SEQ ID NO: 625509 - DNA, 56 bp, Artificial; identical to SEQ ID NO: 207721
  Synthetic oligonucleotide

SEQ ID NO: 625510 - DNA, 55 bp, Artificial; identical to SEQ ID NO: 164691
  Synthetic oligonucleotide

SEQ ID NO: 625511 - DNA, 55 bp, Artificial; identical to SEQ ID NO: 164690
  Synthetic oligonucleotide

SEQ ID NO: 625512 - DNA, 55 bp, Artificial; identical to SEQ ID NO: 211475
  Synthetic oligonucleotide

SEQ ID NO: 625513 - DNA, 57 bp, Artificial; identical to SEQ ID NO: 217282
  Synthetic oligonucleotide

SEQ ID NO: 625514 - DNA, 55 bp, Artificial; identical to SEQ ID NO: 238050
  Synthetic oligonucleotide

SEQ ID NO: 625515 - DNA, 51 bp, Artificial; identical to SEQ ID NO: 157107
  Synthetic oligonucleotide

SEQ ID NO: 625516 - DNA, 54 bp, Artificial; identical to SEQ ID NO: 157108
  Synthetic oligonucleotide

SEQ ID NO: 625517 - DNA, 55 bp, Artificial; identical to SEQ ID NO: 164692
  Synthetic oligonucleotide

SEQ ID NO: 625518 - DNA, 53 bp, Artificial; identical to SEQ ID NO: 222872
  Synthetic oligonucleotide

SEQ ID NO: 625519 - DNA, 55 bp, Artificial; identical to SEQ ID NO: 157112
  Synthetic oligonucleotide

SEQ ID NO: 625520 - DNA, 55 bp, Artificial; identical to SEQ ID NO: 203843
  Synthetic oligonucleotide

SEQ ID NO: 625521 - DNA, 55 bp, Artificial; identical to SEQ ID NO: 249100
  Synthetic oligonucleotide

SEQ ID NO: 625522 - DNA, 60 bp, Artificial; identical to SEQ ID NO: 247432
  Synthetic oligonucleotide

SEQ ID NO: 625523 - DNA, 53 bp, Artificial; identical to SEQ ID NO: 240232
  Synthetic oligonucleotide

SEQ ID NO: 625524 - DNA, 53 bp, Artificial; identical to SEQ ID NO: 155386
  Synthetic oligonucleotide

SEQ ID NO: 625525 - DNA, 54 bp, Artificial; identical to SEQ ID NO: 154198
  Synthetic oligonucleotide

SEQ ID NO: 625526 - DNA, 55 bp, Artificial; identical to SEQ ID NO: 164665
  Synthetic oligonucleotide

SEQ ID NO: 625527 - DNA, 55 bp, Artificial; identical to SEQ ID NO: 197105
  Synthetic oligonucleotide

SEQ ID NO: 625528 - DNA, 55 bp, Artificial; identical to SEQ ID NO: 184314
  Synthetic oligonucleotide

SEQ ID NO: 625529 - DNA, 55 bp, Artificial; identical to SEQ ID NO: 254819
  Synthetic oligonucleotide

SEQ ID NO: 625530 - DNA, 55 bp, Artificial; identical to SEQ ID NO: 208104
  Synthetic oligonucleotide

SEQ ID NO: 625531 - DNA, 55 bp, Artificial; identical to SEQ ID NO: 199153
  Synthetic oligonucleotide

SEQ ID NO: 625532 - DNA, 50 bp, Artificial; identical to SEQ ID NO: 257171
  Synthetic oligonucleotide

SEQ ID NO: 625533 - DNA, 55 bp, Artificial; identical to SEQ ID NO: 257822
  Synthetic oligonucleotide

SEQ ID NO: 625534 - DNA, 55 bp, Artificial; identical to SEQ ID NO: 202919
  Synthetic oligonucleotide

SEQ ID NO: 625535 - DNA, 55 bp, Artificial; identical to SEQ ID NO: 184297
  Synthetic oligonucleotide

SEQ ID NO: 625536 - DNA, 56 bp, Artificial; identical to SEQ ID NO: 155766
  Synthetic oligonucleotide

SEQ ID NO: 625537 - DNA, 52 bp, Artificial; identical to SEQ ID NO: 248454
  Synthetic oligonucleotide

SEQ ID NO: 625538 - DNA, 50 bp, Artificial; identical to SEQ ID NO: 262726
  Synthetic oligonucleotide

SEQ ID NO: 625539 - DNA, 53 bp, Artificial; identical to SEQ ID NO: 237030
  Synthetic oligonucleotide

SEQ ID NO: 625540 - DNA, 55 bp, Artificial; identical to SEQ ID NO: 174515
  Synthetic oligonucleotide

SEQ ID NO: 625541 - DNA, 52 bp, Artificial; identical to SEQ ID NO: 174268
  Synthetic oligonucleotide

SEQ ID NO: 625542 - DNA, 55 bp, Artificial; identical to SEQ ID NO: 203840
  Synthetic oligonucleotide

SEQ ID NO: 625543 - DNA, 55 bp, Artificial; identical to SEQ ID NO: 142449
  Synthetic oligonucleotide

SEQ ID NO: 625544 - DNA, 54 bp, Artificial; identical to SEQ ID NO: 147332
  Synthetic oligonucleotide

SEQ ID NO: 625545 - DNA, 57 bp, Artificial; identical to SEQ ID NO: 199859
  Synthetic oligonucleotide

SEQ ID NO: 625546 - DNA, 55 bp, Artificial; identical to SEQ ID NO: 171135
  Synthetic oligonucleotide

SEQ ID NO: 625547 - DNA, 55 bp, Artificial; identical to SEQ ID NO: 184340
  Synthetic oligonucleotide

SEQ ID NO: 625548 - DNA, 55 bp, Artificial; identical to SEQ ID NO: 153507
  Synthetic oligonucleotide

SEQ ID NO: 625549 - DNA, 60 bp, Artificial; identical to SEQ ID NO: 256378
  Synthetic oligonucleotide

SEQ ID NO: 625550 - DNA, 50 bp, Artificial; identical to SEQ ID NO: 150051
  Synthetic oligonucleotide

SEQ ID NO: 625551 - DNA, 55 bp, Artificial; identical to SEQ ID NO: 166975
  Synthetic oligonucleotide

SEQ ID NO: 625552 - DNA, 51 bp, Artificial; identical to SEQ ID NO: 157760
  Synthetic oligonucleotide

SEQ ID NO: 625553 - DNA, 55 bp, Artificial; identical to SEQ ID NO: 197106
  Synthetic oligonucleotide

SEQ ID NO: 625554 - DNA, 55 bp, Artificial; identical to SEQ ID NO: 262799
  Synthetic oligonucleotide

SEQ ID NO: 625555 - DNA, 53 bp, Artificial; identical to SEQ ID NO: 148517
  Synthetic oligonucleotide

SEQ ID NO: 625556 - DNA, 55 bp, Artificial; identical to SEQ ID NO: 174514
  Synthetic oligonucleotide

SEQ ID NO: 625557 - DNA, 55 bp, Artificial; identical to SEQ ID NO: 164666
  Synthetic oligonucleotide

SEQ ID NO: 625558 - DNA, 55 bp, Artificial; identical to SEQ ID NO: 225048
  Synthetic oligonucleotide

SEQ ID NO: 625559 - DNA, 51 bp, Artificial; identical to SEQ ID NO: 184342
  Synthetic oligonucleotide

SEQ ID NO: 625560 - DNA, 60 bp, Artificial; identical to SEQ ID NO: 225158
  Synthetic oligonucleotide

SEQ ID NO: 625561 - DNA, 55 bp, Artificial; identical to SEQ ID NO: 194682
  Synthetic oligonucleotide

SEQ ID NO: 625562 - DNA, 59 bp, Artificial; identical to SEQ ID NO: 238871
  Synthetic oligonucleotide

SEQ ID NO: 625563 - DNA, 54 bp, Artificial; identical to SEQ ID NO: 217856
  Synthetic oligonucleotide

SEQ ID NO: 625564 - DNA, 55 bp, Artificial; identical to SEQ ID NO: 162150
  Synthetic oligonucleotide

SEQ ID NO: 625565 - DNA, 55 bp, Artificial; identical to SEQ ID NO: 164670
  Synthetic oligonucleotide

SEQ ID NO: 625566 - DNA, 55 bp, Artificial; identical to SEQ ID NO: 152397
  Synthetic oligonucleotide

SEQ ID NO: 625567 - DNA, 55 bp, Artificial; identical to SEQ ID NO: 164672
  Synthetic oligonucleotide

SEQ ID NO: 625568 - DNA, 55 bp, Artificial; identical to SEQ ID NO: 234173
  Synthetic oligonucleotide

SEQ ID NO: 625569 - DNA, 54 bp, Artificial; identical to SEQ ID NO: 245407
  Synthetic oligonucleotide

SEQ ID NO: 625570 - DNA, 50 bp, Artificial; identical to SEQ ID NO: 189844
  Synthetic oligonucleotide

SEQ ID NO: 625571 - DNA, 55 bp, Artificial; identical to SEQ ID NO: 233609
  Synthetic oligonucleotide

SEQ ID NO: 625572 - DNA, 55 bp, Artificial; identical to SEQ ID NO: 169872
  Synthetic oligonucleotide

SEQ ID NO: 625573 - DNA, 55 bp, Artificial; identical to SEQ ID NO: 242871
  Synthetic oligonucleotide

SEQ ID NO: 625574 - DNA, 55 bp, Artificial; identical to SEQ ID NO: 220572
  Synthetic oligonucleotide

SEQ ID NO: 625575 - DNA, 56 bp, Artificial; identical to SEQ ID NO: 233779
  Synthetic oligonucleotide

SEQ ID NO: 625576 - DNA, 55 bp, Artificial; identical to SEQ ID NO: 174422
  Synthetic oligonucleotide

SEQ ID NO: 625577 - DNA, 55 bp, Artificial; identical to SEQ ID NO: 225021
  Synthetic oligonucleotide

SEQ ID NO: 625578 - DNA, 53 bp, Artificial; identical to SEQ ID NO: 196167
  Synthetic oligonucleotide

SEQ ID NO: 625579 - DNA, 52 bp, Artificial; identical to SEQ ID NO: 246416
  Synthetic oligonucleotide

SEQ ID NO: 625580 - DNA, 58 bp, Artificial; identical to SEQ ID NO: 199848
  Synthetic oligonucleotide

SEQ ID NO: 625581 - DNA, 59 bp, Artificial; identical to SEQ ID NO: 266276
  Synthetic oligonucleotide

SEQ ID NO: 625582 - DNA, 55 bp, Artificial; identical to SEQ ID NO: 240222
  Synthetic oligonucleotide

SEQ ID NO: 625583 - DNA, 58 bp, Artificial; identical to SEQ ID NO: 164944
  Synthetic oligonucleotide

SEQ ID NO: 625584 - DNA, 55 bp, Artificial; identical to SEQ ID NO: 240218
  Synthetic oligonucleotide

SEQ ID NO: 625585 - DNA, 54 bp, Artificial; identical to SEQ ID NO: 199642
  Synthetic oligonucleotide

SEQ ID NO: 625586 - DNA, 55 bp, Artificial; identical to SEQ ID NO: 190497
  Synthetic oligonucleotide

SEQ ID NO: 625587 - DNA, 55 bp, Artificial; identical to SEQ ID NO: 184343
  Synthetic oligonucleotide

SEQ ID NO: 625588 - DNA, 59 bp, Artificial; identical to SEQ ID NO: 211502
  Synthetic oligonucleotide

SEQ ID NO: 625589 - DNA, 55 bp, Artificial; identical to SEQ ID NO: 171138
  Synthetic oligonucleotide

SEQ ID NO: 625590 - DNA, 55 bp, Artificial; identical to SEQ ID NO: 164675
  Synthetic oligonucleotide

SEQ ID NO: 625591 - DNA, 55 bp, Artificial; identical to SEQ ID NO: 217858
  Synthetic oligonucleotide

SEQ ID NO: 625592 - DNA, 55 bp, Artificial; identical to SEQ ID NO: 188338
  Synthetic oligonucleotide

SEQ ID NO: 625593 - DNA, 55 bp, Artificial; identical to SEQ ID NO: 146325
  Synthetic oligonucleotide

SEQ ID NO: 625594 - DNA, 55 bp, Artificial; identical to SEQ ID NO: 254814
  Synthetic oligonucleotide

SEQ ID NO: 625595 - DNA, 55 bp, Artificial; identical to SEQ ID NO: 201294
  Synthetic oligonucleotide

SEQ ID NO: 625596 - DNA, 51 bp, Artificial; identical to SEQ ID NO: 186621
  Synthetic oligonucleotide

SEQ ID NO: 625597 - DNA, 54 bp, Artificial; identical to SEQ ID NO: 238054
  Synthetic oligonucleotide

SEQ ID NO: 625598 - DNA, 55 bp, Artificial; identical to SEQ ID NO: 218762
  Synthetic oligonucleotide

SEQ ID NO: 625599 - DNA, 55 bp, Artificial; identical to SEQ ID NO: 242872
  Synthetic oligonucleotide

SEQ ID NO: 625600 - DNA, 55 bp, Artificial; identical to SEQ ID NO: 148678
  Synthetic oligonucleotide

SEQ ID NO: 625601 - DNA, 53 bp, Artificial; identical to SEQ ID NO: 184348
  Synthetic oligonucleotide

SEQ ID NO: 625602 - DNA, 55 bp, Artificial; identical to SEQ ID NO: 184350
  Synthetic oligonucleotide

SEQ ID NO: 625603 - DNA, 55 bp, Artificial; identical to SEQ ID NO: 184351
  Synthetic oligonucleotide

SEQ ID NO: 625604 - DNA, 55 bp, Artificial; identical to SEQ ID NO: 184352
  Synthetic oligonucleotide

SEQ ID NO: 625605 - DNA, 50 bp, Artificial; identical to SEQ ID NO: 243431
  Synthetic oligonucleotide

SEQ ID NO: 625606 - DNA, 55 bp, Artificial; identical to SEQ ID NO: 240214
  Synthetic oligonucleotide

SEQ ID NO: 625607 - DNA, 55 bp, Artificial; identical to SEQ ID NO: 240212
  Synthetic oligonucleotide

SEQ ID NO: 625608 - DNA, 55 bp, Artificial; identical to SEQ ID NO: 148677
  Synthetic oligonucleotide

SEQ ID NO: 625609 - DNA, 55 bp, Artificial; identical to SEQ ID NO: 160354
  Synthetic oligonucleotide

SEQ ID NO: 625610 - DNA, 60 bp, Artificial; identical to SEQ ID NO: 265626
  Synthetic oligonucleotide

SEQ ID NO: 625611 - DNA, 55 bp, Artificial; identical to SEQ ID NO: 265635
  Synthetic oligonucleotide

SEQ ID NO: 625612 - DNA, 55 bp, Artificial; identical to SEQ ID NO: 164679
  Synthetic oligonucleotide

SEQ ID NO: 625613 - DNA, 55 bp, Artificial; identical to SEQ ID NO: 164682
  Synthetic oligonucleotide

SEQ ID NO: 625614 - DNA, 55 bp, Artificial; identical to SEQ ID NO: 171141
  Synthetic oligonucleotide

SEQ ID NO: 625615 - DNA, 56 bp, Artificial; identical to SEQ ID NO: 154046
  Synthetic oligonucleotide

SEQ ID NO: 625616 - DNA, 59 bp, Artificial; identical to SEQ ID NO: 206409
  Synthetic oligonucleotide

SEQ ID NO: 625617 - DNA, 53 bp, Artificial; identical to SEQ ID NO: 253272
  Synthetic oligonucleotide

SEQ ID NO: 625618 - DNA, 53 bp, Artificial; identical to SEQ ID NO: 141262
  Synthetic oligonucleotide

SEQ ID NO: 625619 - DNA, 60 bp, Artificial; identical to SEQ ID NO: 150694
  Synthetic oligonucleotide

SEQ ID NO: 625620 - DNA, 51 bp, Artificial; identical to SEQ ID NO: 186618
  Synthetic oligonucleotide

SEQ ID NO: 625621 - DNA, 53 bp, Artificial; identical to SEQ ID NO: 203838
  Synthetic oligonucleotide

SEQ ID NO: 625622 - DNA, 55 bp, Artificial; identical to SEQ ID NO: 238804
  Synthetic oligonucleotide

SEQ ID NO: 625623 - DNA, 54 bp, Artificial; identical to SEQ ID NO: 197438
  Synthetic oligonucleotide

SEQ ID NO: 625624 - DNA, 55 bp, Artificial; identical to SEQ ID NO: 199151
  Synthetic oligonucleotide

SEQ ID NO: 625625 - DNA, 54 bp, Artificial; identical to SEQ ID NO: 265699
  Synthetic oligonucleotide

SEQ ID NO: 625626 - DNA, 55 bp, Artificial; identical to SEQ ID NO: 189379
  Synthetic oligonucleotide

SEQ ID NO: 625627 - DNA, 50 bp, Artificial; identical to SEQ ID NO: 193904
  Synthetic oligonucleotide

SEQ ID NO: 625628 - DNA, 50 bp, Artificial; identical to SEQ ID NO: 209802
  Synthetic oligonucleotide

SEQ ID NO: 625629 - DNA, 55 bp, Artificial; identical to SEQ ID NO: 245399
  Synthetic oligonucleotide

SEQ ID NO: 625630 - DNA, 55 bp, Artificial; identical to SEQ ID NO: 216403
  Synthetic oligonucleotide

SEQ ID NO: 625631 - DNA, 55 bp, Artificial; identical to SEQ ID NO: 166976
  Synthetic oligonucleotide

SEQ ID NO: 625632 - DNA, 54 bp, Artificial; identical to SEQ ID NO: 217859
  Synthetic oligonucleotide

SEQ ID NO: 625633 - DNA, 55 bp, Artificial; identical to SEQ ID NO: 197110
  Synthetic oligonucleotide

SEQ ID NO: 625634 - DNA, 59 bp, Artificial; identical to SEQ ID NO: 159720
  Synthetic oligonucleotide

SEQ ID NO: 625635 - DNA, 55 bp, Artificial; identical to SEQ ID NO: 234226
  Synthetic oligonucleotide

SEQ ID NO: 625636 - DNA, 55 bp, Artificial; identical to SEQ ID NO: 209440
  Synthetic oligonucleotide

SEQ ID NO: 625637 - DNA, 55 bp, Artificial; identical to SEQ ID NO: 164683
  Synthetic oligonucleotide

SEQ ID NO: 625638 - DNA, 52 bp, Artificial; identical to SEQ ID NO: 209697
  Synthetic oligonucleotide

SEQ ID NO: 625639 - DNA, 54 bp, Artificial; identical to SEQ ID NO: 234422
  Synthetic oligonucleotide

SEQ ID NO: 625640 - DNA, 55 bp, Artificial; identical to SEQ ID NO: 168364
  Synthetic oligonucleotide

SEQ ID NO: 625641 - DNA, 55 bp, Artificial; identical to SEQ ID NO: 157096
  Synthetic oligonucleotide

SEQ ID NO: 625642 - DNA, 52 bp, Artificial; identical to SEQ ID NO: 149554
  Synthetic oligonucleotide

SEQ ID NO: 625643 - DNA, 55 bp, Artificial; identical to SEQ ID NO: 148670
  Synthetic oligonucleotide

SEQ ID NO: 625644 - DNA, 52 bp, Artificial; identical to SEQ ID NO: 266751
  Synthetic oligonucleotide

SEQ ID NO: 625645 - DNA, 55 bp, Artificial; identical to SEQ ID NO: 212883
  Synthetic oligonucleotide

SEQ ID NO: 625646 - DNA, 51 bp, Artificial; identical to SEQ ID NO: 157093
  Synthetic oligonucleotide

SEQ ID NO: 625647 - DNA, 50 bp, Artificial; identical to SEQ ID NO: 161135
  Synthetic oligonucleotide

SEQ ID NO: 625648 - DNA, 55 bp, Artificial; identical to SEQ ID NO: 157085
  Synthetic oligonucleotide

SEQ ID NO: 625649 - DNA, 59 bp, Artificial; identical to SEQ ID NO: 194141
  Synthetic oligonucleotide

SEQ ID NO: 625650 - DNA, 55 bp, Artificial; identical to SEQ ID NO: 157080
  Synthetic oligonucleotide

SEQ ID NO: 625651 - DNA, 56 bp, Artificial; identical to SEQ ID NO: 248450
  Synthetic oligonucleotide

SEQ ID NO: 625652 - DNA, 54 bp, Artificial; identical to SEQ ID NO: 207545
  Synthetic oligonucleotide

SEQ ID NO: 625653 - DNA, 55 bp, Artificial; identical to SEQ ID NO: 148669
  Synthetic oligonucleotide

SEQ ID NO: 625654 - DNA, 55 bp, Artificial; identical to SEQ ID NO: 151915
  Synthetic oligonucleotide

SEQ ID NO: 625655 - DNA, 55 bp, Artificial; identical to SEQ ID NO: 144125
  Synthetic oligonucleotide

SEQ ID NO: 625656 - DNA, 55 bp, Artificial; identical to SEQ ID NO: 148668
  Synthetic oligonucleotide

SEQ ID NO: 625657 - DNA, 54 bp, Artificial; identical to SEQ ID NO: 254812
  Synthetic oligonucleotide

SEQ ID NO: 625658 - DNA, 55 bp, Artificial; identical to SEQ ID NO: 245395
  Synthetic oligonucleotide

SEQ ID NO: 625659 - DNA, 57 bp, Artificial; identical to SEQ ID NO: 212512
  Synthetic oligonucleotide

SEQ ID NO: 625660 - DNA, 51 bp, Artificial; identical to SEQ ID NO: 200131
  Synthetic oligonucleotide

SEQ ID NO: 625661 - DNA, 55 bp, Artificial; identical to SEQ ID NO: 245394
  Synthetic oligonucleotide

SEQ ID NO: 625662 - DNA, 51 bp, Artificial; identical to SEQ ID NO: 193114
  Synthetic oligonucleotide

SEQ ID NO: 625663 - DNA, 55 bp, Artificial; identical to SEQ ID NO: 184324
  Synthetic oligonucleotide

SEQ ID NO: 625664 - DNA, 52 bp, Artificial; identical to SEQ ID NO: 168997
  Synthetic oligonucleotide

SEQ ID NO: 625665 - DNA, 52 bp, Artificial; identical to SEQ ID NO: 225025
  Synthetic oligonucleotide

SEQ ID NO: 625666 - DNA, 55 bp, Artificial; identical to SEQ ID NO: 249989
  Synthetic oligonucleotide

SEQ ID NO: 625667 - DNA, 55 bp, Artificial; identical to SEQ ID NO: 238107
  Synthetic oligonucleotide

SEQ ID NO: 625668 - DNA, 56 bp, Artificial; identical to SEQ ID NO: 225541
  Synthetic oligonucleotide

SEQ ID NO: 625669 - DNA, 59 bp, Artificial; identical to SEQ ID NO: 238782
  Synthetic oligonucleotide

SEQ ID NO: 625670 - DNA, 51 bp, Artificial; identical to SEQ ID NO: 152130
  Synthetic oligonucleotide

SEQ ID NO: 625671 - DNA, 53 bp, Artificial; identical to SEQ ID NO: 170081
  Synthetic oligonucleotide

SEQ ID NO: 625672 - DNA, 50 bp, Artificial; identical to SEQ ID NO: 209800
  Synthetic oligonucleotide

SEQ ID NO: 625673 - DNA, 52 bp, Artificial; identical to SEQ ID NO: 184323
  Synthetic oligonucleotide

SEQ ID NO: 625674 - DNA, 55 bp, Artificial; identical to SEQ ID NO: 153505
  Synthetic oligonucleotide

SEQ ID NO: 625675 - DNA, 54 bp, Artificial; identical to SEQ ID NO: 153578
  Synthetic oligonucleotide

SEQ ID NO: 625676 - DNA, 52 bp, Artificial; identical to SEQ ID NO: 221735
  Synthetic oligonucleotide

SEQ ID NO: 625677 - DNA, 55 bp, Artificial; identical to SEQ ID NO: 184252
  Synthetic oligonucleotide

SEQ ID NO: 625678 - DNA, 52 bp, Artificial; identical to SEQ ID NO: 190502
  Synthetic oligonucleotide

SEQ ID NO: 625679 - DNA, 51 bp, Artificial; identical to SEQ ID NO: 233873
  Synthetic oligonucleotide

SEQ ID NO: 625680 - DNA, 55 bp, Artificial; identical to SEQ ID NO: 249633
  Synthetic oligonucleotide

SEQ ID NO: 625681 - DNA, 55 bp, Artificial; identical to SEQ ID NO: 234224
  Synthetic oligonucleotide

SEQ ID NO: 625682 - DNA, 55 bp, Artificial; identical to SEQ ID NO: 152396
  Synthetic oligonucleotide

SEQ ID NO: 625683 - DNA, 53 bp, Artificial; identical to SEQ ID NO: 211491
  Synthetic oligonucleotide

SEQ ID NO: 625684 - DNA, 55 bp, Artificial; identical to SEQ ID NO: 207547
  Synthetic oligonucleotide

SEQ ID NO: 625685 - DNA, 53 bp, Artificial; identical to SEQ ID NO: 189512
  Synthetic oligonucleotide

SEQ ID NO: 625686 - DNA, 51 bp, Artificial; identical to SEQ ID NO: 186599
  Synthetic oligonucleotide

SEQ ID NO: 625687 - DNA, 60 bp, Artificial; identical to SEQ ID NO: 248447
  Synthetic oligonucleotide

SEQ ID NO: 625688 - DNA, 52 bp, Artificial; identical to SEQ ID NO: 165097
  Synthetic oligonucleotide

SEQ ID NO: 625689 - DNA, 60 bp, Artificial; identical to SEQ ID NO: 247476
  Synthetic oligonucleotide

SEQ ID NO: 625690 - DNA, 53 bp, Artificial; identical to SEQ ID NO: 193596
  Synthetic oligonucleotide

SEQ ID NO: 625691 - DNA, 52 bp, Artificial; identical to SEQ ID NO: 171683
  Synthetic oligonucleotide

SEQ ID NO: 625692 - DNA, 51 bp, Artificial; identical to SEQ ID NO: 186597
  Synthetic oligonucleotide

SEQ ID NO: 625693 - DNA, 51 bp, Artificial; identical to SEQ ID NO: 246680
  Synthetic oligonucleotide

SEQ ID NO: 625694 - DNA, 55 bp, Artificial; identical to SEQ ID NO: 249145
  Synthetic oligonucleotide

SEQ ID NO: 625695 - DNA, 51 bp, Artificial; identical to SEQ ID NO: 192166
  Synthetic oligonucleotide

SEQ ID NO: 625696 - DNA, 55 bp, Artificial; identical to SEQ ID NO: 194723
  Synthetic oligonucleotide

SEQ ID NO: 625697 - DNA, 55 bp, Artificial; identical to SEQ ID NO: 245392
  Synthetic oligonucleotide

SEQ ID NO: 625698 - DNA, 50 bp, Artificial; identical to SEQ ID NO: 193910
  Synthetic oligonucleotide

SEQ ID NO: 625699 - DNA, 53 bp, Artificial; identical to SEQ ID NO: 242442
  Synthetic oligonucleotide

SEQ ID NO: 625700 - DNA, 56 bp, Artificial; identical to SEQ ID NO: 150691
  Synthetic oligonucleotide

SEQ ID NO: 625701 - DNA, 53 bp, Artificial; identical to SEQ ID NO: 219475
  Synthetic oligonucleotide

SEQ ID NO: 625702 - DNA, 50 bp, Artificial; identical to SEQ ID NO: 176325
  Synthetic oligonucleotide

SEQ ID NO: 625703 - DNA, 57 bp, Artificial; identical to SEQ ID NO: 205217
  Synthetic oligonucleotide

SEQ ID NO: 625704 - DNA, 51 bp, Artificial; identical to SEQ ID NO: 237888
  Synthetic oligonucleotide

SEQ ID NO: 625705 - DNA, 58 bp, Artificial; identical to SEQ ID NO: 177097
  Synthetic oligonucleotide

SEQ ID NO: 625706 - DNA, 50 bp, Artificial; identical to SEQ ID NO: 166455
  Synthetic oligonucleotide

SEQ ID NO: 625707 - DNA, 53 bp, Artificial; identical to SEQ ID NO: 184244
  Synthetic oligonucleotide

SEQ ID NO: 625708 - DNA, 52 bp, Artificial; identical to SEQ ID NO: 216771
  Synthetic oligonucleotide

SEQ ID NO: 625709 - DNA, 53 bp, Artificial; identical to SEQ ID NO: 216572
  Synthetic oligonucleotide

SEQ ID NO: 625710 - DNA, 55 bp, Artificial; identical to SEQ ID NO: 184241
  Synthetic oligonucleotide

SEQ ID NO: 625711 - DNA, 56 bp, Artificial; identical to SEQ ID NO: 252998
  Synthetic oligonucleotide

SEQ ID NO: 625712 - DNA, 52 bp, Artificial; identical to SEQ ID NO: 161134
  Synthetic oligonucleotide

SEQ ID NO: 625713 - DNA, 51 bp, Artificial; identical to SEQ ID NO: 157101
  Synthetic oligonucleotide

SEQ ID NO: 625714 - DNA, 55 bp, Artificial; identical to SEQ ID NO: 148663
  Synthetic oligonucleotide

SEQ ID NO: 625715 - DNA, 55 bp, Artificial; identical to SEQ ID NO: 238749
  Synthetic oligonucleotide

SEQ ID NO: 625716 - DNA, 55 bp, Artificial; identical to SEQ ID NO: 169874
  Synthetic oligonucleotide

SEQ ID NO: 625717 - DNA, 54 bp, Artificial; identical to SEQ ID NO: 169997
  Synthetic oligonucleotide

SEQ ID NO: 625718 - DNA, 53 bp, Artificial; identical to SEQ ID NO: 262667
  Synthetic oligonucleotide

SEQ ID NO: 625719 - DNA, 55 bp, Artificial; identical to SEQ ID NO: 208098
  Synthetic oligonucleotide

SEQ ID NO: 625720 - DNA, 52 bp, Artificial; identical to SEQ ID NO: 155494
  Synthetic oligonucleotide

SEQ ID NO: 625721 - DNA, 55 bp, Artificial; identical to SEQ ID NO: 208095
  Synthetic oligonucleotide

SEQ ID NO: 625722 - DNA, 57 bp, Artificial; identical to SEQ ID NO: 177093
  Synthetic oligonucleotide

SEQ ID NO: 625723 - DNA, 55 bp, Artificial; identical to SEQ ID NO: 194724
  Synthetic oligonucleotide

SEQ ID NO: 625724 - DNA, 55 bp, Artificial; identical to SEQ ID NO: 148659
  Synthetic oligonucleotide

SEQ ID NO: 625725 - DNA, 55 bp, Artificial; identical to SEQ ID NO: 146327
  Synthetic oligonucleotide

SEQ ID NO: 625726 - DNA, 55 bp, Artificial; identical to SEQ ID NO: 245391
  Synthetic oligonucleotide

SEQ ID NO: 625727 - DNA, 55 bp, Artificial; identical to SEQ ID NO: 153503
  Synthetic oligonucleotide

SEQ ID NO: 625728 - DNA, 58 bp, Artificial; identical to SEQ ID NO: 168177
  Synthetic oligonucleotide

SEQ ID NO: 625729 - DNA, 55 bp, Artificial; identical to SEQ ID NO: 164680
  Synthetic oligonucleotide

SEQ ID NO: 625730 - DNA, 54 bp, Artificial; identical to SEQ ID NO: 185010
  Synthetic oligonucleotide

SEQ ID NO: 625731 - DNA, 55 bp, Artificial; identical to SEQ ID NO: 254809
  Synthetic oligonucleotide

SEQ ID NO: 625732 - DNA, 52 bp, Artificial; identical to SEQ ID NO: 149557
  Synthetic oligonucleotide

SEQ ID NO: 625733 - DNA, 55 bp, Artificial; identical to SEQ ID NO: 162149
  Synthetic oligonucleotide

SEQ ID NO: 625734 - DNA, 55 bp, Artificial; identical to SEQ ID NO: 199147
  Synthetic oligonucleotide

SEQ ID NO: 625735 - DNA, 54 bp, Artificial; identical to SEQ ID NO: 156922
  Synthetic oligonucleotide

SEQ ID NO: 625736 - DNA, 54 bp, Artificial; identical to SEQ ID NO: 245441
  Synthetic oligonucleotide

SEQ ID NO: 625737 - DNA, 55 bp, Artificial; identical to SEQ ID NO: 234222
  Synthetic oligonucleotide

SEQ ID NO: 625738 - DNA, 52 bp, Artificial; identical to SEQ ID NO: 185956
  Synthetic oligonucleotide

SEQ ID NO: 625739 - DNA, 55 bp, Artificial; identical to SEQ ID NO: 156923
  Synthetic oligonucleotide

SEQ ID NO: 625740 - DNA, 51 bp, Artificial; identical to SEQ ID NO: 237222
  Synthetic oligonucleotide

SEQ ID NO: 625741 - DNA, 54 bp, Artificial; identical to SEQ ID NO: 184947
  Synthetic oligonucleotide

SEQ ID NO: 625742 - DNA, 52 bp, Artificial; identical to SEQ ID NO: 197621
  Synthetic oligonucleotide

SEQ ID NO: 625743 - DNA, 55 bp, Artificial; identical to SEQ ID NO: 194728
  Synthetic oligonucleotide

SEQ ID NO: 625744 - DNA, 53 bp, Artificial; identical to SEQ ID NO: 222711
  Synthetic oligonucleotide

SEQ ID NO: 625745 - DNA, 54 bp, Artificial; identical to SEQ ID NO: 203866
  Synthetic oligonucleotide

SEQ ID NO: 625746 - DNA, 54 bp, Artificial; identical to SEQ ID NO: 248444
  Synthetic oligonucleotide

SEQ ID NO: 625747 - DNA, 56 bp, Artificial; identical to SEQ ID NO: 248634
  Synthetic oligonucleotide

SEQ ID NO: 625748 - DNA, 55 bp, Artificial; identical to SEQ ID NO: 144935
  Synthetic oligonucleotide

SEQ ID NO: 625749 - DNA, 55 bp, Artificial; identical to SEQ ID NO: 245440
  Synthetic oligonucleotide

SEQ ID NO: 625750 - DNA, 55 bp, Artificial; identical to SEQ ID NO: 175708
  Synthetic oligonucleotide

SEQ ID NO: 625751 - DNA, 50 bp, Artificial; identical to SEQ ID NO: 209306
  Synthetic oligonucleotide

SEQ ID NO: 625752 - DNA, 54 bp, Artificial; identical to SEQ ID NO: 222697
  Synthetic oligonucleotide

SEQ ID NO: 625753 - DNA, 53 bp, Artificial; identical to SEQ ID NO: 225045
  Synthetic oligonucleotide

SEQ ID NO: 625754 - DNA, 55 bp, Artificial; identical to SEQ ID NO: 184223
  Synthetic oligonucleotide

SEQ ID NO: 625755 - DNA, 55 bp, Artificial; identical to SEQ ID NO: 249984
  Synthetic oligonucleotide

SEQ ID NO: 625756 - DNA, 51 bp, Artificial; identical to SEQ ID NO: 248081
  Synthetic oligonucleotide

SEQ ID NO: 625757 - DNA, 55 bp, Artificial; identical to SEQ ID NO: 167880
  Synthetic oligonucleotide

SEQ ID NO: 625758 - DNA, 52 bp, Artificial; identical to SEQ ID NO: 237056
  Synthetic oligonucleotide

SEQ ID NO: 625759 - DNA, 54 bp, Artificial; identical to SEQ ID NO: 184221
  Synthetic oligonucleotide

SEQ ID NO: 625760 - DNA, 55 bp, Artificial; identical to SEQ ID NO: 184270
  Synthetic oligonucleotide

SEQ ID NO: 625761 - DNA, 55 bp, Artificial; identical to SEQ ID NO: 203842
  Synthetic oligonucleotide

SEQ ID NO: 625762 - DNA, 55 bp, Artificial; identical to SEQ ID NO: 254806
  Synthetic oligonucleotide

SEQ ID NO: 625763 - DNA, 55 bp, Artificial; identical to SEQ ID NO: 199145
  Synthetic oligonucleotide

SEQ ID NO: 625764 - DNA, 51 bp, Artificial; identical to SEQ ID NO: 208105
  Synthetic oligonucleotide

SEQ ID NO: 625765 - DNA, 55 bp, Artificial; identical to SEQ ID NO: 155495
  Synthetic oligonucleotide

SEQ ID NO: 625766 - DNA, 45 bp, Artificial; identical to SEQ ID NO: 169354
  Synthetic oligonucleotide

SEQ ID NO: 625767 - DNA, 53 bp, Artificial; identical to SEQ ID NO: 144522
  Synthetic oligonucleotide

SEQ ID NO: 625768 - DNA, 55 bp, Artificial; identical to SEQ ID NO: 249157
  Synthetic oligonucleotide

SEQ ID NO: 625769 - DNA, 55 bp, Artificial; identical to SEQ ID NO: 254805
  Synthetic oligonucleotide

SEQ ID NO: 625770 - DNA, 55 bp, Artificial; identical to SEQ ID NO: 245438
  Synthetic oligonucleotide

SEQ ID NO: 625771 - DNA, 50 bp, Artificial; identical to SEQ ID NO: 187136
  Synthetic oligonucleotide

SEQ ID NO: 625772 - DNA, 53 bp, Artificial; identical to SEQ ID NO: 254804
  Synthetic oligonucleotide

SEQ ID NO: 625773 - DNA, 54 bp, Artificial; identical to SEQ ID NO: 156925
  Synthetic oligonucleotide

SEQ ID NO: 625774 - DNA, 54 bp, Artificial; identical to SEQ ID NO: 194162
  Synthetic oligonucleotide

SEQ ID NO: 625775 - DNA, 55 bp, Artificial; identical to SEQ ID NO: 161133
  Synthetic oligonucleotide

SEQ ID NO: 625776 - DNA, 55 bp, Artificial; identical to SEQ ID NO: 249158
  Synthetic oligonucleotide

SEQ ID NO: 625777 - DNA, 52 bp, Artificial; identical to SEQ ID NO: 240201
  Synthetic oligonucleotide

SEQ ID NO: 625778 - DNA, 54 bp, Artificial; identical to SEQ ID NO: 257873
  Synthetic oligonucleotide

SEQ ID NO: 625779 - DNA, 54 bp, Artificial; identical to SEQ ID NO: 160395
  Synthetic oligonucleotide

SEQ ID NO: 625780 - DNA, 54 bp, Artificial; identical to SEQ ID NO: 144503
  Synthetic oligonucleotide

SEQ ID NO: 625781 - DNA, 55 bp, Artificial; identical to SEQ ID NO: 189377
  Synthetic oligonucleotide

SEQ ID NO: 625782 - DNA, 55 bp, Artificial; identical to SEQ ID NO: 247510
  Synthetic oligonucleotide

SEQ ID NO: 625783 - DNA, 54 bp, Artificial; identical to SEQ ID NO: 190176
  Synthetic oligonucleotide

SEQ ID NO: 625784 - DNA, 55 bp, Artificial; identical to SEQ ID NO: 148706
  Synthetic oligonucleotide

SEQ ID NO: 625785 - DNA, 55 bp, Artificial; identical to SEQ ID NO: 202375
  Synthetic oligonucleotide

SEQ ID NO: 625786 - DNA, 55 bp, Artificial; identical to SEQ ID NO: 245437
  Synthetic oligonucleotide

SEQ ID NO: 625787 - DNA, 55 bp, Artificial; identical to SEQ ID NO: 257872
  Synthetic oligonucleotide

SEQ ID NO: 625788 - DNA, 57 bp, Artificial; identical to SEQ ID NO: 234242
  Synthetic oligonucleotide

SEQ ID NO: 625789 - DNA, 55 bp, Artificial; identical to SEQ ID NO: 249160
  Synthetic oligonucleotide

SEQ ID NO: 625790 - DNA, 54 bp, Artificial; identical to SEQ ID NO: 221680
  Synthetic oligonucleotide

SEQ ID NO: 625791 - DNA, 55 bp, Artificial; identical to SEQ ID NO: 162183
  Synthetic oligonucleotide

SEQ ID NO: 625792 - DNA, 55 bp, Artificial; identical to SEQ ID NO: 222672
  Synthetic oligonucleotide

SEQ ID NO: 625793 - DNA, 52 bp, Artificial; identical to SEQ ID NO: 149559
  Synthetic oligonucleotide

SEQ ID NO: 625794 - DNA, 54 bp, Artificial; identical to SEQ ID NO: 161132
  Synthetic oligonucleotide

SEQ ID NO: 625795 - DNA, 55 bp, Artificial; identical to SEQ ID NO: 260171
  Synthetic oligonucleotide

SEQ ID NO: 625796 - DNA, 55 bp, Artificial; identical to SEQ ID NO: 245436
  Synthetic oligonucleotide

SEQ ID NO: 625797 - DNA, 52 bp, Artificial; identical to SEQ ID NO: 247970
  Synthetic oligonucleotide

SEQ ID NO: 625798 - DNA, 53 bp, Artificial; identical to SEQ ID NO: 220755
  Synthetic oligonucleotide

SEQ ID NO: 625799 - DNA, 50 bp, Artificial; identical to SEQ ID NO: 154985
  Synthetic oligonucleotide

SEQ ID NO: 625800 - DNA, 55 bp, Artificial; identical to SEQ ID NO: 221188
  Synthetic oligonucleotide

SEQ ID NO: 625801 - DNA, 55 bp, Artificial; identical to SEQ ID NO: 252714
  Synthetic oligonucleotide

SEQ ID NO: 625802 - DNA, 55 bp, Artificial; identical to SEQ ID NO: 245434
  Synthetic oligonucleotide

SEQ ID NO: 625803 - DNA, 52 bp, Artificial; identical to SEQ ID NO: 185991
  Synthetic oligonucleotide

SEQ ID NO: 625804 - DNA, 55 bp, Artificial; identical to SEQ ID NO: 254751
  Synthetic oligonucleotide

SEQ ID NO: 625805 - DNA, 54 bp, Artificial; identical to SEQ ID NO: 157264
  Synthetic oligonucleotide

SEQ ID NO: 625806 - DNA, 55 bp, Artificial; identical to SEQ ID NO: 211463
  Synthetic oligonucleotide

SEQ ID NO: 625807 - DNA, 55 bp, Artificial; identical to SEQ ID NO: 144072
  Synthetic oligonucleotide

SEQ ID NO: 625808 - DNA, 52 bp, Artificial; identical to SEQ ID NO: 154019
  Synthetic oligonucleotide

SEQ ID NO: 625809 - DNA, 53 bp, Artificial; identical to SEQ ID NO: 254750
  Synthetic oligonucleotide

SEQ ID NO: 625810 - DNA, 55 bp, Artificial; identical to SEQ ID NO: 197118
  Synthetic oligonucleotide

SEQ ID NO: 625811 - DNA, 55 bp, Artificial; identical to SEQ ID NO: 164568
  Synthetic oligonucleotide

SEQ ID NO: 625812 - DNA, 53 bp, Artificial; identical to SEQ ID NO: 189508
  Synthetic oligonucleotide

SEQ ID NO: 625813 - DNA, 54 bp, Artificial; identical to SEQ ID NO: 242875
  Synthetic oligonucleotide

SEQ ID NO: 625814 - DNA, 55 bp, Artificial; identical to SEQ ID NO: 225086
  Synthetic oligonucleotide

SEQ ID NO: 625815 - DNA, 50 bp, Artificial; identical to SEQ ID NO: 206680
  Synthetic oligonucleotide

SEQ ID NO: 625816 - DNA, 53 bp, Artificial; identical to SEQ ID NO: 247003
  Synthetic oligonucleotide

SEQ ID NO: 625817 - DNA, 52 bp, Artificial; identical to SEQ ID NO: 234219
  Synthetic oligonucleotide

SEQ ID NO: 625818 - DNA, 52 bp, Artificial; identical to SEQ ID NO: 174892
  Synthetic oligonucleotide

SEQ ID NO: 625819 - DNA, 54 bp, Artificial; identical to SEQ ID NO: 190510
  Synthetic oligonucleotide

SEQ ID NO: 625820 - DNA, 56 bp, Artificial; identical to SEQ ID NO: 216782
  Synthetic oligonucleotide

SEQ ID NO: 625821 - DNA, 55 bp, Artificial; identical to SEQ ID NO: 242818
  Synthetic oligonucleotide

SEQ ID NO: 625822 - DNA, 51 bp, Artificial; identical to SEQ ID NO: 206485
  Synthetic oligonucleotide

SEQ ID NO: 625823 - DNA, 54 bp, Artificial; identical to SEQ ID NO: 156929
  Synthetic oligonucleotide

SEQ ID NO: 625824 - DNA, 51 bp, Artificial; identical to SEQ ID NO: 193857
  Synthetic oligonucleotide

SEQ ID NO: 625825 - DNA, 55 bp, Artificial; identical to SEQ ID NO: 172912
  Synthetic oligonucleotide

SEQ ID NO: 625826 - DNA, 55 bp, Artificial; identical to SEQ ID NO: 154253
  Synthetic oligonucleotide

SEQ ID NO: 625827 - DNA, 54 bp, Artificial; identical to SEQ ID NO: 148702
  Synthetic oligonucleotide

SEQ ID NO: 625828 - DNA, 52 bp, Artificial; identical to SEQ ID NO: 186000
  Synthetic oligonucleotide

SEQ ID NO: 625829 - DNA, 60 bp, Artificial; identical to SEQ ID NO: 239293
  Synthetic oligonucleotide

SEQ ID NO: 625830 - DNA, 55 bp, Artificial; identical to SEQ ID NO: 142823
  Synthetic oligonucleotide

SEQ ID NO: 625831 - DNA, 54 bp, Artificial; identical to SEQ ID NO: 174806
  Synthetic oligonucleotide

SEQ ID NO: 625832 - DNA, 55 bp, Artificial; identical to SEQ ID NO: 254748
  Synthetic oligonucleotide

SEQ ID NO: 625833 - DNA, 54 bp, Artificial; identical to SEQ ID NO: 199513
  Synthetic oligonucleotide

SEQ ID NO: 625834 - DNA, 54 bp, Artificial; identical to SEQ ID NO: 199144
  Synthetic oligonucleotide

SEQ ID NO: 625835 - DNA, 54 bp, Artificial; identical to SEQ ID NO: 194731
  Synthetic oligonucleotide

SEQ ID NO: 625836 - DNA, 55 bp, Artificial; identical to SEQ ID NO: 160345
  Synthetic oligonucleotide

SEQ ID NO: 625837 - DNA, 52 bp, Artificial; identical to SEQ ID NO: 240841
  Synthetic oligonucleotide

SEQ ID NO: 625838 - DNA, 53 bp, Artificial; identical to SEQ ID NO: 239489
  Synthetic oligonucleotide

SEQ ID NO: 625839 - DNA, 53 bp, Artificial; identical to SEQ ID NO: 157257
  Synthetic oligonucleotide

SEQ ID NO: 625840 - DNA, 52 bp, Artificial; identical to SEQ ID NO: 197616
  Synthetic oligonucleotide

SEQ ID NO: 625841 - DNA, 51 bp, Artificial; identical to SEQ ID NO: 209735
  Synthetic oligonucleotide

SEQ ID NO: 625842 - DNA, 54 bp, Artificial; identical to SEQ ID NO: 190029
  Synthetic oligonucleotide

SEQ ID NO: 625843 - DNA, 50 bp, Artificial; identical to SEQ ID NO: 246934
  Synthetic oligonucleotide

SEQ ID NO: 625844 - DNA, 49 bp, Artificial; identical to SEQ ID NO: 153534
  Synthetic oligonucleotide

SEQ ID NO: 625845 - DNA, 51 bp, Artificial; identical to SEQ ID NO: 186517
  Synthetic oligonucleotide

SEQ ID NO: 625846 - DNA, 53 bp, Artificial; identical to SEQ ID NO: 240205
  Synthetic oligonucleotide

SEQ ID NO: 625847 - DNA, 52 bp, Artificial; identical to SEQ ID NO: 161334
  Synthetic oligonucleotide

SEQ ID NO: 625848 - DNA, 59 bp, Artificial; identical to SEQ ID NO: 177016
  Synthetic oligonucleotide

SEQ ID NO: 625849 - DNA, 54 bp, Artificial; identical to SEQ ID NO: 184259
  Synthetic oligonucleotide

SEQ ID NO: 625850 - DNA, 51 bp, Artificial; identical to SEQ ID NO: 209732
  Synthetic oligonucleotide

SEQ ID NO: 625851 - DNA, 55 bp, Artificial; identical to SEQ ID NO: 161834
  Synthetic oligonucleotide

SEQ ID NO: 625852 - DNA, 55 bp, Artificial; identical to SEQ ID NO: 156934
  Synthetic oligonucleotide

SEQ ID NO: 625853 - DNA, 55 bp, Artificial; identical to SEQ ID NO: 221777
  Synthetic oligonucleotide

SEQ ID NO: 625854 - DNA, 55 bp, Artificial; identical to SEQ ID NO: 211461
  Synthetic oligonucleotide

SEQ ID NO: 625855 - DNA, 51 bp, Artificial; identical to SEQ ID NO: 246184
  Synthetic oligonucleotide

SEQ ID NO: 625856 - DNA, 55 bp, Artificial; identical to SEQ ID NO: 215528
  Synthetic oligonucleotide

SEQ ID NO: 625857 - DNA, 55 bp, Artificial; identical to SEQ ID NO: 202914
  Synthetic oligonucleotide

SEQ ID NO: 625858 - DNA, 57 bp, Artificial; identical to SEQ ID NO: 163945
  Synthetic oligonucleotide

SEQ ID NO: 625859 - DNA, 55 bp, Artificial; identical to SEQ ID NO: 199202
  Synthetic oligonucleotide

SEQ ID NO: 625860 - DNA, 55 bp, Artificial; identical to SEQ ID NO: 211460
  Synthetic oligonucleotide

SEQ ID NO: 625861 - DNA, 55 bp, Artificial; identical to SEQ ID NO: 142450
  Synthetic oligonucleotide

SEQ ID NO: 625862 - DNA, 51 bp, Artificial; identical to SEQ ID NO: 145051
  Synthetic oligonucleotide

SEQ ID NO: 625863 - DNA, 59 bp, Artificial; identical to SEQ ID NO: 239282
  Synthetic oligonucleotide

SEQ ID NO: 625864 - DNA, 55 bp, Artificial; identical to SEQ ID NO: 220569
  Synthetic oligonucleotide

SEQ ID NO: 625865 - DNA, 55 bp, Artificial; identical to SEQ ID NO: 153528
  Synthetic oligonucleotide

SEQ ID NO: 625866 - DNA, 52 bp, Artificial; identical to SEQ ID NO: 240899
  Synthetic oligonucleotide

SEQ ID NO: 625867 - DNA, 55 bp, Artificial; identical to SEQ ID NO: 234217
  Synthetic oligonucleotide

SEQ ID NO: 625868 - DNA, 55 bp, Artificial; identical to SEQ ID NO: 199201
  Synthetic oligonucleotide

SEQ ID NO: 625869 - DNA, 55 bp, Artificial; identical to SEQ ID NO: 168369
  Synthetic oligonucleotide

SEQ ID NO: 625870 - DNA, 55 bp, Artificial; identical to SEQ ID NO: 156936
  Synthetic oligonucleotide

SEQ ID NO: 625871 - DNA, 53 bp, Artificial; identical to SEQ ID NO: 249129
  Synthetic oligonucleotide

SEQ ID NO: 625872 - DNA, 55 bp, Artificial; identical to SEQ ID NO: 190034
  Synthetic oligonucleotide

SEQ ID NO: 625873 - DNA, 55 bp, Artificial; identical to SEQ ID NO: 171111
  Synthetic oligonucleotide

SEQ ID NO: 625874 - DNA, 55 bp, Artificial; identical to SEQ ID NO: 208148
  Synthetic oligonucleotide

SEQ ID NO: 625875 - DNA, 55 bp, Artificial; identical to SEQ ID NO: 184257
  Synthetic oligonucleotide

SEQ ID NO: 625876 - DNA, 55 bp, Artificial; identical to SEQ ID NO: 144147
  Synthetic oligonucleotide

SEQ ID NO: 625877 - DNA, 55 bp, Artificial; identical to SEQ ID NO: 168370
  Synthetic oligonucleotide

SEQ ID NO: 625878 - DNA, 55 bp, Artificial; identical to SEQ ID NO: 184256
  Synthetic oligonucleotide

SEQ ID NO: 625879 - DNA, 51 bp, Artificial; identical to SEQ ID NO: 204022
  Synthetic oligonucleotide

SEQ ID NO: 625880 - DNA, 54 bp, Artificial; identical to SEQ ID NO: 205612
  Synthetic oligonucleotide

SEQ ID NO: 625881 - DNA, 55 bp, Artificial; identical to SEQ ID NO: 156937
  Synthetic oligonucleotide

SEQ ID NO: 625882 - DNA, 55 bp, Artificial; identical to SEQ ID NO: 253130
  Synthetic oligonucleotide

SEQ ID NO: 625883 - DNA, 55 bp, Artificial; identical to SEQ ID NO: 191987
  Synthetic oligonucleotide

SEQ ID NO: 625884 - DNA, 55 bp, Artificial; identical to SEQ ID NO: 209436
  Synthetic oligonucleotide

SEQ ID NO: 625885 - DNA, 55 bp, Artificial; identical to SEQ ID NO: 249131
  Synthetic oligonucleotide

SEQ ID NO: 625886 - DNA, 55 bp, Artificial; identical to SEQ ID NO: 156939
  Synthetic oligonucleotide

SEQ ID NO: 625887 - DNA, 53 bp, Artificial; identical to SEQ ID NO: 248221
  Synthetic oligonucleotide

SEQ ID NO: 625888 - DNA, 52 bp, Artificial; identical to SEQ ID NO: 155558
  Synthetic oligonucleotide

SEQ ID NO: 625889 - DNA, 55 bp, Artificial; identical to SEQ ID NO: 184254
  Synthetic oligonucleotide

SEQ ID NO: 625890 - DNA, 55 bp, Artificial; identical to SEQ ID NO: 254743
  Synthetic oligonucleotide

SEQ ID NO: 625891 - DNA, 55 bp, Artificial; identical to SEQ ID NO: 254742
  Synthetic oligonucleotide

SEQ ID NO: 625892 - DNA, 54 bp, Artificial; identical to SEQ ID NO: 184448
  Synthetic oligonucleotide

SEQ ID NO: 625893 - DNA, 55 bp, Artificial; identical to SEQ ID NO: 202913
  Synthetic oligonucleotide

SEQ ID NO: 625894 - DNA, 55 bp, Artificial; identical to SEQ ID NO: 254741
  Synthetic oligonucleotide

SEQ ID NO: 625895 - DNA, 55 bp, Artificial; identical to SEQ ID NO: 144073
  Synthetic oligonucleotide

SEQ ID NO: 625896 - DNA, 55 bp, Artificial; identical to SEQ ID NO: 144074
  Synthetic oligonucleotide

SEQ ID NO: 625897 - DNA, 57 bp, Artificial; identical to SEQ ID NO: 206442
  Synthetic oligonucleotide

SEQ ID NO: 625898 - DNA, 55 bp, Artificial; identical to SEQ ID NO: 160344
  Synthetic oligonucleotide

SEQ ID NO: 625899 - DNA, 55 bp, Artificial; identical to SEQ ID NO: 265759
  Synthetic oligonucleotide

SEQ ID NO: 625900 - DNA, 55 bp, Artificial; identical to SEQ ID NO: 184451
  Synthetic oligonucleotide

SEQ ID NO: 625901 - DNA, 51 bp, Artificial; identical to SEQ ID NO: 190035
  Synthetic oligonucleotide

SEQ ID NO: 625902 - DNA, 55 bp, Artificial; identical to SEQ ID NO: 199199
  Synthetic oligonucleotide

SEQ ID NO: 625903 - DNA, 55 bp, Artificial; identical to SEQ ID NO: 153531
  Synthetic oligonucleotide

SEQ ID NO: 625904 - DNA, 55 bp, Artificial; identical to SEQ ID NO: 194733
  Synthetic oligonucleotide

SEQ ID NO: 625905 - DNA, 55 bp, Artificial; identical to SEQ ID NO: 209435
  Synthetic oligonucleotide

SEQ ID NO: 625906 - DNA, 55 bp, Artificial; identical to SEQ ID NO: 221766
  Synthetic oligonucleotide

SEQ ID NO: 625907 - DNA, 55 bp, Artificial; identical to SEQ ID NO: 148691
  Synthetic oligonucleotide

SEQ ID NO: 625908 - DNA, 55 bp, Artificial; identical to SEQ ID NO: 169195
  Synthetic oligonucleotide

SEQ ID NO: 625909 - DNA, 54 bp, Artificial; identical to SEQ ID NO: 242697
  Synthetic oligonucleotide

SEQ ID NO: 625910 - DNA, 53 bp, Artificial; identical to SEQ ID NO: 216648
  Synthetic oligonucleotide

SEQ ID NO: 625911 - DNA, 55 bp, Artificial; identical to SEQ ID NO: 233607
  Synthetic oligonucleotide

SEQ ID NO: 625912 - DNA, 55 bp, Artificial; identical to SEQ ID NO: 155500
  Synthetic oligonucleotide

SEQ ID NO: 625913 - DNA, 55 bp, Artificial; identical to SEQ ID NO: 160348
  Synthetic oligonucleotide

SEQ ID NO: 625914 - DNA, 55 bp, Artificial; identical to SEQ ID NO: 208150
  Synthetic oligonucleotide

SEQ ID NO: 625915 - DNA, 49 bp, Artificial; identical to SEQ ID NO: 248210
  Synthetic oligonucleotide

SEQ ID NO: 625916 - DNA, 55 bp, Artificial; identical to SEQ ID NO: 245425
  Synthetic oligonucleotide

SEQ ID NO: 625917 - DNA, 55 bp, Artificial; identical to SEQ ID NO: 240207
  Synthetic oligonucleotide

SEQ ID NO: 625918 - DNA, 55 bp, Artificial; identical to SEQ ID NO: 184454
  Synthetic oligonucleotide

SEQ ID NO: 625919 - DNA, 55 bp, Artificial; identical to SEQ ID NO: 144075
  Synthetic oligonucleotide

SEQ ID NO: 625920 - DNA, 58 bp, Artificial; identical to SEQ ID NO: 256284
  Synthetic oligonucleotide

SEQ ID NO: 625921 - DNA, 55 bp, Artificial; identical to SEQ ID NO: 194735
  Synthetic oligonucleotide

SEQ ID NO: 625922 - DNA, 54 bp, Artificial; identical to SEQ ID NO: 247795
  Synthetic oligonucleotide

SEQ ID NO: 625923 - DNA, 55 bp, Artificial; identical to SEQ ID NO: 208806
  Synthetic oligonucleotide

SEQ ID NO: 625924 - DNA, 53 bp, Artificial; identical to SEQ ID NO: 248199
  Synthetic oligonucleotide

SEQ ID NO: 625925 - DNA, 55 bp, Artificial; identical to SEQ ID NO: 156945
  Synthetic oligonucleotide

SEQ ID NO: 625926 - DNA, 52 bp, Artificial; identical to SEQ ID NO: 256332
  Synthetic oligonucleotide

SEQ ID NO: 625927 - DNA, 55 bp, Artificial; identical to SEQ ID NO: 253127
  Synthetic oligonucleotide

SEQ ID NO: 625928 - DNA, 55 bp, Artificial; identical to SEQ ID NO: 193229
  Synthetic oligonucleotide

SEQ ID NO: 625929 - DNA, 54 bp, Artificial; identical to SEQ ID NO: 266287
  Synthetic oligonucleotide

SEQ ID NO: 625930 - DNA, 55 bp, Artificial; identical to SEQ ID NO: 254739
  Synthetic oligonucleotide

SEQ ID NO: 625931 - DNA, 55 bp, Artificial; identical to SEQ ID NO: 212884
  Synthetic oligonucleotide

SEQ ID NO: 625932 - DNA, 54 bp, Artificial; identical to SEQ ID NO: 195147
  Synthetic oligonucleotide

SEQ ID NO: 625933 - DNA, 54 bp, Artificial; identical to SEQ ID NO: 194951
  Synthetic oligonucleotide

SEQ ID NO: 625934 - DNA, 56 bp, Artificial; identical to SEQ ID NO: 187994
  Synthetic oligonucleotide

SEQ ID NO: 625935 - DNA, 55 bp, Artificial; identical to SEQ ID NO: 249132
  Synthetic oligonucleotide

SEQ ID NO: 625936 - DNA, 54 bp, Artificial; identical to SEQ ID NO: 156947
  Synthetic oligonucleotide

SEQ ID NO: 625937 - DNA, 60 bp, Artificial; identical to SEQ ID NO: 248177
  Synthetic oligonucleotide

SEQ ID NO: 625938 - DNA, 60 bp, Artificial; identical to SEQ ID NO: 176949
  Synthetic oligonucleotide

SEQ ID NO: 625939 - DNA, 55 bp, Artificial; identical to SEQ ID NO: 194736
  Synthetic oligonucleotide

SEQ ID NO: 625940 - DNA, 55 bp, Artificial; identical to SEQ ID NO: 203777
  Synthetic oligonucleotide

SEQ ID NO: 625941 - DNA, 51 bp, Artificial; identical to SEQ ID NO: 165311
  Synthetic oligonucleotide

SEQ ID NO: 625942 - DNA, 50 bp, Artificial; identical to SEQ ID NO: 141481
  Synthetic oligonucleotide

SEQ ID NO: 625943 - DNA, 53 bp, Artificial; identical to SEQ ID NO: 203776
  Synthetic oligonucleotide

SEQ ID NO: 625944 - DNA, 55 bp, Artificial; identical to SEQ ID NO: 160787
  Synthetic oligonucleotide

SEQ ID NO: 625945 - DNA, 54 bp, Artificial; identical to SEQ ID NO: 168372
  Synthetic oligonucleotide

SEQ ID NO: 625946 - DNA, 54 bp, Artificial; identical to SEQ ID NO: 160400
  Synthetic oligonucleotide

SEQ ID NO: 625947 - DNA, 55 bp, Artificial; identical to SEQ ID NO: 199192
  Synthetic oligonucleotide

SEQ ID NO: 625948 - DNA, 55 bp, Artificial; identical to SEQ ID NO: 265748
  Synthetic oligonucleotide

SEQ ID NO: 625949 - DNA, 55 bp, Artificial; identical to SEQ ID NO: 144077
  Synthetic oligonucleotide

SEQ ID NO: 625950 - DNA, 56 bp, Artificial; identical to SEQ ID NO: 191746
  Synthetic oligonucleotide

SEQ ID NO: 625951 - DNA, 55 bp, Artificial; identical to SEQ ID NO: 212885
  Synthetic oligonucleotide

SEQ ID NO: 625952 - DNA, 54 bp, Artificial; identical to SEQ ID NO: 184440
  Synthetic oligonucleotide

SEQ ID NO: 625953 - DNA, 55 bp, Artificial; identical to SEQ ID NO: 249135
  Synthetic oligonucleotide

SEQ ID NO: 625954 - DNA, 55 bp, Artificial; identical to SEQ ID NO: 240209
  Synthetic oligonucleotide

SEQ ID NO: 625955 - DNA, 55 bp, Artificial; identical to SEQ ID NO: 156886
  Synthetic oligonucleotide

SEQ ID NO: 625956 - DNA, 55 bp, Artificial; identical to SEQ ID NO: 161021
  Synthetic oligonucleotide

SEQ ID NO: 625957 - DNA, 55 bp, Artificial; identical to SEQ ID NO: 168373
  Synthetic oligonucleotide

SEQ ID NO: 625958 - DNA, 52 bp, Artificial; identical to SEQ ID NO: 258137
  Synthetic oligonucleotide

SEQ ID NO: 625959 - DNA, 52 bp, Artificial; identical to SEQ ID NO: 164570
  Synthetic oligonucleotide

SEQ ID NO: 625960 - DNA, 55 bp, Artificial; identical to SEQ ID NO: 184434
  Synthetic oligonucleotide

SEQ ID NO: 625961 - DNA, 55 bp, Artificial; identical to SEQ ID NO: 171123
  Synthetic oligonucleotide

SEQ ID NO: 625962 - DNA, 55 bp, Artificial; identical to SEQ ID NO: 257860
  Synthetic oligonucleotide

SEQ ID NO: 625963 - DNA, 54 bp, Artificial; identical to SEQ ID NO: 164790
  Synthetic oligonucleotide

SEQ ID NO: 625964 - DNA, 55 bp, Artificial; identical to SEQ ID NO: 184431
  Synthetic oligonucleotide

SEQ ID NO: 625965 - DNA, 55 bp, Artificial; identical to SEQ ID NO: 156889
  Synthetic oligonucleotide

SEQ ID NO: 625966 - DNA, 58 bp, Artificial; identical to SEQ ID NO: 248143
  Synthetic oligonucleotide

SEQ ID NO: 625967 - DNA, 60 bp, Artificial; identical to SEQ ID NO: 224936
  Synthetic oligonucleotide

SEQ ID NO: 625968 - DNA, 55 bp, Artificial; identical to SEQ ID NO: 201636
  Synthetic oligonucleotide

SEQ ID NO: 625969 - DNA, 54 bp, Artificial; identical to SEQ ID NO: 166982
  Synthetic oligonucleotide

SEQ ID NO: 625970 - DNA, 52 bp, Artificial; identical to SEQ ID NO: 203774
  Synthetic oligonucleotide

SEQ ID NO: 625971 - DNA, 55 bp, Artificial; identical to SEQ ID NO: 164571
  Synthetic oligonucleotide

SEQ ID NO: 625972 - DNA, 56 bp, Artificial; identical to SEQ ID NO: 179990
  Synthetic oligonucleotide

SEQ ID NO: 625973 - DNA, 55 bp, Artificial; identical to SEQ ID NO: 249138
  Synthetic oligonucleotide

SEQ ID NO: 625974 - DNA, 55 bp, Artificial; identical to SEQ ID NO: 184487
  Synthetic oligonucleotide

SEQ ID NO: 625975 - DNA, 55 bp, Artificial; identical to SEQ ID NO: 184490
  Synthetic oligonucleotide

SEQ ID NO: 625976 - DNA, 53 bp, Artificial; identical to SEQ ID NO: 152041
  Synthetic oligonucleotide

SEQ ID NO: 625977 - DNA, 53 bp, Artificial; identical to SEQ ID NO: 199741
  Synthetic oligonucleotide

SEQ ID NO: 625978 - DNA, 55 bp, Artificial; identical to SEQ ID NO: 184494
  Synthetic oligonucleotide

SEQ ID NO: 625979 - DNA, 55 bp, Artificial; identical to SEQ ID NO: 142454
  Synthetic oligonucleotide

SEQ ID NO: 625980 - DNA, 55 bp, Artificial; identical to SEQ ID NO: 142822
  Synthetic oligonucleotide

SEQ ID NO: 625981 - DNA, 55 bp, Artificial; identical to SEQ ID NO: 156893
  Synthetic oligonucleotide

SEQ ID NO: 625982 - DNA, 56 bp, Artificial; identical to SEQ ID NO: 150637
  Synthetic oligonucleotide

SEQ ID NO: 625983 - DNA, 55 bp, Artificial; identical to SEQ ID NO: 217863
  Synthetic oligonucleotide

SEQ ID NO: 625984 - DNA, 55 bp, Artificial; identical to SEQ ID NO: 184495
  Synthetic oligonucleotide

SEQ ID NO: 625985 - DNA, 59 bp, Artificial; identical to SEQ ID NO: 179396
  Synthetic oligonucleotide

SEQ ID NO: 625986 - DNA, 50 bp, Artificial; identical to SEQ ID NO: 155491
  Synthetic oligonucleotide

SEQ ID NO: 625987 - DNA, 55 bp, Artificial; identical to SEQ ID NO: 174611
  Synthetic oligonucleotide

SEQ ID NO: 625988 - DNA, 55 bp, Artificial; identical to SEQ ID NO: 184480
  Synthetic oligonucleotide

SEQ ID NO: 625989 - DNA, 55 bp, Artificial; identical to SEQ ID NO: 197090
  Synthetic oligonucleotide

SEQ ID NO: 625990 - DNA, 55 bp, Artificial; identical to SEQ ID NO: 156896
  Synthetic oligonucleotide

SEQ ID NO: 625991 - DNA, 55 bp, Artificial; identical to SEQ ID NO: 208154
  Synthetic oligonucleotide

SEQ ID NO: 625992 - DNA, 55 bp, Artificial; identical to SEQ ID NO: 156897
  Synthetic oligonucleotide

SEQ ID NO: 625993 - DNA, 52 bp, Artificial; identical to SEQ ID NO: 247949
  Synthetic oligonucleotide

SEQ ID NO: 625994 - DNA, 54 bp, Artificial; identical to SEQ ID NO: 221677
  Synthetic oligonucleotide

SEQ ID NO: 625995 - DNA, 54 bp, Artificial; identical to SEQ ID NO: 144079
  Synthetic oligonucleotide

SEQ ID NO: 625996 - DNA, 55 bp, Artificial; identical to SEQ ID NO: 148624
  Synthetic oligonucleotide

SEQ ID NO: 625997 - DNA, 50 bp, Artificial; identical to SEQ ID NO: 156898
  Synthetic oligonucleotide

SEQ ID NO: 625998 - DNA, 51 bp, Artificial; identical to SEQ ID NO: 248019
  Synthetic oligonucleotide

SEQ ID NO: 625999 - DNA, 55 bp, Artificial; identical to SEQ ID NO: 142455
  Synthetic oligonucleotide

SEQ ID NO: 626000 - DNA, 51 bp, Artificial; identical to SEQ ID NO: 225032
  Synthetic oligonucleotide

SEQ ID NO: 626001 - DNA, 52 bp, Artificial; identical to SEQ ID NO: 247754
  Synthetic oligonucleotide

SEQ ID NO: 626002 - DNA, 55 bp, Artificial; identical to SEQ ID NO: 164574
  Synthetic oligonucleotide

SEQ ID NO: 626003 - DNA, 55 bp, Artificial; identical to SEQ ID NO: 257041
  Synthetic oligonucleotide

SEQ ID NO: 626004 - DNA, 55 bp, Artificial; identical to SEQ ID NO: 254734
  Synthetic oligonucleotide

SEQ ID NO: 626005 - DNA, 51 bp, Artificial; identical to SEQ ID NO: 218376
  Synthetic oligonucleotide

SEQ ID NO: 626006 - DNA, 55 bp, Artificial; identical to SEQ ID NO: 187690
  Synthetic oligonucleotide

SEQ ID NO: 626007 - DNA, 55 bp, Artificial; identical to SEQ ID NO: 171126
  Synthetic oligonucleotide

SEQ ID NO: 626008 - DNA, 55 bp, Artificial; identical to SEQ ID NO: 212886
  Synthetic oligonucleotide

SEQ ID NO: 626009 - DNA, 55 bp, Artificial; identical to SEQ ID NO: 254776
  Synthetic oligonucleotide

SEQ ID NO: 626010 - DNA, 55 bp, Artificial; identical to SEQ ID NO: 160301
  Synthetic oligonucleotide

SEQ ID NO: 626011 - DNA, 54 bp, Artificial; identical to SEQ ID NO: 219635
  Synthetic oligonucleotide

SEQ ID NO: 626012 - DNA, 55 bp, Artificial; identical to SEQ ID NO: 160300
  Synthetic oligonucleotide

SEQ ID NO: 626013 - DNA, 55 bp, Artificial; identical to SEQ ID NO: 205374
  Synthetic oligonucleotide

SEQ ID NO: 626014 - DNA, 55 bp, Artificial; identical to SEQ ID NO: 164575
  Synthetic oligonucleotide

SEQ ID NO: 626015 - DNA, 55 bp, Artificial; identical to SEQ ID NO: 153526
  Synthetic oligonucleotide

SEQ ID NO: 626016 - DNA, 53 bp, Artificial; identical to SEQ ID NO: 240829
  Synthetic oligonucleotide

SEQ ID NO: 626017 - DNA, 55 bp, Artificial; identical to SEQ ID NO: 156903
  Synthetic oligonucleotide

SEQ ID NO: 626018 - DNA, 55 bp, Artificial; identical to SEQ ID NO: 171127
  Synthetic oligonucleotide

SEQ ID NO: 626019 - DNA, 55 bp, Artificial; identical to SEQ ID NO: 208156
  Synthetic oligonucleotide

SEQ ID NO: 626020 - DNA, 55 bp, Artificial; identical to SEQ ID NO: 144080
  Synthetic oligonucleotide

SEQ ID NO: 626021 - DNA, 55 bp, Artificial; identical to SEQ ID NO: 211396
  Synthetic oligonucleotide

SEQ ID NO: 626022 - DNA, 54 bp, Artificial; identical to SEQ ID NO: 144082
  Synthetic oligonucleotide

SEQ ID NO: 626023 - DNA, 51 bp, Artificial; identical to SEQ ID NO: 201298
  Synthetic oligonucleotide

SEQ ID NO: 626024 - DNA, 56 bp, Artificial; identical to SEQ ID NO: 145142
  Synthetic oligonucleotide

SEQ ID NO: 626025 - DNA, 55 bp, Artificial; identical to SEQ ID NO: 242551
  Synthetic oligonucleotide

SEQ ID NO: 626026 - DNA, 55 bp, Artificial; identical to SEQ ID NO: 197094
  Synthetic oligonucleotide

SEQ ID NO: 626027 - DNA, 55 bp, Artificial; identical to SEQ ID NO: 211397
  Synthetic oligonucleotide

SEQ ID NO: 626028 - DNA, 55 bp, Artificial; identical to SEQ ID NO: 257857
  Synthetic oligonucleotide

SEQ ID NO: 626029 - DNA, 55 bp, Artificial; identical to SEQ ID NO: 154249
  Synthetic oligonucleotide

SEQ ID NO: 626030 - DNA, 50 bp, Artificial; identical to SEQ ID NO: 176112
  Synthetic oligonucleotide

SEQ ID NO: 626031 - DNA, 59 bp, Artificial; identical to SEQ ID NO: 177123
  Synthetic oligonucleotide

SEQ ID NO: 626032 - DNA, 55 bp, Artificial; identical to SEQ ID NO: 202912
  Synthetic oligonucleotide

SEQ ID NO: 626033 - DNA, 55 bp, Artificial; identical to SEQ ID NO: 190039
  Synthetic oligonucleotide

SEQ ID NO: 626034 - DNA, 55 bp, Artificial; identical to SEQ ID NO: 156904
  Synthetic oligonucleotide

SEQ ID NO: 626035 - DNA, 55 bp, Artificial; identical to SEQ ID NO: 266675
  Synthetic oligonucleotide

SEQ ID NO: 626036 - DNA, 55 bp, Artificial; identical to SEQ ID NO: 164576
  Synthetic oligonucleotide

SEQ ID NO: 626037 - DNA, 55 bp, Artificial; identical to SEQ ID NO: 234213
  Synthetic oligonucleotide

SEQ ID NO: 626038 - DNA, 55 bp, Artificial; identical to SEQ ID NO: 217864
  Synthetic oligonucleotide

SEQ ID NO: 626039 - DNA, 55 bp, Artificial; identical to SEQ ID NO: 155455
  Synthetic oligonucleotide

SEQ ID NO: 626040 - DNA, 55 bp, Artificial; identical to SEQ ID NO: 247750
  Synthetic oligonucleotide

SEQ ID NO: 626041 - DNA, 55 bp, Artificial; identical to SEQ ID NO: 221566
  Synthetic oligonucleotide

SEQ ID NO: 626042 - DNA, 53 bp, Artificial; identical to SEQ ID NO: 209602
  Synthetic oligonucleotide

SEQ ID NO: 626043 - DNA, 55 bp, Artificial; identical to SEQ ID NO: 174685
  Synthetic oligonucleotide

SEQ ID NO: 626044 - DNA, 54 bp, Artificial; identical to SEQ ID NO: 144690
  Synthetic oligonucleotide

SEQ ID NO: 626045 - DNA, 55 bp, Artificial; identical to SEQ ID NO: 161126
  Synthetic oligonucleotide

SEQ ID NO: 626046 - DNA, 50 bp, Artificial; identical to SEQ ID NO: 176109
  Synthetic oligonucleotide

SEQ ID NO: 626047 - DNA, 55 bp, Artificial; identical to SEQ ID NO: 253124
  Synthetic oligonucleotide

SEQ ID NO: 626048 - DNA, 53 bp, Artificial; identical to SEQ ID NO: 184376
  Synthetic oligonucleotide

SEQ ID NO: 626049 - DNA, 55 bp, Artificial; identical to SEQ ID NO: 144153
  Synthetic oligonucleotide

SEQ ID NO: 626050 - DNA, 55 bp, Artificial; identical to SEQ ID NO: 144928
  Synthetic oligonucleotide

SEQ ID NO: 626051 - DNA, 52 bp, Artificial; identical to SEQ ID NO: 186188
  Synthetic oligonucleotide

SEQ ID NO: 626052 - DNA, 59 bp, Artificial; identical to SEQ ID NO: 200248
  Synthetic oligonucleotide

SEQ ID NO: 626053 - DNA, 53 bp, Artificial; identical to SEQ ID NO: 148622
  Synthetic oligonucleotide

SEQ ID NO: 626054 - DNA, 57 bp, Artificial; identical to SEQ ID NO: 200237
  Synthetic oligonucleotide

SEQ ID NO: 626055 - DNA, 55 bp, Artificial; identical to SEQ ID NO: 245585
  Synthetic oligonucleotide

SEQ ID NO: 626056 - DNA, 53 bp, Artificial; identical to SEQ ID NO: 156907
  Synthetic oligonucleotide

SEQ ID NO: 626057 - DNA, 57 bp, Artificial; identical to SEQ ID NO: 237738
  Synthetic oligonucleotide

SEQ ID NO: 626058 - DNA, 55 bp, Artificial; identical to SEQ ID NO: 245584
  Synthetic oligonucleotide

SEQ ID NO: 626059 - DNA, 53 bp, Artificial; identical to SEQ ID NO: 168912
  Synthetic oligonucleotide

SEQ ID NO: 626060 - DNA, 51 bp, Artificial; identical to SEQ ID NO: 179730
  Synthetic oligonucleotide

SEQ ID NO: 626061 - DNA, 55 bp, Artificial; identical to SEQ ID NO: 199190
  Synthetic oligonucleotide

SEQ ID NO: 626062 - DNA, 55 bp, Artificial; identical to SEQ ID NO: 201299
  Synthetic oligonucleotide

SEQ ID NO: 626063 - DNA, 51 bp, Artificial; identical to SEQ ID NO: 240656
  Synthetic oligonucleotide

SEQ ID NO: 626064 - DNA, 59 bp, Artificial; identical to SEQ ID NO: 216815
  Synthetic oligonucleotide

SEQ ID NO: 626065 - DNA, 55 bp, Artificial; identical to SEQ ID NO: 171191
  Synthetic oligonucleotide

SEQ ID NO: 626066 - DNA, 56 bp, Artificial; identical to SEQ ID NO: 191743
  Synthetic oligonucleotide

SEQ ID NO: 626067 - DNA, 55 bp, Artificial; identical to SEQ ID NO: 199188
  Synthetic oligonucleotide

SEQ ID NO: 626068 - DNA, 55 bp, Artificial; identical to SEQ ID NO: 190041
  Synthetic oligonucleotide

SEQ ID NO: 626069 - DNA, 53 bp, Artificial; identical to SEQ ID NO: 255352
  Synthetic oligonucleotide

SEQ ID NO: 626070 - DNA, 52 bp, Artificial; identical to SEQ ID NO: 193788
  Synthetic oligonucleotide

SEQ ID NO: 626071 - DNA, 55 bp, Artificial; identical to SEQ ID NO: 240216
  Synthetic oligonucleotide

SEQ ID NO: 626072 - DNA, 55 bp, Artificial; identical to SEQ ID NO: 174687
  Synthetic oligonucleotide

SEQ ID NO: 626073 - DNA, 53 bp, Artificial; identical to SEQ ID NO: 245583
  Synthetic oligonucleotide

SEQ ID NO: 626074 - DNA, 57 bp, Artificial; identical to SEQ ID NO: 192145
  Synthetic oligonucleotide

SEQ ID NO: 626075 - DNA, 55 bp, Artificial; identical to SEQ ID NO: 245582
  Synthetic oligonucleotide

SEQ ID NO: 626076 - DNA, 54 bp, Artificial; identical to SEQ ID NO: 170815
  Synthetic oligonucleotide

SEQ ID NO: 626077 - DNA, 55 bp, Artificial; identical to SEQ ID NO: 253123
  Synthetic oligonucleotide

SEQ ID NO: 626078 - DNA, 55 bp, Artificial; identical to SEQ ID NO: 142458
  Synthetic oligonucleotide

SEQ ID NO: 626079 - DNA, 55 bp, Artificial; identical to SEQ ID NO: 146328
  Synthetic oligonucleotide

SEQ ID NO: 626080 - DNA, 55 bp, Artificial; identical to SEQ ID NO: 184363
  Synthetic oligonucleotide

SEQ ID NO: 626081 - DNA, 58 bp, Artificial; identical to SEQ ID NO: 160530
  Synthetic oligonucleotide

SEQ ID NO: 626082 - DNA, 48 bp, Artificial; identical to SEQ ID NO: 239204
  Synthetic oligonucleotide

SEQ ID NO: 626083 - DNA, 55 bp, Artificial; identical to SEQ ID NO: 169196
  Synthetic oligonucleotide

SEQ ID NO: 626084 - DNA, 55 bp, Artificial; identical to SEQ ID NO: 156908
  Synthetic oligonucleotide

SEQ ID NO: 626085 - DNA, 51 bp, Artificial; identical to SEQ ID NO: 209755
  Synthetic oligonucleotide

SEQ ID NO: 626086 - DNA, 51 bp, Artificial; identical to SEQ ID NO: 144592
  Synthetic oligonucleotide

SEQ ID NO: 626087 - DNA, 57 bp, Artificial; identical to SEQ ID NO: 234275
  Synthetic oligonucleotide

SEQ ID NO: 626088 - DNA, 55 bp, Artificial; identical to SEQ ID NO: 148617
  Synthetic oligonucleotide

SEQ ID NO: 626089 - DNA, 60 bp, Artificial; identical to SEQ ID NO: 156487
  Synthetic oligonucleotide

SEQ ID NO: 626090 - DNA, 55 bp, Artificial; identical to SEQ ID NO: 150629
  Synthetic oligonucleotide

SEQ ID NO: 626091 - DNA, 57 bp, Artificial; identical to SEQ ID NO: 177121
  Synthetic oligonucleotide

SEQ ID NO: 626092 - DNA, 55 bp, Artificial; identical to SEQ ID NO: 172909
  Synthetic oligonucleotide

SEQ ID NO: 626093 - DNA, 55 bp, Artificial; identical to SEQ ID NO: 217865
  Synthetic oligonucleotide

SEQ ID NO: 626094 - DNA, 55 bp, Artificial; identical to SEQ ID NO: 184359
  Synthetic oligonucleotide

SEQ ID NO: 626095 - DNA, 55 bp, Artificial; identical to SEQ ID NO: 202910
  Synthetic oligonucleotide

SEQ ID NO: 626096 - DNA, 55 bp, Artificial; identical to SEQ ID NO: 242822
  Synthetic oligonucleotide

SEQ ID NO: 626097 - DNA, 50 bp, Artificial; identical to SEQ ID NO: 149957
  Synthetic oligonucleotide

SEQ ID NO: 626098 - DNA, 55 bp, Artificial; identical to SEQ ID NO: 171193
  Synthetic oligonucleotide

SEQ ID NO: 626099 - DNA, 55 bp, Artificial; identical to SEQ ID NO: 144486
  Synthetic oligonucleotide

SEQ ID NO: 626100 - DNA, 56 bp, Artificial; identical to SEQ ID NO: 247590
  Synthetic oligonucleotide

SEQ ID NO: 626101 - DNA, 53 bp, Artificial; identical to SEQ ID NO: 243179
  Synthetic oligonucleotide

SEQ ID NO: 626102 - DNA, 52 bp, Artificial; identical to SEQ ID NO: 189162
  Synthetic oligonucleotide

SEQ ID NO: 626103 - DNA, 55 bp, Artificial; identical to SEQ ID NO: 254769
  Synthetic oligonucleotide

SEQ ID NO: 626104 - DNA, 55 bp, Artificial; identical to SEQ ID NO: 208158
  Synthetic oligonucleotide

SEQ ID NO: 626105 - DNA, 55 bp, Artificial; identical to SEQ ID NO: 164582
  Synthetic oligonucleotide

SEQ ID NO: 626106 - DNA, 52 bp, Artificial; identical to SEQ ID NO: 150628
  Synthetic oligonucleotide

SEQ ID NO: 626107 - DNA, 55 bp, Artificial; identical to SEQ ID NO: 240219
  Synthetic oligonucleotide

SEQ ID NO: 626108 - DNA, 55 bp, Artificial; identical to SEQ ID NO: 257856
  Synthetic oligonucleotide

SEQ ID NO: 626109 - DNA, 55 bp, Artificial; identical to SEQ ID NO: 148614
  Synthetic oligonucleotide

SEQ ID NO: 626110 - DNA, 55 bp, Artificial; identical to SEQ ID NO: 196287
  Synthetic oligonucleotide

SEQ ID NO: 626111 - DNA, 55 bp, Artificial; identical to SEQ ID NO: 234211
  Synthetic oligonucleotide

SEQ ID NO: 626112 - DNA, 55 bp, Artificial; identical to SEQ ID NO: 161125
  Synthetic oligonucleotide

SEQ ID NO: 626113 - DNA, 55 bp, Artificial; identical to SEQ ID NO: 184418
  Synthetic oligonucleotide

SEQ ID NO: 626114 - DNA, 55 bp, Artificial; identical to SEQ ID NO: 247746
  Synthetic oligonucleotide

SEQ ID NO: 626115 - DNA, 53 bp, Artificial; identical to SEQ ID NO: 194740
  Synthetic oligonucleotide

SEQ ID NO: 626116 - DNA, 52 bp, Artificial; identical to SEQ ID NO: 254767
  Synthetic oligonucleotide

SEQ ID NO: 626117 - DNA, 55 bp, Artificial; identical to SEQ ID NO: 169197
  Synthetic oligonucleotide

SEQ ID NO: 626118 - DNA, 55 bp, Artificial; identical to SEQ ID NO: 154244
  Synthetic oligonucleotide

SEQ ID NO: 626119 - DNA, 55 bp, Artificial; identical to SEQ ID NO: 212345
  Synthetic oligonucleotide

SEQ ID NO: 626120 - DNA, 57 bp, Artificial; identical to SEQ ID NO: 212344
  Synthetic oligonucleotide

SEQ ID NO: 626121 - DNA, 55 bp, Artificial; identical to SEQ ID NO: 148613
  Synthetic oligonucleotide

SEQ ID NO: 626122 - DNA, 55 bp, Artificial; identical to SEQ ID NO: 212887
  Synthetic oligonucleotide

SEQ ID NO: 626123 - DNA, 53 bp, Artificial; identical to SEQ ID NO: 164583
  Synthetic oligonucleotide

SEQ ID NO: 626124 - DNA, 55 bp, Artificial; identical to SEQ ID NO: 225085
  Synthetic oligonucleotide

SEQ ID NO: 626125 - DNA, 55 bp, Artificial; identical to SEQ ID NO: 257855
  Synthetic oligonucleotide

SEQ ID NO: 626126 - DNA, 55 bp, Artificial; identical to SEQ ID NO: 174652
  Synthetic oligonucleotide

SEQ ID NO: 626127 - DNA, 55 bp, Artificial; identical to SEQ ID NO: 205370
  Synthetic oligonucleotide

SEQ ID NO: 626128 - DNA, 55 bp, Artificial; identical to SEQ ID NO: 257854
  Synthetic oligonucleotide

SEQ ID NO: 626129 - DNA, 56 bp, Artificial; identical to SEQ ID NO: 194321
  Synthetic oligonucleotide

SEQ ID NO: 626130 - DNA, 55 bp, Artificial; identical to SEQ ID NO: 148611
  Synthetic oligonucleotide

SEQ ID NO: 626131 - DNA, 54 bp, Artificial; identical to SEQ ID NO: 245578
  Synthetic oligonucleotide

SEQ ID NO: 626132 - DNA, 55 bp, Artificial; identical to SEQ ID NO: 165722
  Synthetic oligonucleotide

SEQ ID NO: 626133 - DNA, 55 bp, Artificial; identical to SEQ ID NO: 184421
  Synthetic oligonucleotide

SEQ ID NO: 626134 - DNA, 55 bp, Artificial; identical to SEQ ID NO: 187731
  Synthetic oligonucleotide

SEQ ID NO: 626135 - DNA, 55 bp, Artificial; identical to SEQ ID NO: 223344
  Synthetic oligonucleotide

SEQ ID NO: 626136 - DNA, 52 bp, Artificial; identical to SEQ ID NO: 185721
  Synthetic oligonucleotide

SEQ ID NO: 626137 - DNA, 55 bp, Artificial; identical to SEQ ID NO: 197098
  Synthetic oligonucleotide

SEQ ID NO: 626138 - DNA, 55 bp, Artificial; identical to SEQ ID NO: 174661
  Synthetic oligonucleotide

SEQ ID NO: 626139 - DNA, 55 bp, Artificial; identical to SEQ ID NO: 238084
  Synthetic oligonucleotide

SEQ ID NO: 626140 - DNA, 55 bp, Artificial; identical to SEQ ID NO: 184425
  Synthetic oligonucleotide

SEQ ID NO: 626141 - DNA, 55 bp, Artificial; identical to SEQ ID NO: 202909
  Synthetic oligonucleotide

SEQ ID NO: 626142 - DNA, 55 bp, Artificial; identical to SEQ ID NO: 225084
  Synthetic oligonucleotide

SEQ ID NO: 626143 - DNA, 55 bp, Artificial; identical to SEQ ID NO: 254764
  Synthetic oligonucleotide

SEQ ID NO: 626144 - DNA, 53 bp, Artificial; identical to SEQ ID NO: 199187
  Synthetic oligonucleotide

SEQ ID NO: 626145 - DNA, 55 bp, Artificial; identical to SEQ ID NO: 148609
  Synthetic oligonucleotide

SEQ ID NO: 626146 - DNA, 55 bp, Artificial; identical to SEQ ID NO: 190044
  Synthetic oligonucleotide

SEQ ID NO: 626147 - DNA, 55 bp, Artificial; identical to SEQ ID NO: 223345
  Synthetic oligonucleotide

SEQ ID NO: 626148 - DNA, 55 bp, Artificial; identical to SEQ ID NO: 144927
  Synthetic oligonucleotide

SEQ ID NO: 626149 - DNA, 55 bp, Artificial; identical to SEQ ID NO: 245573
  Synthetic oligonucleotide

SEQ ID NO: 626150 - DNA, 56 bp, Artificial; identical to SEQ ID NO: 141173
  Synthetic oligonucleotide

SEQ ID NO: 626151 - DNA, 59 bp, Artificial; identical to SEQ ID NO: 248066
  Synthetic oligonucleotide

SEQ ID NO: 626152 - DNA, 55 bp, Artificial; identical to SEQ ID NO: 197099
  Synthetic oligonucleotide

SEQ ID NO: 626153 - DNA, 55 bp, Artificial; identical to SEQ ID NO: 254763
  Synthetic oligonucleotide

SEQ ID NO: 626154 - DNA, 55 bp, Artificial; identical to SEQ ID NO: 156913
  Synthetic oligonucleotide

SEQ ID NO: 626155 - DNA, 54 bp, Artificial; identical to SEQ ID NO: 196298
  Synthetic oligonucleotide

SEQ ID NO: 626156 - DNA, 54 bp, Artificial; identical to SEQ ID NO: 144954
  Synthetic oligonucleotide

SEQ ID NO: 626157 - DNA, 55 bp, Artificial; identical to SEQ ID NO: 164587
  Synthetic oligonucleotide

SEQ ID NO: 626158 - DNA, 49 bp, Artificial; identical to SEQ ID NO: 253120
  Synthetic oligonucleotide

SEQ ID NO: 626159 - DNA, 55 bp, Artificial; identical to SEQ ID NO: 220559
  Synthetic oligonucleotide

SEQ ID NO: 626160 - DNA, 55 bp, Artificial; identical to SEQ ID NO: 162174
  Synthetic oligonucleotide

SEQ ID NO: 626161 - DNA, 53 bp, Artificial; identical to SEQ ID NO: 246358
  Synthetic oligonucleotide

SEQ ID NO: 626162 - DNA, 55 bp, Artificial; identical to SEQ ID NO: 197101
  Synthetic oligonucleotide

SEQ ID NO: 626163 - DNA, 55 bp, Artificial; identical to SEQ ID NO: 168318
  Synthetic oligonucleotide

SEQ ID NO: 626164 - DNA, 55 bp, Artificial; identical to SEQ ID NO: 225083
  Synthetic oligonucleotide

SEQ ID NO: 626165 - DNA, 55 bp, Artificial; identical to SEQ ID NO: 144925
  Synthetic oligonucleotide

SEQ ID NO: 626166 - DNA, 55 bp, Artificial; identical to SEQ ID NO: 166985
  Synthetic oligonucleotide

SEQ ID NO: 626167 - DNA, 55 bp, Artificial; identical to SEQ ID NO: 249951
  Synthetic oligonucleotide

SEQ ID NO: 626168 - DNA, 55 bp, Artificial; identical to SEQ ID NO: 196987
  Synthetic oligonucleotide

SEQ ID NO: 626169 - DNA, 55 bp, Artificial; identical to SEQ ID NO: 203771
  Synthetic oligonucleotide

SEQ ID NO: 626170 - DNA, 53 bp, Artificial; identical to SEQ ID NO: 156985
  Synthetic oligonucleotide

SEQ ID NO: 626171 - DNA, 55 bp, Artificial; identical to SEQ ID NO: 202942
  Synthetic oligonucleotide

SEQ ID NO: 626172 - DNA, 55 bp, Artificial; identical to SEQ ID NO: 156986
  Synthetic oligonucleotide

SEQ ID NO: 626173 - DNA, 51 bp, Artificial; identical to SEQ ID NO: 245570
  Synthetic oligonucleotide

SEQ ID NO: 626174 - DNA, 51 bp, Artificial; identical to SEQ ID NO: 266753
  Synthetic oligonucleotide

SEQ ID NO: 626175 - DNA, 55 bp, Artificial; identical to SEQ ID NO: 166986
  Synthetic oligonucleotide

SEQ ID NO: 626176 - DNA, 51 bp, Artificial; identical to SEQ ID NO: 197717
  Synthetic oligonucleotide

SEQ ID NO: 626177 - DNA, 53 bp, Artificial; identical to SEQ ID NO: 205677
  Synthetic oligonucleotide

SEQ ID NO: 626178 - DNA, 55 bp, Artificial; identical to SEQ ID NO: 184401
  Synthetic oligonucleotide

SEQ ID NO: 626179 - DNA, 55 bp, Artificial; identical to SEQ ID NO: 151975
  Synthetic oligonucleotide

SEQ ID NO: 626180 - DNA, 55 bp, Artificial; identical to SEQ ID NO: 177116
  Synthetic oligonucleotide

SEQ ID NO: 626181 - DNA, 55 bp, Artificial; identical to SEQ ID NO: 155451
  Synthetic oligonucleotide

SEQ ID NO: 626182 - DNA, 55 bp, Artificial; identical to SEQ ID NO: 151976
  Synthetic oligonucleotide

SEQ ID NO: 626183 - DNA, 54 bp, Artificial; identical to SEQ ID NO: 177115
  Synthetic oligonucleotide

SEQ ID NO: 626184 - DNA, 55 bp, Artificial; identical to SEQ ID NO: 234210
  Synthetic oligonucleotide

SEQ ID NO: 626185 - DNA, 60 bp, Artificial; identical to SEQ ID NO: 177114
  Synthetic oligonucleotide

SEQ ID NO: 626186 - DNA, 58 bp, Artificial; identical to SEQ ID NO: 257501
  Synthetic oligonucleotide

SEQ ID NO: 626187 - DNA, 54 bp, Artificial; identical to SEQ ID NO: 255265
  Synthetic oligonucleotide

SEQ ID NO: 626188 - DNA, 54 bp, Artificial; identical to SEQ ID NO: 190649
  Synthetic oligonucleotide

SEQ ID NO: 626189 - DNA, 55 bp, Artificial; identical to SEQ ID NO: 184034
  Synthetic oligonucleotide

SEQ ID NO: 626190 - DNA, 55 bp, Artificial; identical to SEQ ID NO: 171203
  Synthetic oligonucleotide

SEQ ID NO: 626191 - DNA, 55 bp, Artificial; identical to SEQ ID NO: 184043
  Synthetic oligonucleotide

SEQ ID NO: 626192 - DNA, 59 bp, Artificial; identical to SEQ ID NO: 150622
  Synthetic oligonucleotide

SEQ ID NO: 626193 - DNA, 55 bp, Artificial; identical to SEQ ID NO: 166987
  Synthetic oligonucleotide

SEQ ID NO: 626194 - DNA, 55 bp, Artificial; identical to SEQ ID NO: 191992
  Synthetic oligonucleotide

SEQ ID NO: 626195 - DNA, 55 bp, Artificial; identical to SEQ ID NO: 207435
  Synthetic oligonucleotide

SEQ ID NO: 626196 - DNA, 54 bp, Artificial; identical to SEQ ID NO: 149191
  Synthetic oligonucleotide

SEQ ID NO: 626197 - DNA, 55 bp, Artificial; identical to SEQ ID NO: 240224
  Synthetic oligonucleotide

SEQ ID NO: 626198 - DNA, 55 bp, Artificial; identical to SEQ ID NO: 254759
  Synthetic oligonucleotide

SEQ ID NO: 626199 - DNA, 47 bp, Artificial; identical to SEQ ID NO: 150621
  Synthetic oligonucleotide

SEQ ID NO: 626200 - DNA, 52 bp, Artificial; identical to SEQ ID NO: 171089
  Synthetic oligonucleotide

SEQ ID NO: 626201 - DNA, 55 bp, Artificial; identical to SEQ ID NO: 146331
  Synthetic oligonucleotide

SEQ ID NO: 626202 - DNA, 55 bp, Artificial; identical to SEQ ID NO: 146334
  Synthetic oligonucleotide

SEQ ID NO: 626203 - DNA, 54 bp, Artificial; identical to SEQ ID NO: 222845
  Synthetic oligonucleotide

SEQ ID NO: 626204 - DNA, 54 bp, Artificial; identical to SEQ ID NO: 194954
  Synthetic oligonucleotide

SEQ ID NO: 626205 - DNA, 53 bp, Artificial; identical to SEQ ID NO: 254757
  Synthetic oligonucleotide

SEQ ID NO: 626206 - DNA, 52 bp, Artificial; identical to SEQ ID NO: 240892
  Synthetic oligonucleotide

SEQ ID NO: 626207 - DNA, 53 bp, Artificial; identical to SEQ ID NO: 247854
  Synthetic oligonucleotide

SEQ ID NO: 626208 - DNA, 55 bp, Artificial; identical to SEQ ID NO: 193518
  Synthetic oligonucleotide

SEQ ID NO: 626209 - DNA, 55 bp, Artificial; identical to SEQ ID NO: 164590
  Synthetic oligonucleotide

SEQ ID NO: 626210 - DNA, 55 bp, Artificial; identical to SEQ ID NO: 184020
  Synthetic oligonucleotide

SEQ ID NO: 626211 - DNA, 55 bp, Artificial; identical to SEQ ID NO: 225082
  Synthetic oligonucleotide

SEQ ID NO: 626212 - DNA, 55 bp, Artificial; identical to SEQ ID NO: 148601
  Synthetic oligonucleotide

SEQ ID NO: 626213 - DNA, 55 bp, Artificial; identical to SEQ ID NO: 154243
  Synthetic oligonucleotide

SEQ ID NO: 626214 - DNA, 56 bp, Artificial; identical to SEQ ID NO: 237771
  Synthetic oligonucleotide

SEQ ID NO: 626215 - DNA, 51 bp, Artificial; identical to SEQ ID NO: 257168
  Synthetic oligonucleotide

SEQ ID NO: 626216 - DNA, 55 bp, Artificial; identical to SEQ ID NO: 148600
  Synthetic oligonucleotide

SEQ ID NO: 626217 - DNA, 54 bp, Artificial; identical to SEQ ID NO: 249952
  Synthetic oligonucleotide

SEQ ID NO: 626218 - DNA, 50 bp, Artificial; identical to SEQ ID NO: 253222
  Synthetic oligonucleotide

SEQ ID NO: 626219 - DNA, 55 bp, Artificial; identical to SEQ ID NO: 217867
  Synthetic oligonucleotide

SEQ ID NO: 626220 - DNA, 50 bp, Artificial; identical to SEQ ID NO: 200511
  Synthetic oligonucleotide

SEQ ID NO: 626221 - DNA, 53 bp, Artificial; identical to SEQ ID NO: 209672
  Synthetic oligonucleotide

SEQ ID NO: 626222 - DNA, 52 bp, Artificial; identical to SEQ ID NO: 142640
  Synthetic oligonucleotide

SEQ ID NO: 626223 - DNA, 55 bp, Artificial; identical to SEQ ID NO: 189414
  Synthetic oligonucleotide

SEQ ID NO: 626224 - DNA, 52 bp, Artificial; identical to SEQ ID NO: 205416
  Synthetic oligonucleotide

SEQ ID NO: 626225 - DNA, 55 bp, Artificial; identical to SEQ ID NO: 156989
  Synthetic oligonucleotide

SEQ ID NO: 626226 - DNA, 60 bp, Artificial; identical to SEQ ID NO: 212342
  Synthetic oligonucleotide

SEQ ID NO: 626227 - DNA, 53 bp, Artificial; identical to SEQ ID NO: 223349
  Synthetic oligonucleotide

SEQ ID NO: 626228 - DNA, 58 bp, Artificial; identical to SEQ ID NO: 150620
  Synthetic oligonucleotide

SEQ ID NO: 626229 - DNA, 51 bp, Artificial; identical to SEQ ID NO: 216799
  Synthetic oligonucleotide

SEQ ID NO: 626230 - DNA, 55 bp, Artificial; identical to SEQ ID NO: 223350
  Synthetic oligonucleotide

SEQ ID NO: 626231 - DNA, 55 bp, Artificial; identical to SEQ ID NO: 199186
  Synthetic oligonucleotide

SEQ ID NO: 626232 - DNA, 60 bp, Artificial; identical to SEQ ID NO: 155375
  Synthetic oligonucleotide

SEQ ID NO: 626233 - DNA, 54 bp, Artificial; identical to SEQ ID NO: 216557
  Synthetic oligonucleotide

SEQ ID NO: 626234 - DNA, 51 bp, Artificial; identical to SEQ ID NO: 211399
  Synthetic oligonucleotide

SEQ ID NO: 626235 - DNA, 53 bp, Artificial; identical to SEQ ID NO: 153468
  Synthetic oligonucleotide

SEQ ID NO: 626236 - DNA, 55 bp, Artificial; identical to SEQ ID NO: 184061
  Synthetic oligonucleotide

SEQ ID NO: 626237 - DNA, 55 bp, Artificial; identical to SEQ ID NO: 160323
  Synthetic oligonucleotide

SEQ ID NO: 626238 - DNA, 54 bp, Artificial; identical to SEQ ID NO: 171208
  Synthetic oligonucleotide

SEQ ID NO: 626239 - DNA, 52 bp, Artificial; identical to SEQ ID NO: 223352
  Synthetic oligonucleotide

SEQ ID NO: 626240 - DNA, 50 bp, Artificial; identical to SEQ ID NO: 237531
  Synthetic oligonucleotide

SEQ ID NO: 626241 - DNA, 60 bp, Artificial; identical to SEQ ID NO: 156709
  Synthetic oligonucleotide

SEQ ID NO: 626242 - DNA, 54 bp, Artificial; identical to SEQ ID NO: 208160
  Synthetic oligonucleotide

SEQ ID NO: 626243 - DNA, 54 bp, Artificial; identical to SEQ ID NO: 192003
  Synthetic oligonucleotide

SEQ ID NO: 626244 - DNA, 55 bp, Artificial; identical to SEQ ID NO: 171213
  Synthetic oligonucleotide

SEQ ID NO: 626245 - DNA, 54 bp, Artificial; identical to SEQ ID NO: 247741
  Synthetic oligonucleotide

SEQ ID NO: 626246 - DNA, 55 bp, Artificial; identical to SEQ ID NO: 156993
  Synthetic oligonucleotide

SEQ ID NO: 626247 - DNA, 52 bp, Artificial; identical to SEQ ID NO: 148651
  Synthetic oligonucleotide

SEQ ID NO: 626248 - DNA, 55 bp, Artificial; identical to SEQ ID NO: 222670
  Synthetic oligonucleotide

SEQ ID NO: 626249 - DNA, 55 bp, Artificial; identical to SEQ ID NO: 151942
  Synthetic oligonucleotide

SEQ ID NO: 626250 - DNA, 55 bp, Artificial; identical to SEQ ID NO: 156994
  Synthetic oligonucleotide

SEQ ID NO: 626251 - DNA, 55 bp, Artificial; identical to SEQ ID NO: 151943
  Synthetic oligonucleotide

SEQ ID NO: 626252 - DNA, 55 bp, Artificial; identical to SEQ ID NO: 254526
  Synthetic oligonucleotide

SEQ ID NO: 626253 - DNA, 55 bp, Artificial; identical to SEQ ID NO: 153467
  Synthetic oligonucleotide

SEQ ID NO: 626254 - DNA, 55 bp, Artificial; identical to SEQ ID NO: 174641
  Synthetic oligonucleotide

SEQ ID NO: 626255 - DNA, 58 bp, Artificial; identical to SEQ ID NO: 150619
  Synthetic oligonucleotide

SEQ ID NO: 626256 - DNA, 53 bp, Artificial; identical to SEQ ID NO: 190051
  Synthetic oligonucleotide

SEQ ID NO: 626257 - DNA, 55 bp, Artificial; identical to SEQ ID NO: 169198
  Synthetic oligonucleotide

SEQ ID NO: 626258 - DNA, 54 bp, Artificial; identical to SEQ ID NO: 212918
  Synthetic oligonucleotide

SEQ ID NO: 626259 - DNA, 56 bp, Artificial; identical to SEQ ID NO: 239137
  Synthetic oligonucleotide

SEQ ID NO: 626260 - DNA, 59 bp, Artificial; identical to SEQ ID NO: 144693
  Synthetic oligonucleotide

SEQ ID NO: 626261 - DNA, 55 bp, Artificial; identical to SEQ ID NO: 169200
  Synthetic oligonucleotide

SEQ ID NO: 626262 - DNA, 55 bp, Artificial; identical to SEQ ID NO: 240230
  Synthetic oligonucleotide

SEQ ID NO: 626263 - DNA, 55 bp, Artificial; identical to SEQ ID NO: 224987
  Synthetic oligonucleotide

SEQ ID NO: 626264 - DNA, 50 bp, Artificial; identical to SEQ ID NO: 247740
  Synthetic oligonucleotide

SEQ ID NO: 626265 - DNA, 49 bp, Artificial; identical to SEQ ID NO: 208829
  Synthetic oligonucleotide

SEQ ID NO: 626266 - DNA, 57 bp, Artificial; identical to SEQ ID NO: 239126
  Synthetic oligonucleotide

SEQ ID NO: 626267 - DNA, 55 bp, Artificial; identical to SEQ ID NO: 184065
  Synthetic oligonucleotide

SEQ ID NO: 626268 - DNA, 55 bp, Artificial; identical to SEQ ID NO: 188336
  Synthetic oligonucleotide

SEQ ID NO: 626269 - DNA, 55 bp, Artificial; identical to SEQ ID NO: 169201
  Synthetic oligonucleotide

SEQ ID NO: 626270 - DNA, 51 bp, Artificial; identical to SEQ ID NO: 243362
  Synthetic oligonucleotide

SEQ ID NO: 626271 - DNA, 60 bp, Artificial; identical to SEQ ID NO: 150618
  Synthetic oligonucleotide

SEQ ID NO: 626272 - DNA, 55 bp, Artificial; identical to SEQ ID NO: 238094
  Synthetic oligonucleotide

SEQ ID NO: 626273 - DNA, 55 bp, Artificial; identical to SEQ ID NO: 184066
  Synthetic oligonucleotide

SEQ ID NO: 626274 - DNA, 55 bp, Artificial; identical to SEQ ID NO: 184070
  Synthetic oligonucleotide

SEQ ID NO: 626275 - DNA, 55 bp, Artificial; identical to SEQ ID NO: 169202
  Synthetic oligonucleotide

SEQ ID NO: 626276 - DNA, 55 bp, Artificial; identical to SEQ ID NO: 199181
  Synthetic oligonucleotide

SEQ ID NO: 626277 - DNA, 55 bp, Artificial; identical to SEQ ID NO: 254524
  Synthetic oligonucleotide

SEQ ID NO: 626278 - DNA, 51 bp, Artificial; identical to SEQ ID NO: 155612
  Synthetic oligonucleotide

SEQ ID NO: 626279 - DNA, 55 bp, Artificial; identical to SEQ ID NO: 211401
  Synthetic oligonucleotide

SEQ ID NO: 626280 - DNA, 55 bp, Artificial; identical to SEQ ID NO: 147042
  Synthetic oligonucleotide

SEQ ID NO: 626281 - DNA, 50 bp, Artificial; identical to SEQ ID NO: 145119
  Synthetic oligonucleotide

SEQ ID NO: 626282 - DNA, 55 bp, Artificial; identical to SEQ ID NO: 164591
  Synthetic oligonucleotide

SEQ ID NO: 626283 - DNA, 55 bp, Artificial; identical to SEQ ID NO: 184074
  Synthetic oligonucleotide

SEQ ID NO: 626284 - DNA, 52 bp, Artificial; identical to SEQ ID NO: 190892
  Synthetic oligonucleotide

SEQ ID NO: 626285 - DNA, 55 bp, Artificial; identical to SEQ ID NO: 203768
  Synthetic oligonucleotide

SEQ ID NO: 626286 - DNA, 58 bp, Artificial; identical to SEQ ID NO: 217267
  Synthetic oligonucleotide

SEQ ID NO: 626287 - DNA, 55 bp, Artificial; identical to SEQ ID NO: 191126
  Synthetic oligonucleotide

SEQ ID NO: 626288 - DNA, 55 bp, Artificial; identical to SEQ ID NO: 164592
  Synthetic oligonucleotide

SEQ ID NO: 626289 - DNA, 54 bp, Artificial; identical to SEQ ID NO: 157261
  Synthetic oligonucleotide

SEQ ID NO: 626290 - DNA, 55 bp, Artificial; identical to SEQ ID NO: 212890
  Synthetic oligonucleotide

SEQ ID NO: 626291 - DNA, 55 bp, Artificial; identical to SEQ ID NO: 142460
  Synthetic oligonucleotide

SEQ ID NO: 626292 - DNA, 55 bp, Artificial; identical to SEQ ID NO: 184075
  Synthetic oligonucleotide

SEQ ID NO: 626293 - DNA, 55 bp, Artificial; identical to SEQ ID NO: 184076
  Synthetic oligonucleotide

SEQ ID NO: 626294 - DNA, 55 bp, Artificial; identical to SEQ ID NO: 174631
  Synthetic oligonucleotide

SEQ ID NO: 626295 - DNA, 55 bp, Artificial; identical to SEQ ID NO: 148647
  Synthetic oligonucleotide

SEQ ID NO: 626296 - DNA, 55 bp, Artificial; identical to SEQ ID NO: 184057
  Synthetic oligonucleotide

SEQ ID NO: 626297 - DNA, 55 bp, Artificial; identical to SEQ ID NO: 187736
  Synthetic oligonucleotide

SEQ ID NO: 626298 - DNA, 52 bp, Artificial; identical to SEQ ID NO: 238096
  Synthetic oligonucleotide

SEQ ID NO: 626299 - DNA, 55 bp, Artificial; identical to SEQ ID NO: 156998
  Synthetic oligonucleotide

SEQ ID NO: 626300 - DNA, 55 bp, Artificial; identical to SEQ ID NO: 237995
  Synthetic oligonucleotide

SEQ ID NO: 626301 - DNA, 60 bp, Artificial; identical to SEQ ID NO: 257464
  Synthetic oligonucleotide

SEQ ID NO: 626302 - DNA, 54 bp, Artificial; identical to SEQ ID NO: 237994
  Synthetic oligonucleotide

SEQ ID NO: 626303 - DNA, 55 bp, Artificial; identical to SEQ ID NO: 184053
  Synthetic oligonucleotide

SEQ ID NO: 626304 - DNA, 55 bp, Artificial; identical to SEQ ID NO: 148646
  Synthetic oligonucleotide

SEQ ID NO: 626305 - DNA, 56 bp, Artificial; identical to SEQ ID NO: 177103
  Synthetic oligonucleotide

SEQ ID NO: 626306 - DNA, 55 bp, Artificial; identical to SEQ ID NO: 247738
  Synthetic oligonucleotide

SEQ ID NO: 626307 - DNA, 55 bp, Artificial; identical to SEQ ID NO: 254523
  Synthetic oligonucleotide

SEQ ID NO: 626308 - DNA, 55 bp, Artificial; identical to SEQ ID NO: 216406
  Synthetic oligonucleotide

SEQ ID NO: 626309 - DNA, 55 bp, Artificial; identical to SEQ ID NO: 222669
  Synthetic oligonucleotide

SEQ ID NO: 626310 - DNA, 50 bp, Artificial; identical to SEQ ID NO: 224023
  Synthetic oligonucleotide

SEQ ID NO: 626311 - DNA, 55 bp, Artificial; identical to SEQ ID NO: 195136
  Synthetic oligonucleotide

SEQ ID NO: 626312 - DNA, 55 bp, Artificial; identical to SEQ ID NO: 187737
  Synthetic oligonucleotide

SEQ ID NO: 626313 - DNA, 55 bp, Artificial; identical to SEQ ID NO: 171168
  Synthetic oligonucleotide

SEQ ID NO: 626314 - DNA, 55 bp, Artificial; identical to SEQ ID NO: 184052
  Synthetic oligonucleotide

SEQ ID NO: 626315 - DNA, 52 bp, Artificial; identical to SEQ ID NO: 255536
  Synthetic oligonucleotide

SEQ ID NO: 626316 - DNA, 55 bp, Artificial; identical to SEQ ID NO: 154240
  Synthetic oligonucleotide

SEQ ID NO: 626317 - DNA, 55 bp, Artificial; identical to SEQ ID NO: 184051
  Synthetic oligonucleotide

SEQ ID NO: 626318 - DNA, 55 bp, Artificial; identical to SEQ ID NO: 215525
  Synthetic oligonucleotide

SEQ ID NO: 626319 - DNA, 51 bp, Artificial; identical to SEQ ID NO: 234537
  Synthetic oligonucleotide

SEQ ID NO: 626320 - DNA, 55 bp, Artificial; identical to SEQ ID NO: 184047
  Synthetic oligonucleotide

SEQ ID NO: 626321 - DNA, 55 bp, Artificial; identical to SEQ ID NO: 240231
  Synthetic oligonucleotide

SEQ ID NO: 626322 - DNA, 54 bp, Artificial; identical to SEQ ID NO: 203067
  Synthetic oligonucleotide

SEQ ID NO: 626323 - DNA, 55 bp, Artificial; identical to SEQ ID NO: 148644
  Synthetic oligonucleotide

SEQ ID NO: 626324 - DNA, 51 bp, Artificial; identical to SEQ ID NO: 246714
  Synthetic oligonucleotide

SEQ ID NO: 626325 - DNA, 55 bp, Artificial; identical to SEQ ID NO: 205407
  Synthetic oligonucleotide

SEQ ID NO: 626326 - DNA, 55 bp, Artificial; identical to SEQ ID NO: 183972
  Synthetic oligonucleotide

SEQ ID NO: 626327 - DNA, 57 bp, Artificial; identical to SEQ ID NO: 142736
  Synthetic oligonucleotide

SEQ ID NO: 626328 - DNA, 55 bp, Artificial; identical to SEQ ID NO: 219647
  Synthetic oligonucleotide

SEQ ID NO: 626329 - DNA, 55 bp, Artificial; identical to SEQ ID NO: 164593
  Synthetic oligonucleotide

SEQ ID NO: 626330 - DNA, 60 bp, Artificial; identical to SEQ ID NO: 206464
  Synthetic oligonucleotide

SEQ ID NO: 626331 - DNA, 50 bp, Artificial; identical to SEQ ID NO: 176180
  Synthetic oligonucleotide

SEQ ID NO: 626332 - DNA, 49 bp, Artificial; identical to SEQ ID NO: 233604
  Synthetic oligonucleotide

SEQ ID NO: 626333 - DNA, 49 bp, Artificial; identical to SEQ ID NO: 247013
  Synthetic oligonucleotide

SEQ ID NO: 626334 - DNA, 60 bp, Artificial; identical to SEQ ID NO: 141184
  Synthetic oligonucleotide

SEQ ID NO: 626335 - DNA, 57 bp, Artificial; identical to SEQ ID NO: 209137
  Synthetic oligonucleotide

SEQ ID NO: 626336 - DNA, 55 bp, Artificial; identical to SEQ ID NO: 183963
  Synthetic oligonucleotide

SEQ ID NO: 626337 - DNA, 52 bp, Artificial; identical to SEQ ID NO: 190006
  Synthetic oligonucleotide

SEQ ID NO: 626338 - DNA, 57 bp, Artificial; identical to SEQ ID NO: 179795
  Synthetic oligonucleotide

SEQ ID NO: 626339 - DNA, 55 bp, Artificial; identical to SEQ ID NO: 157005
  Synthetic oligonucleotide

SEQ ID NO: 626340 - DNA, 54 bp, Artificial; identical to SEQ ID NO: 168320
  Synthetic oligonucleotide

SEQ ID NO: 626341 - DNA, 54 bp, Artificial; identical to SEQ ID NO: 170027
  Synthetic oligonucleotide

SEQ ID NO: 626342 - DNA, 55 bp, Artificial; identical to SEQ ID NO: 199180
  Synthetic oligonucleotide

SEQ ID NO: 626343 - DNA, 60 bp, Artificial; identical to SEQ ID NO: 187972
  Synthetic oligonucleotide

SEQ ID NO: 626344 - DNA, 56 bp, Artificial; identical to SEQ ID NO: 247484
  Synthetic oligonucleotide

SEQ ID NO: 626345 - DNA, 55 bp, Artificial; identical to SEQ ID NO: 217726
  Synthetic oligonucleotide

SEQ ID NO: 626346 - DNA, 55 bp, Artificial; identical to SEQ ID NO: 208162
  Synthetic oligonucleotide

SEQ ID NO: 626347 - DNA, 55 bp, Artificial; identical to SEQ ID NO: 233603
  Synthetic oligonucleotide

SEQ ID NO: 626348 - DNA, 55 bp, Artificial; identical to SEQ ID NO: 171172
  Synthetic oligonucleotide

SEQ ID NO: 626349 - DNA, 55 bp, Artificial; identical to SEQ ID NO: 245612
  Synthetic oligonucleotide

SEQ ID NO: 626350 - DNA, 56 bp, Artificial; identical to SEQ ID NO: 212339
  Synthetic oligonucleotide

SEQ ID NO: 626351 - DNA, 55 bp, Artificial; identical to SEQ ID NO: 254516
  Synthetic oligonucleotide

SEQ ID NO: 626352 - DNA, 55 bp, Artificial; identical to SEQ ID NO: 205405
  Synthetic oligonucleotide

SEQ ID NO: 626353 - DNA, 55 bp, Artificial; identical to SEQ ID NO: 258014
  Synthetic oligonucleotide

SEQ ID NO: 626354 - DNA, 55 bp, Artificial; identical to SEQ ID NO: 168322
  Synthetic oligonucleotide

SEQ ID NO: 626355 - DNA, 54 bp, Artificial; identical to SEQ ID NO: 245607
  Synthetic oligonucleotide

SEQ ID NO: 626356 - DNA, 49 bp, Artificial; identical to SEQ ID NO: 209661
  Synthetic oligonucleotide

SEQ ID NO: 626357 - DNA, 55 bp, Artificial; identical to SEQ ID NO: 258012
  Synthetic oligonucleotide

SEQ ID NO: 626358 - DNA, 55 bp, Artificial; identical to SEQ ID NO: 146338
  Synthetic oligonucleotide

SEQ ID NO: 626359 - DNA, 51 bp, Artificial; identical to SEQ ID NO: 149902
  Synthetic oligonucleotide

SEQ ID NO: 626360 - DNA, 54 bp, Artificial; identical to SEQ ID NO: 144923
  Synthetic oligonucleotide

SEQ ID NO: 626361 - DNA, 55 bp, Artificial; identical to SEQ ID NO: 157008
  Synthetic oligonucleotide

SEQ ID NO: 626362 - DNA, 55 bp, Artificial; identical to SEQ ID NO: 157009
  Synthetic oligonucleotide

SEQ ID NO: 626363 - DNA, 57 bp, Artificial; identical to SEQ ID NO: 201178
  Synthetic oligonucleotide

SEQ ID NO: 626364 - DNA, 55 bp, Artificial; identical to SEQ ID NO: 203398
  Synthetic oligonucleotide

SEQ ID NO: 626365 - DNA, 55 bp, Artificial; identical to SEQ ID NO: 144083
  Synthetic oligonucleotide

SEQ ID NO: 626366 - DNA, 55 bp, Artificial; identical to SEQ ID NO: 157011
  Synthetic oligonucleotide

SEQ ID NO: 626367 - DNA, 55 bp, Artificial; identical to SEQ ID NO: 194743
  Synthetic oligonucleotide

SEQ ID NO: 626368 - DNA, 55 bp, Artificial; identical to SEQ ID NO: 153459
  Synthetic oligonucleotide

SEQ ID NO: 626369 - DNA, 54 bp, Artificial; identical to SEQ ID NO: 188419
  Synthetic oligonucleotide

SEQ ID NO: 626370 - DNA, 55 bp, Artificial; identical to SEQ ID NO: 199178
  Synthetic oligonucleotide

SEQ ID NO: 626371 - DNA, 52 bp, Artificial; identical to SEQ ID NO: 142566
  Synthetic oligonucleotide

SEQ ID NO: 626372 - DNA, 55 bp, Artificial; identical to SEQ ID NO: 199177
  Synthetic oligonucleotide

SEQ ID NO: 626373 - DNA, 55 bp, Artificial; identical to SEQ ID NO: 205402
  Synthetic oligonucleotide

SEQ ID NO: 626374 - DNA, 55 bp, Artificial; identical to SEQ ID NO: 203766
  Synthetic oligonucleotide

SEQ ID NO: 626375 - DNA, 55 bp, Artificial; identical to SEQ ID NO: 176594
  Synthetic oligonucleotide

SEQ ID NO: 626376 - DNA, 51 bp, Artificial; identical to SEQ ID NO: 186675
  Synthetic oligonucleotide

SEQ ID NO: 626377 - DNA, 55 bp, Artificial; identical to SEQ ID NO: 234203
  Synthetic oligonucleotide

SEQ ID NO: 626378 - DNA, 60 bp, Artificial; identical to SEQ ID NO: 211424
  Synthetic oligonucleotide

SEQ ID NO: 626379 - DNA, 55 bp, Artificial; identical to SEQ ID NO: 211405
  Synthetic oligonucleotide

SEQ ID NO: 626380 - DNA, 60 bp, Artificial; identical to SEQ ID NO: 256111
  Synthetic oligonucleotide

SEQ ID NO: 626381 - DNA, 55 bp, Artificial; identical to SEQ ID NO: 198866
  Synthetic oligonucleotide

SEQ ID NO: 626382 - DNA, 57 bp, Artificial; identical to SEQ ID NO: 189625
  Synthetic oligonucleotide

SEQ ID NO: 626383 - DNA, 51 bp, Artificial; identical to SEQ ID NO: 186673
  Synthetic oligonucleotide

SEQ ID NO: 626384 - DNA, 55 bp, Artificial; identical to SEQ ID NO: 198865
  Synthetic oligonucleotide

SEQ ID NO: 626385 - DNA, 52 bp, Artificial; identical to SEQ ID NO: 188501
  Synthetic oligonucleotide

SEQ ID NO: 626386 - DNA, 57 bp, Artificial; identical to SEQ ID NO: 171060
  Synthetic oligonucleotide

SEQ ID NO: 626387 - DNA, 55 bp, Artificial; identical to SEQ ID NO: 258009
  Synthetic oligonucleotide

SEQ ID NO: 626388 - DNA, 54 bp, Artificial; identical to SEQ ID NO: 212894
  Synthetic oligonucleotide

SEQ ID NO: 626389 - DNA, 58 bp, Artificial; identical to SEQ ID NO: 209161
  Synthetic oligonucleotide

SEQ ID NO: 626390 - DNA, 60 bp, Artificial; identical to SEQ ID NO: 237804
  Synthetic oligonucleotide

SEQ ID NO: 626391 - DNA, 55 bp, Artificial; identical to SEQ ID NO: 235162
  Synthetic oligonucleotide

SEQ ID NO: 626392 - DNA, 57 bp, Artificial; identical to SEQ ID NO: 176583
  Synthetic oligonucleotide

SEQ ID NO: 626393 - DNA, 55 bp, Artificial; identical to SEQ ID NO: 224994
  Synthetic oligonucleotide

SEQ ID NO: 626394 - DNA, 55 bp, Artificial; identical to SEQ ID NO: 212896
  Synthetic oligonucleotide

SEQ ID NO: 626395 - DNA, 55 bp, Artificial; identical to SEQ ID NO: 258007
  Synthetic oligonucleotide

SEQ ID NO: 626396 - DNA, 55 bp, Artificial; identical to SEQ ID NO: 183999
  Synthetic oligonucleotide

SEQ ID NO: 626397 - DNA, 55 bp, Artificial; identical to SEQ ID NO: 208164
  Synthetic oligonucleotide

SEQ ID NO: 626398 - DNA, 55 bp, Artificial; identical to SEQ ID NO: 240165
  Synthetic oligonucleotide

SEQ ID NO: 626399 - DNA, 55 bp, Artificial; identical to SEQ ID NO: 184002
  Synthetic oligonucleotide

SEQ ID NO: 626400 - DNA, 55 bp, Artificial; identical to SEQ ID NO: 164595
  Synthetic oligonucleotide

SEQ ID NO: 626401 - DNA, 55 bp, Artificial; identical to SEQ ID NO: 197000
  Synthetic oligonucleotide

SEQ ID NO: 626402 - DNA, 55 bp, Artificial; identical to SEQ ID NO: 184003
  Synthetic oligonucleotide

SEQ ID NO: 626403 - DNA, 54 bp, Artificial; identical to SEQ ID NO: 254512
  Synthetic oligonucleotide

SEQ ID NO: 626404 - DNA, 55 bp, Artificial; identical to SEQ ID NO: 148636
  Synthetic oligonucleotide

SEQ ID NO: 626405 - DNA, 55 bp, Artificial; identical to SEQ ID NO: 240167
  Synthetic oligonucleotide

SEQ ID NO: 626406 - DNA, 51 bp, Artificial; identical to SEQ ID NO: 189663
  Synthetic oligonucleotide

SEQ ID NO: 626407 - DNA, 60 bp, Artificial; identical to SEQ ID NO: 176572
  Synthetic oligonucleotide

SEQ ID NO: 626408 - DNA, 52 bp, Artificial; identical to SEQ ID NO: 209691
  Synthetic oligonucleotide

SEQ ID NO: 626409 - DNA, 55 bp, Artificial; identical to SEQ ID NO: 242826
  Synthetic oligonucleotide

SEQ ID NO: 626410 - DNA, 55 bp, Artificial; identical to SEQ ID NO: 245598
  Synthetic oligonucleotide

SEQ ID NO: 626411 - DNA, 55 bp, Artificial; identical to SEQ ID NO: 198863
  Synthetic oligonucleotide

SEQ ID NO: 626412 - DNA, 53 bp, Artificial; identical to SEQ ID NO: 183984
  Synthetic oligonucleotide

SEQ ID NO: 626413 - DNA, 55 bp, Artificial; identical to SEQ ID NO: 183983
  Synthetic oligonucleotide

SEQ ID NO: 626414 - DNA, 51 bp, Artificial; identical to SEQ ID NO: 186662
  Synthetic oligonucleotide

SEQ ID NO: 626415 - DNA, 55 bp, Artificial; identical to SEQ ID NO: 207441
  Synthetic oligonucleotide

SEQ ID NO: 626416 - DNA, 60 bp, Artificial; identical to SEQ ID NO: 176561
  Synthetic oligonucleotide

SEQ ID NO: 626417 - DNA, 50 bp, Artificial; identical to SEQ ID NO: 170611
  Synthetic oligonucleotide

SEQ ID NO: 626418 - DNA, 55 bp, Artificial; identical to SEQ ID NO: 198862
  Synthetic oligonucleotide

SEQ ID NO: 626419 - DNA, 55 bp, Artificial; identical to SEQ ID NO: 218887
  Synthetic oligonucleotide

SEQ ID NO: 626420 - DNA, 51 bp, Artificial; identical to SEQ ID NO: 186661
  Synthetic oligonucleotide

SEQ ID NO: 626421 - DNA, 60 bp, Artificial; identical to SEQ ID NO: 150659
  Synthetic oligonucleotide

SEQ ID NO: 626422 - DNA, 55 bp, Artificial; identical to SEQ ID NO: 153457
  Synthetic oligonucleotide

SEQ ID NO: 626423 - DNA, 55 bp, Artificial; identical to SEQ ID NO: 198861
  Synthetic oligonucleotide

SEQ ID NO: 626424 - DNA, 55 bp, Artificial; identical to SEQ ID NO: 189410
  Synthetic oligonucleotide

SEQ ID NO: 626425 - DNA, 55 bp, Artificial; identical to SEQ ID NO: 183980
  Synthetic oligonucleotide

SEQ ID NO: 626426 - DNA, 60 bp, Artificial; identical to SEQ ID NO: 155843
  Synthetic oligonucleotide

SEQ ID NO: 626427 - DNA, 55 bp, Artificial; identical to SEQ ID NO: 254551
  Synthetic oligonucleotide

SEQ ID NO: 626428 - DNA, 55 bp, Artificial; identical to SEQ ID NO: 171771
  Synthetic oligonucleotide

SEQ ID NO: 626429 - DNA, 55 bp, Artificial; identical to SEQ ID NO: 217729
  Synthetic oligonucleotide

SEQ ID NO: 626430 - DNA, 55 bp, Artificial; identical to SEQ ID NO: 262801
  Synthetic oligonucleotide

SEQ ID NO: 626431 - DNA, 55 bp, Artificial; identical to SEQ ID NO: 198860
  Synthetic oligonucleotide

SEQ ID NO: 626432 - DNA, 55 bp, Artificial; identical to SEQ ID NO: 198858
  Synthetic oligonucleotide

SEQ ID NO: 626433 - DNA, 55 bp, Artificial; identical to SEQ ID NO: 191999
  Synthetic oligonucleotide

SEQ ID NO: 626434 - DNA, 50 bp, Artificial; identical to SEQ ID NO: 187135
  Synthetic oligonucleotide

SEQ ID NO: 626435 - DNA, 55 bp, Artificial; identical to SEQ ID NO: 151949
  Synthetic oligonucleotide

SEQ ID NO: 626436 - DNA, 55 bp, Artificial; identical to SEQ ID NO: 222044
  Synthetic oligonucleotide

SEQ ID NO: 626437 - DNA, 55 bp, Artificial; identical to SEQ ID NO: 164596
  Synthetic oligonucleotide

SEQ ID NO: 626438 - DNA, 51 bp, Artificial; identical to SEQ ID NO: 145080
  Synthetic oligonucleotide

SEQ ID NO: 626439 - DNA, 51 bp, Artificial; identical to SEQ ID NO: 144154
  Synthetic oligonucleotide

SEQ ID NO: 626440 - DNA, 55 bp, Artificial; identical to SEQ ID NO: 183979
  Synthetic oligonucleotide

SEQ ID NO: 626441 - DNA, 55 bp, Artificial; identical to SEQ ID NO: 148630
  Synthetic oligonucleotide

SEQ ID NO: 626442 - DNA, 55 bp, Artificial; identical to SEQ ID NO: 183977
  Synthetic oligonucleotide

SEQ ID NO: 626443 - DNA, 55 bp, Artificial; identical to SEQ ID NO: 198857
  Synthetic oligonucleotide

SEQ ID NO: 626444 - DNA, 51 bp, Artificial; identical to SEQ ID NO: 141319
  Synthetic oligonucleotide

SEQ ID NO: 626445 - DNA, 55 bp, Artificial; identical to SEQ ID NO: 157019
  Synthetic oligonucleotide

SEQ ID NO: 626446 - DNA, 55 bp, Artificial; identical to SEQ ID NO: 168324
  Synthetic oligonucleotide

SEQ ID NO: 626447 - DNA, 55 bp, Artificial; identical to SEQ ID NO: 189409
  Synthetic oligonucleotide

SEQ ID NO: 626448 - DNA, 55 bp, Artificial; identical to SEQ ID NO: 148629
  Synthetic oligonucleotide

SEQ ID NO: 626449 - DNA, 55 bp, Artificial; identical to SEQ ID NO: 151950
  Synthetic oligonucleotide

SEQ ID NO: 626450 - DNA, 55 bp, Artificial; identical to SEQ ID NO: 208165
  Synthetic oligonucleotide

SEQ ID NO: 626451 - DNA, 55 bp, Artificial; identical to SEQ ID NO: 224996
  Synthetic oligonucleotide

SEQ ID NO: 626452 - DNA, 57 bp, Artificial; identical to SEQ ID NO: 179753
  Synthetic oligonucleotide

SEQ ID NO: 626453 - DNA, 55 bp, Artificial; identical to SEQ ID NO: 151951
  Synthetic oligonucleotide

SEQ ID NO: 626454 - DNA, 55 bp, Artificial; identical to SEQ ID NO: 212897
  Synthetic oligonucleotide

SEQ ID NO: 626455 - DNA, 55 bp, Artificial; identical to SEQ ID NO: 217731
  Synthetic oligonucleotide

SEQ ID NO: 626456 - DNA, 57 bp, Artificial; identical to SEQ ID NO: 141195
  Synthetic oligonucleotide

SEQ ID NO: 626457 - DNA, 55 bp, Artificial; identical to SEQ ID NO: 174770
  Synthetic oligonucleotide

SEQ ID NO: 626458 - DNA, 55 bp, Artificial; identical to SEQ ID NO: 203764
  Synthetic oligonucleotide

SEQ ID NO: 626459 - DNA, 55 bp, Artificial; identical to SEQ ID NO: 224997
  Synthetic oligonucleotide

SEQ ID NO: 626460 - DNA, 55 bp, Artificial; identical to SEQ ID NO: 215524
  Synthetic oligonucleotide

SEQ ID NO: 626461 - DNA, 55 bp, Artificial; identical to SEQ ID NO: 240169
  Synthetic oligonucleotide

SEQ ID NO: 626462 - DNA, 55 bp, Artificial; identical to SEQ ID NO: 217732
  Synthetic oligonucleotide

SEQ ID NO: 626463 - DNA, 55 bp, Artificial; identical to SEQ ID NO: 217733
  Synthetic oligonucleotide

SEQ ID NO: 626464 - DNA, 56 bp, Artificial; identical to SEQ ID NO: 169011
  Synthetic oligonucleotide

SEQ ID NO: 626465 - DNA, 53 bp, Artificial; identical to SEQ ID NO: 170075
  Synthetic oligonucleotide

SEQ ID NO: 626466 - DNA, 53 bp, Artificial; identical to SEQ ID NO: 247885
  Synthetic oligonucleotide

SEQ ID NO: 626467 - DNA, 55 bp, Artificial; identical to SEQ ID NO: 254548
  Synthetic oligonucleotide

SEQ ID NO: 626468 - DNA, 60 bp, Artificial; identical to SEQ ID NO: 256298
  Synthetic oligonucleotide

SEQ ID NO: 626469 - DNA, 55 bp, Artificial; identical to SEQ ID NO: 183975
  Synthetic oligonucleotide

SEQ ID NO: 626470 - DNA, 55 bp, Artificial; identical to SEQ ID NO: 247729
  Synthetic oligonucleotide

SEQ ID NO: 626471 - DNA, 52 bp, Artificial; identical to SEQ ID NO: 221757
  Synthetic oligonucleotide

SEQ ID NO: 626472 - DNA, 55 bp, Artificial; identical to SEQ ID NO: 156956
  Synthetic oligonucleotide

SEQ ID NO: 626473 - DNA, 55 bp, Artificial; identical to SEQ ID NO: 254545
  Synthetic oligonucleotide

SEQ ID NO: 626474 - DNA, 55 bp, Artificial; identical to SEQ ID NO: 211408
  Synthetic oligonucleotide

SEQ ID NO: 626475 - DNA, 55 bp, Artificial; identical to SEQ ID NO: 224214
  Synthetic oligonucleotide

SEQ ID NO: 626476 - DNA, 55 bp, Artificial; identical to SEQ ID NO: 153455
  Synthetic oligonucleotide

SEQ ID NO: 626477 - DNA, 55 bp, Artificial; identical to SEQ ID NO: 216838
  Synthetic oligonucleotide

SEQ ID NO: 626478 - DNA, 55 bp, Artificial; identical to SEQ ID NO: 184172
  Synthetic oligonucleotide

SEQ ID NO: 626479 - DNA, 55 bp, Artificial; identical to SEQ ID NO: 189407
  Synthetic oligonucleotide

SEQ ID NO: 626480 - DNA, 55 bp, Artificial; identical to SEQ ID NO: 146339
  Synthetic oligonucleotide

SEQ ID NO: 626481 - DNA, 55 bp, Artificial; identical to SEQ ID NO: 217736
  Synthetic oligonucleotide

SEQ ID NO: 626482 - DNA, 50 bp, Artificial; identical to SEQ ID NO: 158256
  Synthetic oligonucleotide

SEQ ID NO: 626483 - DNA, 55 bp, Artificial; identical to SEQ ID NO: 258004
  Synthetic oligonucleotide

SEQ ID NO: 626484 - DNA, 55 bp, Artificial; identical to SEQ ID NO: 156961
  Synthetic oligonucleotide

SEQ ID NO: 626485 - DNA, 55 bp, Artificial; identical to SEQ ID NO: 171181
  Synthetic oligonucleotide

SEQ ID NO: 626486 - DNA, 55 bp, Artificial; identical to SEQ ID NO: 164537
  Synthetic oligonucleotide

SEQ ID NO: 626487 - DNA, 55 bp, Artificial; identical to SEQ ID NO: 189405
  Synthetic oligonucleotide

SEQ ID NO: 626488 - DNA, 55 bp, Artificial; identical to SEQ ID NO: 245530
  Synthetic oligonucleotide

SEQ ID NO: 626489 - DNA, 60 bp, Artificial; identical to SEQ ID NO: 141206
  Synthetic oligonucleotide

SEQ ID NO: 626490 - DNA, 55 bp, Artificial; identical to SEQ ID NO: 174709
  Synthetic oligonucleotide

SEQ ID NO: 626491 - DNA, 55 bp, Artificial; identical to SEQ ID NO: 254542
  Synthetic oligonucleotide

SEQ ID NO: 626492 - DNA, 51 bp, Artificial; identical to SEQ ID NO: 186651
  Synthetic oligonucleotide

SEQ ID NO: 626493 - DNA, 55 bp, Artificial; identical to SEQ ID NO: 249957
  Synthetic oligonucleotide

SEQ ID NO: 626494 - DNA, 55 bp, Artificial; identical to SEQ ID NO: 189404
  Synthetic oligonucleotide

SEQ ID NO: 626495 - DNA, 55 bp, Artificial; identical to SEQ ID NO: 253230
  Synthetic oligonucleotide

SEQ ID NO: 626496 - DNA, 51 bp, Artificial; identical to SEQ ID NO: 216788
  Synthetic oligonucleotide

SEQ ID NO: 626497 - DNA, 58 bp, Artificial; identical to SEQ ID NO: 239339
  Synthetic oligonucleotide

SEQ ID NO: 626498 - DNA, 55 bp, Artificial; identical to SEQ ID NO: 190011
  Synthetic oligonucleotide

SEQ ID NO: 626499 - DNA, 55 bp, Artificial; identical to SEQ ID NO: 184161
  Synthetic oligonucleotide

SEQ ID NO: 626500 - DNA, 56 bp, Artificial; identical to SEQ ID NO: 180065
  Synthetic oligonucleotide

SEQ ID NO: 626501 - DNA, 51 bp, Artificial; identical to SEQ ID NO: 253818
  Synthetic oligonucleotide

SEQ ID NO: 626502 - DNA, 55 bp, Artificial; identical to SEQ ID NO: 184156
  Synthetic oligonucleotide

SEQ ID NO: 626503 - DNA, 55 bp, Artificial; identical to SEQ ID NO: 161123
  Synthetic oligonucleotide

SEQ ID NO: 626504 - DNA, 55 bp, Artificial; identical to SEQ ID NO: 168328
  Synthetic oligonucleotide

SEQ ID NO: 626505 - DNA, 55 bp, Artificial; identical to SEQ ID NO: 164539
  Synthetic oligonucleotide

SEQ ID NO: 626506 - DNA, 55 bp, Artificial; identical to SEQ ID NO: 184152
  Synthetic oligonucleotide

SEQ ID NO: 626507 - DNA, 55 bp, Artificial; identical to SEQ ID NO: 171183
  Synthetic oligonucleotide

SEQ ID NO: 626508 - DNA, 55 bp, Artificial; identical to SEQ ID NO: 184151
  Synthetic oligonucleotide

SEQ ID NO: 626509 - DNA, 55 bp, Artificial; identical to SEQ ID NO: 215567
  Synthetic oligonucleotide

SEQ ID NO: 626510 - DNA, 55 bp, Artificial; identical to SEQ ID NO: 190013
  Synthetic oligonucleotide

SEQ ID NO: 626511 - DNA, 55 bp, Artificial; identical to SEQ ID NO: 142421
  Synthetic oligonucleotide

SEQ ID NO: 626512 - DNA, 57 bp, Artificial; identical to SEQ ID NO: 256610
  Synthetic oligonucleotide

SEQ ID NO: 626513 - DNA, 53 bp, Artificial; identical to SEQ ID NO: 243182
  Synthetic oligonucleotide

SEQ ID NO: 626514 - DNA, 55 bp, Artificial; identical to SEQ ID NO: 253238
  Synthetic oligonucleotide

SEQ ID NO: 626515 - DNA, 55 bp, Artificial; identical to SEQ ID NO: 240172
  Synthetic oligonucleotide

SEQ ID NO: 626516 - DNA, 55 bp, Artificial; identical to SEQ ID NO: 240174
  Synthetic oligonucleotide

SEQ ID NO: 626517 - DNA, 55 bp, Artificial; identical to SEQ ID NO: 184150
  Synthetic oligonucleotide

SEQ ID NO: 626518 - DNA, 54 bp, Artificial; identical to SEQ ID NO: 144998
  Synthetic oligonucleotide

SEQ ID NO: 626519 - DNA, 52 bp, Artificial; identical to SEQ ID NO: 205701
  Synthetic oligonucleotide

SEQ ID NO: 626520 - DNA, 55 bp, Artificial; identical to SEQ ID NO: 253236
  Synthetic oligonucleotide

SEQ ID NO: 626521 - DNA, 55 bp, Artificial; identical to SEQ ID NO: 205396
  Synthetic oligonucleotide

SEQ ID NO: 626522 - DNA, 60 bp, Artificial; identical to SEQ ID NO: 208851
  Synthetic oligonucleotide

SEQ ID NO: 626523 - DNA, 55 bp, Artificial; identical to SEQ ID NO: 233599
  Synthetic oligonucleotide

SEQ ID NO: 626524 - DNA, 55 bp, Artificial; identical to SEQ ID NO: 208125
  Synthetic oligonucleotide

SEQ ID NO: 626525 - DNA, 51 bp, Artificial; identical to SEQ ID NO: 237195
  Synthetic oligonucleotide

SEQ ID NO: 626526 - DNA, 53 bp, Artificial; identical to SEQ ID NO: 157452
  Synthetic oligonucleotide

SEQ ID NO: 626527 - DNA, 59 bp, Artificial; identical to SEQ ID NO: 150652
  Synthetic oligonucleotide

SEQ ID NO: 626528 - DNA, 51 bp, Artificial; identical to SEQ ID NO: 198854
  Synthetic oligonucleotide

SEQ ID NO: 626529 - DNA, 60 bp, Artificial; identical to SEQ ID NO: 216860
  Synthetic oligonucleotide

SEQ ID NO: 626530 - DNA, 54 bp, Artificial; identical to SEQ ID NO: 205394
  Synthetic oligonucleotide

SEQ ID NO: 626531 - DNA, 55 bp, Artificial; identical to SEQ ID NO: 184199
  Synthetic oligonucleotide

SEQ ID NO: 626532 - DNA, 55 bp, Artificial; identical to SEQ ID NO: 211411
  Synthetic oligonucleotide

SEQ ID NO: 626533 - DNA, 51 bp, Artificial; identical to SEQ ID NO: 247955
  Synthetic oligonucleotide

SEQ ID NO: 626534 - DNA, 57 bp, Artificial; identical to SEQ ID NO: 179762
  Synthetic oligonucleotide

SEQ ID NO: 626535 - DNA, 55 bp, Artificial; identical to SEQ ID NO: 153453
  Synthetic oligonucleotide

SEQ ID NO: 626536 - DNA, 55 bp, Artificial; identical to SEQ ID NO: 156966
  Synthetic oligonucleotide

SEQ ID NO: 626537 - DNA, 54 bp, Artificial; identical to SEQ ID NO: 203763
  Synthetic oligonucleotide

SEQ ID NO: 626538 - DNA, 55 bp, Artificial; identical to SEQ ID NO: 164540
  Synthetic oligonucleotide

SEQ ID NO: 626539 - DNA, 55 bp, Artificial; identical to SEQ ID NO: 207443
  Synthetic oligonucleotide

SEQ ID NO: 626540 - DNA, 55 bp, Artificial; identical to SEQ ID NO: 151954
  Synthetic oligonucleotide

SEQ ID NO: 626541 - DNA, 60 bp, Artificial; identical to SEQ ID NO: 194204
  Synthetic oligonucleotide

SEQ ID NO: 626542 - DNA, 50 bp, Artificial; identical to SEQ ID NO: 253509
  Synthetic oligonucleotide

SEQ ID NO: 626543 - DNA, 54 bp, Artificial; identical to SEQ ID NO: 191998
  Synthetic oligonucleotide

SEQ ID NO: 626544 - DNA, 60 bp, Artificial; identical to SEQ ID NO: 150651
  Synthetic oligonucleotide

SEQ ID NO: 626545 - DNA, 60 bp, Artificial; identical to SEQ ID NO: 170861
  Synthetic oligonucleotide

SEQ ID NO: 626546 - DNA, 50 bp, Artificial; identical to SEQ ID NO: 241208
  Synthetic oligonucleotide

SEQ ID NO: 626547 - DNA, 55 bp, Artificial; identical to SEQ ID NO: 247727
  Synthetic oligonucleotide

SEQ ID NO: 626548 - DNA, 60 bp, Artificial; identical to SEQ ID NO: 247944
  Synthetic oligonucleotide

SEQ ID NO: 626549 - DNA, 52 bp, Artificial; identical to SEQ ID NO: 240888
  Synthetic oligonucleotide

SEQ ID NO: 626550 - DNA, 55 bp, Artificial; identical to SEQ ID NO: 198852
  Synthetic oligonucleotide

SEQ ID NO: 626551 - DNA, 55 bp, Artificial; identical to SEQ ID NO: 148339
  Synthetic oligonucleotide

SEQ ID NO: 626552 - DNA, 55 bp, Artificial; identical to SEQ ID NO: 184197
  Synthetic oligonucleotide

SEQ ID NO: 626553 - DNA, 54 bp, Artificial; identical to SEQ ID NO: 187346
  Synthetic oligonucleotide

SEQ ID NO: 626554 - DNA, 55 bp, Artificial; identical to SEQ ID NO: 194708
  Synthetic oligonucleotide

SEQ ID NO: 626555 - DNA, 57 bp, Artificial; identical to SEQ ID NO: 150650
  Synthetic oligonucleotide

SEQ ID NO: 626556 - DNA, 52 bp, Artificial; identical to SEQ ID NO: 218353
  Synthetic oligonucleotide

SEQ ID NO: 626557 - DNA, 55 bp, Artificial; identical to SEQ ID NO: 198851
  Synthetic oligonucleotide

SEQ ID NO: 626558 - DNA, 55 bp, Artificial; identical to SEQ ID NO: 168330
  Synthetic oligonucleotide

SEQ ID NO: 626559 - DNA, 55 bp, Artificial; identical to SEQ ID NO: 184196
  Synthetic oligonucleotide

SEQ ID NO: 626560 - DNA, 52 bp, Artificial; identical to SEQ ID NO: 171182
  Synthetic oligonucleotide

SEQ ID NO: 626561 - DNA, 54 bp, Artificial; identical to SEQ ID NO: 153008
  Synthetic oligonucleotide

SEQ ID NO: 626562 - DNA, 52 bp, Artificial; identical to SEQ ID NO: 171675
  Synthetic oligonucleotide

SEQ ID NO: 626563 - DNA, 55 bp, Artificial; identical to SEQ ID NO: 166934
  Synthetic oligonucleotide

SEQ ID NO: 626564 - DNA, 55 bp, Artificial; identical to SEQ ID NO: 144084
  Synthetic oligonucleotide

SEQ ID NO: 626565 - DNA, 60 bp, Artificial; identical to SEQ ID NO: 141217
  Synthetic oligonucleotide

SEQ ID NO: 626566 - DNA, 55 bp, Artificial; identical to SEQ ID NO: 148334
  Synthetic oligonucleotide

SEQ ID NO: 626567 - DNA, 52 bp, Artificial; identical to SEQ ID NO: 155561
  Synthetic oligonucleotide

SEQ ID NO: 626568 - DNA, 52 bp, Artificial; identical to SEQ ID NO: 258143
  Synthetic oligonucleotide

SEQ ID NO: 626569 - DNA, 55 bp, Artificial; identical to SEQ ID NO: 257453
  Synthetic oligonucleotide

SEQ ID NO: 626570 - DNA, 55 bp, Artificial; identical to SEQ ID NO: 184186
  Synthetic oligonucleotide

SEQ ID NO: 626571 - DNA, 55 bp, Artificial; identical to SEQ ID NO: 160314
  Synthetic oligonucleotide

SEQ ID NO: 626572 - DNA, 55 bp, Artificial; identical to SEQ ID NO: 184185
  Synthetic oligonucleotide

SEQ ID NO: 626573 - DNA, 55 bp, Artificial; identical to SEQ ID NO: 142423
  Synthetic oligonucleotide

SEQ ID NO: 626574 - DNA, 53 bp, Artificial; identical to SEQ ID NO: 211377
  Synthetic oligonucleotide

SEQ ID NO: 626575 - DNA, 50 bp, Artificial; identical to SEQ ID NO: 141380
  Synthetic oligonucleotide

SEQ ID NO: 626576 - DNA, 55 bp, Artificial; identical to SEQ ID NO: 184184
  Synthetic oligonucleotide

SEQ ID NO: 626577 - DNA, 55 bp, Artificial; identical to SEQ ID NO: 198847
  Synthetic oligonucleotide

SEQ ID NO: 626578 - DNA, 55 bp, Artificial; identical to SEQ ID NO: 142424
  Synthetic oligonucleotide

SEQ ID NO: 626579 - DNA, 55 bp, Artificial; identical to SEQ ID NO: 171215
  Synthetic oligonucleotide

SEQ ID NO: 626580 - DNA, 55 bp, Artificial; identical to SEQ ID NO: 168331
  Synthetic oligonucleotide

SEQ ID NO: 626581 - DNA, 55 bp, Artificial; identical to SEQ ID NO: 171207
  Synthetic oligonucleotide

SEQ ID NO: 626582 - DNA, 55 bp, Artificial; identical to SEQ ID NO: 201300
  Synthetic oligonucleotide

SEQ ID NO: 626583 - DNA, 51 bp, Artificial; identical to SEQ ID NO: 200080
  Synthetic oligonucleotide

SEQ ID NO: 626584 - DNA, 55 bp, Artificial; identical to SEQ ID NO: 200159
  Synthetic oligonucleotide

SEQ ID NO: 626585 - DNA, 54 bp, Artificial; identical to SEQ ID NO: 211381
  Synthetic oligonucleotide

SEQ ID NO: 626586 - DNA, 55 bp, Artificial; identical to SEQ ID NO: 184111
  Synthetic oligonucleotide

SEQ ID NO: 626587 - DNA, 54 bp, Artificial; identical to SEQ ID NO: 225079
  Synthetic oligonucleotide

SEQ ID NO: 626588 - DNA, 55 bp, Artificial; identical to SEQ ID NO: 217738
  Synthetic oligonucleotide

SEQ ID NO: 626589 - DNA, 55 bp, Artificial; identical to SEQ ID NO: 249965
  Synthetic oligonucleotide

SEQ ID NO: 626590 - DNA, 55 bp, Artificial; identical to SEQ ID NO: 221966
  Synthetic oligonucleotide

SEQ ID NO: 626591 - DNA, 55 bp, Artificial; identical to SEQ ID NO: 247759
  Synthetic oligonucleotide

SEQ ID NO: 626592 - DNA, 51 bp, Artificial; identical to SEQ ID NO: 210357
  Synthetic oligonucleotide

SEQ ID NO: 626593 - DNA, 55 bp, Artificial; identical to SEQ ID NO: 144919
  Synthetic oligonucleotide

SEQ ID NO: 626594 - DNA, 55 bp, Artificial; identical to SEQ ID NO: 184108
  Synthetic oligonucleotide

SEQ ID NO: 626595 - DNA, 55 bp, Artificial; identical to SEQ ID NO: 189485
  Synthetic oligonucleotide

SEQ ID NO: 626596 - DNA, 55 bp, Artificial; identical to SEQ ID NO: 171198
  Synthetic oligonucleotide

SEQ ID NO: 626597 - DNA, 55 bp, Artificial; identical to SEQ ID NO: 174445
  Synthetic oligonucleotide

SEQ ID NO: 626598 - DNA, 55 bp, Artificial; identical to SEQ ID NO: 171115
  Synthetic oligonucleotide

SEQ ID NO: 626599 - DNA, 55 bp, Artificial; identical to SEQ ID NO: 146340
  Synthetic oligonucleotide

SEQ ID NO: 626600 - DNA, 51 bp, Artificial; identical to SEQ ID NO: 211413
  Synthetic oligonucleotide

SEQ ID NO: 626601 - DNA, 51 bp, Artificial; identical to SEQ ID NO: 207445
  Synthetic oligonucleotide

SEQ ID NO: 626602 - DNA, 55 bp, Artificial; identical to SEQ ID NO: 194709
  Synthetic oligonucleotide

SEQ ID NO: 626603 - DNA, 54 bp, Artificial; identical to SEQ ID NO: 254534
  Synthetic oligonucleotide

SEQ ID NO: 626604 - DNA, 56 bp, Artificial; identical to SEQ ID NO: 266100
  Synthetic oligonucleotide

SEQ ID NO: 626605 - DNA, 55 bp, Artificial; identical to SEQ ID NO: 220591
  Synthetic oligonucleotide

SEQ ID NO: 626606 - DNA, 55 bp, Artificial; identical to SEQ ID NO: 245526
  Synthetic oligonucleotide

SEQ ID NO: 626607 - DNA, 55 bp, Artificial; identical to SEQ ID NO: 242829
  Synthetic oligonucleotide

SEQ ID NO: 626608 - DNA, 55 bp, Artificial; identical to SEQ ID NO: 184097
  Synthetic oligonucleotide

SEQ ID NO: 626609 - DNA, 55 bp, Artificial; identical to SEQ ID NO: 156971
  Synthetic oligonucleotide

SEQ ID NO: 626610 - DNA, 55 bp, Artificial; identical to SEQ ID NO: 156973
  Synthetic oligonucleotide

SEQ ID NO: 626611 - DNA, 59 bp, Artificial; identical to SEQ ID NO: 211402
  Synthetic oligonucleotide

SEQ ID NO: 626612 - DNA, 55 bp, Artificial; identical to SEQ ID NO: 188426
  Synthetic oligonucleotide

SEQ ID NO: 626613 - DNA, 55 bp, Artificial; identical to SEQ ID NO: 174520
  Synthetic oligonucleotide

SEQ ID NO: 626614 - DNA, 55 bp, Artificial; identical to SEQ ID NO: 254531
  Synthetic oligonucleotide

SEQ ID NO: 626615 - DNA, 55 bp, Artificial; identical to SEQ ID NO: 146343
  Synthetic oligonucleotide

SEQ ID NO: 626616 - DNA, 54 bp, Artificial; identical to SEQ ID NO: 240186
  Synthetic oligonucleotide

SEQ ID NO: 626617 - DNA, 55 bp, Artificial; identical to SEQ ID NO: 242831
  Synthetic oligonucleotide

SEQ ID NO: 626618 - DNA, 55 bp, Artificial; identical to SEQ ID NO: 190018
  Synthetic oligonucleotide

SEQ ID NO: 626619 - DNA, 55 bp, Artificial; identical to SEQ ID NO: 188429
  Synthetic oligonucleotide

SEQ ID NO: 626620 - DNA, 53 bp, Artificial; identical to SEQ ID NO: 149398
  Synthetic oligonucleotide

SEQ ID NO: 626621 - DNA, 55 bp, Artificial; identical to SEQ ID NO: 153451
  Synthetic oligonucleotide

SEQ ID NO: 626622 - DNA, 55 bp, Artificial; identical to SEQ ID NO: 184094
  Synthetic oligonucleotide

SEQ ID NO: 626623 - DNA, 54 bp, Artificial; identical to SEQ ID NO: 254484
  Synthetic oligonucleotide

SEQ ID NO: 626624 - DNA, 53 bp, Artificial; identical to SEQ ID NO: 185827
  Synthetic oligonucleotide

SEQ ID NO: 626625 - DNA, 55 bp, Artificial; identical to SEQ ID NO: 156978
  Synthetic oligonucleotide

SEQ ID NO: 626626 - DNA, 55 bp, Artificial; identical to SEQ ID NO: 247762
  Synthetic oligonucleotide

SEQ ID NO: 626627 - DNA, 58 bp, Artificial; identical to SEQ ID NO: 147168
  Synthetic oligonucleotide

SEQ ID NO: 626628 - DNA, 55 bp, Artificial; identical to SEQ ID NO: 253190
  Synthetic oligonucleotide

SEQ ID NO: 626629 - DNA, 55 bp, Artificial; identical to SEQ ID NO: 218178
  Synthetic oligonucleotide

SEQ ID NO: 626630 - DNA, 52 bp, Artificial; identical to SEQ ID NO: 142628
  Synthetic oligonucleotide

SEQ ID NO: 626631 - DNA, 58 bp, Artificial; identical to SEQ ID NO: 248402
  Synthetic oligonucleotide

SEQ ID NO: 626632 - DNA, 55 bp, Artificial; identical to SEQ ID NO: 266732
  Synthetic oligonucleotide

SEQ ID NO: 626633 - DNA, 55 bp, Artificial; identical to SEQ ID NO: 196973
  Synthetic oligonucleotide

SEQ ID NO: 626634 - DNA, 54 bp, Artificial; identical to SEQ ID NO: 221955
  Synthetic oligonucleotide

SEQ ID NO: 626635 - DNA, 55 bp, Artificial; identical to SEQ ID NO: 156982
  Synthetic oligonucleotide

SEQ ID NO: 626636 - DNA, 55 bp, Artificial; identical to SEQ ID NO: 160791
  Synthetic oligonucleotide

SEQ ID NO: 626637 - DNA, 55 bp, Artificial; identical to SEQ ID NO: 142426
  Synthetic oligonucleotide

SEQ ID NO: 626638 - DNA, 53 bp, Artificial; identical to SEQ ID NO: 237815
  Synthetic oligonucleotide

SEQ ID NO: 626639 - DNA, 54 bp, Artificial; identical to SEQ ID NO: 194956
  Synthetic oligonucleotide

SEQ ID NO: 626640 - DNA, 55 bp, Artificial; identical to SEQ ID NO: 148374
  Synthetic oligonucleotide

SEQ ID NO: 626641 - DNA, 55 bp, Artificial; identical to SEQ ID NO: 148373
  Synthetic oligonucleotide

SEQ ID NO: 626642 - DNA, 54 bp, Artificial; identical to SEQ ID NO: 166936
  Synthetic oligonucleotide

SEQ ID NO: 626643 - DNA, 54 bp, Artificial; identical to SEQ ID NO: 194710
  Synthetic oligonucleotide

SEQ ID NO: 626644 - DNA, 53 bp, Artificial; identical to SEQ ID NO: 189117
  Synthetic oligonucleotide

SEQ ID NO: 626645 - DNA, 55 bp, Artificial; identical to SEQ ID NO: 258000
  Synthetic oligonucleotide

SEQ ID NO: 626646 - DNA, 55 bp, Artificial; identical to SEQ ID NO: 194711
  Synthetic oligonucleotide

SEQ ID NO: 626647 - DNA, 55 bp, Artificial; identical to SEQ ID NO: 254482
  Synthetic oligonucleotide

SEQ ID NO: 626648 - DNA, 55 bp, Artificial; identical to SEQ ID NO: 249474
  Synthetic oligonucleotide

SEQ ID NO: 626649 - DNA, 55 bp, Artificial; identical to SEQ ID NO: 208133
  Synthetic oligonucleotide

SEQ ID NO: 626650 - DNA, 55 bp, Artificial; identical to SEQ ID NO: 254481
  Synthetic oligonucleotide

SEQ ID NO: 626651 - DNA, 55 bp, Artificial; identical to SEQ ID NO: 247768
  Synthetic oligonucleotide

SEQ ID NO: 626652 - DNA, 55 bp, Artificial; identical to SEQ ID NO: 154230
  Synthetic oligonucleotide

SEQ ID NO: 626653 - DNA, 55 bp, Artificial; identical to SEQ ID NO: 184136
  Synthetic oligonucleotide

SEQ ID NO: 626654 - DNA, 55 bp, Artificial; identical to SEQ ID NO: 254479
  Synthetic oligonucleotide

SEQ ID NO: 626655 - DNA, 51 bp, Artificial; identical to SEQ ID NO: 215218
  Synthetic oligonucleotide

SEQ ID NO: 626656 - DNA, 55 bp, Artificial; identical to SEQ ID NO: 189402
  Synthetic oligonucleotide

SEQ ID NO: 626657 - DNA, 55 bp, Artificial; identical to SEQ ID NO: 198841
  Synthetic oligonucleotide

SEQ ID NO: 626658 - DNA, 55 bp, Artificial; identical to SEQ ID NO: 242833
  Synthetic oligonucleotide

SEQ ID NO: 626659 - DNA, 55 bp, Artificial; identical to SEQ ID NO: 190023
  Synthetic oligonucleotide

SEQ ID NO: 626660 - DNA, 54 bp, Artificial; identical to SEQ ID NO: 171130
  Synthetic oligonucleotide

SEQ ID NO: 626661 - DNA, 50 bp, Artificial; identical to SEQ ID NO: 201301
  Synthetic oligonucleotide

SEQ ID NO: 626662 - DNA, 52 bp, Artificial; identical to SEQ ID NO: 217740
  Synthetic oligonucleotide

SEQ ID NO: 626663 - DNA, 55 bp, Artificial; identical to SEQ ID NO: 148369
  Synthetic oligonucleotide

SEQ ID NO: 626664 - DNA, 55 bp, Artificial; identical to SEQ ID NO: 198839
  Synthetic oligonucleotide

SEQ ID NO: 626665 - DNA, 55 bp, Artificial; identical to SEQ ID NO: 184140
  Synthetic oligonucleotide

SEQ ID NO: 626666 - DNA, 55 bp, Artificial; identical to SEQ ID NO: 184141
  Synthetic oligonucleotide

SEQ ID NO: 626667 - DNA, 55 bp, Artificial; identical to SEQ ID NO: 245517
  Synthetic oligonucleotide

SEQ ID NO: 626668 - DNA, 57 bp, Artificial; identical to SEQ ID NO: 176461
  Synthetic oligonucleotide

SEQ ID NO: 626669 - DNA, 60 bp, Artificial; identical to SEQ ID NO: 201831
  Synthetic oligonucleotide

SEQ ID NO: 626670 - DNA, 56 bp, Artificial; identical to SEQ ID NO: 161242
  Synthetic oligonucleotide

SEQ ID NO: 626671 - DNA, 55 bp, Artificial; identical to SEQ ID NO: 184143
  Synthetic oligonucleotide

SEQ ID NO: 626672 - DNA, 55 bp, Artificial; identical to SEQ ID NO: 151959
  Synthetic oligonucleotide

SEQ ID NO: 626673 - DNA, 55 bp, Artificial; identical to SEQ ID NO: 151960
  Synthetic oligonucleotide

SEQ ID NO: 626674 - DNA, 60 bp, Artificial; identical to SEQ ID NO: 151977
  Synthetic oligonucleotide

SEQ ID NO: 626675 - DNA, 55 bp, Artificial; identical to SEQ ID NO: 242834
  Synthetic oligonucleotide

SEQ ID NO: 626676 - DNA, 51 bp, Artificial; identical to SEQ ID NO: 157551
  Synthetic oligonucleotide

SEQ ID NO: 626677 - DNA, 59 bp, Artificial; identical to SEQ ID NO: 150644
  Synthetic oligonucleotide

SEQ ID NO: 626678 - DNA, 54 bp, Artificial; identical to SEQ ID NO: 159268
  Synthetic oligonucleotide

SEQ ID NO: 626679 - DNA, 59 bp, Artificial; identical to SEQ ID NO: 237826
  Synthetic oligonucleotide

SEQ ID NO: 626680 - DNA, 55 bp, Artificial; identical to SEQ ID NO: 196975
  Synthetic oligonucleotide

SEQ ID NO: 626681 - DNA, 55 bp, Artificial; identical to SEQ ID NO: 157920
  Synthetic oligonucleotide

SEQ ID NO: 626682 - DNA, 55 bp, Artificial; identical to SEQ ID NO: 164544
  Synthetic oligonucleotide

SEQ ID NO: 626683 - DNA, 55 bp, Artificial; identical to SEQ ID NO: 151835
  Synthetic oligonucleotide

SEQ ID NO: 626684 - DNA, 54 bp, Artificial; identical to SEQ ID NO: 247760
  Synthetic oligonucleotide

SEQ ID NO: 626685 - DNA, 55 bp, Artificial; identical to SEQ ID NO: 190024
  Synthetic oligonucleotide

SEQ ID NO: 626686 - DNA, 55 bp, Artificial; identical to SEQ ID NO: 196977
  Synthetic oligonucleotide

SEQ ID NO: 626687 - DNA, 53 bp, Artificial; identical to SEQ ID NO: 171137
  Synthetic oligonucleotide

SEQ ID NO: 626688 - DNA, 55 bp, Artificial; identical to SEQ ID NO: 201627
  Synthetic oligonucleotide

SEQ ID NO: 626689 - DNA, 53 bp, Artificial; identical to SEQ ID NO: 142818
  Synthetic oligonucleotide

SEQ ID NO: 626690 - DNA, 51 bp, Artificial; identical to SEQ ID NO: 208134
  Synthetic oligonucleotide

SEQ ID NO: 626691 - DNA, 55 bp, Artificial; identical to SEQ ID NO: 247769
  Synthetic oligonucleotide

SEQ ID NO: 626692 - DNA, 55 bp, Artificial; identical to SEQ ID NO: 245516
  Synthetic oligonucleotide

SEQ ID NO: 626693 - DNA, 55 bp, Artificial; identical to SEQ ID NO: 184125
  Synthetic oligonucleotide

SEQ ID NO: 626694 - DNA, 54 bp, Artificial; identical to SEQ ID NO: 159263
  Synthetic oligonucleotide

SEQ ID NO: 626695 - DNA, 55 bp, Artificial; identical to SEQ ID NO: 164546
  Synthetic oligonucleotide

SEQ ID NO: 626696 - DNA, 50 bp, Artificial; identical to SEQ ID NO: 220988
  Synthetic oligonucleotide

SEQ ID NO: 626697 - DNA, 55 bp, Artificial; identical to SEQ ID NO: 221933
  Synthetic oligonucleotide

SEQ ID NO: 626698 - DNA, 55 bp, Artificial; identical to SEQ ID NO: 142427
  Synthetic oligonucleotide

SEQ ID NO: 626699 - DNA, 55 bp, Artificial; identical to SEQ ID NO: 154229
  Synthetic oligonucleotide

SEQ ID NO: 626700 - DNA, 54 bp, Artificial; identical to SEQ ID NO: 202939
  Synthetic oligonucleotide

SEQ ID NO: 626701 - DNA, 53 bp, Artificial; identical to SEQ ID NO: 167086
  Synthetic oligonucleotide

SEQ ID NO: 626702 - DNA, 55 bp, Artificial; identical to SEQ ID NO: 212899
  Synthetic oligonucleotide

SEQ ID NO: 626703 - DNA, 55 bp, Artificial; identical to SEQ ID NO: 151836
  Synthetic oligonucleotide

SEQ ID NO: 626704 - DNA, 55 bp, Artificial; identical to SEQ ID NO: 174522
  Synthetic oligonucleotide

SEQ ID NO: 626705 - DNA, 54 bp, Artificial; identical to SEQ ID NO: 172904
  Synthetic oligonucleotide

SEQ ID NO: 626706 - DNA, 55 bp, Artificial; identical to SEQ ID NO: 184121
  Synthetic oligonucleotide

SEQ ID NO: 626707 - DNA, 54 bp, Artificial; identical to SEQ ID NO: 144497
  Synthetic oligonucleotide

SEQ ID NO: 626708 - DNA, 55 bp, Artificial; identical to SEQ ID NO: 184120
  Synthetic oligonucleotide

SEQ ID NO: 626709 - DNA, 55 bp, Artificial; identical to SEQ ID NO: 249265
  Synthetic oligonucleotide

SEQ ID NO: 626710 - DNA, 55 bp, Artificial; identical to SEQ ID NO: 184119
  Synthetic oligonucleotide

SEQ ID NO: 626711 - DNA, 53 bp, Artificial; identical to SEQ ID NO: 184117
  Synthetic oligonucleotide

SEQ ID NO: 626712 - DNA, 55 bp, Artificial; identical to SEQ ID NO: 159261
  Synthetic oligonucleotide

SEQ ID NO: 626713 - DNA, 55 bp, Artificial; identical to SEQ ID NO: 254474
  Synthetic oligonucleotide

SEQ ID NO: 626714 - DNA, 55 bp, Artificial; identical to SEQ ID NO: 188427
  Synthetic oligonucleotide

SEQ ID NO: 626715 - DNA, 55 bp, Artificial; identical to SEQ ID NO: 164547
  Synthetic oligonucleotide

SEQ ID NO: 626716 - DNA, 55 bp, Artificial; identical to SEQ ID NO: 164548
  Synthetic oligonucleotide

SEQ ID NO: 626717 - DNA, 55 bp, Artificial; identical to SEQ ID NO: 196980
  Synthetic oligonucleotide

SEQ ID NO: 626718 - DNA, 55 bp, Artificial; identical to SEQ ID NO: 184901
  Synthetic oligonucleotide

SEQ ID NO: 626719 - DNA, 55 bp, Artificial; identical to SEQ ID NO: 198835
  Synthetic oligonucleotide

SEQ ID NO: 626720 - DNA, 55 bp, Artificial; identical to SEQ ID NO: 238018
  Synthetic oligonucleotide

SEQ ID NO: 626721 - DNA, 55 bp, Artificial; identical to SEQ ID NO: 184903
  Synthetic oligonucleotide

SEQ ID NO: 626722 - DNA, 55 bp, Artificial; identical to SEQ ID NO: 224999
  Synthetic oligonucleotide

SEQ ID NO: 626723 - DNA, 56 bp, Artificial; identical to SEQ ID NO: 187961
  Synthetic oligonucleotide

SEQ ID NO: 626724 - DNA, 54 bp, Artificial; identical to SEQ ID NO: 198895
  Synthetic oligonucleotide

SEQ ID NO: 626725 - DNA, 57 bp, Artificial; identical to SEQ ID NO: 179719
  Synthetic oligonucleotide

SEQ ID NO: 626726 - DNA, 55 bp, Artificial; identical to SEQ ID NO: 225000
  Synthetic oligonucleotide

SEQ ID NO: 626727 - DNA, 53 bp, Artificial; identical to SEQ ID NO: 257511
  Synthetic oligonucleotide

SEQ ID NO: 626728 - DNA, 55 bp, Artificial; identical to SEQ ID NO: 188400
  Synthetic oligonucleotide

SEQ ID NO: 626729 - DNA, 60 bp, Artificial; identical to SEQ ID NO: 150642
  Synthetic oligonucleotide

SEQ ID NO: 626730 - DNA, 55 bp, Artificial; identical to SEQ ID NO: 218177
  Synthetic oligonucleotide

SEQ ID NO: 626731 - DNA, 58 bp, Artificial; identical to SEQ ID NO: 141925
  Synthetic oligonucleotide

SEQ ID NO: 626732 - DNA, 55 bp, Artificial; identical to SEQ ID NO: 254472
  Synthetic oligonucleotide

SEQ ID NO: 626733 - DNA, 52 bp, Artificial; identical to SEQ ID NO: 218175
  Synthetic oligonucleotide

SEQ ID NO: 626734 - DNA, 55 bp, Artificial; identical to SEQ ID NO: 144078
  Synthetic oligonucleotide

SEQ ID NO: 626735 - DNA, 55 bp, Artificial; identical to SEQ ID NO: 184921
  Synthetic oligonucleotide

SEQ ID NO: 626736 - DNA, 55 bp, Artificial; identical to SEQ ID NO: 164551
  Synthetic oligonucleotide

SEQ ID NO: 626737 - DNA, 55 bp, Artificial; identical to SEQ ID NO: 188401
  Synthetic oligonucleotide

SEQ ID NO: 626738 - DNA, 52 bp, Artificial; identical to SEQ ID NO: 148364
  Synthetic oligonucleotide

SEQ ID NO: 626739 - DNA, 55 bp, Artificial; identical to SEQ ID NO: 168336
  Synthetic oligonucleotide

SEQ ID NO: 626740 - DNA, 55 bp, Artificial; identical to SEQ ID NO: 220585
  Synthetic oligonucleotide

SEQ ID NO: 626741 - DNA, 53 bp, Artificial; identical to SEQ ID NO: 248395
  Synthetic oligonucleotide

SEQ ID NO: 626742 - DNA, 53 bp, Artificial; identical to SEQ ID NO: 150641
  Synthetic oligonucleotide

SEQ ID NO: 626743 - DNA, 55 bp, Artificial; identical to SEQ ID NO: 142430
  Synthetic oligonucleotide

SEQ ID NO: 626744 - DNA, 55 bp, Artificial; identical to SEQ ID NO: 225001
  Synthetic oligonucleotide

SEQ ID NO: 626745 - DNA, 60 bp, Artificial; identical to SEQ ID NO: 176372
  Synthetic oligonucleotide

SEQ ID NO: 626746 - DNA, 55 bp, Artificial; identical to SEQ ID NO: 184808
  Synthetic oligonucleotide

SEQ ID NO: 626747 - DNA, 55 bp, Artificial; identical to SEQ ID NO: 174523
  Synthetic oligonucleotide

SEQ ID NO: 626748 - DNA, 53 bp, Artificial; identical to SEQ ID NO: 167487
  Synthetic oligonucleotide

SEQ ID NO: 626749 - DNA, 51 bp, Artificial; identical to SEQ ID NO: 176361
  Synthetic oligonucleotide

SEQ ID NO: 626750 - DNA, 55 bp, Artificial; identical to SEQ ID NO: 184779
  Synthetic oligonucleotide

SEQ ID NO: 626751 - DNA, 55 bp, Artificial; identical to SEQ ID NO: 198894
  Synthetic oligonucleotide

SEQ ID NO: 626752 - DNA, 55 bp, Artificial; identical to SEQ ID NO: 159249
  Synthetic oligonucleotide

SEQ ID NO: 626753 - DNA, 55 bp, Artificial; identical to SEQ ID NO: 196983
  Synthetic oligonucleotide

SEQ ID NO: 626754 - DNA, 55 bp, Artificial; identical to SEQ ID NO: 207449
  Synthetic oligonucleotide

SEQ ID NO: 626755 - DNA, 55 bp, Artificial; identical to SEQ ID NO: 184786
  Synthetic oligonucleotide

SEQ ID NO: 626756 - DNA, 59 bp, Artificial; identical to SEQ ID NO: 176871
  Synthetic oligonucleotide

SEQ ID NO: 626757 - DNA, 55 bp, Artificial; identical to SEQ ID NO: 195125
  Synthetic oligonucleotide

SEQ ID NO: 626758 - DNA, 58 bp, Artificial; identical to SEQ ID NO: 255389
  Synthetic oligonucleotide

SEQ ID NO: 626759 - DNA, 55 bp, Artificial; identical to SEQ ID NO: 190026
  Synthetic oligonucleotide

SEQ ID NO: 626760 - DNA, 58 bp, Artificial; identical to SEQ ID NO: 151320
  Synthetic oligonucleotide

SEQ ID NO: 626761 - DNA, 55 bp, Artificial; identical to SEQ ID NO: 208135
  Synthetic oligonucleotide

SEQ ID NO: 626762 - DNA, 52 bp, Artificial; identical to SEQ ID NO: 199912
  Synthetic oligonucleotide

SEQ ID NO: 626763 - DNA, 55 bp, Artificial; identical to SEQ ID NO: 198890
  Synthetic oligonucleotide

SEQ ID NO: 626764 - DNA, 52 bp, Artificial; identical to SEQ ID NO: 141270
  Synthetic oligonucleotide

SEQ ID NO: 626765 - DNA, 55 bp, Artificial; identical to SEQ ID NO: 215564
  Synthetic oligonucleotide

SEQ ID NO: 626766 - DNA, 50 bp, Artificial; identical to SEQ ID NO: 164554
  Synthetic oligonucleotide

SEQ ID NO: 626767 - DNA, 55 bp, Artificial; identical to SEQ ID NO: 169205
  Synthetic oligonucleotide

SEQ ID NO: 626768 - DNA, 55 bp, Artificial; identical to SEQ ID NO: 184861
  Synthetic oligonucleotide

SEQ ID NO: 626769 - DNA, 55 bp, Artificial; identical to SEQ ID NO: 193186
  Synthetic oligonucleotide

SEQ ID NO: 626770 - DNA, 55 bp, Artificial; identical to SEQ ID NO: 148363
  Synthetic oligonucleotide

SEQ ID NO: 626771 - DNA, 55 bp, Artificial; identical to SEQ ID NO: 238021
  Synthetic oligonucleotide

SEQ ID NO: 626772 - DNA, 55 bp, Artificial; identical to SEQ ID NO: 221888
  Synthetic oligonucleotide

SEQ ID NO: 626773 - DNA, 53 bp, Artificial; identical to SEQ ID NO: 249267
  Synthetic oligonucleotide

SEQ ID NO: 626774 - DNA, 55 bp, Artificial; identical to SEQ ID NO: 240191
  Synthetic oligonucleotide

SEQ ID NO: 626775 - DNA, 55 bp, Artificial; identical to SEQ ID NO: 184830
  Synthetic oligonucleotide

SEQ ID NO: 626776 - DNA, 54 bp, Artificial; identical to SEQ ID NO: 255257
  Synthetic oligonucleotide

SEQ ID NO: 626777 - DNA, 54 bp, Artificial; identical to SEQ ID NO: 184837
  Synthetic oligonucleotide

SEQ ID NO: 626778 - DNA, 55 bp, Artificial; identical to SEQ ID NO: 240192
  Synthetic oligonucleotide

SEQ ID NO: 626779 - DNA, 55 bp, Artificial; identical to SEQ ID NO: 212902
  Synthetic oligonucleotide

SEQ ID NO: 626780 - DNA, 53 bp, Artificial; identical to SEQ ID NO: 185514
  Synthetic oligonucleotide

SEQ ID NO: 626781 - DNA, 55 bp, Artificial; identical to SEQ ID NO: 190027
  Synthetic oligonucleotide

SEQ ID NO: 626782 - DNA, 55 bp, Artificial; identical to SEQ ID NO: 249268
  Synthetic oligonucleotide

SEQ ID NO: 626783 - DNA, 55 bp, Artificial; identical to SEQ ID NO: 240194
  Synthetic oligonucleotide

SEQ ID NO: 626784 - DNA, 55 bp, Artificial; identical to SEQ ID NO: 234140
  Synthetic oligonucleotide

SEQ ID NO: 626785 - DNA, 55 bp, Artificial; identical to SEQ ID NO: 184840
  Synthetic oligonucleotide

SEQ ID NO: 626786 - DNA, 54 bp, Artificial; identical to SEQ ID NO: 221676
  Synthetic oligonucleotide

SEQ ID NO: 626787 - DNA, 55 bp, Artificial; identical to SEQ ID NO: 169206
  Synthetic oligonucleotide

SEQ ID NO: 626788 - DNA, 54 bp, Artificial; identical to SEQ ID NO: 174531
  Synthetic oligonucleotide

SEQ ID NO: 626789 - DNA, 55 bp, Artificial; identical to SEQ ID NO: 234139
  Synthetic oligonucleotide

SEQ ID NO: 626790 - DNA, 55 bp, Artificial; identical to SEQ ID NO: 184844
  Synthetic oligonucleotide

SEQ ID NO: 626791 - DNA, 53 bp, Artificial; identical to SEQ ID NO: 248393
  Synthetic oligonucleotide

SEQ ID NO: 626792 - DNA, 55 bp, Artificial; identical to SEQ ID NO: 144271
  Synthetic oligonucleotide

SEQ ID NO: 626793 - DNA, 54 bp, Artificial; identical to SEQ ID NO: 184846
  Synthetic oligonucleotide

SEQ ID NO: 626794 - DNA, 55 bp, Artificial; identical to SEQ ID NO: 225004
  Synthetic oligonucleotide

SEQ ID NO: 626795 - DNA, 55 bp, Artificial; identical to SEQ ID NO: 184845
  Synthetic oligonucleotide

SEQ ID NO: 626796 - DNA, 55 bp, Artificial; identical to SEQ ID NO: 194712
  Synthetic oligonucleotide

SEQ ID NO: 626797 - DNA, 57 bp, Artificial; identical to SEQ ID NO: 174969
  Synthetic oligonucleotide

SEQ ID NO: 626798 - DNA, 51 bp, Artificial; identical to SEQ ID NO: 152937
  Synthetic oligonucleotide

SEQ ID NO: 626799 - DNA, 53 bp, Artificial; identical to SEQ ID NO: 162112
  Synthetic oligonucleotide

SEQ ID NO: 626800 - DNA, 55 bp, Artificial; identical to SEQ ID NO: 189398
  Synthetic oligonucleotide

SEQ ID NO: 626801 - DNA, 55 bp, Artificial; identical to SEQ ID NO: 164559
  Synthetic oligonucleotide

SEQ ID NO: 626802 - DNA, 55 bp, Artificial; identical to SEQ ID NO: 169207
  Synthetic oligonucleotide

SEQ ID NO: 626803 - DNA, 53 bp, Artificial; identical to SEQ ID NO: 184828
  Synthetic oligonucleotide

SEQ ID NO: 626804 - DNA, 55 bp, Artificial; identical to SEQ ID NO: 225076
  Synthetic oligonucleotide

SEQ ID NO: 626805 - DNA, 55 bp, Artificial; identical to SEQ ID NO: 174264
  Synthetic oligonucleotide

SEQ ID NO: 626806 - DNA, 55 bp, Artificial; identical to SEQ ID NO: 142432
  Synthetic oligonucleotide

SEQ ID NO: 626807 - DNA, 58 bp, Artificial; identical to SEQ ID NO: 176849
  Synthetic oligonucleotide

SEQ ID NO: 626808 - DNA, 53 bp, Artificial; identical to SEQ ID NO: 249272
  Synthetic oligonucleotide

SEQ ID NO: 626809 - DNA, 55 bp, Artificial; identical to SEQ ID NO: 212904
  Synthetic oligonucleotide

SEQ ID NO: 626810 - DNA, 60 bp, Artificial; identical to SEQ ID NO: 170866
  Synthetic oligonucleotide

SEQ ID NO: 626811 - DNA, 50 bp, Artificial; identical to SEQ ID NO: 188601
  Synthetic oligonucleotide

SEQ ID NO: 626812 - DNA, 54 bp, Artificial; identical to SEQ ID NO: 211385
  Synthetic oligonucleotide

SEQ ID NO: 626813 - DNA, 55 bp, Artificial; identical to SEQ ID NO: 164560
  Synthetic oligonucleotide

SEQ ID NO: 626814 - DNA, 53 bp, Artificial; identical to SEQ ID NO: 185500
  Synthetic oligonucleotide

SEQ ID NO: 626815 - DNA, 55 bp, Artificial; identical to SEQ ID NO: 184858
  Synthetic oligonucleotide

SEQ ID NO: 626816 - DNA, 55 bp, Artificial; identical to SEQ ID NO: 148358
  Synthetic oligonucleotide

SEQ ID NO: 626817 - DNA, 55 bp, Artificial; identical to SEQ ID NO: 174532
  Synthetic oligonucleotide

SEQ ID NO: 626818 - DNA, 52 bp, Artificial; identical to SEQ ID NO: 160513
  Synthetic oligonucleotide

SEQ ID NO: 626819 - DNA, 51 bp, Artificial; identical to SEQ ID NO: 198887
  Synthetic oligonucleotide

SEQ ID NO: 626820 - DNA, 51 bp, Artificial; identical to SEQ ID NO: 151842
  Synthetic oligonucleotide

SEQ ID NO: 626821 - DNA, 55 bp, Artificial; identical to SEQ ID NO: 194713
  Synthetic oligonucleotide

SEQ ID NO: 626822 - DNA, 51 bp, Artificial; identical to SEQ ID NO: 223792
  Synthetic oligonucleotide

SEQ ID NO: 626823 - DNA, 55 bp, Artificial; identical to SEQ ID NO: 249273
  Synthetic oligonucleotide

SEQ ID NO: 626824 - DNA, 53 bp, Artificial; identical to SEQ ID NO: 245509
  Synthetic oligonucleotide

SEQ ID NO: 626825 - DNA, 50 bp, Artificial; identical to SEQ ID NO: 176531
  Synthetic oligonucleotide

SEQ ID NO: 626826 - DNA, 55 bp, Artificial; identical to SEQ ID NO: 198886
  Synthetic oligonucleotide

SEQ ID NO: 626827 - DNA, 55 bp, Artificial; identical to SEQ ID NO: 184853
  Synthetic oligonucleotide

SEQ ID NO: 626828 - DNA, 59 bp, Artificial; identical to SEQ ID NO: 165945
  Synthetic oligonucleotide

SEQ ID NO: 626829 - DNA, 53 bp, Artificial; identical to SEQ ID NO: 225008
  Synthetic oligonucleotide

SEQ ID NO: 626830 - DNA, 51 bp, Artificial; identical to SEQ ID NO: 208788
  Synthetic oligonucleotide

SEQ ID NO: 626831 - DNA, 54 bp, Artificial; identical to SEQ ID NO: 240612
  Synthetic oligonucleotide

SEQ ID NO: 626832 - DNA, 53 bp, Artificial; identical to SEQ ID NO: 161320
  Synthetic oligonucleotide

SEQ ID NO: 626833 - DNA, 55 bp, Artificial; identical to SEQ ID NO: 218172
  Synthetic oligonucleotide

SEQ ID NO: 626834 - DNA, 55 bp, Artificial; identical to SEQ ID NO: 201626
  Synthetic oligonucleotide

SEQ ID NO: 626835 - DNA, 55 bp, Artificial; identical to SEQ ID NO: 154227
  Synthetic oligonucleotide

SEQ ID NO: 626836 - DNA, 55 bp, Artificial; identical to SEQ ID NO: 142433
  Synthetic oligonucleotide

SEQ ID NO: 626837 - DNA, 55 bp, Artificial; identical to SEQ ID NO: 151843
  Synthetic oligonucleotide

SEQ ID NO: 626838 - DNA, 59 bp, Artificial; identical to SEQ ID NO: 209650
  Synthetic oligonucleotide

SEQ ID NO: 626839 - DNA, 55 bp, Artificial; identical to SEQ ID NO: 198885
  Synthetic oligonucleotide

SEQ ID NO: 626840 - DNA, 55 bp, Artificial; identical to SEQ ID NO: 220583
  Synthetic oligonucleotide

SEQ ID NO: 626841 - DNA, 55 bp, Artificial; identical to SEQ ID NO: 207409
  Synthetic oligonucleotide

SEQ ID NO: 626842 - DNA, 60 bp, Artificial; identical to SEQ ID NO: 176805
  Synthetic oligonucleotide

SEQ ID NO: 626843 - DNA, 55 bp, Artificial; identical to SEQ ID NO: 217742
  Synthetic oligonucleotide

SEQ ID NO: 626844 - DNA, 55 bp, Artificial; identical to SEQ ID NO: 184792
  Synthetic oligonucleotide

SEQ ID NO: 626845 - DNA, 55 bp, Artificial; identical to SEQ ID NO: 152421
  Synthetic oligonucleotide

SEQ ID NO: 626846 - DNA, 54 bp, Artificial; identical to SEQ ID NO: 223525
  Synthetic oligonucleotide

SEQ ID NO: 626847 - DNA, 53 bp, Artificial; identical to SEQ ID NO: 152402
  Synthetic oligonucleotide

SEQ ID NO: 626848 - DNA, 58 bp, Artificial; identical to SEQ ID NO: 176783
  Synthetic oligonucleotide

SEQ ID NO: 626849 - DNA, 54 bp, Artificial; identical to SEQ ID NO: 247831
  Synthetic oligonucleotide

SEQ ID NO: 626850 - DNA, 55 bp, Artificial; identical to SEQ ID NO: 171205
  Synthetic oligonucleotide

SEQ ID NO: 626851 - DNA, 55 bp, Artificial; identical to SEQ ID NO: 148355
  Synthetic oligonucleotide

SEQ ID NO: 626852 - DNA, 59 bp, Artificial; identical to SEQ ID NO: 179354
  Synthetic oligonucleotide

SEQ ID NO: 626853 - DNA, 52 bp, Artificial; identical to SEQ ID NO: 152095
  Synthetic oligonucleotide

SEQ ID NO: 626854 - DNA, 53 bp, Artificial; identical to SEQ ID NO: 253292
  Synthetic oligonucleotide

SEQ ID NO: 626855 - DNA, 56 bp, Artificial; identical to SEQ ID NO: 247018
  Synthetic oligonucleotide

SEQ ID NO: 626856 - DNA, 53 bp, Artificial; identical to SEQ ID NO: 184814
  Synthetic oligonucleotide

SEQ ID NO: 626857 - DNA, 48 bp, Artificial; identical to SEQ ID NO: 242836
  Synthetic oligonucleotide

SEQ ID NO: 626858 - DNA, 57 bp, Artificial; identical to SEQ ID NO: 212332
  Synthetic oligonucleotide

SEQ ID NO: 626859 - DNA, 55 bp, Artificial; identical to SEQ ID NO: 159283
  Synthetic oligonucleotide

SEQ ID NO: 626860 - DNA, 58 bp, Artificial; identical to SEQ ID NO: 221278
  Synthetic oligonucleotide

SEQ ID NO: 626861 - DNA, 55 bp, Artificial; identical to SEQ ID NO: 164562
  Synthetic oligonucleotide

SEQ ID NO: 626862 - DNA, 55 bp, Artificial; identical to SEQ ID NO: 159281
  Synthetic oligonucleotide

SEQ ID NO: 626863 - DNA, 55 bp, Artificial; identical to SEQ ID NO: 184806
  Synthetic oligonucleotide

SEQ ID NO: 626864 - DNA, 55 bp, Artificial; identical to SEQ ID NO: 184804
  Synthetic oligonucleotide

SEQ ID NO: 626865 - DNA, 55 bp, Artificial; identical to SEQ ID NO: 196985
  Synthetic oligonucleotide

SEQ ID NO: 626866 - DNA, 60 bp, Artificial; identical to SEQ ID NO: 174902
  Synthetic oligonucleotide

SEQ ID NO: 626867 - DNA, 55 bp, Artificial; identical to SEQ ID NO: 245505
  Synthetic oligonucleotide

SEQ ID NO: 626868 - DNA, 55 bp, Artificial; identical to SEQ ID NO: 142434
  Synthetic oligonucleotide

SEQ ID NO: 626869 - DNA, 53 bp, Artificial; identical to SEQ ID NO: 239238
  Synthetic oligonucleotide

SEQ ID NO: 626870 - DNA, 57 bp, Artificial; identical to SEQ ID NO: 256088
  Synthetic oligonucleotide

SEQ ID NO: 626871 - DNA, 50 bp, Artificial; identical to SEQ ID NO: 158230
  Synthetic oligonucleotide

SEQ ID NO: 626872 - DNA, 55 bp, Artificial; identical to SEQ ID NO: 198883
  Synthetic oligonucleotide

SEQ ID NO: 626873 - DNA, 55 bp, Artificial; identical to SEQ ID NO: 148354
  Synthetic oligonucleotide

SEQ ID NO: 626874 - DNA, 55 bp, Artificial; identical to SEQ ID NO: 184928
  Synthetic oligonucleotide

SEQ ID NO: 626875 - DNA, 55 bp, Artificial; identical to SEQ ID NO: 225010
  Synthetic oligonucleotide

SEQ ID NO: 626876 - DNA, 55 bp, Artificial; identical to SEQ ID NO: 233593
  Synthetic oligonucleotide

SEQ ID NO: 626877 - DNA, 55 bp, Artificial; identical to SEQ ID NO: 254508
  Synthetic oligonucleotide

SEQ ID NO: 626878 - DNA, 51 bp, Artificial; identical to SEQ ID NO: 160548
  Synthetic oligonucleotide

SEQ ID NO: 626879 - DNA, 53 bp, Artificial; identical to SEQ ID NO: 247884
  Synthetic oligonucleotide

SEQ ID NO: 626880 - DNA, 55 bp, Artificial; identical to SEQ ID NO: 151848
  Synthetic oligonucleotide

SEQ ID NO: 626881 - DNA, 55 bp, Artificial; identical to SEQ ID NO: 148353
  Synthetic oligonucleotide

SEQ ID NO: 626882 - DNA, 52 bp, Artificial; identical to SEQ ID NO: 142435
  Synthetic oligonucleotide

SEQ ID NO: 626883 - DNA, 54 bp, Artificial; identical to SEQ ID NO: 233945
  Synthetic oligonucleotide

SEQ ID NO: 626884 - DNA, 55 bp, Artificial; identical to SEQ ID NO: 245558
  Synthetic oligonucleotide

SEQ ID NO: 626885 - DNA, 55 bp, Artificial; identical to SEQ ID NO: 184887
  Synthetic oligonucleotide

SEQ ID NO: 626886 - DNA, 55 bp, Artificial; identical to SEQ ID NO: 254507
  Synthetic oligonucleotide

SEQ ID NO: 626887 - DNA, 55 bp, Artificial; identical to SEQ ID NO: 184886
  Synthetic oligonucleotide

SEQ ID NO: 626888 - DNA, 60 bp, Artificial; identical to SEQ ID NO: 203392
  Synthetic oligonucleotide

SEQ ID NO: 626889 - DNA, 50 bp, Artificial; identical to SEQ ID NO: 189802
  Synthetic oligonucleotide

SEQ ID NO: 626890 - DNA, 54 bp, Artificial; identical to SEQ ID NO: 199493
  Synthetic oligonucleotide

SEQ ID NO: 626891 - DNA, 58 bp, Artificial; identical to SEQ ID NO: 170867
  Synthetic oligonucleotide

SEQ ID NO: 626892 - DNA, 55 bp, Artificial; identical to SEQ ID NO: 212907
  Synthetic oligonucleotide

SEQ ID NO: 626893 - DNA, 55 bp, Artificial; identical to SEQ ID NO: 187748
  Synthetic oligonucleotide

SEQ ID NO: 626894 - DNA, 55 bp, Artificial; identical to SEQ ID NO: 171210
  Synthetic oligonucleotide

SEQ ID NO: 626895 - DNA, 55 bp, Artificial; identical to SEQ ID NO: 164564
  Synthetic oligonucleotide

SEQ ID NO: 626896 - DNA, 54 bp, Artificial; identical to SEQ ID NO: 257442
  Synthetic oligonucleotide

SEQ ID NO: 626897 - DNA, 55 bp, Artificial; identical to SEQ ID NO: 198880
  Synthetic oligonucleotide

SEQ ID NO: 626898 - DNA, 56 bp, Artificial; identical to SEQ ID NO: 154470
  Synthetic oligonucleotide

SEQ ID NO: 626899 - DNA, 51 bp, Artificial; identical to SEQ ID NO: 148296
  Synthetic oligonucleotide

SEQ ID NO: 626900 - DNA, 54 bp, Artificial; identical to SEQ ID NO: 201350
  Synthetic oligonucleotide

SEQ ID NO: 626901 - DNA, 55 bp, Artificial; identical to SEQ ID NO: 161119
  Synthetic oligonucleotide

SEQ ID NO: 626902 - DNA, 55 bp, Artificial; identical to SEQ ID NO: 155443
  Synthetic oligonucleotide

SEQ ID NO: 626903 - DNA, 53 bp, Artificial; identical to SEQ ID NO: 249963
  Synthetic oligonucleotide

SEQ ID NO: 626904 - DNA, 52 bp, Artificial; identical to SEQ ID NO: 157562
  Synthetic oligonucleotide

SEQ ID NO: 626905 - DNA, 50 bp, Artificial; identical to SEQ ID NO: 192041
  Synthetic oligonucleotide

SEQ ID NO: 626906 - DNA, 55 bp, Artificial; identical to SEQ ID NO: 159222
  Synthetic oligonucleotide

SEQ ID NO: 626907 - DNA, 51 bp, Artificial; identical to SEQ ID NO: 236440
  Synthetic oligonucleotide

SEQ ID NO: 626908 - DNA, 55 bp, Artificial; identical to SEQ ID NO: 184909
  Synthetic oligonucleotide

SEQ ID NO: 626909 - DNA, 56 bp, Artificial; identical to SEQ ID NO: 179908
  Synthetic oligonucleotide

SEQ ID NO: 626910 - DNA, 56 bp, Artificial; identical to SEQ ID NO: 247580
  Synthetic oligonucleotide

SEQ ID NO: 626911 - DNA, 54 bp, Artificial; identical to SEQ ID NO: 152005
  Synthetic oligonucleotide

SEQ ID NO: 626912 - DNA, 55 bp, Artificial; identical to SEQ ID NO: 258031
  Synthetic oligonucleotide

SEQ ID NO: 626913 - DNA, 51 bp, Artificial; identical to SEQ ID NO: 144591
  Synthetic oligonucleotide

SEQ ID NO: 626914 - DNA, 55 bp, Artificial; identical to SEQ ID NO: 238027
  Synthetic oligonucleotide

SEQ ID NO: 626915 - DNA, 54 bp, Artificial; identical to SEQ ID NO: 184897
  Synthetic oligonucleotide

SEQ ID NO: 626916 - DNA, 57 bp, Artificial; identical to SEQ ID NO: 247019
  Synthetic oligonucleotide

SEQ ID NO: 626917 - DNA, 55 bp, Artificial; identical to SEQ ID NO: 233589
  Synthetic oligonucleotide

SEQ ID NO: 626918 - DNA, 52 bp, Artificial; identical to SEQ ID NO: 165111
  Synthetic oligonucleotide

SEQ ID NO: 626919 - DNA, 55 bp, Artificial; identical to SEQ ID NO: 211388
  Synthetic oligonucleotide

SEQ ID NO: 626920 - DNA, 59 bp, Artificial; identical to SEQ ID NO: 176749
  Synthetic oligonucleotide

SEQ ID NO: 626921 - DNA, 55 bp, Artificial; identical to SEQ ID NO: 242837
  Synthetic oligonucleotide

SEQ ID NO: 626922 - DNA, 55 bp, Artificial; identical to SEQ ID NO: 184931
  Synthetic oligonucleotide

SEQ ID NO: 626923 - DNA, 55 bp, Artificial; identical to SEQ ID NO: 198878
  Synthetic oligonucleotide

SEQ ID NO: 626924 - DNA, 55 bp, Artificial; identical to SEQ ID NO: 238028
  Synthetic oligonucleotide

SEQ ID NO: 626925 - DNA, 55 bp, Artificial; identical to SEQ ID NO: 160309
  Synthetic oligonucleotide

SEQ ID NO: 626926 - DNA, 55 bp, Artificial; identical to SEQ ID NO: 144272
  Synthetic oligonucleotide

SEQ ID NO: 626927 - DNA, 52 bp, Artificial; identical to SEQ ID NO: 152094
  Synthetic oligonucleotide

SEQ ID NO: 626928 - DNA, 51 bp, Artificial; identical to SEQ ID NO: 254506
  Synthetic oligonucleotide

SEQ ID NO: 626929 - DNA, 55 bp, Artificial; identical to SEQ ID NO: 215562
  Synthetic oligonucleotide

SEQ ID NO: 626930 - DNA, 55 bp, Artificial; identical to SEQ ID NO: 208139
  Synthetic oligonucleotide

SEQ ID NO: 626931 - DNA, 55 bp, Artificial; identical to SEQ ID NO: 259043
  Synthetic oligonucleotide

SEQ ID NO: 626932 - DNA, 55 bp, Artificial; identical to SEQ ID NO: 249276
  Synthetic oligonucleotide

SEQ ID NO: 626933 - DNA, 55 bp, Artificial; identical to SEQ ID NO: 171174
  Synthetic oligonucleotide

SEQ ID NO: 626934 - DNA, 55 bp, Artificial; identical to SEQ ID NO: 234134
  Synthetic oligonucleotide

SEQ ID NO: 626935 - DNA, 55 bp, Artificial; identical to SEQ ID NO: 184598
  Synthetic oligonucleotide

SEQ ID NO: 626936 - DNA, 60 bp, Artificial; identical to SEQ ID NO: 247020
  Synthetic oligonucleotide

SEQ ID NO: 626937 - DNA, 55 bp, Artificial; identical to SEQ ID NO: 184595
  Synthetic oligonucleotide

SEQ ID NO: 626938 - DNA, 55 bp, Artificial; identical to SEQ ID NO: 258028
  Synthetic oligonucleotide

SEQ ID NO: 626939 - DNA, 52 bp, Artificial; identical to SEQ ID NO: 201699
  Synthetic oligonucleotide

SEQ ID NO: 626940 - DNA, 54 bp, Artificial; identical to SEQ ID NO: 184586
  Synthetic oligonucleotide

SEQ ID NO: 626941 - DNA, 55 bp, Artificial; identical to SEQ ID NO: 187950
  Synthetic oligonucleotide

SEQ ID NO: 626942 - DNA, 55 bp, Artificial; identical to SEQ ID NO: 249277
  Synthetic oligonucleotide

SEQ ID NO: 626943 - DNA, 55 bp, Artificial; identical to SEQ ID NO: 211389
  Synthetic oligonucleotide

SEQ ID NO: 626944 - DNA, 52 bp, Artificial; identical to SEQ ID NO: 199957
  Synthetic oligonucleotide

SEQ ID NO: 626945 - DNA, 60 bp, Artificial; identical to SEQ ID NO: 176705
  Synthetic oligonucleotide

SEQ ID NO: 626946 - DNA, 55 bp, Artificial; identical to SEQ ID NO: 159215
  Synthetic oligonucleotide

SEQ ID NO: 626947 - DNA, 53 bp, Artificial; identical to SEQ ID NO: 141258
  Synthetic oligonucleotide

SEQ ID NO: 626948 - DNA, 55 bp, Artificial; identical to SEQ ID NO: 142306
  Synthetic oligonucleotide

SEQ ID NO: 626949 - DNA, 52 bp, Artificial; identical to SEQ ID NO: 152619
  Synthetic oligonucleotide

SEQ ID NO: 626950 - DNA, 55 bp, Artificial; identical to SEQ ID NO: 184579
  Synthetic oligonucleotide

SEQ ID NO: 626951 - DNA, 55 bp, Artificial; identical to SEQ ID NO: 201326
  Synthetic oligonucleotide

SEQ ID NO: 626952 - DNA, 55 bp, Artificial; identical to SEQ ID NO: 205335
  Synthetic oligonucleotide

SEQ ID NO: 626953 - DNA, 55 bp, Artificial; identical to SEQ ID NO: 254505
  Synthetic oligonucleotide

SEQ ID NO: 626954 - DNA, 55 bp, Artificial; identical to SEQ ID NO: 225075
  Synthetic oligonucleotide

SEQ ID NO: 626955 - DNA, 52 bp, Artificial; identical to SEQ ID NO: 193754
  Synthetic oligonucleotide

SEQ ID NO: 626956 - DNA, 55 bp, Artificial; identical to SEQ ID NO: 148289
  Synthetic oligonucleotide

SEQ ID NO: 626957 - DNA, 55 bp, Artificial; identical to SEQ ID NO: 254504
  Synthetic oligonucleotide

SEQ ID NO: 626958 - DNA, 55 bp, Artificial; identical to SEQ ID NO: 161118
  Synthetic oligonucleotide

SEQ ID NO: 626959 - DNA, 52 bp, Artificial; identical to SEQ ID NO: 149619
  Synthetic oligonucleotide

SEQ ID NO: 626960 - DNA, 55 bp, Artificial; identical to SEQ ID NO: 253216
  Synthetic oligonucleotide

SEQ ID NO: 626961 - DNA, 55 bp, Artificial; identical to SEQ ID NO: 161117
  Synthetic oligonucleotide

SEQ ID NO: 626962 - DNA, 55 bp, Artificial; identical to SEQ ID NO: 221866
  Synthetic oligonucleotide

SEQ ID NO: 626963 - DNA, 52 bp, Artificial; identical to SEQ ID NO: 255585
  Synthetic oligonucleotide

SEQ ID NO: 626964 - DNA, 54 bp, Artificial; identical to SEQ ID NO: 151854
  Synthetic oligonucleotide

SEQ ID NO: 626965 - DNA, 54 bp, Artificial; identical to SEQ ID NO: 265766
  Synthetic oligonucleotide

SEQ ID NO: 626966 - DNA, 55 bp, Artificial; identical to SEQ ID NO: 249961
  Synthetic oligonucleotide

SEQ ID NO: 626967 - DNA, 55 bp, Artificial; identical to SEQ ID NO: 160321
  Synthetic oligonucleotide

SEQ ID NO: 626968 - DNA, 55 bp, Artificial; identical to SEQ ID NO: 261873
  Synthetic oligonucleotide

SEQ ID NO: 626969 - DNA, 55 bp, Artificial; identical to SEQ ID NO: 184572
  Synthetic oligonucleotide

SEQ ID NO: 626970 - DNA, 54 bp, Artificial; identical to SEQ ID NO: 185109
  Synthetic oligonucleotide

SEQ ID NO: 626971 - DNA, 55 bp, Artificial; identical to SEQ ID NO: 240200
  Synthetic oligonucleotide

SEQ ID NO: 626972 - DNA, 55 bp, Artificial; identical to SEQ ID NO: 159230
  Synthetic oligonucleotide

SEQ ID NO: 626973 - DNA, 55 bp, Artificial; identical to SEQ ID NO: 265695
  Synthetic oligonucleotide

SEQ ID NO: 626974 - DNA, 55 bp, Artificial; identical to SEQ ID NO: 233587
  Synthetic oligonucleotide

SEQ ID NO: 626975 - DNA, 50 bp, Artificial; identical to SEQ ID NO: 202602
  Synthetic oligonucleotide

SEQ ID NO: 626976 - DNA, 55 bp, Artificial; identical to SEQ ID NO: 211393
  Synthetic oligonucleotide

SEQ ID NO: 626977 - DNA, 55 bp, Artificial; identical to SEQ ID NO: 238029
  Synthetic oligonucleotide

SEQ ID NO: 626978 - DNA, 52 bp, Artificial; identical to SEQ ID NO: 208787
  Synthetic oligonucleotide

SEQ ID NO: 626979 - DNA, 51 bp, Artificial; identical to SEQ ID NO: 148284
  Synthetic oligonucleotide

SEQ ID NO: 626980 - DNA, 55 bp, Artificial; identical to SEQ ID NO: 148281
  Synthetic oligonucleotide

SEQ ID NO: 626981 - DNA, 55 bp, Artificial; identical to SEQ ID NO: 257137
  Synthetic oligonucleotide

SEQ ID NO: 626982 - DNA, 55 bp, Artificial; identical to SEQ ID NO: 222878
  Synthetic oligonucleotide

SEQ ID NO: 626983 - DNA, 55 bp, Artificial; identical to SEQ ID NO: 202361
  Synthetic oligonucleotide

SEQ ID NO: 626984 - DNA, 57 bp, Artificial; identical to SEQ ID NO: 153059
  Synthetic oligonucleotide

SEQ ID NO: 626985 - DNA, 55 bp, Artificial; identical to SEQ ID NO: 207414
  Synthetic oligonucleotide

SEQ ID NO: 626986 - DNA, 55 bp, Artificial; identical to SEQ ID NO: 249282
  Synthetic oligonucleotide

SEQ ID NO: 626987 - DNA, 55 bp, Artificial; identical to SEQ ID NO: 258025
  Synthetic oligonucleotide

SEQ ID NO: 626988 - DNA, 55 bp, Artificial; identical to SEQ ID NO: 202360
  Synthetic oligonucleotide

SEQ ID NO: 626989 - DNA, 55 bp, Artificial; identical to SEQ ID NO: 164637
  Synthetic oligonucleotide

SEQ ID NO: 626990 - DNA, 55 bp, Artificial; identical to SEQ ID NO: 220580
  Synthetic oligonucleotide

SEQ ID NO: 626991 - DNA, 55 bp, Artificial; identical to SEQ ID NO: 167488
  Synthetic oligonucleotide

SEQ ID NO: 626992 - DNA, 55 bp, Artificial; identical to SEQ ID NO: 184624
  Synthetic oligonucleotide

SEQ ID NO: 626993 - DNA, 55 bp, Artificial; identical to SEQ ID NO: 198876
  Synthetic oligonucleotide

SEQ ID NO: 626994 - DNA, 55 bp, Artificial; identical to SEQ ID NO: 161116
  Synthetic oligonucleotide

SEQ ID NO: 626995 - DNA, 58 bp, Artificial; identical to SEQ ID NO: 153047
  Synthetic oligonucleotide

SEQ ID NO: 626996 - DNA, 58 bp, Artificial; identical to SEQ ID NO: 176649
  Synthetic oligonucleotide

SEQ ID NO: 626997 - DNA, 55 bp, Artificial; identical to SEQ ID NO: 212908
  Synthetic oligonucleotide

SEQ ID NO: 626998 - DNA, 55 bp, Artificial; identical to SEQ ID NO: 253217
  Synthetic oligonucleotide

SEQ ID NO: 626999 - DNA, 55 bp, Artificial; identical to SEQ ID NO: 220579
  Synthetic oligonucleotide

SEQ ID NO: 627000 - DNA, 60 bp, Artificial; identical to SEQ ID NO: 224114
  Synthetic oligonucleotide

SEQ ID NO: 627001 - DNA, 55 bp, Artificial; identical to SEQ ID NO: 221877
  Synthetic oligonucleotide

SEQ ID NO: 627002 - DNA, 55 bp, Artificial; identical to SEQ ID NO: 202931
  Synthetic oligonucleotide

SEQ ID NO: 627003 - DNA, 54 bp, Artificial; identical to SEQ ID NO: 245553
  Synthetic oligonucleotide

SEQ ID NO: 627004 - DNA, 59 bp, Artificial; identical to SEQ ID NO: 155508
  Synthetic oligonucleotide

SEQ ID NO: 627005 - DNA, 55 bp, Artificial; identical to SEQ ID NO: 187751
  Synthetic oligonucleotide

SEQ ID NO: 627006 - DNA, 55 bp, Artificial; identical to SEQ ID NO: 238031
  Synthetic oligonucleotide

SEQ ID NO: 627007 - DNA, 55 bp, Artificial; identical to SEQ ID NO: 233586
  Synthetic oligonucleotide

SEQ ID NO: 627008 - DNA, 54 bp, Artificial; identical to SEQ ID NO: 144070
  Synthetic oligonucleotide

SEQ ID NO: 627009 - DNA, 54 bp, Artificial; identical to SEQ ID NO: 198874
  Synthetic oligonucleotide

SEQ ID NO: 627010 - DNA, 55 bp, Artificial; identical to SEQ ID NO: 254499
  Synthetic oligonucleotide

SEQ ID NO: 627011 - DNA, 52 bp, Artificial; identical to SEQ ID NO: 208786
  Synthetic oligonucleotide

SEQ ID NO: 627012 - DNA, 55 bp, Artificial; identical to SEQ ID NO: 169208
  Synthetic oligonucleotide

SEQ ID NO: 627013 - DNA, 51 bp, Artificial; identical to SEQ ID NO: 206490
  Synthetic oligonucleotide

SEQ ID NO: 627014 - DNA, 55 bp, Artificial; identical to SEQ ID NO: 171189
  Synthetic oligonucleotide

SEQ ID NO: 627015 - DNA, 54 bp, Artificial; identical to SEQ ID NO: 171188
  Synthetic oligonucleotide

SEQ ID NO: 627016 - DNA, 52 bp, Artificial; identical to SEQ ID NO: 208141
  Synthetic oligonucleotide

SEQ ID NO: 627017 - DNA, 55 bp, Artificial; identical to SEQ ID NO: 221899
  Synthetic oligonucleotide

SEQ ID NO: 627018 - DNA, 58 bp, Artificial; identical to SEQ ID NO: 201158
  Synthetic oligonucleotide

SEQ ID NO: 627019 - DNA, 55 bp, Artificial; identical to SEQ ID NO: 171186
  Synthetic oligonucleotide

SEQ ID NO: 627020 - DNA, 55 bp, Artificial; identical to SEQ ID NO: 171185
  Synthetic oligonucleotide

SEQ ID NO: 627021 - DNA, 60 bp, Artificial; identical to SEQ ID NO: 150764
  Synthetic oligonucleotide

SEQ ID NO: 627022 - DNA, 58 bp, Artificial; identical to SEQ ID NO: 256563
  Synthetic oligonucleotide

SEQ ID NO: 627023 - DNA, 55 bp, Artificial; identical to SEQ ID NO: 253214
  Synthetic oligonucleotide

SEQ ID NO: 627024 - DNA, 55 bp, Artificial; identical to SEQ ID NO: 159360
  Synthetic oligonucleotide

SEQ ID NO: 627025 - DNA, 53 bp, Artificial; identical to SEQ ID NO: 238033
  Synthetic oligonucleotide

SEQ ID NO: 627026 - DNA, 56 bp, Artificial; identical to SEQ ID NO: 217241
  Synthetic oligonucleotide

SEQ ID NO: 627027 - DNA, 55 bp, Artificial; identical to SEQ ID NO: 209433
  Synthetic oligonucleotide

SEQ ID NO: 627028 - DNA, 53 bp, Artificial; identical to SEQ ID NO: 206819
  Synthetic oligonucleotide

SEQ ID NO: 627029 - DNA, 55 bp, Artificial; identical to SEQ ID NO: 146342
  Synthetic oligonucleotide

SEQ ID NO: 627030 - DNA, 55 bp, Artificial; identical to SEQ ID NO: 208143
  Synthetic oligonucleotide

SEQ ID NO: 627031 - DNA, 55 bp, Artificial; identical to SEQ ID NO: 184610
  Synthetic oligonucleotide

SEQ ID NO: 627032 - DNA, 55 bp, Artificial; identical to SEQ ID NO: 261943
  Synthetic oligonucleotide

SEQ ID NO: 627033 - DNA, 50 bp, Artificial; identical to SEQ ID NO: 172865
  Synthetic oligonucleotide

SEQ ID NO: 627034 - DNA, 55 bp, Artificial; identical to SEQ ID NO: 190083
  Synthetic oligonucleotide

SEQ ID NO: 627035 - DNA, 57 bp, Artificial; identical to SEQ ID NO: 242135
  Synthetic oligonucleotide

SEQ ID NO: 627036 - DNA, 55 bp, Artificial; identical to SEQ ID NO: 184609
  Synthetic oligonucleotide

SEQ ID NO: 627037 - DNA, 57 bp, Artificial; identical to SEQ ID NO: 247022
  Synthetic oligonucleotide

SEQ ID NO: 627038 - DNA, 56 bp, Artificial; identical to SEQ ID NO: 151353
  Synthetic oligonucleotide

SEQ ID NO: 627039 - DNA, 54 bp, Artificial; identical to SEQ ID NO: 253212
  Synthetic oligonucleotide

SEQ ID NO: 627040 - DNA, 53 bp, Artificial; identical to SEQ ID NO: 184532
  Synthetic oligonucleotide

SEQ ID NO: 627041 - DNA, 55 bp, Artificial; identical to SEQ ID NO: 266182
  Synthetic oligonucleotide

SEQ ID NO: 627042 - DNA, 59 bp, Artificial; identical to SEQ ID NO: 150762
  Synthetic oligonucleotide

SEQ ID NO: 627043 - DNA, 55 bp, Artificial; identical to SEQ ID NO: 234004
  Synthetic oligonucleotide

SEQ ID NO: 627044 - DNA, 55 bp, Artificial; identical to SEQ ID NO: 249249
  Synthetic oligonucleotide

SEQ ID NO: 627045 - DNA, 51 bp, Artificial; identical to SEQ ID NO: 223787
  Synthetic oligonucleotide

SEQ ID NO: 627046 - DNA, 55 bp, Artificial; identical to SEQ ID NO: 196188
  Synthetic oligonucleotide

SEQ ID NO: 627047 - DNA, 50 bp, Artificial; identical to SEQ ID NO: 234743
  Synthetic oligonucleotide

SEQ ID NO: 627048 - DNA, 55 bp, Artificial; identical to SEQ ID NO: 240277
  Synthetic oligonucleotide

SEQ ID NO: 627049 - DNA, 55 bp, Artificial; identical to SEQ ID NO: 184522
  Synthetic oligonucleotide

SEQ ID NO: 627050 - DNA, 55 bp, Artificial; identical to SEQ ID NO: 237996
  Synthetic oligonucleotide

SEQ ID NO: 627051 - DNA, 54 bp, Artificial; identical to SEQ ID NO: 147301
  Synthetic oligonucleotide

SEQ ID NO: 627052 - DNA, 55 bp, Artificial; identical to SEQ ID NO: 187714
  Synthetic oligonucleotide

SEQ ID NO: 627053 - DNA, 50 bp, Artificial; identical to SEQ ID NO: 257090
  Synthetic oligonucleotide

SEQ ID NO: 627054 - DNA, 54 bp, Artificial; identical to SEQ ID NO: 266181
  Synthetic oligonucleotide

SEQ ID NO: 627055 - DNA, 50 bp, Artificial; identical to SEQ ID NO: 165866
  Synthetic oligonucleotide

SEQ ID NO: 627056 - DNA, 55 bp, Artificial; identical to SEQ ID NO: 151819
  Synthetic oligonucleotide

SEQ ID NO: 627057 - DNA, 55 bp, Artificial; identical to SEQ ID NO: 145161
  Synthetic oligonucleotide

SEQ ID NO: 627058 - DNA, 55 bp, Artificial; identical to SEQ ID NO: 245552
  Synthetic oligonucleotide

SEQ ID NO: 627059 - DNA, 52 bp, Artificial; identical to SEQ ID NO: 203949
  Synthetic oligonucleotide

SEQ ID NO: 627060 - DNA, 57 bp, Artificial; identical to SEQ ID NO: 141945
  Synthetic oligonucleotide

SEQ ID NO: 627061 - DNA, 54 bp, Artificial; identical to SEQ ID NO: 159359
  Synthetic oligonucleotide

SEQ ID NO: 627062 - DNA, 55 bp, Artificial; identical to SEQ ID NO: 212321
  Synthetic oligonucleotide

SEQ ID NO: 627063 - DNA, 54 bp, Artificial; identical to SEQ ID NO: 212909
  Synthetic oligonucleotide

SEQ ID NO: 627064 - DNA, 55 bp, Artificial; identical to SEQ ID NO: 220575
  Synthetic oligonucleotide

SEQ ID NO: 627065 - DNA, 53 bp, Artificial; identical to SEQ ID NO: 260025
  Synthetic oligonucleotide

SEQ ID NO: 627066 - DNA, 53 bp, Artificial; identical to SEQ ID NO: 242132
  Synthetic oligonucleotide

SEQ ID NO: 627067 - DNA, 58 bp, Artificial; identical to SEQ ID NO: 248390
  Synthetic oligonucleotide

SEQ ID NO: 627068 - DNA, 50 bp, Artificial; identical to SEQ ID NO: 240279
  Synthetic oligonucleotide

SEQ ID NO: 627069 - DNA, 54 bp, Artificial; identical to SEQ ID NO: 166153
  Synthetic oligonucleotide

SEQ ID NO: 627070 - DNA, 54 bp, Artificial; identical to SEQ ID NO: 185183
  Synthetic oligonucleotide

SEQ ID NO: 627071 - DNA, 55 bp, Artificial; identical to SEQ ID NO: 159358
  Synthetic oligonucleotide

SEQ ID NO: 627072 - DNA, 55 bp, Artificial; identical to SEQ ID NO: 211395
  Synthetic oligonucleotide

SEQ ID NO: 627073 - DNA, 53 bp, Artificial; identical to SEQ ID NO: 154447
  Synthetic oligonucleotide

SEQ ID NO: 627074 - DNA, 50 bp, Artificial; identical to SEQ ID NO: 211437
  Synthetic oligonucleotide

SEQ ID NO: 627075 - DNA, 55 bp, Artificial; identical to SEQ ID NO: 211438
  Synthetic oligonucleotide

SEQ ID NO: 627076 - DNA, 55 bp, Artificial; identical to SEQ ID NO: 254493
  Synthetic oligonucleotide

SEQ ID NO: 627077 - DNA, 53 bp, Artificial; identical to SEQ ID NO: 217699
  Synthetic oligonucleotide

SEQ ID NO: 627078 - DNA, 55 bp, Artificial; identical to SEQ ID NO: 216516
  Synthetic oligonucleotide

SEQ ID NO: 627079 - DNA, 54 bp, Artificial; identical to SEQ ID NO: 194716
  Synthetic oligonucleotide

SEQ ID NO: 627080 - DNA, 49 bp, Artificial; identical to SEQ ID NO: 149824
  Synthetic oligonucleotide

SEQ ID NO: 627081 - DNA, 55 bp, Artificial; identical to SEQ ID NO: 233749
  Synthetic oligonucleotide

SEQ ID NO: 627082 - DNA, 56 bp, Artificial; identical to SEQ ID NO: 239535
  Synthetic oligonucleotide

SEQ ID NO: 627083 - DNA, 53 bp, Artificial; identical to SEQ ID NO: 144526
  Synthetic oligonucleotide

SEQ ID NO: 627084 - DNA, 54 bp, Artificial; identical to SEQ ID NO: 151321
  Synthetic oligonucleotide

SEQ ID NO: 627085 - DNA, 55 bp, Artificial; identical to SEQ ID NO: 159343
  Synthetic oligonucleotide

SEQ ID NO: 627086 - DNA, 55 bp, Artificial; identical to SEQ ID NO: 194717
  Synthetic oligonucleotide

SEQ ID NO: 627087 - DNA, 53 bp, Artificial; identical to SEQ ID NO: 149485
  Synthetic oligonucleotide

SEQ ID NO: 627088 - DNA, 55 bp, Artificial; identical to SEQ ID NO: 217700
  Synthetic oligonucleotide

SEQ ID NO: 627089 - DNA, 55 bp, Artificial; identical to SEQ ID NO: 187715
  Synthetic oligonucleotide

SEQ ID NO: 627090 - DNA, 52 bp, Artificial; identical to SEQ ID NO: 242130
  Synthetic oligonucleotide

SEQ ID NO: 627091 - DNA, 57 bp, Artificial; identical to SEQ ID NO: 166105
  Synthetic oligonucleotide

SEQ ID NO: 627092 - DNA, 56 bp, Artificial; identical to SEQ ID NO: 166201
  Synthetic oligonucleotide

SEQ ID NO: 627093 - DNA, 55 bp, Artificial; identical to SEQ ID NO: 144700
  Synthetic oligonucleotide

SEQ ID NO: 627094 - DNA, 55 bp, Artificial; identical to SEQ ID NO: 148317
  Synthetic oligonucleotide

SEQ ID NO: 627095 - DNA, 54 bp, Artificial; identical to SEQ ID NO: 148315
  Synthetic oligonucleotide

SEQ ID NO: 627096 - DNA, 51 bp, Artificial; identical to SEQ ID NO: 246685
  Synthetic oligonucleotide

SEQ ID NO: 627097 - DNA, 55 bp, Artificial; identical to SEQ ID NO: 245549
  Synthetic oligonucleotide

SEQ ID NO: 627098 - DNA, 53 bp, Artificial; identical to SEQ ID NO: 201836
  Synthetic oligonucleotide

SEQ ID NO: 627099 - DNA, 51 bp, Artificial; identical to SEQ ID NO: 165288
  Synthetic oligonucleotide

SEQ ID NO: 627100 - DNA, 55 bp, Artificial; identical to SEQ ID NO: 245548
  Synthetic oligonucleotide

SEQ ID NO: 627101 - DNA, 52 bp, Artificial; identical to SEQ ID NO: 179748
  Synthetic oligonucleotide

SEQ ID NO: 627102 - DNA, 53 bp, Artificial; identical to SEQ ID NO: 157471
  Synthetic oligonucleotide

SEQ ID NO: 627103 - DNA, 55 bp, Artificial; identical to SEQ ID NO: 188418
  Synthetic oligonucleotide

SEQ ID NO: 627104 - DNA, 54 bp, Artificial; identical to SEQ ID NO: 194719
  Synthetic oligonucleotide

SEQ ID NO: 627105 - DNA, 55 bp, Artificial; identical to SEQ ID NO: 254487
  Synthetic oligonucleotide

SEQ ID NO: 627106 - DNA, 55 bp, Artificial; identical to SEQ ID NO: 164641
  Synthetic oligonucleotide

SEQ ID NO: 627107 - DNA, 56 bp, Artificial; identical to SEQ ID NO: 150759
  Synthetic oligonucleotide

SEQ ID NO: 627108 - DNA, 59 bp, Artificial; identical to SEQ ID NO: 242126
  Synthetic oligonucleotide

SEQ ID NO: 627109 - DNA, 55 bp, Artificial; identical to SEQ ID NO: 160294
  Synthetic oligonucleotide

SEQ ID NO: 627110 - DNA, 51 bp, Artificial; identical to SEQ ID NO: 249450
  Synthetic oligonucleotide

SEQ ID NO: 627111 - DNA, 57 bp, Artificial; identical to SEQ ID NO: 166035
  Synthetic oligonucleotide

SEQ ID NO: 627112 - DNA, 55 bp, Artificial; identical to SEQ ID NO: 201624
  Synthetic oligonucleotide

SEQ ID NO: 627113 - DNA, 54 bp, Artificial; identical to SEQ ID NO: 184564
  Synthetic oligonucleotide

SEQ ID NO: 627114 - DNA, 60 bp, Artificial; identical to SEQ ID NO: 242730
  Synthetic oligonucleotide

SEQ ID NO: 627115 - DNA, 55 bp, Artificial; identical to SEQ ID NO: 202929
  Synthetic oligonucleotide

SEQ ID NO: 627116 - DNA, 56 bp, Artificial; identical to SEQ ID NO: 201837
  Synthetic oligonucleotide

SEQ ID NO: 627117 - DNA, 51 bp, Artificial; identical to SEQ ID NO: 149823
  Synthetic oligonucleotide

SEQ ID NO: 627118 - DNA, 53 bp, Artificial; identical to SEQ ID NO: 185681
  Synthetic oligonucleotide

SEQ ID NO: 627119 - DNA, 53 bp, Artificial; identical to SEQ ID NO: 198867
  Synthetic oligonucleotide

SEQ ID NO: 627120 - DNA, 60 bp, Artificial; identical to SEQ ID NO: 247025
  Synthetic oligonucleotide

SEQ ID NO: 627121 - DNA, 52 bp, Artificial; identical to SEQ ID NO: 145024
  Synthetic oligonucleotide

SEQ ID NO: 627122 - DNA, 55 bp, Artificial; identical to SEQ ID NO: 162115
  Synthetic oligonucleotide

SEQ ID NO: 627123 - DNA, 55 bp, Artificial; identical to SEQ ID NO: 193740
  Synthetic oligonucleotide

SEQ ID NO: 627124 - DNA, 54 bp, Artificial; identical to SEQ ID NO: 192023
  Synthetic oligonucleotide

SEQ ID NO: 627125 - DNA, 55 bp, Artificial; identical to SEQ ID NO: 216408
  Synthetic oligonucleotide

SEQ ID NO: 627126 - DNA, 54 bp, Artificial; identical to SEQ ID NO: 222859
  Synthetic oligonucleotide

SEQ ID NO: 627127 - DNA, 55 bp, Artificial; identical to SEQ ID NO: 141568
  Synthetic oligonucleotide

SEQ ID NO: 627128 - DNA, 55 bp, Artificial; identical to SEQ ID NO: 198801
  Synthetic oligonucleotide

SEQ ID NO: 627129 - DNA, 55 bp, Artificial; identical to SEQ ID NO: 233743
  Synthetic oligonucleotide

SEQ ID NO: 627130 - DNA, 55 bp, Artificial; identical to SEQ ID NO: 198800
  Synthetic oligonucleotide

SEQ ID NO: 627131 - DNA, 55 bp, Artificial; identical to SEQ ID NO: 148313
  Synthetic oligonucleotide

SEQ ID NO: 627132 - DNA, 55 bp, Artificial; identical to SEQ ID NO: 221589
  Synthetic oligonucleotide

SEQ ID NO: 627133 - DNA, 55 bp, Artificial; identical to SEQ ID NO: 168341
  Synthetic oligonucleotide

SEQ ID NO: 627134 - DNA, 59 bp, Artificial; identical to SEQ ID NO: 266298
  Synthetic oligonucleotide

SEQ ID NO: 627135 - DNA, 55 bp, Artificial; identical to SEQ ID NO: 220574
  Synthetic oligonucleotide

SEQ ID NO: 627136 - DNA, 55 bp, Artificial; identical to SEQ ID NO: 245547
  Synthetic oligonucleotide

SEQ ID NO: 627137 - DNA, 55 bp, Artificial; identical to SEQ ID NO: 245546
  Synthetic oligonucleotide

SEQ ID NO: 627138 - DNA, 55 bp, Artificial; identical to SEQ ID NO: 159381
  Synthetic oligonucleotide

SEQ ID NO: 627139 - DNA, 55 bp, Artificial; identical to SEQ ID NO: 234129
  Synthetic oligonucleotide

SEQ ID NO: 627140 - DNA, 51 bp, Artificial; identical to SEQ ID NO: 149822
  Synthetic oligonucleotide

SEQ ID NO: 627141 - DNA, 55 bp, Artificial; identical to SEQ ID NO: 174534
  Synthetic oligonucleotide

SEQ ID NO: 627142 - DNA, 60 bp, Artificial; identical to SEQ ID NO: 195047
  Synthetic oligonucleotide

SEQ ID NO: 627143 - DNA, 55 bp, Artificial; identical to SEQ ID NO: 217704
  Synthetic oligonucleotide

SEQ ID NO: 627144 - DNA, 56 bp, Artificial; identical to SEQ ID NO: 203052
  Synthetic oligonucleotide

SEQ ID NO: 627145 - DNA, 52 bp, Artificial; identical to SEQ ID NO: 141569
  Synthetic oligonucleotide

SEQ ID NO: 627146 - DNA, 52 bp, Artificial; identical to SEQ ID NO: 169210
  Synthetic oligonucleotide

SEQ ID NO: 627147 - DNA, 55 bp, Artificial; identical to SEQ ID NO: 211440
  Synthetic oligonucleotide

SEQ ID NO: 627148 - DNA, 55 bp, Artificial; identical to SEQ ID NO: 162116
  Synthetic oligonucleotide

SEQ ID NO: 627149 - DNA, 51 bp, Artificial; identical to SEQ ID NO: 209722
  Synthetic oligonucleotide

SEQ ID NO: 627150 - DNA, 55 bp, Artificial; identical to SEQ ID NO: 198799
  Synthetic oligonucleotide

SEQ ID NO: 627151 - DNA, 55 bp, Artificial; identical to SEQ ID NO: 159380
  Synthetic oligonucleotide

SEQ ID NO: 627152 - DNA, 58 bp, Artificial; identical to SEQ ID NO: 257431
  Synthetic oligonucleotide

SEQ ID NO: 627153 - DNA, 60 bp, Artificial; identical to SEQ ID NO: 177201
  Synthetic oligonucleotide

SEQ ID NO: 627154 - DNA, 55 bp, Artificial; identical to SEQ ID NO: 217705
  Synthetic oligonucleotide

SEQ ID NO: 627155 - DNA, 51 bp, Artificial; identical to SEQ ID NO: 169433
  Synthetic oligonucleotide

SEQ ID NO: 627156 - DNA, 55 bp, Artificial; identical to SEQ ID NO: 159375
  Synthetic oligonucleotide

SEQ ID NO: 627157 - DNA, 55 bp, Artificial; identical to SEQ ID NO: 144275
  Synthetic oligonucleotide

SEQ ID NO: 627158 - DNA, 55 bp, Artificial; identical to SEQ ID NO: 159372
  Synthetic oligonucleotide

SEQ ID NO: 627159 - DNA, 51 bp, Artificial; identical to SEQ ID NO: 167153
  Synthetic oligonucleotide

SEQ ID NO: 627160 - DNA, 60 bp, Artificial; identical to SEQ ID NO: 216527
  Synthetic oligonucleotide

SEQ ID NO: 627161 - DNA, 55 bp, Artificial; identical to SEQ ID NO: 257971
  Synthetic oligonucleotide

SEQ ID NO: 627162 - DNA, 53 bp, Artificial; identical to SEQ ID NO: 192061
  Synthetic oligonucleotide

SEQ ID NO: 627163 - DNA, 55 bp, Artificial; identical to SEQ ID NO: 164644
  Synthetic oligonucleotide

SEQ ID NO: 627164 - DNA, 60 bp, Artificial; identical to SEQ ID NO: 192012
  Synthetic oligonucleotide

SEQ ID NO: 627165 - DNA, 55 bp, Artificial; identical to SEQ ID NO: 148310
  Synthetic oligonucleotide

SEQ ID NO: 627166 - DNA, 58 bp, Artificial; identical to SEQ ID NO: 170869
  Synthetic oligonucleotide

SEQ ID NO: 627167 - DNA, 55 bp, Artificial; identical to SEQ ID NO: 191953
  Synthetic oligonucleotide

SEQ ID NO: 627168 - DNA, 55 bp, Artificial; identical to SEQ ID NO: 184557
  Synthetic oligonucleotide

SEQ ID NO: 627169 - DNA, 55 bp, Artificial; identical to SEQ ID NO: 208350
  Synthetic oligonucleotide

SEQ ID NO: 627170 - DNA, 59 bp, Artificial; identical to SEQ ID NO: 195025
  Synthetic oligonucleotide

SEQ ID NO: 627171 - DNA, 54 bp, Artificial; identical to SEQ ID NO: 225016
  Synthetic oligonucleotide

SEQ ID NO: 627172 - DNA, 55 bp, Artificial; identical to SEQ ID NO: 237998
  Synthetic oligonucleotide

SEQ ID NO: 627173 - DNA, 55 bp, Artificial; identical to SEQ ID NO: 240284
  Synthetic oligonucleotide

SEQ ID NO: 627174 - DNA, 56 bp, Artificial; identical to SEQ ID NO: 217277
  Synthetic oligonucleotide

SEQ ID NO: 627175 - DNA, 55 bp, Artificial; identical to SEQ ID NO: 184552
  Synthetic oligonucleotide

SEQ ID NO: 627176 - DNA, 55 bp, Artificial; identical to SEQ ID NO: 144064
  Synthetic oligonucleotide

SEQ ID NO: 627177 - DNA, 58 bp, Artificial; identical to SEQ ID NO: 247026
  Synthetic oligonucleotide

SEQ ID NO: 627178 - DNA, 60 bp, Artificial; identical to SEQ ID NO: 152518
  Synthetic oligonucleotide

SEQ ID NO: 627179 - DNA, 51 bp, Artificial; identical to SEQ ID NO: 167146
  Synthetic oligonucleotide

SEQ ID NO: 627180 - DNA, 55 bp, Artificial; identical to SEQ ID NO: 174540
  Synthetic oligonucleotide

SEQ ID NO: 627181 - DNA, 55 bp, Artificial; identical to SEQ ID NO: 194720
  Synthetic oligonucleotide

SEQ ID NO: 627182 - DNA, 55 bp, Artificial; identical to SEQ ID NO: 240286
  Synthetic oligonucleotide

SEQ ID NO: 627183 - DNA, 50 bp, Artificial; identical to SEQ ID NO: 160468
  Synthetic oligonucleotide

SEQ ID NO: 627184 - DNA, 57 bp, Artificial; identical to SEQ ID NO: 175224
  Synthetic oligonucleotide

SEQ ID NO: 627185 - DNA, 54 bp, Artificial; identical to SEQ ID NO: 245542
  Synthetic oligonucleotide

SEQ ID NO: 627186 - DNA, 56 bp, Artificial; identical to SEQ ID NO: 247575
  Synthetic oligonucleotide

SEQ ID NO: 627187 - DNA, 55 bp, Artificial; identical to SEQ ID NO: 174488
  Synthetic oligonucleotide

SEQ ID NO: 627188 - DNA, 59 bp, Artificial; identical to SEQ ID NO: 209144
  Synthetic oligonucleotide

SEQ ID NO: 627189 - DNA, 52 bp, Artificial; identical to SEQ ID NO: 198797
  Synthetic oligonucleotide

SEQ ID NO: 627190 - DNA, 55 bp, Artificial; identical to SEQ ID NO: 245541
  Synthetic oligonucleotide

SEQ ID NO: 627191 - DNA, 55 bp, Artificial; identical to SEQ ID NO: 262803
  Synthetic oligonucleotide

SEQ ID NO: 627192 - DNA, 56 bp, Artificial; identical to SEQ ID NO: 166221
  Synthetic oligonucleotide

SEQ ID NO: 627193 - DNA, 58 bp, Artificial; identical to SEQ ID NO: 242123
  Synthetic oligonucleotide

SEQ ID NO: 627194 - DNA, 55 bp, Artificial; identical to SEQ ID NO: 257117
  Synthetic oligonucleotide

SEQ ID NO: 627195 - DNA, 55 bp, Artificial; identical to SEQ ID NO: 154101
  Synthetic oligonucleotide

SEQ ID NO: 627196 - DNA, 55 bp, Artificial; identical to SEQ ID NO: 245540
  Synthetic oligonucleotide

SEQ ID NO: 627197 - DNA, 53 bp, Artificial; identical to SEQ ID NO: 265716
  Synthetic oligonucleotide

SEQ ID NO: 627198 - DNA, 55 bp, Artificial; identical to SEQ ID NO: 245539
  Synthetic oligonucleotide

SEQ ID NO: 627199 - DNA, 54 bp, Artificial; identical to SEQ ID NO: 205634
  Synthetic oligonucleotide

SEQ ID NO: 627200 - DNA, 55 bp, Artificial; identical to SEQ ID NO: 217707
  Synthetic oligonucleotide

SEQ ID NO: 627201 - DNA, 60 bp, Artificial; identical to SEQ ID NO: 177199
  Synthetic oligonucleotide

SEQ ID NO: 627202 - DNA, 51 bp, Artificial; identical to SEQ ID NO: 216834
  Synthetic oligonucleotide

SEQ ID NO: 627203 - DNA, 56 bp, Artificial; identical to SEQ ID NO: 152520
  Synthetic oligonucleotide

SEQ ID NO: 627204 - DNA, 53 bp, Artificial; identical to SEQ ID NO: 149489
  Synthetic oligonucleotide

SEQ ID NO: 627205 - DNA, 55 bp, Artificial; identical to SEQ ID NO: 162117
  Synthetic oligonucleotide

SEQ ID NO: 627206 - DNA, 55 bp, Artificial; identical to SEQ ID NO: 242122
  Synthetic oligonucleotide

SEQ ID NO: 627207 - DNA, 55 bp, Artificial; identical to SEQ ID NO: 207416
  Synthetic oligonucleotide

SEQ ID NO: 627208 - DNA, 53 bp, Artificial; identical to SEQ ID NO: 242121
  Synthetic oligonucleotide

SEQ ID NO: 627209 - DNA, 54 bp, Artificial; identical to SEQ ID NO: 159853
  Synthetic oligonucleotide

SEQ ID NO: 627210 - DNA, 55 bp, Artificial; identical to SEQ ID NO: 217708
  Synthetic oligonucleotide

SEQ ID NO: 627211 - DNA, 50 bp, Artificial; identical to SEQ ID NO: 246899
  Synthetic oligonucleotide

SEQ ID NO: 627212 - DNA, 55 bp, Artificial; identical to SEQ ID NO: 152409
  Synthetic oligonucleotide

SEQ ID NO: 627213 - DNA, 53 bp, Artificial; identical to SEQ ID NO: 249255
  Synthetic oligonucleotide

SEQ ID NO: 627214 - DNA, 51 bp, Artificial; identical to SEQ ID NO: 208881
  Synthetic oligonucleotide

SEQ ID NO: 627215 - DNA, 58 bp, Artificial; identical to SEQ ID NO: 239323
  Synthetic oligonucleotide

SEQ ID NO: 627216 - DNA, 55 bp, Artificial; identical to SEQ ID NO: 164646
  Synthetic oligonucleotide

SEQ ID NO: 627217 - DNA, 53 bp, Artificial; identical to SEQ ID NO: 171033
  Synthetic oligonucleotide

SEQ ID NO: 627218 - DNA, 55 bp, Artificial; identical to SEQ ID NO: 164647
  Synthetic oligonucleotide

SEQ ID NO: 627219 - DNA, 55 bp, Artificial; identical to SEQ ID NO: 245534
  Synthetic oligonucleotide

SEQ ID NO: 627220 - DNA, 55 bp, Artificial; identical to SEQ ID NO: 223383
  Synthetic oligonucleotide

SEQ ID NO: 627221 - DNA, 53 bp, Artificial; identical to SEQ ID NO: 211545
  Synthetic oligonucleotide

SEQ ID NO: 627222 - DNA, 55 bp, Artificial; identical to SEQ ID NO: 164648
  Synthetic oligonucleotide

SEQ ID NO: 627223 - DNA, 54 bp, Artificial; identical to SEQ ID NO: 254612
  Synthetic oligonucleotide

SEQ ID NO: 627224 - DNA, 55 bp, Artificial; identical to SEQ ID NO: 201303
  Synthetic oligonucleotide

SEQ ID NO: 627225 - DNA, 55 bp, Artificial; identical to SEQ ID NO: 159363
  Synthetic oligonucleotide

SEQ ID NO: 627226 - DNA, 55 bp, Artificial; identical to SEQ ID NO: 171166
  Synthetic oligonucleotide

SEQ ID NO: 627227 - DNA, 53 bp, Artificial; identical to SEQ ID NO: 185670
  Synthetic oligonucleotide

SEQ ID NO: 627228 - DNA, 55 bp, Artificial; identical to SEQ ID NO: 148303
  Synthetic oligonucleotide

SEQ ID NO: 627229 - DNA, 55 bp, Artificial; identical to SEQ ID NO: 164649
  Synthetic oligonucleotide

SEQ ID NO: 627230 - DNA, 60 bp, Artificial; identical to SEQ ID NO: 212288
  Synthetic oligonucleotide

SEQ ID NO: 627231 - DNA, 55 bp, Artificial; identical to SEQ ID NO: 148302
  Synthetic oligonucleotide

SEQ ID NO: 627232 - DNA, 55 bp, Artificial; identical to SEQ ID NO: 168342
  Synthetic oligonucleotide

SEQ ID NO: 627233 - DNA, 59 bp, Artificial; identical to SEQ ID NO: 242118
  Synthetic oligonucleotide

SEQ ID NO: 627234 - DNA, 55 bp, Artificial; identical to SEQ ID NO: 168343
  Synthetic oligonucleotide

SEQ ID NO: 627235 - DNA, 55 bp, Artificial; identical to SEQ ID NO: 148301
  Synthetic oligonucleotide

SEQ ID NO: 627236 - DNA, 55 bp, Artificial; identical to SEQ ID NO: 249256
  Synthetic oligonucleotide

SEQ ID NO: 627237 - DNA, 60 bp, Artificial; identical to SEQ ID NO: 144704
  Synthetic oligonucleotide

SEQ ID NO: 627238 - DNA, 60 bp, Artificial; identical to SEQ ID NO: 248389
  Synthetic oligonucleotide

SEQ ID NO: 627239 - DNA, 55 bp, Artificial; identical to SEQ ID NO: 159362
  Synthetic oligonucleotide

SEQ ID NO: 627240 - DNA, 55 bp, Artificial; identical to SEQ ID NO: 208353
  Synthetic oligonucleotide

SEQ ID NO: 627241 - DNA, 55 bp, Artificial; identical to SEQ ID NO: 240305
  Synthetic oligonucleotide

SEQ ID NO: 627242 - DNA, 52 bp, Artificial; identical to SEQ ID NO: 149622
  Synthetic oligonucleotide

SEQ ID NO: 627243 - DNA, 59 bp, Artificial; identical to SEQ ID NO: 242741
  Synthetic oligonucleotide

SEQ ID NO: 627244 - DNA, 52 bp, Artificial; identical to SEQ ID NO: 246480
  Synthetic oligonucleotide

SEQ ID NO: 627245 - DNA, 53 bp, Artificial; identical to SEQ ID NO: 221666
  Synthetic oligonucleotide

SEQ ID NO: 627246 - DNA, 55 bp, Artificial; identical to SEQ ID NO: 148299
  Synthetic oligonucleotide

SEQ ID NO: 627247 - DNA, 55 bp, Artificial; identical to SEQ ID NO: 223385
  Synthetic oligonucleotide

SEQ ID NO: 627248 - DNA, 57 bp, Artificial; identical to SEQ ID NO: 179708
  Synthetic oligonucleotide

SEQ ID NO: 627249 - DNA, 55 bp, Artificial; identical to SEQ ID NO: 174494
  Synthetic oligonucleotide

SEQ ID NO: 627250 - DNA, 55 bp, Artificial; identical to SEQ ID NO: 161508
  Synthetic oligonucleotide

SEQ ID NO: 627251 - DNA, 55 bp, Artificial; identical to SEQ ID NO: 202357
  Synthetic oligonucleotide

SEQ ID NO: 627252 - DNA, 51 bp, Artificial; identical to SEQ ID NO: 200168
  Synthetic oligonucleotide

SEQ ID NO: 627253 - DNA, 55 bp, Artificial; identical to SEQ ID NO: 184723
  Synthetic oligonucleotide

SEQ ID NO: 627254 - DNA, 55 bp, Artificial; identical to SEQ ID NO: 184722
  Synthetic oligonucleotide

SEQ ID NO: 627255 - DNA, 58 bp, Artificial; identical to SEQ ID NO: 242176
  Synthetic oligonucleotide

SEQ ID NO: 627256 - DNA, 51 bp, Artificial; identical to SEQ ID NO: 190088
  Synthetic oligonucleotide

SEQ ID NO: 627257 - DNA, 55 bp, Artificial; identical to SEQ ID NO: 168344
  Synthetic oligonucleotide

SEQ ID NO: 627258 - DNA, 55 bp, Artificial; identical to SEQ ID NO: 205328
  Synthetic oligonucleotide

SEQ ID NO: 627259 - DNA, 55 bp, Artificial; identical to SEQ ID NO: 187719
  Synthetic oligonucleotide

SEQ ID NO: 627260 - DNA, 54 bp, Artificial; identical to SEQ ID NO: 174821
  Synthetic oligonucleotide

SEQ ID NO: 627261 - DNA, 55 bp, Artificial; identical to SEQ ID NO: 187720
  Synthetic oligonucleotide

SEQ ID NO: 627262 - DNA, 55 bp, Artificial; identical to SEQ ID NO: 240302
  Synthetic oligonucleotide

SEQ ID NO: 627263 - DNA, 53 bp, Artificial; identical to SEQ ID NO: 185576
  Synthetic oligonucleotide

SEQ ID NO: 627264 - DNA, 55 bp, Artificial; identical to SEQ ID NO: 142309
  Synthetic oligonucleotide

SEQ ID NO: 627265 - DNA, 55 bp, Artificial; identical to SEQ ID NO: 148461
  Synthetic oligonucleotide

SEQ ID NO: 627266 - DNA, 55 bp, Artificial; identical to SEQ ID NO: 151825
  Synthetic oligonucleotide

SEQ ID NO: 627267 - DNA, 55 bp, Artificial; identical to SEQ ID NO: 211445
  Synthetic oligonucleotide

SEQ ID NO: 627268 - DNA, 55 bp, Artificial; identical to SEQ ID NO: 223386
  Synthetic oligonucleotide

SEQ ID NO: 627269 - DNA, 55 bp, Artificial; identical to SEQ ID NO: 254610
  Synthetic oligonucleotide

SEQ ID NO: 627270 - DNA, 55 bp, Artificial; identical to SEQ ID NO: 254609
  Synthetic oligonucleotide

SEQ ID NO: 627271 - DNA, 58 bp, Artificial; identical to SEQ ID NO: 224902
  Synthetic oligonucleotide

SEQ ID NO: 627272 - DNA, 55 bp, Artificial; identical to SEQ ID NO: 142310
  Synthetic oligonucleotide

SEQ ID NO: 627273 - DNA, 55 bp, Artificial; identical to SEQ ID NO: 162118
  Synthetic oligonucleotide

SEQ ID NO: 627274 - DNA, 55 bp, Artificial; identical to SEQ ID NO: 148459
  Synthetic oligonucleotide

SEQ ID NO: 627275 - DNA, 52 bp, Artificial; identical to SEQ ID NO: 174499
  Synthetic oligonucleotide

SEQ ID NO: 627276 - DNA, 54 bp, Artificial; identical to SEQ ID NO: 162120
  Synthetic oligonucleotide

SEQ ID NO: 627277 - DNA, 55 bp, Artificial; identical to SEQ ID NO: 254607
  Synthetic oligonucleotide

SEQ ID NO: 627278 - DNA, 55 bp, Artificial; identical to SEQ ID NO: 225074
  Synthetic oligonucleotide

SEQ ID NO: 627279 - DNA, 55 bp, Artificial; identical to SEQ ID NO: 168405
  Synthetic oligonucleotide

SEQ ID NO: 627280 - DNA, 55 bp, Artificial; identical to SEQ ID NO: 159361
  Synthetic oligonucleotide

SEQ ID NO: 627281 - DNA, 55 bp, Artificial; identical to SEQ ID NO: 253855
  Synthetic oligonucleotide

SEQ ID NO: 627282 - DNA, 55 bp, Artificial; identical to SEQ ID NO: 169212
  Synthetic oligonucleotide

SEQ ID NO: 627283 - DNA, 55 bp, Artificial; identical to SEQ ID NO: 203808
  Synthetic oligonucleotide

SEQ ID NO: 627284 - DNA, 55 bp, Artificial; identical to SEQ ID NO: 198795
  Synthetic oligonucleotide

SEQ ID NO: 627285 - DNA, 55 bp, Artificial; identical to SEQ ID NO: 218170
  Synthetic oligonucleotide

SEQ ID NO: 627286 - DNA, 55 bp, Artificial; identical to SEQ ID NO: 191948
  Synthetic oligonucleotide

SEQ ID NO: 627287 - DNA, 55 bp, Artificial; identical to SEQ ID NO: 159308
  Synthetic oligonucleotide

SEQ ID NO: 627288 - DNA, 55 bp, Artificial; identical to SEQ ID NO: 184766
  Synthetic oligonucleotide

SEQ ID NO: 627289 - DNA, 55 bp, Artificial; identical to SEQ ID NO: 233740
  Synthetic oligonucleotide

SEQ ID NO: 627290 - DNA, 55 bp, Artificial; identical to SEQ ID NO: 197032
  Synthetic oligonucleotide

SEQ ID NO: 627291 - DNA, 51 bp, Artificial; identical to SEQ ID NO: 218169
  Synthetic oligonucleotide

SEQ ID NO: 627292 - DNA, 54 bp, Artificial; identical to SEQ ID NO: 150753
  Synthetic oligonucleotide

SEQ ID NO: 627293 - DNA, 55 bp, Artificial; identical to SEQ ID NO: 234127
  Synthetic oligonucleotide

SEQ ID NO: 627294 - DNA, 55 bp, Artificial; identical to SEQ ID NO: 184764
  Synthetic oligonucleotide

SEQ ID NO: 627295 - DNA, 55 bp, Artificial; identical to SEQ ID NO: 234126
  Synthetic oligonucleotide

SEQ ID NO: 627296 - DNA, 55 bp, Artificial; identical to SEQ ID NO: 145160
  Synthetic oligonucleotide

SEQ ID NO: 627297 - DNA, 54 bp, Artificial; identical to SEQ ID NO: 149207
  Synthetic oligonucleotide

SEQ ID NO: 627298 - DNA, 55 bp, Artificial; identical to SEQ ID NO: 223389
  Synthetic oligonucleotide

SEQ ID NO: 627299 - DNA, 55 bp, Artificial; identical to SEQ ID NO: 212542
  Synthetic oligonucleotide

SEQ ID NO: 627300 - DNA, 55 bp, Artificial; identical to SEQ ID NO: 225073
  Synthetic oligonucleotide

SEQ ID NO: 627301 - DNA, 51 bp, Artificial; identical to SEQ ID NO: 148456
  Synthetic oligonucleotide

SEQ ID NO: 627302 - DNA, 55 bp, Artificial; identical to SEQ ID NO: 159337
  Synthetic oligonucleotide

SEQ ID NO: 627303 - DNA, 55 bp, Artificial; identical to SEQ ID NO: 189157
  Synthetic oligonucleotide

SEQ ID NO: 627304 - DNA, 55 bp, Artificial; identical to SEQ ID NO: 154228
  Synthetic oligonucleotide

SEQ ID NO: 627305 - DNA, 55 bp, Artificial; identical to SEQ ID NO: 148455
  Synthetic oligonucleotide

SEQ ID NO: 627306 - DNA, 55 bp, Artificial; identical to SEQ ID NO: 211448
  Synthetic oligonucleotide

SEQ ID NO: 627307 - DNA, 55 bp, Artificial; identical to SEQ ID NO: 245237
  Synthetic oligonucleotide

SEQ ID NO: 627308 - DNA, 55 bp, Artificial; identical to SEQ ID NO: 257961
  Synthetic oligonucleotide

SEQ ID NO: 627309 - DNA, 55 bp, Artificial; identical to SEQ ID NO: 249258
  Synthetic oligonucleotide

SEQ ID NO: 627310 - DNA, 51 bp, Artificial; identical to SEQ ID NO: 258192
  Synthetic oligonucleotide

SEQ ID NO: 627311 - DNA, 55 bp, Artificial; identical to SEQ ID NO: 257959
  Synthetic oligonucleotide

SEQ ID NO: 627312 - DNA, 52 bp, Artificial; identical to SEQ ID NO: 233833
  Synthetic oligonucleotide

SEQ ID NO: 627313 - DNA, 52 bp, Artificial; identical to SEQ ID NO: 186131
  Synthetic oligonucleotide

SEQ ID NO: 627314 - DNA, 55 bp, Artificial; identical to SEQ ID NO: 159326
  Synthetic oligonucleotide

SEQ ID NO: 627315 - DNA, 53 bp, Artificial; identical to SEQ ID NO: 249259
  Synthetic oligonucleotide

SEQ ID NO: 627316 - DNA, 55 bp, Artificial; identical to SEQ ID NO: 249260
  Synthetic oligonucleotide

SEQ ID NO: 627317 - DNA, 55 bp, Artificial; identical to SEQ ID NO: 171221
  Synthetic oligonucleotide

SEQ ID NO: 627318 - DNA, 55 bp, Artificial; identical to SEQ ID NO: 254606
  Synthetic oligonucleotide

SEQ ID NO: 627319 - DNA, 55 bp, Artificial; identical to SEQ ID NO: 245236
  Synthetic oligonucleotide

SEQ ID NO: 627320 - DNA, 53 bp, Artificial; identical to SEQ ID NO: 233738
  Synthetic oligonucleotide

SEQ ID NO: 627321 - DNA, 55 bp, Artificial; identical to SEQ ID NO: 260127
  Synthetic oligonucleotide

SEQ ID NO: 627322 - DNA, 55 bp, Artificial; identical to SEQ ID NO: 184747
  Synthetic oligonucleotide

SEQ ID NO: 627323 - DNA, 57 bp, Artificial; identical to SEQ ID NO: 205697
  Synthetic oligonucleotide

SEQ ID NO: 627324 - DNA, 55 bp, Artificial; identical to SEQ ID NO: 155157
  Synthetic oligonucleotide

SEQ ID NO: 627325 - DNA, 55 bp, Artificial; identical to SEQ ID NO: 254602
  Synthetic oligonucleotide

SEQ ID NO: 627326 - DNA, 55 bp, Artificial; identical to SEQ ID NO: 144471
  Synthetic oligonucleotide

SEQ ID NO: 627327 - DNA, 55 bp, Artificial; identical to SEQ ID NO: 221722
  Synthetic oligonucleotide

SEQ ID NO: 627328 - DNA, 55 bp, Artificial; identical to SEQ ID NO: 171220
  Synthetic oligonucleotide

SEQ ID NO: 627329 - DNA, 55 bp, Artificial; identical to SEQ ID NO: 249955
  Synthetic oligonucleotide

SEQ ID NO: 627330 - DNA, 55 bp, Artificial; identical to SEQ ID NO: 171216
  Synthetic oligonucleotide

SEQ ID NO: 627331 - DNA, 55 bp, Artificial; identical to SEQ ID NO: 253210
  Synthetic oligonucleotide

SEQ ID NO: 627332 - DNA, 51 bp, Artificial; identical to SEQ ID NO: 255649
  Synthetic oligonucleotide

SEQ ID NO: 627333 - DNA, 55 bp, Artificial; identical to SEQ ID NO: 164651
  Synthetic oligonucleotide

SEQ ID NO: 627334 - DNA, 52 bp, Artificial; identical to SEQ ID NO: 240815
  Synthetic oligonucleotide

SEQ ID NO: 627335 - DNA, 52 bp, Artificial; identical to SEQ ID NO: 206468
  Synthetic oligonucleotide

SEQ ID NO: 627336 - DNA, 55 bp, Artificial; identical to SEQ ID NO: 190089
  Synthetic oligonucleotide

SEQ ID NO: 627337 - DNA, 60 bp, Artificial; identical to SEQ ID NO: 237871
  Synthetic oligonucleotide

SEQ ID NO: 627338 - DNA, 55 bp, Artificial; identical to SEQ ID NO: 164652
  Synthetic oligonucleotide

SEQ ID NO: 627339 - DNA, 55 bp, Artificial; identical to SEQ ID NO: 188417
  Synthetic oligonucleotide

SEQ ID NO: 627340 - DNA, 60 bp, Artificial; identical to SEQ ID NO: 141570
  Synthetic oligonucleotide

SEQ ID NO: 627341 - DNA, 60 bp, Artificial; identical to SEQ ID NO: 248388
  Synthetic oligonucleotide

SEQ ID NO: 627342 - DNA, 54 bp, Artificial; identical to SEQ ID NO: 148450
  Synthetic oligonucleotide

SEQ ID NO: 627343 - DNA, 55 bp, Artificial; identical to SEQ ID NO: 240294
  Synthetic oligonucleotide

SEQ ID NO: 627344 - DNA, 55 bp, Artificial; identical to SEQ ID NO: 245234
  Synthetic oligonucleotide

SEQ ID NO: 627345 - DNA, 52 bp, Artificial; identical to SEQ ID NO: 220813
  Synthetic oligonucleotide

SEQ ID NO: 627346 - DNA, 55 bp, Artificial; identical to SEQ ID NO: 184741
  Synthetic oligonucleotide

SEQ ID NO: 627347 - DNA, 55 bp, Artificial; identical to SEQ ID NO: 148448
  Synthetic oligonucleotide

SEQ ID NO: 627348 - DNA, 51 bp, Artificial; identical to SEQ ID NO: 216835
  Synthetic oligonucleotide

SEQ ID NO: 627349 - DNA, 55 bp, Artificial; identical to SEQ ID NO: 221744
  Synthetic oligonucleotide

SEQ ID NO: 627350 - DNA, 55 bp, Artificial; identical to SEQ ID NO: 234124
  Synthetic oligonucleotide

SEQ ID NO: 627351 - DNA, 55 bp, Artificial; identical to SEQ ID NO: 188154
  Synthetic oligonucleotide

SEQ ID NO: 627352 - DNA, 55 bp, Artificial; identical to SEQ ID NO: 218166
  Synthetic oligonucleotide

SEQ ID NO: 627353 - DNA, 55 bp, Artificial; identical to SEQ ID NO: 197035
  Synthetic oligonucleotide

SEQ ID NO: 627354 - DNA, 52 bp, Artificial; identical to SEQ ID NO: 199943
  Synthetic oligonucleotide

SEQ ID NO: 627355 - DNA, 50 bp, Artificial; identical to SEQ ID NO: 246892
  Synthetic oligonucleotide

SEQ ID NO: 627356 - DNA, 60 bp, Artificial; identical to SEQ ID NO: 169044
  Synthetic oligonucleotide

SEQ ID NO: 627357 - DNA, 58 bp, Artificial; identical to SEQ ID NO: 246865
  Synthetic oligonucleotide

SEQ ID NO: 627358 - DNA, 55 bp, Artificial; identical to SEQ ID NO: 242669
  Synthetic oligonucleotide

SEQ ID NO: 627359 - DNA, 55 bp, Artificial; identical to SEQ ID NO: 234123
  Synthetic oligonucleotide

SEQ ID NO: 627360 - DNA, 55 bp, Artificial; identical to SEQ ID NO: 198793
  Synthetic oligonucleotide

SEQ ID NO: 627361 - DNA, 58 bp, Artificial; identical to SEQ ID NO: 171795
  Synthetic oligonucleotide

SEQ ID NO: 627362 - DNA, 54 bp, Artificial; identical to SEQ ID NO: 141172
  Synthetic oligonucleotide

SEQ ID NO: 627363 - DNA, 60 bp, Artificial; identical to SEQ ID NO: 152921
  Synthetic oligonucleotide

SEQ ID NO: 627364 - DNA, 55 bp, Artificial; identical to SEQ ID NO: 202356
  Synthetic oligonucleotide

SEQ ID NO: 627365 - DNA, 51 bp, Artificial; identical to SEQ ID NO: 190031
  Synthetic oligonucleotide

SEQ ID NO: 627366 - DNA, 55 bp, Artificial; identical to SEQ ID NO: 142311
  Synthetic oligonucleotide

SEQ ID NO: 627367 - DNA, 60 bp, Artificial; identical to SEQ ID NO: 152920
  Synthetic oligonucleotide

SEQ ID NO: 627368 - DNA, 60 bp, Artificial; identical to SEQ ID NO: 200126
  Synthetic oligonucleotide

SEQ ID NO: 627369 - DNA, 59 bp, Artificial; identical to SEQ ID NO: 239214
  Synthetic oligonucleotide

SEQ ID NO: 627370 - DNA, 58 bp, Artificial; identical to SEQ ID NO: 154525
  Synthetic oligonucleotide

SEQ ID NO: 627371 - DNA, 53 bp, Artificial; identical to SEQ ID NO: 255390
  Synthetic oligonucleotide

SEQ ID NO: 627372 - DNA, 55 bp, Artificial; identical to SEQ ID NO: 257115
  Synthetic oligonucleotide

SEQ ID NO: 627373 - DNA, 55 bp, Artificial; identical to SEQ ID NO: 205326
  Synthetic oligonucleotide

SEQ ID NO: 627374 - DNA, 60 bp, Artificial; identical to SEQ ID NO: 255067
  Synthetic oligonucleotide

SEQ ID NO: 627375 - DNA, 55 bp, Artificial; identical to SEQ ID NO: 257955
  Synthetic oligonucleotide

SEQ ID NO: 627376 - DNA, 55 bp, Artificial; identical to SEQ ID NO: 197038
  Synthetic oligonucleotide

SEQ ID NO: 627377 - DNA, 52 bp, Artificial; identical to SEQ ID NO: 202873
  Synthetic oligonucleotide

SEQ ID NO: 627378 - DNA, 53 bp, Artificial; identical to SEQ ID NO: 197524
  Synthetic oligonucleotide

SEQ ID NO: 627379 - DNA, 55 bp, Artificial; identical to SEQ ID NO: 158598
  Synthetic oligonucleotide

SEQ ID NO: 627380 - DNA, 53 bp, Artificial; identical to SEQ ID NO: 198791
  Synthetic oligonucleotide

SEQ ID NO: 627381 - DNA, 55 bp, Artificial; identical to SEQ ID NO: 171212
  Synthetic oligonucleotide

SEQ ID NO: 627382 - DNA, 55 bp, Artificial; identical to SEQ ID NO: 215561
  Synthetic oligonucleotide

SEQ ID NO: 627383 - DNA, 55 bp, Artificial; identical to SEQ ID NO: 167491
  Synthetic oligonucleotide

SEQ ID NO: 627384 - DNA, 55 bp, Artificial; identical to SEQ ID NO: 189213
  Synthetic oligonucleotide

SEQ ID NO: 627385 - DNA, 53 bp, Artificial; identical to SEQ ID NO: 234472
  Synthetic oligonucleotide

SEQ ID NO: 627386 - DNA, 55 bp, Artificial; identical to SEQ ID NO: 209429
  Synthetic oligonucleotide

SEQ ID NO: 627387 - DNA, 60 bp, Artificial; identical to SEQ ID NO: 150793
  Synthetic oligonucleotide

SEQ ID NO: 627388 - DNA, 52 bp, Artificial; identical to SEQ ID NO: 205692
  Synthetic oligonucleotide

SEQ ID NO: 627389 - DNA, 55 bp, Artificial; identical to SEQ ID NO: 238007
  Synthetic oligonucleotide

SEQ ID NO: 627390 - DNA, 52 bp, Artificial; identical to SEQ ID NO: 246482
  Synthetic oligonucleotide

SEQ ID NO: 627391 - DNA, 55 bp, Artificial; identical to SEQ ID NO: 242670
  Synthetic oligonucleotide

SEQ ID NO: 627392 - DNA, 55 bp, Artificial; identical to SEQ ID NO: 142312
  Synthetic oligonucleotide

SEQ ID NO: 627393 - DNA, 55 bp, Artificial; identical to SEQ ID NO: 184661
  Synthetic oligonucleotide

SEQ ID NO: 627394 - DNA, 52 bp, Artificial; identical to SEQ ID NO: 141281
  Synthetic oligonucleotide

SEQ ID NO: 627395 - DNA, 55 bp, Artificial; identical to SEQ ID NO: 171211
  Synthetic oligonucleotide

SEQ ID NO: 627396 - DNA, 57 bp, Artificial; identical to SEQ ID NO: 194307
  Synthetic oligonucleotide

SEQ ID NO: 627397 - DNA, 58 bp, Artificial; identical to SEQ ID NO: 187341
  Synthetic oligonucleotide

SEQ ID NO: 627398 - DNA, 55 bp, Artificial; identical to SEQ ID NO: 259526
  Synthetic oligonucleotide

SEQ ID NO: 627399 - DNA, 56 bp, Artificial; identical to SEQ ID NO: 177190
  Synthetic oligonucleotide

SEQ ID NO: 627400 - DNA, 57 bp, Artificial; identical to SEQ ID NO: 207046
  Synthetic oligonucleotide

SEQ ID NO: 627401 - DNA, 57 bp, Artificial; identical to SEQ ID NO: 193795
  Synthetic oligonucleotide

SEQ ID NO: 627402 - DNA, 55 bp, Artificial; identical to SEQ ID NO: 221101
  Synthetic oligonucleotide

SEQ ID NO: 627403 - DNA, 55 bp, Artificial; identical to SEQ ID NO: 184651
  Synthetic oligonucleotide

SEQ ID NO: 627404 - DNA, 55 bp, Artificial; identical to SEQ ID NO: 234121
  Synthetic oligonucleotide

SEQ ID NO: 627405 - DNA, 55 bp, Artificial; identical to SEQ ID NO: 164655
  Synthetic oligonucleotide

SEQ ID NO: 627406 - DNA, 57 bp, Artificial; identical to SEQ ID NO: 212515
  Synthetic oligonucleotide

SEQ ID NO: 627407 - DNA, 56 bp, Artificial; identical to SEQ ID NO: 242171
  Synthetic oligonucleotide

SEQ ID NO: 627408 - DNA, 52 bp, Artificial; identical to SEQ ID NO: 240839
  Synthetic oligonucleotide

SEQ ID NO: 627409 - DNA, 55 bp, Artificial; identical to SEQ ID NO: 166945
  Synthetic oligonucleotide

SEQ ID NO: 627410 - DNA, 55 bp, Artificial; identical to SEQ ID NO: 154222
  Synthetic oligonucleotide

SEQ ID NO: 627411 - DNA, 60 bp, Artificial; identical to SEQ ID NO: 224592
  Synthetic oligonucleotide

SEQ ID NO: 627412 - DNA, 50 bp, Artificial; identical to SEQ ID NO: 177014
  Synthetic oligonucleotide

SEQ ID NO: 627413 - DNA, 51 bp, Artificial; identical to SEQ ID NO: 242169
  Synthetic oligonucleotide

SEQ ID NO: 627414 - DNA, 55 bp, Artificial; identical to SEQ ID NO: 155476
  Synthetic oligonucleotide

SEQ ID NO: 627415 - DNA, 60 bp, Artificial; identical to SEQ ID NO: 177189
  Synthetic oligonucleotide

SEQ ID NO: 627416 - DNA, 57 bp, Artificial; identical to SEQ ID NO: 209198
  Synthetic oligonucleotide

SEQ ID NO: 627417 - DNA, 55 bp, Artificial; identical to SEQ ID NO: 198790
  Synthetic oligonucleotide

SEQ ID NO: 627418 - DNA, 51 bp, Artificial; identical to SEQ ID NO: 206566
  Synthetic oligonucleotide

SEQ ID NO: 627419 - DNA, 55 bp, Artificial; identical to SEQ ID NO: 164657
  Synthetic oligonucleotide

SEQ ID NO: 627420 - DNA, 50 bp, Artificial; identical to SEQ ID NO: 177009
  Synthetic oligonucleotide

SEQ ID NO: 627421 - DNA, 55 bp, Artificial; identical to SEQ ID NO: 184635
  Synthetic oligonucleotide

SEQ ID NO: 627422 - DNA, 54 bp, Artificial; identical to SEQ ID NO: 143786
  Synthetic oligonucleotide

SEQ ID NO: 627423 - DNA, 53 bp, Artificial; identical to SEQ ID NO: 258120
  Synthetic oligonucleotide

SEQ ID NO: 627424 - DNA, 53 bp, Artificial; identical to SEQ ID NO: 246401
  Synthetic oligonucleotide

SEQ ID NO: 627425 - DNA, 51 bp, Artificial; identical to SEQ ID NO: 165343
  Synthetic oligonucleotide

SEQ ID NO: 627426 - DNA, 55 bp, Artificial; identical to SEQ ID NO: 197040
  Synthetic oligonucleotide

SEQ ID NO: 627427 - DNA, 55 bp, Artificial; identical to SEQ ID NO: 211451
  Synthetic oligonucleotide

SEQ ID NO: 627428 - DNA, 55 bp, Artificial; identical to SEQ ID NO: 158498
  Synthetic oligonucleotide

SEQ ID NO: 627429 - DNA, 55 bp, Artificial; identical to SEQ ID NO: 184634
  Synthetic oligonucleotide

SEQ ID NO: 627430 - DNA, 53 bp, Artificial; identical to SEQ ID NO: 216672
  Synthetic oligonucleotide

SEQ ID NO: 627431 - DNA, 56 bp, Artificial; identical to SEQ ID NO: 193806
  Synthetic oligonucleotide

SEQ ID NO: 627432 - DNA, 55 bp, Artificial; identical to SEQ ID NO: 158454
  Synthetic oligonucleotide

SEQ ID NO: 627433 - DNA, 55 bp, Artificial; identical to SEQ ID NO: 189224
  Synthetic oligonucleotide

SEQ ID NO: 627434 - DNA, 55 bp, Artificial; identical to SEQ ID NO: 211453
  Synthetic oligonucleotide

SEQ ID NO: 627435 - DNA, 55 bp, Artificial; identical to SEQ ID NO: 158443
  Synthetic oligonucleotide

SEQ ID NO: 627436 - DNA, 55 bp, Artificial; identical to SEQ ID NO: 184701
  Synthetic oligonucleotide

SEQ ID NO: 627437 - DNA, 55 bp, Artificial; identical to SEQ ID NO: 249304
  Synthetic oligonucleotide

SEQ ID NO: 627438 - DNA, 55 bp, Artificial; identical to SEQ ID NO: 212613
  Synthetic oligonucleotide

SEQ ID NO: 627439 - DNA, 55 bp, Artificial; identical to SEQ ID NO: 184699
  Synthetic oligonucleotide

SEQ ID NO: 627440 - DNA, 55 bp, Artificial; identical to SEQ ID NO: 212616
  Synthetic oligonucleotide

SEQ ID NO: 627441 - DNA, 55 bp, Artificial; identical to SEQ ID NO: 195260
  Synthetic oligonucleotide

SEQ ID NO: 627442 - DNA, 59 bp, Artificial; identical to SEQ ID NO: 216549
  Synthetic oligonucleotide

SEQ ID NO: 627443 - DNA, 55 bp, Artificial; identical to SEQ ID NO: 184688
  Synthetic oligonucleotide

SEQ ID NO: 627444 - DNA, 56 bp, Artificial; identical to SEQ ID NO: 239501
  Synthetic oligonucleotide

SEQ ID NO: 627445 - DNA, 60 bp, Artificial; identical to SEQ ID NO: 255078
  Synthetic oligonucleotide

SEQ ID NO: 627446 - DNA, 55 bp, Artificial; identical to SEQ ID NO: 245270
  Synthetic oligonucleotide

SEQ ID NO: 627447 - DNA, 54 bp, Artificial; identical to SEQ ID NO: 194960
  Synthetic oligonucleotide

SEQ ID NO: 627448 - DNA, 55 bp, Artificial; identical to SEQ ID NO: 184684
  Synthetic oligonucleotide

SEQ ID NO: 627449 - DNA, 55 bp, Artificial; identical to SEQ ID NO: 257949
  Synthetic oligonucleotide

SEQ ID NO: 627450 - DNA, 55 bp, Artificial; identical to SEQ ID NO: 188155
  Synthetic oligonucleotide

SEQ ID NO: 627451 - DNA, 56 bp, Artificial; identical to SEQ ID NO: 168207
  Synthetic oligonucleotide

SEQ ID NO: 627452 - DNA, 55 bp, Artificial; identical to SEQ ID NO: 154285
  Synthetic oligonucleotide

SEQ ID NO: 627453 - DNA, 55 bp, Artificial; identical to SEQ ID NO: 194893
  Synthetic oligonucleotide

SEQ ID NO: 627454 - DNA, 56 bp, Artificial; identical to SEQ ID NO: 160130
  Synthetic oligonucleotide

SEQ ID NO: 627455 - DNA, 52 bp, Artificial; identical to SEQ ID NO: 192129
  Synthetic oligonucleotide

SEQ ID NO: 627456 - DNA, 52 bp, Artificial; identical to SEQ ID NO: 237045
  Synthetic oligonucleotide

SEQ ID NO: 627457 - DNA, 55 bp, Artificial; identical to SEQ ID NO: 202411
  Synthetic oligonucleotide

SEQ ID NO: 627458 - DNA, 55 bp, Artificial; identical to SEQ ID NO: 190092
  Synthetic oligonucleotide

SEQ ID NO: 627459 - DNA, 58 bp, Artificial; identical to SEQ ID NO: 248376
  Synthetic oligonucleotide

SEQ ID NO: 627460 - DNA, 55 bp, Artificial; identical to SEQ ID NO: 253866
  Synthetic oligonucleotide

SEQ ID NO: 627461 - DNA, 55 bp, Artificial; identical to SEQ ID NO: 249305
  Synthetic oligonucleotide

SEQ ID NO: 627462 - DNA, 55 bp, Artificial; identical to SEQ ID NO: 164659
  Synthetic oligonucleotide

SEQ ID NO: 627463 - DNA, 55 bp, Artificial; identical to SEQ ID NO: 249950
  Synthetic oligonucleotide

SEQ ID NO: 627464 - DNA, 55 bp, Artificial; identical to SEQ ID NO: 164661
  Synthetic oligonucleotide

SEQ ID NO: 627465 - DNA, 55 bp, Artificial; identical to SEQ ID NO: 217714
  Synthetic oligonucleotide

SEQ ID NO: 627466 - DNA, 55 bp, Artificial; identical to SEQ ID NO: 164662
  Synthetic oligonucleotide

SEQ ID NO: 627467 - DNA, 52 bp, Artificial; identical to SEQ ID NO: 190903
  Synthetic oligonucleotide

SEQ ID NO: 627468 - DNA, 55 bp, Artificial; identical to SEQ ID NO: 202876
  Synthetic oligonucleotide

SEQ ID NO: 627469 - DNA, 51 bp, Artificial; identical to SEQ ID NO: 150788
  Synthetic oligonucleotide

SEQ ID NO: 627470 - DNA, 53 bp, Artificial; identical to SEQ ID NO: 149451
  Synthetic oligonucleotide

SEQ ID NO: 627471 - DNA, 54 bp, Artificial; identical to SEQ ID NO: 245269
  Synthetic oligonucleotide

SEQ ID NO: 627472 - DNA, 55 bp, Artificial; identical to SEQ ID NO: 240288
  Synthetic oligonucleotide

SEQ ID NO: 627473 - DNA, 55 bp, Artificial; identical to SEQ ID NO: 187724
  Synthetic oligonucleotide

SEQ ID NO: 627474 - DNA, 55 bp, Artificial; identical to SEQ ID NO: 154287
  Synthetic oligonucleotide

SEQ ID NO: 627475 - DNA, 55 bp, Artificial; identical to SEQ ID NO: 254637
  Synthetic oligonucleotide

SEQ ID NO: 627476 - DNA, 55 bp, Artificial; identical to SEQ ID NO: 193507
  Synthetic oligonucleotide

SEQ ID NO: 627477 - DNA, 54 bp, Artificial; identical to SEQ ID NO: 234119
  Synthetic oligonucleotide

SEQ ID NO: 627478 - DNA, 57 bp, Artificial; identical to SEQ ID NO: 266309
  Synthetic oligonucleotide

SEQ ID NO: 627479 - DNA, 55 bp, Artificial; identical to SEQ ID NO: 183176
  Synthetic oligonucleotide

SEQ ID NO: 627480 - DNA, 55 bp, Artificial; identical to SEQ ID NO: 164664
  Synthetic oligonucleotide

SEQ ID NO: 627481 - DNA, 59 bp, Artificial; identical to SEQ ID NO: 200115
  Synthetic oligonucleotide

SEQ ID NO: 627482 - DNA, 55 bp, Artificial; identical to SEQ ID NO: 188785
  Synthetic oligonucleotide

SEQ ID NO: 627483 - DNA, 55 bp, Artificial; identical to SEQ ID NO: 171204
  Synthetic oligonucleotide

SEQ ID NO: 627484 - DNA, 60 bp, Artificial; identical to SEQ ID NO: 242167
  Synthetic oligonucleotide

SEQ ID NO: 627485 - DNA, 53 bp, Artificial; identical to SEQ ID NO: 183181
  Synthetic oligonucleotide

SEQ ID NO: 627486 - DNA, 55 bp, Artificial; identical to SEQ ID NO: 238012
  Synthetic oligonucleotide

SEQ ID NO: 627487 - DNA, 55 bp, Artificial; identical to SEQ ID NO: 223393
  Synthetic oligonucleotide

SEQ ID NO: 627488 - DNA, 54 bp, Artificial; identical to SEQ ID NO: 242166
  Synthetic oligonucleotide

SEQ ID NO: 627489 - DNA, 55 bp, Artificial; identical to SEQ ID NO: 160896
  Synthetic oligonucleotide

SEQ ID NO: 627490 - DNA, 60 bp, Artificial; identical to SEQ ID NO: 201839
  Synthetic oligonucleotide

SEQ ID NO: 627491 - DNA, 52 bp, Artificial; identical to SEQ ID NO: 151377
  Synthetic oligonucleotide

SEQ ID NO: 627492 - DNA, 52 bp, Artificial; identical to SEQ ID NO: 240236
  Synthetic oligonucleotide

SEQ ID NO: 627493 - DNA, 57 bp, Artificial; identical to SEQ ID NO: 242163
  Synthetic oligonucleotide

SEQ ID NO: 627494 - DNA, 51 bp, Artificial; identical to SEQ ID NO: 208882
  Synthetic oligonucleotide

SEQ ID NO: 627495 - DNA, 55 bp, Artificial; identical to SEQ ID NO: 142313
  Synthetic oligonucleotide

SEQ ID NO: 627496 - DNA, 51 bp, Artificial; identical to SEQ ID NO: 158376
  Synthetic oligonucleotide

SEQ ID NO: 627497 - DNA, 53 bp, Artificial; identical to SEQ ID NO: 240802
  Synthetic oligonucleotide

SEQ ID NO: 627498 - DNA, 55 bp, Artificial; identical to SEQ ID NO: 148435
  Synthetic oligonucleotide

SEQ ID NO: 627499 - DNA, 55 bp, Artificial; identical to SEQ ID NO: 242676
  Synthetic oligonucleotide

SEQ ID NO: 627500 - DNA, 55 bp, Artificial; identical to SEQ ID NO: 198787
  Synthetic oligonucleotide

SEQ ID NO: 627501 - DNA, 53 bp, Artificial; identical to SEQ ID NO: 162321
  Synthetic oligonucleotide

SEQ ID NO: 627502 - DNA, 55 bp, Artificial; identical to SEQ ID NO: 144058
  Synthetic oligonucleotide

SEQ ID NO: 627503 - DNA, 55 bp, Artificial; identical to SEQ ID NO: 148487
  Synthetic oligonucleotide

SEQ ID NO: 627504 - DNA, 55 bp, Artificial; identical to SEQ ID NO: 249944
  Synthetic oligonucleotide

SEQ ID NO: 627505 - DNA, 58 bp, Artificial; identical to SEQ ID NO: 200104
  Synthetic oligonucleotide

SEQ ID NO: 627506 - DNA, 55 bp, Artificial; identical to SEQ ID NO: 158842
  Synthetic oligonucleotide

SEQ ID NO: 627507 - DNA, 55 bp, Artificial; identical to SEQ ID NO: 221800
  Synthetic oligonucleotide

SEQ ID NO: 627508 - DNA, 55 bp, Artificial; identical to SEQ ID NO: 233737
  Synthetic oligonucleotide

SEQ ID NO: 627509 - DNA, 55 bp, Artificial; identical to SEQ ID NO: 183154
  Synthetic oligonucleotide

SEQ ID NO: 627510 - DNA, 60 bp, Artificial; identical to SEQ ID NO: 242162
  Synthetic oligonucleotide

SEQ ID NO: 627511 - DNA, 55 bp, Artificial; identical to SEQ ID NO: 217715
  Synthetic oligonucleotide

SEQ ID NO: 627512 - DNA, 55 bp, Artificial; identical to SEQ ID NO: 223397
  Synthetic oligonucleotide

SEQ ID NO: 627513 - DNA, 55 bp, Artificial; identical to SEQ ID NO: 151828
  Synthetic oligonucleotide

SEQ ID NO: 627514 - DNA, 55 bp, Artificial; identical to SEQ ID NO: 188416
  Synthetic oligonucleotide

SEQ ID NO: 627515 - DNA, 55 bp, Artificial; identical to SEQ ID NO: 158776
  Synthetic oligonucleotide

SEQ ID NO: 627516 - DNA, 55 bp, Artificial; identical to SEQ ID NO: 183152
  Synthetic oligonucleotide

SEQ ID NO: 627517 - DNA, 50 bp, Artificial; identical to SEQ ID NO: 197819
  Synthetic oligonucleotide

SEQ ID NO: 627518 - DNA, 55 bp, Artificial; identical to SEQ ID NO: 183150
  Synthetic oligonucleotide

SEQ ID NO: 627519 - DNA, 60 bp, Artificial; identical to SEQ ID NO: 177237
  Synthetic oligonucleotide

SEQ ID NO: 627520 - DNA, 55 bp, Artificial; identical to SEQ ID NO: 148484
  Synthetic oligonucleotide

SEQ ID NO: 627521 - DNA, 56 bp, Artificial; identical to SEQ ID NO: 177236
  Synthetic oligonucleotide

SEQ ID NO: 627522 - DNA, 55 bp, Artificial; identical to SEQ ID NO: 148483
  Synthetic oligonucleotide

SEQ ID NO: 627523 - DNA, 55 bp, Artificial; identical to SEQ ID NO: 183148
  Synthetic oligonucleotide

SEQ ID NO: 627524 - DNA, 55 bp, Artificial; identical to SEQ ID NO: 217716
  Synthetic oligonucleotide

SEQ ID NO: 627525 - DNA, 55 bp, Artificial; identical to SEQ ID NO: 221099
  Synthetic oligonucleotide

SEQ ID NO: 627526 - DNA, 55 bp, Artificial; identical to SEQ ID NO: 217717
  Synthetic oligonucleotide

SEQ ID NO: 627527 - DNA, 54 bp, Artificial; identical to SEQ ID NO: 190097
  Synthetic oligonucleotide

SEQ ID NO: 627528 - DNA, 55 bp, Artificial; identical to SEQ ID NO: 258920
  Synthetic oligonucleotide

SEQ ID NO: 627529 - DNA, 55 bp, Artificial; identical to SEQ ID NO: 158720
  Synthetic oligonucleotide

SEQ ID NO: 627530 - DNA, 57 bp, Artificial; identical to SEQ ID NO: 170872
  Synthetic oligonucleotide

SEQ ID NO: 627531 - DNA, 55 bp, Artificial; identical to SEQ ID NO: 242161
  Synthetic oligonucleotide

SEQ ID NO: 627532 - DNA, 58 bp, Artificial; identical to SEQ ID NO: 166084
  Synthetic oligonucleotide

SEQ ID NO: 627533 - DNA, 54 bp, Artificial; identical to SEQ ID NO: 239201
  Synthetic oligonucleotide

SEQ ID NO: 627534 - DNA, 57 bp, Artificial; identical to SEQ ID NO: 225538
  Synthetic oligonucleotide

SEQ ID NO: 627535 - DNA, 55 bp, Artificial; identical to SEQ ID NO: 221302
  Synthetic oligonucleotide

SEQ ID NO: 627536 - DNA, 60 bp, Artificial; identical to SEQ ID NO: 216560
  Synthetic oligonucleotide

SEQ ID NO: 627537 - DNA, 53 bp, Artificial; identical to SEQ ID NO: 164604
  Synthetic oligonucleotide

SEQ ID NO: 627538 - DNA, 55 bp, Artificial; identical to SEQ ID NO: 158709
  Synthetic oligonucleotide

SEQ ID NO: 627539 - DNA, 55 bp, Artificial; identical to SEQ ID NO: 171200
  Synthetic oligonucleotide

SEQ ID NO: 627540 - DNA, 60 bp, Artificial; identical to SEQ ID NO: 242160
  Synthetic oligonucleotide

SEQ ID NO: 627541 - DNA, 60 bp, Artificial; identical to SEQ ID NO: 177234
  Synthetic oligonucleotide

SEQ ID NO: 627542 - DNA, 51 bp, Artificial; identical to SEQ ID NO: 200180
  Synthetic oligonucleotide

SEQ ID NO: 627543 - DNA, 54 bp, Artificial; identical to SEQ ID NO: 242679
  Synthetic oligonucleotide

SEQ ID NO: 627544 - DNA, 56 bp, Artificial; identical to SEQ ID NO: 239509
  Synthetic oligonucleotide

SEQ ID NO: 627545 - DNA, 60 bp, Artificial; identical to SEQ ID NO: 237882
  Synthetic oligonucleotide

SEQ ID NO: 627546 - DNA, 52 bp, Artificial; identical to SEQ ID NO: 240954
  Synthetic oligonucleotide

SEQ ID NO: 627547 - DNA, 55 bp, Artificial; identical to SEQ ID NO: 164605
  Synthetic oligonucleotide

SEQ ID NO: 627548 - DNA, 55 bp, Artificial; identical to SEQ ID NO: 245266
  Synthetic oligonucleotide

SEQ ID NO: 627549 - DNA, 55 bp, Artificial; identical to SEQ ID NO: 254632
  Synthetic oligonucleotide

SEQ ID NO: 627550 - DNA, 55 bp, Artificial; identical to SEQ ID NO: 146321
  Synthetic oligonucleotide

SEQ ID NO: 627551 - DNA, 55 bp, Artificial; identical to SEQ ID NO: 183212
  Synthetic oligonucleotide

SEQ ID NO: 627552 - DNA, 55 bp, Artificial; identical to SEQ ID NO: 164606
  Synthetic oligonucleotide

SEQ ID NO: 627553 - DNA, 51 bp, Artificial; identical to SEQ ID NO: 258199
  Synthetic oligonucleotide

SEQ ID NO: 627554 - DNA, 55 bp, Artificial; identical to SEQ ID NO: 154104
  Synthetic oligonucleotide

SEQ ID NO: 627555 - DNA, 59 bp, Artificial; identical to SEQ ID NO: 242159
  Synthetic oligonucleotide

SEQ ID NO: 627556 - DNA, 55 bp, Artificial; identical to SEQ ID NO: 158698
  Synthetic oligonucleotide

SEQ ID NO: 627557 - DNA, 55 bp, Artificial; identical to SEQ ID NO: 240244
  Synthetic oligonucleotide

SEQ ID NO: 627558 - DNA, 50 bp, Artificial; identical to SEQ ID NO: 241249
  Synthetic oligonucleotide

SEQ ID NO: 627559 - DNA, 55 bp, Artificial; identical to SEQ ID NO: 160325
  Synthetic oligonucleotide

SEQ ID NO: 627560 - DNA, 55 bp, Artificial; identical to SEQ ID NO: 161564
  Synthetic oligonucleotide

SEQ ID NO: 627561 - DNA, 55 bp, Artificial; identical to SEQ ID NO: 218165
  Synthetic oligonucleotide

SEQ ID NO: 627562 - DNA, 55 bp, Artificial; identical to SEQ ID NO: 174263
  Synthetic oligonucleotide

SEQ ID NO: 627563 - DNA, 55 bp, Artificial; identical to SEQ ID NO: 189324
  Synthetic oligonucleotide

SEQ ID NO: 627564 - DNA, 50 bp, Artificial; identical to SEQ ID NO: 176179
  Synthetic oligonucleotide

SEQ ID NO: 627565 - DNA, 51 bp, Artificial; identical to SEQ ID NO: 246779
  Synthetic oligonucleotide

SEQ ID NO: 627566 - DNA, 52 bp, Artificial; identical to SEQ ID NO: 237042
  Synthetic oligonucleotide

SEQ ID NO: 627567 - DNA, 53 bp, Artificial; identical to SEQ ID NO: 141571
  Synthetic oligonucleotide

SEQ ID NO: 627568 - DNA, 53 bp, Artificial; identical to SEQ ID NO: 190052
  Synthetic oligonucleotide

SEQ ID NO: 627569 - DNA, 55 bp, Artificial; identical to SEQ ID NO: 245262
  Synthetic oligonucleotide

SEQ ID NO: 627570 - DNA, 57 bp, Artificial; identical to SEQ ID NO: 239367
  Synthetic oligonucleotide

SEQ ID NO: 627571 - DNA, 56 bp, Artificial; identical to SEQ ID NO: 239511
  Synthetic oligonucleotide

SEQ ID NO: 627572 - DNA, 55 bp, Artificial; identical to SEQ ID NO: 198785
  Synthetic oligonucleotide

SEQ ID NO: 627573 - DNA, 53 bp, Artificial; identical to SEQ ID NO: 240805
  Synthetic oligonucleotide

SEQ ID NO: 627574 - DNA, 54 bp, Artificial; identical to SEQ ID NO: 237893
  Synthetic oligonucleotide

SEQ ID NO: 627575 - DNA, 55 bp, Artificial; identical to SEQ ID NO: 240246
  Synthetic oligonucleotide

SEQ ID NO: 627576 - DNA, 55 bp, Artificial; identical to SEQ ID NO: 190055
  Synthetic oligonucleotide

SEQ ID NO: 627577 - DNA, 55 bp, Artificial; identical to SEQ ID NO: 238220
  Synthetic oligonucleotide

SEQ ID NO: 627578 - DNA, 54 bp, Artificial; identical to SEQ ID NO: 265633
  Synthetic oligonucleotide

SEQ ID NO: 627579 - DNA, 60 bp, Artificial; identical to SEQ ID NO: 165811
  Synthetic oligonucleotide

SEQ ID NO: 627580 - DNA, 55 bp, Artificial; identical to SEQ ID NO: 164608
  Synthetic oligonucleotide

SEQ ID NO: 627581 - DNA, 55 bp, Artificial; identical to SEQ ID NO: 183192
  Synthetic oligonucleotide

SEQ ID NO: 627582 - DNA, 55 bp, Artificial; identical to SEQ ID NO: 197007
  Synthetic oligonucleotide

SEQ ID NO: 627583 - DNA, 59 bp, Artificial; identical to SEQ ID NO: 224260
  Synthetic oligonucleotide

SEQ ID NO: 627584 - DNA, 55 bp, Artificial; identical to SEQ ID NO: 191144
  Synthetic oligonucleotide

SEQ ID NO: 627585 - DNA, 52 bp, Artificial; identical to SEQ ID NO: 165030
  Synthetic oligonucleotide

SEQ ID NO: 627586 - DNA, 55 bp, Artificial; identical to SEQ ID NO: 148477
  Synthetic oligonucleotide

SEQ ID NO: 627587 - DNA, 55 bp, Artificial; identical to SEQ ID NO: 174506
  Synthetic oligonucleotide

SEQ ID NO: 627588 - DNA, 55 bp, Artificial; identical to SEQ ID NO: 183097
  Synthetic oligonucleotide

SEQ ID NO: 627589 - DNA, 57 bp, Artificial; identical to SEQ ID NO: 177230
  Synthetic oligonucleotide

SEQ ID NO: 627590 - DNA, 53 bp, Artificial; identical to SEQ ID NO: 205671
  Synthetic oligonucleotide

SEQ ID NO: 627591 - DNA, 54 bp, Artificial; identical to SEQ ID NO: 185014
  Synthetic oligonucleotide

SEQ ID NO: 627592 - DNA, 55 bp, Artificial; identical to SEQ ID NO: 245261
  Synthetic oligonucleotide

SEQ ID NO: 627593 - DNA, 55 bp, Artificial; identical to SEQ ID NO: 205356
  Synthetic oligonucleotide

SEQ ID NO: 627594 - DNA, 55 bp, Artificial; identical to SEQ ID NO: 201101
  Synthetic oligonucleotide

SEQ ID NO: 627595 - DNA, 55 bp, Artificial; identical to SEQ ID NO: 171194
  Synthetic oligonucleotide

SEQ ID NO: 627596 - DNA, 55 bp, Artificial; identical to SEQ ID NO: 164610
  Synthetic oligonucleotide

SEQ ID NO: 627597 - DNA, 55 bp, Artificial; identical to SEQ ID NO: 260116
  Synthetic oligonucleotide

SEQ ID NO: 627598 - DNA, 55 bp, Artificial; identical to SEQ ID NO: 155286
  Synthetic oligonucleotide

SEQ ID NO: 627599 - DNA, 55 bp, Artificial; identical to SEQ ID NO: 242680
  Synthetic oligonucleotide

SEQ ID NO: 627600 - DNA, 55 bp, Artificial; identical to SEQ ID NO: 245260
  Synthetic oligonucleotide

SEQ ID NO: 627601 - DNA, 55 bp, Artificial; identical to SEQ ID NO: 233733
  Synthetic oligonucleotide

SEQ ID NO: 627602 - DNA, 55 bp, Artificial; identical to SEQ ID NO: 205355
  Synthetic oligonucleotide

SEQ ID NO: 627603 - DNA, 55 bp, Artificial; identical to SEQ ID NO: 190056
  Synthetic oligonucleotide

SEQ ID NO: 627604 - DNA, 56 bp, Artificial; identical to SEQ ID NO: 266107
  Synthetic oligonucleotide

SEQ ID NO: 627605 - DNA, 51 bp, Artificial; identical to SEQ ID NO: 200185
  Synthetic oligonucleotide

SEQ ID NO: 627606 - DNA, 55 bp, Artificial; identical to SEQ ID NO: 148475
  Synthetic oligonucleotide

SEQ ID NO: 627607 - DNA, 55 bp, Artificial; identical to SEQ ID NO: 261826
  Synthetic oligonucleotide

SEQ ID NO: 627608 - DNA, 55 bp, Artificial; identical to SEQ ID NO: 148474
  Synthetic oligonucleotide

SEQ ID NO: 627609 - DNA, 57 bp, Artificial; identical to SEQ ID NO: 141572
  Synthetic oligonucleotide

SEQ ID NO: 627610 - DNA, 53 bp, Artificial; identical to SEQ ID NO: 208359
  Synthetic oligonucleotide

SEQ ID NO: 627611 - DNA, 53 bp, Artificial; identical to SEQ ID NO: 179881
  Synthetic oligonucleotide

SEQ ID NO: 627612 - DNA, 55 bp, Artificial; identical to SEQ ID NO: 197010
  Synthetic oligonucleotide

SEQ ID NO: 627613 - DNA, 55 bp, Artificial; identical to SEQ ID NO: 183111
  Synthetic oligonucleotide

SEQ ID NO: 627614 - DNA, 55 bp, Artificial; identical to SEQ ID NO: 234170
  Synthetic oligonucleotide

SEQ ID NO: 627615 - DNA, 55 bp, Artificial; identical to SEQ ID NO: 198783
  Synthetic oligonucleotide

SEQ ID NO: 627616 - DNA, 55 bp, Artificial; identical to SEQ ID NO: 174508
  Synthetic oligonucleotide

SEQ ID NO: 627617 - DNA, 60 bp, Artificial; identical to SEQ ID NO: 206828
  Synthetic oligonucleotide

SEQ ID NO: 627618 - DNA, 55 bp, Artificial; identical to SEQ ID NO: 155473
  Synthetic oligonucleotide

SEQ ID NO: 627619 - DNA, 53 bp, Artificial; identical to SEQ ID NO: 223399
  Synthetic oligonucleotide

SEQ ID NO: 627620 - DNA, 54 bp, Artificial; identical to SEQ ID NO: 187939
  Synthetic oligonucleotide

SEQ ID NO: 627621 - DNA, 55 bp, Artificial; identical to SEQ ID NO: 207423
  Synthetic oligonucleotide

SEQ ID NO: 627622 - DNA, 55 bp, Artificial; identical to SEQ ID NO: 158132
  Synthetic oligonucleotide

SEQ ID NO: 627623 - DNA, 55 bp, Artificial; identical to SEQ ID NO: 202880
  Synthetic oligonucleotide

SEQ ID NO: 627624 - DNA, 56 bp, Artificial; identical to SEQ ID NO: 248354
  Synthetic oligonucleotide

SEQ ID NO: 627625 - DNA, 55 bp, Artificial; identical to SEQ ID NO: 198780
  Synthetic oligonucleotide

SEQ ID NO: 627626 - DNA, 55 bp, Artificial; identical to SEQ ID NO: 211456
  Synthetic oligonucleotide

SEQ ID NO: 627627 - DNA, 55 bp, Artificial; identical to SEQ ID NO: 183094
  Synthetic oligonucleotide

SEQ ID NO: 627628 - DNA, 55 bp, Artificial; identical to SEQ ID NO: 207424
  Synthetic oligonucleotide

SEQ ID NO: 627629 - DNA, 60 bp, Artificial; identical to SEQ ID NO: 203278
  Synthetic oligonucleotide

SEQ ID NO: 627630 - DNA, 52 bp, Artificial; identical to SEQ ID NO: 142316
  Synthetic oligonucleotide

SEQ ID NO: 627631 - DNA, 53 bp, Artificial; identical to SEQ ID NO: 153602
  Synthetic oligonucleotide

SEQ ID NO: 627632 - DNA, 55 bp, Artificial; identical to SEQ ID NO: 245258
  Synthetic oligonucleotide

SEQ ID NO: 627633 - DNA, 59 bp, Artificial; identical to SEQ ID NO: 246921
  Synthetic oligonucleotide

SEQ ID NO: 627634 - DNA, 52 bp, Artificial; identical to SEQ ID NO: 217316
  Synthetic oligonucleotide

SEQ ID NO: 627635 - DNA, 55 bp, Artificial; identical to SEQ ID NO: 160349
  Synthetic oligonucleotide

SEQ ID NO: 627636 - DNA, 59 bp, Artificial; identical to SEQ ID NO: 194257
  Synthetic oligonucleotide

SEQ ID NO: 627637 - DNA, 55 bp, Artificial; identical to SEQ ID NO: 198778
  Synthetic oligonucleotide

SEQ ID NO: 627638 - DNA, 53 bp, Artificial; identical to SEQ ID NO: 198777
  Synthetic oligonucleotide

SEQ ID NO: 627639 - DNA, 53 bp, Artificial; identical to SEQ ID NO: 253195
  Synthetic oligonucleotide

SEQ ID NO: 627640 - DNA, 59 bp, Artificial; identical to SEQ ID NO: 246932
  Synthetic oligonucleotide

SEQ ID NO: 627641 - DNA, 53 bp, Artificial; identical to SEQ ID NO: 141221
  Synthetic oligonucleotide

SEQ ID NO: 627642 - DNA, 51 bp, Artificial; identical to SEQ ID NO: 141347
  Synthetic oligonucleotide

SEQ ID NO: 627643 - DNA, 55 bp, Artificial; identical to SEQ ID NO: 158021
  Synthetic oligonucleotide

SEQ ID NO: 627644 - DNA, 55 bp, Artificial; identical to SEQ ID NO: 191139
  Synthetic oligonucleotide

SEQ ID NO: 627645 - DNA, 59 bp, Artificial; identical to SEQ ID NO: 248343
  Synthetic oligonucleotide

SEQ ID NO: 627646 - DNA, 55 bp, Artificial; identical to SEQ ID NO: 194888
  Synthetic oligonucleotide

SEQ ID NO: 627647 - DNA, 53 bp, Artificial; identical to SEQ ID NO: 172798
  Synthetic oligonucleotide

SEQ ID NO: 627648 - DNA, 56 bp, Artificial; identical to SEQ ID NO: 179907
  Synthetic oligonucleotide

SEQ ID NO: 627649 - DNA, 55 bp, Artificial; identical to SEQ ID NO: 183089
  Synthetic oligonucleotide

SEQ ID NO: 627650 - DNA, 60 bp, Artificial; identical to SEQ ID NO: 246943
  Synthetic oligonucleotide

SEQ ID NO: 627651 - DNA, 55 bp, Artificial; identical to SEQ ID NO: 148469
  Synthetic oligonucleotide

SEQ ID NO: 627652 - DNA, 56 bp, Artificial; identical to SEQ ID NO: 205497
  Synthetic oligonucleotide

SEQ ID NO: 627653 - DNA, 54 bp, Artificial; identical to SEQ ID NO: 223401
  Synthetic oligonucleotide

SEQ ID NO: 627654 - DNA, 56 bp, Artificial; identical to SEQ ID NO: 254966
  Synthetic oligonucleotide

SEQ ID NO: 627655 - DNA, 57 bp, Artificial; identical to SEQ ID NO: 193183
  Synthetic oligonucleotide

SEQ ID NO: 627656 - DNA, 50 bp, Artificial; identical to SEQ ID NO: 155650
  Synthetic oligonucleotide

SEQ ID NO: 627657 - DNA, 60 bp, Artificial; identical to SEQ ID NO: 242157
  Synthetic oligonucleotide

SEQ ID NO: 627658 - DNA, 55 bp, Artificial; identical to SEQ ID NO: 198776
  Synthetic oligonucleotide

SEQ ID NO: 627659 - DNA, 54 bp, Artificial; identical to SEQ ID NO: 192037
  Synthetic oligonucleotide

SEQ ID NO: 627660 - DNA, 55 bp, Artificial; identical to SEQ ID NO: 187729
  Synthetic oligonucleotide

SEQ ID NO: 627661 - DNA, 53 bp, Artificial; identical to SEQ ID NO: 144474
  Synthetic oligonucleotide

SEQ ID NO: 627662 - DNA, 59 bp, Artificial; identical to SEQ ID NO: 177227
  Synthetic oligonucleotide

SEQ ID NO: 627663 - DNA, 55 bp, Artificial; identical to SEQ ID NO: 198775
  Synthetic oligonucleotide

SEQ ID NO: 627664 - DNA, 53 bp, Artificial; identical to SEQ ID NO: 200093
  Synthetic oligonucleotide

SEQ ID NO: 627665 - DNA, 55 bp, Artificial; identical to SEQ ID NO: 187730
  Synthetic oligonucleotide

SEQ ID NO: 627666 - DNA, 55 bp, Artificial; identical to SEQ ID NO: 253193
  Synthetic oligonucleotide

SEQ ID NO: 627667 - DNA, 51 bp, Artificial; identical to SEQ ID NO: 149454
  Synthetic oligonucleotide

SEQ ID NO: 627668 - DNA, 53 bp, Artificial; identical to SEQ ID NO: 150782
  Synthetic oligonucleotide

SEQ ID NO: 627669 - DNA, 54 bp, Artificial; identical to SEQ ID NO: 266320
  Synthetic oligonucleotide

SEQ ID NO: 627670 - DNA, 54 bp, Artificial; identical to SEQ ID NO: 150781
  Synthetic oligonucleotide

SEQ ID NO: 627671 - DNA, 55 bp, Artificial; identical to SEQ ID NO: 162122
  Synthetic oligonucleotide

SEQ ID NO: 627672 - DNA, 51 bp, Artificial; identical to SEQ ID NO: 160936
  Synthetic oligonucleotide

SEQ ID NO: 627673 - DNA, 50 bp, Artificial; identical to SEQ ID NO: 207031
  Synthetic oligonucleotide

SEQ ID NO: 627674 - DNA, 55 bp, Artificial; identical to SEQ ID NO: 157999
  Synthetic oligonucleotide

SEQ ID NO: 627675 - DNA, 53 bp, Artificial; identical to SEQ ID NO: 177226
  Synthetic oligonucleotide

SEQ ID NO: 627676 - DNA, 55 bp, Artificial; identical to SEQ ID NO: 217720
  Synthetic oligonucleotide

SEQ ID NO: 627677 - DNA, 51 bp, Artificial; identical to SEQ ID NO: 187046
  Synthetic oligonucleotide

SEQ ID NO: 627678 - DNA, 54 bp, Artificial; identical to SEQ ID NO: 147356
  Synthetic oligonucleotide

SEQ ID NO: 627679 - DNA, 52 bp, Artificial; identical to SEQ ID NO: 246435
  Synthetic oligonucleotide

SEQ ID NO: 627680 - DNA, 55 bp, Artificial; identical to SEQ ID NO: 187931
  Synthetic oligonucleotide

SEQ ID NO: 627681 - DNA, 57 bp, Artificial; identical to SEQ ID NO: 194273
  Synthetic oligonucleotide

SEQ ID NO: 627682 - DNA, 52 bp, Artificial; identical to SEQ ID NO: 205684
  Synthetic oligonucleotide

SEQ ID NO: 627683 - DNA, 55 bp, Artificial; identical to SEQ ID NO: 245256
  Synthetic oligonucleotide

SEQ ID NO: 627684 - DNA, 51 bp, Artificial; identical to SEQ ID NO: 246785
  Synthetic oligonucleotide

SEQ ID NO: 627685 - DNA, 53 bp, Artificial; identical to SEQ ID NO: 168898
  Synthetic oligonucleotide

SEQ ID NO: 627686 - DNA, 57 bp, Artificial; identical to SEQ ID NO: 179607
  Synthetic oligonucleotide

SEQ ID NO: 627687 - DNA, 55 bp, Artificial; identical to SEQ ID NO: 164615
  Synthetic oligonucleotide

SEQ ID NO: 627688 - DNA, 53 bp, Artificial; identical to SEQ ID NO: 225072
  Synthetic oligonucleotide

SEQ ID NO: 627689 - DNA, 55 bp, Artificial; identical to SEQ ID NO: 201622
  Synthetic oligonucleotide

SEQ ID NO: 627690 - DNA, 55 bp, Artificial; identical to SEQ ID NO: 221097
  Synthetic oligonucleotide

SEQ ID NO: 627691 - DNA, 59 bp, Artificial; identical to SEQ ID NO: 234837
  Synthetic oligonucleotide

SEQ ID NO: 627692 - DNA, 55 bp, Artificial; identical to SEQ ID NO: 183136
  Synthetic oligonucleotide

SEQ ID NO: 627693 - DNA, 55 bp, Artificial; identical to SEQ ID NO: 242682
  Synthetic oligonucleotide

SEQ ID NO: 627694 - DNA, 60 bp, Artificial; identical to SEQ ID NO: 174293
  Synthetic oligonucleotide

SEQ ID NO: 627695 - DNA, 55 bp, Artificial; identical to SEQ ID NO: 266171
  Synthetic oligonucleotide

SEQ ID NO: 627696 - DNA, 50 bp, Artificial; identical to SEQ ID NO: 241250
  Synthetic oligonucleotide

SEQ ID NO: 627697 - DNA, 55 bp, Artificial; identical to SEQ ID NO: 158276
  Synthetic oligonucleotide

SEQ ID NO: 627698 - DNA, 53 bp, Artificial; identical to SEQ ID NO: 151834
  Synthetic oligonucleotide

SEQ ID NO: 627699 - DNA, 56 bp, Artificial; identical to SEQ ID NO: 191749
  Synthetic oligonucleotide

SEQ ID NO: 627700 - DNA, 59 bp, Artificial; identical to SEQ ID NO: 187928
  Synthetic oligonucleotide

SEQ ID NO: 627701 - DNA, 55 bp, Artificial; identical to SEQ ID NO: 183146
  Synthetic oligonucleotide

SEQ ID NO: 627702 - DNA, 53 bp, Artificial; identical to SEQ ID NO: 157328
  Synthetic oligonucleotide

SEQ ID NO: 627703 - DNA, 59 bp, Artificial; identical to SEQ ID NO: 177221
  Synthetic oligonucleotide

SEQ ID NO: 627704 - DNA, 50 bp, Artificial; identical to SEQ ID NO: 240251
  Synthetic oligonucleotide

SEQ ID NO: 627705 - DNA, 55 bp, Artificial; identical to SEQ ID NO: 164617
  Synthetic oligonucleotide

SEQ ID NO: 627706 - DNA, 47 bp, Artificial; identical to SEQ ID NO: 200082
  Synthetic oligonucleotide

SEQ ID NO: 627707 - DNA, 52 bp, Artificial; identical to SEQ ID NO: 200071
  Synthetic oligonucleotide

SEQ ID NO: 627708 - DNA, 58 bp, Artificial; identical to SEQ ID NO: 242156
  Synthetic oligonucleotide

SEQ ID NO: 627709 - DNA, 60 bp, Artificial; identical to SEQ ID NO: 242155
  Synthetic oligonucleotide

SEQ ID NO: 627710 - DNA, 53 bp, Artificial; identical to SEQ ID NO: 149455
  Synthetic oligonucleotide

SEQ ID NO: 627711 - DNA, 55 bp, Artificial; identical to SEQ ID NO: 222885
  Synthetic oligonucleotide

SEQ ID NO: 627712 - DNA, 55 bp, Artificial; identical to SEQ ID NO: 146320
  Synthetic oligonucleotide

SEQ ID NO: 627713 - DNA, 55 bp, Artificial; identical to SEQ ID NO: 198774
  Synthetic oligonucleotide

SEQ ID NO: 627714 - DNA, 54 bp, Artificial; identical to SEQ ID NO: 164618
  Synthetic oligonucleotide

SEQ ID NO: 627715 - DNA, 56 bp, Artificial; identical to SEQ ID NO: 200060
  Synthetic oligonucleotide

SEQ ID NO: 627716 - DNA, 52 bp, Artificial; identical to SEQ ID NO: 189160
  Synthetic oligonucleotide

SEQ ID NO: 627717 - DNA, 60 bp, Artificial; identical to SEQ ID NO: 205409
  Synthetic oligonucleotide

SEQ ID NO: 627718 - DNA, 57 bp, Artificial; identical to SEQ ID NO: 150780
  Synthetic oligonucleotide

SEQ ID NO: 627719 - DNA, 50 bp, Artificial; identical to SEQ ID NO: 201732
  Synthetic oligonucleotide

SEQ ID NO: 627720 - DNA, 52 bp, Artificial; identical to SEQ ID NO: 234169
  Synthetic oligonucleotide

SEQ ID NO: 627721 - DNA, 53 bp, Artificial; identical to SEQ ID NO: 149456
  Synthetic oligonucleotide

SEQ ID NO: 627722 - DNA, 54 bp, Artificial; identical to SEQ ID NO: 185162
  Synthetic oligonucleotide

SEQ ID NO: 627723 - DNA, 53 bp, Artificial; identical to SEQ ID NO: 183122
  Synthetic oligonucleotide

SEQ ID NO: 627724 - DNA, 55 bp, Artificial; identical to SEQ ID NO: 159175
  Synthetic oligonucleotide

SEQ ID NO: 627725 - DNA, 60 bp, Artificial; identical to SEQ ID NO: 177215
  Synthetic oligonucleotide

SEQ ID NO: 627726 - DNA, 55 bp, Artificial; identical to SEQ ID NO: 249310
  Synthetic oligonucleotide

SEQ ID NO: 627727 - DNA, 58 bp, Artificial; identical to SEQ ID NO: 155319
  Synthetic oligonucleotide

SEQ ID NO: 627728 - DNA, 55 bp, Artificial; identical to SEQ ID NO: 183120
  Synthetic oligonucleotide

SEQ ID NO: 627729 - DNA, 50 bp, Artificial; identical to SEQ ID NO: 255785
  Synthetic oligonucleotide

SEQ ID NO: 627730 - DNA, 53 bp, Artificial; identical to SEQ ID NO: 212598
  Synthetic oligonucleotide

SEQ ID NO: 627731 - DNA, 55 bp, Artificial; identical to SEQ ID NO: 153492
  Synthetic oligonucleotide

SEQ ID NO: 627732 - DNA, 55 bp, Artificial; identical to SEQ ID NO: 254574
  Synthetic oligonucleotide

SEQ ID NO: 627733 - DNA, 55 bp, Artificial; identical to SEQ ID NO: 217721
  Synthetic oligonucleotide

SEQ ID NO: 627734 - DNA, 54 bp, Artificial; identical to SEQ ID NO: 255291
  Synthetic oligonucleotide

SEQ ID NO: 627735 - DNA, 51 bp, Artificial; identical to SEQ ID NO: 248332
  Synthetic oligonucleotide

SEQ ID NO: 627736 - DNA, 55 bp, Artificial; identical to SEQ ID NO: 148405
  Synthetic oligonucleotide

SEQ ID NO: 627737 - DNA, 52 bp, Artificial; identical to SEQ ID NO: 154293
  Synthetic oligonucleotide

SEQ ID NO: 627738 - DNA, 55 bp, Artificial; identical to SEQ ID NO: 253187
  Synthetic oligonucleotide

SEQ ID NO: 627739 - DNA, 55 bp, Artificial; identical to SEQ ID NO: 164619
  Synthetic oligonucleotide

SEQ ID NO: 627740 - DNA, 55 bp, Artificial; identical to SEQ ID NO: 190060
  Synthetic oligonucleotide

SEQ ID NO: 627741 - DNA, 59 bp, Artificial; identical to SEQ ID NO: 242154
  Synthetic oligonucleotide

SEQ ID NO: 627742 - DNA, 55 bp, Artificial; identical to SEQ ID NO: 211416
  Synthetic oligonucleotide

SEQ ID NO: 627743 - DNA, 55 bp, Artificial; identical to SEQ ID NO: 171121
  Synthetic oligonucleotide

SEQ ID NO: 627744 - DNA, 55 bp, Artificial; identical to SEQ ID NO: 245249
  Synthetic oligonucleotide

SEQ ID NO: 627745 - DNA, 60 bp, Artificial; identical to SEQ ID NO: 177157
  Synthetic oligonucleotide

SEQ ID NO: 627746 - DNA, 51 bp, Artificial; identical to SEQ ID NO: 202409
  Synthetic oligonucleotide

SEQ ID NO: 627747 - DNA, 52 bp, Artificial; identical to SEQ ID NO: 248623
  Synthetic oligonucleotide

SEQ ID NO: 627748 - DNA, 51 bp, Artificial; identical to SEQ ID NO: 246792
  Synthetic oligonucleotide

SEQ ID NO: 627749 - DNA, 55 bp, Artificial; identical to SEQ ID NO: 155471
  Synthetic oligonucleotide

SEQ ID NO: 627750 - DNA, 55 bp, Artificial; identical to SEQ ID NO: 154299
  Synthetic oligonucleotide

SEQ ID NO: 627751 - DNA, 57 bp, Artificial; identical to SEQ ID NO: 237915
  Synthetic oligonucleotide

SEQ ID NO: 627752 - DNA, 55 bp, Artificial; identical to SEQ ID NO: 164620
  Synthetic oligonucleotide

SEQ ID NO: 627753 - DNA, 53 bp, Artificial; identical to SEQ ID NO: 157327
  Synthetic oligonucleotide

SEQ ID NO: 627754 - DNA, 51 bp, Artificial; identical to SEQ ID NO: 172837
  Synthetic oligonucleotide

SEQ ID NO: 627755 - DNA, 58 bp, Artificial; identical to SEQ ID NO: 246976
  Synthetic oligonucleotide

SEQ ID NO: 627756 - DNA, 55 bp, Artificial; identical to SEQ ID NO: 159172
  Synthetic oligonucleotide

SEQ ID NO: 627757 - DNA, 55 bp, Artificial; identical to SEQ ID NO: 155470
  Synthetic oligonucleotide

SEQ ID NO: 627758 - DNA, 55 bp, Artificial; identical to SEQ ID NO: 160890
  Synthetic oligonucleotide

SEQ ID NO: 627759 - DNA, 51 bp, Artificial; identical to SEQ ID NO: 190911
  Synthetic oligonucleotide

SEQ ID NO: 627760 - DNA, 55 bp, Artificial; identical to SEQ ID NO: 221305
  Synthetic oligonucleotide

SEQ ID NO: 627761 - DNA, 55 bp, Artificial; identical to SEQ ID NO: 198834
  Synthetic oligonucleotide

SEQ ID NO: 627762 - DNA, 58 bp, Artificial; identical to SEQ ID NO: 147147
  Synthetic oligonucleotide

SEQ ID NO: 627763 - DNA, 55 bp, Artificial; identical to SEQ ID NO: 148400
  Synthetic oligonucleotide

SEQ ID NO: 627764 - DNA, 55 bp, Artificial; identical to SEQ ID NO: 159168
  Synthetic oligonucleotide

SEQ ID NO: 627765 - DNA, 53 bp, Artificial; identical to SEQ ID NO: 246388
  Synthetic oligonucleotide

SEQ ID NO: 627766 - DNA, 53 bp, Artificial; identical to SEQ ID NO: 161307
  Synthetic oligonucleotide

SEQ ID NO: 627767 - DNA, 51 bp, Artificial; identical to SEQ ID NO: 239418
  Synthetic oligonucleotide

SEQ ID NO: 627768 - DNA, 55 bp, Artificial; identical to SEQ ID NO: 245247
  Synthetic oligonucleotide

SEQ ID NO: 627769 - DNA, 55 bp, Artificial; identical to SEQ ID NO: 203277
  Synthetic oligonucleotide

SEQ ID NO: 627770 - DNA, 58 bp, Artificial; identical to SEQ ID NO: 147089
  Synthetic oligonucleotide

SEQ ID NO: 627771 - DNA, 51 bp, Artificial; identical to SEQ ID NO: 141349
  Synthetic oligonucleotide

SEQ ID NO: 627772 - DNA, 55 bp, Artificial; identical to SEQ ID NO: 153487
  Synthetic oligonucleotide

SEQ ID NO: 627773 - DNA, 53 bp, Artificial; identical to SEQ ID NO: 199773
  Synthetic oligonucleotide

SEQ ID NO: 627774 - DNA, 53 bp, Artificial; identical to SEQ ID NO: 212968
  Synthetic oligonucleotide

SEQ ID NO: 627775 - DNA, 55 bp, Artificial; identical to SEQ ID NO: 205344
  Synthetic oligonucleotide

SEQ ID NO: 627776 - DNA, 54 bp, Artificial; identical to SEQ ID NO: 168418
  Synthetic oligonucleotide

SEQ ID NO: 627777 - DNA, 55 bp, Artificial; identical to SEQ ID NO: 242684
  Synthetic oligonucleotide

SEQ ID NO: 627778 - DNA, 53 bp, Artificial; identical to SEQ ID NO: 199775
  Synthetic oligonucleotide

SEQ ID NO: 627779 - DNA, 55 bp, Artificial; identical to SEQ ID NO: 159161
  Synthetic oligonucleotide

SEQ ID NO: 627780 - DNA, 50 bp, Artificial; identical to SEQ ID NO: 255803
  Synthetic oligonucleotide

SEQ ID NO: 627781 - DNA, 55 bp, Artificial; identical to SEQ ID NO: 257992
  Synthetic oligonucleotide

SEQ ID NO: 627782 - DNA, 55 bp, Artificial; identical to SEQ ID NO: 198833
  Synthetic oligonucleotide

SEQ ID NO: 627783 - DNA, 53 bp, Artificial; identical to SEQ ID NO: 211547
  Synthetic oligonucleotide

SEQ ID NO: 627784 - DNA, 55 bp, Artificial; identical to SEQ ID NO: 245246
  Synthetic oligonucleotide

SEQ ID NO: 627785 - DNA, 56 bp, Artificial; identical to SEQ ID NO: 150775
  Synthetic oligonucleotide

SEQ ID NO: 627786 - DNA, 55 bp, Artificial; identical to SEQ ID NO: 144476
  Synthetic oligonucleotide

SEQ ID NO: 627787 - DNA, 53 bp, Artificial; identical to SEQ ID NO: 190062
  Synthetic oligonucleotide

SEQ ID NO: 627788 - DNA, 56 bp, Artificial; identical to SEQ ID NO: 255278
  Synthetic oligonucleotide

SEQ ID NO: 627789 - DNA, 52 bp, Artificial; identical to SEQ ID NO: 208782
  Synthetic oligonucleotide

SEQ ID NO: 627790 - DNA, 53 bp, Artificial; identical to SEQ ID NO: 150774
  Synthetic oligonucleotide

SEQ ID NO: 627791 - DNA, 55 bp, Artificial; identical to SEQ ID NO: 254560
  Synthetic oligonucleotide

SEQ ID NO: 627792 - DNA, 55 bp, Artificial; identical to SEQ ID NO: 208360
  Synthetic oligonucleotide

SEQ ID NO: 627793 - DNA, 55 bp, Artificial; identical to SEQ ID NO: 211419
  Synthetic oligonucleotide

SEQ ID NO: 627794 - DNA, 50 bp, Artificial; identical to SEQ ID NO: 246929
  Synthetic oligonucleotide

SEQ ID NO: 627795 - DNA, 58 bp, Artificial; identical to SEQ ID NO: 144651
  Synthetic oligonucleotide

SEQ ID NO: 627796 - DNA, 52 bp, Artificial; identical to SEQ ID NO: 185143
  Synthetic oligonucleotide

SEQ ID NO: 627797 - DNA, 55 bp, Artificial; identical to SEQ ID NO: 212600
  Synthetic oligonucleotide

SEQ ID NO: 627798 - DNA, 55 bp, Artificial; identical to SEQ ID NO: 188414
  Synthetic oligonucleotide

SEQ ID NO: 627799 - DNA, 58 bp, Artificial; identical to SEQ ID NO: 160097
  Synthetic oligonucleotide

SEQ ID NO: 627800 - DNA, 55 bp, Artificial; identical to SEQ ID NO: 245244
  Synthetic oligonucleotide

SEQ ID NO: 627801 - DNA, 55 bp, Artificial; identical to SEQ ID NO: 212601
  Synthetic oligonucleotide

SEQ ID NO: 627802 - DNA, 55 bp, Artificial; identical to SEQ ID NO: 249313
  Synthetic oligonucleotide

SEQ ID NO: 627803 - DNA, 55 bp, Artificial; identical to SEQ ID NO: 159160
  Synthetic oligonucleotide

SEQ ID NO: 627804 - DNA, 55 bp, Artificial; identical to SEQ ID NO: 169172
  Synthetic oligonucleotide

SEQ ID NO: 627805 - DNA, 55 bp, Artificial; identical to SEQ ID NO: 190063
  Synthetic oligonucleotide

SEQ ID NO: 627806 - DNA, 59 bp, Artificial; identical to SEQ ID NO: 141904
  Synthetic oligonucleotide

SEQ ID NO: 627807 - DNA, 55 bp, Artificial; identical to SEQ ID NO: 159157
  Synthetic oligonucleotide

SEQ ID NO: 627808 - DNA, 60 bp, Artificial; identical to SEQ ID NO: 242152
  Synthetic oligonucleotide

SEQ ID NO: 627809 - DNA, 55 bp, Artificial; identical to SEQ ID NO: 148397
  Synthetic oligonucleotide

SEQ ID NO: 627810 - DNA, 53 bp, Artificial; identical to SEQ ID NO: 247776
  Synthetic oligonucleotide

SEQ ID NO: 627811 - DNA, 54 bp, Artificial; identical to SEQ ID NO: 242557
  Synthetic oligonucleotide

SEQ ID NO: 627812 - DNA, 57 bp, Artificial; identical to SEQ ID NO: 200047
  Synthetic oligonucleotide

SEQ ID NO: 627813 - DNA, 55 bp, Artificial; identical to SEQ ID NO: 159194
  Synthetic oligonucleotide

SEQ ID NO: 627814 - DNA, 51 bp, Artificial; identical to SEQ ID NO: 149809
  Synthetic oligonucleotide

SEQ ID NO: 627815 - DNA, 60 bp, Artificial; identical to SEQ ID NO: 246986
  Synthetic oligonucleotide

SEQ ID NO: 627816 - DNA, 55 bp, Artificial; identical to SEQ ID NO: 159193
  Synthetic oligonucleotide

SEQ ID NO: 627817 - DNA, 55 bp, Artificial; identical to SEQ ID NO: 188413
  Synthetic oligonucleotide

SEQ ID NO: 627818 - DNA, 55 bp, Artificial; identical to SEQ ID NO: 159190
  Synthetic oligonucleotide

SEQ ID NO: 627819 - DNA, 55 bp, Artificial; identical to SEQ ID NO: 249986
  Synthetic oligonucleotide

SEQ ID NO: 627820 - DNA, 55 bp, Artificial; identical to SEQ ID NO: 205345
  Synthetic oligonucleotide

SEQ ID NO: 627821 - DNA, 55 bp, Artificial; identical to SEQ ID NO: 170839
  Synthetic oligonucleotide

SEQ ID NO: 627822 - DNA, 55 bp, Artificial; identical to SEQ ID NO: 154308
  Synthetic oligonucleotide

SEQ ID NO: 627823 - DNA, 55 bp, Artificial; identical to SEQ ID NO: 152368
  Synthetic oligonucleotide

SEQ ID NO: 627824 - DNA, 55 bp, Artificial; identical to SEQ ID NO: 183301
  Synthetic oligonucleotide

SEQ ID NO: 627825 - DNA, 57 bp, Artificial; identical to SEQ ID NO: 210825
  Synthetic oligonucleotide

SEQ ID NO: 627826 - DNA, 55 bp, Artificial; identical to SEQ ID NO: 234166
  Synthetic oligonucleotide

SEQ ID NO: 627827 - DNA, 54 bp, Artificial; identical to SEQ ID NO: 183297
  Synthetic oligonucleotide

SEQ ID NO: 627828 - DNA, 55 bp, Artificial; identical to SEQ ID NO: 242685
  Synthetic oligonucleotide

SEQ ID NO: 627829 - DNA, 51 bp, Artificial; identical to SEQ ID NO: 201719
  Synthetic oligonucleotide

SEQ ID NO: 627830 - DNA, 55 bp, Artificial; identical to SEQ ID NO: 245184
  Synthetic oligonucleotide

SEQ ID NO: 627831 - DNA, 54 bp, Artificial; identical to SEQ ID NO: 216571
  Synthetic oligonucleotide

SEQ ID NO: 627832 - DNA, 55 bp, Artificial; identical to SEQ ID NO: 168419
  Synthetic oligonucleotide

SEQ ID NO: 627833 - DNA, 55 bp, Artificial; identical to SEQ ID NO: 249315
  Synthetic oligonucleotide

SEQ ID NO: 627834 - DNA, 55 bp, Artificial; identical to SEQ ID NO: 155468
  Synthetic oligonucleotide

SEQ ID NO: 627835 - DNA, 52 bp, Artificial; identical to SEQ ID NO: 224399
  Synthetic oligonucleotide

SEQ ID NO: 627836 - DNA, 55 bp, Artificial; identical to SEQ ID NO: 198829
  Synthetic oligonucleotide

SEQ ID NO: 627837 - DNA, 55 bp, Artificial; identical to SEQ ID NO: 159186
  Synthetic oligonucleotide

SEQ ID NO: 627838 - DNA, 55 bp, Artificial; identical to SEQ ID NO: 148394
  Synthetic oligonucleotide

SEQ ID NO: 627839 - DNA, 55 bp, Artificial; identical to SEQ ID NO: 161586
  Synthetic oligonucleotide

SEQ ID NO: 627840 - DNA, 51 bp, Artificial; identical to SEQ ID NO: 222733
  Synthetic oligonucleotide

SEQ ID NO: 627841 - DNA, 52 bp, Artificial; identical to SEQ ID NO: 221746
  Synthetic oligonucleotide

SEQ ID NO: 627842 - DNA, 55 bp, Artificial; identical to SEQ ID NO: 198828
  Synthetic oligonucleotide

SEQ ID NO: 627843 - DNA, 55 bp, Artificial; identical to SEQ ID NO: 207427
  Synthetic oligonucleotide

SEQ ID NO: 627844 - DNA, 52 bp, Artificial; identical to SEQ ID NO: 185958
  Synthetic oligonucleotide

SEQ ID NO: 627845 - DNA, 55 bp, Artificial; identical to SEQ ID NO: 190064
  Synthetic oligonucleotide

SEQ ID NO: 627846 - DNA, 55 bp, Artificial; identical to SEQ ID NO: 245183
  Synthetic oligonucleotide

SEQ ID NO: 627847 - DNA, 59 bp, Artificial; identical to SEQ ID NO: 150773
  Synthetic oligonucleotide

SEQ ID NO: 627848 - DNA, 55 bp, Artificial; identical to SEQ ID NO: 159180
  Synthetic oligonucleotide

SEQ ID NO: 627849 - DNA, 54 bp, Artificial; identical to SEQ ID NO: 246237
  Synthetic oligonucleotide

SEQ ID NO: 627850 - DNA, 55 bp, Artificial; identical to SEQ ID NO: 183348
  Synthetic oligonucleotide

SEQ ID NO: 627851 - DNA, 55 bp, Artificial; identical to SEQ ID NO: 183351
  Synthetic oligonucleotide

SEQ ID NO: 627852 - DNA, 50 bp, Artificial; identical to SEQ ID NO: 205983
  Synthetic oligonucleotide

SEQ ID NO: 627853 - DNA, 56 bp, Artificial; identical to SEQ ID NO: 147290
  Synthetic oligonucleotide

SEQ ID NO: 627854 - DNA, 55 bp, Artificial; identical to SEQ ID NO: 253240
  Synthetic oligonucleotide

SEQ ID NO: 627855 - DNA, 54 bp, Artificial; identical to SEQ ID NO: 157282
  Synthetic oligonucleotide

SEQ ID NO: 627856 - DNA, 55 bp, Artificial; identical to SEQ ID NO: 183355
  Synthetic oligonucleotide

SEQ ID NO: 627857 - DNA, 50 bp, Artificial; identical to SEQ ID NO: 165348
  Synthetic oligonucleotide

SEQ ID NO: 627858 - DNA, 55 bp, Artificial; identical to SEQ ID NO: 164624
  Synthetic oligonucleotide

SEQ ID NO: 627859 - DNA, 55 bp, Artificial; identical to SEQ ID NO: 162126
  Synthetic oligonucleotide

SEQ ID NO: 627860 - DNA, 53 bp, Artificial; identical to SEQ ID NO: 217722
  Synthetic oligonucleotide

SEQ ID NO: 627861 - DNA, 55 bp, Artificial; identical to SEQ ID NO: 208363
  Synthetic oligonucleotide

SEQ ID NO: 627862 - DNA, 53 bp, Artificial; identical to SEQ ID NO: 183356
  Synthetic oligonucleotide

SEQ ID NO: 627863 - DNA, 58 bp, Artificial; identical to SEQ ID NO: 177152
  Synthetic oligonucleotide

SEQ ID NO: 627864 - DNA, 55 bp, Artificial; identical to SEQ ID NO: 234165
  Synthetic oligonucleotide

SEQ ID NO: 627865 - DNA, 55 bp, Artificial; identical to SEQ ID NO: 254553
  Synthetic oligonucleotide

SEQ ID NO: 627866 - DNA, 55 bp, Artificial; identical to SEQ ID NO: 202406
  Synthetic oligonucleotide

SEQ ID NO: 627867 - DNA, 55 bp, Artificial; identical to SEQ ID NO: 183359
  Synthetic oligonucleotide

SEQ ID NO: 627868 - DNA, 57 bp, Artificial; identical to SEQ ID NO: 177151
  Synthetic oligonucleotide

SEQ ID NO: 627869 - DNA, 50 bp, Artificial; identical to SEQ ID NO: 187131
  Synthetic oligonucleotide

SEQ ID NO: 627870 - DNA, 55 bp, Artificial; identical to SEQ ID NO: 240258
  Synthetic oligonucleotide

SEQ ID NO: 627871 - DNA, 55 bp, Artificial; identical to SEQ ID NO: 265717
  Synthetic oligonucleotide

SEQ ID NO: 627872 - DNA, 55 bp, Artificial; identical to SEQ ID NO: 148389
  Synthetic oligonucleotide

SEQ ID NO: 627873 - DNA, 57 bp, Artificial; identical to SEQ ID NO: 244022
  Synthetic oligonucleotide

SEQ ID NO: 627874 - DNA, 58 bp, Artificial; identical to SEQ ID NO: 144662
  Synthetic oligonucleotide

SEQ ID NO: 627875 - DNA, 57 bp, Artificial; identical to SEQ ID NO: 200036
  Synthetic oligonucleotide

SEQ ID NO: 627876 - DNA, 57 bp, Artificial; identical to SEQ ID NO: 256599
  Synthetic oligonucleotide

SEQ ID NO: 627877 - DNA, 55 bp, Artificial; identical to SEQ ID NO: 159031
  Synthetic oligonucleotide

SEQ ID NO: 627878 - DNA, 60 bp, Artificial; identical to SEQ ID NO: 242151
  Synthetic oligonucleotide

SEQ ID NO: 627879 - DNA, 55 bp, Artificial; identical to SEQ ID NO: 158998
  Synthetic oligonucleotide

SEQ ID NO: 627880 - DNA, 58 bp, Artificial; identical to SEQ ID NO: 266343
  Synthetic oligonucleotide

SEQ ID NO: 627881 - DNA, 51 bp, Artificial; identical to SEQ ID NO: 216807
  Synthetic oligonucleotide

SEQ ID NO: 627882 - DNA, 58 bp, Artificial; identical to SEQ ID NO: 212336
  Synthetic oligonucleotide

SEQ ID NO: 627883 - DNA, 54 bp, Artificial; identical to SEQ ID NO: 148388
  Synthetic oligonucleotide

SEQ ID NO: 627884 - DNA, 52 bp, Artificial; identical to SEQ ID NO: 158987
  Synthetic oligonucleotide

SEQ ID NO: 627885 - DNA, 55 bp, Artificial; identical to SEQ ID NO: 158920
  Synthetic oligonucleotide

SEQ ID NO: 627886 - DNA, 54 bp, Artificial; identical to SEQ ID NO: 148386
  Synthetic oligonucleotide

SEQ ID NO: 627887 - DNA, 55 bp, Artificial; identical to SEQ ID NO: 151880
  Synthetic oligonucleotide

SEQ ID NO: 627888 - DNA, 55 bp, Artificial; identical to SEQ ID NO: 159895
  Synthetic oligonucleotide

SEQ ID NO: 627889 - DNA, 55 bp, Artificial; identical to SEQ ID NO: 150726
  Synthetic oligonucleotide

SEQ ID NO: 627890 - DNA, 59 bp, Artificial; identical to SEQ ID NO: 255189
  Synthetic oligonucleotide

SEQ ID NO: 627891 - DNA, 53 bp, Artificial; identical to SEQ ID NO: 153614
  Synthetic oligonucleotide

SEQ ID NO: 627892 - DNA, 55 bp, Artificial; identical to SEQ ID NO: 254594
  Synthetic oligonucleotide

SEQ ID NO: 627893 - DNA, 55 bp, Artificial; identical to SEQ ID NO: 183334
  Synthetic oligonucleotide

SEQ ID NO: 627894 - DNA, 55 bp, Artificial; identical to SEQ ID NO: 194885
  Synthetic oligonucleotide

SEQ ID NO: 627895 - DNA, 55 bp, Artificial; identical to SEQ ID NO: 211425
  Synthetic oligonucleotide

SEQ ID NO: 627896 - DNA, 55 bp, Artificial; identical to SEQ ID NO: 200025
  Synthetic oligonucleotide

SEQ ID NO: 627897 - DNA, 50 bp, Artificial; identical to SEQ ID NO: 175244
  Synthetic oligonucleotide

SEQ ID NO: 627898 - DNA, 55 bp, Artificial; identical to SEQ ID NO: 146360
  Synthetic oligonucleotide

SEQ ID NO: 627899 - DNA, 55 bp, Artificial; identical to SEQ ID NO: 190071
  Synthetic oligonucleotide

SEQ ID NO: 627900 - DNA, 50 bp, Artificial; identical to SEQ ID NO: 167810
  Synthetic oligonucleotide

SEQ ID NO: 627901 - DNA, 55 bp, Artificial; identical to SEQ ID NO: 242687
  Synthetic oligonucleotide

SEQ ID NO: 627902 - DNA, 55 bp, Artificial; identical to SEQ ID NO: 167292
  Synthetic oligonucleotide

SEQ ID NO: 627903 - DNA, 55 bp, Artificial; identical to SEQ ID NO: 183335
  Synthetic oligonucleotide

SEQ ID NO: 627904 - DNA, 55 bp, Artificial; identical to SEQ ID NO: 254591
  Synthetic oligonucleotide

SEQ ID NO: 627905 - DNA, 55 bp, Artificial; identical to SEQ ID NO: 257989
  Synthetic oligonucleotide

SEQ ID NO: 627906 - DNA, 59 bp, Artificial; identical to SEQ ID NO: 222850
  Synthetic oligonucleotide

SEQ ID NO: 627907 - DNA, 53 bp, Artificial; identical to SEQ ID NO: 190072
  Synthetic oligonucleotide

SEQ ID NO: 627908 - DNA, 51 bp, Artificial; identical to SEQ ID NO: 197711
  Synthetic oligonucleotide

SEQ ID NO: 627909 - DNA, 51 bp, Artificial; identical to SEQ ID NO: 243332
  Synthetic oligonucleotide

SEQ ID NO: 627910 - DNA, 55 bp, Artificial; identical to SEQ ID NO: 215558
  Synthetic oligonucleotide

SEQ ID NO: 627911 - DNA, 52 bp, Artificial; identical to SEQ ID NO: 185973
  Synthetic oligonucleotide

SEQ ID NO: 627912 - DNA, 55 bp, Artificial; identical to SEQ ID NO: 254587
  Synthetic oligonucleotide

SEQ ID NO: 627913 - DNA, 58 bp, Artificial; identical to SEQ ID NO: 194837
  Synthetic oligonucleotide

SEQ ID NO: 627914 - DNA, 55 bp, Artificial; identical to SEQ ID NO: 205346
  Synthetic oligonucleotide

SEQ ID NO: 627915 - DNA, 55 bp, Artificial; identical to SEQ ID NO: 245175
  Synthetic oligonucleotide

SEQ ID NO: 627916 - DNA, 55 bp, Artificial; identical to SEQ ID NO: 238198
  Synthetic oligonucleotide

SEQ ID NO: 627917 - DNA, 55 bp, Artificial; identical to SEQ ID NO: 159151
  Synthetic oligonucleotide

SEQ ID NO: 627918 - DNA, 55 bp, Artificial; identical to SEQ ID NO: 218162
  Synthetic oligonucleotide

SEQ ID NO: 627919 - DNA, 55 bp, Artificial; identical to SEQ ID NO: 155466
  Synthetic oligonucleotide

SEQ ID NO: 627920 - DNA, 55 bp, Artificial; identical to SEQ ID NO: 195249
  Synthetic oligonucleotide

SEQ ID NO: 627921 - DNA, 60 bp, Artificial; identical to SEQ ID NO: 242797
  Synthetic oligonucleotide

SEQ ID NO: 627922 - DNA, 51 bp, Artificial; identical to SEQ ID NO: 208885
  Synthetic oligonucleotide

SEQ ID NO: 627923 - DNA, 55 bp, Artificial; identical to SEQ ID NO: 183239
  Synthetic oligonucleotide

SEQ ID NO: 627924 - DNA, 55 bp, Artificial; identical to SEQ ID NO: 240260
  Synthetic oligonucleotide

SEQ ID NO: 627925 - DNA, 51 bp, Artificial; identical to SEQ ID NO: 187047
  Synthetic oligonucleotide

SEQ ID NO: 627926 - DNA, 55 bp, Artificial; identical to SEQ ID NO: 234163
  Synthetic oligonucleotide

SEQ ID NO: 627927 - DNA, 55 bp, Artificial; identical to SEQ ID NO: 245172
  Synthetic oligonucleotide

SEQ ID NO: 627928 - DNA, 51 bp, Artificial; identical to SEQ ID NO: 192180
  Synthetic oligonucleotide

SEQ ID NO: 627929 - DNA, 55 bp, Artificial; identical to SEQ ID NO: 249317
  Synthetic oligonucleotide

SEQ ID NO: 627930 - DNA, 55 bp, Artificial; identical to SEQ ID NO: 151883
  Synthetic oligonucleotide

SEQ ID NO: 627931 - DNA, 55 bp, Artificial; identical to SEQ ID NO: 221315
  Synthetic oligonucleotide

SEQ ID NO: 627932 - DNA, 55 bp, Artificial; identical to SEQ ID NO: 218161
  Synthetic oligonucleotide

SEQ ID NO: 627933 - DNA, 55 bp, Artificial; identical to SEQ ID NO: 205347
  Synthetic oligonucleotide

SEQ ID NO: 627934 - DNA, 55 bp, Artificial; identical to SEQ ID NO: 183245
  Synthetic oligonucleotide

SEQ ID NO: 627935 - DNA, 54 bp, Artificial; identical to SEQ ID NO: 188022
  Synthetic oligonucleotide

SEQ ID NO: 627936 - DNA, 55 bp, Artificial; identical to SEQ ID NO: 211427
  Synthetic oligonucleotide

SEQ ID NO: 627937 - DNA, 50 bp, Artificial; identical to SEQ ID NO: 160703
  Synthetic oligonucleotide

SEQ ID NO: 627938 - DNA, 55 bp, Artificial; identical to SEQ ID NO: 217773
  Synthetic oligonucleotide

SEQ ID NO: 627939 - DNA, 55 bp, Artificial; identical to SEQ ID NO: 257988
  Synthetic oligonucleotide

SEQ ID NO: 627940 - DNA, 55 bp, Artificial; identical to SEQ ID NO: 207469
  Synthetic oligonucleotide

SEQ ID NO: 627941 - DNA, 60 bp, Artificial; identical to SEQ ID NO: 237726
  Synthetic oligonucleotide

SEQ ID NO: 627942 - DNA, 55 bp, Artificial; identical to SEQ ID NO: 254585
  Synthetic oligonucleotide

SEQ ID NO: 627943 - DNA, 55 bp, Artificial; identical to SEQ ID NO: 161575
  Synthetic oligonucleotide

SEQ ID NO: 627944 - DNA, 55 bp, Artificial; identical to SEQ ID NO: 171107
  Synthetic oligonucleotide

SEQ ID NO: 627945 - DNA, 55 bp, Artificial; identical to SEQ ID NO: 245170
  Synthetic oligonucleotide

SEQ ID NO: 627946 - DNA, 56 bp, Artificial; identical to SEQ ID NO: 212338
  Synthetic oligonucleotide

SEQ ID NO: 627947 - DNA, 52 bp, Artificial; identical to SEQ ID NO: 186007
  Synthetic oligonucleotide

SEQ ID NO: 627948 - DNA, 50 bp, Artificial; identical to SEQ ID NO: 203038
  Synthetic oligonucleotide

SEQ ID NO: 627949 - DNA, 52 bp, Artificial; identical to SEQ ID NO: 186010
  Synthetic oligonucleotide

SEQ ID NO: 627950 - DNA, 55 bp, Artificial; identical to SEQ ID NO: 174512
  Synthetic oligonucleotide

SEQ ID NO: 627951 - DNA, 55 bp, Artificial; identical to SEQ ID NO: 215557
  Synthetic oligonucleotide

SEQ ID NO: 627952 - DNA, 51 bp, Artificial; identical to SEQ ID NO: 141576
  Synthetic oligonucleotide

SEQ ID NO: 627953 - DNA, 54 bp, Artificial; identical to SEQ ID NO: 225071
  Synthetic oligonucleotide

SEQ ID NO: 627954 - DNA, 55 bp, Artificial; identical to SEQ ID NO: 142320
  Synthetic oligonucleotide

SEQ ID NO: 627955 - DNA, 55 bp, Artificial; identical to SEQ ID NO: 247724
  Synthetic oligonucleotide

SEQ ID NO: 627956 - DNA, 52 bp, Artificial; identical to SEQ ID NO: 197013
  Synthetic oligonucleotide

SEQ ID NO: 627957 - DNA, 55 bp, Artificial; identical to SEQ ID NO: 169174
  Synthetic oligonucleotide

SEQ ID NO: 627958 - DNA, 51 bp, Artificial; identical to SEQ ID NO: 223775
  Synthetic oligonucleotide

SEQ ID NO: 627959 - DNA, 57 bp, Artificial; identical to SEQ ID NO: 147167
  Synthetic oligonucleotide

SEQ ID NO: 627960 - DNA, 55 bp, Artificial; identical to SEQ ID NO: 153484
  Synthetic oligonucleotide

SEQ ID NO: 627961 - DNA, 55 bp, Artificial; identical to SEQ ID NO: 167494
  Synthetic oligonucleotide

SEQ ID NO: 627962 - DNA, 53 bp, Artificial; identical to SEQ ID NO: 265769
  Synthetic oligonucleotide

SEQ ID NO: 627963 - DNA, 57 bp, Artificial; identical to SEQ ID NO: 199592
  Synthetic oligonucleotide

SEQ ID NO: 627964 - DNA, 52 bp, Artificial; identical to SEQ ID NO: 197566
  Synthetic oligonucleotide

SEQ ID NO: 627965 - DNA, 55 bp, Artificial; identical to SEQ ID NO: 211428
  Synthetic oligonucleotide

SEQ ID NO: 627966 - DNA, 55 bp, Artificial; identical to SEQ ID NO: 207470
  Synthetic oligonucleotide

SEQ ID NO: 627967 - DNA, 55 bp, Artificial; identical to SEQ ID NO: 168424
  Synthetic oligonucleotide

SEQ ID NO: 627968 - DNA, 55 bp, Artificial; identical to SEQ ID NO: 154310
  Synthetic oligonucleotide

SEQ ID NO: 627969 - DNA, 55 bp, Artificial; identical to SEQ ID NO: 249283
  Synthetic oligonucleotide

SEQ ID NO: 627970 - DNA, 55 bp, Artificial; identical to SEQ ID NO: 183224
  Synthetic oligonucleotide

SEQ ID NO: 627971 - DNA, 55 bp, Artificial; identical to SEQ ID NO: 161826
  Synthetic oligonucleotide

SEQ ID NO: 627972 - DNA, 55 bp, Artificial; identical to SEQ ID NO: 211429
  Synthetic oligonucleotide

SEQ ID NO: 627973 - DNA, 52 bp, Artificial; identical to SEQ ID NO: 246444
  Synthetic oligonucleotide

SEQ ID NO: 627974 - DNA, 55 bp, Artificial; identical to SEQ ID NO: 143681
  Synthetic oligonucleotide

SEQ ID NO: 627975 - DNA, 55 bp, Artificial; identical to SEQ ID NO: 183276
  Synthetic oligonucleotide

SEQ ID NO: 627976 - DNA, 52 bp, Artificial; identical to SEQ ID NO: 141301
  Synthetic oligonucleotide

SEQ ID NO: 627977 - DNA, 53 bp, Artificial; identical to SEQ ID NO: 154110
  Synthetic oligonucleotide

SEQ ID NO: 627978 - DNA, 53 bp, Artificial; identical to SEQ ID NO: 202981
  Synthetic oligonucleotide

SEQ ID NO: 627979 - DNA, 55 bp, Artificial; identical to SEQ ID NO: 160889
  Synthetic oligonucleotide

SEQ ID NO: 627980 - DNA, 55 bp, Artificial; identical to SEQ ID NO: 249287
  Synthetic oligonucleotide

SEQ ID NO: 627981 - DNA, 55 bp, Artificial; identical to SEQ ID NO: 183278
  Synthetic oligonucleotide

SEQ ID NO: 627982 - DNA, 55 bp, Artificial; identical to SEQ ID NO: 183279
  Synthetic oligonucleotide

SEQ ID NO: 627983 - DNA, 59 bp, Artificial; identical to SEQ ID NO: 237837
  Synthetic oligonucleotide

SEQ ID NO: 627984 - DNA, 55 bp, Artificial; identical to SEQ ID NO: 208368
  Synthetic oligonucleotide

SEQ ID NO: 627985 - DNA, 49 bp, Artificial; identical to SEQ ID NO: 148378
  Synthetic oligonucleotide

SEQ ID NO: 627986 - DNA, 55 bp, Artificial; identical to SEQ ID NO: 208369
  Synthetic oligonucleotide

SEQ ID NO: 627987 - DNA, 52 bp, Artificial; identical to SEQ ID NO: 185908
  Synthetic oligonucleotide

SEQ ID NO: 627988 - DNA, 55 bp, Artificial; identical to SEQ ID NO: 198823
  Synthetic oligonucleotide

SEQ ID NO: 627989 - DNA, 55 bp, Artificial; identical to SEQ ID NO: 171102
  Synthetic oligonucleotide

SEQ ID NO: 627990 - DNA, 55 bp, Artificial; identical to SEQ ID NO: 217774
  Synthetic oligonucleotide

SEQ ID NO: 627991 - DNA, 55 bp, Artificial; identical to SEQ ID NO: 187378
  Synthetic oligonucleotide

SEQ ID NO: 627992 - DNA, 55 bp, Artificial; identical to SEQ ID NO: 148433
  Synthetic oligonucleotide

SEQ ID NO: 627993 - DNA, 55 bp, Artificial; identical to SEQ ID NO: 257113
  Synthetic oligonucleotide

SEQ ID NO: 627994 - DNA, 51 bp, Artificial; identical to SEQ ID NO: 248051
  Synthetic oligonucleotide

SEQ ID NO: 627995 - DNA, 50 bp, Artificial; identical to SEQ ID NO: 205985
  Synthetic oligonucleotide

SEQ ID NO: 627996 - DNA, 55 bp, Artificial; identical to SEQ ID NO: 249290
  Synthetic oligonucleotide

SEQ ID NO: 627997 - DNA, 56 bp, Artificial; identical to SEQ ID NO: 154680
  Synthetic oligonucleotide

SEQ ID NO: 627998 - DNA, 59 bp, Artificial; identical to SEQ ID NO: 206804
  Synthetic oligonucleotide

SEQ ID NO: 627999 - DNA, 55 bp, Artificial; identical to SEQ ID NO: 168425
  Synthetic oligonucleotide

SEQ ID NO: 628000 - DNA, 55 bp, Artificial; identical to SEQ ID NO: 159627
  Synthetic oligonucleotide

SEQ ID NO: 628001 - DNA, 54 bp, Artificial; identical to SEQ ID NO: 242689
  Synthetic oligonucleotide

SEQ ID NO: 628002 - DNA, 51 bp, Artificial; identical to SEQ ID NO: 186867
  Synthetic oligonucleotide

SEQ ID NO: 628003 - DNA, 55 bp, Artificial; identical to SEQ ID NO: 245167
  Synthetic oligonucleotide

SEQ ID NO: 628004 - DNA, 50 bp, Artificial; identical to SEQ ID NO: 165416
  Synthetic oligonucleotide

SEQ ID NO: 628005 - DNA, 55 bp, Artificial; identical to SEQ ID NO: 159619
  Synthetic oligonucleotide

SEQ ID NO: 628006 - DNA, 55 bp, Artificial; identical to SEQ ID NO: 183285
  Synthetic oligonucleotide

SEQ ID NO: 628007 - DNA, 55 bp, Artificial; identical to SEQ ID NO: 143678
  Synthetic oligonucleotide

SEQ ID NO: 628008 - DNA, 55 bp, Artificial; identical to SEQ ID NO: 183286
  Synthetic oligonucleotide

SEQ ID NO: 628009 - DNA, 55 bp, Artificial; identical to SEQ ID NO: 183288
  Synthetic oligonucleotide

SEQ ID NO: 628010 - DNA, 55 bp, Artificial; identical to SEQ ID NO: 207472
  Synthetic oligonucleotide

SEQ ID NO: 628011 - DNA, 55 bp, Artificial; identical to SEQ ID NO: 225235
  Synthetic oligonucleotide

SEQ ID NO: 628012 - DNA, 55 bp, Artificial; identical to SEQ ID NO: 159616
  Synthetic oligonucleotide

SEQ ID NO: 628013 - DNA, 55 bp, Artificial; identical to SEQ ID NO: 168426
  Synthetic oligonucleotide

SEQ ID NO: 628014 - DNA, 55 bp, Artificial; identical to SEQ ID NO: 183291
  Synthetic oligonucleotide

SEQ ID NO: 628015 - DNA, 55 bp, Artificial; identical to SEQ ID NO: 188784
  Synthetic oligonucleotide

SEQ ID NO: 628016 - DNA, 60 bp, Artificial; identical to SEQ ID NO: 266354
  Synthetic oligonucleotide

SEQ ID NO: 628017 - DNA, 55 bp, Artificial; identical to SEQ ID NO: 145187
  Synthetic oligonucleotide

SEQ ID NO: 628018 - DNA, 55 bp, Artificial; identical to SEQ ID NO: 183258
  Synthetic oligonucleotide

SEQ ID NO: 628019 - DNA, 55 bp, Artificial; identical to SEQ ID NO: 203276
  Synthetic oligonucleotide

SEQ ID NO: 628020 - DNA, 55 bp, Artificial; identical to SEQ ID NO: 262806
  Synthetic oligonucleotide

SEQ ID NO: 628021 - DNA, 60 bp, Artificial; identical to SEQ ID NO: 150724
  Synthetic oligonucleotide

SEQ ID NO: 628022 - DNA, 54 bp, Artificial; identical to SEQ ID NO: 190073
  Synthetic oligonucleotide

SEQ ID NO: 628023 - DNA, 55 bp, Artificial; identical to SEQ ID NO: 169175
  Synthetic oligonucleotide

SEQ ID NO: 628024 - DNA, 54 bp, Artificial; identical to SEQ ID NO: 188023
  Synthetic oligonucleotide

SEQ ID NO: 628025 - DNA, 60 bp, Artificial; identical to SEQ ID NO: 257420
  Synthetic oligonucleotide

SEQ ID NO: 628026 - DNA, 55 bp, Artificial; identical to SEQ ID NO: 245164
  Synthetic oligonucleotide

SEQ ID NO: 628027 - DNA, 54 bp, Artificial; identical to SEQ ID NO: 143677
  Synthetic oligonucleotide

SEQ ID NO: 628028 - DNA, 55 bp, Artificial; identical to SEQ ID NO: 223409
  Synthetic oligonucleotide

SEQ ID NO: 628029 - DNA, 51 bp, Artificial; identical to SEQ ID NO: 161893
  Synthetic oligonucleotide

SEQ ID NO: 628030 - DNA, 55 bp, Artificial; identical to SEQ ID NO: 154261
  Synthetic oligonucleotide

SEQ ID NO: 628031 - DNA, 54 bp, Artificial; identical to SEQ ID NO: 247793
  Synthetic oligonucleotide

SEQ ID NO: 628032 - DNA, 55 bp, Artificial; identical to SEQ ID NO: 183261
  Synthetic oligonucleotide

SEQ ID NO: 628033 - DNA, 55 bp, Artificial; identical to SEQ ID NO: 183263
  Synthetic oligonucleotide

SEQ ID NO: 628034 - DNA, 55 bp, Artificial; identical to SEQ ID NO: 159613
  Synthetic oligonucleotide

SEQ ID NO: 628035 - DNA, 55 bp, Artificial; identical to SEQ ID NO: 191089
  Synthetic oligonucleotide

SEQ ID NO: 628036 - DNA, 52 bp, Artificial; identical to SEQ ID NO: 211593
  Synthetic oligonucleotide

SEQ ID NO: 628037 - DNA, 54 bp, Artificial; identical to SEQ ID NO: 161295
  Synthetic oligonucleotide

SEQ ID NO: 628038 - DNA, 55 bp, Artificial; identical to SEQ ID NO: 183270
  Synthetic oligonucleotide

SEQ ID NO: 628039 - DNA, 55 bp, Artificial; identical to SEQ ID NO: 152593
  Synthetic oligonucleotide

SEQ ID NO: 628040 - DNA, 55 bp, Artificial; identical to SEQ ID NO: 153482
  Synthetic oligonucleotide

SEQ ID NO: 628041 - DNA, 55 bp, Artificial; identical to SEQ ID NO: 148432
  Synthetic oligonucleotide

SEQ ID NO: 628042 - DNA, 56 bp, Artificial; identical to SEQ ID NO: 248642
  Synthetic oligonucleotide

SEQ ID NO: 628043 - DNA, 55 bp, Artificial; identical to SEQ ID NO: 154269
  Synthetic oligonucleotide

SEQ ID NO: 628044 - DNA, 55 bp, Artificial; identical to SEQ ID NO: 233732
  Synthetic oligonucleotide

SEQ ID NO: 628045 - DNA, 59 bp, Artificial; identical to SEQ ID NO: 212487
  Synthetic oligonucleotide

SEQ ID NO: 628046 - DNA, 60 bp, Artificial; identical to SEQ ID NO: 212340
  Synthetic oligonucleotide

SEQ ID NO: 628047 - DNA, 54 bp, Artificial; identical to SEQ ID NO: 164738
  Synthetic oligonucleotide

SEQ ID NO: 628048 - DNA, 52 bp, Artificial; identical to SEQ ID NO: 188110
  Synthetic oligonucleotide

SEQ ID NO: 628049 - DNA, 54 bp, Artificial; identical to SEQ ID NO: 202403
  Synthetic oligonucleotide

SEQ ID NO: 628050 - DNA, 55 bp, Artificial; identical to SEQ ID NO: 198821
  Synthetic oligonucleotide

SEQ ID NO: 628051 - DNA, 55 bp, Artificial; identical to SEQ ID NO: 258994
  Synthetic oligonucleotide

SEQ ID NO: 628052 - DNA, 50 bp, Artificial; identical to SEQ ID NO: 200227
  Synthetic oligonucleotide

SEQ ID NO: 628053 - DNA, 55 bp, Artificial; identical to SEQ ID NO: 245163
  Synthetic oligonucleotide

SEQ ID NO: 628054 - DNA, 54 bp, Artificial; identical to SEQ ID NO: 199643
  Synthetic oligonucleotide

SEQ ID NO: 628055 - DNA, 60 bp, Artificial; identical to SEQ ID NO: 154314
  Synthetic oligonucleotide

SEQ ID NO: 628056 - DNA, 57 bp, Artificial; identical to SEQ ID NO: 170842
  Synthetic oligonucleotide

SEQ ID NO: 628057 - DNA, 55 bp, Artificial; identical to SEQ ID NO: 168427
  Synthetic oligonucleotide

SEQ ID NO: 628058 - DNA, 54 bp, Artificial; identical to SEQ ID NO: 183274
  Synthetic oligonucleotide

SEQ ID NO: 628059 - DNA, 57 bp, Artificial; identical to SEQ ID NO: 141579
  Synthetic oligonucleotide

SEQ ID NO: 628060 - DNA, 55 bp, Artificial; identical to SEQ ID NO: 234161
  Synthetic oligonucleotide

SEQ ID NO: 628061 - DNA, 55 bp, Artificial; identical to SEQ ID NO: 164626
  Synthetic oligonucleotide

SEQ ID NO: 628062 - DNA, 56 bp, Artificial; identical to SEQ ID NO: 257409
  Synthetic oligonucleotide

SEQ ID NO: 628063 - DNA, 54 bp, Artificial; identical to SEQ ID NO: 147241
  Synthetic oligonucleotide

SEQ ID NO: 628064 - DNA, 55 bp, Artificial; identical to SEQ ID NO: 187938
  Synthetic oligonucleotide

SEQ ID NO: 628065 - DNA, 55 bp, Artificial; identical to SEQ ID NO: 205351
  Synthetic oligonucleotide

SEQ ID NO: 628066 - DNA, 50 bp, Artificial; identical to SEQ ID NO: 158059
  Synthetic oligonucleotide

SEQ ID NO: 628067 - DNA, 55 bp, Artificial; identical to SEQ ID NO: 182884
  Synthetic oligonucleotide

SEQ ID NO: 628068 - DNA, 58 bp, Artificial; identical to SEQ ID NO: 177137
  Synthetic oligonucleotide

SEQ ID NO: 628069 - DNA, 60 bp, Artificial; identical to SEQ ID NO: 246992
  Synthetic oligonucleotide

SEQ ID NO: 628070 - DNA, 60 bp, Artificial; identical to SEQ ID NO: 248288
  Synthetic oligonucleotide

SEQ ID NO: 628071 - DNA, 55 bp, Artificial; identical to SEQ ID NO: 249477
  Synthetic oligonucleotide

SEQ ID NO: 628072 - DNA, 60 bp, Artificial; identical to SEQ ID NO: 170843
  Synthetic oligonucleotide

SEQ ID NO: 628073 - DNA, 50 bp, Artificial; identical to SEQ ID NO: 150087
  Synthetic oligonucleotide

SEQ ID NO: 628074 - DNA, 55 bp, Artificial; identical to SEQ ID NO: 245159
  Synthetic oligonucleotide

SEQ ID NO: 628075 - DNA, 51 bp, Artificial; identical to SEQ ID NO: 165180
  Synthetic oligonucleotide

SEQ ID NO: 628076 - DNA, 50 bp, Artificial; identical to SEQ ID NO: 187126
  Synthetic oligonucleotide

SEQ ID NO: 628077 - DNA, 55 bp, Artificial; identical to SEQ ID NO: 182896
  Synthetic oligonucleotide

SEQ ID NO: 628078 - DNA, 55 bp, Artificial; identical to SEQ ID NO: 148426
  Synthetic oligonucleotide

SEQ ID NO: 628079 - DNA, 55 bp, Artificial; identical to SEQ ID NO: 207473
  Synthetic oligonucleotide

SEQ ID NO: 628080 - DNA, 55 bp, Artificial; identical to SEQ ID NO: 265728
  Synthetic oligonucleotide

SEQ ID NO: 628081 - DNA, 55 bp, Artificial; identical to SEQ ID NO: 202400
  Synthetic oligonucleotide

SEQ ID NO: 628082 - DNA, 52 bp, Artificial; identical to SEQ ID NO: 160511
  Synthetic oligonucleotide

SEQ ID NO: 628083 - DNA, 55 bp, Artificial; identical to SEQ ID NO: 171159
  Synthetic oligonucleotide

SEQ ID NO: 628084 - DNA, 51 bp, Artificial; identical to SEQ ID NO: 246747
  Synthetic oligonucleotide

SEQ ID NO: 628085 - DNA, 55 bp, Artificial; identical to SEQ ID NO: 198818
  Synthetic oligonucleotide

SEQ ID NO: 628086 - DNA, 55 bp, Artificial; identical to SEQ ID NO: 148425
  Synthetic oligonucleotide

SEQ ID NO: 628087 - DNA, 56 bp, Artificial; identical to SEQ ID NO: 248645
  Synthetic oligonucleotide

SEQ ID NO: 628088 - DNA, 55 bp, Artificial; identical to SEQ ID NO: 205354
  Synthetic oligonucleotide

SEQ ID NO: 628089 - DNA, 55 bp, Artificial; identical to SEQ ID NO: 154991
  Synthetic oligonucleotide

SEQ ID NO: 628090 - DNA, 59 bp, Artificial; identical to SEQ ID NO: 209617
  Synthetic oligonucleotide

SEQ ID NO: 628091 - DNA, 55 bp, Artificial; identical to SEQ ID NO: 182876
  Synthetic oligonucleotide

SEQ ID NO: 628092 - DNA, 55 bp, Artificial; identical to SEQ ID NO: 220553
  Synthetic oligonucleotide

SEQ ID NO: 628093 - DNA, 55 bp, Artificial; identical to SEQ ID NO: 210955
  Synthetic oligonucleotide

SEQ ID NO: 628094 - DNA, 55 bp, Artificial; identical to SEQ ID NO: 234160
  Synthetic oligonucleotide

SEQ ID NO: 628095 - DNA, 55 bp, Artificial; identical to SEQ ID NO: 245207
  Synthetic oligonucleotide

SEQ ID NO: 628096 - DNA, 57 bp, Artificial; identical to SEQ ID NO: 246996
  Synthetic oligonucleotide

SEQ ID NO: 628097 - DNA, 53 bp, Artificial; identical to SEQ ID NO: 157336
  Synthetic oligonucleotide

SEQ ID NO: 628098 - DNA, 55 bp, Artificial; identical to SEQ ID NO: 249982
  Synthetic oligonucleotide

SEQ ID NO: 628099 - DNA, 55 bp, Artificial; identical to SEQ ID NO: 182866
  Synthetic oligonucleotide

SEQ ID NO: 628100 - DNA, 55 bp, Artificial; identical to SEQ ID NO: 238207
  Synthetic oligonucleotide

SEQ ID NO: 628101 - DNA, 55 bp, Artificial; identical to SEQ ID NO: 153480
  Synthetic oligonucleotide

SEQ ID NO: 628102 - DNA, 55 bp, Artificial; identical to SEQ ID NO: 245204
  Synthetic oligonucleotide

SEQ ID NO: 628103 - DNA, 55 bp, Artificial; identical to SEQ ID NO: 148423
  Synthetic oligonucleotide

SEQ ID NO: 628104 - DNA, 60 bp, Artificial; identical to SEQ ID NO: 258285
  Synthetic oligonucleotide

SEQ ID NO: 628105 - DNA, 51 bp, Artificial; identical to SEQ ID NO: 186892
  Synthetic oligonucleotide

SEQ ID NO: 628106 - DNA, 55 bp, Artificial; identical to SEQ ID NO: 182922
  Synthetic oligonucleotide

SEQ ID NO: 628107 - DNA, 55 bp, Artificial; identical to SEQ ID NO: 177184
  Synthetic oligonucleotide

SEQ ID NO: 628108 - DNA, 55 bp, Artificial; identical to SEQ ID NO: 255061
  Synthetic oligonucleotide

SEQ ID NO: 628109 - DNA, 55 bp, Artificial; identical to SEQ ID NO: 208372
  Synthetic oligonucleotide

SEQ ID NO: 628110 - DNA, 55 bp, Artificial; identical to SEQ ID NO: 255060
  Synthetic oligonucleotide

SEQ ID NO: 628111 - DNA, 56 bp, Artificial; identical to SEQ ID NO: 187917
  Synthetic oligonucleotide

SEQ ID NO: 628112 - DNA, 55 bp, Artificial; identical to SEQ ID NO: 160310
  Synthetic oligonucleotide

SEQ ID NO: 628113 - DNA, 51 bp, Artificial; identical to SEQ ID NO: 225253
  Synthetic oligonucleotide

SEQ ID NO: 628114 - DNA, 55 bp, Artificial; identical to SEQ ID NO: 162146
  Synthetic oligonucleotide

SEQ ID NO: 628115 - DNA, 55 bp, Artificial; identical to SEQ ID NO: 245202
  Synthetic oligonucleotide

SEQ ID NO: 628116 - DNA, 55 bp, Artificial; identical to SEQ ID NO: 237948
  Synthetic oligonucleotide

SEQ ID NO: 628117 - DNA, 54 bp, Artificial; identical to SEQ ID NO: 157272
  Synthetic oligonucleotide

SEQ ID NO: 628118 - DNA, 55 bp, Artificial; identical to SEQ ID NO: 189371
  Synthetic oligonucleotide

SEQ ID NO: 628119 - DNA, 55 bp, Artificial; identical to SEQ ID NO: 171156
  Synthetic oligonucleotide

SEQ ID NO: 628120 - DNA, 55 bp, Artificial; identical to SEQ ID NO: 182926
  Synthetic oligonucleotide

SEQ ID NO: 628121 - DNA, 55 bp, Artificial; identical to SEQ ID NO: 240263
  Synthetic oligonucleotide

SEQ ID NO: 628122 - DNA, 56 bp, Artificial; identical to SEQ ID NO: 144364
  Synthetic oligonucleotide

SEQ ID NO: 628123 - DNA, 55 bp, Artificial; identical to SEQ ID NO: 233731
  Synthetic oligonucleotide

SEQ ID NO: 628124 - DNA, 53 bp, Artificial; identical to SEQ ID NO: 188052
  Synthetic oligonucleotide

SEQ ID NO: 628125 - DNA, 55 bp, Artificial; identical to SEQ ID NO: 173617
  Synthetic oligonucleotide

SEQ ID NO: 628126 - DNA, 55 bp, Artificial; identical to SEQ ID NO: 245200
  Synthetic oligonucleotide

SEQ ID NO: 628127 - DNA, 55 bp, Artificial; identical to SEQ ID NO: 182928
  Synthetic oligonucleotide

SEQ ID NO: 628128 - DNA, 60 bp, Artificial; identical to SEQ ID NO: 194870
  Synthetic oligonucleotide

SEQ ID NO: 628129 - DNA, 56 bp, Artificial; identical to SEQ ID NO: 194325
  Synthetic oligonucleotide

SEQ ID NO: 628130 - DNA, 55 bp, Artificial; identical to SEQ ID NO: 143672
  Synthetic oligonucleotide

SEQ ID NO: 628131 - DNA, 52 bp, Artificial; identical to SEQ ID NO: 211582
  Synthetic oligonucleotide

SEQ ID NO: 628132 - DNA, 55 bp, Artificial; identical to SEQ ID NO: 182930
  Synthetic oligonucleotide

SEQ ID NO: 628133 - DNA, 55 bp, Artificial; identical to SEQ ID NO: 159634
  Synthetic oligonucleotide

SEQ ID NO: 628134 - DNA, 55 bp, Artificial; identical to SEQ ID NO: 182932
  Synthetic oligonucleotide

SEQ ID NO: 628135 - DNA, 54 bp, Artificial; identical to SEQ ID NO: 141204
  Synthetic oligonucleotide

SEQ ID NO: 628136 - DNA, 55 bp, Artificial; identical to SEQ ID NO: 198812
  Synthetic oligonucleotide

SEQ ID NO: 628137 - DNA, 56 bp, Artificial; identical to SEQ ID NO: 242087
  Synthetic oligonucleotide

SEQ ID NO: 628138 - DNA, 50 bp, Artificial; identical to SEQ ID NO: 200232
  Synthetic oligonucleotide

SEQ ID NO: 628139 - DNA, 55 bp, Artificial; identical to SEQ ID NO: 220552
  Synthetic oligonucleotide

SEQ ID NO: 628140 - DNA, 50 bp, Artificial; identical to SEQ ID NO: 176329
  Synthetic oligonucleotide

SEQ ID NO: 628141 - DNA, 55 bp, Artificial; identical to SEQ ID NO: 223353
  Synthetic oligonucleotide

SEQ ID NO: 628142 - DNA, 55 bp, Artificial; identical to SEQ ID NO: 182934
  Synthetic oligonucleotide

SEQ ID NO: 628143 - DNA, 52 bp, Artificial; identical to SEQ ID NO: 243228
  Synthetic oligonucleotide

SEQ ID NO: 628144 - DNA, 55 bp, Artificial; identical to SEQ ID NO: 153475
  Synthetic oligonucleotide

SEQ ID NO: 628145 - DNA, 55 bp, Artificial; identical to SEQ ID NO: 145186
  Synthetic oligonucleotide

SEQ ID NO: 628146 - DNA, 57 bp, Artificial; identical to SEQ ID NO: 152553
  Synthetic oligonucleotide

SEQ ID NO: 628147 - DNA, 51 bp, Artificial; identical to SEQ ID NO: 241089
  Synthetic oligonucleotide

SEQ ID NO: 628148 - DNA, 55 bp, Artificial; identical to SEQ ID NO: 188412
  Synthetic oligonucleotide

SEQ ID NO: 628149 - DNA, 54 bp, Artificial; identical to SEQ ID NO: 255055
  Synthetic oligonucleotide

SEQ ID NO: 628150 - DNA, 55 bp, Artificial; identical to SEQ ID NO: 255054
  Synthetic oligonucleotide

SEQ ID NO: 628151 - DNA, 55 bp, Artificial; identical to SEQ ID NO: 148422
  Synthetic oligonucleotide

SEQ ID NO: 628152 - DNA, 55 bp, Artificial; identical to SEQ ID NO: 159581
  Synthetic oligonucleotide

SEQ ID NO: 628153 - DNA, 55 bp, Artificial; identical to SEQ ID NO: 249293
  Synthetic oligonucleotide

SEQ ID NO: 628154 - DNA, 55 bp, Artificial; identical to SEQ ID NO: 148421
  Synthetic oligonucleotide

SEQ ID NO: 628155 - DNA, 55 bp, Artificial; identical to SEQ ID NO: 242693
  Synthetic oligonucleotide

SEQ ID NO: 628156 - DNA, 56 bp, Artificial; identical to SEQ ID NO: 142737
  Synthetic oligonucleotide

SEQ ID NO: 628157 - DNA, 57 bp, Artificial; identical to SEQ ID NO: 199570
  Synthetic oligonucleotide

SEQ ID NO: 628158 - DNA, 53 bp, Artificial; identical to SEQ ID NO: 171154
  Synthetic oligonucleotide

SEQ ID NO: 628159 - DNA, 51 bp, Artificial; identical to SEQ ID NO: 246757
  Synthetic oligonucleotide

SEQ ID NO: 628160 - DNA, 55 bp, Artificial; identical to SEQ ID NO: 223354
  Synthetic oligonucleotide

SEQ ID NO: 628161 - DNA, 55 bp, Artificial; identical to SEQ ID NO: 148420
  Synthetic oligonucleotide

SEQ ID NO: 628162 - DNA, 55 bp, Artificial; identical to SEQ ID NO: 171148
  Synthetic oligonucleotide

SEQ ID NO: 628163 - DNA, 55 bp, Artificial; identical to SEQ ID NO: 202399
  Synthetic oligonucleotide

SEQ ID NO: 628164 - DNA, 55 bp, Artificial; identical to SEQ ID NO: 164630
  Synthetic oligonucleotide

SEQ ID NO: 628165 - DNA, 55 bp, Artificial; identical to SEQ ID NO: 148417
  Synthetic oligonucleotide

SEQ ID NO: 628166 - DNA, 55 bp, Artificial; identical to SEQ ID NO: 238211
  Synthetic oligonucleotide

SEQ ID NO: 628167 - DNA, 56 bp, Artificial; identical to SEQ ID NO: 262764
  Synthetic oligonucleotide

SEQ ID NO: 628168 - DNA, 52 bp, Artificial; identical to SEQ ID NO: 247437
  Synthetic oligonucleotide

SEQ ID NO: 628169 - DNA, 53 bp, Artificial; identical to SEQ ID NO: 154562
  Synthetic oligonucleotide

SEQ ID NO: 628170 - DNA, 60 bp, Artificial; identical to SEQ ID NO: 242841
  Synthetic oligonucleotide

SEQ ID NO: 628171 - DNA, 60 bp, Artificial; identical to SEQ ID NO: 197393
  Synthetic oligonucleotide

SEQ ID NO: 628172 - DNA, 60 bp, Artificial; identical to SEQ ID NO: 247001
  Synthetic oligonucleotide

SEQ ID NO: 628173 - DNA, 55 bp, Artificial; identical to SEQ ID NO: 182906
  Synthetic oligonucleotide

SEQ ID NO: 628174 - DNA, 55 bp, Artificial; identical to SEQ ID NO: 168430
  Synthetic oligonucleotide

SEQ ID NO: 628175 - DNA, 59 bp, Artificial; identical to SEQ ID NO: 197570
  Synthetic oligonucleotide

SEQ ID NO: 628176 - DNA, 55 bp, Artificial; identical to SEQ ID NO: 208332
  Synthetic oligonucleotide

SEQ ID NO: 628177 - DNA, 59 bp, Artificial; identical to SEQ ID NO: 203274
  Synthetic oligonucleotide

SEQ ID NO: 628178 - DNA, 50 bp, Artificial; identical to SEQ ID NO: 158092
  Synthetic oligonucleotide

SEQ ID NO: 628179 - DNA, 50 bp, Artificial; identical to SEQ ID NO: 170561
  Synthetic oligonucleotide

SEQ ID NO: 628180 - DNA, 51 bp, Artificial; identical to SEQ ID NO: 186795
  Synthetic oligonucleotide

SEQ ID NO: 628181 - DNA, 55 bp, Artificial; identical to SEQ ID NO: 223357
  Synthetic oligonucleotide

SEQ ID NO: 628182 - DNA, 51 bp, Artificial; identical to SEQ ID NO: 200128
  Synthetic oligonucleotide

SEQ ID NO: 628183 - DNA, 55 bp, Artificial; identical to SEQ ID NO: 223358
  Synthetic oligonucleotide

SEQ ID NO: 628184 - DNA, 55 bp, Artificial; identical to SEQ ID NO: 153474
  Synthetic oligonucleotide

SEQ ID NO: 628185 - DNA, 57 bp, Artificial; identical to SEQ ID NO: 225202
  Synthetic oligonucleotide

SEQ ID NO: 628186 - DNA, 55 bp, Artificial; identical to SEQ ID NO: 221283
  Synthetic oligonucleotide

SEQ ID NO: 628187 - DNA, 55 bp, Artificial; identical to SEQ ID NO: 212553
  Synthetic oligonucleotide

SEQ ID NO: 628188 - DNA, 57 bp, Artificial; identical to SEQ ID NO: 247062
  Synthetic oligonucleotide

SEQ ID NO: 628189 - DNA, 55 bp, Artificial; identical to SEQ ID NO: 143671
  Synthetic oligonucleotide

SEQ ID NO: 628190 - DNA, 55 bp, Artificial; identical to SEQ ID NO: 223359
  Synthetic oligonucleotide

SEQ ID NO: 628191 - DNA, 55 bp, Artificial; identical to SEQ ID NO: 248254
  Synthetic oligonucleotide

SEQ ID NO: 628192 - DNA, 52 bp, Artificial; identical to SEQ ID NO: 153623
  Synthetic oligonucleotide

SEQ ID NO: 628193 - DNA, 55 bp, Artificial; identical to SEQ ID NO: 189313
  Synthetic oligonucleotide

SEQ ID NO: 628194 - DNA, 54 bp, Artificial; identical to SEQ ID NO: 199630
  Synthetic oligonucleotide

SEQ ID NO: 628195 - DNA, 58 bp, Artificial; identical to SEQ ID NO: 238059
  Synthetic oligonucleotide

SEQ ID NO: 628196 - DNA, 60 bp, Artificial; identical to SEQ ID NO: 177178
  Synthetic oligonucleotide

SEQ ID NO: 628197 - DNA, 55 bp, Artificial; identical to SEQ ID NO: 148413
  Synthetic oligonucleotide

SEQ ID NO: 628198 - DNA, 55 bp, Artificial; identical to SEQ ID NO: 159606
  Synthetic oligonucleotide

SEQ ID NO: 628199 - DNA, 51 bp, Artificial; identical to SEQ ID NO: 258201
  Synthetic oligonucleotide

SEQ ID NO: 628200 - DNA, 52 bp, Artificial; identical to SEQ ID NO: 165146
  Synthetic oligonucleotide

SEQ ID NO: 628201 - DNA, 55 bp, Artificial; identical to SEQ ID NO: 220551
  Synthetic oligonucleotide

SEQ ID NO: 628202 - DNA, 52 bp, Artificial; identical to SEQ ID NO: 174366
  Synthetic oligonucleotide

SEQ ID NO: 628203 - DNA, 60 bp, Artificial; identical to SEQ ID NO: 242084
  Synthetic oligonucleotide

SEQ ID NO: 628204 - DNA, 53 bp, Artificial; identical to SEQ ID NO: 142326
  Synthetic oligonucleotide

SEQ ID NO: 628205 - DNA, 55 bp, Artificial; identical to SEQ ID NO: 182810
  Synthetic oligonucleotide

SEQ ID NO: 628206 - DNA, 55 bp, Artificial; identical to SEQ ID NO: 182813
  Synthetic oligonucleotide

SEQ ID NO: 628207 - DNA, 55 bp, Artificial; identical to SEQ ID NO: 182814
  Synthetic oligonucleotide

SEQ ID NO: 628208 - DNA, 57 bp, Artificial; identical to SEQ ID NO: 258063
  Synthetic oligonucleotide

SEQ ID NO: 628209 - DNA, 55 bp, Artificial; identical to SEQ ID NO: 148409
  Synthetic oligonucleotide

SEQ ID NO: 628210 - DNA, 55 bp, Artificial; identical to SEQ ID NO: 169177
  Synthetic oligonucleotide

SEQ ID NO: 628211 - DNA, 50 bp, Artificial; identical to SEQ ID NO: 255921
  Synthetic oligonucleotide

SEQ ID NO: 628212 - DNA, 53 bp, Artificial; identical to SEQ ID NO: 149469
  Synthetic oligonucleotide

SEQ ID NO: 628213 - DNA, 51 bp, Artificial; identical to SEQ ID NO: 149855
  Synthetic oligonucleotide

SEQ ID NO: 628214 - DNA, 53 bp, Artificial; identical to SEQ ID NO: 150715
  Synthetic oligonucleotide

SEQ ID NO: 628215 - DNA, 55 bp, Artificial; identical to SEQ ID NO: 159605
  Synthetic oligonucleotide

SEQ ID NO: 628216 - DNA, 55 bp, Artificial; identical to SEQ ID NO: 146356
  Synthetic oligonucleotide

SEQ ID NO: 628217 - DNA, 55 bp, Artificial; identical to SEQ ID NO: 202398
  Synthetic oligonucleotide

SEQ ID NO: 628218 - DNA, 55 bp, Artificial; identical to SEQ ID NO: 197018
  Synthetic oligonucleotide

SEQ ID NO: 628219 - DNA, 55 bp, Artificial; identical to SEQ ID NO: 159604
  Synthetic oligonucleotide

SEQ ID NO: 628220 - DNA, 56 bp, Artificial; identical to SEQ ID NO: 180081
  Synthetic oligonucleotide

SEQ ID NO: 628221 - DNA, 55 bp, Artificial; identical to SEQ ID NO: 223361
  Synthetic oligonucleotide

SEQ ID NO: 628222 - DNA, 52 bp, Artificial; identical to SEQ ID NO: 186250
  Synthetic oligonucleotide

SEQ ID NO: 628223 - DNA, 54 bp, Artificial; identical to SEQ ID NO: 170031
  Synthetic oligonucleotide

SEQ ID NO: 628224 - DNA, 53 bp, Artificial; identical to SEQ ID NO: 223619
  Synthetic oligonucleotide

SEQ ID NO: 628225 - DNA, 55 bp, Artificial; identical to SEQ ID NO: 198811
  Synthetic oligonucleotide

SEQ ID NO: 628226 - DNA, 55 bp, Artificial; identical to SEQ ID NO: 164631
  Synthetic oligonucleotide

SEQ ID NO: 628227 - DNA, 55 bp, Artificial; identical to SEQ ID NO: 189963
  Synthetic oligonucleotide

SEQ ID NO: 628228 - DNA, 55 bp, Artificial; identical to SEQ ID NO: 159599
  Synthetic oligonucleotide

SEQ ID NO: 628229 - DNA, 55 bp, Artificial; identical to SEQ ID NO: 182819
  Synthetic oligonucleotide

SEQ ID NO: 628230 - DNA, 53 bp, Artificial; identical to SEQ ID NO: 203915
  Synthetic oligonucleotide

SEQ ID NO: 628231 - DNA, 55 bp, Artificial; identical to SEQ ID NO: 253232
  Synthetic oligonucleotide

SEQ ID NO: 628232 - DNA, 55 bp, Artificial; identical to SEQ ID NO: 210957
  Synthetic oligonucleotide

SEQ ID NO: 628233 - DNA, 55 bp, Artificial; identical to SEQ ID NO: 148997
  Synthetic oligonucleotide

SEQ ID NO: 628234 - DNA, 55 bp, Artificial; identical to SEQ ID NO: 201619
  Synthetic oligonucleotide

SEQ ID NO: 628235 - DNA, 55 bp, Artificial; identical to SEQ ID NO: 182821
  Synthetic oligonucleotide

SEQ ID NO: 628236 - DNA, 55 bp, Artificial; identical to SEQ ID NO: 219686
  Synthetic oligonucleotide

SEQ ID NO: 628237 - DNA, 55 bp, Artificial; identical to SEQ ID NO: 220550
  Synthetic oligonucleotide

SEQ ID NO: 628238 - DNA, 55 bp, Artificial; identical to SEQ ID NO: 155460
  Synthetic oligonucleotide

SEQ ID NO: 628239 - DNA, 55 bp, Artificial; identical to SEQ ID NO: 173711
  Synthetic oligonucleotide

SEQ ID NO: 628240 - DNA, 55 bp, Artificial; identical to SEQ ID NO: 208333
  Synthetic oligonucleotide

SEQ ID NO: 628241 - DNA, 55 bp, Artificial; identical to SEQ ID NO: 198809
  Synthetic oligonucleotide

SEQ ID NO: 628242 - DNA, 55 bp, Artificial; identical to SEQ ID NO: 189301
  Synthetic oligonucleotide

SEQ ID NO: 628243 - DNA, 55 bp, Artificial; identical to SEQ ID NO: 182822
  Synthetic oligonucleotide

SEQ ID NO: 628244 - DNA, 55 bp, Artificial; identical to SEQ ID NO: 159595
  Synthetic oligonucleotide

SEQ ID NO: 628245 - DNA, 55 bp, Artificial; identical to SEQ ID NO: 198808
  Synthetic oligonucleotide

SEQ ID NO: 628246 - DNA, 54 bp, Artificial; identical to SEQ ID NO: 170846
  Synthetic oligonucleotide

SEQ ID NO: 628247 - DNA, 60 bp, Artificial; identical to SEQ ID NO: 210803
  Synthetic oligonucleotide

SEQ ID NO: 628248 - DNA, 54 bp, Artificial; identical to SEQ ID NO: 208334
  Synthetic oligonucleotide

SEQ ID NO: 628249 - DNA, 55 bp, Artificial; identical to SEQ ID NO: 148996
  Synthetic oligonucleotide

SEQ ID NO: 628250 - DNA, 55 bp, Artificial; identical to SEQ ID NO: 191090
  Synthetic oligonucleotide

SEQ ID NO: 628251 - DNA, 55 bp, Artificial; identical to SEQ ID NO: 255051
  Synthetic oligonucleotide

SEQ ID NO: 628252 - DNA, 55 bp, Artificial; identical to SEQ ID NO: 205359
  Synthetic oligonucleotide

SEQ ID NO: 628253 - DNA, 55 bp, Artificial; identical to SEQ ID NO: 207476
  Synthetic oligonucleotide

SEQ ID NO: 628254 - DNA, 54 bp, Artificial; identical to SEQ ID NO: 150707
  Synthetic oligonucleotide

SEQ ID NO: 628255 - DNA, 55 bp, Artificial; identical to SEQ ID NO: 221285
  Synthetic oligonucleotide

SEQ ID NO: 628256 - DNA, 54 bp, Artificial; identical to SEQ ID NO: 147255
  Synthetic oligonucleotide

SEQ ID NO: 628257 - DNA, 51 bp, Artificial; identical to SEQ ID NO: 243384
  Synthetic oligonucleotide

SEQ ID NO: 628258 - DNA, 55 bp, Artificial; identical to SEQ ID NO: 162145
  Synthetic oligonucleotide

SEQ ID NO: 628259 - DNA, 55 bp, Artificial; identical to SEQ ID NO: 160311
  Synthetic oligonucleotide

SEQ ID NO: 628260 - DNA, 52 bp, Artificial; identical to SEQ ID NO: 209696
  Synthetic oligonucleotide

SEQ ID NO: 628261 - DNA, 50 bp, Artificial; identical to SEQ ID NO: 146534
  Synthetic oligonucleotide

SEQ ID NO: 628262 - DNA, 55 bp, Artificial; identical to SEQ ID NO: 159722
  Synthetic oligonucleotide

SEQ ID NO: 628263 - DNA, 60 bp, Artificial; identical to SEQ ID NO: 199548
  Synthetic oligonucleotide

SEQ ID NO: 628264 - DNA, 54 bp, Artificial; identical to SEQ ID NO: 197457
  Synthetic oligonucleotide

SEQ ID NO: 628265 - DNA, 55 bp, Artificial; identical to SEQ ID NO: 164632
  Synthetic oligonucleotide

SEQ ID NO: 628266 - DNA, 55 bp, Artificial; identical to SEQ ID NO: 194878
  Synthetic oligonucleotide

SEQ ID NO: 628267 - DNA, 57 bp, Artificial; identical to SEQ ID NO: 150705
  Synthetic oligonucleotide

SEQ ID NO: 628268 - DNA, 55 bp, Artificial; identical to SEQ ID NO: 154138
  Synthetic oligonucleotide

SEQ ID NO: 628269 - DNA, 51 bp, Artificial; identical to SEQ ID NO: 243382
  Synthetic oligonucleotide

SEQ ID NO: 628270 - DNA, 59 bp, Artificial; identical to SEQ ID NO: 150749
  Synthetic oligonucleotide

SEQ ID NO: 628271 - DNA, 54 bp, Artificial; identical to SEQ ID NO: 157260
  Synthetic oligonucleotide

SEQ ID NO: 628272 - DNA, 55 bp, Artificial; identical to SEQ ID NO: 189961
  Synthetic oligonucleotide

SEQ ID NO: 628273 - DNA, 52 bp, Artificial; identical to SEQ ID NO: 258147
  Synthetic oligonucleotide

SEQ ID NO: 628274 - DNA, 55 bp, Artificial; identical to SEQ ID NO: 172899
  Synthetic oligonucleotide

SEQ ID NO: 628275 - DNA, 57 bp, Artificial; identical to SEQ ID NO: 201976
  Synthetic oligonucleotide

SEQ ID NO: 628276 - DNA, 54 bp, Artificial; identical to SEQ ID NO: 216593
  Synthetic oligonucleotide

SEQ ID NO: 628277 - DNA, 53 bp, Artificial; identical to SEQ ID NO: 152031
  Synthetic oligonucleotide

SEQ ID NO: 628278 - DNA, 50 bp, Artificial; identical to SEQ ID NO: 171923
  Synthetic oligonucleotide

SEQ ID NO: 628279 - DNA, 55 bp, Artificial; identical to SEQ ID NO: 166243
  Synthetic oligonucleotide

SEQ ID NO: 628280 - DNA, 59 bp, Artificial; identical to SEQ ID NO: 224127
  Synthetic oligonucleotide

SEQ ID NO: 628281 - DNA, 55 bp, Artificial; identical to SEQ ID NO: 245186
  Synthetic oligonucleotide

SEQ ID NO: 628282 - DNA, 51 bp, Artificial; identical to SEQ ID NO: 243379
  Synthetic oligonucleotide

SEQ ID NO: 628283 - DNA, 52 bp, Artificial; identical to SEQ ID NO: 209699
  Synthetic oligonucleotide

SEQ ID NO: 628284 - DNA, 50 bp, Artificial; identical to SEQ ID NO: 186979
  Synthetic oligonucleotide

SEQ ID NO: 628285 - DNA, 60 bp, Artificial; identical to SEQ ID NO: 167244
  Synthetic oligonucleotide

SEQ ID NO: 628286 - DNA, 56 bp, Artificial; identical to SEQ ID NO: 257518
  Synthetic oligonucleotide

SEQ ID NO: 628287 - DNA, 59 bp, Artificial; identical to SEQ ID NO: 177171
  Synthetic oligonucleotide

SEQ ID NO: 628288 - DNA, 55 bp, Artificial; identical to SEQ ID NO: 159718
  Synthetic oligonucleotide

SEQ ID NO: 628289 - DNA, 57 bp, Artificial; identical to SEQ ID NO: 141581
  Synthetic oligonucleotide

SEQ ID NO: 628290 - DNA, 60 bp, Artificial; identical to SEQ ID NO: 150747
  Synthetic oligonucleotide

SEQ ID NO: 628291 - DNA, 55 bp, Artificial; identical to SEQ ID NO: 191939
  Synthetic oligonucleotide

SEQ ID NO: 628292 - DNA, 55 bp, Artificial; identical to SEQ ID NO: 210961
  Synthetic oligonucleotide

SEQ ID NO: 628293 - DNA, 59 bp, Artificial; identical to SEQ ID NO: 191778
  Synthetic oligonucleotide

SEQ ID NO: 628294 - DNA, 56 bp, Artificial; identical to SEQ ID NO: 167242
  Synthetic oligonucleotide

SEQ ID NO: 628295 - DNA, 55 bp, Artificial; identical to SEQ ID NO: 242696
  Synthetic oligonucleotide

SEQ ID NO: 628296 - DNA, 60 bp, Artificial; identical to SEQ ID NO: 199537
  Synthetic oligonucleotide

SEQ ID NO: 628297 - DNA, 51 bp, Artificial; identical to SEQ ID NO: 253253
  Synthetic oligonucleotide

SEQ ID NO: 628298 - DNA, 50 bp, Artificial; identical to SEQ ID NO: 167631
  Synthetic oligonucleotide

SEQ ID NO: 628299 - DNA, 60 bp, Artificial; identical to SEQ ID NO: 150744
  Synthetic oligonucleotide

SEQ ID NO: 628300 - DNA, 55 bp, Artificial; identical to SEQ ID NO: 197020
  Synthetic oligonucleotide

SEQ ID NO: 628301 - DNA, 55 bp, Artificial; identical to SEQ ID NO: 197021
  Synthetic oligonucleotide

SEQ ID NO: 628302 - DNA, 55 bp, Artificial; identical to SEQ ID NO: 266126
  Synthetic oligonucleotide

SEQ ID NO: 628303 - DNA, 55 bp, Artificial; identical to SEQ ID NO: 182855
  Synthetic oligonucleotide

SEQ ID NO: 628304 - DNA, 55 bp, Artificial; identical to SEQ ID NO: 202397
  Synthetic oligonucleotide

SEQ ID NO: 628305 - DNA, 55 bp, Artificial; identical to SEQ ID NO: 198804
  Synthetic oligonucleotide

SEQ ID NO: 628306 - DNA, 55 bp, Artificial; identical to SEQ ID NO: 148987
  Synthetic oligonucleotide

SEQ ID NO: 628307 - DNA, 55 bp, Artificial; identical to SEQ ID NO: 159717
  Synthetic oligonucleotide

SEQ ID NO: 628308 - DNA, 55 bp, Artificial; identical to SEQ ID NO: 208335
  Synthetic oligonucleotide

SEQ ID NO: 628309 - DNA, 59 bp, Artificial; identical to SEQ ID NO: 210792
  Synthetic oligonucleotide

SEQ ID NO: 628310 - DNA, 55 bp, Artificial; identical to SEQ ID NO: 182859
  Synthetic oligonucleotide

SEQ ID NO: 628311 - DNA, 55 bp, Artificial; identical to SEQ ID NO: 249298
  Synthetic oligonucleotide

SEQ ID NO: 628312 - DNA, 55 bp, Artificial; identical to SEQ ID NO: 182844
  Synthetic oligonucleotide

SEQ ID NO: 628313 - DNA, 55 bp, Artificial; identical to SEQ ID NO: 151891
  Synthetic oligonucleotide

SEQ ID NO: 628314 - DNA, 55 bp, Artificial; identical to SEQ ID NO: 142327
  Synthetic oligonucleotide

SEQ ID NO: 628315 - DNA, 55 bp, Artificial; identical to SEQ ID NO: 142564
  Synthetic oligonucleotide

SEQ ID NO: 628316 - DNA, 55 bp, Artificial; identical to SEQ ID NO: 171345
  Synthetic oligonucleotide

SEQ ID NO: 628317 - DNA, 55 bp, Artificial; identical to SEQ ID NO: 223365
  Synthetic oligonucleotide

SEQ ID NO: 628318 - DNA, 55 bp, Artificial; identical to SEQ ID NO: 154769
  Synthetic oligonucleotide

SEQ ID NO: 628319 - DNA, 56 bp, Artificial; identical to SEQ ID NO: 161397
  Synthetic oligonucleotide

SEQ ID NO: 628320 - DNA, 55 bp, Artificial; identical to SEQ ID NO: 201616
  Synthetic oligonucleotide

SEQ ID NO: 628321 - DNA, 53 bp, Artificial; identical to SEQ ID NO: 185595
  Synthetic oligonucleotide

SEQ ID NO: 628322 - DNA, 55 bp, Artificial; identical to SEQ ID NO: 142788
  Synthetic oligonucleotide

SEQ ID NO: 628323 - DNA, 57 bp, Artificial; identical to SEQ ID NO: 248610
  Synthetic oligonucleotide

SEQ ID NO: 628324 - DNA, 55 bp, Artificial; identical to SEQ ID NO: 257952
  Synthetic oligonucleotide

SEQ ID NO: 628325 - DNA, 55 bp, Artificial; identical to SEQ ID NO: 148986
  Synthetic oligonucleotide

SEQ ID NO: 628326 - DNA, 55 bp, Artificial; identical to SEQ ID NO: 159747
  Synthetic oligonucleotide

SEQ ID NO: 628327 - DNA, 55 bp, Artificial; identical to SEQ ID NO: 240268
  Synthetic oligonucleotide

SEQ ID NO: 628328 - DNA, 50 bp, Artificial; identical to SEQ ID NO: 196561
  Synthetic oligonucleotide

SEQ ID NO: 628329 - DNA, 59 bp, Artificial; identical to SEQ ID NO: 199515
  Synthetic oligonucleotide

SEQ ID NO: 628330 - DNA, 55 bp, Artificial; identical to SEQ ID NO: 205360
  Synthetic oligonucleotide

SEQ ID NO: 628331 - DNA, 54 bp, Artificial; identical to SEQ ID NO: 188017
  Synthetic oligonucleotide

SEQ ID NO: 628332 - DNA, 56 bp, Artificial; identical to SEQ ID NO: 187894
  Synthetic oligonucleotide

SEQ ID NO: 628333 - DNA, 55 bp, Artificial; identical to SEQ ID NO: 182837
  Synthetic oligonucleotide

SEQ ID NO: 628334 - DNA, 55 bp, Artificial; identical to SEQ ID NO: 182835
  Synthetic oligonucleotide

SEQ ID NO: 628335 - DNA, 55 bp, Artificial; identical to SEQ ID NO: 171346
  Synthetic oligonucleotide

SEQ ID NO: 628336 - DNA, 55 bp, Artificial; identical to SEQ ID NO: 146354
  Synthetic oligonucleotide

SEQ ID NO: 628337 - DNA, 57 bp, Artificial; identical to SEQ ID NO: 170847
  Synthetic oligonucleotide

SEQ ID NO: 628338 - DNA, 55 bp, Artificial; identical to SEQ ID NO: 148984
  Synthetic oligonucleotide

SEQ ID NO: 628339 - DNA, 54 bp, Artificial; identical to SEQ ID NO: 201358
  Synthetic oligonucleotide

SEQ ID NO: 628340 - DNA, 56 bp, Artificial; identical to SEQ ID NO: 199504
  Synthetic oligonucleotide

SEQ ID NO: 628341 - DNA, 58 bp, Artificial; identical to SEQ ID NO: 150743
  Synthetic oligonucleotide

SEQ ID NO: 628342 - DNA, 60 bp, Artificial; identical to SEQ ID NO: 141583
  Synthetic oligonucleotide

SEQ ID NO: 628343 - DNA, 60 bp, Artificial; identical to SEQ ID NO: 141584
  Synthetic oligonucleotide

SEQ ID NO: 628344 - DNA, 55 bp, Artificial; identical to SEQ ID NO: 245185
  Synthetic oligonucleotide

SEQ ID NO: 628345 - DNA, 55 bp, Artificial; identical to SEQ ID NO: 242698
  Synthetic oligonucleotide

SEQ ID NO: 628346 - DNA, 60 bp, Artificial; identical to SEQ ID NO: 247068
  Synthetic oligonucleotide

SEQ ID NO: 628347 - DNA, 54 bp, Artificial; identical to SEQ ID NO: 159737
  Synthetic oligonucleotide

SEQ ID NO: 628348 - DNA, 51 bp, Artificial; identical to SEQ ID NO: 146469
  Synthetic oligonucleotide

SEQ ID NO: 628349 - DNA, 59 bp, Artificial; identical to SEQ ID NO: 152524
  Synthetic oligonucleotide

SEQ ID NO: 628350 - DNA, 55 bp, Artificial; identical to SEQ ID NO: 205365
  Synthetic oligonucleotide

SEQ ID NO: 628351 - DNA, 55 bp, Artificial; identical to SEQ ID NO: 152371
  Synthetic oligonucleotide

SEQ ID NO: 628352 - DNA, 52 bp, Artificial; identical to SEQ ID NO: 243258
  Synthetic oligonucleotide

SEQ ID NO: 628353 - DNA, 59 bp, Artificial; identical to SEQ ID NO: 199492
  Synthetic oligonucleotide

SEQ ID NO: 628354 - DNA, 55 bp, Artificial; identical to SEQ ID NO: 245356
  Synthetic oligonucleotide

SEQ ID NO: 628355 - DNA, 55 bp, Artificial; identical to SEQ ID NO: 182829
  Synthetic oligonucleotide

SEQ ID NO: 628356 - DNA, 55 bp, Artificial; identical to SEQ ID NO: 255044
  Synthetic oligonucleotide

SEQ ID NO: 628357 - DNA, 58 bp, Artificial; identical to SEQ ID NO: 177164
  Synthetic oligonucleotide

SEQ ID NO: 628358 - DNA, 59 bp, Artificial; identical to SEQ ID NO: 254711
  Synthetic oligonucleotide

SEQ ID NO: 628359 - DNA, 55 bp, Artificial; identical to SEQ ID NO: 153494
  Synthetic oligonucleotide

SEQ ID NO: 628360 - DNA, 55 bp, Artificial; identical to SEQ ID NO: 194896
  Synthetic oligonucleotide

SEQ ID NO: 628361 - DNA, 55 bp, Artificial; identical to SEQ ID NO: 183028
  Synthetic oligonucleotide

SEQ ID NO: 628362 - DNA, 50 bp, Artificial; identical to SEQ ID NO: 189919
  Synthetic oligonucleotide

SEQ ID NO: 628363 - DNA, 55 bp, Artificial; identical to SEQ ID NO: 257977
  Synthetic oligonucleotide

SEQ ID NO: 628364 - DNA, 55 bp, Artificial; identical to SEQ ID NO: 208337
  Synthetic oligonucleotide

SEQ ID NO: 628365 - DNA, 60 bp, Artificial; identical to SEQ ID NO: 248243
  Synthetic oligonucleotide

SEQ ID NO: 628366 - DNA, 60 bp, Artificial; identical to SEQ ID NO: 205575
  Synthetic oligonucleotide

SEQ ID NO: 628367 - DNA, 53 bp, Artificial; identical to SEQ ID NO: 157301
  Synthetic oligonucleotide

SEQ ID NO: 628368 - DNA, 55 bp, Artificial; identical to SEQ ID NO: 202888
  Synthetic oligonucleotide

SEQ ID NO: 628369 - DNA, 55 bp, Artificial; identical to SEQ ID NO: 153442
  Synthetic oligonucleotide

SEQ ID NO: 628370 - DNA, 58 bp, Artificial; identical to SEQ ID NO: 212505
  Synthetic oligonucleotide

SEQ ID NO: 628371 - DNA, 59 bp, Artificial; identical to SEQ ID NO: 257841
  Synthetic oligonucleotide

SEQ ID NO: 628372 - DNA, 55 bp, Artificial; identical to SEQ ID NO: 234158
  Synthetic oligonucleotide

SEQ ID NO: 628373 - DNA, 55 bp, Artificial; identical to SEQ ID NO: 221288
  Synthetic oligonucleotide

SEQ ID NO: 628374 - DNA, 55 bp, Artificial; identical to SEQ ID NO: 221290
  Synthetic oligonucleotide

SEQ ID NO: 628375 - DNA, 55 bp, Artificial; identical to SEQ ID NO: 159729
  Synthetic oligonucleotide

SEQ ID NO: 628376 - DNA, 55 bp, Artificial; identical to SEQ ID NO: 238170
  Synthetic oligonucleotide

SEQ ID NO: 628377 - DNA, 50 bp, Artificial; identical to SEQ ID NO: 209769
  Synthetic oligonucleotide

SEQ ID NO: 628378 - DNA, 55 bp, Artificial; identical to SEQ ID NO: 154847
  Synthetic oligonucleotide

SEQ ID NO: 628379 - DNA, 60 bp, Artificial; identical to SEQ ID NO: 247071
  Synthetic oligonucleotide

SEQ ID NO: 628380 - DNA, 55 bp, Artificial; identical to SEQ ID NO: 188410
  Synthetic oligonucleotide

SEQ ID NO: 628381 - DNA, 60 bp, Artificial; identical to SEQ ID NO: 159465
  Synthetic oligonucleotide

SEQ ID NO: 628382 - DNA, 55 bp, Artificial; identical to SEQ ID NO: 183036
  Synthetic oligonucleotide

SEQ ID NO: 628383 - DNA, 54 bp, Artificial; identical to SEQ ID NO: 216612
  Synthetic oligonucleotide

SEQ ID NO: 628384 - DNA, 54 bp, Artificial; identical to SEQ ID NO: 157280
  Synthetic oligonucleotide

SEQ ID NO: 628385 - DNA, 60 bp, Artificial; identical to SEQ ID NO: 224140
  Synthetic oligonucleotide

SEQ ID NO: 628386 - DNA, 54 bp, Artificial; identical to SEQ ID NO: 203271
  Synthetic oligonucleotide

SEQ ID NO: 628387 - DNA, 51 bp, Artificial; identical to SEQ ID NO: 186838
  Synthetic oligonucleotide

SEQ ID NO: 628388 - DNA, 55 bp, Artificial; identical to SEQ ID NO: 160322
  Synthetic oligonucleotide

SEQ ID NO: 628389 - DNA, 50 bp, Artificial; identical to SEQ ID NO: 253488
  Synthetic oligonucleotide

SEQ ID NO: 628390 - DNA, 55 bp, Artificial; identical to SEQ ID NO: 155458
  Synthetic oligonucleotide

SEQ ID NO: 628391 - DNA, 55 bp, Artificial; identical to SEQ ID NO: 183040
  Synthetic oligonucleotide

SEQ ID NO: 628392 - DNA, 55 bp, Artificial; identical to SEQ ID NO: 194902
  Synthetic oligonucleotide

SEQ ID NO: 628393 - DNA, 55 bp, Artificial; identical to SEQ ID NO: 210963
  Synthetic oligonucleotide

SEQ ID NO: 628394 - DNA, 52 bp, Artificial; identical to SEQ ID NO: 183041
  Synthetic oligonucleotide

SEQ ID NO: 628395 - DNA, 55 bp, Artificial; identical to SEQ ID NO: 255086
  Synthetic oligonucleotide

SEQ ID NO: 628396 - DNA, 55 bp, Artificial; identical to SEQ ID NO: 221291
  Synthetic oligonucleotide

SEQ ID NO: 628397 - DNA, 55 bp, Artificial; identical to SEQ ID NO: 148979
  Synthetic oligonucleotide

SEQ ID NO: 628398 - DNA, 55 bp, Artificial; identical to SEQ ID NO: 198981
  Synthetic oligonucleotide

SEQ ID NO: 628399 - DNA, 55 bp, Artificial; identical to SEQ ID NO: 197022
  Synthetic oligonucleotide

SEQ ID NO: 628400 - DNA, 52 bp, Artificial; identical to SEQ ID NO: 186224
  Synthetic oligonucleotide

SEQ ID NO: 628401 - DNA, 55 bp, Artificial; identical to SEQ ID NO: 221292
  Synthetic oligonucleotide

SEQ ID NO: 628402 - DNA, 55 bp, Artificial; identical to SEQ ID NO: 183019
  Synthetic oligonucleotide

SEQ ID NO: 628403 - DNA, 55 bp, Artificial; identical to SEQ ID NO: 255083
  Synthetic oligonucleotide

SEQ ID NO: 628404 - DNA, 59 bp, Artificial; identical to SEQ ID NO: 242080
  Synthetic oligonucleotide

SEQ ID NO: 628405 - DNA, 52 bp, Artificial; identical to SEQ ID NO: 141987
  Synthetic oligonucleotide

SEQ ID NO: 628406 - DNA, 55 bp, Artificial; identical to SEQ ID NO: 198980
  Synthetic oligonucleotide

SEQ ID NO: 628407 - DNA, 56 bp, Artificial; identical to SEQ ID NO: 203269
  Synthetic oligonucleotide

SEQ ID NO: 628408 - DNA, 53 bp, Artificial; identical to SEQ ID NO: 148978
  Synthetic oligonucleotide

SEQ ID NO: 628409 - DNA, 58 bp, Artificial; identical to SEQ ID NO: 216604
  Synthetic oligonucleotide

SEQ ID NO: 628410 - DNA, 53 bp, Artificial; identical to SEQ ID NO: 246402
  Synthetic oligonucleotide

SEQ ID NO: 628411 - DNA, 55 bp, Artificial; identical to SEQ ID NO: 148977
  Synthetic oligonucleotide

SEQ ID NO: 628412 - DNA, 54 bp, Artificial; identical to SEQ ID NO: 169340
  Synthetic oligonucleotide

SEQ ID NO: 628413 - DNA, 53 bp, Artificial; identical to SEQ ID NO: 153068
  Synthetic oligonucleotide

SEQ ID NO: 628414 - DNA, 56 bp, Artificial; identical to SEQ ID NO: 150740
  Synthetic oligonucleotide

SEQ ID NO: 628415 - DNA, 55 bp, Artificial; identical to SEQ ID NO: 198979
  Synthetic oligonucleotide

SEQ ID NO: 628416 - DNA, 55 bp, Artificial; identical to SEQ ID NO: 202394
  Synthetic oligonucleotide

SEQ ID NO: 628417 - DNA, 55 bp, Artificial; identical to SEQ ID NO: 223366
  Synthetic oligonucleotide

SEQ ID NO: 628418 - DNA, 50 bp, Artificial; identical to SEQ ID NO: 204123
  Synthetic oligonucleotide

SEQ ID NO: 628419 - DNA, 55 bp, Artificial; identical to SEQ ID NO: 166349
  Synthetic oligonucleotide

SEQ ID NO: 628420 - DNA, 50 bp, Artificial; identical to SEQ ID NO: 242863
  Synthetic oligonucleotide

SEQ ID NO: 628421 - DNA, 55 bp, Artificial; identical to SEQ ID NO: 223367
  Synthetic oligonucleotide

SEQ ID NO: 628422 - DNA, 58 bp, Artificial; identical to SEQ ID NO: 141587
  Synthetic oligonucleotide

SEQ ID NO: 628423 - DNA, 55 bp, Artificial; identical to SEQ ID NO: 153444
  Synthetic oligonucleotide

SEQ ID NO: 628424 - DNA, 57 bp, Artificial; identical to SEQ ID NO: 150739
  Synthetic oligonucleotide

SEQ ID NO: 628425 - DNA, 51 bp, Artificial; identical to SEQ ID NO: 262672
  Synthetic oligonucleotide

SEQ ID NO: 628426 - DNA, 58 bp, Artificial; identical to SEQ ID NO: 242079
  Synthetic oligonucleotide

SEQ ID NO: 628427 - DNA, 55 bp, Artificial; identical to SEQ ID NO: 144232
  Synthetic oligonucleotide

SEQ ID NO: 628428 - DNA, 59 bp, Artificial; identical to SEQ ID NO: 187315
  Synthetic oligonucleotide

SEQ ID NO: 628429 - DNA, 60 bp, Artificial; identical to SEQ ID NO: 247073
  Synthetic oligonucleotide

SEQ ID NO: 628430 - DNA, 55 bp, Artificial; identical to SEQ ID NO: 188408
  Synthetic oligonucleotide

SEQ ID NO: 628431 - DNA, 55 bp, Artificial; identical to SEQ ID NO: 171348
  Synthetic oligonucleotide

SEQ ID NO: 628432 - DNA, 51 bp, Artificial; identical to SEQ ID NO: 149849
  Synthetic oligonucleotide

SEQ ID NO: 628433 - DNA, 55 bp, Artificial; identical to SEQ ID NO: 188783
  Synthetic oligonucleotide

SEQ ID NO: 628434 - DNA, 55 bp, Artificial; identical to SEQ ID NO: 255075
  Synthetic oligonucleotide

SEQ ID NO: 628435 - DNA, 55 bp, Artificial; identical to SEQ ID NO: 198977
  Synthetic oligonucleotide

SEQ ID NO: 628436 - DNA, 55 bp, Artificial; identical to SEQ ID NO: 223368
  Synthetic oligonucleotide

SEQ ID NO: 628437 - DNA, 54 bp, Artificial; identical to SEQ ID NO: 203795
  Synthetic oligonucleotide

SEQ ID NO: 628438 - DNA, 55 bp, Artificial; identical to SEQ ID NO: 197023
  Synthetic oligonucleotide

SEQ ID NO: 628439 - DNA, 55 bp, Artificial; identical to SEQ ID NO: 245344
  Synthetic oligonucleotide

SEQ ID NO: 628440 - DNA, 55 bp, Artificial; identical to SEQ ID NO: 215555
  Synthetic oligonucleotide

SEQ ID NO: 628441 - DNA, 55 bp, Artificial; identical to SEQ ID NO: 151894
  Synthetic oligonucleotide

SEQ ID NO: 628442 - DNA, 55 bp, Artificial; identical to SEQ ID NO: 203794
  Synthetic oligonucleotide

SEQ ID NO: 628443 - DNA, 55 bp, Artificial; identical to SEQ ID NO: 210964
  Synthetic oligonucleotide

SEQ ID NO: 628444 - DNA, 55 bp, Artificial; identical to SEQ ID NO: 225067
  Synthetic oligonucleotide

SEQ ID NO: 628445 - DNA, 56 bp, Artificial; identical to SEQ ID NO: 179979
  Synthetic oligonucleotide

SEQ ID NO: 628446 - DNA, 51 bp, Artificial; identical to SEQ ID NO: 197713
  Synthetic oligonucleotide

SEQ ID NO: 628447 - DNA, 60 bp, Artificial; identical to SEQ ID NO: 144670
  Synthetic oligonucleotide

SEQ ID NO: 628448 - DNA, 51 bp, Artificial; identical to SEQ ID NO: 209751
  Synthetic oligonucleotide

SEQ ID NO: 628449 - DNA, 60 bp, Artificial; identical to SEQ ID NO: 206955
  Synthetic oligonucleotide

SEQ ID NO: 628450 - DNA, 55 bp, Artificial; identical to SEQ ID NO: 188407
  Synthetic oligonucleotide

SEQ ID NO: 628451 - DNA, 60 bp, Artificial; identical to SEQ ID NO: 159476
  Synthetic oligonucleotide

SEQ ID NO: 628452 - DNA, 55 bp, Artificial; identical to SEQ ID NO: 160886
  Synthetic oligonucleotide

SEQ ID NO: 628453 - DNA, 54 bp, Artificial; identical to SEQ ID NO: 159916
  Synthetic oligonucleotide

SEQ ID NO: 628454 - DNA, 60 bp, Artificial; identical to SEQ ID NO: 155563
  Synthetic oligonucleotide

SEQ ID NO: 628455 - DNA, 55 bp, Artificial; identical to SEQ ID NO: 263226
  Synthetic oligonucleotide

SEQ ID NO: 628456 - DNA, 51 bp, Artificial; identical to SEQ ID NO: 200141
  Synthetic oligonucleotide

SEQ ID NO: 628457 - DNA, 56 bp, Artificial; identical to SEQ ID NO: 242874
  Synthetic oligonucleotide

SEQ ID NO: 628458 - DNA, 55 bp, Artificial; identical to SEQ ID NO: 207478
  Synthetic oligonucleotide

SEQ ID NO: 628459 - DNA, 55 bp, Artificial; identical to SEQ ID NO: 168433
  Synthetic oligonucleotide

SEQ ID NO: 628460 - DNA, 54 bp, Artificial; identical to SEQ ID NO: 185782
  Synthetic oligonucleotide

SEQ ID NO: 628461 - DNA, 57 bp, Artificial; identical to SEQ ID NO: 179813
  Synthetic oligonucleotide

SEQ ID NO: 628462 - DNA, 58 bp, Artificial; identical to SEQ ID NO: 217245
  Synthetic oligonucleotide

SEQ ID NO: 628463 - DNA, 60 bp, Artificial; identical to SEQ ID NO: 242885
  Synthetic oligonucleotide

SEQ ID NO: 628464 - DNA, 55 bp, Artificial; identical to SEQ ID NO: 159673
  Synthetic oligonucleotide

SEQ ID NO: 628465 - DNA, 55 bp, Artificial; identical to SEQ ID NO: 218159
  Synthetic oligonucleotide

SEQ ID NO: 628466 - DNA, 55 bp, Artificial; identical to SEQ ID NO: 188406
  Synthetic oligonucleotide

SEQ ID NO: 628467 - DNA, 55 bp, Artificial; identical to SEQ ID NO: 233768
  Synthetic oligonucleotide

SEQ ID NO: 628468 - DNA, 55 bp, Artificial; identical to SEQ ID NO: 155456
  Synthetic oligonucleotide

SEQ ID NO: 628469 - DNA, 60 bp, Artificial; identical to SEQ ID NO: 242076
  Synthetic oligonucleotide

SEQ ID NO: 628470 - DNA, 55 bp, Artificial; identical to SEQ ID NO: 255069
  Synthetic oligonucleotide

SEQ ID NO: 628471 - DNA, 55 bp, Artificial; identical to SEQ ID NO: 202907
  Synthetic oligonucleotide

SEQ ID NO: 628472 - DNA, 57 bp, Artificial; identical to SEQ ID NO: 166152
  Synthetic oligonucleotide

SEQ ID NO: 628473 - DNA, 55 bp, Artificial; identical to SEQ ID NO: 255068
  Synthetic oligonucleotide

SEQ ID NO: 628474 - DNA, 60 bp, Artificial; identical to SEQ ID NO: 216616
  Synthetic oligonucleotide

SEQ ID NO: 628475 - DNA, 55 bp, Artificial; identical to SEQ ID NO: 183045
  Synthetic oligonucleotide

SEQ ID NO: 628476 - DNA, 55 bp, Artificial; identical to SEQ ID NO: 189956
  Synthetic oligonucleotide

SEQ ID NO: 628477 - DNA, 55 bp, Artificial; identical to SEQ ID NO: 248713
  Synthetic oligonucleotide

SEQ ID NO: 628478 - DNA, 52 bp, Artificial; identical to SEQ ID NO: 195232
  Synthetic oligonucleotide

SEQ ID NO: 628479 - DNA, 60 bp, Artificial; identical to SEQ ID NO: 159520
  Synthetic oligonucleotide

SEQ ID NO: 628480 - DNA, 58 bp, Artificial; identical to SEQ ID NO: 144342
  Synthetic oligonucleotide

SEQ ID NO: 628481 - DNA, 55 bp, Artificial; identical to SEQ ID NO: 154891
  Synthetic oligonucleotide

SEQ ID NO: 628482 - DNA, 55 bp, Artificial; identical to SEQ ID NO: 253227
  Synthetic oligonucleotide

SEQ ID NO: 628483 - DNA, 55 bp, Artificial; identical to SEQ ID NO: 203793
  Synthetic oligonucleotide

SEQ ID NO: 628484 - DNA, 55 bp, Artificial; identical to SEQ ID NO: 255066
  Synthetic oligonucleotide

SEQ ID NO: 628485 - DNA, 55 bp, Artificial; identical to SEQ ID NO: 242643
  Synthetic oligonucleotide

SEQ ID NO: 628486 - DNA, 54 bp, Artificial; identical to SEQ ID NO: 157275
  Synthetic oligonucleotide

SEQ ID NO: 628487 - DNA, 60 bp, Artificial; identical to SEQ ID NO: 257730
  Synthetic oligonucleotide

SEQ ID NO: 628488 - DNA, 55 bp, Artificial; identical to SEQ ID NO: 183048
  Synthetic oligonucleotide

SEQ ID NO: 628489 - DNA, 60 bp, Artificial; identical to SEQ ID NO: 203268
  Synthetic oligonucleotide

SEQ ID NO: 628490 - DNA, 55 bp, Artificial; identical to SEQ ID NO: 149021
  Synthetic oligonucleotide

SEQ ID NO: 628491 - DNA, 55 bp, Artificial; identical to SEQ ID NO: 162141
  Synthetic oligonucleotide

SEQ ID NO: 628492 - DNA, 55 bp, Artificial; identical to SEQ ID NO: 171352
  Synthetic oligonucleotide

SEQ ID NO: 628493 - DNA, 54 bp, Artificial; identical to SEQ ID NO: 258049
  Synthetic oligonucleotide

SEQ ID NO: 628494 - DNA, 55 bp, Artificial; identical to SEQ ID NO: 189957
  Synthetic oligonucleotide

SEQ ID NO: 628495 - DNA, 55 bp, Artificial; identical to SEQ ID NO: 143670
  Synthetic oligonucleotide

SEQ ID NO: 628496 - DNA, 55 bp, Artificial; identical to SEQ ID NO: 210968
  Synthetic oligonucleotide

SEQ ID NO: 628497 - DNA, 60 bp, Artificial; identical to SEQ ID NO: 185759
  Synthetic oligonucleotide

SEQ ID NO: 628498 - DNA, 55 bp, Artificial; identical to SEQ ID NO: 183055
  Synthetic oligonucleotide

SEQ ID NO: 628499 - DNA, 54 bp, Artificial; identical to SEQ ID NO: 246127
  Synthetic oligonucleotide

SEQ ID NO: 628500 - DNA, 55 bp, Artificial; identical to SEQ ID NO: 183058
  Synthetic oligonucleotide

SEQ ID NO: 628501 - DNA, 51 bp, Artificial; identical to SEQ ID NO: 186786
  Synthetic oligonucleotide

SEQ ID NO: 628502 - DNA, 55 bp, Artificial; identical to SEQ ID NO: 187913
  Synthetic oligonucleotide

SEQ ID NO: 628503 - DNA, 55 bp, Artificial; identical to SEQ ID NO: 217783
  Synthetic oligonucleotide

SEQ ID NO: 628504 - DNA, 57 bp, Artificial; identical to SEQ ID NO: 179636
  Synthetic oligonucleotide

SEQ ID NO: 628505 - DNA, 55 bp, Artificial; identical to SEQ ID NO: 188405
  Synthetic oligonucleotide

SEQ ID NO: 628506 - DNA, 55 bp, Artificial; identical to SEQ ID NO: 189146
  Synthetic oligonucleotide

SEQ ID NO: 628507 - DNA, 53 bp, Artificial; identical to SEQ ID NO: 185577
  Synthetic oligonucleotide

SEQ ID NO: 628508 - DNA, 51 bp, Artificial; identical to SEQ ID NO: 248046
  Synthetic oligonucleotide

SEQ ID NO: 628509 - DNA, 59 bp, Artificial; identical to SEQ ID NO: 216627
  Synthetic oligonucleotide

SEQ ID NO: 628510 - DNA, 55 bp, Artificial; identical to SEQ ID NO: 223372
  Synthetic oligonucleotide

SEQ ID NO: 628511 - DNA, 55 bp, Artificial; identical to SEQ ID NO: 234157
  Synthetic oligonucleotide

SEQ ID NO: 628512 - DNA, 53 bp, Artificial; identical to SEQ ID NO: 164951
  Synthetic oligonucleotide

SEQ ID NO: 628513 - DNA, 60 bp, Artificial; identical to SEQ ID NO: 185715
  Synthetic oligonucleotide

SEQ ID NO: 628514 - DNA, 55 bp, Artificial; identical to SEQ ID NO: 245341
  Synthetic oligonucleotide

SEQ ID NO: 628515 - DNA, 55 bp, Artificial; identical to SEQ ID NO: 154169
  Synthetic oligonucleotide

SEQ ID NO: 628516 - DNA, 54 bp, Artificial; identical to SEQ ID NO: 243029
  Synthetic oligonucleotide

SEQ ID NO: 628517 - DNA, 60 bp, Artificial; identical to SEQ ID NO: 203267
  Synthetic oligonucleotide

SEQ ID NO: 628518 - DNA, 57 bp, Artificial; identical to SEQ ID NO: 242897
  Synthetic oligonucleotide

SEQ ID NO: 628519 - DNA, 60 bp, Artificial; identical to SEQ ID NO: 150737
  Synthetic oligonucleotide

SEQ ID NO: 628520 - DNA, 55 bp, Artificial; identical to SEQ ID NO: 217784
  Synthetic oligonucleotide

SEQ ID NO: 628521 - DNA, 60 bp, Artificial; identical to SEQ ID NO: 203266
  Synthetic oligonucleotide

SEQ ID NO: 628522 - DNA, 55 bp, Artificial; identical to SEQ ID NO: 166277
  Synthetic oligonucleotide

SEQ ID NO: 628523 - DNA, 55 bp, Artificial; identical to SEQ ID NO: 207479
  Synthetic oligonucleotide

SEQ ID NO: 628524 - DNA, 55 bp, Artificial; identical to SEQ ID NO: 233764
  Synthetic oligonucleotide

SEQ ID NO: 628525 - DNA, 55 bp, Artificial; identical to SEQ ID NO: 168379
  Synthetic oligonucleotide

SEQ ID NO: 628526 - DNA, 60 bp, Artificial; identical to SEQ ID NO: 185637
  Synthetic oligonucleotide

SEQ ID NO: 628527 - DNA, 57 bp, Artificial; identical to SEQ ID NO: 147231
  Synthetic oligonucleotide

SEQ ID NO: 628528 - DNA, 55 bp, Artificial; identical to SEQ ID NO: 151896
  Synthetic oligonucleotide

SEQ ID NO: 628529 - DNA, 52 bp, Artificial; identical to SEQ ID NO: 194277
  Synthetic oligonucleotide

SEQ ID NO: 628530 - DNA, 52 bp, Artificial; identical to SEQ ID NO: 170159
  Synthetic oligonucleotide

SEQ ID NO: 628531 - DNA, 55 bp, Artificial; identical to SEQ ID NO: 207480
  Synthetic oligonucleotide

SEQ ID NO: 628532 - DNA, 55 bp, Artificial; identical to SEQ ID NO: 212608
  Synthetic oligonucleotide

SEQ ID NO: 628533 - DNA, 55 bp, Artificial; identical to SEQ ID NO: 234156
  Synthetic oligonucleotide

SEQ ID NO: 628534 - DNA, 55 bp, Artificial; identical to SEQ ID NO: 208338
  Synthetic oligonucleotide

SEQ ID NO: 628535 - DNA, 60 bp, Artificial; identical to SEQ ID NO: 185593
  Synthetic oligonucleotide

SEQ ID NO: 628536 - DNA, 52 bp, Artificial; identical to SEQ ID NO: 223654
  Synthetic oligonucleotide

SEQ ID NO: 628537 - DNA, 55 bp, Artificial; identical to SEQ ID NO: 182939
  Synthetic oligonucleotide

SEQ ID NO: 628538 - DNA, 55 bp, Artificial; identical to SEQ ID NO: 212584
  Synthetic oligonucleotide

SEQ ID NO: 628539 - DNA, 55 bp, Artificial; identical to SEQ ID NO: 159669
  Synthetic oligonucleotide

SEQ ID NO: 628540 - DNA, 55 bp, Artificial; identical to SEQ ID NO: 166314
  Synthetic oligonucleotide

SEQ ID NO: 628541 - DNA, 60 bp, Artificial; identical to SEQ ID NO: 185571
  Synthetic oligonucleotide

SEQ ID NO: 628542 - DNA, 55 bp, Artificial; identical to SEQ ID NO: 198976
  Synthetic oligonucleotide

SEQ ID NO: 628543 - DNA, 55 bp, Artificial; identical to SEQ ID NO: 187914
  Synthetic oligonucleotide

SEQ ID NO: 628544 - DNA, 55 bp, Artificial; identical to SEQ ID NO: 187915
  Synthetic oligonucleotide

SEQ ID NO: 628545 - DNA, 54 bp, Artificial; identical to SEQ ID NO: 225214
  Synthetic oligonucleotide

SEQ ID NO: 628546 - DNA, 55 bp, Artificial; identical to SEQ ID NO: 208339
  Synthetic oligonucleotide

SEQ ID NO: 628547 - DNA, 55 bp, Artificial; identical to SEQ ID NO: 142290
  Synthetic oligonucleotide

SEQ ID NO: 628548 - DNA, 59 bp, Artificial; identical to SEQ ID NO: 256516
  Synthetic oligonucleotide

SEQ ID NO: 628549 - DNA, 60 bp, Artificial; identical to SEQ ID NO: 186105
  Synthetic oligonucleotide

SEQ ID NO: 628550 - DNA, 55 bp, Artificial; identical to SEQ ID NO: 255017
  Synthetic oligonucleotide

SEQ ID NO: 628551 - DNA, 55 bp, Artificial; identical to SEQ ID NO: 189556
  Synthetic oligonucleotide

SEQ ID NO: 628552 - DNA, 55 bp, Artificial; identical to SEQ ID NO: 252845
  Synthetic oligonucleotide

SEQ ID NO: 628553 - DNA, 55 bp, Artificial; identical to SEQ ID NO: 152373
  Synthetic oligonucleotide

SEQ ID NO: 628554 - DNA, 55 bp, Artificial; identical to SEQ ID NO: 155186
  Synthetic oligonucleotide

SEQ ID NO: 628555 - DNA, 53 bp, Artificial; identical to SEQ ID NO: 243211
  Synthetic oligonucleotide

SEQ ID NO: 628556 - DNA, 58 bp, Artificial; identical to SEQ ID NO: 186093
  Synthetic oligonucleotide

SEQ ID NO: 628557 - DNA, 55 bp, Artificial; identical to SEQ ID NO: 162140
  Synthetic oligonucleotide

SEQ ID NO: 628558 - DNA, 55 bp, Artificial; identical to SEQ ID NO: 183009
  Synthetic oligonucleotide

SEQ ID NO: 628559 - DNA, 55 bp, Artificial; identical to SEQ ID NO: 255015
  Synthetic oligonucleotide

SEQ ID NO: 628560 - DNA, 55 bp, Artificial; identical to SEQ ID NO: 175676
  Synthetic oligonucleotide

SEQ ID NO: 628561 - DNA, 60 bp, Artificial; identical to SEQ ID NO: 159833
  Synthetic oligonucleotide

SEQ ID NO: 628562 - DNA, 55 bp, Artificial; identical to SEQ ID NO: 142291
  Synthetic oligonucleotide

SEQ ID NO: 628563 - DNA, 55 bp, Artificial; identical to SEQ ID NO: 222887
  Synthetic oligonucleotide

SEQ ID NO: 628564 - DNA, 53 bp, Artificial; identical to SEQ ID NO: 190713
  Synthetic oligonucleotide

SEQ ID NO: 628565 - DNA, 55 bp, Artificial; identical to SEQ ID NO: 257950
  Synthetic oligonucleotide

SEQ ID NO: 628566 - DNA, 57 bp, Artificial; identical to SEQ ID NO: 179834
  Synthetic oligonucleotide

SEQ ID NO: 628567 - DNA, 55 bp, Artificial; identical to SEQ ID NO: 191092
  Synthetic oligonucleotide

SEQ ID NO: 628568 - DNA, 55 bp, Artificial; identical to SEQ ID NO: 257960
  Synthetic oligonucleotide

SEQ ID NO: 628569 - DNA, 55 bp, Artificial; identical to SEQ ID NO: 255014
  Synthetic oligonucleotide

SEQ ID NO: 628570 - DNA, 55 bp, Artificial; identical to SEQ ID NO: 159699
  Synthetic oligonucleotide

SEQ ID NO: 628571 - DNA, 55 bp, Artificial; identical to SEQ ID NO: 255013
  Synthetic oligonucleotide

SEQ ID NO: 628572 - DNA, 55 bp, Artificial; identical to SEQ ID NO: 255011
  Synthetic oligonucleotide

SEQ ID NO: 628573 - DNA, 58 bp, Artificial; identical to SEQ ID NO: 199448
  Synthetic oligonucleotide

SEQ ID NO: 628574 - DNA, 55 bp, Artificial; identical to SEQ ID NO: 220545
  Synthetic oligonucleotide

SEQ ID NO: 628575 - DNA, 55 bp, Artificial; identical to SEQ ID NO: 187919
  Synthetic oligonucleotide

SEQ ID NO: 628576 - DNA, 60 bp, Artificial; identical to SEQ ID NO: 199437
  Synthetic oligonucleotide

SEQ ID NO: 628577 - DNA, 56 bp, Artificial; identical to SEQ ID NO: 242908
  Synthetic oligonucleotide

SEQ ID NO: 628578 - DNA, 55 bp, Artificial; identical to SEQ ID NO: 198972
  Synthetic oligonucleotide

SEQ ID NO: 628579 - DNA, 50 bp, Artificial; identical to SEQ ID NO: 200316
  Synthetic oligonucleotide

SEQ ID NO: 628580 - DNA, 51 bp, Artificial; identical to SEQ ID NO: 149843
  Synthetic oligonucleotide

SEQ ID NO: 628581 - DNA, 58 bp, Artificial; identical to SEQ ID NO: 141588
  Synthetic oligonucleotide

SEQ ID NO: 628582 - DNA, 55 bp, Artificial; identical to SEQ ID NO: 143668
  Synthetic oligonucleotide

SEQ ID NO: 628583 - DNA, 55 bp, Artificial; identical to SEQ ID NO: 223376
  Synthetic oligonucleotide

SEQ ID NO: 628584 - DNA, 55 bp, Artificial; identical to SEQ ID NO: 182983
  Synthetic oligonucleotide

SEQ ID NO: 628585 - DNA, 55 bp, Artificial; identical to SEQ ID NO: 248712
  Synthetic oligonucleotide

SEQ ID NO: 628586 - DNA, 55 bp, Artificial; identical to SEQ ID NO: 197016
  Synthetic oligonucleotide

SEQ ID NO: 628587 - DNA, 55 bp, Artificial; identical to SEQ ID NO: 182985
  Synthetic oligonucleotide

SEQ ID NO: 628588 - DNA, 55 bp, Artificial; identical to SEQ ID NO: 210972
  Synthetic oligonucleotide

SEQ ID NO: 628589 - DNA, 55 bp, Artificial; identical to SEQ ID NO: 155251
  Synthetic oligonucleotide

SEQ ID NO: 628590 - DNA, 60 bp, Artificial; identical to SEQ ID NO: 150733
  Synthetic oligonucleotide

SEQ ID NO: 628591 - DNA, 55 bp, Artificial; identical to SEQ ID NO: 159697
  Synthetic oligonucleotide

SEQ ID NO: 628592 - DNA, 55 bp, Artificial; identical to SEQ ID NO: 195216
  Synthetic oligonucleotide

SEQ ID NO: 628593 - DNA, 58 bp, Artificial; identical to SEQ ID NO: 209606
  Synthetic oligonucleotide

SEQ ID NO: 628594 - DNA, 55 bp, Artificial; identical to SEQ ID NO: 160295
  Synthetic oligonucleotide

SEQ ID NO: 628595 - DNA, 55 bp, Artificial; identical to SEQ ID NO: 183739
  Synthetic oligonucleotide

SEQ ID NO: 628596 - DNA, 51 bp, Artificial; identical to SEQ ID NO: 169059
  Synthetic oligonucleotide

SEQ ID NO: 628597 - DNA, 54 bp, Artificial; identical to SEQ ID NO: 243138
  Synthetic oligonucleotide

SEQ ID NO: 628598 - DNA, 55 bp, Artificial; identical to SEQ ID NO: 196308
  Synthetic oligonucleotide

SEQ ID NO: 628599 - DNA, 51 bp, Artificial; identical to SEQ ID NO: 170226
  Synthetic oligonucleotide

SEQ ID NO: 628600 - DNA, 55 bp, Artificial; identical to SEQ ID NO: 154175
  Synthetic oligonucleotide

SEQ ID NO: 628601 - DNA, 58 bp, Artificial; identical to SEQ ID NO: 243959
  Synthetic oligonucleotide

SEQ ID NO: 628602 - DNA, 55 bp, Artificial; identical to SEQ ID NO: 183747
  Synthetic oligonucleotide

SEQ ID NO: 628603 - DNA, 58 bp, Artificial; identical to SEQ ID NO: 175157
  Synthetic oligonucleotide

SEQ ID NO: 628604 - DNA, 55 bp, Artificial; identical to SEQ ID NO: 149011
  Synthetic oligonucleotide

SEQ ID NO: 628605 - DNA, 51 bp, Artificial; identical to SEQ ID NO: 160585
  Synthetic oligonucleotide

SEQ ID NO: 628606 - DNA, 55 bp, Artificial; identical to SEQ ID NO: 168381
  Synthetic oligonucleotide

SEQ ID NO: 628607 - DNA, 60 bp, Artificial; identical to SEQ ID NO: 224178
  Synthetic oligonucleotide

SEQ ID NO: 628608 - DNA, 54 bp, Artificial; identical to SEQ ID NO: 233761
  Synthetic oligonucleotide

SEQ ID NO: 628609 - DNA, 56 bp, Artificial; identical to SEQ ID NO: 209595
  Synthetic oligonucleotide

SEQ ID NO: 628610 - DNA, 55 bp, Artificial; identical to SEQ ID NO: 258032
  Synthetic oligonucleotide

SEQ ID NO: 628611 - DNA, 55 bp, Artificial; identical to SEQ ID NO: 242644
  Synthetic oligonucleotide

SEQ ID NO: 628612 - DNA, 55 bp, Artificial; identical to SEQ ID NO: 145190
  Synthetic oligonucleotide

SEQ ID NO: 628613 - DNA, 55 bp, Artificial; identical to SEQ ID NO: 159689
  Synthetic oligonucleotide

SEQ ID NO: 628614 - DNA, 55 bp, Artificial; identical to SEQ ID NO: 242645
  Synthetic oligonucleotide

SEQ ID NO: 628615 - DNA, 55 bp, Artificial; identical to SEQ ID NO: 266697
  Synthetic oligonucleotide

SEQ ID NO: 628616 - DNA, 54 bp, Artificial; identical to SEQ ID NO: 246129
  Synthetic oligonucleotide

SEQ ID NO: 628617 - DNA, 55 bp, Artificial; identical to SEQ ID NO: 252846
  Synthetic oligonucleotide

SEQ ID NO: 628618 - DNA, 60 bp, Artificial; identical to SEQ ID NO: 213103
  Synthetic oligonucleotide

SEQ ID NO: 628619 - DNA, 55 bp, Artificial; identical to SEQ ID NO: 254996
  Synthetic oligonucleotide

SEQ ID NO: 628620 - DNA, 56 bp, Artificial; identical to SEQ ID NO: 242074
  Synthetic oligonucleotide

SEQ ID NO: 628621 - DNA, 53 bp, Artificial; identical to SEQ ID NO: 240786
  Synthetic oligonucleotide

SEQ ID NO: 628622 - DNA, 55 bp, Artificial; identical to SEQ ID NO: 146353
  Synthetic oligonucleotide

SEQ ID NO: 628623 - DNA, 57 bp, Artificial; identical to SEQ ID NO: 224179
  Synthetic oligonucleotide

SEQ ID NO: 628624 - DNA, 55 bp, Artificial; identical to SEQ ID NO: 238265
  Synthetic oligonucleotide

SEQ ID NO: 628625 - DNA, 55 bp, Artificial; identical to SEQ ID NO: 149009
  Synthetic oligonucleotide

SEQ ID NO: 628626 - DNA, 55 bp, Artificial; identical to SEQ ID NO: 205322
  Synthetic oligonucleotide

SEQ ID NO: 628627 - DNA, 55 bp, Artificial; identical to SEQ ID NO: 183736
  Synthetic oligonucleotide

SEQ ID NO: 628628 - DNA, 53 bp, Artificial; identical to SEQ ID NO: 152046
  Synthetic oligonucleotide

SEQ ID NO: 628629 - DNA, 60 bp, Artificial; identical to SEQ ID NO: 185971
  Synthetic oligonucleotide

SEQ ID NO: 628630 - DNA, 55 bp, Artificial; identical to SEQ ID NO: 242646
  Synthetic oligonucleotide

SEQ ID NO: 628631 - DNA, 55 bp, Artificial; identical to SEQ ID NO: 208342
  Synthetic oligonucleotide

SEQ ID NO: 628632 - DNA, 55 bp, Artificial; identical to SEQ ID NO: 263227
  Synthetic oligonucleotide

SEQ ID NO: 628633 - DNA, 55 bp, Artificial; identical to SEQ ID NO: 201614
  Synthetic oligonucleotide

SEQ ID NO: 628634 - DNA, 55 bp, Artificial; identical to SEQ ID NO: 259042
  Synthetic oligonucleotide

SEQ ID NO: 628635 - DNA, 55 bp, Artificial; identical to SEQ ID NO: 159445
  Synthetic oligonucleotide

SEQ ID NO: 628636 - DNA, 55 bp, Artificial; identical to SEQ ID NO: 201613
  Synthetic oligonucleotide

SEQ ID NO: 628637 - DNA, 55 bp, Artificial; identical to SEQ ID NO: 194900
  Synthetic oligonucleotide

SEQ ID NO: 628638 - DNA, 55 bp, Artificial; identical to SEQ ID NO: 152374
  Synthetic oligonucleotide

SEQ ID NO: 628639 - DNA, 53 bp, Artificial; identical to SEQ ID NO: 234470
  Synthetic oligonucleotide

SEQ ID NO: 628640 - DNA, 55 bp, Artificial; identical to SEQ ID NO: 168383
  Synthetic oligonucleotide

SEQ ID NO: 628641 - DNA, 58 bp, Artificial; identical to SEQ ID NO: 239301
  Synthetic oligonucleotide

SEQ ID NO: 628642 - DNA, 55 bp, Artificial; identical to SEQ ID NO: 151858
  Synthetic oligonucleotide

SEQ ID NO: 628643 - DNA, 55 bp, Artificial; identical to SEQ ID NO: 166297
  Synthetic oligonucleotide

SEQ ID NO: 628644 - DNA, 55 bp, Artificial; identical to SEQ ID NO: 188402
  Synthetic oligonucleotide

SEQ ID NO: 628645 - DNA, 55 bp, Artificial; identical to SEQ ID NO: 166295
  Synthetic oligonucleotide

SEQ ID NO: 628646 - DNA, 55 bp, Artificial; identical to SEQ ID NO: 255039
  Synthetic oligonucleotide

SEQ ID NO: 628647 - DNA, 52 bp, Artificial; identical to SEQ ID NO: 155585
  Synthetic oligonucleotide

SEQ ID NO: 628648 - DNA, 55 bp, Artificial; identical to SEQ ID NO: 183723
  Synthetic oligonucleotide

SEQ ID NO: 628649 - DNA, 60 bp, Artificial; identical to SEQ ID NO: 238392
  Synthetic oligonucleotide

SEQ ID NO: 628650 - DNA, 55 bp, Artificial; identical to SEQ ID NO: 159432
  Synthetic oligonucleotide

SEQ ID NO: 628651 - DNA, 55 bp, Artificial; identical to SEQ ID NO: 202323
  Synthetic oligonucleotide

SEQ ID NO: 628652 - DNA, 55 bp, Artificial; identical to SEQ ID NO: 168384
  Synthetic oligonucleotide

SEQ ID NO: 628653 - DNA, 53 bp, Artificial; identical to SEQ ID NO: 223629
  Synthetic oligonucleotide

SEQ ID NO: 628654 - DNA, 55 bp, Artificial; identical to SEQ ID NO: 261590
  Synthetic oligonucleotide

SEQ ID NO: 628655 - DNA, 55 bp, Artificial; identical to SEQ ID NO: 234155
  Synthetic oligonucleotide

SEQ ID NO: 628656 - DNA, 55 bp, Artificial; identical to SEQ ID NO: 207484
  Synthetic oligonucleotide

SEQ ID NO: 628657 - DNA, 55 bp, Artificial; identical to SEQ ID NO: 248709
  Synthetic oligonucleotide

SEQ ID NO: 628658 - DNA, 55 bp, Artificial; identical to SEQ ID NO: 197012
  Synthetic oligonucleotide

SEQ ID NO: 628659 - DNA, 55 bp, Artificial; identical to SEQ ID NO: 240068
  Synthetic oligonucleotide

SEQ ID NO: 628660 - DNA, 55 bp, Artificial; identical to SEQ ID NO: 183780
  Synthetic oligonucleotide

SEQ ID NO: 628661 - DNA, 55 bp, Artificial; identical to SEQ ID NO: 242648
  Synthetic oligonucleotide

SEQ ID NO: 628662 - DNA, 55 bp, Artificial; identical to SEQ ID NO: 187920
  Synthetic oligonucleotide

SEQ ID NO: 628663 - DNA, 54 bp, Artificial; identical to SEQ ID NO: 185130
  Synthetic oligonucleotide

SEQ ID NO: 628664 - DNA, 55 bp, Artificial; identical to SEQ ID NO: 223380
  Synthetic oligonucleotide

SEQ ID NO: 628665 - DNA, 55 bp, Artificial; identical to SEQ ID NO: 235195
  Synthetic oligonucleotide

SEQ ID NO: 628666 - DNA, 55 bp, Artificial; identical to SEQ ID NO: 217789
  Synthetic oligonucleotide

SEQ ID NO: 628667 - DNA, 55 bp, Artificial; identical to SEQ ID NO: 183784
  Synthetic oligonucleotide

SEQ ID NO: 628668 - DNA, 54 bp, Artificial; identical to SEQ ID NO: 164695
  Synthetic oligonucleotide

SEQ ID NO: 628669 - DNA, 57 bp, Artificial; identical to SEQ ID NO: 247086
  Synthetic oligonucleotide

SEQ ID NO: 628670 - DNA, 50 bp, Artificial; identical to SEQ ID NO: 234742
  Synthetic oligonucleotide

SEQ ID NO: 628671 - DNA, 55 bp, Artificial; identical to SEQ ID NO: 183790
  Synthetic oligonucleotide

SEQ ID NO: 628672 - DNA, 53 bp, Artificial; identical to SEQ ID NO: 185547
  Synthetic oligonucleotide

SEQ ID NO: 628673 - DNA, 55 bp, Artificial; identical to SEQ ID NO: 183757
  Synthetic oligonucleotide

SEQ ID NO: 628674 - DNA, 60 bp, Artificial; identical to SEQ ID NO: 199426
  Synthetic oligonucleotide

SEQ ID NO: 628675 - DNA, 55 bp, Artificial; identical to SEQ ID NO: 194846
  Synthetic oligonucleotide

SEQ ID NO: 628676 - DNA, 55 bp, Artificial; identical to SEQ ID NO: 183762
  Synthetic oligonucleotide

SEQ ID NO: 628677 - DNA, 59 bp, Artificial; identical to SEQ ID NO: 225213
  Synthetic oligonucleotide

SEQ ID NO: 628678 - DNA, 53 bp, Artificial; identical to SEQ ID NO: 149307
  Synthetic oligonucleotide

SEQ ID NO: 628679 - DNA, 51 bp, Artificial; identical to SEQ ID NO: 199415
  Synthetic oligonucleotide

SEQ ID NO: 628680 - DNA, 55 bp, Artificial; identical to SEQ ID NO: 233760
  Synthetic oligonucleotide

SEQ ID NO: 628681 - DNA, 55 bp, Artificial; identical to SEQ ID NO: 217791
  Synthetic oligonucleotide

SEQ ID NO: 628682 - DNA, 58 bp, Artificial; identical to SEQ ID NO: 238503
  Synthetic oligonucleotide

SEQ ID NO: 628683 - DNA, 55 bp, Artificial; identical to SEQ ID NO: 198963
  Synthetic oligonucleotide

SEQ ID NO: 628684 - DNA, 55 bp, Artificial; identical to SEQ ID NO: 258029
  Synthetic oligonucleotide

SEQ ID NO: 628685 - DNA, 55 bp, Artificial; identical to SEQ ID NO: 223381
  Synthetic oligonucleotide

SEQ ID NO: 628686 - DNA, 55 bp, Artificial; identical to SEQ ID NO: 183766
  Synthetic oligonucleotide

SEQ ID NO: 628687 - DNA, 55 bp, Artificial; identical to SEQ ID NO: 202321
  Synthetic oligonucleotide

SEQ ID NO: 628688 - DNA, 55 bp, Artificial; identical to SEQ ID NO: 242649
  Synthetic oligonucleotide

SEQ ID NO: 628689 - DNA, 55 bp, Artificial; identical to SEQ ID NO: 155246
  Synthetic oligonucleotide

SEQ ID NO: 628690 - DNA, 55 bp, Artificial; identical to SEQ ID NO: 207485
  Synthetic oligonucleotide

SEQ ID NO: 628691 - DNA, 58 bp, Artificial; identical to SEQ ID NO: 210758
  Synthetic oligonucleotide

SEQ ID NO: 628692 - DNA, 55 bp, Artificial; identical to SEQ ID NO: 222890
  Synthetic oligonucleotide

SEQ ID NO: 628693 - DNA, 55 bp, Artificial; identical to SEQ ID NO: 255032
  Synthetic oligonucleotide

SEQ ID NO: 628694 - DNA, 55 bp, Artificial; identical to SEQ ID NO: 238268
  Synthetic oligonucleotide

SEQ ID NO: 628695 - DNA, 55 bp, Artificial; identical to SEQ ID NO: 191938
  Synthetic oligonucleotide

SEQ ID NO: 628696 - DNA, 55 bp, Artificial; identical to SEQ ID NO: 159472
  Synthetic oligonucleotide

SEQ ID NO: 628697 - DNA, 55 bp, Artificial; identical to SEQ ID NO: 202320
  Synthetic oligonucleotide

SEQ ID NO: 628698 - DNA, 51 bp, Artificial; identical to SEQ ID NO: 223810
  Synthetic oligonucleotide

SEQ ID NO: 628699 - DNA, 55 bp, Artificial; identical to SEQ ID NO: 202906
  Synthetic oligonucleotide

SEQ ID NO: 628700 - DNA, 55 bp, Artificial; identical to SEQ ID NO: 183775
  Synthetic oligonucleotide

SEQ ID NO: 628701 - DNA, 55 bp, Artificial; identical to SEQ ID NO: 183669
  Synthetic oligonucleotide

SEQ ID NO: 628702 - DNA, 55 bp, Artificial; identical to SEQ ID NO: 245377
  Synthetic oligonucleotide

SEQ ID NO: 628703 - DNA, 52 bp, Artificial; identical to SEQ ID NO: 142626
  Synthetic oligonucleotide

SEQ ID NO: 628704 - DNA, 55 bp, Artificial; identical to SEQ ID NO: 245375
  Synthetic oligonucleotide

SEQ ID NO: 628705 - DNA, 55 bp, Artificial; identical to SEQ ID NO: 183670
  Synthetic oligonucleotide

SEQ ID NO: 628706 - DNA, 55 bp, Artificial; identical to SEQ ID NO: 224426
  Synthetic oligonucleotide

SEQ ID NO: 628707 - DNA, 55 bp, Artificial; identical to SEQ ID NO: 255031
  Synthetic oligonucleotide

SEQ ID NO: 628708 - DNA, 51 bp, Artificial; identical to SEQ ID NO: 201720
  Synthetic oligonucleotide

SEQ ID NO: 628709 - DNA, 55 bp, Artificial; identical to SEQ ID NO: 166298
  Synthetic oligonucleotide

SEQ ID NO: 628710 - DNA, 55 bp, Artificial; identical to SEQ ID NO: 183677
  Synthetic oligonucleotide

SEQ ID NO: 628711 - DNA, 55 bp, Artificial; identical to SEQ ID NO: 217793
  Synthetic oligonucleotide

SEQ ID NO: 628712 - DNA, 58 bp, Artificial; identical to SEQ ID NO: 179618
  Synthetic oligonucleotide

SEQ ID NO: 628713 - DNA, 50 bp, Artificial; identical to SEQ ID NO: 176608
  Synthetic oligonucleotide

SEQ ID NO: 628714 - DNA, 53 bp, Artificial; identical to SEQ ID NO: 185465
  Synthetic oligonucleotide

SEQ ID NO: 628715 - DNA, 55 bp, Artificial; identical to SEQ ID NO: 202319
  Synthetic oligonucleotide

SEQ ID NO: 628716 - DNA, 50 bp, Artificial; identical to SEQ ID NO: 258372
  Synthetic oligonucleotide

SEQ ID NO: 628717 - DNA, 55 bp, Artificial; identical to SEQ ID NO: 189290
  Synthetic oligonucleotide

SEQ ID NO: 628718 - DNA, 55 bp, Artificial; identical to SEQ ID NO: 234152
  Synthetic oligonucleotide

SEQ ID NO: 628719 - DNA, 55 bp, Artificial; identical to SEQ ID NO: 171358
  Synthetic oligonucleotide

SEQ ID NO: 628720 - DNA, 55 bp, Artificial; identical to SEQ ID NO: 183682
  Synthetic oligonucleotide

SEQ ID NO: 628721 - DNA, 60 bp, Artificial; identical to SEQ ID NO: 155710
  Synthetic oligonucleotide

SEQ ID NO: 628722 - DNA, 55 bp, Artificial; identical to SEQ ID NO: 255029
  Synthetic oligonucleotide

SEQ ID NO: 628723 - DNA, 55 bp, Artificial; identical to SEQ ID NO: 238271
  Synthetic oligonucleotide

SEQ ID NO: 628724 - DNA, 55 bp, Artificial; identical to SEQ ID NO: 183684
  Synthetic oligonucleotide

SEQ ID NO: 628725 - DNA, 55 bp, Artificial; identical to SEQ ID NO: 189990
  Synthetic oligonucleotide

SEQ ID NO: 628726 - DNA, 55 bp, Artificial; identical to SEQ ID NO: 149000
  Synthetic oligonucleotide

SEQ ID NO: 628727 - DNA, 55 bp, Artificial; identical to SEQ ID NO: 189268
  Synthetic oligonucleotide

SEQ ID NO: 628728 - DNA, 55 bp, Artificial; identical to SEQ ID NO: 166957
  Synthetic oligonucleotide

SEQ ID NO: 628729 - DNA, 55 bp, Artificial; identical to SEQ ID NO: 189257
  Synthetic oligonucleotide

SEQ ID NO: 628730 - DNA, 52 bp, Artificial; identical to SEQ ID NO: 253724
  Synthetic oligonucleotide

SEQ ID NO: 628731 - DNA, 58 bp, Artificial; identical to SEQ ID NO: 147174
  Synthetic oligonucleotide

SEQ ID NO: 628732 - DNA, 55 bp, Artificial; identical to SEQ ID NO: 233757
  Synthetic oligonucleotide

SEQ ID NO: 628733 - DNA, 55 bp, Artificial; identical to SEQ ID NO: 183668
  Synthetic oligonucleotide

SEQ ID NO: 628734 - DNA, 55 bp, Artificial; identical to SEQ ID NO: 183666
  Synthetic oligonucleotide

SEQ ID NO: 628735 - DNA, 55 bp, Artificial; identical to SEQ ID NO: 155244
  Synthetic oligonucleotide

SEQ ID NO: 628736 - DNA, 50 bp, Artificial; identical to SEQ ID NO: 209780
  Synthetic oligonucleotide

SEQ ID NO: 628737 - DNA, 55 bp, Artificial; identical to SEQ ID NO: 265971
  Synthetic oligonucleotide

SEQ ID NO: 628738 - DNA, 55 bp, Artificial; identical to SEQ ID NO: 255026
  Synthetic oligonucleotide

SEQ ID NO: 628739 - DNA, 55 bp, Artificial; identical to SEQ ID NO: 242653
  Synthetic oligonucleotide

SEQ ID NO: 628740 - DNA, 50 bp, Artificial; identical to SEQ ID NO: 258371
  Synthetic oligonucleotide

SEQ ID NO: 628741 - DNA, 55 bp, Artificial; identical to SEQ ID NO: 166306
  Synthetic oligonucleotide

SEQ ID NO: 628742 - DNA, 55 bp, Artificial; identical to SEQ ID NO: 155243
  Synthetic oligonucleotide

SEQ ID NO: 628743 - DNA, 52 bp, Artificial; identical to SEQ ID NO: 141589
  Synthetic oligonucleotide

SEQ ID NO: 628744 - DNA, 55 bp, Artificial; identical to SEQ ID NO: 255024
  Synthetic oligonucleotide

SEQ ID NO: 628745 - DNA, 52 bp, Artificial; identical to SEQ ID NO: 218158
  Synthetic oligonucleotide

SEQ ID NO: 628746 - DNA, 53 bp, Artificial; identical to SEQ ID NO: 259035
  Synthetic oligonucleotide

SEQ ID NO: 628747 - DNA, 55 bp, Artificial; identical to SEQ ID NO: 209420
  Synthetic oligonucleotide

SEQ ID NO: 628748 - DNA, 55 bp, Artificial; identical to SEQ ID NO: 210932
  Synthetic oligonucleotide

SEQ ID NO: 628749 - DNA, 55 bp, Artificial; identical to SEQ ID NO: 155752
  Synthetic oligonucleotide

SEQ ID NO: 628750 - DNA, 55 bp, Artificial; identical to SEQ ID NO: 168387
  Synthetic oligonucleotide

SEQ ID NO: 628751 - DNA, 60 bp, Artificial; identical to SEQ ID NO: 236981
  Synthetic oligonucleotide

SEQ ID NO: 628752 - DNA, 53 bp, Artificial; identical to SEQ ID NO: 185469
  Synthetic oligonucleotide

SEQ ID NO: 628753 - DNA, 55 bp, Artificial; identical to SEQ ID NO: 248707
  Synthetic oligonucleotide

SEQ ID NO: 628754 - DNA, 60 bp, Artificial; identical to SEQ ID NO: 185848
  Synthetic oligonucleotide

SEQ ID NO: 628755 - DNA, 55 bp, Artificial; identical to SEQ ID NO: 166309
  Synthetic oligonucleotide

SEQ ID NO: 628756 - DNA, 55 bp, Artificial; identical to SEQ ID NO: 174575
  Synthetic oligonucleotide

SEQ ID NO: 628757 - DNA, 55 bp, Artificial; identical to SEQ ID NO: 151859
  Synthetic oligonucleotide

SEQ ID NO: 628758 - DNA, 55 bp, Artificial; identical to SEQ ID NO: 255021
  Synthetic oligonucleotide

SEQ ID NO: 628759 - DNA, 54 bp, Artificial; identical to SEQ ID NO: 170855
  Synthetic oligonucleotide

SEQ ID NO: 628760 - DNA, 55 bp, Artificial; identical to SEQ ID NO: 265819
  Synthetic oligonucleotide

SEQ ID NO: 628761 - DNA, 55 bp, Artificial; identical to SEQ ID NO: 221298
  Synthetic oligonucleotide

SEQ ID NO: 628762 - DNA, 55 bp, Artificial; identical to SEQ ID NO: 221299
  Synthetic oligonucleotide

SEQ ID NO: 628763 - DNA, 55 bp, Artificial; identical to SEQ ID NO: 198958
  Synthetic oligonucleotide

SEQ ID NO: 628764 - DNA, 55 bp, Artificial; identical to SEQ ID NO: 240070
  Synthetic oligonucleotide

SEQ ID NO: 628765 - DNA, 55 bp, Artificial; identical to SEQ ID NO: 245373
  Synthetic oligonucleotide

SEQ ID NO: 628766 - DNA, 55 bp, Artificial; identical to SEQ ID NO: 210933
  Synthetic oligonucleotide

SEQ ID NO: 628767 - DNA, 54 bp, Artificial; identical to SEQ ID NO: 141590
  Synthetic oligonucleotide

SEQ ID NO: 628768 - DNA, 51 bp, Artificial; identical to SEQ ID NO: 223803
  Synthetic oligonucleotide

SEQ ID NO: 628769 - DNA, 55 bp, Artificial; identical to SEQ ID NO: 159461
  Synthetic oligonucleotide

SEQ ID NO: 628770 - DNA, 55 bp, Artificial; identical to SEQ ID NO: 171361
  Synthetic oligonucleotide

SEQ ID NO: 628771 - DNA, 54 bp, Artificial; identical to SEQ ID NO: 224461
  Synthetic oligonucleotide

SEQ ID NO: 628772 - DNA, 55 bp, Artificial; identical to SEQ ID NO: 238234
  Synthetic oligonucleotide

SEQ ID NO: 628773 - DNA, 55 bp, Artificial; identical to SEQ ID NO: 166958
  Synthetic oligonucleotide

SEQ ID NO: 628774 - DNA, 55 bp, Artificial; identical to SEQ ID NO: 260020
  Synthetic oligonucleotide

SEQ ID NO: 628775 - DNA, 55 bp, Artificial; identical to SEQ ID NO: 183704
  Synthetic oligonucleotide

SEQ ID NO: 628776 - DNA, 54 bp, Artificial; identical to SEQ ID NO: 205324
  Synthetic oligonucleotide

SEQ ID NO: 628777 - DNA, 55 bp, Artificial; identical to SEQ ID NO: 160299
  Synthetic oligonucleotide

SEQ ID NO: 628778 - DNA, 54 bp, Artificial; identical to SEQ ID NO: 183708
  Synthetic oligonucleotide

SEQ ID NO: 628779 - DNA, 59 bp, Artificial; identical to SEQ ID NO: 266365
  Synthetic oligonucleotide

SEQ ID NO: 628780 - DNA, 55 bp, Artificial; identical to SEQ ID NO: 183715
  Synthetic oligonucleotide

SEQ ID NO: 628781 - DNA, 54 bp, Artificial; identical to SEQ ID NO: 221341
  Synthetic oligonucleotide

SEQ ID NO: 628782 - DNA, 52 bp, Artificial; identical to SEQ ID NO: 208772
  Synthetic oligonucleotide

SEQ ID NO: 628783 - DNA, 55 bp, Artificial; identical to SEQ ID NO: 175687
  Synthetic oligonucleotide

SEQ ID NO: 628784 - DNA, 52 bp, Artificial; identical to SEQ ID NO: 149594
  Synthetic oligonucleotide

SEQ ID NO: 628785 - DNA, 55 bp, Artificial; identical to SEQ ID NO: 240072
  Synthetic oligonucleotide

SEQ ID NO: 628786 - DNA, 55 bp, Artificial; identical to SEQ ID NO: 207936
  Synthetic oligonucleotide

SEQ ID NO: 628787 - DNA, 55 bp, Artificial; identical to SEQ ID NO: 155751
  Synthetic oligonucleotide

SEQ ID NO: 628788 - DNA, 51 bp, Artificial; identical to SEQ ID NO: 189988
  Synthetic oligonucleotide

SEQ ID NO: 628789 - DNA, 55 bp, Artificial; identical to SEQ ID NO: 224434
  Synthetic oligonucleotide

SEQ ID NO: 628790 - DNA, 55 bp, Artificial; identical to SEQ ID NO: 219687
  Synthetic oligonucleotide

SEQ ID NO: 628791 - DNA, 55 bp, Artificial; identical to SEQ ID NO: 189246
  Synthetic oligonucleotide

SEQ ID NO: 628792 - DNA, 55 bp, Artificial; identical to SEQ ID NO: 221342
  Synthetic oligonucleotide

SEQ ID NO: 628793 - DNA, 54 bp, Artificial; identical to SEQ ID NO: 194286
  Synthetic oligonucleotide

SEQ ID NO: 628794 - DNA, 55 bp, Artificial; identical to SEQ ID NO: 248698
  Synthetic oligonucleotide

SEQ ID NO: 628795 - DNA, 55 bp, Artificial; identical to SEQ ID NO: 162131
  Synthetic oligonucleotide

SEQ ID NO: 628796 - DNA, 50 bp, Artificial; identical to SEQ ID NO: 191093
  Synthetic oligonucleotide

SEQ ID NO: 628797 - DNA, 55 bp, Artificial; identical to SEQ ID NO: 245371
  Synthetic oligonucleotide

SEQ ID NO: 628798 - DNA, 55 bp, Artificial; identical to SEQ ID NO: 162129
  Synthetic oligonucleotide

SEQ ID NO: 628799 - DNA, 55 bp, Artificial; identical to SEQ ID NO: 221343
  Synthetic oligonucleotide

SEQ ID NO: 628800 - DNA, 60 bp, Artificial; identical to SEQ ID NO: 207033
  Synthetic oligonucleotide

SEQ ID NO: 628801 - DNA, 55 bp, Artificial; identical to SEQ ID NO: 159452
  Synthetic oligonucleotide

SEQ ID NO: 628802 - DNA, 55 bp, Artificial; identical to SEQ ID NO: 168390
  Synthetic oligonucleotide

SEQ ID NO: 628803 - DNA, 55 bp, Artificial; identical to SEQ ID NO: 188399
  Synthetic oligonucleotide

SEQ ID NO: 628804 - DNA, 55 bp, Artificial; identical to SEQ ID NO: 169183
  Synthetic oligonucleotide

SEQ ID NO: 628805 - DNA, 52 bp, Artificial; identical to SEQ ID NO: 185238
  Synthetic oligonucleotide

SEQ ID NO: 628806 - DNA, 55 bp, Artificial; identical to SEQ ID NO: 255644
  Synthetic oligonucleotide

SEQ ID NO: 628807 - DNA, 60 bp, Artificial; identical to SEQ ID NO: 234353
  Synthetic oligonucleotide

SEQ ID NO: 628808 - DNA, 51 bp, Artificial; identical to SEQ ID NO: 221813
  Synthetic oligonucleotide

SEQ ID NO: 628809 - DNA, 52 bp, Artificial; identical to SEQ ID NO: 159448
  Synthetic oligonucleotide

SEQ ID NO: 628810 - DNA, 55 bp, Artificial; identical to SEQ ID NO: 171364
  Synthetic oligonucleotide

SEQ ID NO: 628811 - DNA, 55 bp, Artificial; identical to SEQ ID NO: 210937
  Synthetic oligonucleotide

SEQ ID NO: 628812 - DNA, 55 bp, Artificial; identical to SEQ ID NO: 153458
  Synthetic oligonucleotide

SEQ ID NO: 628813 - DNA, 55 bp, Artificial; identical to SEQ ID NO: 248695
  Synthetic oligonucleotide

SEQ ID NO: 628814 - DNA, 55 bp, Artificial; identical to SEQ ID NO: 252848
  Synthetic oligonucleotide

SEQ ID NO: 628815 - DNA, 52 bp, Artificial; identical to SEQ ID NO: 199850
  Synthetic oligonucleotide

SEQ ID NO: 628816 - DNA, 56 bp, Artificial; identical to SEQ ID NO: 197887
  Synthetic oligonucleotide

SEQ ID NO: 628817 - DNA, 55 bp, Artificial; identical to SEQ ID NO: 203785
  Synthetic oligonucleotide

SEQ ID NO: 628818 - DNA, 55 bp, Artificial; identical to SEQ ID NO: 208344
  Synthetic oligonucleotide

SEQ ID NO: 628819 - DNA, 55 bp, Artificial; identical to SEQ ID NO: 203784
  Synthetic oligonucleotide

SEQ ID NO: 628820 - DNA, 55 bp, Artificial; identical to SEQ ID NO: 159402
  Synthetic oligonucleotide

SEQ ID NO: 628821 - DNA, 55 bp, Artificial; identical to SEQ ID NO: 159393
  Synthetic oligonucleotide

SEQ ID NO: 628822 - DNA, 55 bp, Artificial; identical to SEQ ID NO: 208345
  Synthetic oligonucleotide

SEQ ID NO: 628823 - DNA, 55 bp, Artificial; identical to SEQ ID NO: 160792
  Synthetic oligonucleotide

SEQ ID NO: 628824 - DNA, 55 bp, Artificial; identical to SEQ ID NO: 261944
  Synthetic oligonucleotide

SEQ ID NO: 628825 - DNA, 55 bp, Artificial; identical to SEQ ID NO: 159391
  Synthetic oligonucleotide

SEQ ID NO: 628826 - DNA, 56 bp, Artificial; identical to SEQ ID NO: 167625
  Synthetic oligonucleotide

SEQ ID NO: 628827 - DNA, 56 bp, Artificial; identical to SEQ ID NO: 266369
  Synthetic oligonucleotide

SEQ ID NO: 628828 - DNA, 55 bp, Artificial; identical to SEQ ID NO: 183887
  Synthetic oligonucleotide

SEQ ID NO: 628829 - DNA, 55 bp, Artificial; identical to SEQ ID NO: 169184
  Synthetic oligonucleotide

SEQ ID NO: 628830 - DNA, 55 bp, Artificial; identical to SEQ ID NO: 255142
  Synthetic oligonucleotide

SEQ ID NO: 628831 - DNA, 54 bp, Artificial; identical to SEQ ID NO: 171365
  Synthetic oligonucleotide

SEQ ID NO: 628832 - DNA, 55 bp, Artificial; identical to SEQ ID NO: 153464
  Synthetic oligonucleotide

SEQ ID NO: 628833 - DNA, 55 bp, Artificial; identical to SEQ ID NO: 217795
  Synthetic oligonucleotide

SEQ ID NO: 628834 - DNA, 51 bp, Artificial; identical to SEQ ID NO: 241100
  Synthetic oligonucleotide

SEQ ID NO: 628835 - DNA, 55 bp, Artificial; identical to SEQ ID NO: 159424
  Synthetic oligonucleotide

SEQ ID NO: 628836 - DNA, 55 bp, Artificial; identical to SEQ ID NO: 153533
  Synthetic oligonucleotide

SEQ ID NO: 628837 - DNA, 56 bp, Artificial; identical to SEQ ID NO: 248299
  Synthetic oligonucleotide

SEQ ID NO: 628838 - DNA, 60 bp, Artificial; identical to SEQ ID NO: 237092
  Synthetic oligonucleotide

SEQ ID NO: 628839 - DNA, 55 bp, Artificial; identical to SEQ ID NO: 210938
  Synthetic oligonucleotide

SEQ ID NO: 628840 - DNA, 60 bp, Artificial; identical to SEQ ID NO: 167636
  Synthetic oligonucleotide

SEQ ID NO: 628841 - DNA, 55 bp, Artificial; identical to SEQ ID NO: 183892
  Synthetic oligonucleotide

SEQ ID NO: 628842 - DNA, 55 bp, Artificial; identical to SEQ ID NO: 142299
  Synthetic oligonucleotide

SEQ ID NO: 628843 - DNA, 55 bp, Artificial; identical to SEQ ID NO: 183893
  Synthetic oligonucleotide

SEQ ID NO: 628844 - DNA, 55 bp, Artificial; identical to SEQ ID NO: 242069
  Synthetic oligonucleotide

SEQ ID NO: 628845 - DNA, 55 bp, Artificial; identical to SEQ ID NO: 183897
  Synthetic oligonucleotide

SEQ ID NO: 628846 - DNA, 55 bp, Artificial; identical to SEQ ID NO: 212550
  Synthetic oligonucleotide

SEQ ID NO: 628847 - DNA, 55 bp, Artificial; identical to SEQ ID NO: 159419
  Synthetic oligonucleotide

SEQ ID NO: 628848 - DNA, 55 bp, Artificial; identical to SEQ ID NO: 240074
  Synthetic oligonucleotide

SEQ ID NO: 628849 - DNA, 55 bp, Artificial; identical to SEQ ID NO: 151860
  Synthetic oligonucleotide

SEQ ID NO: 628850 - DNA, 55 bp, Artificial; identical to SEQ ID NO: 189190
  Synthetic oligonucleotide

SEQ ID NO: 628851 - DNA, 55 bp, Artificial; identical to SEQ ID NO: 153512
  Synthetic oligonucleotide

SEQ ID NO: 628852 - DNA, 55 bp, Artificial; identical to SEQ ID NO: 183878
  Synthetic oligonucleotide

SEQ ID NO: 628853 - DNA, 55 bp, Artificial; identical to SEQ ID NO: 261589
  Synthetic oligonucleotide

SEQ ID NO: 628854 - DNA, 55 bp, Artificial; identical to SEQ ID NO: 154162
  Synthetic oligonucleotide

SEQ ID NO: 628855 - DNA, 57 bp, Artificial; identical to SEQ ID NO: 247091
  Synthetic oligonucleotide

SEQ ID NO: 628856 - DNA, 57 bp, Artificial; identical to SEQ ID NO: 242930
  Synthetic oligonucleotide

SEQ ID NO: 628857 - DNA, 53 bp, Artificial; identical to SEQ ID NO: 224459
  Synthetic oligonucleotide

SEQ ID NO: 628858 - DNA, 55 bp, Artificial; identical to SEQ ID NO: 183868
  Synthetic oligonucleotide

SEQ ID NO: 628859 - DNA, 50 bp, Artificial; identical to SEQ ID NO: 237524
  Synthetic oligonucleotide

SEQ ID NO: 628860 - DNA, 55 bp, Artificial; identical to SEQ ID NO: 245364
  Synthetic oligonucleotide

SEQ ID NO: 628861 - DNA, 55 bp, Artificial; identical to SEQ ID NO: 245363
  Synthetic oligonucleotide

SEQ ID NO: 628862 - DNA, 55 bp, Artificial; identical to SEQ ID NO: 255133
  Synthetic oligonucleotide

SEQ ID NO: 628863 - DNA, 50 bp, Artificial; identical to SEQ ID NO: 189936
  Synthetic oligonucleotide

SEQ ID NO: 628864 - DNA, 55 bp, Artificial; identical to SEQ ID NO: 191975
  Synthetic oligonucleotide

SEQ ID NO: 628865 - DNA, 51 bp, Artificial; identical to SEQ ID NO: 204034
  Synthetic oligonucleotide

SEQ ID NO: 628866 - DNA, 53 bp, Artificial; identical to SEQ ID NO: 240076
  Synthetic oligonucleotide

SEQ ID NO: 628867 - DNA, 60 bp, Artificial; identical to SEQ ID NO: 210747
  Synthetic oligonucleotide

SEQ ID NO: 628868 - DNA, 53 bp, Artificial; identical to SEQ ID NO: 203919
  Synthetic oligonucleotide

SEQ ID NO: 628869 - DNA, 55 bp, Artificial; identical to SEQ ID NO: 148935
  Synthetic oligonucleotide

SEQ ID NO: 628870 - DNA, 55 bp, Artificial; identical to SEQ ID NO: 202317
  Synthetic oligonucleotide

SEQ ID NO: 628871 - DNA, 57 bp, Artificial; identical to SEQ ID NO: 203261
  Synthetic oligonucleotide

SEQ ID NO: 628872 - DNA, 54 bp, Artificial; identical to SEQ ID NO: 154543
  Synthetic oligonucleotide

SEQ ID NO: 628873 - DNA, 54 bp, Artificial; identical to SEQ ID NO: 150159
  Synthetic oligonucleotide

SEQ ID NO: 628874 - DNA, 55 bp, Artificial; identical to SEQ ID NO: 174576
  Synthetic oligonucleotide

SEQ ID NO: 628875 - DNA, 55 bp, Artificial; identical to SEQ ID NO: 210940
  Synthetic oligonucleotide

SEQ ID NO: 628876 - DNA, 55 bp, Artificial; identical to SEQ ID NO: 208347
  Synthetic oligonucleotide

SEQ ID NO: 628877 - DNA, 55 bp, Artificial; identical to SEQ ID NO: 168393
  Synthetic oligonucleotide

SEQ ID NO: 628878 - DNA, 55 bp, Artificial; identical to SEQ ID NO: 206855
  Synthetic oligonucleotide

SEQ ID NO: 628879 - DNA, 55 bp, Artificial; identical to SEQ ID NO: 188396
  Synthetic oligonucleotide

SEQ ID NO: 628880 - DNA, 55 bp, Artificial; identical to SEQ ID NO: 202902
  Synthetic oligonucleotide

SEQ ID NO: 628881 - DNA, 55 bp, Artificial; identical to SEQ ID NO: 161475
  Synthetic oligonucleotide

SEQ ID NO: 628882 - DNA, 55 bp, Artificial; identical to SEQ ID NO: 266776
  Synthetic oligonucleotide

SEQ ID NO: 628883 - DNA, 60 bp, Artificial; identical to SEQ ID NO: 185171
  Synthetic oligonucleotide

SEQ ID NO: 628884 - DNA, 55 bp, Artificial; identical to SEQ ID NO: 168394
  Synthetic oligonucleotide

SEQ ID NO: 628885 - DNA, 55 bp, Artificial; identical to SEQ ID NO: 152378
  Synthetic oligonucleotide

SEQ ID NO: 628886 - DNA, 55 bp, Artificial; identical to SEQ ID NO: 207452
  Synthetic oligonucleotide

SEQ ID NO: 628887 - DNA, 60 bp, Artificial; identical to SEQ ID NO: 203260
  Synthetic oligonucleotide

SEQ ID NO: 628888 - DNA, 60 bp, Artificial; identical to SEQ ID NO: 207632
  Synthetic oligonucleotide

SEQ ID NO: 628889 - DNA, 55 bp, Artificial; identical to SEQ ID NO: 155749
  Synthetic oligonucleotide

SEQ ID NO: 628890 - DNA, 55 bp, Artificial; identical to SEQ ID NO: 258016
  Synthetic oligonucleotide

SEQ ID NO: 628891 - DNA, 55 bp, Artificial; identical to SEQ ID NO: 205339
  Synthetic oligonucleotide

SEQ ID NO: 628892 - DNA, 60 bp, Artificial; identical to SEQ ID NO: 242067
  Synthetic oligonucleotide

SEQ ID NO: 628893 - DNA, 51 bp, Artificial; identical to SEQ ID NO: 223801
  Synthetic oligonucleotide

SEQ ID NO: 628894 - DNA, 55 bp, Artificial; identical to SEQ ID NO: 142300
  Synthetic oligonucleotide

SEQ ID NO: 628895 - DNA, 55 bp, Artificial; identical to SEQ ID NO: 187925
  Synthetic oligonucleotide

SEQ ID NO: 628896 - DNA, 55 bp, Artificial; identical to SEQ ID NO: 203477
  Synthetic oligonucleotide

SEQ ID NO: 628897 - DNA, 55 bp, Artificial; identical to SEQ ID NO: 199012
  Synthetic oligonucleotide

SEQ ID NO: 628898 - DNA, 54 bp, Artificial; identical to SEQ ID NO: 153517
  Synthetic oligonucleotide

SEQ ID NO: 628899 - DNA, 55 bp, Artificial; identical to SEQ ID NO: 252850
  Synthetic oligonucleotide

SEQ ID NO: 628900 - DNA, 60 bp, Artificial; identical to SEQ ID NO: 150148
  Synthetic oligonucleotide

SEQ ID NO: 628901 - DNA, 55 bp, Artificial; identical to SEQ ID NO: 191974
  Synthetic oligonucleotide

SEQ ID NO: 628902 - DNA, 55 bp, Artificial; identical to SEQ ID NO: 151861
  Synthetic oligonucleotide

SEQ ID NO: 628903 - DNA, 55 bp, Artificial; identical to SEQ ID NO: 217749
  Synthetic oligonucleotide

SEQ ID NO: 628904 - DNA, 55 bp, Artificial; identical to SEQ ID NO: 183900
  Synthetic oligonucleotide

SEQ ID NO: 628905 - DNA, 58 bp, Artificial; identical to SEQ ID NO: 179456
  Synthetic oligonucleotide

SEQ ID NO: 628906 - DNA, 59 bp, Artificial; identical to SEQ ID NO: 213125
  Synthetic oligonucleotide

SEQ ID NO: 628907 - DNA, 55 bp, Artificial; identical to SEQ ID NO: 245361
  Synthetic oligonucleotide

SEQ ID NO: 628908 - DNA, 56 bp, Artificial; identical to SEQ ID NO: 147280
  Synthetic oligonucleotide

SEQ ID NO: 628909 - DNA, 56 bp, Artificial; identical to SEQ ID NO: 147281
  Synthetic oligonucleotide

SEQ ID NO: 628910 - DNA, 51 bp, Artificial; identical to SEQ ID NO: 186409
  Synthetic oligonucleotide

SEQ ID NO: 628911 - DNA, 60 bp, Artificial; identical to SEQ ID NO: 242066
  Synthetic oligonucleotide

SEQ ID NO: 628912 - DNA, 55 bp, Artificial; identical to SEQ ID NO: 197008
  Synthetic oligonucleotide

SEQ ID NO: 628913 - DNA, 55 bp, Artificial; identical to SEQ ID NO: 168395
  Synthetic oligonucleotide

SEQ ID NO: 628914 - DNA, 55 bp, Artificial; identical to SEQ ID NO: 240077
  Synthetic oligonucleotide

SEQ ID NO: 628915 - DNA, 55 bp, Artificial; identical to SEQ ID NO: 168396
  Synthetic oligonucleotide

SEQ ID NO: 628916 - DNA, 52 bp, Artificial; identical to SEQ ID NO: 149592
  Synthetic oligonucleotide

SEQ ID NO: 628917 - DNA, 58 bp, Artificial; identical to SEQ ID NO: 243936
  Synthetic oligonucleotide

SEQ ID NO: 628918 - DNA, 50 bp, Artificial; identical to SEQ ID NO: 255901
  Synthetic oligonucleotide

SEQ ID NO: 628919 - DNA, 55 bp, Artificial; identical to SEQ ID NO: 258018
  Synthetic oligonucleotide

SEQ ID NO: 628920 - DNA, 55 bp, Artificial; identical to SEQ ID NO: 146350
  Synthetic oligonucleotide

SEQ ID NO: 628921 - DNA, 55 bp, Artificial; identical to SEQ ID NO: 187883
  Synthetic oligonucleotide

SEQ ID NO: 628922 - DNA, 54 bp, Artificial; identical to SEQ ID NO: 148931
  Synthetic oligonucleotide

SEQ ID NO: 628923 - DNA, 55 bp, Artificial; identical to SEQ ID NO: 197006
  Synthetic oligonucleotide

SEQ ID NO: 628924 - DNA, 54 bp, Artificial; identical to SEQ ID NO: 242063
  Synthetic oligonucleotide

SEQ ID NO: 628925 - DNA, 52 bp, Artificial; identical to SEQ ID NO: 240914
  Synthetic oligonucleotide

SEQ ID NO: 628926 - DNA, 55 bp, Artificial; identical to SEQ ID NO: 187872
  Synthetic oligonucleotide

SEQ ID NO: 628927 - DNA, 55 bp, Artificial; identical to SEQ ID NO: 159536
  Synthetic oligonucleotide

SEQ ID NO: 628928 - DNA, 50 bp, Artificial; identical to SEQ ID NO: 201413
  Synthetic oligonucleotide

SEQ ID NO: 628929 - DNA, 55 bp, Artificial; identical to SEQ ID NO: 160303
  Synthetic oligonucleotide

SEQ ID NO: 628930 - DNA, 55 bp, Artificial; identical to SEQ ID NO: 207453
  Synthetic oligonucleotide

SEQ ID NO: 628931 - DNA, 55 bp, Artificial; identical to SEQ ID NO: 183911
  Synthetic oligonucleotide

SEQ ID NO: 628932 - DNA, 51 bp, Artificial; identical to SEQ ID NO: 157795
  Synthetic oligonucleotide

SEQ ID NO: 628933 - DNA, 55 bp, Artificial; identical to SEQ ID NO: 166282
  Synthetic oligonucleotide

SEQ ID NO: 628934 - DNA, 54 bp, Artificial; identical to SEQ ID NO: 153037
  Synthetic oligonucleotide

SEQ ID NO: 628935 - DNA, 55 bp, Artificial; identical to SEQ ID NO: 225041
  Synthetic oligonucleotide

SEQ ID NO: 628936 - DNA, 55 bp, Artificial; identical to SEQ ID NO: 199011
  Synthetic oligonucleotide

SEQ ID NO: 628937 - DNA, 50 bp, Artificial; identical to SEQ ID NO: 167664
  Synthetic oligonucleotide

SEQ ID NO: 628938 - DNA, 54 bp, Artificial; identical to SEQ ID NO: 238251
  Synthetic oligonucleotide

SEQ ID NO: 628939 - DNA, 60 bp, Artificial; identical to SEQ ID NO: 242941
  Synthetic oligonucleotide

SEQ ID NO: 628940 - DNA, 60 bp, Artificial; identical to SEQ ID NO: 4716
  Synthetic oligonucleotide

SEQ ID NO: 628941 - DNA, 55 bp, Artificial; identical to SEQ ID NO: 197041
  Synthetic oligonucleotide

SEQ ID NO: 628942 - DNA, 55 bp, Artificial; identical to SEQ ID NO: 183811
  Synthetic oligonucleotide

SEQ ID NO: 628943 - DNA, 55 bp, Artificial; identical to SEQ ID NO: 240081
  Synthetic oligonucleotide

SEQ ID NO: 628944 - DNA, 53 bp, Artificial; identical to SEQ ID NO: 188432
  Synthetic oligonucleotide

SEQ ID NO: 628945 - DNA, 55 bp, Artificial; identical to SEQ ID NO: 242657
  Synthetic oligonucleotide

SEQ ID NO: 628946 - DNA, 58 bp, Artificial; identical to SEQ ID NO: 147073
  Synthetic oligonucleotide

SEQ ID NO: 628947 - DNA, 55 bp, Artificial; identical to SEQ ID NO: 187929
  Synthetic oligonucleotide

SEQ ID NO: 628948 - DNA, 55 bp, Artificial; identical to SEQ ID NO: 193485
  Synthetic oligonucleotide

SEQ ID NO: 628949 - DNA, 54 bp, Artificial; identical to SEQ ID NO: 203867
  Synthetic oligonucleotide

SEQ ID NO: 628950 - DNA, 55 bp, Artificial; identical to SEQ ID NO: 146348
  Synthetic oligonucleotide

SEQ ID NO: 628951 - DNA, 60 bp, Artificial; identical to SEQ ID NO: 203304
  Synthetic oligonucleotide

SEQ ID NO: 628952 - DNA, 60 bp, Artificial; identical to SEQ ID NO: 145159
  Synthetic oligonucleotide

SEQ ID NO: 628953 - DNA, 55 bp, Artificial; identical to SEQ ID NO: 155085
  Synthetic oligonucleotide

SEQ ID NO: 628954 - DNA, 55 bp, Artificial; identical to SEQ ID NO: 155036
  Synthetic oligonucleotide

SEQ ID NO: 628955 - DNA, 55 bp, Artificial; identical to SEQ ID NO: 159524
  Synthetic oligonucleotide

SEQ ID NO: 628956 - DNA, 55 bp, Artificial; identical to SEQ ID NO: 212610
  Synthetic oligonucleotide

SEQ ID NO: 628957 - DNA, 55 bp, Artificial; identical to SEQ ID NO: 199010
  Synthetic oligonucleotide

SEQ ID NO: 628958 - DNA, 55 bp, Artificial; identical to SEQ ID NO: 183812
  Synthetic oligonucleotide

SEQ ID NO: 628959 - DNA, 55 bp, Artificial; identical to SEQ ID NO: 248727
  Synthetic oligonucleotide

SEQ ID NO: 628960 - DNA, 51 bp, Artificial; identical to SEQ ID NO: 248056
  Synthetic oligonucleotide

SEQ ID NO: 628961 - DNA, 55 bp, Artificial; identical to SEQ ID NO: 255147
  Synthetic oligonucleotide

SEQ ID NO: 628962 - DNA, 55 bp, Artificial; identical to SEQ ID NO: 183815
  Synthetic oligonucleotide

SEQ ID NO: 628963 - DNA, 60 bp, Artificial; identical to SEQ ID NO: 199803
  Synthetic oligonucleotide

SEQ ID NO: 628964 - DNA, 55 bp, Artificial; identical to SEQ ID NO: 221348
  Synthetic oligonucleotide

SEQ ID NO: 628965 - DNA, 55 bp, Artificial; identical to SEQ ID NO: 194827
  Synthetic oligonucleotide

SEQ ID NO: 628966 - DNA, 53 bp, Artificial; identical to SEQ ID NO: 195027
  Synthetic oligonucleotide

SEQ ID NO: 628967 - DNA, 55 bp, Artificial; identical to SEQ ID NO: 240083
  Synthetic oligonucleotide

SEQ ID NO: 628968 - DNA, 55 bp, Artificial; identical to SEQ ID NO: 185105
  Synthetic oligonucleotide

SEQ ID NO: 628969 - DNA, 55 bp, Artificial; identical to SEQ ID NO: 221115
  Synthetic oligonucleotide

SEQ ID NO: 628970 - DNA, 55 bp, Artificial; identical to SEQ ID NO: 183819
  Synthetic oligonucleotide

SEQ ID NO: 628971 - DNA, 55 bp, Artificial; identical to SEQ ID NO: 208349
  Synthetic oligonucleotide

SEQ ID NO: 628972 - DNA, 55 bp, Artificial; identical to SEQ ID NO: 159565
  Synthetic oligonucleotide

SEQ ID NO: 628973 - DNA, 51 bp, Artificial; identical to SEQ ID NO: 237118
  Synthetic oligonucleotide

SEQ ID NO: 628974 - DNA, 55 bp, Artificial; identical to SEQ ID NO: 183820
  Synthetic oligonucleotide

SEQ ID NO: 628975 - DNA, 60 bp, Artificial; identical to SEQ ID NO: 162414
  Synthetic oligonucleotide

SEQ ID NO: 628976 - DNA, 56 bp, Artificial; identical to SEQ ID NO: 143850
  Synthetic oligonucleotide

SEQ ID NO: 628977 - DNA, 58 bp, Artificial; identical to SEQ ID NO: 185093
  Synthetic oligonucleotide

SEQ ID NO: 628978 - DNA, 52 bp, Artificial; identical to SEQ ID NO: 199845
  Synthetic oligonucleotide

SEQ ID NO: 628979 - DNA, 60 bp, Artificial; identical to SEQ ID NO: 266370
  Synthetic oligonucleotide

SEQ ID NO: 628980 - DNA, 55 bp, Artificial; identical to SEQ ID NO: 194869
  Synthetic oligonucleotide

SEQ ID NO: 628981 - DNA, 54 bp, Artificial; identical to SEQ ID NO: 153147
  Synthetic oligonucleotide

SEQ ID NO: 628982 - DNA, 52 bp, Artificial; identical to SEQ ID NO: 255568
  Synthetic oligonucleotide

SEQ ID NO: 628983 - DNA, 57 bp, Artificial; identical to SEQ ID NO: 141528
  Synthetic oligonucleotide

SEQ ID NO: 628984 - DNA, 51 bp, Artificial; identical to SEQ ID NO: 248057
  Synthetic oligonucleotide

SEQ ID NO: 628985 - DNA, 55 bp, Artificial; identical to SEQ ID NO: 148927
  Synthetic oligonucleotide

SEQ ID NO: 628986 - DNA, 55 bp, Artificial; identical to SEQ ID NO: 143665
  Synthetic oligonucleotide

SEQ ID NO: 628987 - DNA, 55 bp, Artificial; identical to SEQ ID NO: 225043
  Synthetic oligonucleotide

SEQ ID NO: 628988 - DNA, 55 bp, Artificial; identical to SEQ ID NO: 240084
  Synthetic oligonucleotide

SEQ ID NO: 628989 - DNA, 54 bp, Artificial; identical to SEQ ID NO: 247801
  Synthetic oligonucleotide

SEQ ID NO: 628990 - DNA, 55 bp, Artificial; identical to SEQ ID NO: 183826
  Synthetic oligonucleotide

SEQ ID NO: 628991 - DNA, 55 bp, Artificial; identical to SEQ ID NO: 183809
  Synthetic oligonucleotide

SEQ ID NO: 628992 - DNA, 55 bp, Artificial; identical to SEQ ID NO: 183802
  Synthetic oligonucleotide

SEQ ID NO: 628993 - DNA, 55 bp, Artificial; identical to SEQ ID NO: 245299
  Synthetic oligonucleotide

SEQ ID NO: 628994 - DNA, 50 bp, Artificial; identical to SEQ ID NO: 215261
  Synthetic oligonucleotide

SEQ ID NO: 628995 - DNA, 55 bp, Artificial; identical to SEQ ID NO: 242658
  Synthetic oligonucleotide

SEQ ID NO: 628996 - DNA, 53 bp, Artificial; identical to SEQ ID NO: 183797
  Synthetic oligonucleotide

SEQ ID NO: 628997 - DNA, 54 bp, Artificial; identical to SEQ ID NO: 199008
  Synthetic oligonucleotide

SEQ ID NO: 628998 - DNA, 55 bp, Artificial; identical to SEQ ID NO: 240086
  Synthetic oligonucleotide

SEQ ID NO: 628999 - DNA, 55 bp, Artificial; identical to SEQ ID NO: 183848
  Synthetic oligonucleotide

SEQ ID NO: 629000 - DNA, 55 bp, Artificial; identical to SEQ ID NO: 159545
  Synthetic oligonucleotide

SEQ ID NO: 629001 - DNA, 53 bp, Artificial; identical to SEQ ID NO: 149315
  Synthetic oligonucleotide

SEQ ID NO: 629002 - DNA, 55 bp, Artificial; identical to SEQ ID NO: 201340
  Synthetic oligonucleotide

SEQ ID NO: 629003 - DNA, 55 bp, Artificial; identical to SEQ ID NO: 240087
  Synthetic oligonucleotide

SEQ ID NO: 629004 - DNA, 55 bp, Artificial; identical to SEQ ID NO: 221349
  Synthetic oligonucleotide

SEQ ID NO: 629005 - DNA, 55 bp, Artificial; identical to SEQ ID NO: 240088
  Synthetic oligonucleotide

SEQ ID NO: 629006 - DNA, 55 bp, Artificial; identical to SEQ ID NO: 168398
  Synthetic oligonucleotide

SEQ ID NO: 629007 - DNA, 55 bp, Artificial; identical to SEQ ID NO: 207457
  Synthetic oligonucleotide

SEQ ID NO: 629008 - DNA, 55 bp, Artificial; identical to SEQ ID NO: 145198
  Synthetic oligonucleotide

SEQ ID NO: 629009 - DNA, 60 bp, Artificial; identical to SEQ ID NO: 207411
  Synthetic oligonucleotide

SEQ ID NO: 629010 - DNA, 55 bp, Artificial; identical to SEQ ID NO: 153146
  Synthetic oligonucleotide

SEQ ID NO: 629011 - DNA, 55 bp, Artificial; identical to SEQ ID NO: 143664
  Synthetic oligonucleotide

SEQ ID NO: 629012 - DNA, 55 bp, Artificial; identical to SEQ ID NO: 153145
  Synthetic oligonucleotide

SEQ ID NO: 629013 - DNA, 60 bp, Artificial; identical to SEQ ID NO: 194028
  Synthetic oligonucleotide

SEQ ID NO: 629014 - DNA, 55 bp, Artificial; identical to SEQ ID NO: 159475
  Synthetic oligonucleotide

SEQ ID NO: 629015 - DNA, 56 bp, Artificial; identical to SEQ ID NO: 175013
  Synthetic oligonucleotide

SEQ ID NO: 629016 - DNA, 55 bp, Artificial; identical to SEQ ID NO: 238141
  Synthetic oligonucleotide

SEQ ID NO: 629017 - DNA, 54 bp, Artificial; identical to SEQ ID NO: 199792
  Synthetic oligonucleotide

SEQ ID NO: 629018 - DNA, 55 bp, Artificial; identical to SEQ ID NO: 265972
  Synthetic oligonucleotide

SEQ ID NO: 629019 - DNA, 51 bp, Artificial; identical to SEQ ID NO: 208880
  Synthetic oligonucleotide

SEQ ID NO: 629020 - DNA, 57 bp, Artificial; identical to SEQ ID NO: 225531
  Synthetic oligonucleotide

SEQ ID NO: 629021 - DNA, 55 bp, Artificial; identical to SEQ ID NO: 245297
  Synthetic oligonucleotide

SEQ ID NO: 629022 - DNA, 55 bp, Artificial; identical to SEQ ID NO: 159518
  Synthetic oligonucleotide

SEQ ID NO: 629023 - DNA, 55 bp, Artificial; identical to SEQ ID NO: 194868
  Synthetic oligonucleotide

SEQ ID NO: 629024 - DNA, 55 bp, Artificial; identical to SEQ ID NO: 148969
  Synthetic oligonucleotide

SEQ ID NO: 629025 - DNA, 55 bp, Artificial; identical to SEQ ID NO: 194865
  Synthetic oligonucleotide

SEQ ID NO: 629026 - DNA, 55 bp, Artificial; identical to SEQ ID NO: 168399
  Synthetic oligonucleotide

SEQ ID NO: 629027 - DNA, 58 bp, Artificial; identical to SEQ ID NO: 248321
  Synthetic oligonucleotide

SEQ ID NO: 629028 - DNA, 55 bp, Artificial; identical to SEQ ID NO: 255159
  Synthetic oligonucleotide

SEQ ID NO: 629029 - DNA, 55 bp, Artificial; identical to SEQ ID NO: 199005
  Synthetic oligonucleotide

SEQ ID NO: 629030 - DNA, 54 bp, Artificial; identical to SEQ ID NO: 223510
  Synthetic oligonucleotide

SEQ ID NO: 629031 - DNA, 55 bp, Artificial; identical to SEQ ID NO: 183833
  Synthetic oligonucleotide

SEQ ID NO: 629032 - DNA, 55 bp, Artificial; identical to SEQ ID NO: 265803
  Synthetic oligonucleotide

SEQ ID NO: 629033 - DNA, 55 bp, Artificial; identical to SEQ ID NO: 162221
  Synthetic oligonucleotide

SEQ ID NO: 629034 - DNA, 55 bp, Artificial; identical to SEQ ID NO: 205341
  Synthetic oligonucleotide

SEQ ID NO: 629035 - DNA, 54 bp, Artificial; identical to SEQ ID NO: 169998
  Synthetic oligonucleotide

SEQ ID NO: 629036 - DNA, 55 bp, Artificial; identical to SEQ ID NO: 159506
  Synthetic oligonucleotide

SEQ ID NO: 629037 - DNA, 53 bp, Artificial; identical to SEQ ID NO: 237031
  Synthetic oligonucleotide

SEQ ID NO: 629038 - DNA, 55 bp, Artificial; identical to SEQ ID NO: 153142
  Synthetic oligonucleotide

SEQ ID NO: 629039 - DNA, 52 bp, Artificial; identical to SEQ ID NO: 208399
  Synthetic oligonucleotide

SEQ ID NO: 629040 - DNA, 55 bp, Artificial; identical to SEQ ID NO: 238145
  Synthetic oligonucleotide

SEQ ID NO: 629041 - DNA, 55 bp, Artificial; identical to SEQ ID NO: 197033
  Synthetic oligonucleotide

SEQ ID NO: 629042 - DNA, 55 bp, Artificial; identical to SEQ ID NO: 205343
  Synthetic oligonucleotide

SEQ ID NO: 629043 - DNA, 51 bp, Artificial; identical to SEQ ID NO: 203020
  Synthetic oligonucleotide

SEQ ID NO: 629044 - DNA, 55 bp, Artificial; identical to SEQ ID NO: 245295
  Synthetic oligonucleotide

SEQ ID NO: 629045 - DNA, 55 bp, Artificial; identical to SEQ ID NO: 171323
  Synthetic oligonucleotide

SEQ ID NO: 629046 - DNA, 55 bp, Artificial; identical to SEQ ID NO: 193463
  Synthetic oligonucleotide

SEQ ID NO: 629047 - DNA, 55 bp, Artificial; identical to SEQ ID NO: 248718
  Synthetic oligonucleotide

SEQ ID NO: 629048 - DNA, 55 bp, Artificial; identical to SEQ ID NO: 234015
  Synthetic oligonucleotide

SEQ ID NO: 629049 - DNA, 54 bp, Artificial; identical to SEQ ID NO: 159501
  Synthetic oligonucleotide

SEQ ID NO: 629050 - DNA, 55 bp, Artificial; identical to SEQ ID NO: 257063
  Synthetic oligonucleotide

SEQ ID NO: 629051 - DNA, 55 bp, Artificial; identical to SEQ ID NO: 189527
  Synthetic oligonucleotide

SEQ ID NO: 629052 - DNA, 55 bp, Artificial; identical to SEQ ID NO: 153140
  Synthetic oligonucleotide

SEQ ID NO: 629053 - DNA, 55 bp, Artificial; identical to SEQ ID NO: 189980
  Synthetic oligonucleotide

SEQ ID NO: 629054 - DNA, 55 bp, Artificial; identical to SEQ ID NO: 183841
  Synthetic oligonucleotide

SEQ ID NO: 629055 - DNA, 55 bp, Artificial; identical to SEQ ID NO: 257549
  Synthetic oligonucleotide

SEQ ID NO: 629056 - DNA, 58 bp, Artificial; identical to SEQ ID NO: 152949
  Synthetic oligonucleotide

SEQ ID NO: 629057 - DNA, 55 bp, Artificial; identical to SEQ ID NO: 144477
  Synthetic oligonucleotide

SEQ ID NO: 629058 - DNA, 55 bp, Artificial; identical to SEQ ID NO: 146344
  Synthetic oligonucleotide

SEQ ID NO: 629059 - DNA, 58 bp, Artificial; identical to SEQ ID NO: 152950
  Synthetic oligonucleotide

SEQ ID NO: 629060 - DNA, 55 bp, Artificial; identical to SEQ ID NO: 183843
  Synthetic oligonucleotide

SEQ ID NO: 629061 - DNA, 55 bp, Artificial; identical to SEQ ID NO: 183844
  Synthetic oligonucleotide

SEQ ID NO: 629062 - DNA, 52 bp, Artificial; identical to SEQ ID NO: 257508
  Synthetic oligonucleotide

SEQ ID NO: 629063 - DNA, 60 bp, Artificial; identical to SEQ ID NO: 150082
  Synthetic oligonucleotide

SEQ ID NO: 629064 - DNA, 55 bp, Artificial; identical to SEQ ID NO: 201654
  Synthetic oligonucleotide

SEQ ID NO: 629065 - DNA, 55 bp, Artificial; identical to SEQ ID NO: 142766
  Synthetic oligonucleotide

SEQ ID NO: 629066 - DNA, 50 bp, Artificial; identical to SEQ ID NO: 224126
  Synthetic oligonucleotide

SEQ ID NO: 629067 - DNA, 58 bp, Artificial; identical to SEQ ID NO: 155152
  Synthetic oligonucleotide

SEQ ID NO: 629068 - DNA, 54 bp, Artificial; identical to SEQ ID NO: 185072
  Synthetic oligonucleotide

SEQ ID NO: 629069 - DNA, 55 bp, Artificial; identical to SEQ ID NO: 255158
  Synthetic oligonucleotide

SEQ ID NO: 629070 - DNA, 55 bp, Artificial; identical to SEQ ID NO: 159504
  Synthetic oligonucleotide

SEQ ID NO: 629071 - DNA, 53 bp, Artificial; identical to SEQ ID NO: 208873
  Synthetic oligonucleotide

SEQ ID NO: 629072 - DNA, 57 bp, Artificial; identical to SEQ ID NO: 171049
  Synthetic oligonucleotide

SEQ ID NO: 629073 - DNA, 55 bp, Artificial; identical to SEQ ID NO: 183453
  Synthetic oligonucleotide

SEQ ID NO: 629074 - DNA, 55 bp, Artificial; identical to SEQ ID NO: 183454
  Synthetic oligonucleotide

SEQ ID NO: 629075 - DNA, 55 bp, Artificial; identical to SEQ ID NO: 183455
  Synthetic oligonucleotide

SEQ ID NO: 629076 - DNA, 55 bp, Artificial; identical to SEQ ID NO: 189982
  Synthetic oligonucleotide

SEQ ID NO: 629077 - DNA, 55 bp, Artificial; identical to SEQ ID NO: 221351
  Synthetic oligonucleotide

SEQ ID NO: 629078 - DNA, 55 bp, Artificial; identical to SEQ ID NO: 159505
  Synthetic oligonucleotide

SEQ ID NO: 629079 - DNA, 55 bp, Artificial; identical to SEQ ID NO: 183461
  Synthetic oligonucleotide

SEQ ID NO: 629080 - DNA, 50 bp, Artificial; identical to SEQ ID NO: 152204
  Synthetic oligonucleotide

SEQ ID NO: 629081 - DNA, 55 bp, Artificial; identical to SEQ ID NO: 266108
  Synthetic oligonucleotide

SEQ ID NO: 629082 - DNA, 55 bp, Artificial; identical to SEQ ID NO: 194861
  Synthetic oligonucleotide

SEQ ID NO: 629083 - DNA, 60 bp, Artificial; identical to SEQ ID NO: 257386
  Synthetic oligonucleotide

SEQ ID NO: 629084 - DNA, 52 bp, Artificial; identical to SEQ ID NO: 155583
  Synthetic oligonucleotide

SEQ ID NO: 629085 - DNA, 54 bp, Artificial; identical to SEQ ID NO: 159508
  Synthetic oligonucleotide

SEQ ID NO: 629086 - DNA, 55 bp, Artificial; identical to SEQ ID NO: 183462
  Synthetic oligonucleotide

SEQ ID NO: 629087 - DNA, 55 bp, Artificial; identical to SEQ ID NO: 202313
  Synthetic oligonucleotide

SEQ ID NO: 629088 - DNA, 55 bp, Artificial; identical to SEQ ID NO: 161760
  Synthetic oligonucleotide

SEQ ID NO: 629089 - DNA, 52 bp, Artificial; identical to SEQ ID NO: 157525
  Synthetic oligonucleotide

SEQ ID NO: 629090 - DNA, 55 bp, Artificial; identical to SEQ ID NO: 202312
  Synthetic oligonucleotide

SEQ ID NO: 629091 - DNA, 55 bp, Artificial; identical to SEQ ID NO: 159511
  Synthetic oligonucleotide

SEQ ID NO: 629092 - DNA, 55 bp, Artificial; identical to SEQ ID NO: 240092
  Synthetic oligonucleotide

SEQ ID NO: 629093 - DNA, 52 bp, Artificial; identical to SEQ ID NO: 202532
  Synthetic oligonucleotide

SEQ ID NO: 629094 - DNA, 55 bp, Artificial; identical to SEQ ID NO: 183463
  Synthetic oligonucleotide

SEQ ID NO: 629095 - DNA, 55 bp, Artificial; identical to SEQ ID NO: 257639
  Synthetic oligonucleotide

SEQ ID NO: 629096 - DNA, 55 bp, Artificial; identical to SEQ ID NO: 171331
  Synthetic oligonucleotide

SEQ ID NO: 629097 - DNA, 55 bp, Artificial; identical to SEQ ID NO: 211004
  Synthetic oligonucleotide

SEQ ID NO: 629098 - DNA, 55 bp, Artificial; identical to SEQ ID NO: 202899
  Synthetic oligonucleotide

SEQ ID NO: 629099 - DNA, 55 bp, Artificial; identical to SEQ ID NO: 194854
  Synthetic oligonucleotide

SEQ ID NO: 629100 - DNA, 60 bp, Artificial; identical to SEQ ID NO: 256686
  Synthetic oligonucleotide

SEQ ID NO: 629101 - DNA, 55 bp, Artificial; identical to SEQ ID NO: 202897
  Synthetic oligonucleotide

SEQ ID NO: 629102 - DNA, 55 bp, Artificial; identical to SEQ ID NO: 183466
  Synthetic oligonucleotide

SEQ ID NO: 629103 - DNA, 55 bp, Artificial; identical to SEQ ID NO: 169293
  Synthetic oligonucleotide

SEQ ID NO: 629104 - DNA, 50 bp, Artificial; identical to SEQ ID NO: 216920
  Synthetic oligonucleotide

SEQ ID NO: 629105 - DNA, 55 bp, Artificial; identical to SEQ ID NO: 168402
  Synthetic oligonucleotide

SEQ ID NO: 629106 - DNA, 55 bp, Artificial; identical to SEQ ID NO: 183469
  Synthetic oligonucleotide

SEQ ID NO: 629107 - DNA, 55 bp, Artificial; identical to SEQ ID NO: 159514
  Synthetic oligonucleotide

SEQ ID NO: 629108 - DNA, 55 bp, Artificial; identical to SEQ ID NO: 171333
  Synthetic oligonucleotide

SEQ ID NO: 629109 - DNA, 55 bp, Artificial; identical to SEQ ID NO: 145200
  Synthetic oligonucleotide

SEQ ID NO: 629110 - DNA, 55 bp, Artificial; identical to SEQ ID NO: 255103
  Synthetic oligonucleotide

SEQ ID NO: 629111 - DNA, 54 bp, Artificial; identical to SEQ ID NO: 221352
  Synthetic oligonucleotide

SEQ ID NO: 629112 - DNA, 55 bp, Artificial; identical to SEQ ID NO: 202896
  Synthetic oligonucleotide

SEQ ID NO: 629113 - DNA, 55 bp, Artificial; identical to SEQ ID NO: 245293
  Synthetic oligonucleotide

SEQ ID NO: 629114 - DNA, 55 bp, Artificial; identical to SEQ ID NO: 199002
  Synthetic oligonucleotide

SEQ ID NO: 629115 - DNA, 52 bp, Artificial; identical to SEQ ID NO: 186290
  Synthetic oligonucleotide

SEQ ID NO: 629116 - DNA, 55 bp, Artificial; identical to SEQ ID NO: 148965
  Synthetic oligonucleotide

SEQ ID NO: 629117 - DNA, 60 bp, Artificial; identical to SEQ ID NO: 141539
  Synthetic oligonucleotide

SEQ ID NO: 629118 - DNA, 60 bp, Artificial; identical to SEQ ID NO: 202440
  Synthetic oligonucleotide

SEQ ID NO: 629119 - DNA, 53 bp, Artificial; identical to SEQ ID NO: 179475
  Synthetic oligonucleotide

SEQ ID NO: 629120 - DNA, 57 bp, Artificial; identical to SEQ ID NO: 239431
  Synthetic oligonucleotide

SEQ ID NO: 629121 - DNA, 55 bp, Artificial; identical to SEQ ID NO: 168404
  Synthetic oligonucleotide

SEQ ID NO: 629122 - DNA, 55 bp, Artificial; identical to SEQ ID NO: 183442
  Synthetic oligonucleotide

SEQ ID NO: 629123 - DNA, 55 bp, Artificial; identical to SEQ ID NO: 171334
  Synthetic oligonucleotide

SEQ ID NO: 629124 - DNA, 53 bp, Artificial; identical to SEQ ID NO: 257637
  Synthetic oligonucleotide

SEQ ID NO: 629125 - DNA, 55 bp, Artificial; identical to SEQ ID NO: 255102
  Synthetic oligonucleotide

SEQ ID NO: 629126 - DNA, 54 bp, Artificial; identical to SEQ ID NO: 151867
  Synthetic oligonucleotide

SEQ ID NO: 629127 - DNA, 55 bp, Artificial; identical to SEQ ID NO: 255101
  Synthetic oligonucleotide

SEQ ID NO: 629128 - DNA, 55 bp, Artificial; identical to SEQ ID NO: 183440
  Synthetic oligonucleotide

SEQ ID NO: 629129 - DNA, 57 bp, Artificial; identical to SEQ ID NO: 185449
  Synthetic oligonucleotide

SEQ ID NO: 629130 - DNA, 60 bp, Artificial; identical to SEQ ID NO: 185438
  Synthetic oligonucleotide

SEQ ID NO: 629131 - DNA, 55 bp, Artificial; identical to SEQ ID NO: 183490
  Synthetic oligonucleotide

SEQ ID NO: 629132 - DNA, 55 bp, Artificial; identical to SEQ ID NO: 183491
  Synthetic oligonucleotide

SEQ ID NO: 629133 - DNA, 55 bp, Artificial; identical to SEQ ID NO: 183492
  Synthetic oligonucleotide

SEQ ID NO: 629134 - DNA, 60 bp, Artificial; identical to SEQ ID NO: 185426
  Synthetic oligonucleotide

SEQ ID NO: 629135 - DNA, 55 bp, Artificial; identical to SEQ ID NO: 183503
  Synthetic oligonucleotide

SEQ ID NO: 629136 - DNA, 51 bp, Artificial; identical to SEQ ID NO: 191222
  Synthetic oligonucleotide

SEQ ID NO: 629137 - DNA, 59 bp, Artificial; identical to SEQ ID NO: 201293
  Synthetic oligonucleotide

SEQ ID NO: 629138 - DNA, 55 bp, Artificial; identical to SEQ ID NO: 183506
  Synthetic oligonucleotide

SEQ ID NO: 629139 - DNA, 57 bp, Artificial; identical to SEQ ID NO: 208884
  Synthetic oligonucleotide

SEQ ID NO: 629140 - DNA, 60 bp, Artificial; identical to SEQ ID NO: 170531
  Synthetic oligonucleotide

SEQ ID NO: 629141 - DNA, 55 bp, Artificial; identical to SEQ ID NO: 262808
  Synthetic oligonucleotide

SEQ ID NO: 629142 - DNA, 51 bp, Artificial; identical to SEQ ID NO: 145075
  Synthetic oligonucleotide

SEQ ID NO: 629143 - DNA, 55 bp, Artificial; identical to SEQ ID NO: 218155
  Synthetic oligonucleotide

SEQ ID NO: 629144 - DNA, 54 bp, Artificial; identical to SEQ ID NO: 185415
  Synthetic oligonucleotide

SEQ ID NO: 629145 - DNA, 54 bp, Artificial; identical to SEQ ID NO: 195215
  Synthetic oligonucleotide

SEQ ID NO: 629146 - DNA, 55 bp, Artificial; identical to SEQ ID NO: 245290
  Synthetic oligonucleotide

SEQ ID NO: 629147 - DNA, 54 bp, Artificial; identical to SEQ ID NO: 168231
  Synthetic oligonucleotide

SEQ ID NO: 629148 - DNA, 59 bp, Artificial; identical to SEQ ID NO: 237894
  Synthetic oligonucleotide

SEQ ID NO: 629149 - DNA, 51 bp, Artificial; identical to SEQ ID NO: 186723
  Synthetic oligonucleotide

SEQ ID NO: 629150 - DNA, 60 bp, Artificial; identical to SEQ ID NO: 209583
  Synthetic oligonucleotide

SEQ ID NO: 629151 - DNA, 51 bp, Artificial; identical to SEQ ID NO: 148964
  Synthetic oligonucleotide

SEQ ID NO: 629152 - DNA, 55 bp, Artificial; identical to SEQ ID NO: 187312
  Synthetic oligonucleotide

SEQ ID NO: 629153 - DNA, 56 bp, Artificial; identical to SEQ ID NO: 233933
  Synthetic oligonucleotide

SEQ ID NO: 629154 - DNA, 55 bp, Artificial; identical to SEQ ID NO: 217754
  Synthetic oligonucleotide

SEQ ID NO: 629155 - DNA, 55 bp, Artificial; identical to SEQ ID NO: 148963
  Synthetic oligonucleotide

SEQ ID NO: 629156 - DNA, 60 bp, Artificial; identical to SEQ ID NO: 187861
  Synthetic oligonucleotide

SEQ ID NO: 629157 - DNA, 54 bp, Artificial; identical to SEQ ID NO: 209599
  Synthetic oligonucleotide

SEQ ID NO: 629158 - DNA, 58 bp, Artificial; identical to SEQ ID NO: 209572
  Synthetic oligonucleotide

SEQ ID NO: 629159 - DNA, 55 bp, Artificial; identical to SEQ ID NO: 240094
  Synthetic oligonucleotide

SEQ ID NO: 629160 - DNA, 55 bp, Artificial; identical to SEQ ID NO: 183478
  Synthetic oligonucleotide

SEQ ID NO: 629161 - DNA, 55 bp, Artificial; identical to SEQ ID NO: 148962
  Synthetic oligonucleotide

SEQ ID NO: 629162 - DNA, 55 bp, Artificial; identical to SEQ ID NO: 202309
  Synthetic oligonucleotide

SEQ ID NO: 629163 - DNA, 55 bp, Artificial; identical to SEQ ID NO: 169304
  Synthetic oligonucleotide

SEQ ID NO: 629164 - DNA, 59 bp, Artificial; identical to SEQ ID NO: 185393
  Synthetic oligonucleotide

SEQ ID NO: 629165 - DNA, 55 bp, Artificial; identical to SEQ ID NO: 183483
  Synthetic oligonucleotide

SEQ ID NO: 629166 - DNA, 60 bp, Artificial; identical to SEQ ID NO: 185371
  Synthetic oligonucleotide

SEQ ID NO: 629167 - DNA, 55 bp, Artificial; identical to SEQ ID NO: 199000
  Synthetic oligonucleotide

SEQ ID NO: 629168 - DNA, 60 bp, Artificial; identical to SEQ ID NO: 203299
  Synthetic oligonucleotide

SEQ ID NO: 629169 - DNA, 55 bp, Artificial; identical to SEQ ID NO: 257633
  Synthetic oligonucleotide

SEQ ID NO: 629170 - DNA, 51 bp, Artificial; identical to SEQ ID NO: 169071
  Synthetic oligonucleotide

SEQ ID NO: 629171 - DNA, 55 bp, Artificial; identical to SEQ ID NO: 207461
  Synthetic oligonucleotide

SEQ ID NO: 629172 - DNA, 55 bp, Artificial; identical to SEQ ID NO: 168232
  Synthetic oligonucleotide

SEQ ID NO: 629173 - DNA, 53 bp, Artificial; identical to SEQ ID NO: 195023
  Synthetic oligonucleotide

SEQ ID NO: 629174 - DNA, 52 bp, Artificial; identical to SEQ ID NO: 195056
  Synthetic oligonucleotide

SEQ ID NO: 629175 - DNA, 55 bp, Artificial; identical to SEQ ID NO: 144738
  Synthetic oligonucleotide

SEQ ID NO: 629176 - DNA, 55 bp, Artificial; identical to SEQ ID NO: 245288
  Synthetic oligonucleotide

SEQ ID NO: 629177 - DNA, 53 bp, Artificial; identical to SEQ ID NO: 142629
  Synthetic oligonucleotide

SEQ ID NO: 629178 - DNA, 56 bp, Artificial; identical to SEQ ID NO: 197858
  Synthetic oligonucleotide

SEQ ID NO: 629179 - DNA, 53 bp, Artificial; identical to SEQ ID NO: 199782
  Synthetic oligonucleotide

SEQ ID NO: 629180 - DNA, 55 bp, Artificial; identical to SEQ ID NO: 183386
  Synthetic oligonucleotide

SEQ ID NO: 629181 - DNA, 55 bp, Artificial; identical to SEQ ID NO: 152381
  Synthetic oligonucleotide

SEQ ID NO: 629182 - DNA, 54 bp, Artificial; identical to SEQ ID NO: 242116
  Synthetic oligonucleotide

SEQ ID NO: 629183 - DNA, 60 bp, Artificial; identical to SEQ ID NO: 199770
  Synthetic oligonucleotide

SEQ ID NO: 629184 - DNA, 53 bp, Artificial; identical to SEQ ID NO: 216638
  Synthetic oligonucleotide

SEQ ID NO: 629185 - DNA, 55 bp, Artificial; identical to SEQ ID NO: 159478
  Synthetic oligonucleotide

SEQ ID NO: 629186 - DNA, 55 bp, Artificial; identical to SEQ ID NO: 245286
  Synthetic oligonucleotide

SEQ ID NO: 629187 - DNA, 55 bp, Artificial; identical to SEQ ID NO: 159480
  Synthetic oligonucleotide

SEQ ID NO: 629188 - DNA, 55 bp, Artificial; identical to SEQ ID NO: 252857
  Synthetic oligonucleotide

SEQ ID NO: 629189 - DNA, 55 bp, Artificial; identical to SEQ ID NO: 208404
  Synthetic oligonucleotide

SEQ ID NO: 629190 - DNA, 55 bp, Artificial; identical to SEQ ID NO: 171335
  Synthetic oligonucleotide

SEQ ID NO: 629191 - DNA, 55 bp, Artificial; identical to SEQ ID NO: 144737
  Synthetic oligonucleotide

SEQ ID NO: 629192 - DNA, 55 bp, Artificial; identical to SEQ ID NO: 183395
  Synthetic oligonucleotide

SEQ ID NO: 629193 - DNA, 55 bp, Artificial; identical to SEQ ID NO: 183397
  Synthetic oligonucleotide

SEQ ID NO: 629194 - DNA, 60 bp, Artificial; identical to SEQ ID NO: 242115
  Synthetic oligonucleotide

SEQ ID NO: 629195 - DNA, 55 bp, Artificial; identical to SEQ ID NO: 215552
  Synthetic oligonucleotide

SEQ ID NO: 629196 - DNA, 55 bp, Artificial; identical to SEQ ID NO: 255094
  Synthetic oligonucleotide

SEQ ID NO: 629197 - DNA, 51 bp, Artificial; identical to SEQ ID NO: 223797
  Synthetic oligonucleotide

SEQ ID NO: 629198 - DNA, 55 bp, Artificial; identical to SEQ ID NO: 159483
  Synthetic oligonucleotide

SEQ ID NO: 629199 - DNA, 55 bp, Artificial; identical to SEQ ID NO: 183399
  Synthetic oligonucleotide

SEQ ID NO: 629200 - DNA, 55 bp, Artificial; identical to SEQ ID NO: 169315
  Synthetic oligonucleotide

SEQ ID NO: 629201 - DNA, 55 bp, Artificial; identical to SEQ ID NO: 202308
  Synthetic oligonucleotide

SEQ ID NO: 629202 - DNA, 56 bp, Artificial; identical to SEQ ID NO: 207499
  Synthetic oligonucleotide

SEQ ID NO: 629203 - DNA, 52 bp, Artificial; identical to SEQ ID NO: 253328
  Synthetic oligonucleotide

SEQ ID NO: 629204 - DNA, 58 bp, Artificial; identical to SEQ ID NO: 213158
  Synthetic oligonucleotide

SEQ ID NO: 629205 - DNA, 55 bp, Artificial; identical to SEQ ID NO: 245284
  Synthetic oligonucleotide

SEQ ID NO: 629206 - DNA, 60 bp, Artificial; identical to SEQ ID NO: 152959
  Synthetic oligonucleotide

SEQ ID NO: 629207 - DNA, 55 bp, Artificial; identical to SEQ ID NO: 183378
  Synthetic oligonucleotide

SEQ ID NO: 629208 - DNA, 55 bp, Artificial; identical to SEQ ID NO: 166346
  Synthetic oligonucleotide

SEQ ID NO: 629209 - DNA, 55 bp, Artificial; identical to SEQ ID NO: 249980
  Synthetic oligonucleotide

SEQ ID NO: 629210 - DNA, 58 bp, Artificial; identical to SEQ ID NO: 199759
  Synthetic oligonucleotide

SEQ ID NO: 629211 - DNA, 51 bp, Artificial; identical to SEQ ID NO: 152960
  Synthetic oligonucleotide

SEQ ID NO: 629212 - DNA, 51 bp, Artificial; identical to SEQ ID NO: 145074
  Synthetic oligonucleotide

SEQ ID NO: 629213 - DNA, 60 bp, Artificial; identical to SEQ ID NO: 224295
  Synthetic oligonucleotide

SEQ ID NO: 629214 - DNA, 55 bp, Artificial; identical to SEQ ID NO: 183374
  Synthetic oligonucleotide

SEQ ID NO: 629215 - DNA, 55 bp, Artificial; identical to SEQ ID NO: 233699
  Synthetic oligonucleotide

SEQ ID NO: 629216 - DNA, 54 bp, Artificial; identical to SEQ ID NO: 249979
  Synthetic oligonucleotide

SEQ ID NO: 629217 - DNA, 55 bp, Artificial; identical to SEQ ID NO: 166350
  Synthetic oligonucleotide

SEQ ID NO: 629218 - DNA, 55 bp, Artificial; identical to SEQ ID NO: 154189
  Synthetic oligonucleotide

SEQ ID NO: 629219 - DNA, 55 bp, Artificial; identical to SEQ ID NO: 187968
  Synthetic oligonucleotide

SEQ ID NO: 629220 - DNA, 60 bp, Artificial; identical to SEQ ID NO: 199748
  Synthetic oligonucleotide

SEQ ID NO: 629221 - DNA, 55 bp, Artificial; identical to SEQ ID NO: 148957
  Synthetic oligonucleotide

SEQ ID NO: 629222 - DNA, 55 bp, Artificial; identical to SEQ ID NO: 218154
  Synthetic oligonucleotide

SEQ ID NO: 629223 - DNA, 55 bp, Artificial; identical to SEQ ID NO: 249555
  Synthetic oligonucleotide

SEQ ID NO: 629224 - DNA, 53 bp, Artificial; identical to SEQ ID NO: 157382
  Synthetic oligonucleotide

SEQ ID NO: 629225 - DNA, 60 bp, Artificial; identical to SEQ ID NO: 152961
  Synthetic oligonucleotide

SEQ ID NO: 629226 - DNA, 60 bp, Artificial; identical to SEQ ID NO: 185282
  Synthetic oligonucleotide

SEQ ID NO: 629227 - DNA, 55 bp, Artificial; identical to SEQ ID NO: 245280
  Synthetic oligonucleotide

SEQ ID NO: 629228 - DNA, 55 bp, Artificial; identical to SEQ ID NO: 183367
  Synthetic oligonucleotide

SEQ ID NO: 629229 - DNA, 55 bp, Artificial; identical to SEQ ID NO: 148955
  Synthetic oligonucleotide

SEQ ID NO: 629230 - DNA, 54 bp, Artificial; identical to SEQ ID NO: 207462
  Synthetic oligonucleotide

SEQ ID NO: 629231 - DNA, 55 bp, Artificial; identical to SEQ ID NO: 148953
  Synthetic oligonucleotide

SEQ ID NO: 629232 - DNA, 56 bp, Artificial; identical to SEQ ID NO: 257708
  Synthetic oligonucleotide

SEQ ID NO: 629233 - DNA, 55 bp, Artificial; identical to SEQ ID NO: 252858
  Synthetic oligonucleotide

SEQ ID NO: 629234 - DNA, 55 bp, Artificial; identical to SEQ ID NO: 183364
  Synthetic oligonucleotide

SEQ ID NO: 629235 - DNA, 55 bp, Artificial; identical to SEQ ID NO: 148951
  Synthetic oligonucleotide

SEQ ID NO: 629236 - DNA, 55 bp, Artificial; identical to SEQ ID NO: 148950
  Synthetic oligonucleotide

SEQ ID NO: 629237 - DNA, 57 bp, Artificial; identical to SEQ ID NO: 254333
  Synthetic oligonucleotide

SEQ ID NO: 629238 - DNA, 55 bp, Artificial; identical to SEQ ID NO: 194850
  Synthetic oligonucleotide

SEQ ID NO: 629239 - DNA, 55 bp, Artificial; identical to SEQ ID NO: 159484
  Synthetic oligonucleotide

SEQ ID NO: 629240 - DNA, 55 bp, Artificial; identical to SEQ ID NO: 171792
  Synthetic oligonucleotide

SEQ ID NO: 629241 - DNA, 55 bp, Artificial; identical to SEQ ID NO: 255091
  Synthetic oligonucleotide

SEQ ID NO: 629242 - DNA, 60 bp, Artificial; identical to SEQ ID NO: 199737
  Synthetic oligonucleotide

SEQ ID NO: 629243 - DNA, 55 bp, Artificial; identical to SEQ ID NO: 187971
  Synthetic oligonucleotide

SEQ ID NO: 629244 - DNA, 55 bp, Artificial; identical to SEQ ID NO: 248663
  Synthetic oligonucleotide

SEQ ID NO: 629245 - DNA, 55 bp, Artificial; identical to SEQ ID NO: 255090
  Synthetic oligonucleotide

SEQ ID NO: 629246 - DNA, 55 bp, Artificial; identical to SEQ ID NO: 159485
  Synthetic oligonucleotide

SEQ ID NO: 629247 - DNA, 55 bp, Artificial; identical to SEQ ID NO: 183423
  Synthetic oligonucleotide

SEQ ID NO: 629248 - DNA, 55 bp, Artificial; identical to SEQ ID NO: 266142
  Synthetic oligonucleotide

SEQ ID NO: 629249 - DNA, 57 bp, Artificial; identical to SEQ ID NO: 141961
  Synthetic oligonucleotide

SEQ ID NO: 629250 - DNA, 54 bp, Artificial; identical to SEQ ID NO: 197421
  Synthetic oligonucleotide

SEQ ID NO: 629251 - DNA, 59 bp, Artificial; identical to SEQ ID NO: 247395
  Synthetic oligonucleotide

SEQ ID NO: 629252 - DNA, 55 bp, Artificial; identical to SEQ ID NO: 218153
  Synthetic oligonucleotide

SEQ ID NO: 629253 - DNA, 55 bp, Artificial; identical to SEQ ID NO: 202306
  Synthetic oligonucleotide

SEQ ID NO: 629254 - DNA, 51 bp, Artificial; identical to SEQ ID NO: 146470
  Synthetic oligonucleotide

SEQ ID NO: 629255 - DNA, 58 bp, Artificial; identical to SEQ ID NO: 256556
  Synthetic oligonucleotide

SEQ ID NO: 629256 - DNA, 55 bp, Artificial; identical to SEQ ID NO: 201338
  Synthetic oligonucleotide

SEQ ID NO: 629257 - DNA, 54 bp, Artificial; identical to SEQ ID NO: 189086
  Synthetic oligonucleotide

SEQ ID NO: 629258 - DNA, 59 bp, Artificial; identical to SEQ ID NO: 265893
  Synthetic oligonucleotide

SEQ ID NO: 629259 - DNA, 55 bp, Artificial; identical to SEQ ID NO: 207465
  Synthetic oligonucleotide

SEQ ID NO: 629260 - DNA, 60 bp, Artificial; identical to SEQ ID NO: 186915
  Synthetic oligonucleotide

SEQ ID NO: 629261 - DNA, 55 bp, Artificial; identical to SEQ ID NO: 198999
  Synthetic oligonucleotide

SEQ ID NO: 629262 - DNA, 55 bp, Artificial; identical to SEQ ID NO: 221357
  Synthetic oligonucleotide

SEQ ID NO: 629263 - DNA, 55 bp, Artificial; identical to SEQ ID NO: 248666
  Synthetic oligonucleotide

SEQ ID NO: 629264 - DNA, 56 bp, Artificial; identical to SEQ ID NO: 201984
  Synthetic oligonucleotide

SEQ ID NO: 629265 - DNA, 55 bp, Artificial; identical to SEQ ID NO: 198998
  Synthetic oligonucleotide

SEQ ID NO: 629266 - DNA, 60 bp, Artificial; identical to SEQ ID NO: 224233
  Synthetic oligonucleotide

SEQ ID NO: 629267 - DNA, 52 bp, Artificial; identical to SEQ ID NO: 199890
  Synthetic oligonucleotide

SEQ ID NO: 629268 - DNA, 55 bp, Artificial; identical to SEQ ID NO: 221358
  Synthetic oligonucleotide

SEQ ID NO: 629269 - DNA, 55 bp, Artificial; identical to SEQ ID NO: 162228
  Synthetic oligonucleotide

SEQ ID NO: 629270 - DNA, 60 bp, Artificial; identical to SEQ ID NO: 199726
  Synthetic oligonucleotide

SEQ ID NO: 629271 - DNA, 55 bp, Artificial; identical to SEQ ID NO: 257660
  Synthetic oligonucleotide

SEQ ID NO: 629272 - DNA, 55 bp, Artificial; identical to SEQ ID NO: 187973
  Synthetic oligonucleotide

SEQ ID NO: 629273 - DNA, 55 bp, Artificial; identical to SEQ ID NO: 234147
  Synthetic oligonucleotide

SEQ ID NO: 629274 - DNA, 53 bp, Artificial; identical to SEQ ID NO: 195022
  Synthetic oligonucleotide

SEQ ID NO: 629275 - DNA, 60 bp, Artificial; identical to SEQ ID NO: 199714
  Synthetic oligonucleotide

SEQ ID NO: 629276 - DNA, 55 bp, Artificial; identical to SEQ ID NO: 168235
  Synthetic oligonucleotide

SEQ ID NO: 629277 - DNA, 60 bp, Artificial; identical to SEQ ID NO: 205231
  Synthetic oligonucleotide

SEQ ID NO: 629278 - DNA, 55 bp, Artificial; identical to SEQ ID NO: 159492
  Synthetic oligonucleotide

SEQ ID NO: 629279 - DNA, 55 bp, Artificial; identical to SEQ ID NO: 144734
  Synthetic oligonucleotide

SEQ ID NO: 629280 - DNA, 55 bp, Artificial; identical to SEQ ID NO: 224437
  Synthetic oligonucleotide

SEQ ID NO: 629281 - DNA, 60 bp, Artificial; identical to SEQ ID NO: 207544
  Synthetic oligonucleotide

SEQ ID NO: 629282 - DNA, 51 bp, Artificial; identical to SEQ ID NO: 234545
  Synthetic oligonucleotide

SEQ ID NO: 629283 - DNA, 55 bp, Artificial; identical to SEQ ID NO: 242660
  Synthetic oligonucleotide

SEQ ID NO: 629284 - DNA, 53 bp, Artificial; identical to SEQ ID NO: 265832
  Synthetic oligonucleotide

SEQ ID NO: 629285 - DNA, 55 bp, Artificial; identical to SEQ ID NO: 183403
  Synthetic oligonucleotide

SEQ ID NO: 629286 - DNA, 59 bp, Artificial; identical to SEQ ID NO: 141549
  Synthetic oligonucleotide

SEQ ID NO: 629287 - DNA, 60 bp, Artificial; identical to SEQ ID NO: 167680
  Synthetic oligonucleotide

SEQ ID NO: 629288 - DNA, 55 bp, Artificial; identical to SEQ ID NO: 240029
  Synthetic oligonucleotide

SEQ ID NO: 629289 - DNA, 55 bp, Artificial; identical to SEQ ID NO: 257655
  Synthetic oligonucleotide

SEQ ID NO: 629290 - DNA, 55 bp, Artificial; identical to SEQ ID NO: 166351
  Synthetic oligonucleotide

SEQ ID NO: 629291 - DNA, 51 bp, Artificial; identical to SEQ ID NO: 192136
  Synthetic oligonucleotide

SEQ ID NO: 629292 - DNA, 55 bp, Artificial; identical to SEQ ID NO: 149087
  Synthetic oligonucleotide

SEQ ID NO: 629293 - DNA, 55 bp, Artificial; identical to SEQ ID NO: 183596
  Synthetic oligonucleotide

SEQ ID NO: 629294 - DNA, 55 bp, Artificial; identical to SEQ ID NO: 191098
  Synthetic oligonucleotide

SEQ ID NO: 629295 - DNA, 55 bp, Artificial; identical to SEQ ID NO: 208405
  Synthetic oligonucleotide

SEQ ID NO: 629296 - DNA, 55 bp, Artificial; identical to SEQ ID NO: 144478
  Synthetic oligonucleotide

SEQ ID NO: 629297 - DNA, 55 bp, Artificial; identical to SEQ ID NO: 166316
  Synthetic oligonucleotide

SEQ ID NO: 629298 - DNA, 55 bp, Artificial; identical to SEQ ID NO: 245275
  Synthetic oligonucleotide

SEQ ID NO: 629299 - DNA, 58 bp, Artificial; identical to SEQ ID NO: 150004
  Synthetic oligonucleotide

SEQ ID NO: 629300 - DNA, 55 bp, Artificial; identical to SEQ ID NO: 149089
  Synthetic oligonucleotide

SEQ ID NO: 629301 - DNA, 55 bp, Artificial; identical to SEQ ID NO: 217756
  Synthetic oligonucleotide

SEQ ID NO: 629302 - DNA, 51 bp, Artificial; identical to SEQ ID NO: 248029
  Synthetic oligonucleotide

SEQ ID NO: 629303 - DNA, 55 bp, Artificial; identical to SEQ ID NO: 166319
  Synthetic oligonucleotide

SEQ ID NO: 629304 - DNA, 53 bp, Artificial; identical to SEQ ID NO: 159850
  Synthetic oligonucleotide

SEQ ID NO: 629305 - DNA, 55 bp, Artificial; identical to SEQ ID NO: 255124
  Synthetic oligonucleotide

SEQ ID NO: 629306 - DNA, 50 bp, Artificial; identical to SEQ ID NO: 255874
  Synthetic oligonucleotide

SEQ ID NO: 629307 - DNA, 53 bp, Artificial; identical to SEQ ID NO: 221717
  Synthetic oligonucleotide

SEQ ID NO: 629308 - DNA, 57 bp, Artificial; identical to SEQ ID NO: 186848
  Synthetic oligonucleotide

SEQ ID NO: 629309 - DNA, 55 bp, Artificial; identical to SEQ ID NO: 242661
  Synthetic oligonucleotide

SEQ ID NO: 629310 - DNA, 55 bp, Artificial; identical to SEQ ID NO: 144087
  Synthetic oligonucleotide

SEQ ID NO: 629311 - DNA, 55 bp, Artificial; identical to SEQ ID NO: 238121
  Synthetic oligonucleotide

SEQ ID NO: 629312 - DNA, 55 bp, Artificial; identical to SEQ ID NO: 183605
  Synthetic oligonucleotide

SEQ ID NO: 629313 - DNA, 53 bp, Artificial; identical to SEQ ID NO: 265833
  Synthetic oligonucleotide

SEQ ID NO: 629314 - DNA, 60 bp, Artificial; identical to SEQ ID NO: 256353
  Synthetic oligonucleotide

SEQ ID NO: 629315 - DNA, 55 bp, Artificial; identical to SEQ ID NO: 183606
  Synthetic oligonucleotide

SEQ ID NO: 629316 - DNA, 55 bp, Artificial; identical to SEQ ID NO: 217758
  Synthetic oligonucleotide

SEQ ID NO: 629317 - DNA, 55 bp, Artificial; identical to SEQ ID NO: 238122
  Synthetic oligonucleotide

SEQ ID NO: 629318 - DNA, 56 bp, Artificial; identical to SEQ ID NO: 210736
  Synthetic oligonucleotide

SEQ ID NO: 629319 - DNA, 55 bp, Artificial; identical to SEQ ID NO: 234146
  Synthetic oligonucleotide

SEQ ID NO: 629320 - DNA, 60 bp, Artificial; identical to SEQ ID NO: 149982
  Synthetic oligonucleotide

SEQ ID NO: 629321 - DNA, 55 bp, Artificial; identical to SEQ ID NO: 160885
  Synthetic oligonucleotide

SEQ ID NO: 629322 - DNA, 55 bp, Artificial; identical to SEQ ID NO: 169337
  Synthetic oligonucleotide

SEQ ID NO: 629323 - DNA, 55 bp, Artificial; identical to SEQ ID NO: 168238
  Synthetic oligonucleotide

SEQ ID NO: 629324 - DNA, 55 bp, Artificial; identical to SEQ ID NO: 183609
  Synthetic oligonucleotide

SEQ ID NO: 629325 - DNA, 55 bp, Artificial; identical to SEQ ID NO: 188930
  Synthetic oligonucleotide

SEQ ID NO: 629326 - DNA, 51 bp, Artificial; identical to SEQ ID NO: 141355
  Synthetic oligonucleotide

SEQ ID NO: 629327 - DNA, 55 bp, Artificial; identical to SEQ ID NO: 221112
  Synthetic oligonucleotide

SEQ ID NO: 629328 - DNA, 55 bp, Artificial; identical to SEQ ID NO: 209415
  Synthetic oligonucleotide

SEQ ID NO: 629329 - DNA, 55 bp, Artificial; identical to SEQ ID NO: 142304
  Synthetic oligonucleotide

SEQ ID NO: 629330 - DNA, 55 bp, Artificial; identical to SEQ ID NO: 183610
  Synthetic oligonucleotide

SEQ ID NO: 629331 - DNA, 60 bp, Artificial; identical to SEQ ID NO: 242518
  Synthetic oligonucleotide

SEQ ID NO: 629332 - DNA, 60 bp, Artificial; identical to SEQ ID NO: 242113
  Synthetic oligonucleotide

SEQ ID NO: 629333 - DNA, 55 bp, Artificial; identical to SEQ ID NO: 149098
  Synthetic oligonucleotide

SEQ ID NO: 629334 - DNA, 55 bp, Artificial; identical to SEQ ID NO: 240031
  Synthetic oligonucleotide

SEQ ID NO: 629335 - DNA, 55 bp, Artificial; identical to SEQ ID NO: 242662
  Synthetic oligonucleotide

SEQ ID NO: 629336 - DNA, 55 bp, Artificial; identical to SEQ ID NO: 262774
  Synthetic oligonucleotide

SEQ ID NO: 629337 - DNA, 59 bp, Artificial; identical to SEQ ID NO: 233942
  Synthetic oligonucleotide

SEQ ID NO: 629338 - DNA, 55 bp, Artificial; identical to SEQ ID NO: 242664
  Synthetic oligonucleotide

SEQ ID NO: 629339 - DNA, 55 bp, Artificial; identical to SEQ ID NO: 207467
  Synthetic oligonucleotide

SEQ ID NO: 629340 - DNA, 55 bp, Artificial; identical to SEQ ID NO: 194856
  Synthetic oligonucleotide

SEQ ID NO: 629341 - DNA, 55 bp, Artificial; identical to SEQ ID NO: 194857
  Synthetic oligonucleotide

SEQ ID NO: 629342 - DNA, 55 bp, Artificial; identical to SEQ ID NO: 245272
  Synthetic oligonucleotide

SEQ ID NO: 629343 - DNA, 55 bp, Artificial; identical to SEQ ID NO: 159495
  Synthetic oligonucleotide

SEQ ID NO: 629344 - DNA, 55 bp, Artificial; identical to SEQ ID NO: 202893
  Synthetic oligonucleotide

SEQ ID NO: 629345 - DNA, 58 bp, Artificial; identical to SEQ ID NO: 167691
  Synthetic oligonucleotide

SEQ ID NO: 629346 - DNA, 55 bp, Artificial; identical to SEQ ID NO: 167495
  Synthetic oligonucleotide

SEQ ID NO: 629347 - DNA, 55 bp, Artificial; identical to SEQ ID NO: 152963
  Synthetic oligonucleotide

SEQ ID NO: 629348 - DNA, 55 bp, Artificial; identical to SEQ ID NO: 155087
  Synthetic oligonucleotide

SEQ ID NO: 629349 - DNA, 55 bp, Artificial; identical to SEQ ID NO: 245326
  Synthetic oligonucleotide

SEQ ID NO: 629350 - DNA, 51 bp, Artificial; identical to SEQ ID NO: 247034
  Synthetic oligonucleotide

SEQ ID NO: 629351 - DNA, 53 bp, Artificial; identical to SEQ ID NO: 255383
  Synthetic oligonucleotide

SEQ ID NO: 629352 - DNA, 55 bp, Artificial; identical to SEQ ID NO: 255119
  Synthetic oligonucleotide

SEQ ID NO: 629353 - DNA, 50 bp, Artificial; identical to SEQ ID NO: 165688
  Synthetic oligonucleotide

SEQ ID NO: 629354 - DNA, 55 bp, Artificial; identical to SEQ ID NO: 146357
  Synthetic oligonucleotide

SEQ ID NO: 629355 - DNA, 51 bp, Artificial; identical to SEQ ID NO: 186562
  Synthetic oligonucleotide

SEQ ID NO: 629356 - DNA, 55 bp, Artificial; identical to SEQ ID NO: 198996
  Synthetic oligonucleotide

SEQ ID NO: 629357 - DNA, 56 bp, Artificial; identical to SEQ ID NO: 150393
  Synthetic oligonucleotide

SEQ ID NO: 629358 - DNA, 55 bp, Artificial; identical to SEQ ID NO: 211008
  Synthetic oligonucleotide

SEQ ID NO: 629359 - DNA, 55 bp, Artificial; identical to SEQ ID NO: 159543
  Synthetic oligonucleotide

SEQ ID NO: 629360 - DNA, 54 bp, Artificial; identical to SEQ ID NO: 147213
  Synthetic oligonucleotide

SEQ ID NO: 629361 - DNA, 55 bp, Artificial; identical to SEQ ID NO: 202484
  Synthetic oligonucleotide

SEQ ID NO: 629362 - DNA, 55 bp, Artificial; identical to SEQ ID NO: 194858
  Synthetic oligonucleotide

SEQ ID NO: 629363 - DNA, 55 bp, Artificial; identical to SEQ ID NO: 183581
  Synthetic oligonucleotide

SEQ ID NO: 629364 - DNA, 55 bp, Artificial; identical to SEQ ID NO: 149084
  Synthetic oligonucleotide

SEQ ID NO: 629365 - DNA, 53 bp, Artificial; identical to SEQ ID NO: 185764
  Synthetic oligonucleotide

SEQ ID NO: 629366 - DNA, 56 bp, Artificial; identical to SEQ ID NO: 170554
  Synthetic oligonucleotide

SEQ ID NO: 629367 - DNA, 55 bp, Artificial; identical to SEQ ID NO: 234149
  Synthetic oligonucleotide

SEQ ID NO: 629368 - DNA, 55 bp, Artificial; identical to SEQ ID NO: 159546
  Synthetic oligonucleotide

SEQ ID NO: 629369 - DNA, 55 bp, Artificial; identical to SEQ ID NO: 159547
  Synthetic oligonucleotide

SEQ ID NO: 629370 - DNA, 54 bp, Artificial; identical to SEQ ID NO: 187345
  Synthetic oligonucleotide

SEQ ID NO: 629371 - DNA, 51 bp, Artificial; identical to SEQ ID NO: 188516
  Synthetic oligonucleotide

SEQ ID NO: 629372 - DNA, 55 bp, Artificial; identical to SEQ ID NO: 171336
  Synthetic oligonucleotide

SEQ ID NO: 629373 - DNA, 55 bp, Artificial; identical to SEQ ID NO: 248671
  Synthetic oligonucleotide

SEQ ID NO: 629374 - DNA, 50 bp, Artificial; identical to SEQ ID NO: 241190
  Synthetic oligonucleotide

SEQ ID NO: 629375 - DNA, 60 bp, Artificial; identical to SEQ ID NO: 213169
  Synthetic oligonucleotide

SEQ ID NO: 629376 - DNA, 60 bp, Artificial; identical to SEQ ID NO: 199703
  Synthetic oligonucleotide

SEQ ID NO: 629377 - DNA, 55 bp, Artificial; identical to SEQ ID NO: 167496
  Synthetic oligonucleotide

SEQ ID NO: 629378 - DNA, 51 bp, Artificial; identical to SEQ ID NO: 187076
  Synthetic oligonucleotide

SEQ ID NO: 629379 - DNA, 54 bp, Artificial; identical to SEQ ID NO: 202966
  Synthetic oligonucleotide

SEQ ID NO: 629380 - DNA, 55 bp, Artificial; identical to SEQ ID NO: 142348
  Synthetic oligonucleotide

SEQ ID NO: 629381 - DNA, 55 bp, Artificial; identical to SEQ ID NO: 208406
  Synthetic oligonucleotide

SEQ ID NO: 629382 - DNA, 60 bp, Artificial; identical to SEQ ID NO: 186804
  Synthetic oligonucleotide

SEQ ID NO: 629383 - DNA, 55 bp, Artificial; identical to SEQ ID NO: 183634
  Synthetic oligonucleotide

SEQ ID NO: 629384 - DNA, 55 bp, Artificial; identical to SEQ ID NO: 151282
  Synthetic oligonucleotide

SEQ ID NO: 629385 - DNA, 60 bp, Artificial; identical to SEQ ID NO: 167233
  Synthetic oligonucleotide

SEQ ID NO: 629386 - DNA, 60 bp, Artificial; identical to SEQ ID NO: 186793
  Synthetic oligonucleotide

SEQ ID NO: 629387 - DNA, 54 bp, Artificial; identical to SEQ ID NO: 189992
  Synthetic oligonucleotide

SEQ ID NO: 629388 - DNA, 60 bp, Artificial; identical to SEQ ID NO: 150371
  Synthetic oligonucleotide

SEQ ID NO: 629389 - DNA, 55 bp, Artificial; identical to SEQ ID NO: 205403
  Synthetic oligonucleotide

SEQ ID NO: 629390 - DNA, 55 bp, Artificial; identical to SEQ ID NO: 154980
  Synthetic oligonucleotide

SEQ ID NO: 629391 - DNA, 55 bp, Artificial; identical to SEQ ID NO: 194860
  Synthetic oligonucleotide

SEQ ID NO: 629392 - DNA, 55 bp, Artificial; identical to SEQ ID NO: 149107
  Synthetic oligonucleotide

SEQ ID NO: 629393 - DNA, 55 bp, Artificial; identical to SEQ ID NO: 245323
  Synthetic oligonucleotide

SEQ ID NO: 629394 - DNA, 51 bp, Artificial; identical to SEQ ID NO: 174951
  Synthetic oligonucleotide

SEQ ID NO: 629395 - DNA, 54 bp, Artificial; identical to SEQ ID NO: 201670
  Synthetic oligonucleotide

SEQ ID NO: 629396 - DNA, 54 bp, Artificial; identical to SEQ ID NO: 249647
  Synthetic oligonucleotide

SEQ ID NO: 629397 - DNA, 55 bp, Artificial; identical to SEQ ID NO: 217759
  Synthetic oligonucleotide

SEQ ID NO: 629398 - DNA, 54 bp, Artificial; identical to SEQ ID NO: 263521
  Synthetic oligonucleotide

SEQ ID NO: 629399 - DNA, 52 bp, Artificial; identical to SEQ ID NO: 154538
  Synthetic oligonucleotide

SEQ ID NO: 629400 - DNA, 55 bp, Artificial; identical to SEQ ID NO: 260247
  Synthetic oligonucleotide

SEQ ID NO: 629401 - DNA, 54 bp, Artificial; identical to SEQ ID NO: 245322
  Synthetic oligonucleotide

SEQ ID NO: 629402 - DNA, 56 bp, Artificial; identical to SEQ ID NO: 257697
  Synthetic oligonucleotide

SEQ ID NO: 629403 - DNA, 55 bp, Artificial; identical to SEQ ID NO: 205404
  Synthetic oligonucleotide

SEQ ID NO: 629404 - DNA, 55 bp, Artificial; identical to SEQ ID NO: 252859
  Synthetic oligonucleotide

SEQ ID NO: 629405 - DNA, 56 bp, Artificial; identical to SEQ ID NO: 186748
  Synthetic oligonucleotide

SEQ ID NO: 629406 - DNA, 55 bp, Artificial; identical to SEQ ID NO: 173689
  Synthetic oligonucleotide

SEQ ID NO: 629407 - DNA, 55 bp, Artificial; identical to SEQ ID NO: 159550
  Synthetic oligonucleotide

SEQ ID NO: 629408 - DNA, 51 bp, Artificial; identical to SEQ ID NO: 183641
  Synthetic oligonucleotide

SEQ ID NO: 629409 - DNA, 46 bp, Artificial; identical to SEQ ID NO: 246568
  Synthetic oligonucleotide

SEQ ID NO: 629410 - DNA, 53 bp, Artificial; identical to SEQ ID NO: 199787
  Synthetic oligonucleotide

SEQ ID NO: 629411 - DNA, 55 bp, Artificial; identical to SEQ ID NO: 261945
  Synthetic oligonucleotide

SEQ ID NO: 629412 - DNA, 55 bp, Artificial; identical to SEQ ID NO: 257615
  Synthetic oligonucleotide

SEQ ID NO: 629413 - DNA, 55 bp, Artificial; identical to SEQ ID NO: 255115
  Synthetic oligonucleotide

SEQ ID NO: 629414 - DNA, 56 bp, Artificial; identical to SEQ ID NO: 186726
  Synthetic oligonucleotide

SEQ ID NO: 629415 - DNA, 59 bp, Artificial; identical to SEQ ID NO: 187839
  Synthetic oligonucleotide

SEQ ID NO: 629416 - DNA, 52 bp, Artificial; identical to SEQ ID NO: 211012
  Synthetic oligonucleotide

SEQ ID NO: 629417 - DNA, 55 bp, Artificial; identical to SEQ ID NO: 255113
  Synthetic oligonucleotide

SEQ ID NO: 629418 - DNA, 52 bp, Artificial; identical to SEQ ID NO: 161887
  Synthetic oligonucleotide

SEQ ID NO: 629419 - DNA, 55 bp, Artificial; identical to SEQ ID NO: 205413
  Synthetic oligonucleotide

SEQ ID NO: 629420 - DNA, 55 bp, Artificial; identical to SEQ ID NO: 262767
  Synthetic oligonucleotide

SEQ ID NO: 629421 - DNA, 55 bp, Artificial; identical to SEQ ID NO: 171337
  Synthetic oligonucleotide

SEQ ID NO: 629422 - DNA, 55 bp, Artificial; identical to SEQ ID NO: 242666
  Synthetic oligonucleotide

SEQ ID NO: 629423 - DNA, 54 bp, Artificial; identical to SEQ ID NO: 252860
  Synthetic oligonucleotide

SEQ ID NO: 629424 - DNA, 55 bp, Artificial; identical to SEQ ID NO: 212604
  Synthetic oligonucleotide

SEQ ID NO: 629425 - DNA, 55 bp, Artificial; identical to SEQ ID NO: 159557
  Synthetic oligonucleotide

SEQ ID NO: 629426 - DNA, 55 bp, Artificial; identical to SEQ ID NO: 167021
  Synthetic oligonucleotide

SEQ ID NO: 629427 - DNA, 55 bp, Artificial; identical to SEQ ID NO: 161755
  Synthetic oligonucleotide

SEQ ID NO: 629428 - DNA, 55 bp, Artificial; identical to SEQ ID NO: 149102
  Synthetic oligonucleotide

SEQ ID NO: 629429 - DNA, 51 bp, Artificial; identical to SEQ ID NO: 213048
  Synthetic oligonucleotide

SEQ ID NO: 629430 - DNA, 55 bp, Artificial; identical to SEQ ID NO: 245318
  Synthetic oligonucleotide

SEQ ID NO: 629431 - DNA, 55 bp, Artificial; identical to SEQ ID NO: 245316
  Synthetic oligonucleotide

SEQ ID NO: 629432 - DNA, 55 bp, Artificial; identical to SEQ ID NO: 159560
  Synthetic oligonucleotide

SEQ ID NO: 629433 - DNA, 55 bp, Artificial; identical to SEQ ID NO: 151874
  Synthetic oligonucleotide

SEQ ID NO: 629434 - DNA, 55 bp, Artificial; identical to SEQ ID NO: 142744
  Synthetic oligonucleotide

SEQ ID NO: 629435 - DNA, 55 bp, Artificial; identical to SEQ ID NO: 208409
  Synthetic oligonucleotide

SEQ ID NO: 629436 - DNA, 55 bp, Artificial; identical to SEQ ID NO: 187979
  Synthetic oligonucleotide

SEQ ID NO: 629437 - DNA, 60 bp, Artificial; identical to SEQ ID NO: 150305
  Synthetic oligonucleotide

SEQ ID NO: 629438 - DNA, 55 bp, Artificial; identical to SEQ ID NO: 212624
  Synthetic oligonucleotide

SEQ ID NO: 629439 - DNA, 50 bp, Artificial; identical to SEQ ID NO: 154956
  Synthetic oligonucleotide

SEQ ID NO: 629440 - DNA, 54 bp, Artificial; identical to SEQ ID NO: 167497
  Synthetic oligonucleotide

SEQ ID NO: 629441 - DNA, 55 bp, Artificial; identical to SEQ ID NO: 207671
  Synthetic oligonucleotide

SEQ ID NO: 629442 - DNA, 54 bp, Artificial; identical to SEQ ID NO: 174819
  Synthetic oligonucleotide

SEQ ID NO: 629443 - DNA, 55 bp, Artificial; identical to SEQ ID NO: 149052
  Synthetic oligonucleotide

SEQ ID NO: 629444 - DNA, 55 bp, Artificial; identical to SEQ ID NO: 205414
  Synthetic oligonucleotide

SEQ ID NO: 629445 - DNA, 55 bp, Artificial; identical to SEQ ID NO: 149050
  Synthetic oligonucleotide

SEQ ID NO: 629446 - DNA, 56 bp, Artificial; identical to SEQ ID NO: 213191
  Synthetic oligonucleotide

SEQ ID NO: 629447 - DNA, 55 bp, Artificial; identical to SEQ ID NO: 151416
  Synthetic oligonucleotide

SEQ ID NO: 629448 - DNA, 55 bp, Artificial; identical to SEQ ID NO: 202302
  Synthetic oligonucleotide

SEQ ID NO: 629449 - DNA, 55 bp, Artificial; identical to SEQ ID NO: 159561
  Synthetic oligonucleotide

SEQ ID NO: 629450 - DNA, 55 bp, Artificial; identical to SEQ ID NO: 224431
  Synthetic oligonucleotide

SEQ ID NO: 629451 - DNA, 55 bp, Artificial; identical to SEQ ID NO: 196981
  Synthetic oligonucleotide

SEQ ID NO: 629452 - DNA, 55 bp, Artificial; identical to SEQ ID NO: 257613
  Synthetic oligonucleotide

SEQ ID NO: 629453 - DNA, 55 bp, Artificial; identical to SEQ ID NO: 234122
  Synthetic oligonucleotide

SEQ ID NO: 629454 - DNA, 55 bp, Artificial; identical to SEQ ID NO: 240038
  Synthetic oligonucleotide

SEQ ID NO: 629455 - DNA, 55 bp, Artificial; identical to SEQ ID NO: 153122
  Synthetic oligonucleotide

SEQ ID NO: 629456 - DNA, 55 bp, Artificial; identical to SEQ ID NO: 166271
  Synthetic oligonucleotide

SEQ ID NO: 629457 - DNA, 55 bp, Artificial; identical to SEQ ID NO: 159519
  Synthetic oligonucleotide

SEQ ID NO: 629458 - DNA, 55 bp, Artificial; identical to SEQ ID NO: 189999
  Synthetic oligonucleotide

SEQ ID NO: 629459 - DNA, 55 bp, Artificial; identical to SEQ ID NO: 183619
  Synthetic oligonucleotide

SEQ ID NO: 629460 - DNA, 55 bp, Artificial; identical to SEQ ID NO: 149046
  Synthetic oligonucleotide

SEQ ID NO: 629461 - DNA, 55 bp, Artificial; identical to SEQ ID NO: 159522
  Synthetic oligonucleotide

SEQ ID NO: 629462 - DNA, 59 bp, Artificial; identical to SEQ ID NO: 155866
  Synthetic oligonucleotide

SEQ ID NO: 629463 - DNA, 55 bp, Artificial; identical to SEQ ID NO: 234128
  Synthetic oligonucleotide

SEQ ID NO: 629464 - DNA, 54 bp, Artificial; identical to SEQ ID NO: 159525
  Synthetic oligonucleotide

SEQ ID NO: 629465 - DNA, 52 bp, Artificial; identical to SEQ ID NO: 203929
  Synthetic oligonucleotide

SEQ ID NO: 629466 - DNA, 53 bp, Artificial; identical to SEQ ID NO: 243191
  Synthetic oligonucleotide

SEQ ID NO: 629467 - DNA, 55 bp, Artificial; identical to SEQ ID NO: 221325
  Synthetic oligonucleotide

SEQ ID NO: 629468 - DNA, 55 bp, Artificial; identical to SEQ ID NO: 159526
  Synthetic oligonucleotide

SEQ ID NO: 629469 - DNA, 55 bp, Artificial; identical to SEQ ID NO: 261875
  Synthetic oligonucleotide

SEQ ID NO: 629470 - DNA, 52 bp, Artificial; identical to SEQ ID NO: 149609
  Synthetic oligonucleotide

SEQ ID NO: 629471 - DNA, 55 bp, Artificial; identical to SEQ ID NO: 169382
  Synthetic oligonucleotide

SEQ ID NO: 629472 - DNA, 56 bp, Artificial; identical to SEQ ID NO: 247038
  Synthetic oligonucleotide

SEQ ID NO: 629473 - DNA, 55 bp, Artificial; identical to SEQ ID NO: 149040
  Synthetic oligonucleotide

SEQ ID NO: 629474 - DNA, 55 bp, Artificial; identical to SEQ ID NO: 240039
  Synthetic oligonucleotide

SEQ ID NO: 629475 - DNA, 55 bp, Artificial; identical to SEQ ID NO: 240040
  Synthetic oligonucleotide

SEQ ID NO: 629476 - DNA, 59 bp, Artificial; identical to SEQ ID NO: 248591
  Synthetic oligonucleotide

SEQ ID NO: 629477 - DNA, 55 bp, Artificial; identical to SEQ ID NO: 218385
  Synthetic oligonucleotide

SEQ ID NO: 629478 - DNA, 55 bp, Artificial; identical to SEQ ID NO: 159528
  Synthetic oligonucleotide

SEQ ID NO: 629479 - DNA, 55 bp, Artificial; identical to SEQ ID NO: 159530
  Synthetic oligonucleotide

SEQ ID NO: 629480 - DNA, 55 bp, Artificial; identical to SEQ ID NO: 248693
  Synthetic oligonucleotide

SEQ ID NO: 629481 - DNA, 55 bp, Artificial; identical to SEQ ID NO: 202301
  Synthetic oligonucleotide

SEQ ID NO: 629482 - DNA, 51 bp, Artificial; identical to SEQ ID NO: 237216
  Synthetic oligonucleotide

SEQ ID NO: 629483 - DNA, 55 bp, Artificial; identical to SEQ ID NO: 188926
  Synthetic oligonucleotide

SEQ ID NO: 629484 - DNA, 52 bp, Artificial; identical to SEQ ID NO: 189158
  Synthetic oligonucleotide

SEQ ID NO: 629485 - DNA, 49 bp, Artificial; identical to SEQ ID NO: 149917
  Synthetic oligonucleotide

SEQ ID NO: 629486 - DNA, 55 bp, Artificial; identical to SEQ ID NO: 153120
  Synthetic oligonucleotide

SEQ ID NO: 629487 - DNA, 55 bp, Artificial; identical to SEQ ID NO: 217760
  Synthetic oligonucleotide

SEQ ID NO: 629488 - DNA, 55 bp, Artificial; identical to SEQ ID NO: 203462
  Synthetic oligonucleotide

SEQ ID NO: 629489 - DNA, 54 bp, Artificial; identical to SEQ ID NO: 248590
  Synthetic oligonucleotide

SEQ ID NO: 629490 - DNA, 50 bp, Artificial; identical to SEQ ID NO: 141412
  Synthetic oligonucleotide

SEQ ID NO: 629491 - DNA, 55 bp, Artificial; identical to SEQ ID NO: 188923
  Synthetic oligonucleotide

SEQ ID NO: 629492 - DNA, 55 bp, Artificial; identical to SEQ ID NO: 183625
  Synthetic oligonucleotide

SEQ ID NO: 629493 - DNA, 55 bp, Artificial; identical to SEQ ID NO: 183628
  Synthetic oligonucleotide

SEQ ID NO: 629494 - DNA, 55 bp, Artificial; identical to SEQ ID NO: 183525
  Synthetic oligonucleotide

SEQ ID NO: 629495 - DNA, 55 bp, Artificial; identical to SEQ ID NO: 190000
  Synthetic oligonucleotide

SEQ ID NO: 629496 - DNA, 50 bp, Artificial; identical to SEQ ID NO: 263188
  Synthetic oligonucleotide

SEQ ID NO: 629497 - DNA, 55 bp, Artificial; identical to SEQ ID NO: 257612
  Synthetic oligonucleotide

SEQ ID NO: 629498 - DNA, 54 bp, Artificial; identical to SEQ ID NO: 240623
  Synthetic oligonucleotide

SEQ ID NO: 629499 - DNA, 50 bp, Artificial; identical to SEQ ID NO: 246881
  Synthetic oligonucleotide

SEQ ID NO: 629500 - DNA, 55 bp, Artificial; identical to SEQ ID NO: 174588
  Synthetic oligonucleotide

SEQ ID NO: 629501 - DNA, 53 bp, Artificial; identical to SEQ ID NO: 185747
  Synthetic oligonucleotide

SEQ ID NO: 629502 - DNA, 57 bp, Artificial; identical to SEQ ID NO: 207577
  Synthetic oligonucleotide

SEQ ID NO: 629503 - DNA, 55 bp, Artificial; identical to SEQ ID NO: 183529
  Synthetic oligonucleotide

SEQ ID NO: 629504 - DNA, 55 bp, Artificial; identical to SEQ ID NO: 221326
  Synthetic oligonucleotide

SEQ ID NO: 629505 - DNA, 53 bp, Artificial; identical to SEQ ID NO: 185744
  Synthetic oligonucleotide

SEQ ID NO: 629506 - DNA, 55 bp, Artificial; identical to SEQ ID NO: 159537
  Synthetic oligonucleotide

SEQ ID NO: 629507 - DNA, 51 bp, Artificial; identical to SEQ ID NO: 204007
  Synthetic oligonucleotide

SEQ ID NO: 629508 - DNA, 55 bp, Artificial; identical to SEQ ID NO: 198988
  Synthetic oligonucleotide

SEQ ID NO: 629509 - DNA, 55 bp, Artificial; identical to SEQ ID NO: 194864
  Synthetic oligonucleotide

SEQ ID NO: 629510 - DNA, 55 bp, Artificial; identical to SEQ ID NO: 224429
  Synthetic oligonucleotide

SEQ ID NO: 629511 - DNA, 55 bp, Artificial; identical to SEQ ID NO: 159538
  Synthetic oligonucleotide

SEQ ID NO: 629512 - DNA, 55 bp, Artificial; identical to SEQ ID NO: 183534
  Synthetic oligonucleotide

SEQ ID NO: 629513 - DNA, 54 bp, Artificial; identical to SEQ ID NO: 198987
  Synthetic oligonucleotide

SEQ ID NO: 629514 - DNA, 57 bp, Artificial; identical to SEQ ID NO: 253209
  Synthetic oligonucleotide

SEQ ID NO: 629515 - DNA, 55 bp, Artificial; identical to SEQ ID NO: 183535
  Synthetic oligonucleotide

SEQ ID NO: 629516 - DNA, 56 bp, Artificial; identical to SEQ ID NO: 213202
  Synthetic oligonucleotide

SEQ ID NO: 629517 - DNA, 55 bp, Artificial; identical to SEQ ID NO: 142349
  Synthetic oligonucleotide

SEQ ID NO: 629518 - DNA, 60 bp, Artificial; identical to SEQ ID NO: 203297
  Synthetic oligonucleotide

SEQ ID NO: 629519 - DNA, 55 bp, Artificial; identical to SEQ ID NO: 207680
  Synthetic oligonucleotide

SEQ ID NO: 629520 - DNA, 55 bp, Artificial; identical to SEQ ID NO: 159539
  Synthetic oligonucleotide

SEQ ID NO: 629521 - DNA, 55 bp, Artificial; identical to SEQ ID NO: 191970
  Synthetic oligonucleotide

SEQ ID NO: 629522 - DNA, 55 bp, Artificial; identical to SEQ ID NO: 159540
  Synthetic oligonucleotide

SEQ ID NO: 629523 - DNA, 55 bp, Artificial; identical to SEQ ID NO: 160358
  Synthetic oligonucleotide

SEQ ID NO: 629524 - DNA, 52 bp, Artificial; identical to SEQ ID NO: 208768
  Synthetic oligonucleotide

SEQ ID NO: 629525 - DNA, 55 bp, Artificial; identical to SEQ ID NO: 183540
  Synthetic oligonucleotide

SEQ ID NO: 629526 - DNA, 60 bp, Artificial; identical to SEQ ID NO: 237314
  Synthetic oligonucleotide

SEQ ID NO: 629527 - DNA, 55 bp, Artificial; identical to SEQ ID NO: 154493
  Synthetic oligonucleotide

SEQ ID NO: 629528 - DNA, 60 bp, Artificial; identical to SEQ ID NO: 208895
  Synthetic oligonucleotide

SEQ ID NO: 629529 - DNA, 55 bp, Artificial; identical to SEQ ID NO: 248682
  Synthetic oligonucleotide

SEQ ID NO: 629530 - DNA, 55 bp, Artificial; identical to SEQ ID NO: 183520
  Synthetic oligonucleotide

SEQ ID NO: 629531 - DNA, 55 bp, Artificial; identical to SEQ ID NO: 257607
  Synthetic oligonucleotide

SEQ ID NO: 629532 - DNA, 55 bp, Artificial; identical to SEQ ID NO: 261582
  Synthetic oligonucleotide

SEQ ID NO: 629533 - DNA, 54 bp, Artificial; identical to SEQ ID NO: 149204
  Synthetic oligonucleotide

SEQ ID NO: 629534 - DNA, 54 bp, Artificial; identical to SEQ ID NO: 240625
  Synthetic oligonucleotide

SEQ ID NO: 629535 - DNA, 51 bp, Artificial; identical to SEQ ID NO: 197708
  Synthetic oligonucleotide

SEQ ID NO: 629536 - DNA, 50 bp, Artificial; identical to SEQ ID NO: 204116
  Synthetic oligonucleotide

SEQ ID NO: 629537 - DNA, 55 bp, Artificial; identical to SEQ ID NO: 202898
  Synthetic oligonucleotide

SEQ ID NO: 629538 - DNA, 55 bp, Artificial; identical to SEQ ID NO: 265975
  Synthetic oligonucleotide

SEQ ID NO: 629539 - DNA, 53 bp, Artificial; identical to SEQ ID NO: 171791
  Synthetic oligonucleotide

SEQ ID NO: 629540 - DNA, 60 bp, Artificial; identical to SEQ ID NO: 207133
  Synthetic oligonucleotide

SEQ ID NO: 629541 - DNA, 55 bp, Artificial; identical to SEQ ID NO: 149033
  Synthetic oligonucleotide

SEQ ID NO: 629542 - DNA, 55 bp, Artificial; identical to SEQ ID NO: 238131
  Synthetic oligonucleotide

SEQ ID NO: 629543 - DNA, 55 bp, Artificial; identical to SEQ ID NO: 166512
  Synthetic oligonucleotide

SEQ ID NO: 629544 - DNA, 60 bp, Artificial; identical to SEQ ID NO: 150270
  Synthetic oligonucleotide

SEQ ID NO: 629545 - DNA, 55 bp, Artificial; identical to SEQ ID NO: 254885
  Synthetic oligonucleotide

SEQ ID NO: 629546 - DNA, 55 bp, Artificial; identical to SEQ ID NO: 198986
  Synthetic oligonucleotide

SEQ ID NO: 629547 - DNA, 56 bp, Artificial; identical to SEQ ID NO: 176339
  Synthetic oligonucleotide

SEQ ID NO: 629548 - DNA, 55 bp, Artificial; identical to SEQ ID NO: 151420
  Synthetic oligonucleotide

SEQ ID NO: 629549 - DNA, 50 bp, Artificial; identical to SEQ ID NO: 196626
  Synthetic oligonucleotide

SEQ ID NO: 629550 - DNA, 56 bp, Artificial; identical to SEQ ID NO: 243996
  Synthetic oligonucleotide

SEQ ID NO: 629551 - DNA, 49 bp, Artificial; identical to SEQ ID NO: 239546
  Synthetic oligonucleotide

SEQ ID NO: 629552 - DNA, 57 bp, Artificial; identical to SEQ ID NO: 248387
  Synthetic oligonucleotide

SEQ ID NO: 629553 - DNA, 55 bp, Artificial; identical to SEQ ID NO: 211017
  Synthetic oligonucleotide

SEQ ID NO: 629554 - DNA, 58 bp, Artificial; identical to SEQ ID NO: 144678
  Synthetic oligonucleotide

SEQ ID NO: 629555 - DNA, 55 bp, Artificial; identical to SEQ ID NO: 154432
  Synthetic oligonucleotide

SEQ ID NO: 629556 - DNA, 55 bp, Artificial; identical to SEQ ID NO: 159405
  Synthetic oligonucleotide

SEQ ID NO: 629557 - DNA, 55 bp, Artificial; identical to SEQ ID NO: 166516
  Synthetic oligonucleotide

SEQ ID NO: 629558 - DNA, 55 bp, Artificial; identical to SEQ ID NO: 183519
  Synthetic oligonucleotide

SEQ ID NO: 629559 - DNA, 55 bp, Artificial; identical to SEQ ID NO: 183518
  Synthetic oligonucleotide

SEQ ID NO: 629560 - DNA, 49 bp, Artificial; identical to SEQ ID NO: 248658
  Synthetic oligonucleotide

SEQ ID NO: 629561 - DNA, 51 bp, Artificial; identical to SEQ ID NO: 202559
  Synthetic oligonucleotide

SEQ ID NO: 629562 - DNA, 55 bp, Artificial; identical to SEQ ID NO: 159406
  Synthetic oligonucleotide

SEQ ID NO: 629563 - DNA, 55 bp, Artificial; identical to SEQ ID NO: 198924
  Synthetic oligonucleotide

SEQ ID NO: 629564 - DNA, 55 bp, Artificial; identical to SEQ ID NO: 221327
  Synthetic oligonucleotide

SEQ ID NO: 629565 - DNA, 55 bp, Artificial; identical to SEQ ID NO: 160359
  Synthetic oligonucleotide

SEQ ID NO: 629566 - DNA, 60 bp, Artificial; identical to SEQ ID NO: 199670
  Synthetic oligonucleotide

SEQ ID NO: 629567 - DNA, 55 bp, Artificial; identical to SEQ ID NO: 198923
  Synthetic oligonucleotide

SEQ ID NO: 629568 - DNA, 54 bp, Artificial; identical to SEQ ID NO: 166519
  Synthetic oligonucleotide

SEQ ID NO: 629569 - DNA, 55 bp, Artificial; identical to SEQ ID NO: 190001
  Synthetic oligonucleotide

SEQ ID NO: 629570 - DNA, 55 bp, Artificial; identical to SEQ ID NO: 171342
  Synthetic oligonucleotide

SEQ ID NO: 629571 - DNA, 59 bp, Artificial; identical to SEQ ID NO: 216682
  Synthetic oligonucleotide

SEQ ID NO: 629572 - DNA, 55 bp, Artificial; identical to SEQ ID NO: 142353
  Synthetic oligonucleotide

SEQ ID NO: 629573 - DNA, 55 bp, Artificial; identical to SEQ ID NO: 220547
  Synthetic oligonucleotide

SEQ ID NO: 629574 - DNA, 55 bp, Artificial; identical to SEQ ID NO: 225044
  Synthetic oligonucleotide

SEQ ID NO: 629575 - DNA, 53 bp, Artificial; identical to SEQ ID NO: 152040
  Synthetic oligonucleotide

SEQ ID NO: 629576 - DNA, 55 bp, Artificial; identical to SEQ ID NO: 155272
  Synthetic oligonucleotide

SEQ ID NO: 629577 - DNA, 60 bp, Artificial; identical to SEQ ID NO: 176328
  Synthetic oligonucleotide

SEQ ID NO: 629578 - DNA, 60 bp, Artificial; identical to SEQ ID NO: 215472
  Synthetic oligonucleotide

SEQ ID NO: 629579 - DNA, 55 bp, Artificial; identical to SEQ ID NO: 142354
  Synthetic oligonucleotide

SEQ ID NO: 629580 - DNA, 54 bp, Artificial; identical to SEQ ID NO: 159408
  Synthetic oligonucleotide

SEQ ID NO: 629581 - DNA, 55 bp, Artificial; identical to SEQ ID NO: 207648
  Synthetic oligonucleotide

SEQ ID NO: 629582 - DNA, 55 bp, Artificial; identical to SEQ ID NO: 159410
  Synthetic oligonucleotide

SEQ ID NO: 629583 - DNA, 55 bp, Artificial; identical to SEQ ID NO: 202901
  Synthetic oligonucleotide

SEQ ID NO: 629584 - DNA, 55 bp, Artificial; identical to SEQ ID NO: 211022
  Synthetic oligonucleotide

SEQ ID NO: 629585 - DNA, 55 bp, Artificial; identical to SEQ ID NO: 224502
  Synthetic oligonucleotide

SEQ ID NO: 629586 - DNA, 55 bp, Artificial; identical to SEQ ID NO: 190002
  Synthetic oligonucleotide

SEQ ID NO: 629587 - DNA, 55 bp, Artificial; identical to SEQ ID NO: 149031
  Synthetic oligonucleotide

SEQ ID NO: 629588 - DNA, 55 bp, Artificial; identical to SEQ ID NO: 142356
  Synthetic oligonucleotide

SEQ ID NO: 629589 - DNA, 52 bp, Artificial; identical to SEQ ID NO: 186317
  Synthetic oligonucleotide

SEQ ID NO: 629590 - DNA, 55 bp, Artificial; identical to SEQ ID NO: 145209
  Synthetic oligonucleotide

SEQ ID NO: 629591 - DNA, 55 bp, Artificial; identical to SEQ ID NO: 151421
  Synthetic oligonucleotide

SEQ ID NO: 629592 - DNA, 55 bp, Artificial; identical to SEQ ID NO: 234204
  Synthetic oligonucleotide

SEQ ID NO: 629593 - DNA, 55 bp, Artificial; identical to SEQ ID NO: 171390
  Synthetic oligonucleotide

SEQ ID NO: 629594 - DNA, 54 bp, Artificial; identical to SEQ ID NO: 153552
  Synthetic oligonucleotide

SEQ ID NO: 629595 - DNA, 60 bp, Artificial; identical to SEQ ID NO: 242103
  Synthetic oligonucleotide

SEQ ID NO: 629596 - DNA, 55 bp, Artificial; identical to SEQ ID NO: 151424
  Synthetic oligonucleotide

SEQ ID NO: 629597 - DNA, 55 bp, Artificial; identical to SEQ ID NO: 208412
  Synthetic oligonucleotide

SEQ ID NO: 629598 - DNA, 51 bp, Artificial; identical to SEQ ID NO: 157895
  Synthetic oligonucleotide

SEQ ID NO: 629599 - DNA, 54 bp, Artificial; identical to SEQ ID NO: 183562
  Synthetic oligonucleotide

SEQ ID NO: 629600 - DNA, 55 bp, Artificial; identical to SEQ ID NO: 240047
  Synthetic oligonucleotide

SEQ ID NO: 629601 - DNA, 55 bp, Artificial; identical to SEQ ID NO: 183567
  Synthetic oligonucleotide

SEQ ID NO: 629602 - DNA, 53 bp, Artificial; identical to SEQ ID NO: 248681
  Synthetic oligonucleotide

SEQ ID NO: 629603 - DNA, 55 bp, Artificial; identical to SEQ ID NO: 203453
  Synthetic oligonucleotide

SEQ ID NO: 629604 - DNA, 52 bp, Artificial; identical to SEQ ID NO: 149608
  Synthetic oligonucleotide

SEQ ID NO: 629605 - DNA, 55 bp, Artificial; identical to SEQ ID NO: 221328
  Synthetic oligonucleotide

SEQ ID NO: 629606 - DNA, 55 bp, Artificial; identical to SEQ ID NO: 153181
  Synthetic oligonucleotide

SEQ ID NO: 629607 - DNA, 55 bp, Artificial; identical to SEQ ID NO: 245300
  Synthetic oligonucleotide

SEQ ID NO: 629608 - DNA, 55 bp, Artificial; identical to SEQ ID NO: 252865
  Synthetic oligonucleotide

SEQ ID NO: 629609 - DNA, 55 bp, Artificial; identical to SEQ ID NO: 233695
  Synthetic oligonucleotide

SEQ ID NO: 629610 - DNA, 60 bp, Artificial; identical to SEQ ID NO: 242101
  Synthetic oligonucleotide

SEQ ID NO: 629611 - DNA, 55 bp, Artificial; identical to SEQ ID NO: 263518
  Synthetic oligonucleotide

SEQ ID NO: 629612 - DNA, 55 bp, Artificial; identical to SEQ ID NO: 240049
  Synthetic oligonucleotide

SEQ ID NO: 629613 - DNA, 55 bp, Artificial; identical to SEQ ID NO: 254876
  Synthetic oligonucleotide

SEQ ID NO: 629614 - DNA, 51 bp, Artificial; identical to SEQ ID NO: 186569
  Synthetic oligonucleotide

SEQ ID NO: 629615 - DNA, 55 bp, Artificial; identical to SEQ ID NO: 168243
  Synthetic oligonucleotide

SEQ ID NO: 629616 - DNA, 54 bp, Artificial; identical to SEQ ID NO: 191166
  Synthetic oligonucleotide

SEQ ID NO: 629617 - DNA, 55 bp, Artificial; identical to SEQ ID NO: 201659
  Synthetic oligonucleotide

SEQ ID NO: 629618 - DNA, 55 bp, Artificial; identical to SEQ ID NO: 252866
  Synthetic oligonucleotide

SEQ ID NO: 629619 - DNA, 55 bp, Artificial; identical to SEQ ID NO: 254211
  Synthetic oligonucleotide

SEQ ID NO: 629620 - DNA, 50 bp, Artificial; identical to SEQ ID NO: 266329
  Synthetic oligonucleotide

SEQ ID NO: 629621 - DNA, 55 bp, Artificial; identical to SEQ ID NO: 254873
  Synthetic oligonucleotide

SEQ ID NO: 629622 - DNA, 54 bp, Artificial; identical to SEQ ID NO: 153548
  Synthetic oligonucleotide

SEQ ID NO: 629623 - DNA, 55 bp, Artificial; identical to SEQ ID NO: 168244
  Synthetic oligonucleotide

SEQ ID NO: 629624 - DNA, 54 bp, Artificial; identical to SEQ ID NO: 149078
  Synthetic oligonucleotide

SEQ ID NO: 629625 - DNA, 55 bp, Artificial; identical to SEQ ID NO: 166520
  Synthetic oligonucleotide

SEQ ID NO: 629626 - DNA, 54 bp, Artificial; identical to SEQ ID NO: 263228
  Synthetic oligonucleotide

SEQ ID NO: 629627 - DNA, 59 bp, Artificial; identical to SEQ ID NO: 213214
  Synthetic oligonucleotide

SEQ ID NO: 629628 - DNA, 55 bp, Artificial; identical to SEQ ID NO: 208413
  Synthetic oligonucleotide

SEQ ID NO: 629629 - DNA, 55 bp, Artificial; identical to SEQ ID NO: 183543
  Synthetic oligonucleotide

SEQ ID NO: 629630 - DNA, 55 bp, Artificial; identical to SEQ ID NO: 203452
  Synthetic oligonucleotide

SEQ ID NO: 629631 - DNA, 54 bp, Artificial; identical to SEQ ID NO: 238607
  Synthetic oligonucleotide

SEQ ID NO: 629632 - DNA, 60 bp, Artificial; identical to SEQ ID NO: 176294
  Synthetic oligonucleotide

SEQ ID NO: 629633 - DNA, 55 bp, Artificial; identical to SEQ ID NO: 240052
  Synthetic oligonucleotide

SEQ ID NO: 629634 - DNA, 55 bp, Artificial; identical to SEQ ID NO: 142357
  Synthetic oligonucleotide

SEQ ID NO: 629635 - DNA, 55 bp, Artificial; identical to SEQ ID NO: 208415
  Synthetic oligonucleotide

SEQ ID NO: 629636 - DNA, 54 bp, Artificial; identical to SEQ ID NO: 150226
  Synthetic oligonucleotide

SEQ ID NO: 629637 - DNA, 53 bp, Artificial; identical to SEQ ID NO: 168925
  Synthetic oligonucleotide

SEQ ID NO: 629638 - DNA, 55 bp, Artificial; identical to SEQ ID NO: 183550
  Synthetic oligonucleotide

SEQ ID NO: 629639 - DNA, 55 bp, Artificial; identical to SEQ ID NO: 159418
  Synthetic oligonucleotide

SEQ ID NO: 629640 - DNA, 55 bp, Artificial; identical to SEQ ID NO: 159421
  Synthetic oligonucleotide

SEQ ID NO: 629641 - DNA, 50 bp, Artificial; identical to SEQ ID NO: 252867
  Synthetic oligonucleotide

SEQ ID NO: 629642 - DNA, 52 bp, Artificial; identical to SEQ ID NO: 170565
  Synthetic oligonucleotide

SEQ ID NO: 629643 - DNA, 55 bp, Artificial; identical to SEQ ID NO: 254872
  Synthetic oligonucleotide

SEQ ID NO: 629644 - DNA, 55 bp, Artificial; identical to SEQ ID NO: 168249
  Synthetic oligonucleotide

SEQ ID NO: 629645 - DNA, 55 bp, Artificial; identical to SEQ ID NO: 189955
  Synthetic oligonucleotide

SEQ ID NO: 629646 - DNA, 55 bp, Artificial; identical to SEQ ID NO: 154437
  Synthetic oligonucleotide

SEQ ID NO: 629647 - DNA, 55 bp, Artificial; identical to SEQ ID NO: 198920
  Synthetic oligonucleotide

SEQ ID NO: 629648 - DNA, 50 bp, Artificial; identical to SEQ ID NO: 211553
  Synthetic oligonucleotide

SEQ ID NO: 629649 - DNA, 53 bp, Artificial; identical to SEQ ID NO: 185902
  Synthetic oligonucleotide

SEQ ID NO: 629650 - DNA, 55 bp, Artificial; identical to SEQ ID NO: 159423
  Synthetic oligonucleotide

SEQ ID NO: 629651 - DNA, 52 bp, Artificial; identical to SEQ ID NO: 142513
  Synthetic oligonucleotide

SEQ ID NO: 629652 - DNA, 55 bp, Artificial; identical to SEQ ID NO: 198919
  Synthetic oligonucleotide

SEQ ID NO: 629653 - DNA, 51 bp, Artificial; identical to SEQ ID NO: 191221
  Synthetic oligonucleotide

SEQ ID NO: 629654 - DNA, 56 bp, Artificial; identical to SEQ ID NO: 242098
  Synthetic oligonucleotide

SEQ ID NO: 629655 - DNA, 60 bp, Artificial; identical to SEQ ID NO: 210725
  Synthetic oligonucleotide

SEQ ID NO: 629656 - DNA, 56 bp, Artificial; identical to SEQ ID NO: 213225
  Synthetic oligonucleotide

SEQ ID NO: 629657 - DNA, 59 bp, Artificial; identical to SEQ ID NO: 203296
  Synthetic oligonucleotide

SEQ ID NO: 629658 - DNA, 54 bp, Artificial; identical to SEQ ID NO: 247824
  Synthetic oligonucleotide

SEQ ID NO: 629659 - DNA, 55 bp, Artificial; identical to SEQ ID NO: 153178
  Synthetic oligonucleotide

SEQ ID NO: 629660 - DNA, 55 bp, Artificial; identical to SEQ ID NO: 193614
  Synthetic oligonucleotide

SEQ ID NO: 629661 - DNA, 55 bp, Artificial; identical to SEQ ID NO: 169393
  Synthetic oligonucleotide

SEQ ID NO: 629662 - DNA, 55 bp, Artificial; identical to SEQ ID NO: 160786
  Synthetic oligonucleotide

SEQ ID NO: 629663 - DNA, 55 bp, Artificial; identical to SEQ ID NO: 154438
  Synthetic oligonucleotide

SEQ ID NO: 629664 - DNA, 55 bp, Artificial; identical to SEQ ID NO: 238178
  Synthetic oligonucleotide

SEQ ID NO: 629665 - DNA, 55 bp, Artificial; identical to SEQ ID NO: 159384
  Synthetic oligonucleotide

SEQ ID NO: 629666 - DNA, 55 bp, Artificial; identical to SEQ ID NO: 154441
  Synthetic oligonucleotide

SEQ ID NO: 629667 - DNA, 55 bp, Artificial; identical to SEQ ID NO: 183555
  Synthetic oligonucleotide

SEQ ID NO: 629668 - DNA, 55 bp, Artificial; identical to SEQ ID NO: 183553
  Synthetic oligonucleotide

SEQ ID NO: 629669 - DNA, 60 bp, Artificial; identical to SEQ ID NO: 237425
  Synthetic oligonucleotide

SEQ ID NO: 629670 - DNA, 55 bp, Artificial; identical to SEQ ID NO: 168252
  Synthetic oligonucleotide

SEQ ID NO: 629671 - DNA, 55 bp, Artificial; identical to SEQ ID NO: 155271
  Synthetic oligonucleotide

SEQ ID NO: 629672 - DNA, 55 bp, Artificial; identical to SEQ ID NO: 193197
  Synthetic oligonucleotide

SEQ ID NO: 629673 - DNA, 55 bp, Artificial; identical to SEQ ID NO: 218329
  Synthetic oligonucleotide

SEQ ID NO: 629674 - DNA, 55 bp, Artificial; identical to SEQ ID NO: 153175
  Synthetic oligonucleotide

SEQ ID NO: 629675 - DNA, 55 bp, Artificial; identical to SEQ ID NO: 183575
  Synthetic oligonucleotide

SEQ ID NO: 629676 - DNA, 55 bp, Artificial; identical to SEQ ID NO: 202908
  Synthetic oligonucleotide

SEQ ID NO: 629677 - DNA, 55 bp, Artificial; identical to SEQ ID NO: 183572
  Synthetic oligonucleotide

SEQ ID NO: 629678 - DNA, 53 bp, Artificial; identical to SEQ ID NO: 263165
  Synthetic oligonucleotide

SEQ ID NO: 629679 - DNA, 55 bp, Artificial; identical to SEQ ID NO: 145207
  Synthetic oligonucleotide

SEQ ID NO: 629680 - DNA, 55 bp, Artificial; identical to SEQ ID NO: 159389
  Synthetic oligonucleotide

SEQ ID NO: 629681 - DNA, 55 bp, Artificial; identical to SEQ ID NO: 225552
  Synthetic oligonucleotide

SEQ ID NO: 629682 - DNA, 55 bp, Artificial; identical to SEQ ID NO: 224505
  Synthetic oligonucleotide

SEQ ID NO: 629683 - DNA, 55 bp, Artificial; identical to SEQ ID NO: 159390
  Synthetic oligonucleotide

SEQ ID NO: 629684 - DNA, 55 bp, Artificial; identical to SEQ ID NO: 149074
  Synthetic oligonucleotide

SEQ ID NO: 629685 - DNA, 54 bp, Artificial; identical to SEQ ID NO: 176217
  Synthetic oligonucleotide

SEQ ID NO: 629686 - DNA, 55 bp, Artificial; identical to SEQ ID NO: 142358
  Synthetic oligonucleotide

SEQ ID NO: 629687 - DNA, 55 bp, Artificial; identical to SEQ ID NO: 144086
  Synthetic oligonucleotide

SEQ ID NO: 629688 - DNA, 55 bp, Artificial; identical to SEQ ID NO: 217764
  Synthetic oligonucleotide

SEQ ID NO: 629689 - DNA, 58 bp, Artificial; identical to SEQ ID NO: 201130
  Synthetic oligonucleotide

SEQ ID NO: 629690 - DNA, 55 bp, Artificial; identical to SEQ ID NO: 252868
  Synthetic oligonucleotide

SEQ ID NO: 629691 - DNA, 55 bp, Artificial; identical to SEQ ID NO: 248679
  Synthetic oligonucleotide

SEQ ID NO: 629692 - DNA, 55 bp, Artificial; identical to SEQ ID NO: 252822
  Synthetic oligonucleotide

SEQ ID NO: 629693 - DNA, 57 bp, Artificial; identical to SEQ ID NO: 176205
  Synthetic oligonucleotide

SEQ ID NO: 629694 - DNA, 55 bp, Artificial; identical to SEQ ID NO: 174590
  Synthetic oligonucleotide

SEQ ID NO: 629695 - DNA, 60 bp, Artificial; identical to SEQ ID NO: 176194
  Synthetic oligonucleotide

SEQ ID NO: 629696 - DNA, 55 bp, Artificial; identical to SEQ ID NO: 207656
  Synthetic oligonucleotide

SEQ ID NO: 629697 - DNA, 55 bp, Artificial; identical to SEQ ID NO: 193200
  Synthetic oligonucleotide

SEQ ID NO: 629698 - DNA, 55 bp, Artificial; identical to SEQ ID NO: 207668
  Synthetic oligonucleotide

SEQ ID NO: 629699 - DNA, 56 bp, Artificial; identical to SEQ ID NO: 244058
  Synthetic oligonucleotide

SEQ ID NO: 629700 - DNA, 55 bp, Artificial; identical to SEQ ID NO: 187948
  Synthetic oligonucleotide

SEQ ID NO: 629701 - DNA, 55 bp, Artificial; identical to SEQ ID NO: 187949
  Synthetic oligonucleotide

SEQ ID NO: 629702 - DNA, 55 bp, Artificial; identical to SEQ ID NO: 183561
  Synthetic oligonucleotide

SEQ ID NO: 629703 - DNA, 55 bp, Artificial; identical to SEQ ID NO: 189904
  Synthetic oligonucleotide

SEQ ID NO: 629704 - DNA, 55 bp, Artificial; identical to SEQ ID NO: 205249
  Synthetic oligonucleotide

SEQ ID NO: 629705 - DNA, 55 bp, Artificial; identical to SEQ ID NO: 266231
  Synthetic oligonucleotide

SEQ ID NO: 629706 - DNA, 55 bp, Artificial; identical to SEQ ID NO: 242732
  Synthetic oligonucleotide

SEQ ID NO: 629707 - DNA, 60 bp, Artificial; identical to SEQ ID NO: 174935
  Synthetic oligonucleotide

SEQ ID NO: 629708 - DNA, 55 bp, Artificial; identical to SEQ ID NO: 160015
  Synthetic oligonucleotide

SEQ ID NO: 629709 - DNA, 55 bp, Artificial; identical to SEQ ID NO: 153173
  Synthetic oligonucleotide

SEQ ID NO: 629710 - DNA, 55 bp, Artificial; identical to SEQ ID NO: 145206
  Synthetic oligonucleotide

SEQ ID NO: 629711 - DNA, 55 bp, Artificial; identical to SEQ ID NO: 174541
  Synthetic oligonucleotide

SEQ ID NO: 629712 - DNA, 55 bp, Artificial; identical to SEQ ID NO: 153172
  Synthetic oligonucleotide

SEQ ID NO: 629713 - DNA, 54 bp, Artificial; identical to SEQ ID NO: 143906
  Synthetic oligonucleotide

SEQ ID NO: 629714 - DNA, 55 bp, Artificial; identical to SEQ ID NO: 212578
  Synthetic oligonucleotide

SEQ ID NO: 629715 - DNA, 55 bp, Artificial; identical to SEQ ID NO: 183513
  Synthetic oligonucleotide

SEQ ID NO: 629716 - DNA, 55 bp, Artificial; identical to SEQ ID NO: 183514
  Synthetic oligonucleotide

SEQ ID NO: 629717 - DNA, 55 bp, Artificial; identical to SEQ ID NO: 171392
  Synthetic oligonucleotide

SEQ ID NO: 629718 - DNA, 54 bp, Artificial; identical to SEQ ID NO: 168254
  Synthetic oligonucleotide

SEQ ID NO: 629719 - DNA, 55 bp, Artificial; identical to SEQ ID NO: 161753
  Synthetic oligonucleotide

SEQ ID NO: 629720 - DNA, 54 bp, Artificial; identical to SEQ ID NO: 155523
  Synthetic oligonucleotide

SEQ ID NO: 629721 - DNA, 55 bp, Artificial; identical to SEQ ID NO: 233694
  Synthetic oligonucleotide

SEQ ID NO: 629722 - DNA, 54 bp, Artificial; identical to SEQ ID NO: 211518
  Synthetic oligonucleotide

SEQ ID NO: 629723 - DNA, 60 bp, Artificial; identical to SEQ ID NO: 151273
  Synthetic oligonucleotide

SEQ ID NO: 629724 - DNA, 54 bp, Artificial; identical to SEQ ID NO: 183523
  Synthetic oligonucleotide

SEQ ID NO: 629725 - DNA, 55 bp, Artificial; identical to SEQ ID NO: 196968
  Synthetic oligonucleotide

SEQ ID NO: 629726 - DNA, 55 bp, Artificial; identical to SEQ ID NO: 159395
  Synthetic oligonucleotide

SEQ ID NO: 629727 - DNA, 60 bp, Artificial; identical to SEQ ID NO: 247047
  Synthetic oligonucleotide

SEQ ID NO: 629728 - DNA, 55 bp, Artificial; identical to SEQ ID NO: 248806
  Synthetic oligonucleotide

SEQ ID NO: 629729 - DNA, 56 bp, Artificial; identical to SEQ ID NO: 141554
  Synthetic oligonucleotide

SEQ ID NO: 629730 - DNA, 55 bp, Artificial; identical to SEQ ID NO: 151428
  Synthetic oligonucleotide

SEQ ID NO: 629731 - DNA, 59 bp, Artificial; identical to SEQ ID NO: 243455
  Synthetic oligonucleotide

SEQ ID NO: 629732 - DNA, 52 bp, Artificial; identical to SEQ ID NO: 165016
  Synthetic oligonucleotide

SEQ ID NO: 629733 - DNA, 56 bp, Artificial; identical to SEQ ID NO: 179952
  Synthetic oligonucleotide

SEQ ID NO: 629734 - DNA, 51 bp, Artificial; identical to SEQ ID NO: 189200
  Synthetic oligonucleotide

SEQ ID NO: 629735 - DNA, 55 bp, Artificial; identical to SEQ ID NO: 260225
  Synthetic oligonucleotide

SEQ ID NO: 629736 - DNA, 51 bp, Artificial; identical to SEQ ID NO: 266307
  Synthetic oligonucleotide

SEQ ID NO: 629737 - DNA, 55 bp, Artificial; identical to SEQ ID NO: 224510
  Synthetic oligonucleotide

SEQ ID NO: 629738 - DNA, 57 bp, Artificial; identical to SEQ ID NO: 176139
  Synthetic oligonucleotide

SEQ ID NO: 629739 - DNA, 55 bp, Artificial; identical to SEQ ID NO: 210979
  Synthetic oligonucleotide

SEQ ID NO: 629740 - DNA, 51 bp, Artificial; identical to SEQ ID NO: 246660
  Synthetic oligonucleotide

SEQ ID NO: 629741 - DNA, 54 bp, Artificial; identical to SEQ ID NO: 169347
  Synthetic oligonucleotide

SEQ ID NO: 629742 - DNA, 54 bp, Artificial; identical to SEQ ID NO: 215182
  Synthetic oligonucleotide

SEQ ID NO: 629743 - DNA, 50 bp, Artificial; identical to SEQ ID NO: 165403
  Synthetic oligonucleotide

SEQ ID NO: 629744 - DNA, 55 bp, Artificial; identical to SEQ ID NO: 203510
  Synthetic oligonucleotide

SEQ ID NO: 629745 - DNA, 55 bp, Artificial; identical to SEQ ID NO: 146584
  Synthetic oligonucleotide

SEQ ID NO: 629746 - DNA, 55 bp, Artificial; identical to SEQ ID NO: 166484
  Synthetic oligonucleotide

SEQ ID NO: 629747 - DNA, 55 bp, Artificial; identical to SEQ ID NO: 262771
  Synthetic oligonucleotide

SEQ ID NO: 629748 - DNA, 58 bp, Artificial; identical to SEQ ID NO: 150193
  Synthetic oligonucleotide

SEQ ID NO: 629749 - DNA, 52 bp, Artificial; identical to SEQ ID NO: 199659
  Synthetic oligonucleotide

SEQ ID NO: 629750 - DNA, 54 bp, Artificial; identical to SEQ ID NO: 254905
  Synthetic oligonucleotide

SEQ ID NO: 629751 - DNA, 54 bp, Artificial; identical to SEQ ID NO: 149067
  Synthetic oligonucleotide

SEQ ID NO: 629752 - DNA, 55 bp, Artificial; identical to SEQ ID NO: 207664
  Synthetic oligonucleotide

SEQ ID NO: 629753 - DNA, 58 bp, Artificial; identical to SEQ ID NO: 176106
  Synthetic oligonucleotide

SEQ ID NO: 629754 - DNA, 52 bp, Artificial; identical to SEQ ID NO: 212556
  Synthetic oligonucleotide

SEQ ID NO: 629755 - DNA, 55 bp, Artificial; identical to SEQ ID NO: 169437
  Synthetic oligonucleotide

SEQ ID NO: 629756 - DNA, 53 bp, Artificial; identical to SEQ ID NO: 153600
  Synthetic oligonucleotide

SEQ ID NO: 629757 - DNA, 55 bp, Artificial; identical to SEQ ID NO: 189871
  Synthetic oligonucleotide

SEQ ID NO: 629758 - DNA, 55 bp, Artificial; identical to SEQ ID NO: 151286
  Synthetic oligonucleotide

SEQ ID NO: 629759 - DNA, 55 bp, Artificial; identical to SEQ ID NO: 189966
  Synthetic oligonucleotide

SEQ ID NO: 629760 - DNA, 55 bp, Artificial; identical to SEQ ID NO: 151429
  Synthetic oligonucleotide

SEQ ID NO: 629761 - DNA, 59 bp, Artificial; identical to SEQ ID NO: 199648
  Synthetic oligonucleotide

SEQ ID NO: 629762 - DNA, 52 bp, Artificial; identical to SEQ ID NO: 199906
  Synthetic oligonucleotide

SEQ ID NO: 629763 - DNA, 55 bp, Artificial; identical to SEQ ID NO: 197005
  Synthetic oligonucleotide

SEQ ID NO: 629764 - DNA, 55 bp, Artificial; identical to SEQ ID NO: 208376
  Synthetic oligonucleotide

SEQ ID NO: 629765 - DNA, 55 bp, Artificial; identical to SEQ ID NO: 145204
  Synthetic oligonucleotide

SEQ ID NO: 629766 - DNA, 55 bp, Artificial; identical to SEQ ID NO: 197003
  Synthetic oligonucleotide

SEQ ID NO: 629767 - DNA, 55 bp, Artificial; identical to SEQ ID NO: 188779
  Synthetic oligonucleotide

SEQ ID NO: 629768 - DNA, 55 bp, Artificial; identical to SEQ ID NO: 144482
  Synthetic oligonucleotide

SEQ ID NO: 629769 - DNA, 55 bp, Artificial; identical to SEQ ID NO: 183631
  Synthetic oligonucleotide

SEQ ID NO: 629770 - DNA, 57 bp, Artificial; identical to SEQ ID NO: 254378
  Synthetic oligonucleotide

SEQ ID NO: 629771 - DNA, 55 bp, Artificial; identical to SEQ ID NO: 212558
  Synthetic oligonucleotide

SEQ ID NO: 629772 - DNA, 55 bp, Artificial; identical to SEQ ID NO: 238184
  Synthetic oligonucleotide

SEQ ID NO: 629773 - DNA, 52 bp, Artificial; identical to SEQ ID NO: 247389
  Synthetic oligonucleotide

SEQ ID NO: 629774 - DNA, 55 bp, Artificial; identical to SEQ ID NO: 245911
  Synthetic oligonucleotide

SEQ ID NO: 629775 - DNA, 52 bp, Artificial; identical to SEQ ID NO: 247969
  Synthetic oligonucleotide

SEQ ID NO: 629776 - DNA, 53 bp, Artificial; identical to SEQ ID NO: 209466
  Synthetic oligonucleotide

SEQ ID NO: 629777 - DNA, 55 bp, Artificial; identical to SEQ ID NO: 194866
  Synthetic oligonucleotide

SEQ ID NO: 629778 - DNA, 54 bp, Artificial; identical to SEQ ID NO: 201674
  Synthetic oligonucleotide

SEQ ID NO: 629779 - DNA, 52 bp, Artificial; identical to SEQ ID NO: 187295
  Synthetic oligonucleotide

SEQ ID NO: 629780 - DNA, 55 bp, Artificial; identical to SEQ ID NO: 193603
  Synthetic oligonucleotide

SEQ ID NO: 629781 - DNA, 55 bp, Artificial; identical to SEQ ID NO: 183627
  Synthetic oligonucleotide

SEQ ID NO: 629782 - DNA, 55 bp, Artificial; identical to SEQ ID NO: 189968
  Synthetic oligonucleotide

SEQ ID NO: 629783 - DNA, 51 bp, Artificial; identical to SEQ ID NO: 155623
  Synthetic oligonucleotide

SEQ ID NO: 629784 - DNA, 60 bp, Artificial; identical to SEQ ID NO: 248392
  Synthetic oligonucleotide

SEQ ID NO: 629785 - DNA, 55 bp, Artificial; identical to SEQ ID NO: 248801
  Synthetic oligonucleotide

SEQ ID NO: 629786 - DNA, 55 bp, Artificial; identical to SEQ ID NO: 221091
  Synthetic oligonucleotide

SEQ ID NO: 629787 - DNA, 53 bp, Artificial; identical to SEQ ID NO: 141555
  Synthetic oligonucleotide

SEQ ID NO: 629788 - DNA, 50 bp, Artificial; identical to SEQ ID NO: 176355
  Synthetic oligonucleotide

SEQ ID NO: 629789 - DNA, 55 bp, Artificial; identical to SEQ ID NO: 149066
  Synthetic oligonucleotide

SEQ ID NO: 629790 - DNA, 56 bp, Artificial; identical to SEQ ID NO: 179900
  Synthetic oligonucleotide

SEQ ID NO: 629791 - DNA, 52 bp, Artificial; identical to SEQ ID NO: 218355
  Synthetic oligonucleotide

SEQ ID NO: 629792 - DNA, 55 bp, Artificial; identical to SEQ ID NO: 233693
  Synthetic oligonucleotide

SEQ ID NO: 629793 - DNA, 55 bp, Artificial; identical to SEQ ID NO: 245906
  Synthetic oligonucleotide

SEQ ID NO: 629794 - DNA, 55 bp, Artificial; identical to SEQ ID NO: 201336
  Synthetic oligonucleotide

SEQ ID NO: 629795 - DNA, 55 bp, Artificial; identical to SEQ ID NO: 149065
  Synthetic oligonucleotide

SEQ ID NO: 629796 - DNA, 55 bp, Artificial; identical to SEQ ID NO: 183621
  Synthetic oligonucleotide

SEQ ID NO: 629797 - DNA, 55 bp, Artificial; identical to SEQ ID NO: 198910
  Synthetic oligonucleotide

SEQ ID NO: 629798 - DNA, 54 bp, Artificial; identical to SEQ ID NO: 243456
  Synthetic oligonucleotide

SEQ ID NO: 629799 - DNA, 55 bp, Artificial; identical to SEQ ID NO: 183614
  Synthetic oligonucleotide

SEQ ID NO: 629800 - DNA, 57 bp, Artificial; identical to SEQ ID NO: 186360
  Synthetic oligonucleotide

SEQ ID NO: 629801 - DNA, 54 bp, Artificial; identical to SEQ ID NO: 151434
  Synthetic oligonucleotide

SEQ ID NO: 629802 - DNA, 55 bp, Artificial; identical to SEQ ID NO: 169493
  Synthetic oligonucleotide

SEQ ID NO: 629803 - DNA, 58 bp, Artificial; identical to SEQ ID NO: 217047
  Synthetic oligonucleotide

SEQ ID NO: 629804 - DNA, 55 bp, Artificial; identical to SEQ ID NO: 143950
  Synthetic oligonucleotide

SEQ ID NO: 629805 - DNA, 55 bp, Artificial; identical to SEQ ID NO: 238188
  Synthetic oligonucleotide

SEQ ID NO: 629806 - DNA, 55 bp, Artificial; identical to SEQ ID NO: 208377
  Synthetic oligonucleotide

SEQ ID NO: 629807 - DNA, 54 bp, Artificial; identical to SEQ ID NO: 142363
  Synthetic oligonucleotide

SEQ ID NO: 629808 - DNA, 55 bp, Artificial; identical to SEQ ID NO: 183643
  Synthetic oligonucleotide

SEQ ID NO: 629809 - DNA, 55 bp, Artificial; identical to SEQ ID NO: 196244
  Synthetic oligonucleotide

SEQ ID NO: 629810 - DNA, 55 bp, Artificial; identical to SEQ ID NO: 212606
  Synthetic oligonucleotide

SEQ ID NO: 629811 - DNA, 55 bp, Artificial; identical to SEQ ID NO: 183640
  Synthetic oligonucleotide

SEQ ID NO: 629812 - DNA, 55 bp, Artificial; identical to SEQ ID NO: 179577
  Synthetic oligonucleotide

SEQ ID NO: 629813 - DNA, 55 bp, Artificial; identical to SEQ ID NO: 240133
  Synthetic oligonucleotide

SEQ ID NO: 629814 - DNA, 55 bp, Artificial; identical to SEQ ID NO: 253706
  Synthetic oligonucleotide

SEQ ID NO: 629815 - DNA, 51 bp, Artificial; identical to SEQ ID NO: 165337
  Synthetic oligonucleotide

SEQ ID NO: 629816 - DNA, 55 bp, Artificial; identical to SEQ ID NO: 197002
  Synthetic oligonucleotide

SEQ ID NO: 629817 - DNA, 55 bp, Artificial; identical to SEQ ID NO: 195205
  Synthetic oligonucleotide

SEQ ID NO: 629818 - DNA, 55 bp, Artificial; identical to SEQ ID NO: 166493
  Synthetic oligonucleotide

SEQ ID NO: 629819 - DNA, 55 bp, Artificial; identical to SEQ ID NO: 257085
  Synthetic oligonucleotide

SEQ ID NO: 629820 - DNA, 55 bp, Artificial; identical to SEQ ID NO: 183633
  Synthetic oligonucleotide

SEQ ID NO: 629821 - DNA, 55 bp, Artificial; identical to SEQ ID NO: 249971
  Synthetic oligonucleotide

SEQ ID NO: 629822 - DNA, 60 bp, Artificial; identical to SEQ ID NO: 203295
  Synthetic oligonucleotide

SEQ ID NO: 629823 - DNA, 55 bp, Artificial; identical to SEQ ID NO: 266229
  Synthetic oligonucleotide

SEQ ID NO: 629824 - DNA, 55 bp, Artificial; identical to SEQ ID NO: 238191
  Synthetic oligonucleotide

SEQ ID NO: 629825 - DNA, 55 bp, Artificial; identical to SEQ ID NO: 212612
  Synthetic oligonucleotide

SEQ ID NO: 629826 - DNA, 55 bp, Artificial; identical to SEQ ID NO: 188916
  Synthetic oligonucleotide

SEQ ID NO: 629827 - DNA, 58 bp, Artificial; identical to SEQ ID NO: 257686
  Synthetic oligonucleotide

SEQ ID NO: 629828 - DNA, 53 bp, Artificial; identical to SEQ ID NO: 174545
  Synthetic oligonucleotide

SEQ ID NO: 629829 - DNA, 54 bp, Artificial; identical to SEQ ID NO: 190208
  Synthetic oligonucleotide

SEQ ID NO: 629830 - DNA, 55 bp, Artificial; identical to SEQ ID NO: 166497
  Synthetic oligonucleotide

SEQ ID NO: 629831 - DNA, 55 bp, Artificial; identical to SEQ ID NO: 159454
  Synthetic oligonucleotide

SEQ ID NO: 629832 - DNA, 55 bp, Artificial; identical to SEQ ID NO: 217766
  Synthetic oligonucleotide

SEQ ID NO: 629833 - DNA, 54 bp, Artificial; identical to SEQ ID NO: 254899
  Synthetic oligonucleotide

SEQ ID NO: 629834 - DNA, 54 bp, Artificial; identical to SEQ ID NO: 157268
  Synthetic oligonucleotide

SEQ ID NO: 629835 - DNA, 56 bp, Artificial; identical to SEQ ID NO: 197861
  Synthetic oligonucleotide

SEQ ID NO: 629836 - DNA, 55 bp, Artificial; identical to SEQ ID NO: 167498
  Synthetic oligonucleotide

SEQ ID NO: 629837 - DNA, 53 bp, Artificial; identical to SEQ ID NO: 205679
  Synthetic oligonucleotide

SEQ ID NO: 629838 - DNA, 50 bp, Artificial; identical to SEQ ID NO: 158985
  Synthetic oligonucleotide

SEQ ID NO: 629839 - DNA, 55 bp, Artificial; identical to SEQ ID NO: 168214
  Synthetic oligonucleotide

SEQ ID NO: 629840 - DNA, 55 bp, Artificial; identical to SEQ ID NO: 265813
  Synthetic oligonucleotide

SEQ ID NO: 629841 - DNA, 52 bp, Artificial; identical to SEQ ID NO: 245904
  Synthetic oligonucleotide

SEQ ID NO: 629842 - DNA, 55 bp, Artificial; identical to SEQ ID NO: 183584
  Synthetic oligonucleotide

SEQ ID NO: 629843 - DNA, 55 bp, Artificial; identical to SEQ ID NO: 257622
  Synthetic oligonucleotide

SEQ ID NO: 629844 - DNA, 55 bp, Artificial; identical to SEQ ID NO: 221334
  Synthetic oligonucleotide

SEQ ID NO: 629845 - DNA, 53 bp, Artificial; identical to SEQ ID NO: 255346
  Synthetic oligonucleotide

SEQ ID NO: 629846 - DNA, 54 bp, Artificial; identical to SEQ ID NO: 183585
  Synthetic oligonucleotide

SEQ ID NO: 629847 - DNA, 52 bp, Artificial; identical to SEQ ID NO: 239376
  Synthetic oligonucleotide

SEQ ID NO: 629848 - DNA, 59 bp, Artificial; identical to SEQ ID NO: 194253
  Synthetic oligonucleotide

SEQ ID NO: 629849 - DNA, 57 bp, Artificial; identical to SEQ ID NO: 179414
  Synthetic oligonucleotide

SEQ ID NO: 629850 - DNA, 54 bp, Artificial; identical to SEQ ID NO: 166505
  Synthetic oligonucleotide

SEQ ID NO: 629851 - DNA, 50 bp, Artificial; identical to SEQ ID NO: 150188
  Synthetic oligonucleotide

SEQ ID NO: 629852 - DNA, 55 bp, Artificial; identical to SEQ ID NO: 149053
  Synthetic oligonucleotide

SEQ ID NO: 629853 - DNA, 55 bp, Artificial; identical to SEQ ID NO: 145202
  Synthetic oligonucleotide

SEQ ID NO: 629854 - DNA, 55 bp, Artificial; identical to SEQ ID NO: 190210
  Synthetic oligonucleotide

SEQ ID NO: 629855 - DNA, 55 bp, Artificial; identical to SEQ ID NO: 225556
  Synthetic oligonucleotide

SEQ ID NO: 629856 - DNA, 53 bp, Artificial; identical to SEQ ID NO: 183591
  Synthetic oligonucleotide

SEQ ID NO: 629857 - DNA, 55 bp, Artificial; identical to SEQ ID NO: 193201
  Synthetic oligonucleotide

SEQ ID NO: 629858 - DNA, 52 bp, Artificial; identical to SEQ ID NO: 148785
  Synthetic oligonucleotide

SEQ ID NO: 629859 - DNA, 55 bp, Artificial; identical to SEQ ID NO: 234016
  Synthetic oligonucleotide

SEQ ID NO: 629860 - DNA, 55 bp, Artificial; identical to SEQ ID NO: 190211
  Synthetic oligonucleotide

SEQ ID NO: 629861 - DNA, 51 bp, Artificial; identical to SEQ ID NO: 157816
  Synthetic oligonucleotide

SEQ ID NO: 629862 - DNA, 55 bp, Artificial; identical to SEQ ID NO: 198908
  Synthetic oligonucleotide

SEQ ID NO: 629863 - DNA, 53 bp, Artificial; identical to SEQ ID NO: 186271
  Synthetic oligonucleotide

SEQ ID NO: 629864 - DNA, 53 bp, Artificial; identical to SEQ ID NO: 240828
  Synthetic oligonucleotide

SEQ ID NO: 629865 - DNA, 55 bp, Artificial; identical to SEQ ID NO: 183594
  Synthetic oligonucleotide

SEQ ID NO: 629866 - DNA, 52 bp, Artificial; identical to SEQ ID NO: 266372
  Synthetic oligonucleotide

SEQ ID NO: 629867 - DNA, 56 bp, Artificial; identical to SEQ ID NO: 217315
  Synthetic oligonucleotide

SEQ ID NO: 629868 - DNA, 55 bp, Artificial; identical to SEQ ID NO: 221335
  Synthetic oligonucleotide

SEQ ID NO: 629869 - DNA, 54 bp, Artificial; identical to SEQ ID NO: 145065
  Synthetic oligonucleotide

SEQ ID NO: 629870 - DNA, 55 bp, Artificial; identical to SEQ ID NO: 160014
  Synthetic oligonucleotide

SEQ ID NO: 629871 - DNA, 55 bp, Artificial; identical to SEQ ID NO: 203507
  Synthetic oligonucleotide

SEQ ID NO: 629872 - DNA, 55 bp, Artificial; identical to SEQ ID NO: 174548
  Synthetic oligonucleotide

SEQ ID NO: 629873 - DNA, 49 bp, Artificial; identical to SEQ ID NO: 166586
  Synthetic oligonucleotide

SEQ ID NO: 629874 - DNA, 53 bp, Artificial; identical to SEQ ID NO: 217767
  Synthetic oligonucleotide

SEQ ID NO: 629875 - DNA, 56 bp, Artificial; identical to SEQ ID NO: 257675
  Synthetic oligonucleotide

SEQ ID NO: 629876 - DNA, 56 bp, Artificial; identical to SEQ ID NO: 242088
  Synthetic oligonucleotide

SEQ ID NO: 629877 - DNA, 51 bp, Artificial; identical to SEQ ID NO: 213269
  Synthetic oligonucleotide

SEQ ID NO: 629878 - DNA, 52 bp, Artificial; identical to SEQ ID NO: 186242
  Synthetic oligonucleotide

SEQ ID NO: 629879 - DNA, 55 bp, Artificial; identical to SEQ ID NO: 198907
  Synthetic oligonucleotide

SEQ ID NO: 629880 - DNA, 51 bp, Artificial; identical to SEQ ID NO: 236498
  Synthetic oligonucleotide

SEQ ID NO: 629881 - DNA, 55 bp, Artificial; identical to SEQ ID NO: 183601
  Synthetic oligonucleotide

SEQ ID NO: 629882 - DNA, 55 bp, Artificial; identical to SEQ ID NO: 202293
  Synthetic oligonucleotide

SEQ ID NO: 629883 - DNA, 55 bp, Artificial; identical to SEQ ID NO: 183600
  Synthetic oligonucleotide

SEQ ID NO: 629884 - DNA, 59 bp, Artificial; identical to SEQ ID NO: 179418
  Synthetic oligonucleotide

SEQ ID NO: 629885 - DNA, 52 bp, Artificial; identical to SEQ ID NO: 167395
  Synthetic oligonucleotide

SEQ ID NO: 629886 - DNA, 55 bp, Artificial; identical to SEQ ID NO: 240143
  Synthetic oligonucleotide

SEQ ID NO: 629887 - DNA, 58 bp, Artificial; identical to SEQ ID NO: 194659
  Synthetic oligonucleotide

SEQ ID NO: 629888 - DNA, 48 bp, Artificial; identical to SEQ ID NO: 159456
  Synthetic oligonucleotide

SEQ ID NO: 629889 - DNA, 55 bp, Artificial; identical to SEQ ID NO: 194867
  Synthetic oligonucleotide

SEQ ID NO: 629890 - DNA, 55 bp, Artificial; identical to SEQ ID NO: 148780
  Synthetic oligonucleotide

SEQ ID NO: 629891 - DNA, 51 bp, Artificial; identical to SEQ ID NO: 208378
  Synthetic oligonucleotide

SEQ ID NO: 629892 - DNA, 52 bp, Artificial; identical to SEQ ID NO: 151396
  Synthetic oligonucleotide

SEQ ID NO: 629893 - DNA, 52 bp, Artificial; identical to SEQ ID NO: 157519
  Synthetic oligonucleotide

SEQ ID NO: 629894 - DNA, 55 bp, Artificial; identical to SEQ ID NO: 234686
  Synthetic oligonucleotide

SEQ ID NO: 629895 - DNA, 50 bp, Artificial; identical to SEQ ID NO: 222899
  Synthetic oligonucleotide

SEQ ID NO: 629896 - DNA, 50 bp, Artificial; identical to SEQ ID NO: 222900
  Synthetic oligonucleotide

SEQ ID NO: 629897 - DNA, 54 bp, Artificial; identical to SEQ ID NO: 196999
  Synthetic oligonucleotide

SEQ ID NO: 629898 - DNA, 55 bp, Artificial; identical to SEQ ID NO: 202355
  Synthetic oligonucleotide

SEQ ID NO: 629899 - DNA, 55 bp, Artificial; identical to SEQ ID NO: 257588
  Synthetic oligonucleotide

SEQ ID NO: 629900 - DNA, 60 bp, Artificial; identical to SEQ ID NO: 233922
  Synthetic oligonucleotide

SEQ ID NO: 629901 - DNA, 55 bp, Artificial; identical to SEQ ID NO: 144094
  Synthetic oligonucleotide

SEQ ID NO: 629902 - DNA, 53 bp, Artificial; identical to SEQ ID NO: 249970
  Synthetic oligonucleotide

SEQ ID NO: 629903 - DNA, 55 bp, Artificial; identical to SEQ ID NO: 254887
  Synthetic oligonucleotide

SEQ ID NO: 629904 - DNA, 55 bp, Artificial; identical to SEQ ID NO: 221336
  Synthetic oligonucleotide

SEQ ID NO: 629905 - DNA, 55 bp, Artificial; identical to SEQ ID NO: 208379
  Synthetic oligonucleotide

SEQ ID NO: 629906 - DNA, 55 bp, Artificial; identical to SEQ ID NO: 254845
  Synthetic oligonucleotide

SEQ ID NO: 629907 - DNA, 55 bp, Artificial; identical to SEQ ID NO: 183413
  Synthetic oligonucleotide

SEQ ID NO: 629908 - DNA, 55 bp, Artificial; identical to SEQ ID NO: 183433
  Synthetic oligonucleotide

SEQ ID NO: 629909 - DNA, 55 bp, Artificial; identical to SEQ ID NO: 265814
  Synthetic oligonucleotide

SEQ ID NO: 629910 - DNA, 55 bp, Artificial; identical to SEQ ID NO: 159459
  Synthetic oligonucleotide

SEQ ID NO: 629911 - DNA, 55 bp, Artificial; identical to SEQ ID NO: 142364
  Synthetic oligonucleotide

SEQ ID NO: 629912 - DNA, 55 bp, Artificial; identical to SEQ ID NO: 142365
  Synthetic oligonucleotide

SEQ ID NO: 629913 - DNA, 55 bp, Artificial; identical to SEQ ID NO: 183431
  Synthetic oligonucleotide

SEQ ID NO: 629914 - DNA, 55 bp, Artificial; identical to SEQ ID NO: 183430
  Synthetic oligonucleotide

SEQ ID NO: 629915 - DNA, 55 bp, Artificial; identical to SEQ ID NO: 167015
  Synthetic oligonucleotide

SEQ ID NO: 629916 - DNA, 52 bp, Artificial; identical to SEQ ID NO: 203934
  Synthetic oligonucleotide

SEQ ID NO: 629917 - DNA, 55 bp, Artificial; identical to SEQ ID NO: 183428
  Synthetic oligonucleotide

SEQ ID NO: 629918 - DNA, 55 bp, Artificial; identical to SEQ ID NO: 208381
  Synthetic oligonucleotide

SEQ ID NO: 629919 - DNA, 55 bp, Artificial; identical to SEQ ID NO: 194871
  Synthetic oligonucleotide

SEQ ID NO: 629920 - DNA, 57 bp, Artificial; identical to SEQ ID NO: 219586
  Synthetic oligonucleotide

SEQ ID NO: 629921 - DNA, 54 bp, Artificial; identical to SEQ ID NO: 255249
  Synthetic oligonucleotide

SEQ ID NO: 629922 - DNA, 55 bp, Artificial; identical to SEQ ID NO: 198905
  Synthetic oligonucleotide

SEQ ID NO: 629923 - DNA, 55 bp, Artificial; identical to SEQ ID NO: 142366
  Synthetic oligonucleotide

SEQ ID NO: 629924 - DNA, 55 bp, Artificial; identical to SEQ ID NO: 145164
  Synthetic oligonucleotide

SEQ ID NO: 629925 - DNA, 55 bp, Artificial; identical to SEQ ID NO: 162232
  Synthetic oligonucleotide

SEQ ID NO: 629926 - DNA, 55 bp, Artificial; identical to SEQ ID NO: 198904
  Synthetic oligonucleotide

SEQ ID NO: 629927 - DNA, 55 bp, Artificial; identical to SEQ ID NO: 166540
  Synthetic oligonucleotide

SEQ ID NO: 629928 - DNA, 52 bp, Artificial; identical to SEQ ID NO: 217769
  Synthetic oligonucleotide

SEQ ID NO: 629929 - DNA, 55 bp, Artificial; identical to SEQ ID NO: 222901
  Synthetic oligonucleotide

SEQ ID NO: 629930 - DNA, 56 bp, Artificial; identical to SEQ ID NO: 201090
  Synthetic oligonucleotide

SEQ ID NO: 629931 - DNA, 55 bp, Artificial; identical to SEQ ID NO: 198902
  Synthetic oligonucleotide

SEQ ID NO: 629932 - DNA, 55 bp, Artificial; identical to SEQ ID NO: 240145
  Synthetic oligonucleotide

SEQ ID NO: 629933 - DNA, 55 bp, Artificial; identical to SEQ ID NO: 188915
  Synthetic oligonucleotide

SEQ ID NO: 629934 - DNA, 55 bp, Artificial; identical to SEQ ID NO: 153164
  Synthetic oligonucleotide

SEQ ID NO: 629935 - DNA, 55 bp, Artificial; identical to SEQ ID NO: 183419
  Synthetic oligonucleotide

SEQ ID NO: 629936 - DNA, 51 bp, Artificial; identical to SEQ ID NO: 174369
  Synthetic oligonucleotide

SEQ ID NO: 629937 - DNA, 55 bp, Artificial; identical to SEQ ID NO: 210982
  Synthetic oligonucleotide

SEQ ID NO: 629938 - DNA, 55 bp, Artificial; identical to SEQ ID NO: 168218
  Synthetic oligonucleotide

SEQ ID NO: 629939 - DNA, 55 bp, Artificial; identical to SEQ ID NO: 145165
  Synthetic oligonucleotide

SEQ ID NO: 629940 - DNA, 55 bp, Artificial; identical to SEQ ID NO: 245896
  Synthetic oligonucleotide

SEQ ID NO: 629941 - DNA, 54 bp, Artificial; identical to SEQ ID NO: 185279
  Synthetic oligonucleotide

SEQ ID NO: 629942 - DNA, 51 bp, Artificial; identical to SEQ ID NO: 220828
  Synthetic oligonucleotide

SEQ ID NO: 629943 - DNA, 55 bp, Artificial; identical to SEQ ID NO: 210983
  Synthetic oligonucleotide

SEQ ID NO: 629944 - DNA, 55 bp, Artificial; identical to SEQ ID NO: 153160
  Synthetic oligonucleotide

SEQ ID NO: 629945 - DNA, 55 bp, Artificial; identical to SEQ ID NO: 144227
  Synthetic oligonucleotide

SEQ ID NO: 629946 - DNA, 55 bp, Artificial; identical to SEQ ID NO: 159468
  Synthetic oligonucleotide

SEQ ID NO: 629947 - DNA, 55 bp, Artificial; identical to SEQ ID NO: 224533
  Synthetic oligonucleotide

SEQ ID NO: 629948 - DNA, 55 bp, Artificial; identical to SEQ ID NO: 162233
  Synthetic oligonucleotide

SEQ ID NO: 629949 - DNA, 55 bp, Artificial; identical to SEQ ID NO: 205243
  Synthetic oligonucleotide

SEQ ID NO: 629950 - DNA, 55 bp, Artificial; identical to SEQ ID NO: 233688
  Synthetic oligonucleotide

SEQ ID NO: 629951 - DNA, 57 bp, Artificial; identical to SEQ ID NO: 256533
  Synthetic oligonucleotide

SEQ ID NO: 629952 - DNA, 55 bp, Artificial; identical to SEQ ID NO: 245950
  Synthetic oligonucleotide

SEQ ID NO: 629953 - DNA, 60 bp, Artificial; identical to SEQ ID NO: 242259
  Synthetic oligonucleotide

SEQ ID NO: 629954 - DNA, 54 bp, Artificial; identical to SEQ ID NO: 151398
  Synthetic oligonucleotide

SEQ ID NO: 629955 - DNA, 51 bp, Artificial; identical to SEQ ID NO: 257664
  Synthetic oligonucleotide

SEQ ID NO: 629956 - DNA, 54 bp, Artificial; identical to SEQ ID NO: 202352
  Synthetic oligonucleotide

SEQ ID NO: 629957 - DNA, 55 bp, Artificial; identical to SEQ ID NO: 245948
  Synthetic oligonucleotide

SEQ ID NO: 629958 - DNA, 57 bp, Artificial; identical to SEQ ID NO: 237921
  Synthetic oligonucleotide

SEQ ID NO: 629959 - DNA, 55 bp, Artificial; identical to SEQ ID NO: 234741
  Synthetic oligonucleotide

SEQ ID NO: 629960 - DNA, 59 bp, Artificial; identical to SEQ ID NO: 186204
  Synthetic oligonucleotide

SEQ ID NO: 629961 - DNA, 52 bp, Artificial; identical to SEQ ID NO: 190215
  Synthetic oligonucleotide

SEQ ID NO: 629962 - DNA, 55 bp, Artificial; identical to SEQ ID NO: 219689
  Synthetic oligonucleotide

SEQ ID NO: 629963 - DNA, 50 bp, Artificial; identical to SEQ ID NO: 150190
  Synthetic oligonucleotide

SEQ ID NO: 629964 - DNA, 55 bp, Artificial; identical to SEQ ID NO: 190216
  Synthetic oligonucleotide

SEQ ID NO: 629965 - DNA, 53 bp, Artificial; identical to SEQ ID NO: 151399
  Synthetic oligonucleotide

SEQ ID NO: 629966 - DNA, 55 bp, Artificial; identical to SEQ ID NO: 160013
  Synthetic oligonucleotide

SEQ ID NO: 629967 - DNA, 55 bp, Artificial; identical to SEQ ID NO: 249443
  Synthetic oligonucleotide

SEQ ID NO: 629968 - DNA, 55 bp, Artificial; identical to SEQ ID NO: 151401
  Synthetic oligonucleotide

SEQ ID NO: 629969 - DNA, 55 bp, Artificial; identical to SEQ ID NO: 258926
  Synthetic oligonucleotide

SEQ ID NO: 629970 - DNA, 50 bp, Artificial; identical to SEQ ID NO: 257589
  Synthetic oligonucleotide

SEQ ID NO: 629971 - DNA, 55 bp, Artificial; identical to SEQ ID NO: 198900
  Synthetic oligonucleotide

SEQ ID NO: 629972 - DNA, 55 bp, Artificial; identical to SEQ ID NO: 183398
  Synthetic oligonucleotide

SEQ ID NO: 629973 - DNA, 55 bp, Artificial; identical to SEQ ID NO: 183396
  Synthetic oligonucleotide

SEQ ID NO: 629974 - DNA, 55 bp, Artificial; identical to SEQ ID NO: 183387
  Synthetic oligonucleotide

SEQ ID NO: 629975 - DNA, 55 bp, Artificial; identical to SEQ ID NO: 249544
  Synthetic oligonucleotide

SEQ ID NO: 629976 - DNA, 55 bp, Artificial; identical to SEQ ID NO: 151402
  Synthetic oligonucleotide

SEQ ID NO: 629977 - DNA, 55 bp, Artificial; identical to SEQ ID NO: 174261
  Synthetic oligonucleotide

SEQ ID NO: 629978 - DNA, 55 bp, Artificial; identical to SEQ ID NO: 207652
  Synthetic oligonucleotide

SEQ ID NO: 629979 - DNA, 54 bp, Artificial; identical to SEQ ID NO: 190653
  Synthetic oligonucleotide

SEQ ID NO: 629980 - DNA, 55 bp, Artificial; identical to SEQ ID NO: 142368
  Synthetic oligonucleotide

SEQ ID NO: 629981 - DNA, 51 bp, Artificial; identical to SEQ ID NO: 170220
  Synthetic oligonucleotide

SEQ ID NO: 629982 - DNA, 55 bp, Artificial; identical to SEQ ID NO: 224532
  Synthetic oligonucleotide

SEQ ID NO: 629983 - DNA, 55 bp, Artificial; identical to SEQ ID NO: 245947
  Synthetic oligonucleotide

SEQ ID NO: 629984 - DNA, 56 bp, Artificial; identical to SEQ ID NO: 187284
  Synthetic oligonucleotide

SEQ ID NO: 629985 - DNA, 55 bp, Artificial; identical to SEQ ID NO: 151404
  Synthetic oligonucleotide

SEQ ID NO: 629986 - DNA, 60 bp, Artificial; identical to SEQ ID NO: 224813
  Synthetic oligonucleotide

SEQ ID NO: 629987 - DNA, 50 bp, Artificial; identical to SEQ ID NO: 185797
  Synthetic oligonucleotide

SEQ ID NO: 629988 - DNA, 57 bp, Artificial; identical to SEQ ID NO: 266373
  Synthetic oligonucleotide

SEQ ID NO: 629989 - DNA, 51 bp, Artificial; identical to SEQ ID NO: 165270
  Synthetic oligonucleotide

SEQ ID NO: 629990 - DNA, 55 bp, Artificial; identical to SEQ ID NO: 188195
  Synthetic oligonucleotide

SEQ ID NO: 629991 - DNA, 57 bp, Artificial; identical to SEQ ID NO: 247052
  Synthetic oligonucleotide

SEQ ID NO: 629992 - DNA, 50 bp, Artificial; identical to SEQ ID NO: 149931
  Synthetic oligonucleotide

SEQ ID NO: 629993 - DNA, 58 bp, Artificial; identical to SEQ ID NO: 149604
  Synthetic oligonucleotide

SEQ ID NO: 629994 - DNA, 55 bp, Artificial; identical to SEQ ID NO: 188777
  Synthetic oligonucleotide

SEQ ID NO: 629995 - DNA, 55 bp, Artificial; identical to SEQ ID NO: 171397
  Synthetic oligonucleotide

SEQ ID NO: 629996 - DNA, 55 bp, Artificial; identical to SEQ ID NO: 159426
  Synthetic oligonucleotide

SEQ ID NO: 629997 - DNA, 55 bp, Artificial; identical to SEQ ID NO: 183487
  Synthetic oligonucleotide

SEQ ID NO: 629998 - DNA, 55 bp, Artificial; identical to SEQ ID NO: 240149
  Synthetic oligonucleotide

SEQ ID NO: 629999 - DNA, 55 bp, Artificial; identical to SEQ ID NO: 240150
  Synthetic oligonucleotide

SEQ ID NO: 630000 - DNA, 55 bp, Artificial; identical to SEQ ID NO: 159427
  Synthetic oligonucleotide

SEQ ID NO: 630001 - DNA, 55 bp, Artificial; identical to SEQ ID NO: 183485
  Synthetic oligonucleotide

SEQ ID NO: 630002 - DNA, 55 bp, Artificial; identical to SEQ ID NO: 242735
  Synthetic oligonucleotide

SEQ ID NO: 630003 - DNA, 55 bp, Artificial; identical to SEQ ID NO: 201649
  Synthetic oligonucleotide

SEQ ID NO: 630004 - DNA, 55 bp, Artificial; identical to SEQ ID NO: 224528
  Synthetic oligonucleotide

SEQ ID NO: 630005 - DNA, 55 bp, Artificial; identical to SEQ ID NO: 208382
  Synthetic oligonucleotide

SEQ ID NO: 630006 - DNA, 55 bp, Artificial; identical to SEQ ID NO: 198898
  Synthetic oligonucleotide

SEQ ID NO: 630007 - DNA, 54 bp, Artificial; identical to SEQ ID NO: 157286
  Synthetic oligonucleotide

SEQ ID NO: 630008 - DNA, 55 bp, Artificial; identical to SEQ ID NO: 162234
  Synthetic oligonucleotide

SEQ ID NO: 630009 - DNA, 53 bp, Artificial; identical to SEQ ID NO: 202469
  Synthetic oligonucleotide

SEQ ID NO: 630010 - DNA, 60 bp, Artificial; identical to SEQ ID NO: 141556
  Synthetic oligonucleotide

SEQ ID NO: 630011 - DNA, 57 bp, Artificial; identical to SEQ ID NO: 186149
  Synthetic oligonucleotide

SEQ ID NO: 630012 - DNA, 55 bp, Artificial; identical to SEQ ID NO: 261947
  Synthetic oligonucleotide

SEQ ID NO: 630013 - DNA, 54 bp, Artificial; identical to SEQ ID NO: 185208
  Synthetic oligonucleotide

SEQ ID NO: 630014 - DNA, 55 bp, Artificial; identical to SEQ ID NO: 254839
  Synthetic oligonucleotide

SEQ ID NO: 630015 - DNA, 55 bp, Artificial; identical to SEQ ID NO: 208383
  Synthetic oligonucleotide

SEQ ID NO: 630016 - DNA, 55 bp, Artificial; identical to SEQ ID NO: 144028
  Synthetic oligonucleotide

SEQ ID NO: 630017 - DNA, 55 bp, Artificial; identical to SEQ ID NO: 252824
  Synthetic oligonucleotide

SEQ ID NO: 630018 - DNA, 58 bp, Artificial; identical to SEQ ID NO: 247425
  Synthetic oligonucleotide

SEQ ID NO: 630019 - DNA, 55 bp, Artificial; identical to SEQ ID NO: 187955
  Synthetic oligonucleotide

SEQ ID NO: 630020 - DNA, 55 bp, Artificial; identical to SEQ ID NO: 183501
  Synthetic oligonucleotide

SEQ ID NO: 630021 - DNA, 54 bp, Artificial; identical to SEQ ID NO: 164736
  Synthetic oligonucleotide

SEQ ID NO: 630022 - DNA, 54 bp, Artificial; identical to SEQ ID NO: 207869
  Synthetic oligonucleotide

SEQ ID NO: 630023 - DNA, 59 bp, Artificial; identical to SEQ ID NO: 144987
  Synthetic oligonucleotide

SEQ ID NO: 630024 - DNA, 55 bp, Artificial; identical to SEQ ID NO: 254838
  Synthetic oligonucleotide

SEQ ID NO: 630025 - DNA, 55 bp, Artificial; identical to SEQ ID NO: 151405
  Synthetic oligonucleotide

SEQ ID NO: 630026 - DNA, 55 bp, Artificial; identical to SEQ ID NO: 189494
  Synthetic oligonucleotide

SEQ ID NO: 630027 - DNA, 55 bp, Artificial; identical to SEQ ID NO: 208384
  Synthetic oligonucleotide

SEQ ID NO: 630028 - DNA, 55 bp, Artificial; identical to SEQ ID NO: 159429
  Synthetic oligonucleotide

SEQ ID NO: 630029 - DNA, 55 bp, Artificial; identical to SEQ ID NO: 144017
  Synthetic oligonucleotide

SEQ ID NO: 630030 - DNA, 55 bp, Artificial; identical to SEQ ID NO: 208386
  Synthetic oligonucleotide

SEQ ID NO: 630031 - DNA, 52 bp, Artificial; identical to SEQ ID NO: 217772
  Synthetic oligonucleotide

SEQ ID NO: 630032 - DNA, 55 bp, Artificial; identical to SEQ ID NO: 245939
  Synthetic oligonucleotide

SEQ ID NO: 630033 - DNA, 55 bp, Artificial; identical to SEQ ID NO: 208387
  Synthetic oligonucleotide

SEQ ID NO: 630034 - DNA, 55 bp, Artificial; identical to SEQ ID NO: 210984
  Synthetic oligonucleotide

SEQ ID NO: 630035 - DNA, 55 bp, Artificial; identical to SEQ ID NO: 254837
  Synthetic oligonucleotide

SEQ ID NO: 630036 - DNA, 55 bp, Artificial; identical to SEQ ID NO: 153157
  Synthetic oligonucleotide

SEQ ID NO: 630037 - DNA, 55 bp, Artificial; identical to SEQ ID NO: 142370
  Synthetic oligonucleotide

SEQ ID NO: 630038 - DNA, 55 bp, Artificial; identical to SEQ ID NO: 238158
  Synthetic oligonucleotide

SEQ ID NO: 630039 - DNA, 59 bp, Artificial; identical to SEQ ID NO: 224309
  Synthetic oligonucleotide

SEQ ID NO: 630040 - DNA, 55 bp, Artificial; identical to SEQ ID NO: 210985
  Synthetic oligonucleotide

SEQ ID NO: 630041 - DNA, 55 bp, Artificial; identical to SEQ ID NO: 194823
  Synthetic oligonucleotide

SEQ ID NO: 630042 - DNA, 53 bp, Artificial; identical to SEQ ID NO: 190364
  Synthetic oligonucleotide

SEQ ID NO: 630043 - DNA, 55 bp, Artificial; identical to SEQ ID NO: 224527
  Synthetic oligonucleotide

SEQ ID NO: 630044 - DNA, 55 bp, Artificial; identical to SEQ ID NO: 171401
  Synthetic oligonucleotide

SEQ ID NO: 630045 - DNA, 60 bp, Artificial; identical to SEQ ID NO: 186660
  Synthetic oligonucleotide

SEQ ID NO: 630046 - DNA, 59 bp, Artificial; identical to SEQ ID NO: 167221
  Synthetic oligonucleotide

SEQ ID NO: 630047 - DNA, 58 bp, Artificial; identical to SEQ ID NO: 217059
  Synthetic oligonucleotide

SEQ ID NO: 630048 - DNA, 60 bp, Artificial; identical to SEQ ID NO: 141557
  Synthetic oligonucleotide

SEQ ID NO: 630049 - DNA, 55 bp, Artificial; identical to SEQ ID NO: 240151
  Synthetic oligonucleotide

SEQ ID NO: 630050 - DNA, 55 bp, Artificial; identical to SEQ ID NO: 233683
  Synthetic oligonucleotide

SEQ ID NO: 630051 - DNA, 52 bp, Artificial; identical to SEQ ID NO: 190222
  Synthetic oligonucleotide

SEQ ID NO: 630052 - DNA, 55 bp, Artificial; identical to SEQ ID NO: 254835
  Synthetic oligonucleotide

SEQ ID NO: 630053 - DNA, 55 bp, Artificial; identical to SEQ ID NO: 245937
  Synthetic oligonucleotide

SEQ ID NO: 630054 - DNA, 55 bp, Artificial; identical to SEQ ID NO: 188766
  Synthetic oligonucleotide

SEQ ID NO: 630055 - DNA, 54 bp, Artificial; identical to SEQ ID NO: 218274
  Synthetic oligonucleotide

SEQ ID NO: 630056 - DNA, 55 bp, Artificial; identical to SEQ ID NO: 159433
  Synthetic oligonucleotide

SEQ ID NO: 630057 - DNA, 55 bp, Artificial; identical to SEQ ID NO: 196996
  Synthetic oligonucleotide

SEQ ID NO: 630058 - DNA, 51 bp, Artificial; identical to SEQ ID NO: 255757
  Synthetic oligonucleotide

SEQ ID NO: 630059 - DNA, 55 bp, Artificial; identical to SEQ ID NO: 218263
  Synthetic oligonucleotide

SEQ ID NO: 630060 - DNA, 54 bp, Artificial; identical to SEQ ID NO: 208390
  Synthetic oligonucleotide

SEQ ID NO: 630061 - DNA, 51 bp, Artificial; identical to SEQ ID NO: 157823
  Synthetic oligonucleotide

SEQ ID NO: 630062 - DNA, 59 bp, Artificial; identical to SEQ ID NO: 186637
  Synthetic oligonucleotide

SEQ ID NO: 630063 - DNA, 55 bp, Artificial; identical to SEQ ID NO: 240152
  Synthetic oligonucleotide

SEQ ID NO: 630064 - DNA, 54 bp, Artificial; identical to SEQ ID NO: 144348
  Synthetic oligonucleotide

SEQ ID NO: 630065 - DNA, 52 bp, Artificial; identical to SEQ ID NO: 190893
  Synthetic oligonucleotide

SEQ ID NO: 630066 - DNA, 55 bp, Artificial; identical to SEQ ID NO: 216529
  Synthetic oligonucleotide

SEQ ID NO: 630067 - DNA, 52 bp, Artificial; identical to SEQ ID NO: 197598
  Synthetic oligonucleotide

SEQ ID NO: 630068 - DNA, 50 bp, Artificial; identical to SEQ ID NO: 241360
  Synthetic oligonucleotide

SEQ ID NO: 630069 - DNA, 59 bp, Artificial; identical to SEQ ID NO: 239219
  Synthetic oligonucleotide

SEQ ID NO: 630070 - DNA, 55 bp, Artificial; identical to SEQ ID NO: 225551
  Synthetic oligonucleotide

SEQ ID NO: 630071 - DNA, 55 bp, Artificial; identical to SEQ ID NO: 216528
  Synthetic oligonucleotide

SEQ ID NO: 630072 - DNA, 55 bp, Artificial; identical to SEQ ID NO: 145172
  Synthetic oligonucleotide

SEQ ID NO: 630073 - DNA, 55 bp, Artificial; identical to SEQ ID NO: 171402
  Synthetic oligonucleotide

SEQ ID NO: 630074 - DNA, 54 bp, Artificial; identical to SEQ ID NO: 255246
  Synthetic oligonucleotide

SEQ ID NO: 630075 - DNA, 52 bp, Artificial; identical to SEQ ID NO: 162334
  Synthetic oligonucleotide

SEQ ID NO: 630076 - DNA, 55 bp, Artificial; identical to SEQ ID NO: 186604
  Synthetic oligonucleotide

SEQ ID NO: 630077 - DNA, 54 bp, Artificial; identical to SEQ ID NO: 249688
  Synthetic oligonucleotide

SEQ ID NO: 630078 - DNA, 50 bp, Artificial; identical to SEQ ID NO: 206754
  Synthetic oligonucleotide

SEQ ID NO: 630079 - DNA, 54 bp, Artificial; identical to SEQ ID NO: 216600
  Synthetic oligonucleotide

SEQ ID NO: 630080 - DNA, 56 bp, Artificial; identical to SEQ ID NO: 179987
  Synthetic oligonucleotide

SEQ ID NO: 630081 - DNA, 55 bp, Artificial; identical to SEQ ID NO: 159438
  Synthetic oligonucleotide

SEQ ID NO: 630082 - DNA, 55 bp, Artificial; identical to SEQ ID NO: 261948
  Synthetic oligonucleotide

SEQ ID NO: 630083 - DNA, 55 bp, Artificial; identical to SEQ ID NO: 171789
  Synthetic oligonucleotide

SEQ ID NO: 630084 - DNA, 55 bp, Artificial; identical to SEQ ID NO: 245935
  Synthetic oligonucleotide

SEQ ID NO: 630085 - DNA, 55 bp, Artificial; identical to SEQ ID NO: 245933
  Synthetic oligonucleotide

SEQ ID NO: 630086 - DNA, 56 bp, Artificial; identical to SEQ ID NO: 242254
  Synthetic oligonucleotide

SEQ ID NO: 630087 - DNA, 55 bp, Artificial; identical to SEQ ID NO: 240155
  Synthetic oligonucleotide

SEQ ID NO: 630088 - DNA, 55 bp, Artificial; identical to SEQ ID NO: 221339
  Synthetic oligonucleotide

SEQ ID NO: 630089 - DNA, 55 bp, Artificial; identical to SEQ ID NO: 203290
  Synthetic oligonucleotide

SEQ ID NO: 630090 - DNA, 55 bp, Artificial; identical to SEQ ID NO: 151412
  Synthetic oligonucleotide

SEQ ID NO: 630091 - DNA, 55 bp, Artificial; identical to SEQ ID NO: 144226
  Synthetic oligonucleotide

SEQ ID NO: 630092 - DNA, 51 bp, Artificial; identical to SEQ ID NO: 262675
  Synthetic oligonucleotide

SEQ ID NO: 630093 - DNA, 58 bp, Artificial; identical to SEQ ID NO: 186526
  Synthetic oligonucleotide

SEQ ID NO: 630094 - DNA, 55 bp, Artificial; identical to SEQ ID NO: 159440
  Synthetic oligonucleotide

SEQ ID NO: 630095 - DNA, 53 bp, Artificial; identical to SEQ ID NO: 190804
  Synthetic oligonucleotide

SEQ ID NO: 630096 - DNA, 55 bp, Artificial; identical to SEQ ID NO: 208393
  Synthetic oligonucleotide

SEQ ID NO: 630097 - DNA, 55 bp, Artificial; identical to SEQ ID NO: 254825
  Synthetic oligonucleotide

SEQ ID NO: 630098 - DNA, 55 bp, Artificial; identical to SEQ ID NO: 205245
  Synthetic oligonucleotide

SEQ ID NO: 630099 - DNA, 55 bp, Artificial; identical to SEQ ID NO: 183450
  Synthetic oligonucleotide

SEQ ID NO: 630100 - DNA, 53 bp, Artificial; identical to SEQ ID NO: 210989
  Synthetic oligonucleotide

SEQ ID NO: 630101 - DNA, 55 bp, Artificial; identical to SEQ ID NO: 254865
  Synthetic oligonucleotide

SEQ ID NO: 630102 - DNA, 55 bp, Artificial; identical to SEQ ID NO: 148809
  Synthetic oligonucleotide

SEQ ID NO: 630103 - DNA, 50 bp, Artificial; identical to SEQ ID NO: 216517
  Synthetic oligonucleotide

SEQ ID NO: 630104 - DNA, 58 bp, Artificial; identical to SEQ ID NO: 217070
  Synthetic oligonucleotide

SEQ ID NO: 630105 - DNA, 54 bp, Artificial; identical to SEQ ID NO: 237897
  Synthetic oligonucleotide

SEQ ID NO: 630106 - DNA, 53 bp, Artificial; identical to SEQ ID NO: 245930
  Synthetic oligonucleotide

SEQ ID NO: 630107 - DNA, 53 bp, Artificial; identical to SEQ ID NO: 187957
  Synthetic oligonucleotide

SEQ ID NO: 630108 - DNA, 55 bp, Artificial; identical to SEQ ID NO: 168222
  Synthetic oligonucleotide

SEQ ID NO: 630109 - DNA, 55 bp, Artificial; identical to SEQ ID NO: 224521
  Synthetic oligonucleotide

SEQ ID NO: 630110 - DNA, 53 bp, Artificial; identical to SEQ ID NO: 205246
  Synthetic oligonucleotide

SEQ ID NO: 630111 - DNA, 54 bp, Artificial; identical to SEQ ID NO: 254864
  Synthetic oligonucleotide

SEQ ID NO: 630112 - DNA, 54 bp, Artificial; identical to SEQ ID NO: 183470
  Synthetic oligonucleotide

SEQ ID NO: 630113 - DNA, 55 bp, Artificial; identical to SEQ ID NO: 183467
  Synthetic oligonucleotide

SEQ ID NO: 630114 - DNA, 51 bp, Artificial; identical to SEQ ID NO: 254863
  Synthetic oligonucleotide

SEQ ID NO: 630115 - DNA, 55 bp, Artificial; identical to SEQ ID NO: 254862
  Synthetic oligonucleotide

SEQ ID NO: 630116 - DNA, 58 bp, Artificial; identical to SEQ ID NO: 256522
  Synthetic oligonucleotide

SEQ ID NO: 630117 - DNA, 46 bp, Artificial; identical to SEQ ID NO: 144809
  Synthetic oligonucleotide

SEQ ID NO: 630118 - DNA, 55 bp, Artificial; identical to SEQ ID NO: 257591
  Synthetic oligonucleotide

SEQ ID NO: 630119 - DNA, 55 bp, Artificial; identical to SEQ ID NO: 166561
  Synthetic oligonucleotide

SEQ ID NO: 630120 - DNA, 53 bp, Artificial; identical to SEQ ID NO: 190810
  Synthetic oligonucleotide

SEQ ID NO: 630121 - DNA, 54 bp, Artificial; identical to SEQ ID NO: 147308
  Synthetic oligonucleotide

SEQ ID NO: 630122 - DNA, 59 bp, Artificial; identical to SEQ ID NO: 242252
  Synthetic oligonucleotide

SEQ ID NO: 630123 - DNA, 55 bp, Artificial; identical to SEQ ID NO: 260203
  Synthetic oligonucleotide

SEQ ID NO: 630124 - DNA, 54 bp, Artificial; identical to SEQ ID NO: 166563
  Synthetic oligonucleotide

SEQ ID NO: 630125 - DNA, 52 bp, Artificial; identical to SEQ ID NO: 209658
  Synthetic oligonucleotide

SEQ ID NO: 630126 - DNA, 54 bp, Artificial; identical to SEQ ID NO: 141215
  Synthetic oligonucleotide

SEQ ID NO: 630127 - DNA, 57 bp, Artificial; identical to SEQ ID NO: 141558
  Synthetic oligonucleotide

SEQ ID NO: 630128 - DNA, 55 bp, Artificial; identical to SEQ ID NO: 141928
  Synthetic oligonucleotide

SEQ ID NO: 630129 - DNA, 55 bp, Artificial; identical to SEQ ID NO: 258925
  Synthetic oligonucleotide

SEQ ID NO: 630130 - DNA, 55 bp, Artificial; identical to SEQ ID NO: 169864
  Synthetic oligonucleotide

SEQ ID NO: 630131 - DNA, 54 bp, Artificial; identical to SEQ ID NO: 157253
  Synthetic oligonucleotide

SEQ ID NO: 630132 - DNA, 55 bp, Artificial; identical to SEQ ID NO: 146582
  Synthetic oligonucleotide

SEQ ID NO: 630133 - DNA, 47 bp, Artificial; identical to SEQ ID NO: 152931
  Synthetic oligonucleotide

SEQ ID NO: 630134 - DNA, 49 bp, Artificial; identical to SEQ ID NO: 159443
  Synthetic oligonucleotide

SEQ ID NO: 630135 - DNA, 53 bp, Artificial; identical to SEQ ID NO: 207670
  Synthetic oligonucleotide

SEQ ID NO: 630136 - DNA, 55 bp, Artificial; identical to SEQ ID NO: 235119
  Synthetic oligonucleotide

SEQ ID NO: 630137 - DNA, 55 bp, Artificial; identical to SEQ ID NO: 159447
  Synthetic oligonucleotide

SEQ ID NO: 630138 - DNA, 58 bp, Artificial; identical to SEQ ID NO: 187273
  Synthetic oligonucleotide

SEQ ID NO: 630139 - DNA, 55 bp, Artificial; identical to SEQ ID NO: 171404
  Synthetic oligonucleotide

SEQ ID NO: 630140 - DNA, 55 bp, Artificial; identical to SEQ ID NO: 207672
  Synthetic oligonucleotide

SEQ ID NO: 630141 - DNA, 55 bp, Artificial; identical to SEQ ID NO: 183459
  Synthetic oligonucleotide

SEQ ID NO: 630142 - DNA, 51 bp, Artificial; identical to SEQ ID NO: 185231
  Synthetic oligonucleotide

SEQ ID NO: 630143 - DNA, 57 bp, Artificial; identical to SEQ ID NO: 207045
  Synthetic oligonucleotide

SEQ ID NO: 630144 - DNA, 55 bp, Artificial; identical to SEQ ID NO: 188911
  Synthetic oligonucleotide

SEQ ID NO: 630145 - DNA, 53 bp, Artificial; identical to SEQ ID NO: 157299
  Synthetic oligonucleotide

SEQ ID NO: 630146 - DNA, 54 bp, Artificial; identical to SEQ ID NO: 225212
  Synthetic oligonucleotide

SEQ ID NO: 630147 - DNA, 55 bp, Artificial; identical to SEQ ID NO: 210990
  Synthetic oligonucleotide

SEQ ID NO: 630148 - DNA, 55 bp, Artificial; identical to SEQ ID NO: 245924
  Synthetic oligonucleotide

SEQ ID NO: 630149 - DNA, 52 bp, Artificial; identical to SEQ ID NO: 153657
  Synthetic oligonucleotide

SEQ ID NO: 630150 - DNA, 55 bp, Artificial; identical to SEQ ID NO: 257593
  Synthetic oligonucleotide

SEQ ID NO: 630151 - DNA, 55 bp, Artificial; identical to SEQ ID NO: 149560
  Synthetic oligonucleotide

SEQ ID NO: 630152 - DNA, 55 bp, Artificial; identical to SEQ ID NO: 151414
  Synthetic oligonucleotide

SEQ ID NO: 630153 - DNA, 55 bp, Artificial; identical to SEQ ID NO: 208264
  Synthetic oligonucleotide

SEQ ID NO: 630154 - DNA, 52 bp, Artificial; identical to SEQ ID NO: 168091
  Synthetic oligonucleotide

SEQ ID NO: 630155 - DNA, 53 bp, Artificial; identical to SEQ ID NO: 174362
  Synthetic oligonucleotide

SEQ ID NO: 630156 - DNA, 55 bp, Artificial; identical to SEQ ID NO: 174554
  Synthetic oligonucleotide

SEQ ID NO: 630157 - DNA, 52 bp, Artificial; identical to SEQ ID NO: 186305
  Synthetic oligonucleotide

SEQ ID NO: 630158 - DNA, 53 bp, Artificial; identical to SEQ ID NO: 160438
  Synthetic oligonucleotide

SEQ ID NO: 630159 - DNA, 55 bp, Artificial; identical to SEQ ID NO: 248790
  Synthetic oligonucleotide

SEQ ID NO: 630160 - DNA, 55 bp, Artificial; identical to SEQ ID NO: 183845
  Synthetic oligonucleotide

SEQ ID NO: 630161 - DNA, 56 bp, Artificial; identical to SEQ ID NO: 247053
  Synthetic oligonucleotide

SEQ ID NO: 630162 - DNA, 56 bp, Artificial; identical to SEQ ID NO: 152934
  Synthetic oligonucleotide

SEQ ID NO: 630163 - DNA, 55 bp, Artificial; identical to SEQ ID NO: 205248
  Synthetic oligonucleotide

SEQ ID NO: 630164 - DNA, 54 bp, Artificial; identical to SEQ ID NO: 142328
  Synthetic oligonucleotide

SEQ ID NO: 630165 - DNA, 49 bp, Artificial; identical to SEQ ID NO: 155260
  Synthetic oligonucleotide

SEQ ID NO: 630166 - DNA, 55 bp, Artificial; identical to SEQ ID NO: 152387
  Synthetic oligonucleotide

SEQ ID NO: 630167 - DNA, 52 bp, Artificial; identical to SEQ ID NO: 186309
  Synthetic oligonucleotide

SEQ ID NO: 630168 - DNA, 55 bp, Artificial; identical to SEQ ID NO: 148800
  Synthetic oligonucleotide

SEQ ID NO: 630169 - DNA, 55 bp, Artificial; identical to SEQ ID NO: 207673
  Synthetic oligonucleotide

SEQ ID NO: 630170 - DNA, 53 bp, Artificial; identical to SEQ ID NO: 144485
  Synthetic oligonucleotide

SEQ ID NO: 630171 - DNA, 55 bp, Artificial; identical to SEQ ID NO: 148799
  Synthetic oligonucleotide

SEQ ID NO: 630172 - DNA, 53 bp, Artificial; identical to SEQ ID NO: 247057
  Synthetic oligonucleotide

SEQ ID NO: 630173 - DNA, 54 bp, Artificial; identical to SEQ ID NO: 185337
  Synthetic oligonucleotide

SEQ ID NO: 630174 - DNA, 54 bp, Artificial; identical to SEQ ID NO: 221103
  Synthetic oligonucleotide

SEQ ID NO: 630175 - DNA, 52 bp, Artificial; identical to SEQ ID NO: 243457
  Synthetic oligonucleotide

SEQ ID NO: 630176 - DNA, 55 bp, Artificial; identical to SEQ ID NO: 183835
  Synthetic oligonucleotide

SEQ ID NO: 630177 - DNA, 55 bp, Artificial; identical to SEQ ID NO: 216510
  Synthetic oligonucleotide

SEQ ID NO: 630178 - DNA, 55 bp, Artificial; identical to SEQ ID NO: 242739
  Synthetic oligonucleotide

SEQ ID NO: 630179 - DNA, 51 bp, Artificial; identical to SEQ ID NO: 186629
  Synthetic oligonucleotide

SEQ ID NO: 630180 - DNA, 55 bp, Artificial; identical to SEQ ID NO: 254859
  Synthetic oligonucleotide

SEQ ID NO: 630181 - DNA, 53 bp, Artificial; identical to SEQ ID NO: 148798
  Synthetic oligonucleotide

SEQ ID NO: 630182 - DNA, 51 bp, Artificial; identical to SEQ ID NO: 212595
  Synthetic oligonucleotide

SEQ ID NO: 630183 - DNA, 55 bp, Artificial; identical to SEQ ID NO: 148797
  Synthetic oligonucleotide

SEQ ID NO: 630184 - DNA, 55 bp, Artificial; identical to SEQ ID NO: 148796
  Synthetic oligonucleotide

SEQ ID NO: 630185 - DNA, 57 bp, Artificial; identical to SEQ ID NO: 186460
  Synthetic oligonucleotide

SEQ ID NO: 630186 - DNA, 58 bp, Artificial; identical to SEQ ID NO: 186438
  Synthetic oligonucleotide

SEQ ID NO: 630187 - DNA, 55 bp, Artificial; identical to SEQ ID NO: 198951
  Synthetic oligonucleotide

SEQ ID NO: 630188 - DNA, 55 bp, Artificial; identical to SEQ ID NO: 203496
  Synthetic oligonucleotide

SEQ ID NO: 630189 - DNA, 54 bp, Artificial; identical to SEQ ID NO: 245860
  Synthetic oligonucleotide

SEQ ID NO: 630190 - DNA, 54 bp, Artificial; identical to SEQ ID NO: 147037
  Synthetic oligonucleotide

SEQ ID NO: 630191 - DNA, 51 bp, Artificial; identical to SEQ ID NO: 197718
  Synthetic oligonucleotide

SEQ ID NO: 630192 - DNA, 55 bp, Artificial; identical to SEQ ID NO: 152653
  Synthetic oligonucleotide

SEQ ID NO: 630193 - DNA, 55 bp, Artificial; identical to SEQ ID NO: 208266
  Synthetic oligonucleotide

SEQ ID NO: 630194 - DNA, 55 bp, Artificial; identical to SEQ ID NO: 159683
  Synthetic oligonucleotide

SEQ ID NO: 630195 - DNA, 51 bp, Artificial; identical to SEQ ID NO: 187079
  Synthetic oligonucleotide

SEQ ID NO: 630196 - DNA, 60 bp, Artificial; identical to SEQ ID NO: 247059
  Synthetic oligonucleotide

SEQ ID NO: 630197 - DNA, 52 bp, Artificial; identical to SEQ ID NO: 258150
  Synthetic oligonucleotide

SEQ ID NO: 630198 - DNA, 55 bp, Artificial; identical to SEQ ID NO: 198946
  Synthetic oligonucleotide

SEQ ID NO: 630199 - DNA, 52 bp, Artificial; identical to SEQ ID NO: 141559
  Synthetic oligonucleotide

SEQ ID NO: 630200 - DNA, 55 bp, Artificial; identical to SEQ ID NO: 183853
  Synthetic oligonucleotide

SEQ ID NO: 630201 - DNA, 52 bp, Artificial; identical to SEQ ID NO: 255546
  Synthetic oligonucleotide

SEQ ID NO: 630202 - DNA, 55 bp, Artificial; identical to SEQ ID NO: 190186
  Synthetic oligonucleotide

SEQ ID NO: 630203 - DNA, 57 bp, Artificial; identical to SEQ ID NO: 166163
  Synthetic oligonucleotide

SEQ ID NO: 630204 - DNA, 54 bp, Artificial; identical to SEQ ID NO: 183847
  Synthetic oligonucleotide

SEQ ID NO: 630205 - DNA, 54 bp, Artificial; identical to SEQ ID NO: 183795
  Synthetic oligonucleotide

SEQ ID NO: 630206 - DNA, 57 bp, Artificial; identical to SEQ ID NO: 210659
  Synthetic oligonucleotide

SEQ ID NO: 630207 - DNA, 50 bp, Artificial; identical to SEQ ID NO: 176903
  Synthetic oligonucleotide

SEQ ID NO: 630208 - DNA, 54 bp, Artificial; identical to SEQ ID NO: 185362
  Synthetic oligonucleotide

SEQ ID NO: 630209 - DNA, 59 bp, Artificial; identical to SEQ ID NO: 165201
  Synthetic oligonucleotide

SEQ ID NO: 630210 - DNA, 55 bp, Artificial; identical to SEQ ID NO: 190188
  Synthetic oligonucleotide

SEQ ID NO: 630211 - DNA, 56 bp, Artificial; identical to SEQ ID NO: 149926
  Synthetic oligonucleotide

SEQ ID NO: 630212 - DNA, 53 bp, Artificial; identical to SEQ ID NO: 208710
  Synthetic oligonucleotide

SEQ ID NO: 630213 - DNA, 55 bp, Artificial; identical to SEQ ID NO: 202344
  Synthetic oligonucleotide

SEQ ID NO: 630214 - DNA, 55 bp, Artificial; identical to SEQ ID NO: 148792
  Synthetic oligonucleotide

SEQ ID NO: 630215 - DNA, 55 bp, Artificial; identical to SEQ ID NO: 148791
  Synthetic oligonucleotide

SEQ ID NO: 630216 - DNA, 56 bp, Artificial; identical to SEQ ID NO: 192250
  Synthetic oligonucleotide

SEQ ID NO: 630217 - DNA, 55 bp, Artificial; identical to SEQ ID NO: 254854
  Synthetic oligonucleotide

SEQ ID NO: 630218 - DNA, 52 bp, Artificial; identical to SEQ ID NO: 203939
  Synthetic oligonucleotide

SEQ ID NO: 630219 - DNA, 51 bp, Artificial; identical to SEQ ID NO: 167183
  Synthetic oligonucleotide

SEQ ID NO: 630220 - DNA, 55 bp, Artificial; identical to SEQ ID NO: 148790
  Synthetic oligonucleotide

SEQ ID NO: 630221 - DNA, 55 bp, Artificial; identical to SEQ ID NO: 242251
  Synthetic oligonucleotide

SEQ ID NO: 630222 - DNA, 54 bp, Artificial; identical to SEQ ID NO: 207300
  Synthetic oligonucleotide

SEQ ID NO: 630223 - DNA, 52 bp, Artificial; identical to SEQ ID NO: 237704
  Synthetic oligonucleotide

SEQ ID NO: 630224 - DNA, 56 bp, Artificial; identical to SEQ ID NO: 149904
  Synthetic oligonucleotide

SEQ ID NO: 630225 - DNA, 54 bp, Artificial; identical to SEQ ID NO: 177553
  Synthetic oligonucleotide

SEQ ID NO: 630226 - DNA, 55 bp, Artificial; identical to SEQ ID NO: 242740
  Synthetic oligonucleotide

SEQ ID NO: 630227 - DNA, 53 bp, Artificial; identical to SEQ ID NO: 149365
  Synthetic oligonucleotide

SEQ ID NO: 630228 - DNA, 55 bp, Artificial; identical to SEQ ID NO: 199626
  Synthetic oligonucleotide

SEQ ID NO: 630229 - DNA, 55 bp, Artificial; identical to SEQ ID NO: 142563
  Synthetic oligonucleotide

SEQ ID NO: 630230 - DNA, 55 bp, Artificial; identical to SEQ ID NO: 216547
  Synthetic oligonucleotide

SEQ ID NO: 630231 - DNA, 55 bp, Artificial; identical to SEQ ID NO: 196988
  Synthetic oligonucleotide

SEQ ID NO: 630232 - DNA, 55 bp, Artificial; identical to SEQ ID NO: 221104
  Synthetic oligonucleotide

SEQ ID NO: 630233 - DNA, 51 bp, Artificial; identical to SEQ ID NO: 243315
  Synthetic oligonucleotide

SEQ ID NO: 630234 - DNA, 55 bp, Artificial; identical to SEQ ID NO: 183829
  Synthetic oligonucleotide

SEQ ID NO: 630235 - DNA, 55 bp, Artificial; identical to SEQ ID NO: 205300
  Synthetic oligonucleotide

SEQ ID NO: 630236 - DNA, 57 bp, Artificial; identical to SEQ ID NO: 217081
  Synthetic oligonucleotide

SEQ ID NO: 630237 - DNA, 55 bp, Artificial; identical to SEQ ID NO: 245851
  Synthetic oligonucleotide

SEQ ID NO: 630238 - DNA, 55 bp, Artificial; identical to SEQ ID NO: 153150
  Synthetic oligonucleotide

SEQ ID NO: 630239 - DNA, 53 bp, Artificial; identical to SEQ ID NO: 157290
  Synthetic oligonucleotide

SEQ ID NO: 630240 - DNA, 55 bp, Artificial; identical to SEQ ID NO: 188194
  Synthetic oligonucleotide

SEQ ID NO: 630241 - DNA, 55 bp, Artificial; identical to SEQ ID NO: 224467
  Synthetic oligonucleotide

SEQ ID NO: 630242 - DNA, 55 bp, Artificial; identical to SEQ ID NO: 248787
  Synthetic oligonucleotide

SEQ ID NO: 630243 - DNA, 55 bp, Artificial; identical to SEQ ID NO: 201334
  Synthetic oligonucleotide

SEQ ID NO: 630244 - DNA, 55 bp, Artificial; identical to SEQ ID NO: 266257
  Synthetic oligonucleotide

SEQ ID NO: 630245 - DNA, 59 bp, Artificial; identical to SEQ ID NO: 223928
  Synthetic oligonucleotide

SEQ ID NO: 630246 - DNA, 55 bp, Artificial; identical to SEQ ID NO: 252826
  Synthetic oligonucleotide

SEQ ID NO: 630247 - DNA, 55 bp, Artificial; identical to SEQ ID NO: 245850
  Synthetic oligonucleotide

SEQ ID NO: 630248 - DNA, 54 bp, Artificial; identical to SEQ ID NO: 166044
  Synthetic oligonucleotide

SEQ ID NO: 630249 - DNA, 56 bp, Artificial; identical to SEQ ID NO: 180030
  Synthetic oligonucleotide

SEQ ID NO: 630250 - DNA, 51 bp, Artificial; identical to SEQ ID NO: 149911
  Synthetic oligonucleotide

SEQ ID NO: 630251 - DNA, 55 bp, Artificial; identical to SEQ ID NO: 216540
  Synthetic oligonucleotide

SEQ ID NO: 630252 - DNA, 56 bp, Artificial; identical to SEQ ID NO: 212533
  Synthetic oligonucleotide

SEQ ID NO: 630253 - DNA, 55 bp, Artificial; identical to SEQ ID NO: 240160
  Synthetic oligonucleotide

SEQ ID NO: 630254 - DNA, 53 bp, Artificial; identical to SEQ ID NO: 234445
  Synthetic oligonucleotide

SEQ ID NO: 630255 - DNA, 51 bp, Artificial; identical to SEQ ID NO: 186665
  Synthetic oligonucleotide

SEQ ID NO: 630256 - DNA, 55 bp, Artificial; identical to SEQ ID NO: 245849
  Synthetic oligonucleotide

SEQ ID NO: 630257 - DNA, 53 bp, Artificial; identical to SEQ ID NO: 169171
  Synthetic oligonucleotide

SEQ ID NO: 630258 - DNA, 55 bp, Artificial; identical to SEQ ID NO: 242742
  Synthetic oligonucleotide

SEQ ID NO: 630259 - DNA, 50 bp, Artificial; identical to SEQ ID NO: 192213
  Synthetic oligonucleotide

SEQ ID NO: 630260 - DNA, 53 bp, Artificial; identical to SEQ ID NO: 216659
  Synthetic oligonucleotide

SEQ ID NO: 630261 - DNA, 53 bp, Artificial; identical to SEQ ID NO: 144997
  Synthetic oligonucleotide

SEQ ID NO: 630262 - DNA, 54 bp, Artificial; identical to SEQ ID NO: 168828
  Synthetic oligonucleotide

SEQ ID NO: 630263 - DNA, 55 bp, Artificial; identical to SEQ ID NO: 245848
  Synthetic oligonucleotide

SEQ ID NO: 630264 - DNA, 53 bp, Artificial; identical to SEQ ID NO: 252827
  Synthetic oligonucleotide

SEQ ID NO: 630265 - DNA, 52 bp, Artificial; identical to SEQ ID NO: 141560
  Synthetic oligonucleotide

SEQ ID NO: 630266 - DNA, 54 bp, Artificial; identical to SEQ ID NO: 246166
  Synthetic oligonucleotide

SEQ ID NO: 630267 - DNA, 55 bp, Artificial; identical to SEQ ID NO: 254851
  Synthetic oligonucleotide

SEQ ID NO: 630268 - DNA, 55 bp, Artificial; identical to SEQ ID NO: 242743
  Synthetic oligonucleotide

SEQ ID NO: 630269 - DNA, 55 bp, Artificial; identical to SEQ ID NO: 201645
  Synthetic oligonucleotide

SEQ ID NO: 630270 - DNA, 50 bp, Artificial; identical to SEQ ID NO: 162387
  Synthetic oligonucleotide

SEQ ID NO: 630271 - DNA, 55 bp, Artificial; identical to SEQ ID NO: 187965
  Synthetic oligonucleotide

SEQ ID NO: 630272 - DNA, 55 bp, Artificial; identical to SEQ ID NO: 203494
  Synthetic oligonucleotide

SEQ ID NO: 630273 - DNA, 55 bp, Artificial; identical to SEQ ID NO: 160880
  Synthetic oligonucleotide

SEQ ID NO: 630274 - DNA, 57 bp, Artificial; identical to SEQ ID NO: 141561
  Synthetic oligonucleotide

SEQ ID NO: 630275 - DNA, 51 bp, Artificial; identical to SEQ ID NO: 216779
  Synthetic oligonucleotide

SEQ ID NO: 630276 - DNA, 60 bp, Artificial; identical to SEQ ID NO: 170620
  Synthetic oligonucleotide

SEQ ID NO: 630277 - DNA, 55 bp, Artificial; identical to SEQ ID NO: 254850
  Synthetic oligonucleotide

SEQ ID NO: 630278 - DNA, 55 bp, Artificial; identical to SEQ ID NO: 221106
  Synthetic oligonucleotide

SEQ ID NO: 630279 - DNA, 55 bp, Artificial; identical to SEQ ID NO: 183915
  Synthetic oligonucleotide

SEQ ID NO: 630280 - DNA, 53 bp, Artificial; identical to SEQ ID NO: 162290
  Synthetic oligonucleotide

SEQ ID NO: 630281 - DNA, 55 bp, Artificial; identical to SEQ ID NO: 183913
  Synthetic oligonucleotide

SEQ ID NO: 630282 - DNA, 55 bp, Artificial; identical to SEQ ID NO: 254849
  Synthetic oligonucleotide

SEQ ID NO: 630283 - DNA, 55 bp, Artificial; identical to SEQ ID NO: 143983
  Synthetic oligonucleotide

SEQ ID NO: 630284 - DNA, 53 bp, Artificial; identical to SEQ ID NO: 162291
  Synthetic oligonucleotide

SEQ ID NO: 630285 - DNA, 56 bp, Artificial; identical to SEQ ID NO: 256439
  Synthetic oligonucleotide

SEQ ID NO: 630286 - DNA, 55 bp, Artificial; identical to SEQ ID NO: 208268
  Synthetic oligonucleotide

SEQ ID NO: 630287 - DNA, 55 bp, Artificial; identical to SEQ ID NO: 194824
  Synthetic oligonucleotide

SEQ ID NO: 630288 - DNA, 55 bp, Artificial; identical to SEQ ID NO: 161751
  Synthetic oligonucleotide

SEQ ID NO: 630289 - DNA, 52 bp, Artificial; identical to SEQ ID NO: 209654
  Synthetic oligonucleotide

SEQ ID NO: 630290 - DNA, 51 bp, Artificial; identical to SEQ ID NO: 186658
  Synthetic oligonucleotide

SEQ ID NO: 630291 - DNA, 55 bp, Artificial; identical to SEQ ID NO: 168228
  Synthetic oligonucleotide

SEQ ID NO: 630292 - DNA, 55 bp, Artificial; identical to SEQ ID NO: 205301
  Synthetic oligonucleotide

SEQ ID NO: 630293 - DNA, 55 bp, Artificial; identical to SEQ ID NO: 224472
  Synthetic oligonucleotide

SEQ ID NO: 630294 - DNA, 51 bp, Artificial; identical to SEQ ID NO: 165285
  Synthetic oligonucleotide

SEQ ID NO: 630295 - DNA, 57 bp, Artificial; identical to SEQ ID NO: 242249
  Synthetic oligonucleotide

SEQ ID NO: 630296 - DNA, 53 bp, Artificial; identical to SEQ ID NO: 161318
  Synthetic oligonucleotide

SEQ ID NO: 630297 - DNA, 55 bp, Artificial; identical to SEQ ID NO: 183903
  Synthetic oligonucleotide

SEQ ID NO: 630298 - DNA, 55 bp, Artificial; identical to SEQ ID NO: 183934
  Synthetic oligonucleotide

SEQ ID NO: 630299 - DNA, 57 bp, Artificial; identical to SEQ ID NO: 177545
  Synthetic oligonucleotide

SEQ ID NO: 630300 - DNA, 54 bp, Artificial; identical to SEQ ID NO: 243105
  Synthetic oligonucleotide

SEQ ID NO: 630301 - DNA, 55 bp, Artificial; identical to SEQ ID NO: 160007
  Synthetic oligonucleotide

SEQ ID NO: 630302 - DNA, 54 bp, Artificial; identical to SEQ ID NO: 153568
  Synthetic oligonucleotide

SEQ ID NO: 630303 - DNA, 55 bp, Artificial; identical to SEQ ID NO: 166408
  Synthetic oligonucleotide

SEQ ID NO: 630304 - DNA, 53 bp, Artificial; identical to SEQ ID NO: 255362
  Synthetic oligonucleotide

SEQ ID NO: 630305 - DNA, 56 bp, Artificial; identical to SEQ ID NO: 177544
  Synthetic oligonucleotide

SEQ ID NO: 630306 - DNA, 55 bp, Artificial; identical to SEQ ID NO: 245844
  Synthetic oligonucleotide

SEQ ID NO: 630307 - DNA, 54 bp, Artificial; identical to SEQ ID NO: 167020
  Synthetic oligonucleotide

SEQ ID NO: 630308 - DNA, 55 bp, Artificial; identical to SEQ ID NO: 183926
  Synthetic oligonucleotide

SEQ ID NO: 630309 - DNA, 55 bp, Artificial; identical to SEQ ID NO: 145174
  Synthetic oligonucleotide

SEQ ID NO: 630310 - DNA, 55 bp, Artificial; identical to SEQ ID NO: 142331
  Synthetic oligonucleotide

SEQ ID NO: 630311 - DNA, 55 bp, Artificial; identical to SEQ ID NO: 183922
  Synthetic oligonucleotide

SEQ ID NO: 630312 - DNA, 55 bp, Artificial; identical to SEQ ID NO: 245842
  Synthetic oligonucleotide

SEQ ID NO: 630313 - DNA, 58 bp, Artificial; identical to SEQ ID NO: 212371
  Synthetic oligonucleotide

SEQ ID NO: 630314 - DNA, 55 bp, Artificial; identical to SEQ ID NO: 145176
  Synthetic oligonucleotide

SEQ ID NO: 630315 - DNA, 54 bp, Artificial; identical to SEQ ID NO: 201346
  Synthetic oligonucleotide

SEQ ID NO: 630316 - DNA, 55 bp, Artificial; identical to SEQ ID NO: 252829
  Synthetic oligonucleotide

SEQ ID NO: 630317 - DNA, 51 bp, Artificial; identical to SEQ ID NO: 162362
  Synthetic oligonucleotide

SEQ ID NO: 630318 - DNA, 55 bp, Artificial; identical to SEQ ID NO: 149871
  Synthetic oligonucleotide

SEQ ID NO: 630319 - DNA, 55 bp, Artificial; identical to SEQ ID NO: 198940
  Synthetic oligonucleotide

SEQ ID NO: 630320 - DNA, 55 bp, Artificial; identical to SEQ ID NO: 240162
  Synthetic oligonucleotide

SEQ ID NO: 630321 - DNA, 54 bp, Artificial; identical to SEQ ID NO: 183920
  Synthetic oligonucleotide

SEQ ID NO: 630322 - DNA, 55 bp, Artificial; identical to SEQ ID NO: 198939
  Synthetic oligonucleotide

SEQ ID NO: 630323 - DNA, 50 bp, Artificial; identical to SEQ ID NO: 189736
  Synthetic oligonucleotide

SEQ ID NO: 630324 - DNA, 55 bp, Artificial; identical to SEQ ID NO: 242744
  Synthetic oligonucleotide

SEQ ID NO: 630325 - DNA, 60 bp, Artificial; identical to SEQ ID NO: 170631
  Synthetic oligonucleotide

SEQ ID NO: 630326 - DNA, 58 bp, Artificial; identical to SEQ ID NO: 191008
  Synthetic oligonucleotide

SEQ ID NO: 630327 - DNA, 55 bp, Artificial; identical to SEQ ID NO: 265918
  Synthetic oligonucleotide

SEQ ID NO: 630328 - DNA, 55 bp, Artificial; identical to SEQ ID NO: 201644
  Synthetic oligonucleotide

SEQ ID NO: 630329 - DNA, 55 bp, Artificial; identical to SEQ ID NO: 254970
  Synthetic oligonucleotide

SEQ ID NO: 630330 - DNA, 57 bp, Artificial; identical to SEQ ID NO: 199615
  Synthetic oligonucleotide

SEQ ID NO: 630331 - DNA, 55 bp, Artificial; identical to SEQ ID NO: 191968
  Synthetic oligonucleotide

SEQ ID NO: 630332 - DNA, 60 bp, Artificial; identical to SEQ ID NO: 266374
  Synthetic oligonucleotide

SEQ ID NO: 630333 - DNA, 54 bp, Artificial; identical to SEQ ID NO: 218240
  Synthetic oligonucleotide

SEQ ID NO: 630334 - DNA, 55 bp, Artificial; identical to SEQ ID NO: 198938
  Synthetic oligonucleotide

SEQ ID NO: 630335 - DNA, 51 bp, Artificial; identical to SEQ ID NO: 193872
  Synthetic oligonucleotide

SEQ ID NO: 630336 - DNA, 55 bp, Artificial; identical to SEQ ID NO: 234101
  Synthetic oligonucleotide

SEQ ID NO: 630337 - DNA, 55 bp, Artificial; identical to SEQ ID NO: 153081
  Synthetic oligonucleotide

SEQ ID NO: 630338 - DNA, 55 bp, Artificial; identical to SEQ ID NO: 257599
  Synthetic oligonucleotide

SEQ ID NO: 630339 - DNA, 54 bp, Artificial; identical to SEQ ID NO: 240663
  Synthetic oligonucleotide

SEQ ID NO: 630340 - DNA, 55 bp, Artificial; identical to SEQ ID NO: 159691
  Synthetic oligonucleotide

SEQ ID NO: 630341 - DNA, 55 bp, Artificial; identical to SEQ ID NO: 221235
  Synthetic oligonucleotide

SEQ ID NO: 630342 - DNA, 53 bp, Artificial; identical to SEQ ID NO: 208714
  Synthetic oligonucleotide

SEQ ID NO: 630343 - DNA, 55 bp, Artificial; identical to SEQ ID NO: 201642
  Synthetic oligonucleotide

SEQ ID NO: 630344 - DNA, 53 bp, Artificial; identical to SEQ ID NO: 199798
  Synthetic oligonucleotide

SEQ ID NO: 630345 - DNA, 52 bp, Artificial; identical to SEQ ID NO: 174297
  Synthetic oligonucleotide

SEQ ID NO: 630346 - DNA, 55 bp, Artificial; identical to SEQ ID NO: 240164
  Synthetic oligonucleotide

SEQ ID NO: 630347 - DNA, 55 bp, Artificial; identical to SEQ ID NO: 145178
  Synthetic oligonucleotide

SEQ ID NO: 630348 - DNA, 55 bp, Artificial; identical to SEQ ID NO: 257111
  Synthetic oligonucleotide

SEQ ID NO: 630349 - DNA, 53 bp, Artificial; identical to SEQ ID NO: 160922
  Synthetic oligonucleotide

SEQ ID NO: 630350 - DNA, 55 bp, Artificial; identical to SEQ ID NO: 153078
  Synthetic oligonucleotide

SEQ ID NO: 630351 - DNA, 53 bp, Artificial; identical to SEQ ID NO: 161311
  Synthetic oligonucleotide

SEQ ID NO: 630352 - DNA, 51 bp, Artificial; identical to SEQ ID NO: 248072
  Synthetic oligonucleotide

SEQ ID NO: 630353 - DNA, 55 bp, Artificial; identical to SEQ ID NO: 167406
  Synthetic oligonucleotide

SEQ ID NO: 630354 - DNA, 50 bp, Artificial; identical to SEQ ID NO: 176835
  Synthetic oligonucleotide

SEQ ID NO: 630355 - DNA, 53 bp, Artificial; identical to SEQ ID NO: 167025
  Synthetic oligonucleotide

SEQ ID NO: 630356 - DNA, 59 bp, Artificial; identical to SEQ ID NO: 149848
  Synthetic oligonucleotide

SEQ ID NO: 630357 - DNA, 55 bp, Artificial; identical to SEQ ID NO: 171409
  Synthetic oligonucleotide

SEQ ID NO: 630358 - DNA, 60 bp, Artificial; identical to SEQ ID NO: 208451
  Synthetic oligonucleotide

SEQ ID NO: 630359 - DNA, 55 bp, Artificial; identical to SEQ ID NO: 252832
  Synthetic oligonucleotide

SEQ ID NO: 630360 - DNA, 58 bp, Artificial; identical to SEQ ID NO: 239225
  Synthetic oligonucleotide

SEQ ID NO: 630361 - DNA, 60 bp, Artificial; identical to SEQ ID NO: 242247
  Synthetic oligonucleotide

SEQ ID NO: 630362 - DNA, 54 bp, Artificial; identical to SEQ ID NO: 152015
  Synthetic oligonucleotide

SEQ ID NO: 630363 - DNA, 60 bp, Artificial; identical to SEQ ID NO: 208462
  Synthetic oligonucleotide

SEQ ID NO: 630364 - DNA, 55 bp, Artificial; identical to SEQ ID NO: 261952
  Synthetic oligonucleotide

SEQ ID NO: 630365 - DNA, 59 bp, Artificial; identical to SEQ ID NO: 237895
  Synthetic oligonucleotide

SEQ ID NO: 630366 - DNA, 52 bp, Artificial; identical to SEQ ID NO: 157606
  Synthetic oligonucleotide

SEQ ID NO: 630367 - DNA, 55 bp, Artificial; identical to SEQ ID NO: 171410
  Synthetic oligonucleotide

SEQ ID NO: 630368 - DNA, 55 bp, Artificial; identical to SEQ ID NO: 266201
  Synthetic oligonucleotide

SEQ ID NO: 630369 - DNA, 52 bp, Artificial; identical to SEQ ID NO: 245894
  Synthetic oligonucleotide

SEQ ID NO: 630370 - DNA, 55 bp, Artificial; identical to SEQ ID NO: 148721
  Synthetic oligonucleotide

SEQ ID NO: 630371 - DNA, 60 bp, Artificial; identical to SEQ ID NO: 212372
  Synthetic oligonucleotide

SEQ ID NO: 630372 - DNA, 57 bp, Artificial; identical to SEQ ID NO: 170642
  Synthetic oligonucleotide

SEQ ID NO: 630373 - DNA, 51 bp, Artificial; identical to SEQ ID NO: 186388
  Synthetic oligonucleotide

SEQ ID NO: 630374 - DNA, 50 bp, Artificial; identical to SEQ ID NO: 255840
  Synthetic oligonucleotide

SEQ ID NO: 630375 - DNA, 60 bp, Artificial; identical to SEQ ID NO: 177536
  Synthetic oligonucleotide

SEQ ID NO: 630376 - DNA, 55 bp, Artificial; identical to SEQ ID NO: 183896
  Synthetic oligonucleotide

SEQ ID NO: 630377 - DNA, 57 bp, Artificial; identical to SEQ ID NO: 177535
  Synthetic oligonucleotide

SEQ ID NO: 630378 - DNA, 52 bp, Artificial; identical to SEQ ID NO: 189155
  Synthetic oligonucleotide

SEQ ID NO: 630379 - DNA, 55 bp, Artificial; identical to SEQ ID NO: 224473
  Synthetic oligonucleotide

SEQ ID NO: 630380 - DNA, 53 bp, Artificial; identical to SEQ ID NO: 205808
  Synthetic oligonucleotide

SEQ ID NO: 630381 - DNA, 55 bp, Artificial; identical to SEQ ID NO: 245892
  Synthetic oligonucleotide

SEQ ID NO: 630382 - DNA, 54 bp, Artificial; identical to SEQ ID NO: 218229
  Synthetic oligonucleotide

SEQ ID NO: 630383 - DNA, 55 bp, Artificial; identical to SEQ ID NO: 159693
  Synthetic oligonucleotide

SEQ ID NO: 630384 - DNA, 55 bp, Artificial; identical to SEQ ID NO: 166370
  Synthetic oligonucleotide

SEQ ID NO: 630385 - DNA, 55 bp, Artificial; identical to SEQ ID NO: 248825
  Synthetic oligonucleotide

SEQ ID NO: 630386 - DNA, 55 bp, Artificial; identical to SEQ ID NO: 242745
  Synthetic oligonucleotide

SEQ ID NO: 630387 - DNA, 56 bp, Artificial; identical to SEQ ID NO: 177534
  Synthetic oligonucleotide

SEQ ID NO: 630388 - DNA, 54 bp, Artificial; identical to SEQ ID NO: 255240
  Synthetic oligonucleotide

SEQ ID NO: 630389 - DNA, 55 bp, Artificial; identical to SEQ ID NO: 183693
  Synthetic oligonucleotide

SEQ ID NO: 630390 - DNA, 55 bp, Artificial; identical to SEQ ID NO: 248824
  Synthetic oligonucleotide

SEQ ID NO: 630391 - DNA, 55 bp, Artificial; identical to SEQ ID NO: 254956
  Synthetic oligonucleotide

SEQ ID NO: 630392 - DNA, 55 bp, Artificial; identical to SEQ ID NO: 242746
  Synthetic oligonucleotide

SEQ ID NO: 630393 - DNA, 56 bp, Artificial; identical to SEQ ID NO: 201210
  Synthetic oligonucleotide

SEQ ID NO: 630394 - DNA, 55 bp, Artificial; identical to SEQ ID NO: 183696
  Synthetic oligonucleotide

SEQ ID NO: 630395 - DNA, 58 bp, Artificial; identical to SEQ ID NO: 242246
  Synthetic oligonucleotide

SEQ ID NO: 630396 - DNA, 55 bp, Artificial; identical to SEQ ID NO: 234116
  Synthetic oligonucleotide

SEQ ID NO: 630397 - DNA, 55 bp, Artificial; identical to SEQ ID NO: 198934
  Synthetic oligonucleotide

SEQ ID NO: 630398 - DNA, 55 bp, Artificial; identical to SEQ ID NO: 221237
  Synthetic oligonucleotide

SEQ ID NO: 630399 - DNA, 53 bp, Artificial; identical to SEQ ID NO: 160830
  Synthetic oligonucleotide

SEQ ID NO: 630400 - DNA, 55 bp, Artificial; identical to SEQ ID NO: 203487
  Synthetic oligonucleotide

SEQ ID NO: 630401 - DNA, 55 bp, Artificial; identical to SEQ ID NO: 205306
  Synthetic oligonucleotide

SEQ ID NO: 630402 - DNA, 55 bp, Artificial; identical to SEQ ID NO: 197088
  Synthetic oligonucleotide

SEQ ID NO: 630403 - DNA, 55 bp, Artificial; identical to SEQ ID NO: 245888
  Synthetic oligonucleotide

SEQ ID NO: 630404 - DNA, 58 bp, Artificial; identical to SEQ ID NO: 247451
  Synthetic oligonucleotide

SEQ ID NO: 630405 - DNA, 50 bp, Artificial; identical to SEQ ID NO: 175144
  Synthetic oligonucleotide

SEQ ID NO: 630406 - DNA, 55 bp, Artificial; identical to SEQ ID NO: 171413
  Synthetic oligonucleotide

SEQ ID NO: 630407 - DNA, 55 bp, Artificial; identical to SEQ ID NO: 148714
  Synthetic oligonucleotide

SEQ ID NO: 630408 - DNA, 54 bp, Artificial; identical to SEQ ID NO: 243458
  Synthetic oligonucleotide

SEQ ID NO: 630409 - DNA, 60 bp, Artificial; identical to SEQ ID NO: 170654
  Synthetic oligonucleotide

SEQ ID NO: 630410 - DNA, 55 bp, Artificial; identical to SEQ ID NO: 159695
  Synthetic oligonucleotide

SEQ ID NO: 630411 - DNA, 56 bp, Artificial; identical to SEQ ID NO: 242245
  Synthetic oligonucleotide

SEQ ID NO: 630412 - DNA, 55 bp, Artificial; identical to SEQ ID NO: 183721
  Synthetic oligonucleotide

SEQ ID NO: 630413 - DNA, 55 bp, Artificial; identical to SEQ ID NO: 168047
  Synthetic oligonucleotide

SEQ ID NO: 630414 - DNA, 55 bp, Artificial; identical to SEQ ID NO: 142334
  Synthetic oligonucleotide

SEQ ID NO: 630415 - DNA, 55 bp, Artificial; identical to SEQ ID NO: 194426
  Synthetic oligonucleotide

SEQ ID NO: 630416 - DNA, 55 bp, Artificial; identical to SEQ ID NO: 166375
  Synthetic oligonucleotide

SEQ ID NO: 630417 - DNA, 55 bp, Artificial; identical to SEQ ID NO: 248813
  Synthetic oligonucleotide

SEQ ID NO: 630418 - DNA, 54 bp, Artificial; identical to SEQ ID NO: 183712
  Synthetic oligonucleotide

SEQ ID NO: 630419 - DNA, 56 bp, Artificial; identical to SEQ ID NO: 210437
  Synthetic oligonucleotide

SEQ ID NO: 630420 - DNA, 55 bp, Artificial; identical to SEQ ID NO: 234833
  Synthetic oligonucleotide

SEQ ID NO: 630421 - DNA, 54 bp, Artificial; identical to SEQ ID NO: 177526
  Synthetic oligonucleotide

SEQ ID NO: 630422 - DNA, 55 bp, Artificial; identical to SEQ ID NO: 198932
  Synthetic oligonucleotide

SEQ ID NO: 630423 - DNA, 55 bp, Artificial; identical to SEQ ID NO: 188193
  Synthetic oligonucleotide

SEQ ID NO: 630424 - DNA, 55 bp, Artificial; identical to SEQ ID NO: 173568
  Synthetic oligonucleotide

SEQ ID NO: 630425 - DNA, 55 bp, Artificial; identical to SEQ ID NO: 198931
  Synthetic oligonucleotide

SEQ ID NO: 630426 - DNA, 55 bp, Artificial; identical to SEQ ID NO: 203486
  Synthetic oligonucleotide

SEQ ID NO: 630427 - DNA, 51 bp, Artificial; identical to SEQ ID NO: 202933
  Synthetic oligonucleotide

SEQ ID NO: 630428 - DNA, 55 bp, Artificial; identical to SEQ ID NO: 240099
  Synthetic oligonucleotide

SEQ ID NO: 630429 - DNA, 55 bp, Artificial; identical to SEQ ID NO: 183709
  Synthetic oligonucleotide

SEQ ID NO: 630430 - DNA, 59 bp, Artificial; identical to SEQ ID NO: 144684
  Synthetic oligonucleotide

SEQ ID NO: 630431 - DNA, 54 bp, Artificial; identical to SEQ ID NO: 177525
  Synthetic oligonucleotide

SEQ ID NO: 630432 - DNA, 55 bp, Artificial; identical to SEQ ID NO: 153071
  Synthetic oligonucleotide

SEQ ID NO: 630433 - DNA, 55 bp, Artificial; identical to SEQ ID NO: 224475
  Synthetic oligonucleotide

SEQ ID NO: 630434 - DNA, 55 bp, Artificial; identical to SEQ ID NO: 224476
  Synthetic oligonucleotide

SEQ ID NO: 630435 - DNA, 58 bp, Artificial; identical to SEQ ID NO: 243956
  Synthetic oligonucleotide

SEQ ID NO: 630436 - DNA, 55 bp, Artificial; identical to SEQ ID NO: 254994
  Synthetic oligonucleotide

SEQ ID NO: 630437 - DNA, 59 bp, Artificial; identical to SEQ ID NO: 156888
  Synthetic oligonucleotide

SEQ ID NO: 630438 - DNA, 52 bp, Artificial; identical to SEQ ID NO: 258153
  Synthetic oligonucleotide

SEQ ID NO: 630439 - DNA, 55 bp, Artificial; identical to SEQ ID NO: 154495
  Synthetic oligonucleotide

SEQ ID NO: 630440 - DNA, 60 bp, Artificial; identical to SEQ ID NO: 177581
  Synthetic oligonucleotide

SEQ ID NO: 630441 - DNA, 55 bp, Artificial; identical to SEQ ID NO: 233682
  Synthetic oligonucleotide

SEQ ID NO: 630442 - DNA, 51 bp, Artificial; identical to SEQ ID NO: 266308
  Synthetic oligonucleotide

SEQ ID NO: 630443 - DNA, 55 bp, Artificial; identical to SEQ ID NO: 254993
  Synthetic oligonucleotide

SEQ ID NO: 630444 - DNA, 54 bp, Artificial; identical to SEQ ID NO: 246169
  Synthetic oligonucleotide

SEQ ID NO: 630445 - DNA, 52 bp, Artificial; identical to SEQ ID NO: 246170
  Synthetic oligonucleotide

SEQ ID NO: 630446 - DNA, 55 bp, Artificial; identical to SEQ ID NO: 183651
  Synthetic oligonucleotide

SEQ ID NO: 630447 - DNA, 55 bp, Artificial; identical to SEQ ID NO: 219691
  Synthetic oligonucleotide

SEQ ID NO: 630448 - DNA, 55 bp, Artificial; identical to SEQ ID NO: 148762
  Synthetic oligonucleotide

SEQ ID NO: 630449 - DNA, 50 bp, Artificial; identical to SEQ ID NO: 146533
  Synthetic oligonucleotide

SEQ ID NO: 630450 - DNA, 55 bp, Artificial; identical to SEQ ID NO: 209183
  Synthetic oligonucleotide

SEQ ID NO: 630451 - DNA, 55 bp, Artificial; identical to SEQ ID NO: 159702
  Synthetic oligonucleotide

SEQ ID NO: 630452 - DNA, 60 bp, Artificial; identical to SEQ ID NO: 177579
  Synthetic oligonucleotide

SEQ ID NO: 630453 - DNA, 54 bp, Artificial; identical to SEQ ID NO: 188950
  Synthetic oligonucleotide

SEQ ID NO: 630454 - DNA, 55 bp, Artificial; identical to SEQ ID NO: 245882
  Synthetic oligonucleotide

SEQ ID NO: 630455 - DNA, 55 bp, Artificial; identical to SEQ ID NO: 161747
  Synthetic oligonucleotide

SEQ ID NO: 630456 - DNA, 52 bp, Artificial; identical to SEQ ID NO: 162332
  Synthetic oligonucleotide

SEQ ID NO: 630457 - DNA, 55 bp, Artificial; identical to SEQ ID NO: 159657
  Synthetic oligonucleotide

SEQ ID NO: 630458 - DNA, 55 bp, Artificial; identical to SEQ ID NO: 224479
  Synthetic oligonucleotide

SEQ ID NO: 630459 - DNA, 55 bp, Artificial; identical to SEQ ID NO: 159658
  Synthetic oligonucleotide

SEQ ID NO: 630460 - DNA, 55 bp, Artificial; identical to SEQ ID NO: 159660
  Synthetic oligonucleotide

SEQ ID NO: 630461 - DNA, 58 bp, Artificial; identical to SEQ ID NO: 243459
  Synthetic oligonucleotide

SEQ ID NO: 630462 - DNA, 55 bp, Artificial; identical to SEQ ID NO: 168227
  Synthetic oligonucleotide

SEQ ID NO: 630463 - DNA, 59 bp, Artificial; identical to SEQ ID NO: 209125
  Synthetic oligonucleotide

SEQ ID NO: 630464 - DNA, 55 bp, Artificial; identical to SEQ ID NO: 217905
  Synthetic oligonucleotide

SEQ ID NO: 630465 - DNA, 55 bp, Artificial; identical to SEQ ID NO: 198930
  Synthetic oligonucleotide

SEQ ID NO: 630466 - DNA, 55 bp, Artificial; identical to SEQ ID NO: 215328
  Synthetic oligonucleotide

SEQ ID NO: 630467 - DNA, 55 bp, Artificial; identical to SEQ ID NO: 219692
  Synthetic oligonucleotide

SEQ ID NO: 630468 - DNA, 59 bp, Artificial; identical to SEQ ID NO: 256344
  Synthetic oligonucleotide

SEQ ID NO: 630469 - DNA, 55 bp, Artificial; identical to SEQ ID NO: 193581
  Synthetic oligonucleotide

SEQ ID NO: 630470 - DNA, 55 bp, Artificial; identical to SEQ ID NO: 148758
  Synthetic oligonucleotide

SEQ ID NO: 630471 - DNA, 55 bp, Artificial; identical to SEQ ID NO: 197087
  Synthetic oligonucleotide

SEQ ID NO: 630472 - DNA, 55 bp, Artificial; identical to SEQ ID NO: 242749
  Synthetic oligonucleotide

SEQ ID NO: 630473 - DNA, 55 bp, Artificial; identical to SEQ ID NO: 188191
  Synthetic oligonucleotide

SEQ ID NO: 630474 - DNA, 55 bp, Artificial; identical to SEQ ID NO: 198929
  Synthetic oligonucleotide

SEQ ID NO: 630475 - DNA, 55 bp, Artificial; identical to SEQ ID NO: 215295
  Synthetic oligonucleotide

SEQ ID NO: 630476 - DNA, 55 bp, Artificial; identical to SEQ ID NO: 183656
  Synthetic oligonucleotide

SEQ ID NO: 630477 - DNA, 55 bp, Artificial; identical to SEQ ID NO: 159663
  Synthetic oligonucleotide

SEQ ID NO: 630478 - DNA, 55 bp, Artificial; identical to SEQ ID NO: 168226
  Synthetic oligonucleotide

SEQ ID NO: 630479 - DNA, 55 bp, Artificial; identical to SEQ ID NO: 211001
  Synthetic oligonucleotide

SEQ ID NO: 630480 - DNA, 55 bp, Artificial; identical to SEQ ID NO: 183657
  Synthetic oligonucleotide

SEQ ID NO: 630481 - DNA, 55 bp, Artificial; identical to SEQ ID NO: 151462
  Synthetic oligonucleotide

SEQ ID NO: 630482 - DNA, 55 bp, Artificial; identical to SEQ ID NO: 261958
  Synthetic oligonucleotide

SEQ ID NO: 630483 - DNA, 52 bp, Artificial; identical to SEQ ID NO: 243238
  Synthetic oligonucleotide

SEQ ID NO: 630484 - DNA, 55 bp, Artificial; identical to SEQ ID NO: 224487
  Synthetic oligonucleotide

SEQ ID NO: 630485 - DNA, 55 bp, Artificial; identical to SEQ ID NO: 152390
  Synthetic oligonucleotide

SEQ ID NO: 630486 - DNA, 55 bp, Artificial; identical to SEQ ID NO: 153073
  Synthetic oligonucleotide

SEQ ID NO: 630487 - DNA, 55 bp, Artificial; identical to SEQ ID NO: 159666
  Synthetic oligonucleotide

SEQ ID NO: 630488 - DNA, 55 bp, Artificial; identical to SEQ ID NO: 154502
  Synthetic oligonucleotide

SEQ ID NO: 630489 - DNA, 53 bp, Artificial; identical to SEQ ID NO: 154513
  Synthetic oligonucleotide

SEQ ID NO: 630490 - DNA, 55 bp, Artificial; identical to SEQ ID NO: 161730
  Synthetic oligonucleotide

SEQ ID NO: 630491 - DNA, 55 bp, Artificial; identical to SEQ ID NO: 187853
  Synthetic oligonucleotide

SEQ ID NO: 630492 - DNA, 53 bp, Artificial; identical to SEQ ID NO: 259524
  Synthetic oligonucleotide

SEQ ID NO: 630493 - DNA, 56 bp, Artificial; identical to SEQ ID NO: 149793
  Synthetic oligonucleotide

SEQ ID NO: 630494 - DNA, 55 bp, Artificial; identical to SEQ ID NO: 153117
  Synthetic oligonucleotide

SEQ ID NO: 630495 - DNA, 55 bp, Artificial; identical to SEQ ID NO: 166989
  Synthetic oligonucleotide

SEQ ID NO: 630496 - DNA, 55 bp, Artificial; identical to SEQ ID NO: 248810
  Synthetic oligonucleotide

SEQ ID NO: 630497 - DNA, 50 bp, Artificial; identical to SEQ ID NO: 176984
  Synthetic oligonucleotide

SEQ ID NO: 630498 - DNA, 57 bp, Artificial; identical to SEQ ID NO: 242243
  Synthetic oligonucleotide

SEQ ID NO: 630499 - DNA, 51 bp, Artificial; identical to SEQ ID NO: 154025
  Synthetic oligonucleotide

SEQ ID NO: 630500 - DNA, 55 bp, Artificial; identical to SEQ ID NO: 252836
  Synthetic oligonucleotide

SEQ ID NO: 630501 - DNA, 55 bp, Artificial; identical to SEQ ID NO: 142335
  Synthetic oligonucleotide

SEQ ID NO: 630502 - DNA, 55 bp, Artificial; identical to SEQ ID NO: 210863
  Synthetic oligonucleotide

SEQ ID NO: 630503 - DNA, 51 bp, Artificial; identical to SEQ ID NO: 152124
  Synthetic oligonucleotide

SEQ ID NO: 630504 - DNA, 55 bp, Artificial; identical to SEQ ID NO: 201332
  Synthetic oligonucleotide

SEQ ID NO: 630505 - DNA, 55 bp, Artificial; identical to SEQ ID NO: 210883
  Synthetic oligonucleotide

SEQ ID NO: 630506 - DNA, 55 bp, Artificial; identical to SEQ ID NO: 142336
  Synthetic oligonucleotide

SEQ ID NO: 630507 - DNA, 52 bp, Artificial; identical to SEQ ID NO: 161889
  Synthetic oligonucleotide

SEQ ID NO: 630508 - DNA, 58 bp, Artificial; identical to SEQ ID NO: 248394
  Synthetic oligonucleotide

SEQ ID NO: 630509 - DNA, 55 bp, Artificial; identical to SEQ ID NO: 252837
  Synthetic oligonucleotide

SEQ ID NO: 630510 - DNA, 55 bp, Artificial; identical to SEQ ID NO: 155258
  Synthetic oligonucleotide

SEQ ID NO: 630511 - DNA, 54 bp, Artificial; identical to SEQ ID NO: 185324
  Synthetic oligonucleotide

SEQ ID NO: 630512 - DNA, 60 bp, Artificial; identical to SEQ ID NO: 177574
  Synthetic oligonucleotide

SEQ ID NO: 630513 - DNA, 55 bp, Artificial; identical to SEQ ID NO: 152652
  Synthetic oligonucleotide

SEQ ID NO: 630514 - DNA, 54 bp, Artificial; identical to SEQ ID NO: 185294
  Synthetic oligonucleotide

SEQ ID NO: 630515 - DNA, 55 bp, Artificial; identical to SEQ ID NO: 220584
  Synthetic oligonucleotide

SEQ ID NO: 630516 - DNA, 55 bp, Artificial; identical to SEQ ID NO: 166453
  Synthetic oligonucleotide

SEQ ID NO: 630517 - DNA, 55 bp, Artificial; identical to SEQ ID NO: 166462
  Synthetic oligonucleotide

SEQ ID NO: 630518 - DNA, 52 bp, Artificial; identical to SEQ ID NO: 169017
  Synthetic oligonucleotide

SEQ ID NO: 630519 - DNA, 60 bp, Artificial; identical to SEQ ID NO: 256341
  Synthetic oligonucleotide

SEQ ID NO: 630520 - DNA, 57 bp, Artificial; identical to SEQ ID NO: 141562
  Synthetic oligonucleotide

SEQ ID NO: 630521 - DNA, 55 bp, Artificial; identical to SEQ ID NO: 161782
  Synthetic oligonucleotide

SEQ ID NO: 630522 - DNA, 55 bp, Artificial; identical to SEQ ID NO: 245880
  Synthetic oligonucleotide

SEQ ID NO: 630523 - DNA, 55 bp, Artificial; identical to SEQ ID NO: 224489
  Synthetic oligonucleotide

SEQ ID NO: 630524 - DNA, 55 bp, Artificial; identical to SEQ ID NO: 242750
  Synthetic oligonucleotide

SEQ ID NO: 630525 - DNA, 55 bp, Artificial; identical to SEQ ID NO: 183671
  Synthetic oligonucleotide

SEQ ID NO: 630526 - DNA, 58 bp, Artificial; identical to SEQ ID NO: 151311
  Synthetic oligonucleotide

SEQ ID NO: 630527 - DNA, 53 bp, Artificial; identical to SEQ ID NO: 143800
  Synthetic oligonucleotide

SEQ ID NO: 630528 - DNA, 55 bp, Artificial; identical to SEQ ID NO: 152391
  Synthetic oligonucleotide

SEQ ID NO: 630529 - DNA, 55 bp, Artificial; identical to SEQ ID NO: 198928
  Synthetic oligonucleotide

SEQ ID NO: 630530 - DNA, 54 bp, Artificial; identical to SEQ ID NO: 211557
  Synthetic oligonucleotide

SEQ ID NO: 630531 - DNA, 55 bp, Artificial; identical to SEQ ID NO: 257602
  Synthetic oligonucleotide

SEQ ID NO: 630532 - DNA, 53 bp, Artificial; identical to SEQ ID NO: 149369
  Synthetic oligonucleotide

SEQ ID NO: 630533 - DNA, 55 bp, Artificial; identical to SEQ ID NO: 198927
  Synthetic oligonucleotide

SEQ ID NO: 630534 - DNA, 53 bp, Artificial; identical to SEQ ID NO: 240697
  Synthetic oligonucleotide

SEQ ID NO: 630535 - DNA, 59 bp, Artificial; identical to SEQ ID NO: 211446
  Synthetic oligonucleotide

SEQ ID NO: 630536 - DNA, 53 bp, Artificial; identical to SEQ ID NO: 169361
  Synthetic oligonucleotide

SEQ ID NO: 630537 - DNA, 55 bp, Artificial; identical to SEQ ID NO: 187854
  Synthetic oligonucleotide

SEQ ID NO: 630538 - DNA, 52 bp, Artificial; identical to SEQ ID NO: 168211
  Synthetic oligonucleotide

SEQ ID NO: 630539 - DNA, 55 bp, Artificial; identical to SEQ ID NO: 252838
  Synthetic oligonucleotide

SEQ ID NO: 630540 - DNA, 55 bp, Artificial; identical to SEQ ID NO: 245877
  Synthetic oligonucleotide

SEQ ID NO: 630541 - DNA, 51 bp, Artificial; identical to SEQ ID NO: 149910
  Synthetic oligonucleotide

SEQ ID NO: 630542 - DNA, 53 bp, Artificial; identical to SEQ ID NO: 246357
  Synthetic oligonucleotide

SEQ ID NO: 630543 - DNA, 55 bp, Artificial; identical to SEQ ID NO: 197085
  Synthetic oligonucleotide

SEQ ID NO: 630544 - DNA, 53 bp, Artificial; identical to SEQ ID NO: 177571
  Synthetic oligonucleotide

SEQ ID NO: 630545 - DNA, 51 bp, Artificial; identical to SEQ ID NO: 216836
  Synthetic oligonucleotide

SEQ ID NO: 630546 - DNA, 55 bp, Artificial; identical to SEQ ID NO: 254989
  Synthetic oligonucleotide

SEQ ID NO: 630547 - DNA, 56 bp, Artificial; identical to SEQ ID NO: 199603
  Synthetic oligonucleotide

SEQ ID NO: 630548 - DNA, 55 bp, Artificial; identical to SEQ ID NO: 224490
  Synthetic oligonucleotide

SEQ ID NO: 630549 - DNA, 55 bp, Artificial; identical to SEQ ID NO: 261581
  Synthetic oligonucleotide

SEQ ID NO: 630550 - DNA, 60 bp, Artificial; identical to SEQ ID NO: 177569
  Synthetic oligonucleotide

SEQ ID NO: 630551 - DNA, 55 bp, Artificial; identical to SEQ ID NO: 212530
  Synthetic oligonucleotide

SEQ ID NO: 630552 - DNA, 60 bp, Artificial; identical to SEQ ID NO: 200805
  Synthetic oligonucleotide

SEQ ID NO: 630553 - DNA, 55 bp, Artificial; identical to SEQ ID NO: 151467
  Synthetic oligonucleotide

SEQ ID NO: 630554 - DNA, 55 bp, Artificial; identical to SEQ ID NO: 151468
  Synthetic oligonucleotide

SEQ ID NO: 630555 - DNA, 55 bp, Artificial; identical to SEQ ID NO: 245873
  Synthetic oligonucleotide

SEQ ID NO: 630556 - DNA, 55 bp, Artificial; identical to SEQ ID NO: 183769
  Synthetic oligonucleotide

SEQ ID NO: 630557 - DNA, 55 bp, Artificial; identical to SEQ ID NO: 220586
  Synthetic oligonucleotide

SEQ ID NO: 630558 - DNA, 50 bp, Artificial; identical to SEQ ID NO: 176643
  Synthetic oligonucleotide

SEQ ID NO: 630559 - DNA, 51 bp, Artificial; identical to SEQ ID NO: 187080
  Synthetic oligonucleotide

SEQ ID NO: 630560 - DNA, 55 bp, Artificial; identical to SEQ ID NO: 188190
  Synthetic oligonucleotide

SEQ ID NO: 630561 - DNA, 55 bp, Artificial; identical to SEQ ID NO: 257604
  Synthetic oligonucleotide

SEQ ID NO: 630562 - DNA, 55 bp, Artificial; identical to SEQ ID NO: 154259
  Synthetic oligonucleotide

SEQ ID NO: 630563 - DNA, 54 bp, Artificial; identical to SEQ ID NO: 243134
  Synthetic oligonucleotide

SEQ ID NO: 630564 - DNA, 53 bp, Artificial; identical to SEQ ID NO: 199816
  Synthetic oligonucleotide

SEQ ID NO: 630565 - DNA, 55 bp, Artificial; identical to SEQ ID NO: 142337
  Synthetic oligonucleotide

SEQ ID NO: 630566 - DNA, 55 bp, Artificial; identical to SEQ ID NO: 210861
  Synthetic oligonucleotide

SEQ ID NO: 630567 - DNA, 50 bp, Artificial; identical to SEQ ID NO: 200272
  Synthetic oligonucleotide

SEQ ID NO: 630568 - DNA, 60 bp, Artificial; identical to SEQ ID NO: 242240
  Synthetic oligonucleotide

SEQ ID NO: 630569 - DNA, 55 bp, Artificial; identical to SEQ ID NO: 245868
  Synthetic oligonucleotide

SEQ ID NO: 630570 - DNA, 55 bp, Artificial; identical to SEQ ID NO: 249666
  Synthetic oligonucleotide

SEQ ID NO: 630571 - DNA, 55 bp, Artificial; identical to SEQ ID NO: 148751
  Synthetic oligonucleotide

SEQ ID NO: 630572 - DNA, 53 bp, Artificial; identical to SEQ ID NO: 199818
  Synthetic oligonucleotide

SEQ ID NO: 630573 - DNA, 57 bp, Artificial; identical to SEQ ID NO: 248618
  Synthetic oligonucleotide

SEQ ID NO: 630574 - DNA, 60 bp, Artificial; identical to SEQ ID NO: 223673
  Synthetic oligonucleotide

SEQ ID NO: 630575 - DNA, 56 bp, Artificial; identical to SEQ ID NO: 177566
  Synthetic oligonucleotide

SEQ ID NO: 630576 - DNA, 55 bp, Artificial; identical to SEQ ID NO: 238175
  Synthetic oligonucleotide

SEQ ID NO: 630577 - DNA, 55 bp, Artificial; identical to SEQ ID NO: 254985
  Synthetic oligonucleotide

SEQ ID NO: 630578 - DNA, 55 bp, Artificial; identical to SEQ ID NO: 171372
  Synthetic oligonucleotide

SEQ ID NO: 630579 - DNA, 55 bp, Artificial; identical to SEQ ID NO: 199429
  Synthetic oligonucleotide

SEQ ID NO: 630580 - DNA, 59 bp, Artificial; identical to SEQ ID NO: 237891
  Synthetic oligonucleotide

SEQ ID NO: 630581 - DNA, 51 bp, Artificial; identical to SEQ ID NO: 170219
  Synthetic oligonucleotide

SEQ ID NO: 630582 - DNA, 52 bp, Artificial; identical to SEQ ID NO: 186234
  Synthetic oligonucleotide

SEQ ID NO: 630583 - DNA, 60 bp, Artificial; identical to SEQ ID NO: 151333
  Synthetic oligonucleotide

SEQ ID NO: 630584 - DNA, 55 bp, Artificial; identical to SEQ ID NO: 217898
  Synthetic oligonucleotide

SEQ ID NO: 630585 - DNA, 60 bp, Artificial; identical to SEQ ID NO: 243463
  Synthetic oligonucleotide

SEQ ID NO: 630586 - DNA, 55 bp, Artificial; identical to SEQ ID NO: 183791
  Synthetic oligonucleotide

SEQ ID NO: 630587 - DNA, 54 bp, Artificial; identical to SEQ ID NO: 149195
  Synthetic oligonucleotide

SEQ ID NO: 630588 - DNA, 60 bp, Artificial; identical to SEQ ID NO: 141565
  Synthetic oligonucleotide

SEQ ID NO: 630589 - DNA, 55 bp, Artificial; identical to SEQ ID NO: 260009
  Synthetic oligonucleotide

SEQ ID NO: 630590 - DNA, 50 bp, Artificial; identical to SEQ ID NO: 176544
  Synthetic oligonucleotide

SEQ ID NO: 630591 - DNA, 55 bp, Artificial; identical to SEQ ID NO: 257605
  Synthetic oligonucleotide

SEQ ID NO: 630592 - DNA, 55 bp, Artificial; identical to SEQ ID NO: 168210
  Synthetic oligonucleotide

SEQ ID NO: 630593 - DNA, 55 bp, Artificial; identical to SEQ ID NO: 187858
  Synthetic oligonucleotide

SEQ ID NO: 630594 - DNA, 54 bp, Artificial; identical to SEQ ID NO: 160376
  Synthetic oligonucleotide

SEQ ID NO: 630595 - DNA, 55 bp, Artificial; identical to SEQ ID NO: 183787
  Synthetic oligonucleotide

SEQ ID NO: 630596 - DNA, 55 bp, Artificial; identical to SEQ ID NO: 190195
  Synthetic oligonucleotide

SEQ ID NO: 630597 - DNA, 55 bp, Artificial; identical to SEQ ID NO: 199439
  Synthetic oligonucleotide

SEQ ID NO: 630598 - DNA, 54 bp, Artificial; identical to SEQ ID NO: 200793
  Synthetic oligonucleotide

SEQ ID NO: 630599 - DNA, 55 bp, Artificial; identical to SEQ ID NO: 148746
  Synthetic oligonucleotide

SEQ ID NO: 630600 - DNA, 55 bp, Artificial; identical to SEQ ID NO: 160004
  Synthetic oligonucleotide

SEQ ID NO: 630601 - DNA, 60 bp, Artificial; identical to SEQ ID NO: 177562
  Synthetic oligonucleotide

SEQ ID NO: 630602 - DNA, 55 bp, Artificial; identical to SEQ ID NO: 246031
  Synthetic oligonucleotide

SEQ ID NO: 630603 - DNA, 55 bp, Artificial; identical to SEQ ID NO: 183782
  Synthetic oligonucleotide

SEQ ID NO: 630604 - DNA, 55 bp, Artificial; identical to SEQ ID NO: 246030
  Synthetic oligonucleotide

SEQ ID NO: 630605 - DNA, 56 bp, Artificial; identical to SEQ ID NO: 248399
  Synthetic oligonucleotide

SEQ ID NO: 630606 - DNA, 52 bp, Artificial; identical to SEQ ID NO: 254984
  Synthetic oligonucleotide

SEQ ID NO: 630607 - DNA, 55 bp, Artificial; identical to SEQ ID NO: 190196
  Synthetic oligonucleotide

SEQ ID NO: 630608 - DNA, 55 bp, Artificial; identical to SEQ ID NO: 220590
  Synthetic oligonucleotide

SEQ ID NO: 630609 - DNA, 60 bp, Artificial; identical to SEQ ID NO: 243464
  Synthetic oligonucleotide

SEQ ID NO: 630610 - DNA, 55 bp, Artificial; identical to SEQ ID NO: 166471
  Synthetic oligonucleotide

SEQ ID NO: 630611 - DNA, 52 bp, Artificial; identical to SEQ ID NO: 153631
  Synthetic oligonucleotide

SEQ ID NO: 630612 - DNA, 55 bp, Artificial; identical to SEQ ID NO: 159676
  Synthetic oligonucleotide

SEQ ID NO: 630613 - DNA, 55 bp, Artificial; identical to SEQ ID NO: 266787
  Synthetic oligonucleotide

SEQ ID NO: 630614 - DNA, 55 bp, Artificial; identical to SEQ ID NO: 153114
  Synthetic oligonucleotide

SEQ ID NO: 630615 - DNA, 55 bp, Artificial; identical to SEQ ID NO: 254982
  Synthetic oligonucleotide

SEQ ID NO: 630616 - DNA, 54 bp, Artificial; identical to SEQ ID NO: 209188
  Synthetic oligonucleotide

SEQ ID NO: 630617 - DNA, 55 bp, Artificial; identical to SEQ ID NO: 224493
  Synthetic oligonucleotide

SEQ ID NO: 630618 - DNA, 60 bp, Artificial; identical to SEQ ID NO: 248401
  Synthetic oligonucleotide

SEQ ID NO: 630619 - DNA, 55 bp, Artificial; identical to SEQ ID NO: 183778
  Synthetic oligonucleotide

SEQ ID NO: 630620 - DNA, 51 bp, Artificial; identical to SEQ ID NO: 208473
  Synthetic oligonucleotide

SEQ ID NO: 630621 - DNA, 54 bp, Artificial; identical to SEQ ID NO: 248742
  Synthetic oligonucleotide

SEQ ID NO: 630622 - DNA, 55 bp, Artificial; identical to SEQ ID NO: 246025
  Synthetic oligonucleotide

SEQ ID NO: 630623 - DNA, 55 bp, Artificial; identical to SEQ ID NO: 183726
  Synthetic oligonucleotide

SEQ ID NO: 630624 - DNA, 55 bp, Artificial; identical to SEQ ID NO: 159678
  Synthetic oligonucleotide

SEQ ID NO: 630625 - DNA, 55 bp, Artificial; identical to SEQ ID NO: 168286
  Synthetic oligonucleotide

SEQ ID NO: 630626 - DNA, 60 bp, Artificial; identical to SEQ ID NO: 142618
  Synthetic oligonucleotide

SEQ ID NO: 630627 - DNA, 60 bp, Artificial; identical to SEQ ID NO: 170665
  Synthetic oligonucleotide

SEQ ID NO: 630628 - DNA, 58 bp, Artificial; identical to SEQ ID NO: 166019
  Synthetic oligonucleotide

SEQ ID NO: 630629 - DNA, 55 bp, Artificial; identical to SEQ ID NO: 248784
  Synthetic oligonucleotide

SEQ ID NO: 630630 - DNA, 53 bp, Artificial; identical to SEQ ID NO: 180092
  Synthetic oligonucleotide

SEQ ID NO: 630631 - DNA, 55 bp, Artificial; identical to SEQ ID NO: 254978
  Synthetic oligonucleotide

SEQ ID NO: 630632 - DNA, 54 bp, Artificial; identical to SEQ ID NO: 183731
  Synthetic oligonucleotide

SEQ ID NO: 630633 - DNA, 56 bp, Artificial; identical to SEQ ID NO: 244031
  Synthetic oligonucleotide

SEQ ID NO: 630634 - DNA, 55 bp, Artificial; identical to SEQ ID NO: 171377
  Synthetic oligonucleotide

SEQ ID NO: 630635 - DNA, 55 bp, Artificial; identical to SEQ ID NO: 221242
  Synthetic oligonucleotide

SEQ ID NO: 630636 - DNA, 55 bp, Artificial; identical to SEQ ID NO: 166476
  Synthetic oligonucleotide

SEQ ID NO: 630637 - DNA, 50 bp, Artificial; identical to SEQ ID NO: 142645
  Synthetic oligonucleotide

SEQ ID NO: 630638 - DNA, 51 bp, Artificial; identical to SEQ ID NO: 144585
  Synthetic oligonucleotide

SEQ ID NO: 630639 - DNA, 55 bp, Artificial; identical to SEQ ID NO: 225042
  Synthetic oligonucleotide

SEQ ID NO: 630640 - DNA, 55 bp, Artificial; identical to SEQ ID NO: 205317
  Synthetic oligonucleotide

SEQ ID NO: 630641 - DNA, 58 bp, Artificial; identical to SEQ ID NO: 187344
  Synthetic oligonucleotide

SEQ ID NO: 630642 - DNA, 55 bp, Artificial; identical to SEQ ID NO: 210871
  Synthetic oligonucleotide

SEQ ID NO: 630643 - DNA, 55 bp, Artificial; identical to SEQ ID NO: 208278
  Synthetic oligonucleotide

SEQ ID NO: 630644 - DNA, 53 bp, Artificial; identical to SEQ ID NO: 210868
  Synthetic oligonucleotide

SEQ ID NO: 630645 - DNA, 55 bp, Artificial; identical to SEQ ID NO: 246016
  Synthetic oligonucleotide

SEQ ID NO: 630646 - DNA, 55 bp, Artificial; identical to SEQ ID NO: 142863
  Synthetic oligonucleotide

SEQ ID NO: 630647 - DNA, 54 bp, Artificial; identical to SEQ ID NO: 169984
  Synthetic oligonucleotide

SEQ ID NO: 630648 - DNA, 54 bp, Artificial; identical to SEQ ID NO: 185332
  Synthetic oligonucleotide

SEQ ID NO: 630649 - DNA, 56 bp, Artificial; identical to SEQ ID NO: 170332
  Synthetic oligonucleotide

SEQ ID NO: 630650 - DNA, 55 bp, Artificial; identical to SEQ ID NO: 246014
  Synthetic oligonucleotide

SEQ ID NO: 630651 - DNA, 55 bp, Artificial; identical to SEQ ID NO: 183750
  Synthetic oligonucleotide

SEQ ID NO: 630652 - DNA, 59 bp, Artificial; identical to SEQ ID NO: 211224
  Synthetic oligonucleotide

SEQ ID NO: 630653 - DNA, 55 bp, Artificial; identical to SEQ ID NO: 191112
  Synthetic oligonucleotide

SEQ ID NO: 630654 - DNA, 55 bp, Artificial; identical to SEQ ID NO: 148741
  Synthetic oligonucleotide

SEQ ID NO: 630655 - DNA, 50 bp, Artificial; identical to SEQ ID NO: 206958
  Synthetic oligonucleotide

SEQ ID NO: 630656 - DNA, 55 bp, Artificial; identical to SEQ ID NO: 197117
  Synthetic oligonucleotide

SEQ ID NO: 630657 - DNA, 53 bp, Artificial; identical to SEQ ID NO: 240698
  Synthetic oligonucleotide

SEQ ID NO: 630658 - DNA, 55 bp, Artificial; identical to SEQ ID NO: 202342
  Synthetic oligonucleotide

SEQ ID NO: 630659 - DNA, 55 bp, Artificial; identical to SEQ ID NO: 194834
  Synthetic oligonucleotide

SEQ ID NO: 630660 - DNA, 53 bp, Artificial; identical to SEQ ID NO: 209626
  Synthetic oligonucleotide

SEQ ID NO: 630661 - DNA, 52 bp, Artificial; identical to SEQ ID NO: 186330
  Synthetic oligonucleotide

SEQ ID NO: 630662 - DNA, 55 bp, Artificial; identical to SEQ ID NO: 142339
  Synthetic oligonucleotide

SEQ ID NO: 630663 - DNA, 50 bp, Artificial; identical to SEQ ID NO: 160951
  Synthetic oligonucleotide

SEQ ID NO: 630664 - DNA, 55 bp, Artificial; identical to SEQ ID NO: 144056
  Synthetic oligonucleotide

SEQ ID NO: 630665 - DNA, 55 bp, Artificial; identical to SEQ ID NO: 217930
  Synthetic oligonucleotide

SEQ ID NO: 630666 - DNA, 51 bp, Artificial; identical to SEQ ID NO: 213078
  Synthetic oligonucleotide

SEQ ID NO: 630667 - DNA, 58 bp, Artificial; identical to SEQ ID NO: 147058
  Synthetic oligonucleotide

SEQ ID NO: 630668 - DNA, 55 bp, Artificial; identical to SEQ ID NO: 148738
  Synthetic oligonucleotide

SEQ ID NO: 630669 - DNA, 50 bp, Artificial; identical to SEQ ID NO: 141425
  Synthetic oligonucleotide

SEQ ID NO: 630670 - DNA, 55 bp, Artificial; identical to SEQ ID NO: 148735
  Synthetic oligonucleotide

SEQ ID NO: 630671 - DNA, 55 bp, Artificial; identical to SEQ ID NO: 248783
  Synthetic oligonucleotide

SEQ ID NO: 630672 - DNA, 60 bp, Artificial; identical to SEQ ID NO: 247932
  Synthetic oligonucleotide

SEQ ID NO: 630673 - DNA, 55 bp, Artificial; identical to SEQ ID NO: 183742
  Synthetic oligonucleotide

SEQ ID NO: 630674 - DNA, 55 bp, Artificial; identical to SEQ ID NO: 190199
  Synthetic oligonucleotide

SEQ ID NO: 630675 - DNA, 52 bp, Artificial; identical to SEQ ID NO: 238165
  Synthetic oligonucleotide

SEQ ID NO: 630676 - DNA, 55 bp, Artificial; identical to SEQ ID NO: 261955
  Synthetic oligonucleotide

SEQ ID NO: 630677 - DNA, 55 bp, Artificial; identical to SEQ ID NO: 239273
  Synthetic oligonucleotide

SEQ ID NO: 630678 - DNA, 55 bp, Artificial; identical to SEQ ID NO: 203480
  Synthetic oligonucleotide

SEQ ID NO: 630679 - DNA, 60 bp, Artificial; identical to SEQ ID NO: 177495
  Synthetic oligonucleotide

SEQ ID NO: 630680 - DNA, 55 bp, Artificial; identical to SEQ ID NO: 159734
  Synthetic oligonucleotide

SEQ ID NO: 630681 - DNA, 54 bp, Artificial; identical to SEQ ID NO: 266392
  Synthetic oligonucleotide

SEQ ID NO: 630682 - DNA, 55 bp, Artificial; identical to SEQ ID NO: 154345
  Synthetic oligonucleotide

SEQ ID NO: 630683 - DNA, 60 bp, Artificial; identical to SEQ ID NO: 266391
  Synthetic oligonucleotide

SEQ ID NO: 630684 - DNA, 56 bp, Artificial; identical to SEQ ID NO: 187392
  Synthetic oligonucleotide

SEQ ID NO: 630685 - DNA, 55 bp, Artificial; identical to SEQ ID NO: 246008
  Synthetic oligonucleotide

SEQ ID NO: 630686 - DNA, 55 bp, Artificial; identical to SEQ ID NO: 246006
  Synthetic oligonucleotide

SEQ ID NO: 630687 - DNA, 55 bp, Artificial; identical to SEQ ID NO: 254929
  Synthetic oligonucleotide

SEQ ID NO: 630688 - DNA, 55 bp, Artificial; identical to SEQ ID NO: 210866
  Synthetic oligonucleotide

SEQ ID NO: 630689 - DNA, 55 bp, Artificial; identical to SEQ ID NO: 238163
  Synthetic oligonucleotide

SEQ ID NO: 630690 - DNA, 55 bp, Artificial; identical to SEQ ID NO: 246005
  Synthetic oligonucleotide

SEQ ID NO: 630691 - DNA, 55 bp, Artificial; identical to SEQ ID NO: 252692
  Synthetic oligonucleotide

SEQ ID NO: 630692 - DNA, 52 bp, Artificial; identical to SEQ ID NO: 193761
  Synthetic oligonucleotide

SEQ ID NO: 630693 - DNA, 55 bp, Artificial; identical to SEQ ID NO: 225037
  Synthetic oligonucleotide

SEQ ID NO: 630694 - DNA, 55 bp, Artificial; identical to SEQ ID NO: 144681
  Synthetic oligonucleotide

SEQ ID NO: 630695 - DNA, 55 bp, Artificial; identical to SEQ ID NO: 159736
  Synthetic oligonucleotide

SEQ ID NO: 630696 - DNA, 55 bp, Artificial; identical to SEQ ID NO: 217922
  Synthetic oligonucleotide

SEQ ID NO: 630697 - DNA, 55 bp, Artificial; identical to SEQ ID NO: 221243
  Synthetic oligonucleotide

SEQ ID NO: 630698 - DNA, 55 bp, Artificial; identical to SEQ ID NO: 182990
  Synthetic oligonucleotide

SEQ ID NO: 630699 - DNA, 52 bp, Artificial; identical to SEQ ID NO: 223638
  Synthetic oligonucleotide

SEQ ID NO: 630700 - DNA, 55 bp, Artificial; identical to SEQ ID NO: 202339
  Synthetic oligonucleotide

SEQ ID NO: 630701 - DNA, 52 bp, Artificial; identical to SEQ ID NO: 186364
  Synthetic oligonucleotide

SEQ ID NO: 630702 - DNA, 60 bp, Artificial; identical to SEQ ID NO: 177491
  Synthetic oligonucleotide

SEQ ID NO: 630703 - DNA, 52 bp, Artificial; identical to SEQ ID NO: 242756
  Synthetic oligonucleotide

SEQ ID NO: 630704 - DNA, 55 bp, Artificial; identical to SEQ ID NO: 160003
  Synthetic oligonucleotide

SEQ ID NO: 630705 - DNA, 58 bp, Artificial; identical to SEQ ID NO: 159431
  Synthetic oligonucleotide

SEQ ID NO: 630706 - DNA, 55 bp, Artificial; identical to SEQ ID NO: 153112
  Synthetic oligonucleotide

SEQ ID NO: 630707 - DNA, 55 bp, Artificial; identical to SEQ ID NO: 148896
  Synthetic oligonucleotide

SEQ ID NO: 630708 - DNA, 53 bp, Artificial; identical to SEQ ID NO: 185656
  Synthetic oligonucleotide

SEQ ID NO: 630709 - DNA, 57 bp, Artificial; identical to SEQ ID NO: 177490
  Synthetic oligonucleotide

SEQ ID NO: 630710 - DNA, 52 bp, Artificial; identical to SEQ ID NO: 186356
  Synthetic oligonucleotide

SEQ ID NO: 630711 - DNA, 55 bp, Artificial; identical to SEQ ID NO: 224498
  Synthetic oligonucleotide

SEQ ID NO: 630712 - DNA, 51 bp, Artificial; identical to SEQ ID NO: 200760
  Synthetic oligonucleotide

SEQ ID NO: 630713 - DNA, 60 bp, Artificial; identical to SEQ ID NO: 242236
  Synthetic oligonucleotide

SEQ ID NO: 630714 - DNA, 51 bp, Artificial; identical to SEQ ID NO: 211113
  Synthetic oligonucleotide

SEQ ID NO: 630715 - DNA, 55 bp, Artificial; identical to SEQ ID NO: 179767
  Synthetic oligonucleotide

SEQ ID NO: 630716 - DNA, 51 bp, Artificial; identical to SEQ ID NO: 246050
  Synthetic oligonucleotide

SEQ ID NO: 630717 - DNA, 59 bp, Artificial; identical to SEQ ID NO: 177489
  Synthetic oligonucleotide

SEQ ID NO: 630718 - DNA, 55 bp, Artificial; identical to SEQ ID NO: 246051
  Synthetic oligonucleotide

SEQ ID NO: 630719 - DNA, 55 bp, Artificial; identical to SEQ ID NO: 201331
  Synthetic oligonucleotide

SEQ ID NO: 630720 - DNA, 55 bp, Artificial; identical to SEQ ID NO: 182976
  Synthetic oligonucleotide

SEQ ID NO: 630721 - DNA, 55 bp, Artificial; identical to SEQ ID NO: 203479
  Synthetic oligonucleotide

SEQ ID NO: 630722 - DNA, 49 bp, Artificial; identical to SEQ ID NO: 254925
  Synthetic oligonucleotide

SEQ ID NO: 630723 - DNA, 55 bp, Artificial; identical to SEQ ID NO: 243938
  Synthetic oligonucleotide

SEQ ID NO: 630724 - DNA, 53 bp, Artificial; identical to SEQ ID NO: 255403
  Synthetic oligonucleotide

SEQ ID NO: 630725 - DNA, 55 bp, Artificial; identical to SEQ ID NO: 148894
  Synthetic oligonucleotide

SEQ ID NO: 630726 - DNA, 55 bp, Artificial; identical to SEQ ID NO: 199401
  Synthetic oligonucleotide

SEQ ID NO: 630727 - DNA, 55 bp, Artificial; identical to SEQ ID NO: 182975
  Synthetic oligonucleotide

SEQ ID NO: 630728 - DNA, 55 bp, Artificial; identical to SEQ ID NO: 199403
  Synthetic oligonucleotide

SEQ ID NO: 630729 - DNA, 55 bp, Artificial; identical to SEQ ID NO: 153109
  Synthetic oligonucleotide

SEQ ID NO: 630730 - DNA, 55 bp, Artificial; identical to SEQ ID NO: 168288
  Synthetic oligonucleotide

SEQ ID NO: 630731 - DNA, 55 bp, Artificial; identical to SEQ ID NO: 183007
  Synthetic oligonucleotide

SEQ ID NO: 630732 - DNA, 59 bp, Artificial; identical to SEQ ID NO: 211002
  Synthetic oligonucleotide

SEQ ID NO: 630733 - DNA, 55 bp, Artificial; identical to SEQ ID NO: 197116
  Synthetic oligonucleotide

SEQ ID NO: 630734 - DNA, 54 bp, Artificial; identical to SEQ ID NO: 183003
  Synthetic oligonucleotide

SEQ ID NO: 630735 - DNA, 55 bp, Artificial; identical to SEQ ID NO: 254920
  Synthetic oligonucleotide

SEQ ID NO: 630736 - DNA, 55 bp, Artificial; identical to SEQ ID NO: 183002
  Synthetic oligonucleotide

SEQ ID NO: 630737 - DNA, 55 bp, Artificial; identical to SEQ ID NO: 254919
  Synthetic oligonucleotide

SEQ ID NO: 630738 - DNA, 54 bp, Artificial; identical to SEQ ID NO: 217921
  Synthetic oligonucleotide

SEQ ID NO: 630739 - DNA, 53 bp, Artificial; identical to SEQ ID NO: 217103
  Synthetic oligonucleotide

SEQ ID NO: 630740 - DNA, 56 bp, Artificial; identical to SEQ ID NO: 159866
  Synthetic oligonucleotide

SEQ ID NO: 630741 - DNA, 55 bp, Artificial; identical to SEQ ID NO: 183001
  Synthetic oligonucleotide

SEQ ID NO: 630742 - DNA, 57 bp, Artificial; identical to SEQ ID NO: 179782
  Synthetic oligonucleotide

SEQ ID NO: 630743 - DNA, 55 bp, Artificial; identical to SEQ ID NO: 154352
  Synthetic oligonucleotide

SEQ ID NO: 630744 - DNA, 56 bp, Artificial; identical to SEQ ID NO: 150585
  Synthetic oligonucleotide

SEQ ID NO: 630745 - DNA, 54 bp, Artificial; identical to SEQ ID NO: 157258
  Synthetic oligonucleotide

SEQ ID NO: 630746 - DNA, 55 bp, Artificial; identical to SEQ ID NO: 252843
  Synthetic oligonucleotide

SEQ ID NO: 630747 - DNA, 55 bp, Artificial; identical to SEQ ID NO: 148892
  Synthetic oligonucleotide

SEQ ID NO: 630748 - DNA, 55 bp, Artificial; identical to SEQ ID NO: 177485
  Synthetic oligonucleotide

SEQ ID NO: 630749 - DNA, 49 bp, Artificial; identical to SEQ ID NO: 209458
  Synthetic oligonucleotide

SEQ ID NO: 630750 - DNA, 52 bp, Artificial; identical to SEQ ID NO: 255582
  Synthetic oligonucleotide

SEQ ID NO: 630751 - DNA, 55 bp, Artificial; identical to SEQ ID NO: 234847
  Synthetic oligonucleotide

SEQ ID NO: 630752 - DNA, 54 bp, Artificial; identical to SEQ ID NO: 151469
  Synthetic oligonucleotide

SEQ ID NO: 630753 - DNA, 55 bp, Artificial; identical to SEQ ID NO: 202338
  Synthetic oligonucleotide

SEQ ID NO: 630754 - DNA, 54 bp, Artificial; identical to SEQ ID NO: 234416
  Synthetic oligonucleotide

SEQ ID NO: 630755 - DNA, 57 bp, Artificial; identical to SEQ ID NO: 242290
  Synthetic oligonucleotide

SEQ ID NO: 630756 - DNA, 50 bp, Artificial; identical to SEQ ID NO: 153872
  Synthetic oligonucleotide

SEQ ID NO: 630757 - DNA, 59 bp, Artificial; identical to SEQ ID NO: 256526
  Synthetic oligonucleotide

SEQ ID NO: 630758 - DNA, 58 bp, Artificial; identical to SEQ ID NO: 243468
  Synthetic oligonucleotide

SEQ ID NO: 630759 - DNA, 60 bp, Artificial; identical to SEQ ID NO: 150583
  Synthetic oligonucleotide

SEQ ID NO: 630760 - DNA, 52 bp, Artificial; identical to SEQ ID NO: 187868
  Synthetic oligonucleotide

SEQ ID NO: 630761 - DNA, 58 bp, Artificial; identical to SEQ ID NO: 179639
  Synthetic oligonucleotide

SEQ ID NO: 630762 - DNA, 60 bp, Artificial; identical to SEQ ID NO: 266390
  Synthetic oligonucleotide

SEQ ID NO: 630763 - DNA, 52 bp, Artificial; identical to SEQ ID NO: 197114
  Synthetic oligonucleotide

SEQ ID NO: 630764 - DNA, 55 bp, Artificial; identical to SEQ ID NO: 207684
  Synthetic oligonucleotide

SEQ ID NO: 630765 - DNA, 51 bp, Artificial; identical to SEQ ID NO: 243376
  Synthetic oligonucleotide

SEQ ID NO: 630766 - DNA, 55 bp, Artificial; identical to SEQ ID NO: 208281
  Synthetic oligonucleotide

SEQ ID NO: 630767 - DNA, 55 bp, Artificial; identical to SEQ ID NO: 159740
  Synthetic oligonucleotide

SEQ ID NO: 630768 - DNA, 60 bp, Artificial; identical to SEQ ID NO: 150582
  Synthetic oligonucleotide

SEQ ID NO: 630769 - DNA, 51 bp, Artificial; identical to SEQ ID NO: 255717
  Synthetic oligonucleotide

SEQ ID NO: 630770 - DNA, 55 bp, Artificial; identical to SEQ ID NO: 188948
  Synthetic oligonucleotide

SEQ ID NO: 630771 - DNA, 54 bp, Artificial; identical to SEQ ID NO: 248656
  Synthetic oligonucleotide

SEQ ID NO: 630772 - DNA, 55 bp, Artificial; identical to SEQ ID NO: 254915
  Synthetic oligonucleotide

SEQ ID NO: 630773 - DNA, 57 bp, Artificial; identical to SEQ ID NO: 177482
  Synthetic oligonucleotide

SEQ ID NO: 630774 - DNA, 55 bp, Artificial; identical to SEQ ID NO: 182941
  Synthetic oligonucleotide

SEQ ID NO: 630775 - DNA, 55 bp, Artificial; identical to SEQ ID NO: 247977
  Synthetic oligonucleotide

SEQ ID NO: 630776 - DNA, 60 bp, Artificial; identical to SEQ ID NO: 200738
  Synthetic oligonucleotide

SEQ ID NO: 630777 - DNA, 55 bp, Artificial; identical to SEQ ID NO: 152567
  Synthetic oligonucleotide

SEQ ID NO: 630778 - DNA, 55 bp, Artificial; identical to SEQ ID NO: 159741
  Synthetic oligonucleotide

SEQ ID NO: 630779 - DNA, 52 bp, Artificial; identical to SEQ ID NO: 246138
  Synthetic oligonucleotide

SEQ ID NO: 630780 - DNA, 57 bp, Artificial; identical to SEQ ID NO: 150581
  Synthetic oligonucleotide

SEQ ID NO: 630781 - DNA, 50 bp, Artificial; identical to SEQ ID NO: 152250
  Synthetic oligonucleotide

SEQ ID NO: 630782 - DNA, 55 bp, Artificial; identical to SEQ ID NO: 220560
  Synthetic oligonucleotide

SEQ ID NO: 630783 - DNA, 55 bp, Artificial; identical to SEQ ID NO: 257647
  Synthetic oligonucleotide

SEQ ID NO: 630784 - DNA, 55 bp, Artificial; identical to SEQ ID NO: 159744
  Synthetic oligonucleotide

SEQ ID NO: 630785 - DNA, 50 bp, Artificial; identical to SEQ ID NO: 257392
  Synthetic oligonucleotide

SEQ ID NO: 630786 - DNA, 55 bp, Artificial; identical to SEQ ID NO: 148886
  Synthetic oligonucleotide

SEQ ID NO: 630787 - DNA, 55 bp, Artificial; identical to SEQ ID NO: 171742
  Synthetic oligonucleotide

SEQ ID NO: 630788 - DNA, 55 bp, Artificial; identical to SEQ ID NO: 235121
  Synthetic oligonucleotide

SEQ ID NO: 630789 - DNA, 53 bp, Artificial; identical to SEQ ID NO: 217928
  Synthetic oligonucleotide

SEQ ID NO: 630790 - DNA, 59 bp, Artificial; identical to SEQ ID NO: 197459
  Synthetic oligonucleotide

SEQ ID NO: 630791 - DNA, 53 bp, Artificial; identical to SEQ ID NO: 187833
  Synthetic oligonucleotide

SEQ ID NO: 630792 - DNA, 55 bp, Artificial; identical to SEQ ID NO: 190202
  Synthetic oligonucleotide

SEQ ID NO: 630793 - DNA, 55 bp, Artificial; identical to SEQ ID NO: 207679
  Synthetic oligonucleotide

SEQ ID NO: 630794 - DNA, 54 bp, Artificial; identical to SEQ ID NO: 238192
  Synthetic oligonucleotide

SEQ ID NO: 630795 - DNA, 55 bp, Artificial; identical to SEQ ID NO: 151472
  Synthetic oligonucleotide

SEQ ID NO: 630796 - DNA, 55 bp, Artificial; identical to SEQ ID NO: 170376
  Synthetic oligonucleotide

SEQ ID NO: 630797 - DNA, 51 bp, Artificial; identical to SEQ ID NO: 263325
  Synthetic oligonucleotide

SEQ ID NO: 630798 - DNA, 55 bp, Artificial; identical to SEQ ID NO: 194835
  Synthetic oligonucleotide

SEQ ID NO: 630799 - DNA, 55 bp, Artificial; identical to SEQ ID NO: 191965
  Synthetic oligonucleotide

SEQ ID NO: 630800 - DNA, 55 bp, Artificial; identical to SEQ ID NO: 148883
  Synthetic oligonucleotide

SEQ ID NO: 630801 - DNA, 55 bp, Artificial; identical to SEQ ID NO: 159745
  Synthetic oligonucleotide

SEQ ID NO: 630802 - DNA, 54 bp, Artificial; identical to SEQ ID NO: 201639
  Synthetic oligonucleotide

SEQ ID NO: 630803 - DNA, 54 bp, Artificial; identical to SEQ ID NO: 171382
  Synthetic oligonucleotide

SEQ ID NO: 630804 - DNA, 52 bp, Artificial; identical to SEQ ID NO: 147323
  Synthetic oligonucleotide

SEQ ID NO: 630805 - DNA, 60 bp, Artificial; identical to SEQ ID NO: 150576
  Synthetic oligonucleotide

SEQ ID NO: 630806 - DNA, 50 bp, Artificial; identical to SEQ ID NO: 255812
  Synthetic oligonucleotide

SEQ ID NO: 630807 - DNA, 52 bp, Artificial; identical to SEQ ID NO: 169373
  Synthetic oligonucleotide

SEQ ID NO: 630808 - DNA, 55 bp, Artificial; identical to SEQ ID NO: 252844
  Synthetic oligonucleotide

SEQ ID NO: 630809 - DNA, 55 bp, Artificial; identical to SEQ ID NO: 162238
  Synthetic oligonucleotide

SEQ ID NO: 630810 - DNA, 55 bp, Artificial; identical to SEQ ID NO: 174564
  Synthetic oligonucleotide

SEQ ID NO: 630811 - DNA, 55 bp, Artificial; identical to SEQ ID NO: 182947
  Synthetic oligonucleotide

SEQ ID NO: 630812 - DNA, 54 bp, Artificial; identical to SEQ ID NO: 240676
  Synthetic oligonucleotide

SEQ ID NO: 630813 - DNA, 55 bp, Artificial; identical to SEQ ID NO: 159746
  Synthetic oligonucleotide

SEQ ID NO: 630814 - DNA, 55 bp, Artificial; identical to SEQ ID NO: 150575
  Synthetic oligonucleotide

SEQ ID NO: 630815 - DNA, 55 bp, Artificial; identical to SEQ ID NO: 207678
  Synthetic oligonucleotide

SEQ ID NO: 630816 - DNA, 60 bp, Artificial; identical to SEQ ID NO: 223539
  Synthetic oligonucleotide

SEQ ID NO: 630817 - DNA, 54 bp, Artificial; identical to SEQ ID NO: 149202
  Synthetic oligonucleotide

SEQ ID NO: 630818 - DNA, 58 bp, Artificial; identical to SEQ ID NO: 177480
  Synthetic oligonucleotide

SEQ ID NO: 630819 - DNA, 55 bp, Artificial; identical to SEQ ID NO: 182953
  Synthetic oligonucleotide

SEQ ID NO: 630820 - DNA, 54 bp, Artificial; identical to SEQ ID NO: 221213
  Synthetic oligonucleotide

SEQ ID NO: 630821 - DNA, 52 bp, Artificial; identical to SEQ ID NO: 209230
  Synthetic oligonucleotide

SEQ ID NO: 630822 - DNA, 55 bp, Artificial; identical to SEQ ID NO: 218901
  Synthetic oligonucleotide

SEQ ID NO: 630823 - DNA, 56 bp, Artificial; identical to SEQ ID NO: 150573
  Synthetic oligonucleotide

SEQ ID NO: 630824 - DNA, 55 bp, Artificial; identical to SEQ ID NO: 148879
  Synthetic oligonucleotide

SEQ ID NO: 630825 - DNA, 54 bp, Artificial; identical to SEQ ID NO: 150572
  Synthetic oligonucleotide

SEQ ID NO: 630826 - DNA, 51 bp, Artificial; identical to SEQ ID NO: 157889
  Synthetic oligonucleotide

SEQ ID NO: 630827 - DNA, 55 bp, Artificial; identical to SEQ ID NO: 218207
  Synthetic oligonucleotide

SEQ ID NO: 630828 - DNA, 51 bp, Artificial; identical to SEQ ID NO: 186888
  Synthetic oligonucleotide

SEQ ID NO: 630829 - DNA, 59 bp, Artificial; identical to SEQ ID NO: 162214
  Synthetic oligonucleotide

SEQ ID NO: 630830 - DNA, 54 bp, Artificial; identical to SEQ ID NO: 162282
  Synthetic oligonucleotide

SEQ ID NO: 630831 - DNA, 53 bp, Artificial; identical to SEQ ID NO: 216680
  Synthetic oligonucleotide

SEQ ID NO: 630832 - DNA, 55 bp, Artificial; identical to SEQ ID NO: 148878
  Synthetic oligonucleotide

SEQ ID NO: 630833 - DNA, 55 bp, Artificial; identical to SEQ ID NO: 187835
  Synthetic oligonucleotide

SEQ ID NO: 630834 - DNA, 55 bp, Artificial; identical to SEQ ID NO: 254912
  Synthetic oligonucleotide

SEQ ID NO: 630835 - DNA, 55 bp, Artificial; identical to SEQ ID NO: 171385
  Synthetic oligonucleotide

SEQ ID NO: 630836 - DNA, 54 bp, Artificial; identical to SEQ ID NO: 243470
  Synthetic oligonucleotide

SEQ ID NO: 630837 - DNA, 55 bp, Artificial; identical to SEQ ID NO: 159748
  Synthetic oligonucleotide

SEQ ID NO: 630838 - DNA, 55 bp, Artificial; identical to SEQ ID NO: 247988
  Synthetic oligonucleotide

SEQ ID NO: 630839 - DNA, 50 bp, Artificial; identical to SEQ ID NO: 149992
  Synthetic oligonucleotide

SEQ ID NO: 630840 - DNA, 55 bp, Artificial; identical to SEQ ID NO: 153107
  Synthetic oligonucleotide

SEQ ID NO: 630841 - DNA, 55 bp, Artificial; identical to SEQ ID NO: 220563
  Synthetic oligonucleotide

SEQ ID NO: 630842 - DNA, 55 bp, Artificial; identical to SEQ ID NO: 144053
  Synthetic oligonucleotide

SEQ ID NO: 630843 - DNA, 53 bp, Artificial; identical to SEQ ID NO: 200727
  Synthetic oligonucleotide

SEQ ID NO: 630844 - DNA, 56 bp, Artificial; identical to SEQ ID NO: 180074
  Synthetic oligonucleotide

SEQ ID NO: 630845 - DNA, 55 bp, Artificial; identical to SEQ ID NO: 144224
  Synthetic oligonucleotide

SEQ ID NO: 630846 - DNA, 55 bp, Artificial; identical to SEQ ID NO: 162187
  Synthetic oligonucleotide

SEQ ID NO: 630847 - DNA, 55 bp, Artificial; identical to SEQ ID NO: 182969
  Synthetic oligonucleotide

SEQ ID NO: 630848 - DNA, 55 bp, Artificial; identical to SEQ ID NO: 168292
  Synthetic oligonucleotide

SEQ ID NO: 630849 - DNA, 55 bp, Artificial; identical to SEQ ID NO: 159703
  Synthetic oligonucleotide

SEQ ID NO: 630850 - DNA, 55 bp, Artificial; identical to SEQ ID NO: 221214
  Synthetic oligonucleotide

SEQ ID NO: 630851 - DNA, 55 bp, Artificial; identical to SEQ ID NO: 159704
  Synthetic oligonucleotide

SEQ ID NO: 630852 - DNA, 55 bp, Artificial; identical to SEQ ID NO: 159705
  Synthetic oligonucleotide

SEQ ID NO: 630853 - DNA, 51 bp, Artificial; identical to SEQ ID NO: 258218
  Synthetic oligonucleotide

SEQ ID NO: 630854 - DNA, 51 bp, Artificial; identical to SEQ ID NO: 208887
  Synthetic oligonucleotide

SEQ ID NO: 630855 - DNA, 55 bp, Artificial; identical to SEQ ID NO: 187836
  Synthetic oligonucleotide

SEQ ID NO: 630856 - DNA, 55 bp, Artificial; identical to SEQ ID NO: 217933
  Synthetic oligonucleotide

SEQ ID NO: 630857 - DNA, 51 bp, Artificial; identical to SEQ ID NO: 152123
  Synthetic oligonucleotide

SEQ ID NO: 630858 - DNA, 55 bp, Artificial; identical to SEQ ID NO: 159707
  Synthetic oligonucleotide

SEQ ID NO: 630859 - DNA, 57 bp, Artificial; identical to SEQ ID NO: 244012
  Synthetic oligonucleotide

SEQ ID NO: 630860 - DNA, 55 bp, Artificial; identical to SEQ ID NO: 148875
  Synthetic oligonucleotide

SEQ ID NO: 630861 - DNA, 55 bp, Artificial; identical to SEQ ID NO: 257648
  Synthetic oligonucleotide

SEQ ID NO: 630862 - DNA, 54 bp, Artificial; identical to SEQ ID NO: 148874
  Synthetic oligonucleotide

SEQ ID NO: 630863 - DNA, 55 bp, Artificial; identical to SEQ ID NO: 212588
  Synthetic oligonucleotide

SEQ ID NO: 630864 - DNA, 55 bp, Artificial; identical to SEQ ID NO: 212586
  Synthetic oligonucleotide

SEQ ID NO: 630865 - DNA, 55 bp, Artificial; identical to SEQ ID NO: 220564
  Synthetic oligonucleotide

SEQ ID NO: 630866 - DNA, 55 bp, Artificial; identical to SEQ ID NO: 182962
  Synthetic oligonucleotide

SEQ ID NO: 630867 - DNA, 50 bp, Artificial; identical to SEQ ID NO: 238137
  Synthetic oligonucleotide

SEQ ID NO: 630868 - DNA, 55 bp, Artificial; identical to SEQ ID NO: 199485
  Synthetic oligonucleotide

SEQ ID NO: 630869 - DNA, 55 bp, Artificial; identical to SEQ ID NO: 182959
  Synthetic oligonucleotide

SEQ ID NO: 630870 - DNA, 59 bp, Artificial; identical to SEQ ID NO: 187251
  Synthetic oligonucleotide

SEQ ID NO: 630871 - DNA, 55 bp, Artificial; identical to SEQ ID NO: 219694
  Synthetic oligonucleotide

SEQ ID NO: 630872 - DNA, 55 bp, Artificial; identical to SEQ ID NO: 238186
  Synthetic oligonucleotide

SEQ ID NO: 630873 - DNA, 55 bp, Artificial; identical to SEQ ID NO: 188947
  Synthetic oligonucleotide

SEQ ID NO: 630874 - DNA, 55 bp, Artificial; identical to SEQ ID NO: 182958
  Synthetic oligonucleotide

SEQ ID NO: 630875 - DNA, 55 bp, Artificial; identical to SEQ ID NO: 207675
  Synthetic oligonucleotide

SEQ ID NO: 630876 - DNA, 55 bp, Artificial; identical to SEQ ID NO: 171386
  Synthetic oligonucleotide

SEQ ID NO: 630877 - DNA, 55 bp, Artificial; identical to SEQ ID NO: 166423
  Synthetic oligonucleotide

SEQ ID NO: 630878 - DNA, 55 bp, Artificial; identical to SEQ ID NO: 224495
  Synthetic oligonucleotide

SEQ ID NO: 630879 - DNA, 54 bp, Artificial; identical to SEQ ID NO: 177474
  Synthetic oligonucleotide

SEQ ID NO: 630880 - DNA, 60 bp, Artificial; identical to SEQ ID NO: 177473
  Synthetic oligonucleotide

SEQ ID NO: 630881 - DNA, 55 bp, Artificial; identical to SEQ ID NO: 254950
  Synthetic oligonucleotide

SEQ ID NO: 630882 - DNA, 51 bp, Artificial; identical to SEQ ID NO: 206507
  Synthetic oligonucleotide

SEQ ID NO: 630883 - DNA, 55 bp, Artificial; identical to SEQ ID NO: 183053
  Synthetic oligonucleotide

SEQ ID NO: 630884 - DNA, 51 bp, Artificial; identical to SEQ ID NO: 210876
  Synthetic oligonucleotide

SEQ ID NO: 630885 - DNA, 55 bp, Artificial; identical to SEQ ID NO: 187838
  Synthetic oligonucleotide

SEQ ID NO: 630886 - DNA, 55 bp, Artificial; identical to SEQ ID NO: 160001
  Synthetic oligonucleotide

SEQ ID NO: 630887 - DNA, 60 bp, Artificial; identical to SEQ ID NO: 206964
  Synthetic oligonucleotide

SEQ ID NO: 630888 - DNA, 57 bp, Artificial; identical to SEQ ID NO: 239368
  Synthetic oligonucleotide

SEQ ID NO: 630889 - DNA, 55 bp, Artificial; identical to SEQ ID NO: 171387
  Synthetic oligonucleotide

SEQ ID NO: 630890 - DNA, 53 bp, Artificial; identical to SEQ ID NO: 183051
  Synthetic oligonucleotide

SEQ ID NO: 630891 - DNA, 55 bp, Artificial; identical to SEQ ID NO: 187841
  Synthetic oligonucleotide

SEQ ID NO: 630892 - DNA, 55 bp, Artificial; identical to SEQ ID NO: 160891
  Synthetic oligonucleotide

SEQ ID NO: 630893 - DNA, 54 bp, Artificial; identical to SEQ ID NO: 150614
  Synthetic oligonucleotide

SEQ ID NO: 630894 - DNA, 55 bp, Artificial; identical to SEQ ID NO: 159998
  Synthetic oligonucleotide

SEQ ID NO: 630895 - DNA, 55 bp, Artificial; identical to SEQ ID NO: 183050
  Synthetic oligonucleotide

SEQ ID NO: 630896 - DNA, 52 bp, Artificial; identical to SEQ ID NO: 234509
  Synthetic oligonucleotide

SEQ ID NO: 630897 - DNA, 51 bp, Artificial; identical to SEQ ID NO: 200091
  Synthetic oligonucleotide

SEQ ID NO: 630898 - DNA, 53 bp, Artificial; identical to SEQ ID NO: 246039
  Synthetic oligonucleotide

SEQ ID NO: 630899 - DNA, 55 bp, Artificial; identical to SEQ ID NO: 166429
  Synthetic oligonucleotide

SEQ ID NO: 630900 - DNA, 53 bp, Artificial; identical to SEQ ID NO: 150611
  Synthetic oligonucleotide

SEQ ID NO: 630901 - DNA, 53 bp, Artificial; identical to SEQ ID NO: 155732
  Synthetic oligonucleotide

SEQ ID NO: 630902 - DNA, 56 bp, Artificial; identical to SEQ ID NO: 179895
  Synthetic oligonucleotide

SEQ ID NO: 630903 - DNA, 51 bp, Artificial; identical to SEQ ID NO: 241056
  Synthetic oligonucleotide

SEQ ID NO: 630904 - DNA, 55 bp, Artificial; identical to SEQ ID NO: 240121
  Synthetic oligonucleotide

SEQ ID NO: 630905 - DNA, 54 bp, Artificial; identical to SEQ ID NO: 252891
  Synthetic oligonucleotide

SEQ ID NO: 630906 - DNA, 55 bp, Artificial; identical to SEQ ID NO: 220566
  Synthetic oligonucleotide

SEQ ID NO: 630907 - DNA, 56 bp, Artificial; identical to SEQ ID NO: 203406
  Synthetic oligonucleotide

SEQ ID NO: 630908 - DNA, 55 bp, Artificial; identical to SEQ ID NO: 224483
  Synthetic oligonucleotide

SEQ ID NO: 630909 - DNA, 52 bp, Artificial; identical to SEQ ID NO: 179380
  Synthetic oligonucleotide

SEQ ID NO: 630910 - DNA, 53 bp, Artificial; identical to SEQ ID NO: 142606
  Synthetic oligonucleotide

SEQ ID NO: 630911 - DNA, 53 bp, Artificial; identical to SEQ ID NO: 141259
  Synthetic oligonucleotide

SEQ ID NO: 630912 - DNA, 54 bp, Artificial; identical to SEQ ID NO: 223497
  Synthetic oligonucleotide

SEQ ID NO: 630913 - DNA, 55 bp, Artificial; identical to SEQ ID NO: 246037
  Synthetic oligonucleotide

SEQ ID NO: 630914 - DNA, 55 bp, Artificial; identical to SEQ ID NO: 161664
  Synthetic oligonucleotide

SEQ ID NO: 630915 - DNA, 55 bp, Artificial; identical to SEQ ID NO: 159712
  Synthetic oligonucleotide

SEQ ID NO: 630916 - DNA, 55 bp, Artificial; identical to SEQ ID NO: 150610
  Synthetic oligonucleotide

SEQ ID NO: 630917 - DNA, 56 bp, Artificial; identical to SEQ ID NO: 161012
  Synthetic oligonucleotide

SEQ ID NO: 630918 - DNA, 60 bp, Artificial; identical to SEQ ID NO: 256410
  Synthetic oligonucleotide

SEQ ID NO: 630919 - DNA, 55 bp, Artificial; identical to SEQ ID NO: 171389
  Synthetic oligonucleotide

SEQ ID NO: 630920 - DNA, 52 bp, Artificial; identical to SEQ ID NO: 243271
  Synthetic oligonucleotide

SEQ ID NO: 630921 - DNA, 55 bp, Artificial; identical to SEQ ID NO: 183074
  Synthetic oligonucleotide

SEQ ID NO: 630922 - DNA, 53 bp, Artificial; identical to SEQ ID NO: 148922
  Synthetic oligonucleotide

SEQ ID NO: 630923 - DNA, 55 bp, Artificial; identical to SEQ ID NO: 191681
  Synthetic oligonucleotide

SEQ ID NO: 630924 - DNA, 55 bp, Artificial; identical to SEQ ID NO: 162188
  Synthetic oligonucleotide

SEQ ID NO: 630925 - DNA, 54 bp, Artificial; identical to SEQ ID NO: 185275
  Synthetic oligonucleotide

SEQ ID NO: 630926 - DNA, 51 bp, Artificial; identical to SEQ ID NO: 186749
  Synthetic oligonucleotide

SEQ ID NO: 630927 - DNA, 55 bp, Artificial; identical to SEQ ID NO: 179885
  Synthetic oligonucleotide

SEQ ID NO: 630928 - DNA, 55 bp, Artificial; identical to SEQ ID NO: 246036
  Synthetic oligonucleotide

SEQ ID NO: 630929 - DNA, 55 bp, Artificial; identical to SEQ ID NO: 183068
  Synthetic oligonucleotide

SEQ ID NO: 630930 - DNA, 52 bp, Artificial; identical to SEQ ID NO: 150608
  Synthetic oligonucleotide

SEQ ID NO: 630931 - DNA, 60 bp, Artificial; identical to SEQ ID NO: 200705
  Synthetic oligonucleotide

SEQ ID NO: 630932 - DNA, 57 bp, Artificial; identical to SEQ ID NO: 207039
  Synthetic oligonucleotide

SEQ ID NO: 630933 - DNA, 55 bp, Artificial; identical to SEQ ID NO: 144052
  Synthetic oligonucleotide

SEQ ID NO: 630934 - DNA, 51 bp, Artificial; identical to SEQ ID NO: 243364
  Synthetic oligonucleotide

SEQ ID NO: 630935 - DNA, 55 bp, Artificial; identical to SEQ ID NO: 236450
  Synthetic oligonucleotide

SEQ ID NO: 630936 - DNA, 53 bp, Artificial; identical to SEQ ID NO: 246400
  Synthetic oligonucleotide

SEQ ID NO: 630937 - DNA, 53 bp, Artificial; identical to SEQ ID NO: 177523
  Synthetic oligonucleotide

SEQ ID NO: 630938 - DNA, 54 bp, Artificial; identical to SEQ ID NO: 190475
  Synthetic oligonucleotide

SEQ ID NO: 630939 - DNA, 58 bp, Artificial; identical to SEQ ID NO: 179347
  Synthetic oligonucleotide

SEQ ID NO: 630940 - DNA, 52 bp, Artificial; identical to SEQ ID NO: 246140
  Synthetic oligonucleotide

SEQ ID NO: 630941 - DNA, 58 bp, Artificial; identical to SEQ ID NO: 239264
  Synthetic oligonucleotide

SEQ ID NO: 630942 - DNA, 58 bp, Artificial; identical to SEQ ID NO: 209177
  Synthetic oligonucleotide

SEQ ID NO: 630943 - DNA, 57 bp, Artificial; identical to SEQ ID NO: 217125
  Synthetic oligonucleotide

SEQ ID NO: 630944 - DNA, 59 bp, Artificial; identical to SEQ ID NO: 246132
  Synthetic oligonucleotide

SEQ ID NO: 630945 - DNA, 55 bp, Artificial; identical to SEQ ID NO: 202917
  Synthetic oligonucleotide

SEQ ID NO: 630946 - DNA, 60 bp, Artificial; identical to SEQ ID NO: 177521
  Synthetic oligonucleotide

SEQ ID NO: 630947 - DNA, 59 bp, Artificial; identical to SEQ ID NO: 147087
  Synthetic oligonucleotide

SEQ ID NO: 630948 - DNA, 53 bp, Artificial; identical to SEQ ID NO: 177518
  Synthetic oligonucleotide

SEQ ID NO: 630949 - DNA, 55 bp, Artificial; identical to SEQ ID NO: 152634
  Synthetic oligonucleotide

SEQ ID NO: 630950 - DNA, 50 bp, Artificial; identical to SEQ ID NO: 255224
  Synthetic oligonucleotide

SEQ ID NO: 630951 - DNA, 54 bp, Artificial; identical to SEQ ID NO: 153105
  Synthetic oligonucleotide

SEQ ID NO: 630952 - DNA, 55 bp, Artificial; identical to SEQ ID NO: 188189
  Synthetic oligonucleotide

SEQ ID NO: 630953 - DNA, 59 bp, Artificial; identical to SEQ ID NO: 256518
  Synthetic oligonucleotide

SEQ ID NO: 630954 - DNA, 60 bp, Artificial; identical to SEQ ID NO: 144677
  Synthetic oligonucleotide

SEQ ID NO: 630955 - DNA, 55 bp, Artificial; identical to SEQ ID NO: 199461
  Synthetic oligonucleotide

SEQ ID NO: 630956 - DNA, 52 bp, Artificial; identical to SEQ ID NO: 200682
  Synthetic oligonucleotide

SEQ ID NO: 630957 - DNA, 57 bp, Artificial; identical to SEQ ID NO: 159826
  Synthetic oligonucleotide

SEQ ID NO: 630958 - DNA, 55 bp, Artificial; identical to SEQ ID NO: 171247
  Synthetic oligonucleotide

SEQ ID NO: 630959 - DNA, 56 bp, Artificial; identical to SEQ ID NO: 224118
  Synthetic oligonucleotide

SEQ ID NO: 630960 - DNA, 58 bp, Artificial; identical to SEQ ID NO: 238148
  Synthetic oligonucleotide

SEQ ID NO: 630961 - DNA, 51 bp, Artificial; identical to SEQ ID NO: 192130
  Synthetic oligonucleotide

SEQ ID NO: 630962 - DNA, 55 bp, Artificial; identical to SEQ ID NO: 233717
  Synthetic oligonucleotide

SEQ ID NO: 630963 - DNA, 55 bp, Artificial; identical to SEQ ID NO: 240128
  Synthetic oligonucleotide

SEQ ID NO: 630964 - DNA, 53 bp, Artificial; identical to SEQ ID NO: 255409
  Synthetic oligonucleotide

SEQ ID NO: 630965 - DNA, 55 bp, Artificial; identical to SEQ ID NO: 242282
  Synthetic oligonucleotide

SEQ ID NO: 630966 - DNA, 59 bp, Artificial; identical to SEQ ID NO: 242281
  Synthetic oligonucleotide

SEQ ID NO: 630967 - DNA, 56 bp, Artificial; identical to SEQ ID NO: 194217
  Synthetic oligonucleotide

SEQ ID NO: 630968 - DNA, 55 bp, Artificial; identical to SEQ ID NO: 151475
  Synthetic oligonucleotide

SEQ ID NO: 630969 - DNA, 57 bp, Artificial; identical to SEQ ID NO: 210891
  Synthetic oligonucleotide

SEQ ID NO: 630970 - DNA, 53 bp, Artificial; identical to SEQ ID NO: 249652
  Synthetic oligonucleotide

SEQ ID NO: 630971 - DNA, 55 bp, Artificial; identical to SEQ ID NO: 144051
  Synthetic oligonucleotide

SEQ ID NO: 630972 - DNA, 51 bp, Artificial; identical to SEQ ID NO: 165261
  Synthetic oligonucleotide

SEQ ID NO: 630973 - DNA, 55 bp, Artificial; identical to SEQ ID NO: 240129
  Synthetic oligonucleotide

SEQ ID NO: 630974 - DNA, 56 bp, Artificial; identical to SEQ ID NO: 243472
  Synthetic oligonucleotide

SEQ ID NO: 630975 - DNA, 55 bp, Artificial; identical to SEQ ID NO: 153103
  Synthetic oligonucleotide

SEQ ID NO: 630976 - DNA, 55 bp, Artificial; identical to SEQ ID NO: 240522
  Synthetic oligonucleotide

SEQ ID NO: 630977 - DNA, 60 bp, Artificial; identical to SEQ ID NO: 242279
  Synthetic oligonucleotide

SEQ ID NO: 630978 - DNA, 55 bp, Artificial; identical to SEQ ID NO: 259520
  Synthetic oligonucleotide

SEQ ID NO: 630979 - DNA, 52 bp, Artificial; identical to SEQ ID NO: 222723
  Synthetic oligonucleotide

SEQ ID NO: 630980 - DNA, 58 bp, Artificial; identical to SEQ ID NO: 246143
  Synthetic oligonucleotide

SEQ ID NO: 630981 - DNA, 60 bp, Artificial; identical to SEQ ID NO: 150606
  Synthetic oligonucleotide

SEQ ID NO: 630982 - DNA, 50 bp, Artificial; identical to SEQ ID NO: 176955
  Synthetic oligonucleotide

SEQ ID NO: 630983 - DNA, 58 bp, Artificial; identical to SEQ ID NO: 194244
  Synthetic oligonucleotide

SEQ ID NO: 630984 - DNA, 58 bp, Artificial; identical to SEQ ID NO: 200671
  Synthetic oligonucleotide

SEQ ID NO: 630985 - DNA, 59 bp, Artificial; identical to SEQ ID NO: 179300
  Synthetic oligonucleotide

SEQ ID NO: 630986 - DNA, 49 bp, Artificial; identical to SEQ ID NO: 197851
  Synthetic oligonucleotide

SEQ ID NO: 630987 - DNA, 60 bp, Artificial; identical to SEQ ID NO: 206970
  Synthetic oligonucleotide

SEQ ID NO: 630988 - DNA, 55 bp, Artificial; identical to SEQ ID NO: 183039
  Synthetic oligonucleotide

SEQ ID NO: 630989 - DNA, 54 bp, Artificial; identical to SEQ ID NO: 262809
  Synthetic oligonucleotide

SEQ ID NO: 630990 - DNA, 54 bp, Artificial; identical to SEQ ID NO: 168870
  Synthetic oligonucleotide

SEQ ID NO: 630991 - DNA, 50 bp, Artificial; identical to SEQ ID NO: 194908
  Synthetic oligonucleotide

SEQ ID NO: 630992 - DNA, 53 bp, Artificial; identical to SEQ ID NO: 185618
  Synthetic oligonucleotide

SEQ ID NO: 630993 - DNA, 55 bp, Artificial; identical to SEQ ID NO: 219656
  Synthetic oligonucleotide

SEQ ID NO: 630994 - DNA, 53 bp, Artificial; identical to SEQ ID NO: 188820
  Synthetic oligonucleotide

SEQ ID NO: 630995 - DNA, 60 bp, Artificial; identical to SEQ ID NO: 208496
  Synthetic oligonucleotide

SEQ ID NO: 630996 - DNA, 56 bp, Artificial; identical to SEQ ID NO: 243473
  Synthetic oligonucleotide

SEQ ID NO: 630997 - DNA, 55 bp, Artificial; identical to SEQ ID NO: 155734
  Synthetic oligonucleotide

SEQ ID NO: 630998 - DNA, 59 bp, Artificial; identical to SEQ ID NO: 202651
  Synthetic oligonucleotide

SEQ ID NO: 630999 - DNA, 55 bp, Artificial; identical to SEQ ID NO: 152566
  Synthetic oligonucleotide

SEQ ID NO: 631000 - DNA, 55 bp, Artificial; identical to SEQ ID NO: 242274
  Synthetic oligonucleotide

SEQ ID NO: 631001 - DNA, 58 bp, Artificial; identical to SEQ ID NO: 239284
  Synthetic oligonucleotide

SEQ ID NO: 631002 - DNA, 59 bp, Artificial; identical to SEQ ID NO: 201095
  Synthetic oligonucleotide

SEQ ID NO: 631003 - DNA, 51 bp, Artificial; identical to SEQ ID NO: 149946
  Synthetic oligonucleotide

SEQ ID NO: 631004 - DNA, 60 bp, Artificial; identical to SEQ ID NO: 142595
  Synthetic oligonucleotide

SEQ ID NO: 631005 - DNA, 55 bp, Artificial; identical to SEQ ID NO: 254942
  Synthetic oligonucleotide

SEQ ID NO: 631006 - DNA, 55 bp, Artificial; identical to SEQ ID NO: 205284
  Synthetic oligonucleotide

SEQ ID NO: 631007 - DNA, 55 bp, Artificial; identical to SEQ ID NO: 188157
  Synthetic oligonucleotide

SEQ ID NO: 631008 - DNA, 55 bp, Artificial; identical to SEQ ID NO: 171248
  Synthetic oligonucleotide

SEQ ID NO: 631009 - DNA, 60 bp, Artificial; identical to SEQ ID NO: 256350
  Synthetic oligonucleotide

SEQ ID NO: 631010 - DNA, 58 bp, Artificial; identical to SEQ ID NO: 162225
  Synthetic oligonucleotide

SEQ ID NO: 631011 - DNA, 50 bp, Artificial; identical to SEQ ID NO: 241416
  Synthetic oligonucleotide

SEQ ID NO: 631012 - DNA, 55 bp, Artificial; identical to SEQ ID NO: 148917
  Synthetic oligonucleotide

SEQ ID NO: 631013 - DNA, 60 bp, Artificial; identical to SEQ ID NO: 242273
  Synthetic oligonucleotide

SEQ ID NO: 631014 - DNA, 55 bp, Artificial; identical to SEQ ID NO: 159990
  Synthetic oligonucleotide

SEQ ID NO: 631015 - DNA, 55 bp, Artificial; identical to SEQ ID NO: 245972
  Synthetic oligonucleotide

SEQ ID NO: 631016 - DNA, 58 bp, Artificial; identical to SEQ ID NO: 166008
  Synthetic oligonucleotide

SEQ ID NO: 631017 - DNA, 53 bp, Artificial; identical to SEQ ID NO: 150605
  Synthetic oligonucleotide

SEQ ID NO: 631018 - DNA, 55 bp, Artificial; identical to SEQ ID NO: 207607
  Synthetic oligonucleotide

SEQ ID NO: 631019 - DNA, 55 bp, Artificial; identical to SEQ ID NO: 188186
  Synthetic oligonucleotide

SEQ ID NO: 631020 - DNA, 53 bp, Artificial; identical to SEQ ID NO: 160460
  Synthetic oligonucleotide

SEQ ID NO: 631021 - DNA, 55 bp, Artificial; identical to SEQ ID NO: 197847
  Synthetic oligonucleotide

SEQ ID NO: 631022 - DNA, 55 bp, Artificial; identical to SEQ ID NO: 190206
  Synthetic oligonucleotide

SEQ ID NO: 631023 - DNA, 55 bp, Artificial; identical to SEQ ID NO: 183030
  Synthetic oligonucleotide

SEQ ID NO: 631024 - DNA, 60 bp, Artificial; identical to SEQ ID NO: 170398
  Synthetic oligonucleotide

SEQ ID NO: 631025 - DNA, 55 bp, Artificial; identical to SEQ ID NO: 245971
  Synthetic oligonucleotide

SEQ ID NO: 631026 - DNA, 55 bp, Artificial; identical to SEQ ID NO: 194845
  Synthetic oligonucleotide

SEQ ID NO: 631027 - DNA, 55 bp, Artificial; identical to SEQ ID NO: 239286
  Synthetic oligonucleotide

SEQ ID NO: 631028 - DNA, 55 bp, Artificial; identical to SEQ ID NO: 209456
  Synthetic oligonucleotide

SEQ ID NO: 631029 - DNA, 55 bp, Artificial; identical to SEQ ID NO: 159992
  Synthetic oligonucleotide

SEQ ID NO: 631030 - DNA, 60 bp, Artificial; identical to SEQ ID NO: 242272
  Synthetic oligonucleotide

SEQ ID NO: 631031 - DNA, 51 bp, Artificial; identical to SEQ ID NO: 233861
  Synthetic oligonucleotide

SEQ ID NO: 631032 - DNA, 53 bp, Artificial; identical to SEQ ID NO: 237021
  Synthetic oligonucleotide

SEQ ID NO: 631033 - DNA, 55 bp, Artificial; identical to SEQ ID NO: 197111
  Synthetic oligonucleotide

SEQ ID NO: 631034 - DNA, 50 bp, Artificial; identical to SEQ ID NO: 167211
  Synthetic oligonucleotide

SEQ ID NO: 631035 - DNA, 55 bp, Artificial; identical to SEQ ID NO: 183029
  Synthetic oligonucleotide

SEQ ID NO: 631036 - DNA, 52 bp, Artificial; identical to SEQ ID NO: 186278
  Synthetic oligonucleotide

SEQ ID NO: 631037 - DNA, 55 bp, Artificial; identical to SEQ ID NO: 266192
  Synthetic oligonucleotide

SEQ ID NO: 631038 - DNA, 56 bp, Artificial; identical to SEQ ID NO: 244025
  Synthetic oligonucleotide

SEQ ID NO: 631039 - DNA, 55 bp, Artificial; identical to SEQ ID NO: 199306
  Synthetic oligonucleotide

SEQ ID NO: 631040 - DNA, 55 bp, Artificial; identical to SEQ ID NO: 222909
  Synthetic oligonucleotide

SEQ ID NO: 631041 - DNA, 55 bp, Artificial; identical to SEQ ID NO: 166437
  Synthetic oligonucleotide

SEQ ID NO: 631042 - DNA, 57 bp, Artificial; identical to SEQ ID NO: 246154
  Synthetic oligonucleotide

SEQ ID NO: 631043 - DNA, 54 bp, Artificial; identical to SEQ ID NO: 148916
  Synthetic oligonucleotide

SEQ ID NO: 631044 - DNA, 55 bp, Artificial; identical to SEQ ID NO: 146572
  Synthetic oligonucleotide

SEQ ID NO: 631045 - DNA, 55 bp, Artificial; identical to SEQ ID NO: 217909
  Synthetic oligonucleotide

SEQ ID NO: 631046 - DNA, 56 bp, Artificial; identical to SEQ ID NO: 233362
  Synthetic oligonucleotide

SEQ ID NO: 631047 - DNA, 57 bp, Artificial; identical to SEQ ID NO: 242270
  Synthetic oligonucleotide

SEQ ID NO: 631048 - DNA, 57 bp, Artificial; identical to SEQ ID NO: 242269
  Synthetic oligonucleotide

SEQ ID NO: 631049 - DNA, 55 bp, Artificial; identical to SEQ ID NO: 220568
  Synthetic oligonucleotide

SEQ ID NO: 631050 - DNA, 59 bp, Artificial; identical to SEQ ID NO: 242268
  Synthetic oligonucleotide

SEQ ID NO: 631051 - DNA, 55 bp, Artificial; identical to SEQ ID NO: 159716
  Synthetic oligonucleotide

SEQ ID NO: 631052 - DNA, 60 bp, Artificial; identical to SEQ ID NO: 238159
  Synthetic oligonucleotide

SEQ ID NO: 631053 - DNA, 51 bp, Artificial; identical to SEQ ID NO: 160588
  Synthetic oligonucleotide

SEQ ID NO: 631054 - DNA, 60 bp, Artificial; identical to SEQ ID NO: 170409
  Synthetic oligonucleotide

SEQ ID NO: 631055 - DNA, 49 bp, Artificial; identical to SEQ ID NO: 177514
  Synthetic oligonucleotide

SEQ ID NO: 631056 - DNA, 55 bp, Artificial; identical to SEQ ID NO: 199313
  Synthetic oligonucleotide

SEQ ID NO: 631057 - DNA, 57 bp, Artificial; identical to SEQ ID NO: 194200
  Synthetic oligonucleotide

SEQ ID NO: 631058 - DNA, 55 bp, Artificial; identical to SEQ ID NO: 240478
  Synthetic oligonucleotide

SEQ ID NO: 631059 - DNA, 58 bp, Artificial; identical to SEQ ID NO: 142584
  Synthetic oligonucleotide

SEQ ID NO: 631060 - DNA, 52 bp, Artificial; identical to SEQ ID NO: 150603
  Synthetic oligonucleotide

SEQ ID NO: 631061 - DNA, 55 bp, Artificial; identical to SEQ ID NO: 182831
  Synthetic oligonucleotide

SEQ ID NO: 631062 - DNA, 60 bp, Artificial; identical to SEQ ID NO: 142573
  Synthetic oligonucleotide

SEQ ID NO: 631063 - DNA, 50 bp, Artificial; identical to SEQ ID NO: 202334
  Synthetic oligonucleotide

SEQ ID NO: 631064 - DNA, 55 bp, Artificial; identical to SEQ ID NO: 191110
  Synthetic oligonucleotide

SEQ ID NO: 631065 - DNA, 51 bp, Artificial; identical to SEQ ID NO: 241110
  Synthetic oligonucleotide

SEQ ID NO: 631066 - DNA, 55 bp, Artificial; identical to SEQ ID NO: 254940
  Synthetic oligonucleotide

SEQ ID NO: 631067 - DNA, 55 bp, Artificial; identical to SEQ ID NO: 187845
  Synthetic oligonucleotide

SEQ ID NO: 631068 - DNA, 54 bp, Artificial; identical to SEQ ID NO: 218304
  Synthetic oligonucleotide

SEQ ID NO: 631069 - DNA, 55 bp, Artificial; identical to SEQ ID NO: 182832
  Synthetic oligonucleotide

SEQ ID NO: 631070 - DNA, 56 bp, Artificial; identical to SEQ ID NO: 224409
  Synthetic oligonucleotide

SEQ ID NO: 631071 - DNA, 55 bp, Artificial; identical to SEQ ID NO: 221218
  Synthetic oligonucleotide

SEQ ID NO: 631072 - DNA, 55 bp, Artificial; identical to SEQ ID NO: 191686
  Synthetic oligonucleotide

SEQ ID NO: 631073 - DNA, 53 bp, Artificial; identical to SEQ ID NO: 185599
  Synthetic oligonucleotide

SEQ ID NO: 631074 - DNA, 54 bp, Artificial; identical to SEQ ID NO: 220570
  Synthetic oligonucleotide

SEQ ID NO: 631075 - DNA, 55 bp, Artificial; identical to SEQ ID NO: 182836
  Synthetic oligonucleotide

SEQ ID NO: 631076 - DNA, 53 bp, Artificial; identical to SEQ ID NO: 240705
  Synthetic oligonucleotide

SEQ ID NO: 631077 - DNA, 60 bp, Artificial; identical to SEQ ID NO: 242205
  Synthetic oligonucleotide

SEQ ID NO: 631078 - DNA, 56 bp, Artificial; identical to SEQ ID NO: 242204
  Synthetic oligonucleotide

SEQ ID NO: 631079 - DNA, 52 bp, Artificial; identical to SEQ ID NO: 195008
  Synthetic oligonucleotide

SEQ ID NO: 631080 - DNA, 56 bp, Artificial; identical to SEQ ID NO: 188656
  Synthetic oligonucleotide

SEQ ID NO: 631081 - DNA, 60 bp, Artificial; identical to SEQ ID NO: 256386
  Synthetic oligonucleotide

SEQ ID NO: 631082 - DNA, 54 bp, Artificial; identical to SEQ ID NO: 191152
  Synthetic oligonucleotide

SEQ ID NO: 631083 - DNA, 52 bp, Artificial; identical to SEQ ID NO: 243474
  Synthetic oligonucleotide

SEQ ID NO: 631084 - DNA, 59 bp, Artificial; identical to SEQ ID NO: 242203
  Synthetic oligonucleotide

SEQ ID NO: 631085 - DNA, 59 bp, Artificial; identical to SEQ ID NO: 153031
  Synthetic oligonucleotide

SEQ ID NO: 631086 - DNA, 55 bp, Artificial; identical to SEQ ID NO: 154356
  Synthetic oligonucleotide

SEQ ID NO: 631087 - DNA, 58 bp, Artificial; identical to SEQ ID NO: 239267
  Synthetic oligonucleotide

SEQ ID NO: 631088 - DNA, 55 bp, Artificial; identical to SEQ ID NO: 221219
  Synthetic oligonucleotide

SEQ ID NO: 631089 - DNA, 54 bp, Artificial; identical to SEQ ID NO: 206930
  Synthetic oligonucleotide

SEQ ID NO: 631090 - DNA, 54 bp, Artificial; identical to SEQ ID NO: 258059
  Synthetic oligonucleotide

SEQ ID NO: 631091 - DNA, 55 bp, Artificial; identical to SEQ ID NO: 199314
  Synthetic oligonucleotide

SEQ ID NO: 631092 - DNA, 55 bp, Artificial; identical to SEQ ID NO: 182839
  Synthetic oligonucleotide

SEQ ID NO: 631093 - DNA, 51 bp, Artificial; identical to SEQ ID NO: 223780
  Synthetic oligonucleotide

SEQ ID NO: 631094 - DNA, 55 bp, Artificial; identical to SEQ ID NO: 221220
  Synthetic oligonucleotide

SEQ ID NO: 631095 - DNA, 53 bp, Artificial; identical to SEQ ID NO: 199319
  Synthetic oligonucleotide

SEQ ID NO: 631096 - DNA, 55 bp, Artificial; identical to SEQ ID NO: 233711
  Synthetic oligonucleotide

SEQ ID NO: 631097 - DNA, 57 bp, Artificial; identical to SEQ ID NO: 217147
  Synthetic oligonucleotide

SEQ ID NO: 631098 - DNA, 55 bp, Artificial; identical to SEQ ID NO: 242703
  Synthetic oligonucleotide

SEQ ID NO: 631099 - DNA, 59 bp, Artificial; identical to SEQ ID NO: 166071
  Synthetic oligonucleotide

SEQ ID NO: 631100 - DNA, 55 bp, Artificial; identical to SEQ ID NO: 191107
  Synthetic oligonucleotide

SEQ ID NO: 631101 - DNA, 60 bp, Artificial; identical to SEQ ID NO: 152526
  Synthetic oligonucleotide

SEQ ID NO: 631102 - DNA, 60 bp, Artificial; identical to SEQ ID NO: 209528
  Synthetic oligonucleotide

SEQ ID NO: 631103 - DNA, 55 bp, Artificial; identical to SEQ ID NO: 245968
  Synthetic oligonucleotide

SEQ ID NO: 631104 - DNA, 55 bp, Artificial; identical to SEQ ID NO: 166446
  Synthetic oligonucleotide

SEQ ID NO: 631105 - DNA, 53 bp, Artificial; identical to SEQ ID NO: 188090
  Synthetic oligonucleotide

SEQ ID NO: 631106 - DNA, 59 bp, Artificial; identical to SEQ ID NO: 194145
  Synthetic oligonucleotide

SEQ ID NO: 631107 - DNA, 50 bp, Artificial; identical to SEQ ID NO: 200332
  Synthetic oligonucleotide

SEQ ID NO: 631108 - DNA, 55 bp, Artificial; identical to SEQ ID NO: 207606
  Synthetic oligonucleotide

SEQ ID NO: 631109 - DNA, 55 bp, Artificial; identical to SEQ ID NO: 148914
  Synthetic oligonucleotide

SEQ ID NO: 631110 - DNA, 55 bp, Artificial; identical to SEQ ID NO: 188944
  Synthetic oligonucleotide

SEQ ID NO: 631111 - DNA, 52 bp, Artificial; identical to SEQ ID NO: 166445
  Synthetic oligonucleotide

SEQ ID NO: 631112 - DNA, 53 bp, Artificial; identical to SEQ ID NO: 141566
  Synthetic oligonucleotide

SEQ ID NO: 631113 - DNA, 55 bp, Artificial; identical to SEQ ID NO: 194895
  Synthetic oligonucleotide

SEQ ID NO: 631114 - DNA, 57 bp, Artificial; identical to SEQ ID NO: 177509
  Synthetic oligonucleotide

SEQ ID NO: 631115 - DNA, 55 bp, Artificial; identical to SEQ ID NO: 192262
  Synthetic oligonucleotide

SEQ ID NO: 631116 - DNA, 50 bp, Artificial; identical to SEQ ID NO: 192215
  Synthetic oligonucleotide

SEQ ID NO: 631117 - DNA, 59 bp, Artificial; identical to SEQ ID NO: 179371
  Synthetic oligonucleotide

SEQ ID NO: 631118 - DNA, 55 bp, Artificial; identical to SEQ ID NO: 182851
  Synthetic oligonucleotide

SEQ ID NO: 631119 - DNA, 55 bp, Artificial; identical to SEQ ID NO: 259519
  Synthetic oligonucleotide

SEQ ID NO: 631120 - DNA, 55 bp, Artificial; identical to SEQ ID NO: 245966
  Synthetic oligonucleotide

SEQ ID NO: 631121 - DNA, 52 bp, Artificial; identical to SEQ ID NO: 205289
  Synthetic oligonucleotide

SEQ ID NO: 631122 - DNA, 54 bp, Artificial; identical to SEQ ID NO: 253717
  Synthetic oligonucleotide

SEQ ID NO: 631123 - DNA, 56 bp, Artificial; identical to SEQ ID NO: 200627
  Synthetic oligonucleotide

SEQ ID NO: 631124 - DNA, 51 bp, Artificial; identical to SEQ ID NO: 192133
  Synthetic oligonucleotide

SEQ ID NO: 631125 - DNA, 59 bp, Artificial; identical to SEQ ID NO: 143717
  Synthetic oligonucleotide

SEQ ID NO: 631126 - DNA, 55 bp, Artificial; identical to SEQ ID NO: 151437
  Synthetic oligonucleotide

SEQ ID NO: 631127 - DNA, 54 bp, Artificial; identical to SEQ ID NO: 242196
  Synthetic oligonucleotide

SEQ ID NO: 631128 - DNA, 51 bp, Artificial; identical to SEQ ID NO: 248015
  Synthetic oligonucleotide

SEQ ID NO: 631129 - DNA, 53 bp, Artificial; identical to SEQ ID NO: 242496
  Synthetic oligonucleotide

SEQ ID NO: 631130 - DNA, 55 bp, Artificial; identical to SEQ ID NO: 240483
  Synthetic oligonucleotide

SEQ ID NO: 631131 - DNA, 51 bp, Artificial; identical to SEQ ID NO: 152122
  Synthetic oligonucleotide

SEQ ID NO: 631132 - DNA, 55 bp, Artificial; identical to SEQ ID NO: 182846
  Synthetic oligonucleotide

SEQ ID NO: 631133 - DNA, 55 bp, Artificial; identical to SEQ ID NO: 182845
  Synthetic oligonucleotide

SEQ ID NO: 631134 - DNA, 58 bp, Artificial; identical to SEQ ID NO: 201483
  Synthetic oligonucleotide

SEQ ID NO: 631135 - DNA, 50 bp, Artificial; identical to SEQ ID NO: 241417
  Synthetic oligonucleotide

SEQ ID NO: 631136 - DNA, 55 bp, Artificial; identical to SEQ ID NO: 171253
  Synthetic oligonucleotide

SEQ ID NO: 631137 - DNA, 55 bp, Artificial; identical to SEQ ID NO: 169260
  Synthetic oligonucleotide

SEQ ID NO: 631138 - DNA, 55 bp, Artificial; identical to SEQ ID NO: 212617
  Synthetic oligonucleotide

SEQ ID NO: 631139 - DNA, 54 bp, Artificial; identical to SEQ ID NO: 224519
  Synthetic oligonucleotide

SEQ ID NO: 631140 - DNA, 56 bp, Artificial; identical to SEQ ID NO: 141652
  Synthetic oligonucleotide

SEQ ID NO: 631141 - DNA, 55 bp, Artificial; identical to SEQ ID NO: 188941
  Synthetic oligonucleotide

SEQ ID NO: 631142 - DNA, 58 bp, Artificial; identical to SEQ ID NO: 200616
  Synthetic oligonucleotide

SEQ ID NO: 631143 - DNA, 60 bp, Artificial; identical to SEQ ID NO: 142551
  Synthetic oligonucleotide

SEQ ID NO: 631144 - DNA, 54 bp, Artificial; identical to SEQ ID NO: 190252
  Synthetic oligonucleotide

SEQ ID NO: 631145 - DNA, 55 bp, Artificial; identical to SEQ ID NO: 146570
  Synthetic oligonucleotide

SEQ ID NO: 631146 - DNA, 59 bp, Artificial; identical to SEQ ID NO: 209517
  Synthetic oligonucleotide

SEQ ID NO: 631147 - DNA, 53 bp, Artificial; identical to SEQ ID NO: 240707
  Synthetic oligonucleotide

SEQ ID NO: 631148 - DNA, 59 bp, Artificial; identical to SEQ ID NO: 242192
  Synthetic oligonucleotide

SEQ ID NO: 631149 - DNA, 54 bp, Artificial; identical to SEQ ID NO: 197103
  Synthetic oligonucleotide

SEQ ID NO: 631150 - DNA, 51 bp, Artificial; identical to SEQ ID NO: 246616
  Synthetic oligonucleotide

SEQ ID NO: 631151 - DNA, 55 bp, Artificial; identical to SEQ ID NO: 233705
  Synthetic oligonucleotide

SEQ ID NO: 631152 - DNA, 55 bp, Artificial; identical to SEQ ID NO: 265750
  Synthetic oligonucleotide

SEQ ID NO: 631153 - DNA, 55 bp, Artificial; identical to SEQ ID NO: 252892
  Synthetic oligonucleotide

SEQ ID NO: 631154 - DNA, 51 bp, Artificial; identical to SEQ ID NO: 160571
  Synthetic oligonucleotide

SEQ ID NO: 631155 - DNA, 55 bp, Artificial; identical to SEQ ID NO: 210862
  Synthetic oligonucleotide

SEQ ID NO: 631156 - DNA, 55 bp, Artificial; identical to SEQ ID NO: 212373
  Synthetic oligonucleotide

SEQ ID NO: 631157 - DNA, 55 bp, Artificial; identical to SEQ ID NO: 252893
  Synthetic oligonucleotide

SEQ ID NO: 631158 - DNA, 51 bp, Artificial; identical to SEQ ID NO: 186850
  Synthetic oligonucleotide

SEQ ID NO: 631159 - DNA, 55 bp, Artificial; identical to SEQ ID NO: 210859
  Synthetic oligonucleotide

SEQ ID NO: 631160 - DNA, 57 bp, Artificial; identical to SEQ ID NO: 248010
  Synthetic oligonucleotide

SEQ ID NO: 631161 - DNA, 58 bp, Artificial; identical to SEQ ID NO: 203285
  Synthetic oligonucleotide

SEQ ID NO: 631162 - DNA, 55 bp, Artificial; identical to SEQ ID NO: 174565
  Synthetic oligonucleotide

SEQ ID NO: 631163 - DNA, 60 bp, Artificial; identical to SEQ ID NO: 170432
  Synthetic oligonucleotide

SEQ ID NO: 631164 - DNA, 60 bp, Artificial; identical to SEQ ID NO: 200605
  Synthetic oligonucleotide

SEQ ID NO: 631165 - DNA, 59 bp, Artificial; identical to SEQ ID NO: 159320
  Synthetic oligonucleotide

SEQ ID NO: 631166 - DNA, 59 bp, Artificial; identical to SEQ ID NO: 151301
  Synthetic oligonucleotide

SEQ ID NO: 631167 - DNA, 51 bp, Artificial; identical to SEQ ID NO: 141365
  Synthetic oligonucleotide

SEQ ID NO: 631168 - DNA, 57 bp, Artificial; identical to SEQ ID NO: 171023
  Synthetic oligonucleotide

SEQ ID NO: 631169 - DNA, 55 bp, Artificial; identical to SEQ ID NO: 182803
  Synthetic oligonucleotide

SEQ ID NO: 631170 - DNA, 55 bp, Artificial; identical to SEQ ID NO: 182804
  Synthetic oligonucleotide

SEQ ID NO: 631171 - DNA, 54 bp, Artificial; identical to SEQ ID NO: 148912
  Synthetic oligonucleotide

SEQ ID NO: 631172 - DNA, 52 bp, Artificial; identical to SEQ ID NO: 255576
  Synthetic oligonucleotide

SEQ ID NO: 631173 - DNA, 51 bp, Artificial; identical to SEQ ID NO: 157863
  Synthetic oligonucleotide

SEQ ID NO: 631174 - DNA, 55 bp, Artificial; identical to SEQ ID NO: 159996
  Synthetic oligonucleotide

SEQ ID NO: 631175 - DNA, 51 bp, Artificial; identical to SEQ ID NO: 200143
  Synthetic oligonucleotide

SEQ ID NO: 631176 - DNA, 55 bp, Artificial; identical to SEQ ID NO: 166442
  Synthetic oligonucleotide

SEQ ID NO: 631177 - DNA, 55 bp, Artificial; identical to SEQ ID NO: 159588
  Synthetic oligonucleotide

SEQ ID NO: 631178 - DNA, 57 bp, Artificial; identical to SEQ ID NO: 244004
  Synthetic oligonucleotide

SEQ ID NO: 631179 - DNA, 55 bp, Artificial; identical to SEQ ID NO: 245960
  Synthetic oligonucleotide

SEQ ID NO: 631180 - DNA, 50 bp, Artificial; identical to SEQ ID NO: 218918
  Synthetic oligonucleotide

SEQ ID NO: 631181 - DNA, 55 bp, Artificial; identical to SEQ ID NO: 209452
  Synthetic oligonucleotide

SEQ ID NO: 631182 - DNA, 56 bp, Artificial; identical to SEQ ID NO: 239482
  Synthetic oligonucleotide

SEQ ID NO: 631183 - DNA, 50 bp, Artificial; identical to SEQ ID NO: 209786
  Synthetic oligonucleotide

SEQ ID NO: 631184 - DNA, 55 bp, Artificial; identical to SEQ ID NO: 182808
  Synthetic oligonucleotide

SEQ ID NO: 631185 - DNA, 60 bp, Artificial; identical to SEQ ID NO: 197126
  Synthetic oligonucleotide

SEQ ID NO: 631186 - DNA, 55 bp, Artificial; identical to SEQ ID NO: 245958
  Synthetic oligonucleotide

SEQ ID NO: 631187 - DNA, 55 bp, Artificial; identical to SEQ ID NO: 242704
  Synthetic oligonucleotide

SEQ ID NO: 631188 - DNA, 51 bp, Artificial; identical to SEQ ID NO: 153685
  Synthetic oligonucleotide

SEQ ID NO: 631189 - DNA, 55 bp, Artificial; identical to SEQ ID NO: 221226
  Synthetic oligonucleotide

SEQ ID NO: 631190 - DNA, 55 bp, Artificial; identical to SEQ ID NO: 171254
  Synthetic oligonucleotide

SEQ ID NO: 631191 - DNA, 55 bp, Artificial; identical to SEQ ID NO: 224524
  Synthetic oligonucleotide

SEQ ID NO: 631192 - DNA, 55 bp, Artificial; identical to SEQ ID NO: 217915
  Synthetic oligonucleotide

SEQ ID NO: 631193 - DNA, 55 bp, Artificial; identical to SEQ ID NO: 208246
  Synthetic oligonucleotide

SEQ ID NO: 631194 - DNA, 52 bp, Artificial; identical to SEQ ID NO: 150595
  Synthetic oligonucleotide

SEQ ID NO: 631195 - DNA, 55 bp, Artificial; identical to SEQ ID NO: 205291
  Synthetic oligonucleotide

SEQ ID NO: 631196 - DNA, 55 bp, Artificial; identical to SEQ ID NO: 233704
  Synthetic oligonucleotide

SEQ ID NO: 631197 - DNA, 55 bp, Artificial; identical to SEQ ID NO: 261953
  Synthetic oligonucleotide

SEQ ID NO: 631198 - DNA, 60 bp, Artificial; identical to SEQ ID NO: 217170
  Synthetic oligonucleotide

SEQ ID NO: 631199 - DNA, 59 bp, Artificial; identical to SEQ ID NO: 257487
  Synthetic oligonucleotide

SEQ ID NO: 631200 - DNA, 53 bp, Artificial; identical to SEQ ID NO: 190768
  Synthetic oligonucleotide

SEQ ID NO: 631201 - DNA, 55 bp, Artificial; identical to SEQ ID NO: 233355
  Synthetic oligonucleotide

SEQ ID NO: 631202 - DNA, 55 bp, Artificial; identical to SEQ ID NO: 199277
  Synthetic oligonucleotide

SEQ ID NO: 631203 - DNA, 54 bp, Artificial; identical to SEQ ID NO: 191961
  Synthetic oligonucleotide

SEQ ID NO: 631204 - DNA, 54 bp, Artificial; identical to SEQ ID NO: 194938
  Synthetic oligonucleotide

SEQ ID NO: 631205 - DNA, 54 bp, Artificial; identical to SEQ ID NO: 242705
  Synthetic oligonucleotide

SEQ ID NO: 631206 - DNA, 55 bp, Artificial; identical to SEQ ID NO: 240489
  Synthetic oligonucleotide

SEQ ID NO: 631207 - DNA, 56 bp, Artificial; identical to SEQ ID NO: 166074
  Synthetic oligonucleotide

SEQ ID NO: 631208 - DNA, 59 bp, Artificial; identical to SEQ ID NO: 242191
  Synthetic oligonucleotide

SEQ ID NO: 631209 - DNA, 55 bp, Artificial; identical to SEQ ID NO: 174824
  Synthetic oligonucleotide

SEQ ID NO: 631210 - DNA, 55 bp, Artificial; identical to SEQ ID NO: 234326
  Synthetic oligonucleotide

SEQ ID NO: 631211 - DNA, 55 bp, Artificial; identical to SEQ ID NO: 173678
  Synthetic oligonucleotide

SEQ ID NO: 631212 - DNA, 50 bp, Artificial; identical to SEQ ID NO: 150036
  Synthetic oligonucleotide

SEQ ID NO: 631213 - DNA, 56 bp, Artificial; identical to SEQ ID NO: 171717
  Synthetic oligonucleotide

SEQ ID NO: 631214 - DNA, 60 bp, Artificial; identical to SEQ ID NO: 151888
  Synthetic oligonucleotide

SEQ ID NO: 631215 - DNA, 55 bp, Artificial; identical to SEQ ID NO: 243478
  Synthetic oligonucleotide

SEQ ID NO: 631216 - DNA, 59 bp, Artificial; identical to SEQ ID NO: 243479
  Synthetic oligonucleotide

SEQ ID NO: 631217 - DNA, 54 bp, Artificial; identical to SEQ ID NO: 245665
  Synthetic oligonucleotide

SEQ ID NO: 631218 - DNA, 55 bp, Artificial; identical to SEQ ID NO: 142346
  Synthetic oligonucleotide

SEQ ID NO: 631219 - DNA, 55 bp, Artificial; identical to SEQ ID NO: 146569
  Synthetic oligonucleotide

SEQ ID NO: 631220 - DNA, 58 bp, Artificial; identical to SEQ ID NO: 161944
  Synthetic oligonucleotide

SEQ ID NO: 631221 - DNA, 53 bp, Artificial; identical to SEQ ID NO: 166072
  Synthetic oligonucleotide

SEQ ID NO: 631222 - DNA, 60 bp, Artificial; identical to SEQ ID NO: 151910
  Synthetic oligonucleotide

SEQ ID NO: 631223 - DNA, 56 bp, Artificial; identical to SEQ ID NO: 170443
  Synthetic oligonucleotide

SEQ ID NO: 631224 - DNA, 51 bp, Artificial; identical to SEQ ID NO: 246613
  Synthetic oligonucleotide

SEQ ID NO: 631225 - DNA, 60 bp, Artificial; identical to SEQ ID NO: 219696
  Synthetic oligonucleotide

SEQ ID NO: 631226 - DNA, 57 bp, Artificial; identical to SEQ ID NO: 201027
  Synthetic oligonucleotide

SEQ ID NO: 631227 - DNA, 55 bp, Artificial; identical to SEQ ID NO: 194898
  Synthetic oligonucleotide

SEQ ID NO: 631228 - DNA, 54 bp, Artificial; identical to SEQ ID NO: 243048
  Synthetic oligonucleotide

SEQ ID NO: 631229 - DNA, 53 bp, Artificial; identical to SEQ ID NO: 239479
  Synthetic oligonucleotide

SEQ ID NO: 631230 - DNA, 52 bp, Artificial; identical to SEQ ID NO: 149641
  Synthetic oligonucleotide

SEQ ID NO: 631231 - DNA, 55 bp, Artificial; identical to SEQ ID NO: 191104
  Synthetic oligonucleotide

SEQ ID NO: 631232 - DNA, 55 bp, Artificial; identical to SEQ ID NO: 182820
  Synthetic oligonucleotide

SEQ ID NO: 631233 - DNA, 50 bp, Artificial; identical to SEQ ID NO: 160688
  Synthetic oligonucleotide

SEQ ID NO: 631234 - DNA, 55 bp, Artificial; identical to SEQ ID NO: 245953
  Synthetic oligonucleotide

SEQ ID NO: 631235 - DNA, 57 bp, Artificial; identical to SEQ ID NO: 150592
  Synthetic oligonucleotide

SEQ ID NO: 631236 - DNA, 57 bp, Artificial; identical to SEQ ID NO: 242190
  Synthetic oligonucleotide

SEQ ID NO: 631237 - DNA, 55 bp, Artificial; identical to SEQ ID NO: 159590
  Synthetic oligonucleotide

SEQ ID NO: 631238 - DNA, 55 bp, Artificial; identical to SEQ ID NO: 242706
  Synthetic oligonucleotide

SEQ ID NO: 631239 - DNA, 55 bp, Artificial; identical to SEQ ID NO: 254931
  Synthetic oligonucleotide

SEQ ID NO: 631240 - DNA, 60 bp, Artificial; identical to SEQ ID NO: 266389
  Synthetic oligonucleotide

SEQ ID NO: 631241 - DNA, 60 bp, Artificial; identical to SEQ ID NO: 154370
  Synthetic oligonucleotide

SEQ ID NO: 631242 - DNA, 60 bp, Artificial; identical to SEQ ID NO: 160872
  Synthetic oligonucleotide

SEQ ID NO: 631243 - DNA, 56 bp, Artificial; identical to SEQ ID NO: 159987
  Synthetic oligonucleotide

SEQ ID NO: 631244 - DNA, 58 bp, Artificial; identical to SEQ ID NO: 147169
  Synthetic oligonucleotide

SEQ ID NO: 631245 - DNA, 55 bp, Artificial; identical to SEQ ID NO: 199285
  Synthetic oligonucleotide

SEQ ID NO: 631246 - DNA, 55 bp, Artificial; identical to SEQ ID NO: 207602
  Synthetic oligonucleotide

SEQ ID NO: 631247 - DNA, 55 bp, Artificial; identical to SEQ ID NO: 217917
  Synthetic oligonucleotide

SEQ ID NO: 631248 - DNA, 60 bp, Artificial; identical to SEQ ID NO: 203284
  Synthetic oligonucleotide

SEQ ID NO: 631249 - DNA, 55 bp, Artificial; identical to SEQ ID NO: 245952
  Synthetic oligonucleotide

SEQ ID NO: 631250 - DNA, 51 bp, Artificial; identical to SEQ ID NO: 193874
  Synthetic oligonucleotide

SEQ ID NO: 631251 - DNA, 52 bp, Artificial; identical to SEQ ID NO: 190586
  Synthetic oligonucleotide

SEQ ID NO: 631252 - DNA, 55 bp, Artificial; identical to SEQ ID NO: 199294
  Synthetic oligonucleotide

SEQ ID NO: 631253 - DNA, 55 bp, Artificial; identical to SEQ ID NO: 233703
  Synthetic oligonucleotide

SEQ ID NO: 631254 - DNA, 53 bp, Artificial; identical to SEQ ID NO: 185640
  Synthetic oligonucleotide

SEQ ID NO: 631255 - DNA, 50 bp, Artificial; identical to SEQ ID NO: 192216
  Synthetic oligonucleotide

SEQ ID NO: 631256 - DNA, 55 bp, Artificial; identical to SEQ ID NO: 210907
  Synthetic oligonucleotide

SEQ ID NO: 631257 - DNA, 50 bp, Artificial; identical to SEQ ID NO: 248174
  Synthetic oligonucleotide

SEQ ID NO: 631258 - DNA, 54 bp, Artificial; identical to SEQ ID NO: 242188
  Synthetic oligonucleotide

SEQ ID NO: 631259 - DNA, 55 bp, Artificial; identical to SEQ ID NO: 203103
  Synthetic oligonucleotide

SEQ ID NO: 631260 - DNA, 54 bp, Artificial; identical to SEQ ID NO: 211489
  Synthetic oligonucleotide

SEQ ID NO: 631261 - DNA, 57 bp, Artificial; identical to SEQ ID NO: 242187
  Synthetic oligonucleotide

SEQ ID NO: 631262 - DNA, 55 bp, Artificial; identical to SEQ ID NO: 144675
  Synthetic oligonucleotide

SEQ ID NO: 631263 - DNA, 50 bp, Artificial; identical to SEQ ID NO: 200312
  Synthetic oligonucleotide

SEQ ID NO: 631264 - DNA, 55 bp, Artificial; identical to SEQ ID NO: 249655
  Synthetic oligonucleotide

SEQ ID NO: 631265 - DNA, 55 bp, Artificial; identical to SEQ ID NO: 194880
  Synthetic oligonucleotide

SEQ ID NO: 631266 - DNA, 52 bp, Artificial; identical to SEQ ID NO: 247984
  Synthetic oligonucleotide

SEQ ID NO: 631267 - DNA, 60 bp, Artificial; identical to SEQ ID NO: 144854
  Synthetic oligonucleotide

SEQ ID NO: 631268 - DNA, 54 bp, Artificial; identical to SEQ ID NO: 192257
  Synthetic oligonucleotide

SEQ ID NO: 631269 - DNA, 60 bp, Artificial; identical to SEQ ID NO: 202662
  Synthetic oligonucleotide

SEQ ID NO: 631270 - DNA, 55 bp, Artificial; identical to SEQ ID NO: 256885
  Synthetic oligonucleotide

SEQ ID NO: 631271 - DNA, 56 bp, Artificial; identical to SEQ ID NO: 160966
  Synthetic oligonucleotide

SEQ ID NO: 631272 - DNA, 52 bp, Artificial; identical to SEQ ID NO: 243480
  Synthetic oligonucleotide

SEQ ID NO: 631273 - DNA, 55 bp, Artificial; identical to SEQ ID NO: 199366
  Synthetic oligonucleotide

SEQ ID NO: 631274 - DNA, 55 bp, Artificial; identical to SEQ ID NO: 256884
  Synthetic oligonucleotide

SEQ ID NO: 631275 - DNA, 57 bp, Artificial; identical to SEQ ID NO: 177501
  Synthetic oligonucleotide

SEQ ID NO: 631276 - DNA, 55 bp, Artificial; identical to SEQ ID NO: 182811
  Synthetic oligonucleotide

SEQ ID NO: 631277 - DNA, 55 bp, Artificial; identical to SEQ ID NO: 207601
  Synthetic oligonucleotide

SEQ ID NO: 631278 - DNA, 55 bp, Artificial; identical to SEQ ID NO: 207600
  Synthetic oligonucleotide

SEQ ID NO: 631279 - DNA, 55 bp, Artificial; identical to SEQ ID NO: 188182
  Synthetic oligonucleotide

SEQ ID NO: 631280 - DNA, 60 bp, Artificial; identical to SEQ ID NO: 177500
  Synthetic oligonucleotide

SEQ ID NO: 631281 - DNA, 55 bp, Artificial; identical to SEQ ID NO: 203102
  Synthetic oligonucleotide

SEQ ID NO: 631282 - DNA, 55 bp, Artificial; identical to SEQ ID NO: 218174
  Synthetic oligonucleotide

SEQ ID NO: 631283 - DNA, 55 bp, Artificial; identical to SEQ ID NO: 148902
  Synthetic oligonucleotide

SEQ ID NO: 631284 - DNA, 54 bp, Artificial; identical to SEQ ID NO: 207716
  Synthetic oligonucleotide

SEQ ID NO: 631285 - DNA, 55 bp, Artificial; identical to SEQ ID NO: 160044
  Synthetic oligonucleotide

SEQ ID NO: 631286 - DNA, 55 bp, Artificial; identical to SEQ ID NO: 199369
  Synthetic oligonucleotide

SEQ ID NO: 631287 - DNA, 55 bp, Artificial; identical to SEQ ID NO: 202331
  Synthetic oligonucleotide

SEQ ID NO: 631288 - DNA, 54 bp, Artificial; identical to SEQ ID NO: 216545
  Synthetic oligonucleotide

SEQ ID NO: 631289 - DNA, 56 bp, Artificial; identical to SEQ ID NO: 166489
  Synthetic oligonucleotide

SEQ ID NO: 631290 - DNA, 55 bp, Artificial; identical to SEQ ID NO: 242707
  Synthetic oligonucleotide

SEQ ID NO: 631291 - DNA, 55 bp, Artificial; identical to SEQ ID NO: 199372
  Synthetic oligonucleotide

SEQ ID NO: 631292 - DNA, 55 bp, Artificial; identical to SEQ ID NO: 166436
  Synthetic oligonucleotide

SEQ ID NO: 631293 - DNA, 55 bp, Artificial; identical to SEQ ID NO: 245999
  Synthetic oligonucleotide

SEQ ID NO: 631294 - DNA, 55 bp, Artificial; identical to SEQ ID NO: 148901
  Synthetic oligonucleotide

SEQ ID NO: 631295 - DNA, 59 bp, Artificial; identical to SEQ ID NO: 242184
  Synthetic oligonucleotide

SEQ ID NO: 631296 - DNA, 59 bp, Artificial; identical to SEQ ID NO: 152523
  Synthetic oligonucleotide

SEQ ID NO: 631297 - DNA, 51 bp, Artificial; identical to SEQ ID NO: 241107
  Synthetic oligonucleotide

SEQ ID NO: 631298 - DNA, 55 bp, Artificial; identical to SEQ ID NO: 220571
  Synthetic oligonucleotide

SEQ ID NO: 631299 - DNA, 55 bp, Artificial; identical to SEQ ID NO: 150545
  Synthetic oligonucleotide

SEQ ID NO: 631300 - DNA, 55 bp, Artificial; identical to SEQ ID NO: 224515
  Synthetic oligonucleotide

SEQ ID NO: 631301 - DNA, 55 bp, Artificial; identical to SEQ ID NO: 248765
  Synthetic oligonucleotide

SEQ ID NO: 631302 - DNA, 54 bp, Artificial; identical to SEQ ID NO: 224436
  Synthetic oligonucleotide

SEQ ID NO: 631303 - DNA, 55 bp, Artificial; identical to SEQ ID NO: 199374
  Synthetic oligonucleotide

SEQ ID NO: 631304 - DNA, 60 bp, Artificial; identical to SEQ ID NO: 206937
  Synthetic oligonucleotide

SEQ ID NO: 631305 - DNA, 55 bp, Artificial; identical to SEQ ID NO: 240491
  Synthetic oligonucleotide

SEQ ID NO: 631306 - DNA, 55 bp, Artificial; identical to SEQ ID NO: 256883
  Synthetic oligonucleotide

SEQ ID NO: 631307 - DNA, 55 bp, Artificial; identical to SEQ ID NO: 188939
  Synthetic oligonucleotide

SEQ ID NO: 631308 - DNA, 55 bp, Artificial; identical to SEQ ID NO: 216377
  Synthetic oligonucleotide

SEQ ID NO: 631309 - DNA, 53 bp, Artificial; identical to SEQ ID NO: 203906
  Synthetic oligonucleotide

SEQ ID NO: 631310 - DNA, 55 bp, Artificial; identical to SEQ ID NO: 256882
  Synthetic oligonucleotide

SEQ ID NO: 631311 - DNA, 57 bp, Artificial; identical to SEQ ID NO: 257620
  Synthetic oligonucleotide

SEQ ID NO: 631312 - DNA, 59 bp, Artificial; identical to SEQ ID NO: 242183
  Synthetic oligonucleotide

SEQ ID NO: 631313 - DNA, 53 bp, Artificial; identical to SEQ ID NO: 202465
  Synthetic oligonucleotide

SEQ ID NO: 631314 - DNA, 55 bp, Artificial; identical to SEQ ID NO: 245995
  Synthetic oligonucleotide

SEQ ID NO: 631315 - DNA, 51 bp, Artificial; identical to SEQ ID NO: 241103
  Synthetic oligonucleotide

SEQ ID NO: 631316 - DNA, 55 bp, Artificial; identical to SEQ ID NO: 207598
  Synthetic oligonucleotide

SEQ ID NO: 631317 - DNA, 55 bp, Artificial; identical to SEQ ID NO: 207597
  Synthetic oligonucleotide

SEQ ID NO: 631318 - DNA, 55 bp, Artificial; identical to SEQ ID NO: 159592
  Synthetic oligonucleotide

SEQ ID NO: 631319 - DNA, 55 bp, Artificial; identical to SEQ ID NO: 166435
  Synthetic oligonucleotide

SEQ ID NO: 631320 - DNA, 52 bp, Artificial; identical to SEQ ID NO: 208798
  Synthetic oligonucleotide

SEQ ID NO: 631321 - DNA, 55 bp, Artificial; identical to SEQ ID NO: 233702
  Synthetic oligonucleotide

SEQ ID NO: 631322 - DNA, 55 bp, Artificial; identical to SEQ ID NO: 257109
  Synthetic oligonucleotide

SEQ ID NO: 631323 - DNA, 52 bp, Artificial; identical to SEQ ID NO: 240942
  Synthetic oligonucleotide

SEQ ID NO: 631324 - DNA, 56 bp, Artificial; identical to SEQ ID NO: 242181
  Synthetic oligonucleotide

SEQ ID NO: 631325 - DNA, 55 bp, Artificial; identical to SEQ ID NO: 191102
  Synthetic oligonucleotide

SEQ ID NO: 631326 - DNA, 53 bp, Artificial; identical to SEQ ID NO: 240718
  Synthetic oligonucleotide

SEQ ID NO: 631327 - DNA, 55 bp, Artificial; identical to SEQ ID NO: 160892
  Synthetic oligonucleotide

SEQ ID NO: 631328 - DNA, 55 bp, Artificial; identical to SEQ ID NO: 199380
  Synthetic oligonucleotide

SEQ ID NO: 631329 - DNA, 51 bp, Artificial; identical to SEQ ID NO: 200140
  Synthetic oligonucleotide

SEQ ID NO: 631330 - DNA, 51 bp, Artificial; identical to SEQ ID NO: 170216
  Synthetic oligonucleotide

SEQ ID NO: 631331 - DNA, 57 bp, Artificial; identical to SEQ ID NO: 166367
  Synthetic oligonucleotide

SEQ ID NO: 631332 - DNA, 55 bp, Artificial; identical to SEQ ID NO: 168297
  Synthetic oligonucleotide

SEQ ID NO: 631333 - DNA, 55 bp, Artificial; identical to SEQ ID NO: 148898
  Synthetic oligonucleotide

SEQ ID NO: 631334 - DNA, 55 bp, Artificial; identical to SEQ ID NO: 218163
  Synthetic oligonucleotide

SEQ ID NO: 631335 - DNA, 55 bp, Artificial; identical to SEQ ID NO: 256881
  Synthetic oligonucleotide

SEQ ID NO: 631336 - DNA, 56 bp, Artificial; identical to SEQ ID NO: 242543
  Synthetic oligonucleotide

SEQ ID NO: 631337 - DNA, 55 bp, Artificial; identical to SEQ ID NO: 256880
  Synthetic oligonucleotide

SEQ ID NO: 631338 - DNA, 55 bp, Artificial; identical to SEQ ID NO: 225519
  Synthetic oligonucleotide

SEQ ID NO: 631339 - DNA, 55 bp, Artificial; identical to SEQ ID NO: 199384
  Synthetic oligonucleotide

SEQ ID NO: 631340 - DNA, 55 bp, Artificial; identical to SEQ ID NO: 187217
  Synthetic oligonucleotide

SEQ ID NO: 631341 - DNA, 55 bp, Artificial; identical to SEQ ID NO: 194884
  Synthetic oligonucleotide

SEQ ID NO: 631342 - DNA, 60 bp, Artificial; identical to SEQ ID NO: 242180
  Synthetic oligonucleotide

SEQ ID NO: 631343 - DNA, 50 bp, Artificial; identical to SEQ ID NO: 208883
  Synthetic oligonucleotide

SEQ ID NO: 631344 - DNA, 54 bp, Artificial; identical to SEQ ID NO: 233772
  Synthetic oligonucleotide

SEQ ID NO: 631345 - DNA, 59 bp, Artificial; identical to SEQ ID NO: 242179
  Synthetic oligonucleotide

SEQ ID NO: 631346 - DNA, 55 bp, Artificial; identical to SEQ ID NO: 215239
  Synthetic oligonucleotide

SEQ ID NO: 631347 - DNA, 55 bp, Artificial; identical to SEQ ID NO: 145184
  Synthetic oligonucleotide

SEQ ID NO: 631348 - DNA, 56 bp, Artificial; identical to SEQ ID NO: 187388
  Synthetic oligonucleotide

SEQ ID NO: 631349 - DNA, 52 bp, Artificial; identical to SEQ ID NO: 233706
  Synthetic oligonucleotide

SEQ ID NO: 631350 - DNA, 55 bp, Artificial; identical to SEQ ID NO: 221265
  Synthetic oligonucleotide

SEQ ID NO: 631351 - DNA, 54 bp, Artificial; identical to SEQ ID NO: 242235
  Synthetic oligonucleotide

SEQ ID NO: 631352 - DNA, 53 bp, Artificial; identical to SEQ ID NO: 199812
  Synthetic oligonucleotide

SEQ ID NO: 631353 - DNA, 55 bp, Artificial; identical to SEQ ID NO: 220687
  Synthetic oligonucleotide

SEQ ID NO: 631354 - DNA, 55 bp, Artificial; identical to SEQ ID NO: 151440
  Synthetic oligonucleotide

SEQ ID NO: 631355 - DNA, 55 bp, Artificial; identical to SEQ ID NO: 200993
  Synthetic oligonucleotide

SEQ ID NO: 631356 - DNA, 55 bp, Artificial; identical to SEQ ID NO: 148839
  Synthetic oligonucleotide

SEQ ID NO: 631357 - DNA, 55 bp, Artificial; identical to SEQ ID NO: 146567
  Synthetic oligonucleotide

SEQ ID NO: 631358 - DNA, 51 bp, Artificial; identical to SEQ ID NO: 157867
  Synthetic oligonucleotide

SEQ ID NO: 631359 - DNA, 59 bp, Artificial; identical to SEQ ID NO: 209506
  Synthetic oligonucleotide

SEQ ID NO: 631360 - DNA, 55 bp, Artificial; identical to SEQ ID NO: 159593
  Synthetic oligonucleotide

SEQ ID NO: 631361 - DNA, 50 bp, Artificial; identical to SEQ ID NO: 216891
  Synthetic oligonucleotide

SEQ ID NO: 631362 - DNA, 55 bp, Artificial; identical to SEQ ID NO: 239477
  Synthetic oligonucleotide

SEQ ID NO: 631363 - DNA, 55 bp, Artificial; identical to SEQ ID NO: 191109
  Synthetic oligonucleotide

SEQ ID NO: 631364 - DNA, 55 bp, Artificial; identical to SEQ ID NO: 166428
  Synthetic oligonucleotide

SEQ ID NO: 631365 - DNA, 55 bp, Artificial; identical to SEQ ID NO: 191960
  Synthetic oligonucleotide

SEQ ID NO: 631366 - DNA, 60 bp, Artificial; identical to SEQ ID NO: 242233
  Synthetic oligonucleotide

SEQ ID NO: 631367 - DNA, 55 bp, Artificial; identical to SEQ ID NO: 245991
  Synthetic oligonucleotide

SEQ ID NO: 631368 - DNA, 55 bp, Artificial; identical to SEQ ID NO: 182909
  Synthetic oligonucleotide

SEQ ID NO: 631369 - DNA, 51 bp, Artificial; identical to SEQ ID NO: 165328
  Synthetic oligonucleotide

SEQ ID NO: 631370 - DNA, 50 bp, Artificial; identical to SEQ ID NO: 165593
  Synthetic oligonucleotide

SEQ ID NO: 631371 - DNA, 55 bp, Artificial; identical to SEQ ID NO: 148838
  Synthetic oligonucleotide

SEQ ID NO: 631372 - DNA, 60 bp, Artificial; identical to SEQ ID NO: 209495
  Synthetic oligonucleotide

SEQ ID NO: 631373 - DNA, 55 bp, Artificial; identical to SEQ ID NO: 188938
  Synthetic oligonucleotide

SEQ ID NO: 631374 - DNA, 54 bp, Artificial; identical to SEQ ID NO: 166427
  Synthetic oligonucleotide

SEQ ID NO: 631375 - DNA, 53 bp, Artificial; identical to SEQ ID NO: 185453
  Synthetic oligonucleotide

SEQ ID NO: 631376 - DNA, 51 bp, Artificial; identical to SEQ ID NO: 170212
  Synthetic oligonucleotide

SEQ ID NO: 631377 - DNA, 55 bp, Artificial; identical to SEQ ID NO: 151441
  Synthetic oligonucleotide

SEQ ID NO: 631378 - DNA, 55 bp, Artificial; identical to SEQ ID NO: 188158
  Synthetic oligonucleotide

SEQ ID NO: 631379 - DNA, 59 bp, Artificial; identical to SEQ ID NO: 206997
  Synthetic oligonucleotide

SEQ ID NO: 631380 - DNA, 51 bp, Artificial; identical to SEQ ID NO: 154030
  Synthetic oligonucleotide

SEQ ID NO: 631381 - DNA, 55 bp, Artificial; identical to SEQ ID NO: 153100
  Synthetic oligonucleotide

SEQ ID NO: 631382 - DNA, 58 bp, Artificial; identical to SEQ ID NO: 159276
  Synthetic oligonucleotide

SEQ ID NO: 631383 - DNA, 55 bp, Artificial; identical to SEQ ID NO: 209448
  Synthetic oligonucleotide

SEQ ID NO: 631384 - DNA, 51 bp, Artificial; identical to SEQ ID NO: 219492
  Synthetic oligonucleotide

SEQ ID NO: 631385 - DNA, 59 bp, Artificial; identical to SEQ ID NO: 177668
  Synthetic oligonucleotide

SEQ ID NO: 631386 - DNA, 60 bp, Artificial; identical to SEQ ID NO: 150542
  Synthetic oligonucleotide

SEQ ID NO: 631387 - DNA, 57 bp, Artificial; identical to SEQ ID NO: 245732
  Synthetic oligonucleotide

SEQ ID NO: 631388 - DNA, 52 bp, Artificial; identical to SEQ ID NO: 142873
  Synthetic oligonucleotide

SEQ ID NO: 631389 - DNA, 60 bp, Artificial; identical to SEQ ID NO: 212375
  Synthetic oligonucleotide

SEQ ID NO: 631390 - DNA, 52 bp, Artificial; identical to SEQ ID NO: 165075
  Synthetic oligonucleotide

SEQ ID NO: 631391 - DNA, 54 bp, Artificial; identical to SEQ ID NO: 256874
  Synthetic oligonucleotide

SEQ ID NO: 631392 - DNA, 53 bp, Artificial; identical to SEQ ID NO: 190770
  Synthetic oligonucleotide

SEQ ID NO: 631393 - DNA, 55 bp, Artificial; identical to SEQ ID NO: 257096
  Synthetic oligonucleotide

SEQ ID NO: 631394 - DNA, 50 bp, Artificial; identical to SEQ ID NO: 176347
  Synthetic oligonucleotide

SEQ ID NO: 631395 - DNA, 55 bp, Artificial; identical to SEQ ID NO: 182936
  Synthetic oligonucleotide

SEQ ID NO: 631396 - DNA, 55 bp, Artificial; identical to SEQ ID NO: 199333
  Synthetic oligonucleotide

SEQ ID NO: 631397 - DNA, 55 bp, Artificial; identical to SEQ ID NO: 152623
  Synthetic oligonucleotide

SEQ ID NO: 631398 - DNA, 55 bp, Artificial; identical to SEQ ID NO: 182933
  Synthetic oligonucleotide

SEQ ID NO: 631399 - DNA, 58 bp, Artificial; identical to SEQ ID NO: 194279
  Synthetic oligonucleotide

SEQ ID NO: 631400 - DNA, 55 bp, Artificial; identical to SEQ ID NO: 169271
  Synthetic oligonucleotide

SEQ ID NO: 631401 - DNA, 51 bp, Artificial; identical to SEQ ID NO: 157870
  Synthetic oligonucleotide

SEQ ID NO: 631402 - DNA, 55 bp, Artificial; identical to SEQ ID NO: 174419
  Synthetic oligonucleotide

SEQ ID NO: 631403 - DNA, 54 bp, Artificial; identical to SEQ ID NO: 149290
  Synthetic oligonucleotide

SEQ ID NO: 631404 - DNA, 58 bp, Artificial; identical to SEQ ID NO: 190753
  Synthetic oligonucleotide

SEQ ID NO: 631405 - DNA, 53 bp, Artificial; identical to SEQ ID NO: 195005
  Synthetic oligonucleotide

SEQ ID NO: 631406 - DNA, 59 bp, Artificial; identical to SEQ ID NO: 238171
  Synthetic oligonucleotide

SEQ ID NO: 631407 - DNA, 57 bp, Artificial; identical to SEQ ID NO: 144671
  Synthetic oligonucleotide

SEQ ID NO: 631408 - DNA, 55 bp, Artificial; identical to SEQ ID NO: 234327
  Synthetic oligonucleotide

SEQ ID NO: 631409 - DNA, 55 bp, Artificial; identical to SEQ ID NO: 188181
  Synthetic oligonucleotide

SEQ ID NO: 631410 - DNA, 60 bp, Artificial; identical to SEQ ID NO: 242227
  Synthetic oligonucleotide

SEQ ID NO: 631411 - DNA, 58 bp, Artificial; identical to SEQ ID NO: 256573
  Synthetic oligonucleotide

SEQ ID NO: 631412 - DNA, 55 bp, Artificial; identical to SEQ ID NO: 166997
  Synthetic oligonucleotide

SEQ ID NO: 631413 - DNA, 52 bp, Artificial; identical to SEQ ID NO: 193744
  Synthetic oligonucleotide

SEQ ID NO: 631414 - DNA, 58 bp, Artificial; identical to SEQ ID NO: 187206
  Synthetic oligonucleotide

SEQ ID NO: 631415 - DNA, 55 bp, Artificial; identical to SEQ ID NO: 150538
  Synthetic oligonucleotide

SEQ ID NO: 631416 - DNA, 53 bp, Artificial; identical to SEQ ID NO: 199829
  Synthetic oligonucleotide

SEQ ID NO: 631417 - DNA, 55 bp, Artificial; identical to SEQ ID NO: 202330
  Synthetic oligonucleotide

SEQ ID NO: 631418 - DNA, 59 bp, Artificial; identical to SEQ ID NO: 247393
  Synthetic oligonucleotide

SEQ ID NO: 631419 - DNA, 55 bp, Artificial; identical to SEQ ID NO: 166424
  Synthetic oligonucleotide

SEQ ID NO: 631420 - DNA, 60 bp, Artificial; identical to SEQ ID NO: 150537
  Synthetic oligonucleotide

SEQ ID NO: 631421 - DNA, 55 bp, Artificial; identical to SEQ ID NO: 266185
  Synthetic oligonucleotide

SEQ ID NO: 631422 - DNA, 50 bp, Artificial; identical to SEQ ID NO: 197794
  Synthetic oligonucleotide

SEQ ID NO: 631423 - DNA, 58 bp, Artificial; identical to SEQ ID NO: 201964
  Synthetic oligonucleotide

SEQ ID NO: 631424 - DNA, 54 bp, Artificial; identical to SEQ ID NO: 160038
  Synthetic oligonucleotide

SEQ ID NO: 631425 - DNA, 53 bp, Artificial; identical to SEQ ID NO: 199819
  Synthetic oligonucleotide

SEQ ID NO: 631426 - DNA, 52 bp, Artificial; identical to SEQ ID NO: 186319
  Synthetic oligonucleotide

SEQ ID NO: 631427 - DNA, 55 bp, Artificial; identical to SEQ ID NO: 141953
  Synthetic oligonucleotide

SEQ ID NO: 631428 - DNA, 55 bp, Artificial; identical to SEQ ID NO: 191959
  Synthetic oligonucleotide

SEQ ID NO: 631429 - DNA, 55 bp, Artificial; identical to SEQ ID NO: 248021
  Synthetic oligonucleotide

SEQ ID NO: 631430 - DNA, 54 bp, Artificial; identical to SEQ ID NO: 162280
  Synthetic oligonucleotide

SEQ ID NO: 631431 - DNA, 55 bp, Artificial; identical to SEQ ID NO: 174420
  Synthetic oligonucleotide

SEQ ID NO: 631432 - DNA, 55 bp, Artificial; identical to SEQ ID NO: 159877
  Synthetic oligonucleotide

SEQ ID NO: 631433 - DNA, 54 bp, Artificial; identical to SEQ ID NO: 207725
  Synthetic oligonucleotide

SEQ ID NO: 631434 - DNA, 52 bp, Artificial; identical to SEQ ID NO: 243275
  Synthetic oligonucleotide

SEQ ID NO: 631435 - DNA, 55 bp, Artificial; identical to SEQ ID NO: 160037
  Synthetic oligonucleotide

SEQ ID NO: 631436 - DNA, 55 bp, Artificial; identical to SEQ ID NO: 166421
  Synthetic oligonucleotide

SEQ ID NO: 631437 - DNA, 55 bp, Artificial; identical to SEQ ID NO: 182924
  Synthetic oligonucleotide

SEQ ID NO: 631438 - DNA, 55 bp, Artificial; identical to SEQ ID NO: 209447
  Synthetic oligonucleotide

SEQ ID NO: 631439 - DNA, 55 bp, Artificial; identical to SEQ ID NO: 182921
  Synthetic oligonucleotide

SEQ ID NO: 631440 - DNA, 55 bp, Artificial; identical to SEQ ID NO: 142497
  Synthetic oligonucleotide

SEQ ID NO: 631441 - DNA, 55 bp, Artificial; identical to SEQ ID NO: 159596
  Synthetic oligonucleotide

SEQ ID NO: 631442 - DNA, 55 bp, Artificial; identical to SEQ ID NO: 141663
  Synthetic oligonucleotide

SEQ ID NO: 631443 - DNA, 55 bp, Artificial; identical to SEQ ID NO: 210911
  Synthetic oligonucleotide

SEQ ID NO: 631444 - DNA, 55 bp, Artificial; identical to SEQ ID NO: 182920
  Synthetic oligonucleotide

SEQ ID NO: 631445 - DNA, 52 bp, Artificial; identical to SEQ ID NO: 189180
  Synthetic oligonucleotide

SEQ ID NO: 631446 - DNA, 50 bp, Artificial; identical to SEQ ID NO: 241424
  Synthetic oligonucleotide

SEQ ID NO: 631447 - DNA, 52 bp, Artificial; identical to SEQ ID NO: 243273
  Synthetic oligonucleotide

SEQ ID NO: 631448 - DNA, 56 bp, Artificial; identical to SEQ ID NO: 150527
  Synthetic oligonucleotide

SEQ ID NO: 631449 - DNA, 56 bp, Artificial; identical to SEQ ID NO: 225539
  Synthetic oligonucleotide

SEQ ID NO: 631450 - DNA, 55 bp, Artificial; identical to SEQ ID NO: 256872
  Synthetic oligonucleotide

SEQ ID NO: 631451 - DNA, 57 bp, Artificial; identical to SEQ ID NO: 239388
  Synthetic oligonucleotide

SEQ ID NO: 631452 - DNA, 54 bp, Artificial; identical to SEQ ID NO: 238182
  Synthetic oligonucleotide

SEQ ID NO: 631453 - DNA, 55 bp, Artificial; identical to SEQ ID NO: 245988
  Synthetic oligonucleotide

SEQ ID NO: 631454 - DNA, 54 bp, Artificial; identical to SEQ ID NO: 154414
  Synthetic oligonucleotide

SEQ ID NO: 631455 - DNA, 55 bp, Artificial; identical to SEQ ID NO: 159600
  Synthetic oligonucleotide

SEQ ID NO: 631456 - DNA, 52 bp, Artificial; identical to SEQ ID NO: 242441
  Synthetic oligonucleotide

SEQ ID NO: 631457 - DNA, 52 bp, Artificial; identical to SEQ ID NO: 186357
  Synthetic oligonucleotide

SEQ ID NO: 631458 - DNA, 57 bp, Artificial; identical to SEQ ID NO: 147140
  Synthetic oligonucleotide

SEQ ID NO: 631459 - DNA, 53 bp, Artificial; identical to SEQ ID NO: 233800
  Synthetic oligonucleotide

SEQ ID NO: 631460 - DNA, 56 bp, Artificial; identical to SEQ ID NO: 179923
  Synthetic oligonucleotide

SEQ ID NO: 631461 - DNA, 54 bp, Artificial; identical to SEQ ID NO: 166418
  Synthetic oligonucleotide

SEQ ID NO: 631462 - DNA, 59 bp, Artificial; identical to SEQ ID NO: 209039
  Synthetic oligonucleotide

SEQ ID NO: 631463 - DNA, 53 bp, Artificial; identical to SEQ ID NO: 142727
  Synthetic oligonucleotide

SEQ ID NO: 631464 - DNA, 60 bp, Artificial; identical to SEQ ID NO: 217192
  Synthetic oligonucleotide

SEQ ID NO: 631465 - DNA, 50 bp, Artificial; identical to SEQ ID NO: 224049
  Synthetic oligonucleotide

SEQ ID NO: 631466 - DNA, 58 bp, Artificial; identical to SEQ ID NO: 171031
  Synthetic oligonucleotide

SEQ ID NO: 631467 - DNA, 55 bp, Artificial; identical to SEQ ID NO: 187893
  Synthetic oligonucleotide

SEQ ID NO: 631468 - DNA, 60 bp, Artificial; identical to SEQ ID NO: 242217
  Synthetic oligonucleotide

SEQ ID NO: 631469 - DNA, 53 bp, Artificial; identical to SEQ ID NO: 150515
  Synthetic oligonucleotide

SEQ ID NO: 631470 - DNA, 56 bp, Artificial; identical to SEQ ID NO: 171069
  Synthetic oligonucleotide

SEQ ID NO: 631471 - DNA, 56 bp, Artificial; identical to SEQ ID NO: 244047
  Synthetic oligonucleotide

SEQ ID NO: 631472 - DNA, 59 bp, Artificial; identical to SEQ ID NO: 242492
  Synthetic oligonucleotide

SEQ ID NO: 631473 - DNA, 52 bp, Artificial; identical to SEQ ID NO: 201057
  Synthetic oligonucleotide

SEQ ID NO: 631474 - DNA, 58 bp, Artificial; identical to SEQ ID NO: 245743
  Synthetic oligonucleotide

SEQ ID NO: 631475 - DNA, 50 bp, Artificial; identical to SEQ ID NO: 202615
  Synthetic oligonucleotide

SEQ ID NO: 631476 - DNA, 55 bp, Artificial; identical to SEQ ID NO: 240502
  Synthetic oligonucleotide

SEQ ID NO: 631477 - DNA, 55 bp, Artificial; identical to SEQ ID NO: 146566
  Synthetic oligonucleotide

SEQ ID NO: 631478 - DNA, 55 bp, Artificial; identical to SEQ ID NO: 159601
  Synthetic oligonucleotide

SEQ ID NO: 631479 - DNA, 54 bp, Artificial; identical to SEQ ID NO: 188015
  Synthetic oligonucleotide

SEQ ID NO: 631480 - DNA, 56 bp, Artificial; identical to SEQ ID NO: 245754
  Synthetic oligonucleotide

SEQ ID NO: 631481 - DNA, 51 bp, Artificial; identical to SEQ ID NO: 255770
  Synthetic oligonucleotide

SEQ ID NO: 631482 - DNA, 54 bp, Artificial; identical to SEQ ID NO: 166477
  Synthetic oligonucleotide

SEQ ID NO: 631483 - DNA, 58 bp, Artificial; identical to SEQ ID NO: 200960
  Synthetic oligonucleotide

SEQ ID NO: 631484 - DNA, 56 bp, Artificial; identical to SEQ ID NO: 179950
  Synthetic oligonucleotide

SEQ ID NO: 631485 - DNA, 51 bp, Artificial; identical to SEQ ID NO: 186880
  Synthetic oligonucleotide

SEQ ID NO: 631486 - DNA, 53 bp, Artificial; identical to SEQ ID NO: 202668
  Synthetic oligonucleotide

SEQ ID NO: 631487 - DNA, 57 bp, Artificial; identical to SEQ ID NO: 245765
  Synthetic oligonucleotide

SEQ ID NO: 631488 - DNA, 59 bp, Artificial; identical to SEQ ID NO: 242214
  Synthetic oligonucleotide

SEQ ID NO: 631489 - DNA, 55 bp, Artificial; identical to SEQ ID NO: 182873
  Synthetic oligonucleotide

SEQ ID NO: 631490 - DNA, 56 bp, Artificial; identical to SEQ ID NO: 162270
  Synthetic oligonucleotide

SEQ ID NO: 631491 - DNA, 55 bp, Artificial; identical to SEQ ID NO: 256871
  Synthetic oligonucleotide

SEQ ID NO: 631492 - DNA, 58 bp, Artificial; identical to SEQ ID NO: 245776
  Synthetic oligonucleotide

SEQ ID NO: 631493 - DNA, 55 bp, Artificial; identical to SEQ ID NO: 182875
  Synthetic oligonucleotide

SEQ ID NO: 631494 - DNA, 54 bp, Artificial; identical to SEQ ID NO: 205279
  Synthetic oligonucleotide

SEQ ID NO: 631495 - DNA, 50 bp, Artificial; identical to SEQ ID NO: 248181
  Synthetic oligonucleotide

SEQ ID NO: 631496 - DNA, 51 bp, Artificial; identical to SEQ ID NO: 170211
  Synthetic oligonucleotide

SEQ ID NO: 631497 - DNA, 55 bp, Artificial; identical to SEQ ID NO: 188934
  Synthetic oligonucleotide

SEQ ID NO: 631498 - DNA, 51 bp, Artificial; identical to SEQ ID NO: 193875
  Synthetic oligonucleotide

SEQ ID NO: 631499 - DNA, 59 bp, Artificial; identical to SEQ ID NO: 150493
  Synthetic oligonucleotide

SEQ ID NO: 631500 - DNA, 55 bp, Artificial; identical to SEQ ID NO: 148834
  Synthetic oligonucleotide

SEQ ID NO: 631501 - DNA, 55 bp, Artificial; identical to SEQ ID NO: 256869
  Synthetic oligonucleotide

SEQ ID NO: 631502 - DNA, 55 bp, Artificial; identical to SEQ ID NO: 182880
  Synthetic oligonucleotide

SEQ ID NO: 631503 - DNA, 57 bp, Artificial; identical to SEQ ID NO: 187195
  Synthetic oligonucleotide

SEQ ID NO: 631504 - DNA, 57 bp, Artificial; identical to SEQ ID NO: 179764
  Synthetic oligonucleotide

SEQ ID NO: 631505 - DNA, 55 bp, Artificial; identical to SEQ ID NO: 142559
  Synthetic oligonucleotide

SEQ ID NO: 631506 - DNA, 57 bp, Artificial; identical to SEQ ID NO: 256421
  Synthetic oligonucleotide

SEQ ID NO: 631507 - DNA, 55 bp, Artificial; identical to SEQ ID NO: 252896
  Synthetic oligonucleotide

SEQ ID NO: 631508 - DNA, 54 bp, Artificial; identical to SEQ ID NO: 153561
  Synthetic oligonucleotide

SEQ ID NO: 631509 - DNA, 60 bp, Artificial; identical to SEQ ID NO: 141674
  Synthetic oligonucleotide

SEQ ID NO: 631510 - DNA, 55 bp, Artificial; identical to SEQ ID NO: 209445
  Synthetic oligonucleotide

SEQ ID NO: 631511 - DNA, 55 bp, Artificial; identical to SEQ ID NO: 203441
  Synthetic oligonucleotide

SEQ ID NO: 631512 - DNA, 55 bp, Artificial; identical to SEQ ID NO: 182900
  Synthetic oligonucleotide

SEQ ID NO: 631513 - DNA, 55 bp, Artificial; identical to SEQ ID NO: 182899
  Synthetic oligonucleotide

SEQ ID NO: 631514 - DNA, 54 bp, Artificial; identical to SEQ ID NO: 203440
  Synthetic oligonucleotide

SEQ ID NO: 631515 - DNA, 55 bp, Artificial; identical to SEQ ID NO: 224423
  Synthetic oligonucleotide

SEQ ID NO: 631516 - DNA, 59 bp, Artificial; identical to SEQ ID NO: 191693
  Synthetic oligonucleotide

SEQ ID NO: 631517 - DNA, 54 bp, Artificial; identical to SEQ ID NO: 149242
  Synthetic oligonucleotide

SEQ ID NO: 631518 - DNA, 55 bp, Artificial; identical to SEQ ID NO: 199355
  Synthetic oligonucleotide

SEQ ID NO: 631519 - DNA, 55 bp, Artificial; identical to SEQ ID NO: 199356
  Synthetic oligonucleotide

SEQ ID NO: 631520 - DNA, 60 bp, Artificial; identical to SEQ ID NO: 245787
  Synthetic oligonucleotide

SEQ ID NO: 631521 - DNA, 50 bp, Artificial; identical to SEQ ID NO: 207928
  Synthetic oligonucleotide

SEQ ID NO: 631522 - DNA, 55 bp, Artificial; identical to SEQ ID NO: 240442
  Synthetic oligonucleotide

SEQ ID NO: 631523 - DNA, 55 bp, Artificial; identical to SEQ ID NO: 256868
  Synthetic oligonucleotide

SEQ ID NO: 631524 - DNA, 55 bp, Artificial; identical to SEQ ID NO: 153097
  Synthetic oligonucleotide

SEQ ID NO: 631525 - DNA, 52 bp, Artificial; identical to SEQ ID NO: 169380
  Synthetic oligonucleotide

SEQ ID NO: 631526 - DNA, 53 bp, Artificial; identical to SEQ ID NO: 142558
  Synthetic oligonucleotide

SEQ ID NO: 631527 - DNA, 52 bp, Artificial; identical to SEQ ID NO: 199980
  Synthetic oligonucleotide

SEQ ID NO: 631528 - DNA, 57 bp, Artificial; identical to SEQ ID NO: 257608
  Synthetic oligonucleotide

SEQ ID NO: 631529 - DNA, 55 bp, Artificial; identical to SEQ ID NO: 205278
  Synthetic oligonucleotide

SEQ ID NO: 631530 - DNA, 60 bp, Artificial; identical to SEQ ID NO: 242211
  Synthetic oligonucleotide

SEQ ID NO: 631531 - DNA, 55 bp, Artificial; identical to SEQ ID NO: 205276
  Synthetic oligonucleotide

SEQ ID NO: 631532 - DNA, 55 bp, Artificial; identical to SEQ ID NO: 166475
  Synthetic oligonucleotide

SEQ ID NO: 631533 - DNA, 55 bp, Artificial; identical to SEQ ID NO: 256867
  Synthetic oligonucleotide

SEQ ID NO: 631534 - DNA, 59 bp, Artificial; identical to SEQ ID NO: 160119
  Synthetic oligonucleotide

SEQ ID NO: 631535 - DNA, 53 bp, Artificial; identical to SEQ ID NO: 216685
  Synthetic oligonucleotide

SEQ ID NO: 631536 - DNA, 52 bp, Artificial; identical to SEQ ID NO: 182897
  Synthetic oligonucleotide

SEQ ID NO: 631537 - DNA, 55 bp, Artificial; identical to SEQ ID NO: 245982
  Synthetic oligonucleotide

SEQ ID NO: 631538 - DNA, 60 bp, Artificial; identical to SEQ ID NO: 233379
  Synthetic oligonucleotide

SEQ ID NO: 631539 - DNA, 57 bp, Artificial; identical to SEQ ID NO: 217264
  Synthetic oligonucleotide

SEQ ID NO: 631540 - DNA, 57 bp, Artificial; identical to SEQ ID NO: 150471
  Synthetic oligonucleotide

SEQ ID NO: 631541 - DNA, 55 bp, Artificial; identical to SEQ ID NO: 151447
  Synthetic oligonucleotide

SEQ ID NO: 631542 - DNA, 53 bp, Artificial; identical to SEQ ID NO: 195221
  Synthetic oligonucleotide

SEQ ID NO: 631543 - DNA, 53 bp, Artificial; identical to SEQ ID NO: 199788
  Synthetic oligonucleotide

SEQ ID NO: 631544 - DNA, 59 bp, Artificial; identical to SEQ ID NO: 151622
  Synthetic oligonucleotide

SEQ ID NO: 631545 - DNA, 55 bp, Artificial; identical to SEQ ID NO: 182892
  Synthetic oligonucleotide

SEQ ID NO: 631546 - DNA, 55 bp, Artificial; identical to SEQ ID NO: 193548
  Synthetic oligonucleotide

SEQ ID NO: 631547 - DNA, 54 bp, Artificial; identical to SEQ ID NO: 155203
  Synthetic oligonucleotide

SEQ ID NO: 631548 - DNA, 55 bp, Artificial; identical to SEQ ID NO: 187897
  Synthetic oligonucleotide

SEQ ID NO: 631549 - DNA, 55 bp, Artificial; identical to SEQ ID NO: 182889
  Synthetic oligonucleotide

SEQ ID NO: 631550 - DNA, 55 bp, Artificial; identical to SEQ ID NO: 216531
  Synthetic oligonucleotide

SEQ ID NO: 631551 - DNA, 54 bp, Artificial; identical to SEQ ID NO: 242710
  Synthetic oligonucleotide

SEQ ID NO: 631552 - DNA, 55 bp, Artificial; identical to SEQ ID NO: 182888
  Synthetic oligonucleotide

SEQ ID NO: 631553 - DNA, 53 bp, Artificial; identical to SEQ ID NO: 144533
  Synthetic oligonucleotide

SEQ ID NO: 631554 - DNA, 55 bp, Artificial; identical to SEQ ID NO: 166474
  Synthetic oligonucleotide

SEQ ID NO: 631555 - DNA, 55 bp, Artificial; identical to SEQ ID NO: 188933
  Synthetic oligonucleotide

SEQ ID NO: 631556 - DNA, 60 bp, Artificial; identical to SEQ ID NO: 177652
  Synthetic oligonucleotide

SEQ ID NO: 631557 - DNA, 55 bp, Artificial; identical to SEQ ID NO: 148828
  Synthetic oligonucleotide

SEQ ID NO: 631558 - DNA, 55 bp, Artificial; identical to SEQ ID NO: 203439
  Synthetic oligonucleotide

SEQ ID NO: 631559 - DNA, 58 bp, Artificial; identical to SEQ ID NO: 206974
  Synthetic oligonucleotide

SEQ ID NO: 631560 - DNA, 55 bp, Artificial; identical to SEQ ID NO: 142852
  Synthetic oligonucleotide

SEQ ID NO: 631561 - DNA, 60 bp, Artificial; identical to SEQ ID NO: 203282
  Synthetic oligonucleotide

SEQ ID NO: 631562 - DNA, 55 bp, Artificial; identical to SEQ ID NO: 173613
  Synthetic oligonucleotide

SEQ ID NO: 631563 - DNA, 55 bp, Artificial; identical to SEQ ID NO: 205311
  Synthetic oligonucleotide

SEQ ID NO: 631564 - DNA, 55 bp, Artificial; identical to SEQ ID NO: 161903
  Synthetic oligonucleotide

SEQ ID NO: 631565 - DNA, 53 bp, Artificial; identical to SEQ ID NO: 246395
  Synthetic oligonucleotide

SEQ ID NO: 631566 - DNA, 54 bp, Artificial; identical to SEQ ID NO: 185440
  Synthetic oligonucleotide

SEQ ID NO: 631567 - DNA, 55 bp, Artificial; identical to SEQ ID NO: 191957
  Synthetic oligonucleotide

SEQ ID NO: 631568 - DNA, 55 bp, Artificial; identical to SEQ ID NO: 159607
  Synthetic oligonucleotide

SEQ ID NO: 631569 - DNA, 50 bp, Artificial; identical to SEQ ID NO: 189783
  Synthetic oligonucleotide

SEQ ID NO: 631570 - DNA, 60 bp, Artificial; identical to SEQ ID NO: 155475
  Synthetic oligonucleotide

SEQ ID NO: 631571 - DNA, 55 bp, Artificial; identical to SEQ ID NO: 240445
  Synthetic oligonucleotide

SEQ ID NO: 631572 - DNA, 59 bp, Artificial; identical to SEQ ID NO: 248032
  Synthetic oligonucleotide

SEQ ID NO: 631573 - DNA, 60 bp, Artificial; identical to SEQ ID NO: 256393
  Synthetic oligonucleotide

SEQ ID NO: 631574 - DNA, 50 bp, Artificial; identical to SEQ ID NO: 255860
  Synthetic oligonucleotide

SEQ ID NO: 631575 - DNA, 60 bp, Artificial; identical to SEQ ID NO: 203239
  Synthetic oligonucleotide

SEQ ID NO: 631576 - DNA, 55 bp, Artificial; identical to SEQ ID NO: 205310
  Synthetic oligonucleotide

SEQ ID NO: 631577 - DNA, 55 bp, Artificial; identical to SEQ ID NO: 154365
  Synthetic oligonucleotide

SEQ ID NO: 631578 - DNA, 60 bp, Artificial; identical to SEQ ID NO: 166744
  Synthetic oligonucleotide

SEQ ID NO: 631579 - DNA, 50 bp, Artificial; identical to SEQ ID NO: 150055
  Synthetic oligonucleotide

SEQ ID NO: 631580 - DNA, 56 bp, Artificial; identical to SEQ ID NO: 239375
  Synthetic oligonucleotide

SEQ ID NO: 631581 - DNA, 55 bp, Artificial; identical to SEQ ID NO: 150427
  Synthetic oligonucleotide

SEQ ID NO: 631582 - DNA, 54 bp, Artificial; identical to SEQ ID NO: 177651
  Synthetic oligonucleotide

SEQ ID NO: 631583 - DNA, 55 bp, Artificial; identical to SEQ ID NO: 148824
  Synthetic oligonucleotide

SEQ ID NO: 631584 - DNA, 55 bp, Artificial; identical to SEQ ID NO: 205307
  Synthetic oligonucleotide

SEQ ID NO: 631585 - DNA, 60 bp, Artificial; identical to SEQ ID NO: 154247
  Synthetic oligonucleotide

SEQ ID NO: 631586 - DNA, 53 bp, Artificial; identical to SEQ ID NO: 222707
  Synthetic oligonucleotide

SEQ ID NO: 631587 - DNA, 55 bp, Artificial; identical to SEQ ID NO: 207591
  Synthetic oligonucleotide

SEQ ID NO: 631588 - DNA, 55 bp, Artificial; identical to SEQ ID NO: 188888
  Synthetic oligonucleotide

SEQ ID NO: 631589 - DNA, 55 bp, Artificial; identical to SEQ ID NO: 197080
  Synthetic oligonucleotide

SEQ ID NO: 631590 - DNA, 55 bp, Artificial; identical to SEQ ID NO: 159608
  Synthetic oligonucleotide

SEQ ID NO: 631591 - DNA, 55 bp, Artificial; identical to SEQ ID NO: 259041
  Synthetic oligonucleotide

SEQ ID NO: 631592 - DNA, 55 bp, Artificial; identical to SEQ ID NO: 256865
  Synthetic oligonucleotide

SEQ ID NO: 631593 - DNA, 55 bp, Artificial; identical to SEQ ID NO: 172892
  Synthetic oligonucleotide

SEQ ID NO: 631594 - DNA, 55 bp, Artificial; identical to SEQ ID NO: 160034
  Synthetic oligonucleotide

SEQ ID NO: 631595 - DNA, 55 bp, Artificial; identical to SEQ ID NO: 266729
  Synthetic oligonucleotide

SEQ ID NO: 631596 - DNA, 60 bp, Artificial; identical to SEQ ID NO: 243482
  Synthetic oligonucleotide

SEQ ID NO: 631597 - DNA, 55 bp, Artificial; identical to SEQ ID NO: 202326
  Synthetic oligonucleotide

SEQ ID NO: 631598 - DNA, 53 bp, Artificial; identical to SEQ ID NO: 185452
  Synthetic oligonucleotide

SEQ ID NO: 631599 - DNA, 55 bp, Artificial; identical to SEQ ID NO: 249522
  Synthetic oligonucleotide

SEQ ID NO: 631600 - DNA, 55 bp, Artificial; identical to SEQ ID NO: 141685
  Synthetic oligonucleotide

SEQ ID NO: 631601 - DNA, 55 bp, Artificial; identical to SEQ ID NO: 183273
  Synthetic oligonucleotide

SEQ ID NO: 631602 - DNA, 51 bp, Artificial; identical to SEQ ID NO: 186874
  Synthetic oligonucleotide

SEQ ID NO: 631603 - DNA, 55 bp, Artificial; identical to SEQ ID NO: 183268
  Synthetic oligonucleotide

SEQ ID NO: 631604 - DNA, 57 bp, Artificial; identical to SEQ ID NO: 177648
  Synthetic oligonucleotide

SEQ ID NO: 631605 - DNA, 55 bp, Artificial; identical to SEQ ID NO: 141169
  Synthetic oligonucleotide

SEQ ID NO: 631606 - DNA, 55 bp, Artificial; identical to SEQ ID NO: 166473
  Synthetic oligonucleotide

SEQ ID NO: 631607 - DNA, 59 bp, Artificial; identical to SEQ ID NO: 243252
  Synthetic oligonucleotide

SEQ ID NO: 631608 - DNA, 55 bp, Artificial; identical to SEQ ID NO: 225159
  Synthetic oligonucleotide

SEQ ID NO: 631609 - DNA, 55 bp, Artificial; identical to SEQ ID NO: 191758
  Synthetic oligonucleotide

SEQ ID NO: 631610 - DNA, 55 bp, Artificial; identical to SEQ ID NO: 183264
  Synthetic oligonucleotide

SEQ ID NO: 631611 - DNA, 55 bp, Artificial; identical to SEQ ID NO: 248043
  Synthetic oligonucleotide

SEQ ID NO: 631612 - DNA, 53 bp, Artificial; identical to SEQ ID NO: 256404
  Synthetic oligonucleotide

SEQ ID NO: 631613 - DNA, 56 bp, Artificial; identical to SEQ ID NO: 150416
  Synthetic oligonucleotide

SEQ ID NO: 631614 - DNA, 54 bp, Artificial; identical to SEQ ID NO: 149246
  Synthetic oligonucleotide

SEQ ID NO: 631615 - DNA, 55 bp, Artificial; identical to SEQ ID NO: 187898
  Synthetic oligonucleotide

SEQ ID NO: 631616 - DNA, 55 bp, Artificial; identical to SEQ ID NO: 256863
  Synthetic oligonucleotide

SEQ ID NO: 631617 - DNA, 55 bp, Artificial; identical to SEQ ID NO: 144047
  Synthetic oligonucleotide

SEQ ID NO: 631618 - DNA, 53 bp, Artificial; identical to SEQ ID NO: 206403
  Synthetic oligonucleotide

SEQ ID NO: 631619 - DNA, 55 bp, Artificial; identical to SEQ ID NO: 168301
  Synthetic oligonucleotide

SEQ ID NO: 631620 - DNA, 55 bp, Artificial; identical to SEQ ID NO: 245980
  Synthetic oligonucleotide

SEQ ID NO: 631621 - DNA, 60 bp, Artificial; identical to SEQ ID NO: 177644
  Synthetic oligonucleotide

SEQ ID NO: 631622 - DNA, 50 bp, Artificial; identical to SEQ ID NO: 176418
  Synthetic oligonucleotide

SEQ ID NO: 631623 - DNA, 55 bp, Artificial; identical to SEQ ID NO: 203427
  Synthetic oligonucleotide

SEQ ID NO: 631624 - DNA, 60 bp, Artificial; identical to SEQ ID NO: 150569
  Synthetic oligonucleotide

SEQ ID NO: 631625 - DNA, 53 bp, Artificial; identical to SEQ ID NO: 192094
  Synthetic oligonucleotide

SEQ ID NO: 631626 - DNA, 52 bp, Artificial; identical to SEQ ID NO: 165083
  Synthetic oligonucleotide

SEQ ID NO: 631627 - DNA, 55 bp, Artificial; identical to SEQ ID NO: 148822
  Synthetic oligonucleotide

SEQ ID NO: 631628 - DNA, 50 bp, Artificial; identical to SEQ ID NO: 266330
  Synthetic oligonucleotide

SEQ ID NO: 631629 - DNA, 55 bp, Artificial; identical to SEQ ID NO: 194385
  Synthetic oligonucleotide

SEQ ID NO: 631630 - DNA, 60 bp, Artificial; identical to SEQ ID NO: 202669
  Synthetic oligonucleotide

SEQ ID NO: 631631 - DNA, 60 bp, Artificial; identical to SEQ ID NO: 212377
  Synthetic oligonucleotide

SEQ ID NO: 631632 - DNA, 55 bp, Artificial; identical to SEQ ID NO: 188887
  Synthetic oligonucleotide

SEQ ID NO: 631633 - DNA, 52 bp, Artificial; identical to SEQ ID NO: 243286
  Synthetic oligonucleotide

SEQ ID NO: 631634 - DNA, 57 bp, Artificial; identical to SEQ ID NO: 157543
  Synthetic oligonucleotide

SEQ ID NO: 631635 - DNA, 55 bp, Artificial; identical to SEQ ID NO: 188886
  Synthetic oligonucleotide

SEQ ID NO: 631636 - DNA, 57 bp, Artificial; identical to SEQ ID NO: 217286
  Synthetic oligonucleotide

SEQ ID NO: 631637 - DNA, 52 bp, Artificial; identical to SEQ ID NO: 185944
  Synthetic oligonucleotide

SEQ ID NO: 631638 - DNA, 51 bp, Artificial; identical to SEQ ID NO: 246589
  Synthetic oligonucleotide

SEQ ID NO: 631639 - DNA, 60 bp, Artificial; identical to SEQ ID NO: 177640
  Synthetic oligonucleotide

SEQ ID NO: 631640 - DNA, 55 bp, Artificial; identical to SEQ ID NO: 233721
  Synthetic oligonucleotide

SEQ ID NO: 631641 - DNA, 55 bp, Artificial; identical to SEQ ID NO: 207589
  Synthetic oligonucleotide

SEQ ID NO: 631642 - DNA, 58 bp, Artificial; identical to SEQ ID NO: 142540
  Synthetic oligonucleotide

SEQ ID NO: 631643 - DNA, 55 bp, Artificial; identical to SEQ ID NO: 159572
  Synthetic oligonucleotide

SEQ ID NO: 631644 - DNA, 52 bp, Artificial; identical to SEQ ID NO: 193601
  Synthetic oligonucleotide

SEQ ID NO: 631645 - DNA, 55 bp, Artificial; identical to SEQ ID NO: 240447
  Synthetic oligonucleotide

SEQ ID NO: 631646 - DNA, 55 bp, Artificial; identical to SEQ ID NO: 240449
  Synthetic oligonucleotide

SEQ ID NO: 631647 - DNA, 59 bp, Artificial; identical to SEQ ID NO: 234220
  Synthetic oligonucleotide

SEQ ID NO: 631648 - DNA, 55 bp, Artificial; identical to SEQ ID NO: 233722
  Synthetic oligonucleotide

SEQ ID NO: 631649 - DNA, 56 bp, Artificial; identical to SEQ ID NO: 209229
  Synthetic oligonucleotide

SEQ ID NO: 631650 - DNA, 56 bp, Artificial; identical to SEQ ID NO: 245832
  Synthetic oligonucleotide

SEQ ID NO: 631651 - DNA, 54 bp, Artificial; identical to SEQ ID NO: 255231
  Synthetic oligonucleotide

SEQ ID NO: 631652 - DNA, 54 bp, Artificial; identical to SEQ ID NO: 243263
  Synthetic oligonucleotide

SEQ ID NO: 631653 - DNA, 55 bp, Artificial; identical to SEQ ID NO: 245697
  Synthetic oligonucleotide

SEQ ID NO: 631654 - DNA, 55 bp, Artificial; identical to SEQ ID NO: 202324
  Synthetic oligonucleotide

SEQ ID NO: 631655 - DNA, 51 bp, Artificial; identical to SEQ ID NO: 206568
  Synthetic oligonucleotide

SEQ ID NO: 631656 - DNA, 55 bp, Artificial; identical to SEQ ID NO: 187899
  Synthetic oligonucleotide

SEQ ID NO: 631657 - DNA, 51 bp, Artificial; identical to SEQ ID NO: 186873
  Synthetic oligonucleotide

SEQ ID NO: 631658 - DNA, 55 bp, Artificial; identical to SEQ ID NO: 225157
  Synthetic oligonucleotide

SEQ ID NO: 631659 - DNA, 57 bp, Artificial; identical to SEQ ID NO: 256408
  Synthetic oligonucleotide

SEQ ID NO: 631660 - DNA, 55 bp, Artificial; identical to SEQ ID NO: 240451
  Synthetic oligonucleotide

SEQ ID NO: 631661 - DNA, 55 bp, Artificial; identical to SEQ ID NO: 152268
  Synthetic oligonucleotide

SEQ ID NO: 631662 - DNA, 55 bp, Artificial; identical to SEQ ID NO: 160463
  Synthetic oligonucleotide

SEQ ID NO: 631663 - DNA, 55 bp, Artificial; identical to SEQ ID NO: 148820
  Synthetic oligonucleotide

SEQ ID NO: 631664 - DNA, 55 bp, Artificial; identical to SEQ ID NO: 174403
  Synthetic oligonucleotide

SEQ ID NO: 631665 - DNA, 56 bp, Artificial; identical to SEQ ID NO: 166678
  Synthetic oligonucleotide

SEQ ID NO: 631666 - DNA, 55 bp, Artificial; identical to SEQ ID NO: 234340
  Synthetic oligonucleotide

SEQ ID NO: 631667 - DNA, 50 bp, Artificial; identical to SEQ ID NO: 224047
  Synthetic oligonucleotide

SEQ ID NO: 631668 - DNA, 56 bp, Artificial; identical to SEQ ID NO: 245843
  Synthetic oligonucleotide

SEQ ID NO: 631669 - DNA, 55 bp, Artificial; identical to SEQ ID NO: 166468
  Synthetic oligonucleotide

SEQ ID NO: 631670 - DNA, 60 bp, Artificial; identical to SEQ ID NO: 242206
  Synthetic oligonucleotide

SEQ ID NO: 631671 - DNA, 55 bp, Artificial; identical to SEQ ID NO: 148819
  Synthetic oligonucleotide

SEQ ID NO: 631672 - DNA, 55 bp, Artificial; identical to SEQ ID NO: 159574
  Synthetic oligonucleotide

SEQ ID NO: 631673 - DNA, 55 bp, Artificial; identical to SEQ ID NO: 263368
  Synthetic oligonucleotide

SEQ ID NO: 631674 - DNA, 55 bp, Artificial; identical to SEQ ID NO: 191789
  Synthetic oligonucleotide

SEQ ID NO: 631675 - DNA, 55 bp, Artificial; identical to SEQ ID NO: 188885
  Synthetic oligonucleotide

SEQ ID NO: 631676 - DNA, 55 bp, Artificial; identical to SEQ ID NO: 183281
  Synthetic oligonucleotide

SEQ ID NO: 631677 - DNA, 55 bp, Artificial; identical to SEQ ID NO: 256862
  Synthetic oligonucleotide

SEQ ID NO: 631678 - DNA, 55 bp, Artificial; identical to SEQ ID NO: 209444
  Synthetic oligonucleotide

SEQ ID NO: 631679 - DNA, 55 bp, Artificial; identical to SEQ ID NO: 160033
  Synthetic oligonucleotide

SEQ ID NO: 631680 - DNA, 55 bp, Artificial; identical to SEQ ID NO: 168302
  Synthetic oligonucleotide

SEQ ID NO: 631681 - DNA, 55 bp, Artificial; identical to SEQ ID NO: 159577
  Synthetic oligonucleotide

SEQ ID NO: 631682 - DNA, 55 bp, Artificial; identical to SEQ ID NO: 142461
  Synthetic oligonucleotide

SEQ ID NO: 631683 - DNA, 52 bp, Artificial; identical to SEQ ID NO: 185996
  Synthetic oligonucleotide

SEQ ID NO: 631684 - DNA, 53 bp, Artificial; identical to SEQ ID NO: 159578
  Synthetic oligonucleotide

SEQ ID NO: 631685 - DNA, 55 bp, Artificial; identical to SEQ ID NO: 191787
  Synthetic oligonucleotide

SEQ ID NO: 631686 - DNA, 55 bp, Artificial; identical to SEQ ID NO: 152267
  Synthetic oligonucleotide

SEQ ID NO: 631687 - DNA, 50 bp, Artificial; identical to SEQ ID NO: 203034
  Synthetic oligonucleotide

SEQ ID NO: 631688 - DNA, 55 bp, Artificial; identical to SEQ ID NO: 256861
  Synthetic oligonucleotide

SEQ ID NO: 631689 - DNA, 55 bp, Artificial; identical to SEQ ID NO: 174429
  Synthetic oligonucleotide

SEQ ID NO: 631690 - DNA, 55 bp, Artificial; identical to SEQ ID NO: 183275
  Synthetic oligonucleotide

SEQ ID NO: 631691 - DNA, 55 bp, Artificial; identical to SEQ ID NO: 199388
  Synthetic oligonucleotide

SEQ ID NO: 631692 - DNA, 50 bp, Artificial; identical to SEQ ID NO: 165640
  Synthetic oligonucleotide

SEQ ID NO: 631693 - DNA, 55 bp, Artificial; identical to SEQ ID NO: 167470
  Synthetic oligonucleotide

SEQ ID NO: 631694 - DNA, 55 bp, Artificial; identical to SEQ ID NO: 245695
  Synthetic oligonucleotide

SEQ ID NO: 631695 - DNA, 59 bp, Artificial; identical to SEQ ID NO: 167251
  Synthetic oligonucleotide

SEQ ID NO: 631696 - DNA, 56 bp, Artificial; identical to SEQ ID NO: 262728
  Synthetic oligonucleotide

SEQ ID NO: 631697 - DNA, 55 bp, Artificial; identical to SEQ ID NO: 188884
  Synthetic oligonucleotide

SEQ ID NO: 631698 - DNA, 55 bp, Artificial; identical to SEQ ID NO: 199385
  Synthetic oligonucleotide

SEQ ID NO: 631699 - DNA, 53 bp, Artificial; identical to SEQ ID NO: 241903
  Synthetic oligonucleotide

SEQ ID NO: 631700 - DNA, 57 bp, Artificial; identical to SEQ ID NO: 200927
  Synthetic oligonucleotide

SEQ ID NO: 631701 - DNA, 56 bp, Artificial; identical to SEQ ID NO: 257512
  Synthetic oligonucleotide

SEQ ID NO: 631702 - DNA, 55 bp, Artificial; identical to SEQ ID NO: 256859
  Synthetic oligonucleotide

SEQ ID NO: 631703 - DNA, 55 bp, Artificial; identical to SEQ ID NO: 221273
  Synthetic oligonucleotide

SEQ ID NO: 631704 - DNA, 55 bp, Artificial; identical to SEQ ID NO: 233676
  Synthetic oligonucleotide

SEQ ID NO: 631705 - DNA, 57 bp, Artificial; identical to SEQ ID NO: 224161
  Synthetic oligonucleotide

SEQ ID NO: 631706 - DNA, 60 bp, Artificial; identical to SEQ ID NO: 203238
  Synthetic oligonucleotide

SEQ ID NO: 631707 - DNA, 55 bp, Artificial; identical to SEQ ID NO: 153095
  Synthetic oligonucleotide

SEQ ID NO: 631708 - DNA, 53 bp, Artificial; identical to SEQ ID NO: 201804
  Synthetic oligonucleotide

SEQ ID NO: 631709 - DNA, 55 bp, Artificial; identical to SEQ ID NO: 148816
  Synthetic oligonucleotide

SEQ ID NO: 631710 - DNA, 55 bp, Artificial; identical to SEQ ID NO: 151451
  Synthetic oligonucleotide

SEQ ID NO: 631711 - DNA, 59 bp, Artificial; identical to SEQ ID NO: 159687
  Synthetic oligonucleotide

SEQ ID NO: 631712 - DNA, 55 bp, Artificial; identical to SEQ ID NO: 190268
  Synthetic oligonucleotide

SEQ ID NO: 631713 - DNA, 54 bp, Artificial; identical to SEQ ID NO: 150564
  Synthetic oligonucleotide

SEQ ID NO: 631714 - DNA, 55 bp, Artificial; identical to SEQ ID NO: 160032
  Synthetic oligonucleotide

SEQ ID NO: 631715 - DNA, 55 bp, Artificial; identical to SEQ ID NO: 187901
  Synthetic oligonucleotide

SEQ ID NO: 631716 - DNA, 50 bp, Artificial; identical to SEQ ID NO: 176342
  Synthetic oligonucleotide

SEQ ID NO: 631717 - DNA, 55 bp, Artificial; identical to SEQ ID NO: 167474
  Synthetic oligonucleotide

SEQ ID NO: 631718 - DNA, 55 bp, Artificial; identical to SEQ ID NO: 166464
  Synthetic oligonucleotide

SEQ ID NO: 631719 - DNA, 52 bp, Artificial; identical to SEQ ID NO: 207587
  Synthetic oligonucleotide

SEQ ID NO: 631720 - DNA, 53 bp, Artificial; identical to SEQ ID NO: 237979
  Synthetic oligonucleotide

SEQ ID NO: 631721 - DNA, 51 bp, Artificial; identical to SEQ ID NO: 157873
  Synthetic oligonucleotide

SEQ ID NO: 631722 - DNA, 55 bp, Artificial; identical to SEQ ID NO: 144402
  Synthetic oligonucleotide

SEQ ID NO: 631723 - DNA, 58 bp, Artificial; identical to SEQ ID NO: 159675
  Synthetic oligonucleotide

SEQ ID NO: 631724 - DNA, 55 bp, Artificial; identical to SEQ ID NO: 146602
  Synthetic oligonucleotide

SEQ ID NO: 631725 - DNA, 60 bp, Artificial; identical to SEQ ID NO: 153029
  Synthetic oligonucleotide

SEQ ID NO: 631726 - DNA, 55 bp, Artificial; identical to SEQ ID NO: 242712
  Synthetic oligonucleotide

SEQ ID NO: 631727 - DNA, 55 bp, Artificial; identical to SEQ ID NO: 148814
  Synthetic oligonucleotide

SEQ ID NO: 631728 - DNA, 55 bp, Artificial; identical to SEQ ID NO: 174433
  Synthetic oligonucleotide

SEQ ID NO: 631729 - DNA, 53 bp, Artificial; identical to SEQ ID NO: 149344
  Synthetic oligonucleotide

SEQ ID NO: 631730 - DNA, 55 bp, Artificial; identical to SEQ ID NO: 233677
  Synthetic oligonucleotide

SEQ ID NO: 631731 - DNA, 55 bp, Artificial; identical to SEQ ID NO: 248776
  Synthetic oligonucleotide

SEQ ID NO: 631732 - DNA, 55 bp, Artificial; identical to SEQ ID NO: 238233
  Synthetic oligonucleotide

SEQ ID NO: 631733 - DNA, 55 bp, Artificial; identical to SEQ ID NO: 187902
  Synthetic oligonucleotide

SEQ ID NO: 631734 - DNA, 57 bp, Artificial; identical to SEQ ID NO: 171068
  Synthetic oligonucleotide

SEQ ID NO: 631735 - DNA, 55 bp, Artificial; identical to SEQ ID NO: 257119
  Synthetic oligonucleotide

SEQ ID NO: 631736 - DNA, 56 bp, Artificial; identical to SEQ ID NO: 247603
  Synthetic oligonucleotide

SEQ ID NO: 631737 - DNA, 54 bp, Artificial; identical to SEQ ID NO: 183234
  Synthetic oligonucleotide

SEQ ID NO: 631738 - DNA, 55 bp, Artificial; identical to SEQ ID NO: 199379
  Synthetic oligonucleotide

SEQ ID NO: 631739 - DNA, 55 bp, Artificial; identical to SEQ ID NO: 201802
  Synthetic oligonucleotide

SEQ ID NO: 631740 - DNA, 55 bp, Artificial; identical to SEQ ID NO: 210915
  Synthetic oligonucleotide

SEQ ID NO: 631741 - DNA, 55 bp, Artificial; identical to SEQ ID NO: 197078
  Synthetic oligonucleotide

SEQ ID NO: 631742 - DNA, 50 bp, Artificial; identical to SEQ ID NO: 158307
  Synthetic oligonucleotide

SEQ ID NO: 631743 - DNA, 55 bp, Artificial; identical to SEQ ID NO: 248777
  Synthetic oligonucleotide

SEQ ID NO: 631744 - DNA, 54 bp, Artificial; identical to SEQ ID NO: 142469
  Synthetic oligonucleotide

SEQ ID NO: 631745 - DNA, 55 bp, Artificial; identical to SEQ ID NO: 171260
  Synthetic oligonucleotide

SEQ ID NO: 631746 - DNA, 55 bp, Artificial; identical to SEQ ID NO: 205296
  Synthetic oligonucleotide

SEQ ID NO: 631747 - DNA, 53 bp, Artificial; identical to SEQ ID NO: 154315
  Synthetic oligonucleotide

SEQ ID NO: 631748 - DNA, 60 bp, Artificial; identical to SEQ ID NO: 243274
  Synthetic oligonucleotide

SEQ ID NO: 631749 - DNA, 57 bp, Artificial; identical to SEQ ID NO: 241900
  Synthetic oligonucleotide

SEQ ID NO: 631750 - DNA, 55 bp, Artificial; identical to SEQ ID NO: 256857
  Synthetic oligonucleotide

SEQ ID NO: 631751 - DNA, 53 bp, Artificial; identical to SEQ ID NO: 248781
  Synthetic oligonucleotide

SEQ ID NO: 631752 - DNA, 51 bp, Artificial; identical to SEQ ID NO: 223794
  Synthetic oligonucleotide

SEQ ID NO: 631753 - DNA, 55 bp, Artificial; identical to SEQ ID NO: 221274
  Synthetic oligonucleotide

SEQ ID NO: 631754 - DNA, 55 bp, Artificial; identical to SEQ ID NO: 233678
  Synthetic oligonucleotide

SEQ ID NO: 631755 - DNA, 53 bp, Artificial; identical to SEQ ID NO: 193196
  Synthetic oligonucleotide

SEQ ID NO: 631756 - DNA, 55 bp, Artificial; identical to SEQ ID NO: 252899
  Synthetic oligonucleotide

SEQ ID NO: 631757 - DNA, 55 bp, Artificial; identical to SEQ ID NO: 194388
  Synthetic oligonucleotide

SEQ ID NO: 631758 - DNA, 54 bp, Artificial; identical to SEQ ID NO: 141218
  Synthetic oligonucleotide

SEQ ID NO: 631759 - DNA, 55 bp, Artificial; identical to SEQ ID NO: 148868
  Synthetic oligonucleotide

SEQ ID NO: 631760 - DNA, 50 bp, Artificial; identical to SEQ ID NO: 189311
  Synthetic oligonucleotide

SEQ ID NO: 631761 - DNA, 55 bp, Artificial; identical to SEQ ID NO: 242714
  Synthetic oligonucleotide

SEQ ID NO: 631762 - DNA, 60 bp, Artificial; identical to SEQ ID NO: 209261
  Synthetic oligonucleotide

SEQ ID NO: 631763 - DNA, 52 bp, Artificial; identical to SEQ ID NO: 201800
  Synthetic oligonucleotide

SEQ ID NO: 631764 - DNA, 55 bp, Artificial; identical to SEQ ID NO: 148866
  Synthetic oligonucleotide

SEQ ID NO: 631765 - DNA, 54 bp, Artificial; identical to SEQ ID NO: 246147
  Synthetic oligonucleotide

SEQ ID NO: 631766 - DNA, 58 bp, Artificial; identical to SEQ ID NO: 248088
  Synthetic oligonucleotide

SEQ ID NO: 631767 - DNA, 55 bp, Artificial; identical to SEQ ID NO: 257627
  Synthetic oligonucleotide

SEQ ID NO: 631768 - DNA, 55 bp, Artificial; identical to SEQ ID NO: 162199
  Synthetic oligonucleotide

SEQ ID NO: 631769 - DNA, 55 bp, Artificial; identical to SEQ ID NO: 190271
  Synthetic oligonucleotide

SEQ ID NO: 631770 - DNA, 55 bp, Artificial; identical to SEQ ID NO: 171261
  Synthetic oligonucleotide

SEQ ID NO: 631771 - DNA, 52 bp, Artificial; identical to SEQ ID NO: 205714
  Synthetic oligonucleotide

SEQ ID NO: 631772 - DNA, 55 bp, Artificial; identical to SEQ ID NO: 159585
  Synthetic oligonucleotide

SEQ ID NO: 631773 - DNA, 60 bp, Artificial; identical to SEQ ID NO: 150562
  Synthetic oligonucleotide

SEQ ID NO: 631774 - DNA, 55 bp, Artificial; identical to SEQ ID NO: 166460
  Synthetic oligonucleotide

SEQ ID NO: 631775 - DNA, 51 bp, Artificial; identical to SEQ ID NO: 218152
  Synthetic oligonucleotide

SEQ ID NO: 631776 - DNA, 60 bp, Artificial; identical to SEQ ID NO: 141696
  Synthetic oligonucleotide

SEQ ID NO: 631777 - DNA, 60 bp, Artificial; identical to SEQ ID NO: 248099
  Synthetic oligonucleotide

SEQ ID NO: 631778 - DNA, 55 bp, Artificial; identical to SEQ ID NO: 256855
  Synthetic oligonucleotide

SEQ ID NO: 631779 - DNA, 55 bp, Artificial; identical to SEQ ID NO: 142472
  Synthetic oligonucleotide

SEQ ID NO: 631780 - DNA, 55 bp, Artificial; identical to SEQ ID NO: 148864
  Synthetic oligonucleotide

SEQ ID NO: 631781 - DNA, 55 bp, Artificial; identical to SEQ ID NO: 183248
  Synthetic oligonucleotide

SEQ ID NO: 631782 - DNA, 55 bp, Artificial; identical to SEQ ID NO: 166459
  Synthetic oligonucleotide

SEQ ID NO: 631783 - DNA, 60 bp, Artificial; identical to SEQ ID NO: 248110
  Synthetic oligonucleotide

SEQ ID NO: 631784 - DNA, 55 bp, Artificial; identical to SEQ ID NO: 221275
  Synthetic oligonucleotide

SEQ ID NO: 631785 - DNA, 59 bp, Artificial; identical to SEQ ID NO: 207001
  Synthetic oligonucleotide

SEQ ID NO: 631786 - DNA, 58 bp, Artificial; identical to SEQ ID NO: 243285
  Synthetic oligonucleotide

SEQ ID NO: 631787 - DNA, 55 bp, Artificial; identical to SEQ ID NO: 199298
  Synthetic oligonucleotide

SEQ ID NO: 631788 - DNA, 55 bp, Artificial; identical to SEQ ID NO: 183246
  Synthetic oligonucleotide

SEQ ID NO: 631789 - DNA, 55 bp, Artificial; identical to SEQ ID NO: 174431
  Synthetic oligonucleotide

SEQ ID NO: 631790 - DNA, 55 bp, Artificial; identical to SEQ ID NO: 155736
  Synthetic oligonucleotide

SEQ ID NO: 631791 - DNA, 60 bp, Artificial; identical to SEQ ID NO: 256306
  Synthetic oligonucleotide

SEQ ID NO: 631792 - DNA, 53 bp, Artificial; identical to SEQ ID NO: 150561
  Synthetic oligonucleotide

SEQ ID NO: 631793 - DNA, 55 bp, Artificial; identical to SEQ ID NO: 238213
  Synthetic oligonucleotide

SEQ ID NO: 631794 - DNA, 55 bp, Artificial; identical to SEQ ID NO: 172931
  Synthetic oligonucleotide

SEQ ID NO: 631795 - DNA, 54 bp, Artificial; identical to SEQ ID NO: 248743
  Synthetic oligonucleotide

SEQ ID NO: 631796 - DNA, 55 bp, Artificial; identical to SEQ ID NO: 265869
  Synthetic oligonucleotide

SEQ ID NO: 631797 - DNA, 55 bp, Artificial; identical to SEQ ID NO: 187903
  Synthetic oligonucleotide

SEQ ID NO: 631798 - DNA, 60 bp, Artificial; identical to SEQ ID NO: 252680
  Synthetic oligonucleotide

SEQ ID NO: 631799 - DNA, 50 bp, Artificial; identical to SEQ ID NO: 152247
  Synthetic oligonucleotide

SEQ ID NO: 631800 - DNA, 53 bp, Artificial; identical to SEQ ID NO: 185472
  Synthetic oligonucleotide

SEQ ID NO: 631801 - DNA, 52 bp, Artificial; identical to SEQ ID NO: 165064
  Synthetic oligonucleotide

SEQ ID NO: 631802 - DNA, 50 bp, Artificial; identical to SEQ ID NO: 200211
  Synthetic oligonucleotide

SEQ ID NO: 631803 - DNA, 50 bp, Artificial; identical to SEQ ID NO: 146536
  Synthetic oligonucleotide

SEQ ID NO: 631804 - DNA, 60 bp, Artificial; identical to SEQ ID NO: 153026
  Synthetic oligonucleotide

SEQ ID NO: 631805 - DNA, 55 bp, Artificial; identical to SEQ ID NO: 245689
  Synthetic oligonucleotide

SEQ ID NO: 631806 - DNA, 55 bp, Artificial; identical to SEQ ID NO: 142474
  Synthetic oligonucleotide

SEQ ID NO: 631807 - DNA, 55 bp, Artificial; identical to SEQ ID NO: 153091
  Synthetic oligonucleotide

SEQ ID NO: 631808 - DNA, 55 bp, Artificial; identical to SEQ ID NO: 174410
  Synthetic oligonucleotide

SEQ ID NO: 631809 - DNA, 52 bp, Artificial; identical to SEQ ID NO: 247953
  Synthetic oligonucleotide

SEQ ID NO: 631810 - DNA, 55 bp, Artificial; identical to SEQ ID NO: 183237
  Synthetic oligonucleotide

SEQ ID NO: 631811 - DNA, 58 bp, Artificial; identical to SEQ ID NO: 187162
  Synthetic oligonucleotide

SEQ ID NO: 631812 - DNA, 54 bp, Artificial; identical to SEQ ID NO: 150559
  Synthetic oligonucleotide

SEQ ID NO: 631813 - DNA, 55 bp, Artificial; identical to SEQ ID NO: 166457
  Synthetic oligonucleotide

SEQ ID NO: 631814 - DNA, 55 bp, Artificial; identical to SEQ ID NO: 154316
  Synthetic oligonucleotide

SEQ ID NO: 631815 - DNA, 53 bp, Artificial; identical to SEQ ID NO: 247553
  Synthetic oligonucleotide

SEQ ID NO: 631816 - DNA, 55 bp, Artificial; identical to SEQ ID NO: 159637
  Synthetic oligonucleotide

SEQ ID NO: 631817 - DNA, 55 bp, Artificial; identical to SEQ ID NO: 160030
  Synthetic oligonucleotide

SEQ ID NO: 631818 - DNA, 55 bp, Artificial; identical to SEQ ID NO: 234018
  Synthetic oligonucleotide

SEQ ID NO: 631819 - DNA, 55 bp, Artificial; identical to SEQ ID NO: 190273
  Synthetic oligonucleotide

SEQ ID NO: 631820 - DNA, 60 bp, Artificial; identical to SEQ ID NO: 243296
  Synthetic oligonucleotide

SEQ ID NO: 631821 - DNA, 55 bp, Artificial; identical to SEQ ID NO: 212560
  Synthetic oligonucleotide

SEQ ID NO: 631822 - DNA, 57 bp, Artificial; identical to SEQ ID NO: 248121
  Synthetic oligonucleotide

SEQ ID NO: 631823 - DNA, 55 bp, Artificial; identical to SEQ ID NO: 203423
  Synthetic oligonucleotide

SEQ ID NO: 631824 - DNA, 53 bp, Artificial; identical to SEQ ID NO: 155539
  Synthetic oligonucleotide

SEQ ID NO: 631825 - DNA, 55 bp, Artificial; identical to SEQ ID NO: 208254
  Synthetic oligonucleotide

SEQ ID NO: 631826 - DNA, 60 bp, Artificial; identical to SEQ ID NO: 191119
  Synthetic oligonucleotide

SEQ ID NO: 631827 - DNA, 55 bp, Artificial; identical to SEQ ID NO: 154317
  Synthetic oligonucleotide

SEQ ID NO: 631828 - DNA, 59 bp, Artificial; identical to SEQ ID NO: 256497
  Synthetic oligonucleotide

SEQ ID NO: 631829 - DNA, 60 bp, Artificial; identical to SEQ ID NO: 208518
  Synthetic oligonucleotide

SEQ ID NO: 631830 - DNA, 51 bp, Artificial; identical to SEQ ID NO: 167353
  Synthetic oligonucleotide

SEQ ID NO: 631831 - DNA, 55 bp, Artificial; identical to SEQ ID NO: 159639
  Synthetic oligonucleotide

SEQ ID NO: 631832 - DNA, 55 bp, Artificial; identical to SEQ ID NO: 221277
  Synthetic oligonucleotide

SEQ ID NO: 631833 - DNA, 55 bp, Artificial; identical to SEQ ID NO: 183341
  Synthetic oligonucleotide

SEQ ID NO: 631834 - DNA, 55 bp, Artificial; identical to SEQ ID NO: 217918
  Synthetic oligonucleotide

SEQ ID NO: 631835 - DNA, 55 bp, Artificial; identical to SEQ ID NO: 153090
  Synthetic oligonucleotide

SEQ ID NO: 631836 - DNA, 55 bp, Artificial; identical to SEQ ID NO: 201795
  Synthetic oligonucleotide

SEQ ID NO: 631837 - DNA, 54 bp, Artificial; identical to SEQ ID NO: 239255
  Synthetic oligonucleotide

SEQ ID NO: 631838 - DNA, 55 bp, Artificial; identical to SEQ ID NO: 203091
  Synthetic oligonucleotide

SEQ ID NO: 631839 - DNA, 53 bp, Artificial; identical to SEQ ID NO: 157427
  Synthetic oligonucleotide

SEQ ID NO: 631840 - DNA, 55 bp, Artificial; identical to SEQ ID NO: 159641
  Synthetic oligonucleotide

SEQ ID NO: 631841 - DNA, 55 bp, Artificial; identical to SEQ ID NO: 153089
  Synthetic oligonucleotide

SEQ ID NO: 631842 - DNA, 55 bp, Artificial; identical to SEQ ID NO: 252901
  Synthetic oligonucleotide

SEQ ID NO: 631843 - DNA, 55 bp, Artificial; identical to SEQ ID NO: 166454
  Synthetic oligonucleotide

SEQ ID NO: 631844 - DNA, 60 bp, Artificial; identical to SEQ ID NO: 209372
  Synthetic oligonucleotide

SEQ ID NO: 631845 - DNA, 55 bp, Artificial; identical to SEQ ID NO: 188883
  Synthetic oligonucleotide

SEQ ID NO: 631846 - DNA, 59 bp, Artificial; identical to SEQ ID NO: 187104
  Synthetic oligonucleotide

SEQ ID NO: 631847 - DNA, 54 bp, Artificial; identical to SEQ ID NO: 238206
  Synthetic oligonucleotide

SEQ ID NO: 631848 - DNA, 51 bp, Artificial; identical to SEQ ID NO: 212379
  Synthetic oligonucleotide

SEQ ID NO: 631849 - DNA, 54 bp, Artificial; identical to SEQ ID NO: 168849
  Synthetic oligonucleotide

SEQ ID NO: 631850 - DNA, 57 bp, Artificial; identical to SEQ ID NO: 201181
  Synthetic oligonucleotide

SEQ ID NO: 631851 - DNA, 60 bp, Artificial; identical to SEQ ID NO: 177687
  Synthetic oligonucleotide

SEQ ID NO: 631852 - DNA, 50 bp, Artificial; identical to SEQ ID NO: 191247
  Synthetic oligonucleotide

SEQ ID NO: 631853 - DNA, 55 bp, Artificial; identical to SEQ ID NO: 159644
  Synthetic oligonucleotide

SEQ ID NO: 631854 - DNA, 55 bp, Artificial; identical to SEQ ID NO: 245680
  Synthetic oligonucleotide

SEQ ID NO: 631855 - DNA, 60 bp, Artificial; identical to SEQ ID NO: 200904
  Synthetic oligonucleotide

SEQ ID NO: 631856 - DNA, 59 bp, Artificial; identical to SEQ ID NO: 202667
  Synthetic oligonucleotide

SEQ ID NO: 631857 - DNA, 55 bp, Artificial; identical to SEQ ID NO: 220576
  Synthetic oligonucleotide

SEQ ID NO: 631858 - DNA, 55 bp, Artificial; identical to SEQ ID NO: 256916
  Synthetic oligonucleotide

SEQ ID NO: 631859 - DNA, 55 bp, Artificial; identical to SEQ ID NO: 257630
  Synthetic oligonucleotide

SEQ ID NO: 631860 - DNA, 51 bp, Artificial; identical to SEQ ID NO: 186744
  Synthetic oligonucleotide

SEQ ID NO: 631861 - DNA, 55 bp, Artificial; identical to SEQ ID NO: 160029
  Synthetic oligonucleotide

SEQ ID NO: 631862 - DNA, 52 bp, Artificial; identical to SEQ ID NO: 145036
  Synthetic oligonucleotide

SEQ ID NO: 631863 - DNA, 55 bp, Artificial; identical to SEQ ID NO: 225156
  Synthetic oligonucleotide

SEQ ID NO: 631864 - DNA, 56 bp, Artificial; identical to SEQ ID NO: 147303
  Synthetic oligonucleotide

SEQ ID NO: 631865 - DNA, 55 bp, Artificial; identical to SEQ ID NO: 151372
  Synthetic oligonucleotide

SEQ ID NO: 631866 - DNA, 55 bp, Artificial; identical to SEQ ID NO: 148861
  Synthetic oligonucleotide

SEQ ID NO: 631867 - DNA, 55 bp, Artificial; identical to SEQ ID NO: 248749
  Synthetic oligonucleotide

SEQ ID NO: 631868 - DNA, 55 bp, Artificial; identical to SEQ ID NO: 240460
  Synthetic oligonucleotide

SEQ ID NO: 631869 - DNA, 55 bp, Artificial; identical to SEQ ID NO: 171263
  Synthetic oligonucleotide

SEQ ID NO: 631870 - DNA, 53 bp, Artificial; identical to SEQ ID NO: 234448
  Synthetic oligonucleotide

SEQ ID NO: 631871 - DNA, 51 bp, Artificial; identical to SEQ ID NO: 252728
  Synthetic oligonucleotide

SEQ ID NO: 631872 - DNA, 52 bp, Artificial; identical to SEQ ID NO: 167029
  Synthetic oligonucleotide

SEQ ID NO: 631873 - DNA, 55 bp, Artificial; identical to SEQ ID NO: 162200
  Synthetic oligonucleotide

SEQ ID NO: 631874 - DNA, 55 bp, Artificial; identical to SEQ ID NO: 261827
  Synthetic oligonucleotide

SEQ ID NO: 631875 - DNA, 55 bp, Artificial; identical to SEQ ID NO: 161697
  Synthetic oligonucleotide

SEQ ID NO: 631876 - DNA, 55 bp, Artificial; identical to SEQ ID NO: 257632
  Synthetic oligonucleotide

SEQ ID NO: 631877 - DNA, 51 bp, Artificial; identical to SEQ ID NO: 246598
  Synthetic oligonucleotide

SEQ ID NO: 631878 - DNA, 50 bp, Artificial; identical to SEQ ID NO: 203033
  Synthetic oligonucleotide

SEQ ID NO: 631879 - DNA, 54 bp, Artificial; identical to SEQ ID NO: 255233
  Synthetic oligonucleotide

SEQ ID NO: 631880 - DNA, 55 bp, Artificial; identical to SEQ ID NO: 256914
  Synthetic oligonucleotide

SEQ ID NO: 631881 - DNA, 55 bp, Artificial; identical to SEQ ID NO: 172932
  Synthetic oligonucleotide

SEQ ID NO: 631882 - DNA, 55 bp, Artificial; identical to SEQ ID NO: 224678
  Synthetic oligonucleotide

SEQ ID NO: 631883 - DNA, 60 bp, Artificial; identical to SEQ ID NO: 222696
  Synthetic oligonucleotide

SEQ ID NO: 631884 - DNA, 55 bp, Artificial; identical to SEQ ID NO: 148858
  Synthetic oligonucleotide

SEQ ID NO: 631885 - DNA, 55 bp, Artificial; identical to SEQ ID NO: 169737
  Synthetic oligonucleotide

SEQ ID NO: 631886 - DNA, 58 bp, Artificial; identical to SEQ ID NO: 168160
  Synthetic oligonucleotide

SEQ ID NO: 631887 - DNA, 55 bp, Artificial; identical to SEQ ID NO: 166452
  Synthetic oligonucleotide

SEQ ID NO: 631888 - DNA, 55 bp, Artificial; identical to SEQ ID NO: 224679
  Synthetic oligonucleotide

SEQ ID NO: 631889 - DNA, 55 bp, Artificial; identical to SEQ ID NO: 148857
  Synthetic oligonucleotide

SEQ ID NO: 631890 - DNA, 55 bp, Artificial; identical to SEQ ID NO: 217940
  Synthetic oligonucleotide

SEQ ID NO: 631891 - DNA, 55 bp, Artificial; identical to SEQ ID NO: 183363
  Synthetic oligonucleotide

SEQ ID NO: 631892 - DNA, 55 bp, Artificial; identical to SEQ ID NO: 199290
  Synthetic oligonucleotide

SEQ ID NO: 631893 - DNA, 55 bp, Artificial; identical to SEQ ID NO: 183358
  Synthetic oligonucleotide

SEQ ID NO: 631894 - DNA, 51 bp, Artificial; identical to SEQ ID NO: 153684
  Synthetic oligonucleotide

SEQ ID NO: 631895 - DNA, 55 bp, Artificial; identical to SEQ ID NO: 220620
  Synthetic oligonucleotide

SEQ ID NO: 631896 - DNA, 55 bp, Artificial; identical to SEQ ID NO: 166451
  Synthetic oligonucleotide

SEQ ID NO: 631897 - DNA, 52 bp, Artificial; identical to SEQ ID NO: 161350
  Synthetic oligonucleotide

SEQ ID NO: 631898 - DNA, 53 bp, Artificial; identical to SEQ ID NO: 246378
  Synthetic oligonucleotide

SEQ ID NO: 631899 - DNA, 55 bp, Artificial; identical to SEQ ID NO: 191782
  Synthetic oligonucleotide

SEQ ID NO: 631900 - DNA, 59 bp, Artificial; identical to SEQ ID NO: 179417
  Synthetic oligonucleotide

SEQ ID NO: 631901 - DNA, 55 bp, Artificial; identical to SEQ ID NO: 248750
  Synthetic oligonucleotide

SEQ ID NO: 631902 - DNA, 55 bp, Artificial; identical to SEQ ID NO: 166450
  Synthetic oligonucleotide

SEQ ID NO: 631903 - DNA, 55 bp, Artificial; identical to SEQ ID NO: 252902
  Synthetic oligonucleotide

SEQ ID NO: 631904 - DNA, 51 bp, Artificial; identical to SEQ ID NO: 157872
  Synthetic oligonucleotide

SEQ ID NO: 631905 - DNA, 55 bp, Artificial; identical to SEQ ID NO: 245727
  Synthetic oligonucleotide

SEQ ID NO: 631906 - DNA, 59 bp, Artificial; identical to SEQ ID NO: 179420
  Synthetic oligonucleotide

SEQ ID NO: 631907 - DNA, 55 bp, Artificial; identical to SEQ ID NO: 256913
  Synthetic oligonucleotide

SEQ ID NO: 631908 - DNA, 51 bp, Artificial; identical to SEQ ID NO: 149912
  Synthetic oligonucleotide

SEQ ID NO: 631909 - DNA, 54 bp, Artificial; identical to SEQ ID NO: 238552
  Synthetic oligonucleotide

SEQ ID NO: 631910 - DNA, 55 bp, Artificial; identical to SEQ ID NO: 183350
  Synthetic oligonucleotide

SEQ ID NO: 631911 - DNA, 51 bp, Artificial; identical to SEQ ID NO: 215230
  Synthetic oligonucleotide

SEQ ID NO: 631912 - DNA, 50 bp, Artificial; identical to SEQ ID NO: 176381
  Synthetic oligonucleotide

SEQ ID NO: 631913 - DNA, 58 bp, Artificial; identical to SEQ ID NO: 166083
  Synthetic oligonucleotide

SEQ ID NO: 631914 - DNA, 52 bp, Artificial; identical to SEQ ID NO: 221736
  Synthetic oligonucleotide

SEQ ID NO: 631915 - DNA, 53 bp, Artificial; identical to SEQ ID NO: 246374
  Synthetic oligonucleotide

SEQ ID NO: 631916 - DNA, 55 bp, Artificial; identical to SEQ ID NO: 256912
  Synthetic oligonucleotide

SEQ ID NO: 631917 - DNA, 54 bp, Artificial; identical to SEQ ID NO: 249622
  Synthetic oligonucleotide

SEQ ID NO: 631918 - DNA, 52 bp, Artificial; identical to SEQ ID NO: 255532
  Synthetic oligonucleotide

SEQ ID NO: 631919 - DNA, 55 bp, Artificial; identical to SEQ ID NO: 199287
  Synthetic oligonucleotide

SEQ ID NO: 631920 - DNA, 55 bp, Artificial; identical to SEQ ID NO: 166449
  Synthetic oligonucleotide

SEQ ID NO: 631921 - DNA, 55 bp, Artificial; identical to SEQ ID NO: 242716
  Synthetic oligonucleotide

SEQ ID NO: 631922 - DNA, 53 bp, Artificial; identical to SEQ ID NO: 237019
  Synthetic oligonucleotide

SEQ ID NO: 631923 - DNA, 55 bp, Artificial; identical to SEQ ID NO: 225155
  Synthetic oligonucleotide

SEQ ID NO: 631924 - DNA, 55 bp, Artificial; identical to SEQ ID NO: 159650
  Synthetic oligonucleotide

SEQ ID NO: 631925 - DNA, 52 bp, Artificial; identical to SEQ ID NO: 216747
  Synthetic oligonucleotide

SEQ ID NO: 631926 - DNA, 55 bp, Artificial; identical to SEQ ID NO: 203431
  Synthetic oligonucleotide

SEQ ID NO: 631927 - DNA, 55 bp, Artificial; identical to SEQ ID NO: 245720
  Synthetic oligonucleotide

SEQ ID NO: 631928 - DNA, 54 bp, Artificial; identical to SEQ ID NO: 157147
  Synthetic oligonucleotide

SEQ ID NO: 631929 - DNA, 50 bp, Artificial; identical to SEQ ID NO: 207930
  Synthetic oligonucleotide

SEQ ID NO: 631930 - DNA, 55 bp, Artificial; identical to SEQ ID NO: 203089
  Synthetic oligonucleotide

SEQ ID NO: 631931 - DNA, 55 bp, Artificial; identical to SEQ ID NO: 159651
  Synthetic oligonucleotide

SEQ ID NO: 631932 - DNA, 55 bp, Artificial; identical to SEQ ID NO: 256910
  Synthetic oligonucleotide

SEQ ID NO: 631933 - DNA, 55 bp, Artificial; identical to SEQ ID NO: 151371
  Synthetic oligonucleotide

SEQ ID NO: 631934 - DNA, 54 bp, Artificial; identical to SEQ ID NO: 205271
  Synthetic oligonucleotide

SEQ ID NO: 631935 - DNA, 55 bp, Artificial; identical to SEQ ID NO: 166448
  Synthetic oligonucleotide

SEQ ID NO: 631936 - DNA, 55 bp, Artificial; identical to SEQ ID NO: 221070
  Synthetic oligonucleotide

SEQ ID NO: 631937 - DNA, 55 bp, Artificial; identical to SEQ ID NO: 189483
  Synthetic oligonucleotide

SEQ ID NO: 631938 - DNA, 55 bp, Artificial; identical to SEQ ID NO: 154321
  Synthetic oligonucleotide

SEQ ID NO: 631939 - DNA, 54 bp, Artificial; identical to SEQ ID NO: 201356
  Synthetic oligonucleotide

SEQ ID NO: 631940 - DNA, 52 bp, Artificial; identical to SEQ ID NO: 245898
  Synthetic oligonucleotide

SEQ ID NO: 631941 - DNA, 55 bp, Artificial; identical to SEQ ID NO: 240463
  Synthetic oligonucleotide

SEQ ID NO: 631942 - DNA, 55 bp, Artificial; identical to SEQ ID NO: 233684
  Synthetic oligonucleotide

SEQ ID NO: 631943 - DNA, 55 bp, Artificial; identical to SEQ ID NO: 152589
  Synthetic oligonucleotide

SEQ ID NO: 631944 - DNA, 55 bp, Artificial; identical to SEQ ID NO: 159655
  Synthetic oligonucleotide

SEQ ID NO: 631945 - DNA, 55 bp, Artificial; identical to SEQ ID NO: 168310
  Synthetic oligonucleotide

SEQ ID NO: 631946 - DNA, 52 bp, Artificial; identical to SEQ ID NO: 165144
  Synthetic oligonucleotide

SEQ ID NO: 631947 - DNA, 52 bp, Artificial; identical to SEQ ID NO: 245910
  Synthetic oligonucleotide

SEQ ID NO: 631948 - DNA, 55 bp, Artificial; identical to SEQ ID NO: 154326
  Synthetic oligonucleotide

SEQ ID NO: 631949 - DNA, 57 bp, Artificial; identical to SEQ ID NO: 197370
  Synthetic oligonucleotide

SEQ ID NO: 631950 - DNA, 60 bp, Artificial; identical to SEQ ID NO: 174913
  Synthetic oligonucleotide

SEQ ID NO: 631951 - DNA, 55 bp, Artificial; identical to SEQ ID NO: 218897
  Synthetic oligonucleotide

SEQ ID NO: 631952 - DNA, 55 bp, Artificial; identical to SEQ ID NO: 253728
  Synthetic oligonucleotide

SEQ ID NO: 631953 - DNA, 55 bp, Artificial; identical to SEQ ID NO: 191087
  Synthetic oligonucleotide

SEQ ID NO: 631954 - DNA, 55 bp, Artificial; identical to SEQ ID NO: 239547
  Synthetic oligonucleotide

SEQ ID NO: 631955 - DNA, 60 bp, Artificial; identical to SEQ ID NO: 150555
  Synthetic oligonucleotide

SEQ ID NO: 631956 - DNA, 55 bp, Artificial; identical to SEQ ID NO: 193192
  Synthetic oligonucleotide

SEQ ID NO: 631957 - DNA, 57 bp, Artificial; identical to SEQ ID NO: 194129
  Synthetic oligonucleotide

SEQ ID NO: 631958 - DNA, 55 bp, Artificial; identical to SEQ ID NO: 159656
  Synthetic oligonucleotide

SEQ ID NO: 631959 - DNA, 60 bp, Artificial; identical to SEQ ID NO: 241892
  Synthetic oligonucleotide

SEQ ID NO: 631960 - DNA, 57 bp, Artificial; identical to SEQ ID NO: 243329
  Synthetic oligonucleotide

SEQ ID NO: 631961 - DNA, 55 bp, Artificial; identical to SEQ ID NO: 183306
  Synthetic oligonucleotide

SEQ ID NO: 631962 - DNA, 60 bp, Artificial; identical to SEQ ID NO: 150554
  Synthetic oligonucleotide

SEQ ID NO: 631963 - DNA, 55 bp, Artificial; identical to SEQ ID NO: 242717
  Synthetic oligonucleotide

SEQ ID NO: 631964 - DNA, 55 bp, Artificial; identical to SEQ ID NO: 245717
  Synthetic oligonucleotide

SEQ ID NO: 631965 - DNA, 55 bp, Artificial; identical to SEQ ID NO: 183307
  Synthetic oligonucleotide

SEQ ID NO: 631966 - DNA, 55 bp, Artificial; identical to SEQ ID NO: 183308
  Synthetic oligonucleotide

SEQ ID NO: 631967 - DNA, 54 bp, Artificial; identical to SEQ ID NO: 240683
  Synthetic oligonucleotide

SEQ ID NO: 631968 - DNA, 58 bp, Artificial; identical to SEQ ID NO: 150553
  Synthetic oligonucleotide

SEQ ID NO: 631969 - DNA, 51 bp, Artificial; identical to SEQ ID NO: 141359
  Synthetic oligonucleotide

SEQ ID NO: 631970 - DNA, 55 bp, Artificial; identical to SEQ ID NO: 221071
  Synthetic oligonucleotide

SEQ ID NO: 631971 - DNA, 55 bp, Artificial; identical to SEQ ID NO: 166383
  Synthetic oligonucleotide

SEQ ID NO: 631972 - DNA, 57 bp, Artificial; identical to SEQ ID NO: 241889
  Synthetic oligonucleotide

SEQ ID NO: 631973 - DNA, 57 bp, Artificial; identical to SEQ ID NO: 187365
  Synthetic oligonucleotide

SEQ ID NO: 631974 - DNA, 56 bp, Artificial; identical to SEQ ID NO: 200882
  Synthetic oligonucleotide

SEQ ID NO: 631975 - DNA, 60 bp, Artificial; identical to SEQ ID NO: 243341
  Synthetic oligonucleotide

SEQ ID NO: 631976 - DNA, 52 bp, Artificial; identical to SEQ ID NO: 170151
  Synthetic oligonucleotide

SEQ ID NO: 631977 - DNA, 56 bp, Artificial; identical to SEQ ID NO: 177675
  Synthetic oligonucleotide

SEQ ID NO: 631978 - DNA, 55 bp, Artificial; identical to SEQ ID NO: 224682
  Synthetic oligonucleotide

SEQ ID NO: 631979 - DNA, 55 bp, Artificial; identical to SEQ ID NO: 245716
  Synthetic oligonucleotide

SEQ ID NO: 631980 - DNA, 55 bp, Artificial; identical to SEQ ID NO: 208260
  Synthetic oligonucleotide

SEQ ID NO: 631981 - DNA, 55 bp, Artificial; identical to SEQ ID NO: 190232
  Synthetic oligonucleotide

SEQ ID NO: 631982 - DNA, 54 bp, Artificial; identical to SEQ ID NO: 194391
  Synthetic oligonucleotide

SEQ ID NO: 631983 - DNA, 51 bp, Artificial; identical to SEQ ID NO: 245932
  Synthetic oligonucleotide

SEQ ID NO: 631984 - DNA, 60 bp, Artificial; identical to SEQ ID NO: 144705
  Synthetic oligonucleotide

SEQ ID NO: 631985 - DNA, 54 bp, Artificial; identical to SEQ ID NO: 168857
  Synthetic oligonucleotide

SEQ ID NO: 631986 - DNA, 55 bp, Artificial; identical to SEQ ID NO: 199275
  Synthetic oligonucleotide

SEQ ID NO: 631987 - DNA, 55 bp, Artificial; identical to SEQ ID NO: 159611
  Synthetic oligonucleotide

SEQ ID NO: 631988 - DNA, 60 bp, Artificial; identical to SEQ ID NO: 262727
  Synthetic oligonucleotide

SEQ ID NO: 631989 - DNA, 55 bp, Artificial; identical to SEQ ID NO: 256906
  Synthetic oligonucleotide

SEQ ID NO: 631990 - DNA, 56 bp, Artificial; identical to SEQ ID NO: 207070
  Synthetic oligonucleotide

SEQ ID NO: 631991 - DNA, 55 bp, Artificial; identical to SEQ ID NO: 234346
  Synthetic oligonucleotide

SEQ ID NO: 631992 - DNA, 55 bp, Artificial; identical to SEQ ID NO: 245714
  Synthetic oligonucleotide

SEQ ID NO: 631993 - DNA, 60 bp, Artificial; identical to SEQ ID NO: 188027
  Synthetic oligonucleotide

SEQ ID NO: 631994 - DNA, 55 bp, Artificial; identical to SEQ ID NO: 222908
  Synthetic oligonucleotide

SEQ ID NO: 631995 - DNA, 55 bp, Artificial; identical to SEQ ID NO: 222906
  Synthetic oligonucleotide

SEQ ID NO: 631996 - DNA, 55 bp, Artificial; identical to SEQ ID NO: 142481
  Synthetic oligonucleotide

SEQ ID NO: 631997 - DNA, 51 bp, Artificial; identical to SEQ ID NO: 162364
  Synthetic oligonucleotide

SEQ ID NO: 631998 - DNA, 55 bp, Artificial; identical to SEQ ID NO: 224683
  Synthetic oligonucleotide

SEQ ID NO: 631999 - DNA, 55 bp, Artificial; identical to SEQ ID NO: 148854
  Synthetic oligonucleotide

SEQ ID NO: 632000 - DNA, 55 bp, Artificial; identical to SEQ ID NO: 169759
  Synthetic oligonucleotide

SEQ ID NO: 632001 - DNA, 53 bp, Artificial; identical to SEQ ID NO: 247856
  Synthetic oligonucleotide

SEQ ID NO: 632002 - DNA, 54 bp, Artificial; identical to SEQ ID NO: 234414
  Synthetic oligonucleotide

SEQ ID NO: 632003 - DNA, 55 bp, Artificial; identical to SEQ ID NO: 245713
  Synthetic oligonucleotide

SEQ ID NO: 632004 - DNA, 55 bp, Artificial; identical to SEQ ID NO: 148853
  Synthetic oligonucleotide

SEQ ID NO: 632005 - DNA, 55 bp, Artificial; identical to SEQ ID NO: 159614
  Synthetic oligonucleotide

SEQ ID NO: 632006 - DNA, 50 bp, Artificial; identical to SEQ ID NO: 200452
  Synthetic oligonucleotide

SEQ ID NO: 632007 - DNA, 55 bp, Artificial; identical to SEQ ID NO: 142485
  Synthetic oligonucleotide

SEQ ID NO: 632008 - DNA, 55 bp, Artificial; identical to SEQ ID NO: 153273
  Synthetic oligonucleotide

SEQ ID NO: 632009 - DNA, 55 bp, Artificial; identical to SEQ ID NO: 217936
  Synthetic oligonucleotide

SEQ ID NO: 632010 - DNA, 55 bp, Artificial; identical to SEQ ID NO: 256905
  Synthetic oligonucleotide

SEQ ID NO: 632011 - DNA, 50 bp, Artificial; identical to SEQ ID NO: 206646
  Synthetic oligonucleotide

SEQ ID NO: 632012 - DNA, 54 bp, Artificial; identical to SEQ ID NO: 238215
  Synthetic oligonucleotide

SEQ ID NO: 632013 - DNA, 55 bp, Artificial; identical to SEQ ID NO: 240468
  Synthetic oligonucleotide

SEQ ID NO: 632014 - DNA, 55 bp, Artificial; identical to SEQ ID NO: 217924
  Synthetic oligonucleotide

SEQ ID NO: 632015 - DNA, 55 bp, Artificial; identical to SEQ ID NO: 188178
  Synthetic oligonucleotide

SEQ ID NO: 632016 - DNA, 59 bp, Artificial; identical to SEQ ID NO: 200871
  Synthetic oligonucleotide

SEQ ID NO: 632017 - DNA, 60 bp, Artificial; identical to SEQ ID NO: 238226
  Synthetic oligonucleotide

SEQ ID NO: 632018 - DNA, 55 bp, Artificial; identical to SEQ ID NO: 196842
  Synthetic oligonucleotide

SEQ ID NO: 632019 - DNA, 55 bp, Artificial; identical to SEQ ID NO: 162204
  Synthetic oligonucleotide

SEQ ID NO: 632020 - DNA, 55 bp, Artificial; identical to SEQ ID NO: 196872
  Synthetic oligonucleotide

SEQ ID NO: 632021 - DNA, 55 bp, Artificial; identical to SEQ ID NO: 188876
  Synthetic oligonucleotide

SEQ ID NO: 632022 - DNA, 55 bp, Artificial; identical to SEQ ID NO: 233685
  Synthetic oligonucleotide

SEQ ID NO: 632023 - DNA, 53 bp, Artificial; identical to SEQ ID NO: 199268
  Synthetic oligonucleotide

SEQ ID NO: 632024 - DNA, 55 bp, Artificial; identical to SEQ ID NO: 217926
  Synthetic oligonucleotide

SEQ ID NO: 632025 - DNA, 55 bp, Artificial; identical to SEQ ID NO: 257635
  Synthetic oligonucleotide

SEQ ID NO: 632026 - DNA, 52 bp, Artificial; identical to SEQ ID NO: 141289
  Synthetic oligonucleotide

SEQ ID NO: 632027 - DNA, 55 bp, Artificial; identical to SEQ ID NO: 266217
  Synthetic oligonucleotide

SEQ ID NO: 632028 - DNA, 54 bp, Artificial; identical to SEQ ID NO: 240624
  Synthetic oligonucleotide

SEQ ID NO: 632029 - DNA, 55 bp, Artificial; identical to SEQ ID NO: 199327
  Synthetic oligonucleotide

SEQ ID NO: 632030 - DNA, 60 bp, Artificial; identical to SEQ ID NO: 170778
  Synthetic oligonucleotide

SEQ ID NO: 632031 - DNA, 55 bp, Artificial; identical to SEQ ID NO: 166380
  Synthetic oligonucleotide

SEQ ID NO: 632032 - DNA, 55 bp, Artificial; identical to SEQ ID NO: 252903
  Synthetic oligonucleotide

SEQ ID NO: 632033 - DNA, 53 bp, Artificial; identical to SEQ ID NO: 206396
  Synthetic oligonucleotide

SEQ ID NO: 632034 - DNA, 56 bp, Artificial; identical to SEQ ID NO: 147288
  Synthetic oligonucleotide

SEQ ID NO: 632035 - DNA, 57 bp, Artificial; identical to SEQ ID NO: 141730
  Synthetic oligonucleotide

SEQ ID NO: 632036 - DNA, 56 bp, Artificial; identical to SEQ ID NO: 253075
  Synthetic oligonucleotide

SEQ ID NO: 632037 - DNA, 54 bp, Artificial; identical to SEQ ID NO: 185383
  Synthetic oligonucleotide

SEQ ID NO: 632038 - DNA, 56 bp, Artificial; identical to SEQ ID NO: 143839
  Synthetic oligonucleotide

SEQ ID NO: 632039 - DNA, 60 bp, Artificial; identical to SEQ ID NO: 200849
  Synthetic oligonucleotide

SEQ ID NO: 632040 - DNA, 55 bp, Artificial; identical to SEQ ID NO: 155739
  Synthetic oligonucleotide

SEQ ID NO: 632041 - DNA, 60 bp, Artificial; identical to SEQ ID NO: 256336
  Synthetic oligonucleotide

SEQ ID NO: 632042 - DNA, 55 bp, Artificial; identical to SEQ ID NO: 256904
  Synthetic oligonucleotide

SEQ ID NO: 632043 - DNA, 58 bp, Artificial; identical to SEQ ID NO: 191713
  Synthetic oligonucleotide

SEQ ID NO: 632044 - DNA, 59 bp, Artificial; identical to SEQ ID NO: 200838
  Synthetic oligonucleotide

SEQ ID NO: 632045 - DNA, 55 bp, Artificial; identical to SEQ ID NO: 216376
  Synthetic oligonucleotide

SEQ ID NO: 632046 - DNA, 55 bp, Artificial; identical to SEQ ID NO: 245702
  Synthetic oligonucleotide

SEQ ID NO: 632047 - DNA, 55 bp, Artificial; identical to SEQ ID NO: 177669
  Synthetic oligonucleotide

SEQ ID NO: 632048 - DNA, 55 bp, Artificial; identical to SEQ ID NO: 252905
  Synthetic oligonucleotide

SEQ ID NO: 632049 - DNA, 60 bp, Artificial; identical to SEQ ID NO: 241882
  Synthetic oligonucleotide

SEQ ID NO: 632050 - DNA, 55 bp, Artificial; identical to SEQ ID NO: 151365
  Synthetic oligonucleotide

SEQ ID NO: 632051 - DNA, 55 bp, Artificial; identical to SEQ ID NO: 242718
  Synthetic oligonucleotide

SEQ ID NO: 632052 - DNA, 60 bp, Artificial; identical to SEQ ID NO: 177608
  Synthetic oligonucleotide

SEQ ID NO: 632053 - DNA, 51 bp, Artificial; identical to SEQ ID NO: 204021
  Synthetic oligonucleotide

SEQ ID NO: 632054 - DNA, 55 bp, Artificial; identical to SEQ ID NO: 205269
  Synthetic oligonucleotide

SEQ ID NO: 632055 - DNA, 54 bp, Artificial; identical to SEQ ID NO: 257575
  Synthetic oligonucleotide

SEQ ID NO: 632056 - DNA, 54 bp, Artificial; identical to SEQ ID NO: 190660
  Synthetic oligonucleotide

SEQ ID NO: 632057 - DNA, 50 bp, Artificial; identical to SEQ ID NO: 168148
  Synthetic oligonucleotide

SEQ ID NO: 632058 - DNA, 55 bp, Artificial; identical to SEQ ID NO: 207583
  Synthetic oligonucleotide

SEQ ID NO: 632059 - DNA, 60 bp, Artificial; identical to SEQ ID NO: 216948
  Synthetic oligonucleotide

SEQ ID NO: 632060 - DNA, 51 bp, Artificial; identical to SEQ ID NO: 170207
  Synthetic oligonucleotide

SEQ ID NO: 632061 - DNA, 55 bp, Artificial; identical to SEQ ID NO: 168314
  Synthetic oligonucleotide

SEQ ID NO: 632062 - DNA, 51 bp, Artificial; identical to SEQ ID NO: 157868
  Synthetic oligonucleotide

SEQ ID NO: 632063 - DNA, 55 bp, Artificial; identical to SEQ ID NO: 191146
  Synthetic oligonucleotide

SEQ ID NO: 632064 - DNA, 52 bp, Artificial; identical to SEQ ID NO: 195035
  Synthetic oligonucleotide

SEQ ID NO: 632065 - DNA, 55 bp, Artificial; identical to SEQ ID NO: 224216
  Synthetic oligonucleotide

SEQ ID NO: 632066 - DNA, 55 bp, Artificial; identical to SEQ ID NO: 256903
  Synthetic oligonucleotide

SEQ ID NO: 632067 - DNA, 57 bp, Artificial; identical to SEQ ID NO: 203385
  Synthetic oligonucleotide

SEQ ID NO: 632068 - DNA, 55 bp, Artificial; identical to SEQ ID NO: 160027
  Synthetic oligonucleotide

SEQ ID NO: 632069 - DNA, 55 bp, Artificial; identical to SEQ ID NO: 240540
  Synthetic oligonucleotide

SEQ ID NO: 632070 - DNA, 59 bp, Artificial; identical to SEQ ID NO: 209594
  Synthetic oligonucleotide

SEQ ID NO: 632071 - DNA, 55 bp, Artificial; identical to SEQ ID NO: 183130
  Synthetic oligonucleotide

SEQ ID NO: 632072 - DNA, 55 bp, Artificial; identical to SEQ ID NO: 242720
  Synthetic oligonucleotide

SEQ ID NO: 632073 - DNA, 55 bp, Artificial; identical to SEQ ID NO: 154331
  Synthetic oligonucleotide

SEQ ID NO: 632074 - DNA, 50 bp, Artificial; identical to SEQ ID NO: 200462
  Synthetic oligonucleotide

SEQ ID NO: 632075 - DNA, 51 bp, Artificial; identical to SEQ ID NO: 183143
  Synthetic oligonucleotide

SEQ ID NO: 632076 - DNA, 58 bp, Artificial; identical to SEQ ID NO: 200816
  Synthetic oligonucleotide

SEQ ID NO: 632077 - DNA, 51 bp, Artificial; identical to SEQ ID NO: 246585
  Synthetic oligonucleotide

SEQ ID NO: 632078 - DNA, 55 bp, Artificial; identical to SEQ ID NO: 166374
  Synthetic oligonucleotide

SEQ ID NO: 632079 - DNA, 60 bp, Artificial; identical to SEQ ID NO: 150550
  Synthetic oligonucleotide

SEQ ID NO: 632080 - DNA, 54 bp, Artificial; identical to SEQ ID NO: 196875
  Synthetic oligonucleotide

SEQ ID NO: 632081 - DNA, 55 bp, Artificial; identical to SEQ ID NO: 190697
  Synthetic oligonucleotide

SEQ ID NO: 632082 - DNA, 60 bp, Artificial; identical to SEQ ID NO: 177604
  Synthetic oligonucleotide

SEQ ID NO: 632083 - DNA, 55 bp, Artificial; identical to SEQ ID NO: 155740
  Synthetic oligonucleotide

SEQ ID NO: 632084 - DNA, 60 bp, Artificial; identical to SEQ ID NO: 151666
  Synthetic oligonucleotide

SEQ ID NO: 632085 - DNA, 52 bp, Artificial; identical to SEQ ID NO: 223697
  Synthetic oligonucleotide

SEQ ID NO: 632086 - DNA, 58 bp, Artificial; identical to SEQ ID NO: 150549
  Synthetic oligonucleotide

SEQ ID NO: 632087 - DNA, 58 bp, Artificial; identical to SEQ ID NO: 150548
  Synthetic oligonucleotide

SEQ ID NO: 632088 - DNA, 55 bp, Artificial; identical to SEQ ID NO: 199462
  Synthetic oligonucleotide

SEQ ID NO: 632089 - DNA, 55 bp, Artificial; identical to SEQ ID NO: 188161
  Synthetic oligonucleotide

SEQ ID NO: 632090 - DNA, 55 bp, Artificial; identical to SEQ ID NO: 168315
  Synthetic oligonucleotide

SEQ ID NO: 632091 - DNA, 55 bp, Artificial; identical to SEQ ID NO: 245645
  Synthetic oligonucleotide

SEQ ID NO: 632092 - DNA, 55 bp, Artificial; identical to SEQ ID NO: 209441
  Synthetic oligonucleotide

SEQ ID NO: 632093 - DNA, 60 bp, Artificial; identical to SEQ ID NO: 150547
  Synthetic oligonucleotide

SEQ ID NO: 632094 - DNA, 55 bp, Artificial; identical to SEQ ID NO: 183079
  Synthetic oligonucleotide

SEQ ID NO: 632095 - DNA, 55 bp, Artificial; identical to SEQ ID NO: 245644
  Synthetic oligonucleotide

SEQ ID NO: 632096 - DNA, 55 bp, Artificial; identical to SEQ ID NO: 203438
  Synthetic oligonucleotide

SEQ ID NO: 632097 - DNA, 56 bp, Artificial; identical to SEQ ID NO: 211091
  Synthetic oligonucleotide

SEQ ID NO: 632098 - DNA, 55 bp, Artificial; identical to SEQ ID NO: 183081
  Synthetic oligonucleotide

SEQ ID NO: 632099 - DNA, 57 bp, Artificial; identical to SEQ ID NO: 161949
  Synthetic oligonucleotide

SEQ ID NO: 632100 - DNA, 55 bp, Artificial; identical to SEQ ID NO: 188177
  Synthetic oligonucleotide

SEQ ID NO: 632101 - DNA, 55 bp, Artificial; identical to SEQ ID NO: 256901
  Synthetic oligonucleotide

SEQ ID NO: 632102 - DNA, 55 bp, Artificial; identical to SEQ ID NO: 148846
  Synthetic oligonucleotide

SEQ ID NO: 632103 - DNA, 55 bp, Artificial; identical to SEQ ID NO: 194394
  Synthetic oligonucleotide

SEQ ID NO: 632104 - DNA, 55 bp, Artificial; identical to SEQ ID NO: 221248
  Synthetic oligonucleotide

SEQ ID NO: 632105 - DNA, 54 bp, Artificial; identical to SEQ ID NO: 238549
  Synthetic oligonucleotide

SEQ ID NO: 632106 - DNA, 55 bp, Artificial; identical to SEQ ID NO: 225153
  Synthetic oligonucleotide

SEQ ID NO: 632107 - DNA, 59 bp, Artificial; identical to SEQ ID NO: 266385
  Synthetic oligonucleotide

SEQ ID NO: 632108 - DNA, 55 bp, Artificial; identical to SEQ ID NO: 166371
  Synthetic oligonucleotide

SEQ ID NO: 632109 - DNA, 60 bp, Artificial; identical to SEQ ID NO: 177599
  Synthetic oligonucleotide

SEQ ID NO: 632110 - DNA, 60 bp, Artificial; identical to SEQ ID NO: 177597
  Synthetic oligonucleotide

SEQ ID NO: 632111 - DNA, 55 bp, Artificial; identical to SEQ ID NO: 245641
  Synthetic oligonucleotide

SEQ ID NO: 632112 - DNA, 55 bp, Artificial; identical to SEQ ID NO: 207582
  Synthetic oligonucleotide

SEQ ID NO: 632113 - DNA, 60 bp, Artificial; identical to SEQ ID NO: 177596
  Synthetic oligonucleotide

SEQ ID NO: 632114 - DNA, 55 bp, Artificial; identical to SEQ ID NO: 187876
  Synthetic oligonucleotide

SEQ ID NO: 632115 - DNA, 55 bp, Artificial; identical to SEQ ID NO: 240546
  Synthetic oligonucleotide

SEQ ID NO: 632116 - DNA, 55 bp, Artificial; identical to SEQ ID NO: 199472
  Synthetic oligonucleotide

SEQ ID NO: 632117 - DNA, 55 bp, Artificial; identical to SEQ ID NO: 221250
  Synthetic oligonucleotide

SEQ ID NO: 632118 - DNA, 55 bp, Artificial; identical to SEQ ID NO: 234395
  Synthetic oligonucleotide

SEQ ID NO: 632119 - DNA, 60 bp, Artificial; identical to SEQ ID NO: 204213
  Synthetic oligonucleotide

SEQ ID NO: 632120 - DNA, 53 bp, Artificial; identical to SEQ ID NO: 223612
  Synthetic oligonucleotide

SEQ ID NO: 632121 - DNA, 57 bp, Artificial; identical to SEQ ID NO: 179790
  Synthetic oligonucleotide

SEQ ID NO: 632122 - DNA, 55 bp, Artificial; identical to SEQ ID NO: 191131
  Synthetic oligonucleotide

SEQ ID NO: 632123 - DNA, 55 bp, Artificial; identical to SEQ ID NO: 256899
  Synthetic oligonucleotide

SEQ ID NO: 632124 - DNA, 55 bp, Artificial; identical to SEQ ID NO: 205266
  Synthetic oligonucleotide

SEQ ID NO: 632125 - DNA, 55 bp, Artificial; identical to SEQ ID NO: 204202
  Synthetic oligonucleotide

SEQ ID NO: 632126 - DNA, 57 bp, Artificial; identical to SEQ ID NO: 164500
  Synthetic oligonucleotide

SEQ ID NO: 632127 - DNA, 55 bp, Artificial; identical to SEQ ID NO: 224202
  Synthetic oligonucleotide

SEQ ID NO: 632128 - DNA, 53 bp, Artificial; identical to SEQ ID NO: 201078
  Synthetic oligonucleotide

SEQ ID NO: 632129 - DNA, 55 bp, Artificial; identical to SEQ ID NO: 183112
  Synthetic oligonucleotide

SEQ ID NO: 632130 - DNA, 51 bp, Artificial; identical to SEQ ID NO: 165308
  Synthetic oligonucleotide

SEQ ID NO: 632131 - DNA, 54 bp, Artificial; identical to SEQ ID NO: 185427
  Synthetic oligonucleotide

SEQ ID NO: 632132 - DNA, 55 bp, Artificial; identical to SEQ ID NO: 183109
  Synthetic oligonucleotide

SEQ ID NO: 632133 - DNA, 60 bp, Artificial; identical to SEQ ID NO: 209705
  Synthetic oligonucleotide

SEQ ID NO: 632134 - DNA, 54 bp, Artificial; identical to SEQ ID NO: 161877
  Synthetic oligonucleotide

SEQ ID NO: 632135 - DNA, 60 bp, Artificial; identical to SEQ ID NO: 212382
  Synthetic oligonucleotide

SEQ ID NO: 632136 - DNA, 55 bp, Artificial; identical to SEQ ID NO: 260008
  Synthetic oligonucleotide

SEQ ID NO: 632137 - DNA, 52 bp, Artificial; identical to SEQ ID NO: 237090
  Synthetic oligonucleotide

SEQ ID NO: 632138 - DNA, 53 bp, Artificial; identical to SEQ ID NO: 234444
  Synthetic oligonucleotide

SEQ ID NO: 632139 - DNA, 54 bp, Artificial; identical to SEQ ID NO: 161289
  Synthetic oligonucleotide

SEQ ID NO: 632140 - DNA, 55 bp, Artificial; identical to SEQ ID NO: 224692
  Synthetic oligonucleotide

SEQ ID NO: 632141 - DNA, 55 bp, Artificial; identical to SEQ ID NO: 191133
  Synthetic oligonucleotide

SEQ ID NO: 632142 - DNA, 54 bp, Artificial; identical to SEQ ID NO: 183102
  Synthetic oligonucleotide

SEQ ID NO: 632143 - DNA, 54 bp, Artificial; identical to SEQ ID NO: 188026
  Synthetic oligonucleotide

SEQ ID NO: 632144 - DNA, 55 bp, Artificial; identical to SEQ ID NO: 199471
  Synthetic oligonucleotide

SEQ ID NO: 632145 - DNA, 55 bp, Artificial; identical to SEQ ID NO: 203077
  Synthetic oligonucleotide

SEQ ID NO: 632146 - DNA, 55 bp, Artificial; identical to SEQ ID NO: 183100
  Synthetic oligonucleotide

SEQ ID NO: 632147 - DNA, 55 bp, Artificial; identical to SEQ ID NO: 209552
  Synthetic oligonucleotide

SEQ ID NO: 632148 - DNA, 55 bp, Artificial; identical to SEQ ID NO: 240509
  Synthetic oligonucleotide

SEQ ID NO: 632149 - DNA, 53 bp, Artificial; identical to SEQ ID NO: 201682
  Synthetic oligonucleotide

SEQ ID NO: 632150 - DNA, 51 bp, Artificial; identical to SEQ ID NO: 258217
  Synthetic oligonucleotide

SEQ ID NO: 632151 - DNA, 55 bp, Artificial; identical to SEQ ID NO: 155741
  Synthetic oligonucleotide

SEQ ID NO: 632152 - DNA, 55 bp, Artificial; identical to SEQ ID NO: 171223
  Synthetic oligonucleotide

SEQ ID NO: 632153 - DNA, 57 bp, Artificial; identical to SEQ ID NO: 198836
  Synthetic oligonucleotide

SEQ ID NO: 632154 - DNA, 57 bp, Artificial; identical to SEQ ID NO: 248154
  Synthetic oligonucleotide

SEQ ID NO: 632155 - DNA, 55 bp, Artificial; identical to SEQ ID NO: 183200
  Synthetic oligonucleotide

SEQ ID NO: 632156 - DNA, 55 bp, Artificial; identical to SEQ ID NO: 218816
  Synthetic oligonucleotide

SEQ ID NO: 632157 - DNA, 51 bp, Artificial; identical to SEQ ID NO: 144581
  Synthetic oligonucleotide

SEQ ID NO: 632158 - DNA, 54 bp, Artificial; identical to SEQ ID NO: 207580
  Synthetic oligonucleotide

SEQ ID NO: 632159 - DNA, 55 bp, Artificial; identical to SEQ ID NO: 183197
  Synthetic oligonucleotide

SEQ ID NO: 632160 - DNA, 55 bp, Artificial; identical to SEQ ID NO: 172934
  Synthetic oligonucleotide

SEQ ID NO: 632161 - DNA, 55 bp, Artificial; identical to SEQ ID NO: 142467
  Synthetic oligonucleotide

SEQ ID NO: 632162 - DNA, 51 bp, Artificial; identical to SEQ ID NO: 210353
  Synthetic oligonucleotide

SEQ ID NO: 632163 - DNA, 55 bp, Artificial; identical to SEQ ID NO: 249589
  Synthetic oligonucleotide

SEQ ID NO: 632164 - DNA, 55 bp, Artificial; identical to SEQ ID NO: 188874
  Synthetic oligonucleotide

SEQ ID NO: 632165 - DNA, 55 bp, Artificial; identical to SEQ ID NO: 234398
  Synthetic oligonucleotide

SEQ ID NO: 632166 - DNA, 54 bp, Artificial; identical to SEQ ID NO: 173654
  Synthetic oligonucleotide

SEQ ID NO: 632167 - DNA, 60 bp, Artificial; identical to SEQ ID NO: 170781
  Synthetic oligonucleotide

SEQ ID NO: 632168 - DNA, 55 bp, Artificial; identical to SEQ ID NO: 183194
  Synthetic oligonucleotide

SEQ ID NO: 632169 - DNA, 52 bp, Artificial; identical to SEQ ID NO: 185925
  Synthetic oligonucleotide

SEQ ID NO: 632170 - DNA, 55 bp, Artificial; identical to SEQ ID NO: 256896
  Synthetic oligonucleotide

SEQ ID NO: 632171 - DNA, 55 bp, Artificial; identical to SEQ ID NO: 201328
  Synthetic oligonucleotide

SEQ ID NO: 632172 - DNA, 55 bp, Artificial; identical to SEQ ID NO: 245638
  Synthetic oligonucleotide

SEQ ID NO: 632173 - DNA, 60 bp, Artificial; identical to SEQ ID NO: 141741
  Synthetic oligonucleotide

SEQ ID NO: 632174 - DNA, 54 bp, Artificial; identical to SEQ ID NO: 208308
  Synthetic oligonucleotide

SEQ ID NO: 632175 - DNA, 57 bp, Artificial; identical to SEQ ID NO: 256628
  Synthetic oligonucleotide

SEQ ID NO: 632176 - DNA, 55 bp, Artificial; identical to SEQ ID NO: 169770
  Synthetic oligonucleotide

SEQ ID NO: 632177 - DNA, 55 bp, Artificial; identical to SEQ ID NO: 183191
  Synthetic oligonucleotide

SEQ ID NO: 632178 - DNA, 56 bp, Artificial; identical to SEQ ID NO: 180091
  Synthetic oligonucleotide

SEQ ID NO: 632179 - DNA, 52 bp, Artificial; identical to SEQ ID NO: 170147
  Synthetic oligonucleotide

SEQ ID NO: 632180 - DNA, 51 bp, Artificial; identical to SEQ ID NO: 186825
  Synthetic oligonucleotide

SEQ ID NO: 632181 - DNA, 51 bp, Artificial; identical to SEQ ID NO: 186827
  Synthetic oligonucleotide

SEQ ID NO: 632182 - DNA, 53 bp, Artificial; identical to SEQ ID NO: 190808
  Synthetic oligonucleotide

SEQ ID NO: 632183 - DNA, 55 bp, Artificial; identical to SEQ ID NO: 201510
  Synthetic oligonucleotide

SEQ ID NO: 632184 - DNA, 60 bp, Artificial; identical to SEQ ID NO: 164389
  Synthetic oligonucleotide

SEQ ID NO: 632185 - DNA, 53 bp, Artificial; identical to SEQ ID NO: 240511
  Synthetic oligonucleotide

SEQ ID NO: 632186 - DNA, 60 bp, Artificial; identical to SEQ ID NO: 151600
  Synthetic oligonucleotide

SEQ ID NO: 632187 - DNA, 55 bp, Artificial; identical to SEQ ID NO: 183186
  Synthetic oligonucleotide

SEQ ID NO: 632188 - DNA, 54 bp, Artificial; identical to SEQ ID NO: 201079
  Synthetic oligonucleotide

SEQ ID NO: 632189 - DNA, 55 bp, Artificial; identical to SEQ ID NO: 245637
  Synthetic oligonucleotide

SEQ ID NO: 632190 - DNA, 55 bp, Artificial; identical to SEQ ID NO: 183221
  Synthetic oligonucleotide

SEQ ID NO: 632191 - DNA, 54 bp, Artificial; identical to SEQ ID NO: 152013
  Synthetic oligonucleotide

SEQ ID NO: 632192 - DNA, 55 bp, Artificial; identical to SEQ ID NO: 238005
  Synthetic oligonucleotide

SEQ ID NO: 632193 - DNA, 55 bp, Artificial; identical to SEQ ID NO: 159621
  Synthetic oligonucleotide

SEQ ID NO: 632194 - DNA, 55 bp, Artificial; identical to SEQ ID NO: 183219
  Synthetic oligonucleotide

SEQ ID NO: 632195 - DNA, 60 bp, Artificial; identical to SEQ ID NO: 241935
  Synthetic oligonucleotide

SEQ ID NO: 632196 - DNA, 50 bp, Artificial; identical to SEQ ID NO: 255847
  Synthetic oligonucleotide

SEQ ID NO: 632197 - DNA, 56 bp, Artificial; identical to SEQ ID NO: 179986
  Synthetic oligonucleotide

SEQ ID NO: 632198 - DNA, 55 bp, Artificial; identical to SEQ ID NO: 168261
  Synthetic oligonucleotide

SEQ ID NO: 632199 - DNA, 54 bp, Artificial; identical to SEQ ID NO: 170007
  Synthetic oligonucleotide

SEQ ID NO: 632200 - DNA, 55 bp, Artificial; identical to SEQ ID NO: 224693
  Synthetic oligonucleotide

SEQ ID NO: 632201 - DNA, 55 bp, Artificial; identical to SEQ ID NO: 191138
  Synthetic oligonucleotide

SEQ ID NO: 632202 - DNA, 55 bp, Artificial; identical to SEQ ID NO: 205262
  Synthetic oligonucleotide

SEQ ID NO: 632203 - DNA, 59 bp, Artificial; identical to SEQ ID NO: 198725
  Synthetic oligonucleotide

SEQ ID NO: 632204 - DNA, 55 bp, Artificial; identical to SEQ ID NO: 183217
  Synthetic oligonucleotide

SEQ ID NO: 632205 - DNA, 55 bp, Artificial; identical to SEQ ID NO: 245636
  Synthetic oligonucleotide

SEQ ID NO: 632206 - DNA, 60 bp, Artificial; identical to SEQ ID NO: 243352
  Synthetic oligonucleotide

SEQ ID NO: 632207 - DNA, 55 bp, Artificial; identical to SEQ ID NO: 147396
  Synthetic oligonucleotide

SEQ ID NO: 632208 - DNA, 55 bp, Artificial; identical to SEQ ID NO: 217942
  Synthetic oligonucleotide

SEQ ID NO: 632209 - DNA, 55 bp, Artificial; identical to SEQ ID NO: 166369
  Synthetic oligonucleotide

SEQ ID NO: 632210 - DNA, 55 bp, Artificial; identical to SEQ ID NO: 151374
  Synthetic oligonucleotide

SEQ ID NO: 632211 - DNA, 55 bp, Artificial; identical to SEQ ID NO: 183211
  Synthetic oligonucleotide

SEQ ID NO: 632212 - DNA, 55 bp, Artificial; identical to SEQ ID NO: 159622
  Synthetic oligonucleotide

SEQ ID NO: 632213 - DNA, 55 bp, Artificial; identical to SEQ ID NO: 219661
  Synthetic oligonucleotide

SEQ ID NO: 632214 - DNA, 53 bp, Artificial; identical to SEQ ID NO: 240762
  Synthetic oligonucleotide

SEQ ID NO: 632215 - DNA, 55 bp, Artificial; identical to SEQ ID NO: 147398
  Synthetic oligonucleotide

SEQ ID NO: 632216 - DNA, 51 bp, Artificial; identical to SEQ ID NO: 186821
  Synthetic oligonucleotide

SEQ ID NO: 632217 - DNA, 57 bp, Artificial; identical to SEQ ID NO: 187916
  Synthetic oligonucleotide

SEQ ID NO: 632218 - DNA, 57 bp, Artificial; identical to SEQ ID NO: 179853
  Synthetic oligonucleotide

SEQ ID NO: 632219 - DNA, 59 bp, Artificial; identical to SEQ ID NO: 164167
  Synthetic oligonucleotide

SEQ ID NO: 632220 - DNA, 55 bp, Artificial; identical to SEQ ID NO: 166368
  Synthetic oligonucleotide

SEQ ID NO: 632221 - DNA, 55 bp, Artificial; identical to SEQ ID NO: 202024
  Synthetic oligonucleotide

SEQ ID NO: 632222 - DNA, 55 bp, Artificial; identical to SEQ ID NO: 243363
  Synthetic oligonucleotide

SEQ ID NO: 632223 - DNA, 55 bp, Artificial; identical to SEQ ID NO: 240513
  Synthetic oligonucleotide

SEQ ID NO: 632224 - DNA, 55 bp, Artificial; identical to SEQ ID NO: 183151
  Synthetic oligonucleotide

SEQ ID NO: 632225 - DNA, 56 bp, Artificial; identical to SEQ ID NO: 239545
  Synthetic oligonucleotide

SEQ ID NO: 632226 - DNA, 54 bp, Artificial; identical to SEQ ID NO: 245635
  Synthetic oligonucleotide

SEQ ID NO: 632227 - DNA, 55 bp, Artificial; identical to SEQ ID NO: 166366
  Synthetic oligonucleotide

SEQ ID NO: 632228 - DNA, 55 bp, Artificial; identical to SEQ ID NO: 190236
  Synthetic oligonucleotide

SEQ ID NO: 632229 - DNA, 60 bp, Artificial; identical to SEQ ID NO: 177629
  Synthetic oligonucleotide

SEQ ID NO: 632230 - DNA, 55 bp, Artificial; identical to SEQ ID NO: 159623
  Synthetic oligonucleotide

SEQ ID NO: 632231 - DNA, 55 bp, Artificial; identical to SEQ ID NO: 171226
  Synthetic oligonucleotide

SEQ ID NO: 632232 - DNA, 53 bp, Artificial; identical to SEQ ID NO: 162205
  Synthetic oligonucleotide

SEQ ID NO: 632233 - DNA, 55 bp, Artificial; identical to SEQ ID NO: 147426
  Synthetic oligonucleotide

SEQ ID NO: 632234 - DNA, 55 bp, Artificial; identical to SEQ ID NO: 233687
  Synthetic oligonucleotide

SEQ ID NO: 632235 - DNA, 55 bp, Artificial; identical to SEQ ID NO: 159624
  Synthetic oligonucleotide

SEQ ID NO: 632236 - DNA, 51 bp, Artificial; identical to SEQ ID NO: 186810
  Synthetic oligonucleotide

SEQ ID NO: 632237 - DNA, 51 bp, Artificial; identical to SEQ ID NO: 191216
  Synthetic oligonucleotide

SEQ ID NO: 632238 - DNA, 55 bp, Artificial; identical to SEQ ID NO: 183158
  Synthetic oligonucleotide

SEQ ID NO: 632239 - DNA, 60 bp, Artificial; identical to SEQ ID NO: 241930
  Synthetic oligonucleotide

SEQ ID NO: 632240 - DNA, 53 bp, Artificial; identical to SEQ ID NO: 253296
  Synthetic oligonucleotide

SEQ ID NO: 632241 - DNA, 55 bp, Artificial; identical to SEQ ID NO: 194397
  Synthetic oligonucleotide

SEQ ID NO: 632242 - DNA, 54 bp, Artificial; identical to SEQ ID NO: 192031
  Synthetic oligonucleotide

SEQ ID NO: 632243 - DNA, 57 bp, Artificial; identical to SEQ ID NO: 243981
  Synthetic oligonucleotide

SEQ ID NO: 632244 - DNA, 57 bp, Artificial; identical to SEQ ID NO: 177626
  Synthetic oligonucleotide

SEQ ID NO: 632245 - DNA, 60 bp, Artificial; identical to SEQ ID NO: 241929
  Synthetic oligonucleotide

SEQ ID NO: 632246 - DNA, 55 bp, Artificial; identical to SEQ ID NO: 203421
  Synthetic oligonucleotide

SEQ ID NO: 632247 - DNA, 59 bp, Artificial; identical to SEQ ID NO: 246654
  Synthetic oligonucleotide

SEQ ID NO: 632248 - DNA, 55 bp, Artificial; identical to SEQ ID NO: 188872
  Synthetic oligonucleotide

SEQ ID NO: 632249 - DNA, 55 bp, Artificial; identical to SEQ ID NO: 183163
  Synthetic oligonucleotide

SEQ ID NO: 632250 - DNA, 60 bp, Artificial; identical to SEQ ID NO: 238237
  Synthetic oligonucleotide

SEQ ID NO: 632251 - DNA, 55 bp, Artificial; identical to SEQ ID NO: 194398
  Synthetic oligonucleotide

SEQ ID NO: 632252 - DNA, 54 bp, Artificial; identical to SEQ ID NO: 149256
  Synthetic oligonucleotide

SEQ ID NO: 632253 - DNA, 55 bp, Artificial; identical to SEQ ID NO: 209555
  Synthetic oligonucleotide

SEQ ID NO: 632254 - DNA, 55 bp, Artificial; identical to SEQ ID NO: 199417
  Synthetic oligonucleotide

SEQ ID NO: 632255 - DNA, 55 bp, Artificial; identical to SEQ ID NO: 183164
  Synthetic oligonucleotide

SEQ ID NO: 632256 - DNA, 55 bp, Artificial; identical to SEQ ID NO: 245630
  Synthetic oligonucleotide

SEQ ID NO: 632257 - DNA, 55 bp, Artificial; identical to SEQ ID NO: 248761
  Synthetic oligonucleotide

SEQ ID NO: 632258 - DNA, 55 bp, Artificial; identical to SEQ ID NO: 188687
  Synthetic oligonucleotide

SEQ ID NO: 632259 - DNA, 55 bp, Artificial; identical to SEQ ID NO: 202016
  Synthetic oligonucleotide

SEQ ID NO: 632260 - DNA, 57 bp, Artificial; identical to SEQ ID NO: 151822
  Synthetic oligonucleotide

SEQ ID NO: 632261 - DNA, 55 bp, Artificial; identical to SEQ ID NO: 142557
  Synthetic oligonucleotide

SEQ ID NO: 632262 - DNA, 52 bp, Artificial; identical to SEQ ID NO: 246548
  Synthetic oligonucleotide

SEQ ID NO: 632263 - DNA, 59 bp, Artificial; identical to SEQ ID NO: 224138
  Synthetic oligonucleotide

SEQ ID NO: 632264 - DNA, 55 bp, Artificial; identical to SEQ ID NO: 202013
  Synthetic oligonucleotide

SEQ ID NO: 632265 - DNA, 56 bp, Artificial; identical to SEQ ID NO: 248606
  Synthetic oligonucleotide

SEQ ID NO: 632266 - DNA, 54 bp, Artificial; identical to SEQ ID NO: 177625
  Synthetic oligonucleotide

SEQ ID NO: 632267 - DNA, 56 bp, Artificial; identical to SEQ ID NO: 177624
  Synthetic oligonucleotide

SEQ ID NO: 632268 - DNA, 55 bp, Artificial; identical to SEQ ID NO: 147358
  Synthetic oligonucleotide

SEQ ID NO: 632269 - DNA, 59 bp, Artificial; identical to SEQ ID NO: 252987
  Synthetic oligonucleotide

SEQ ID NO: 632270 - DNA, 55 bp, Artificial; identical to SEQ ID NO: 146597
  Synthetic oligonucleotide

SEQ ID NO: 632271 - DNA, 60 bp, Artificial; identical to SEQ ID NO: 224128
  Synthetic oligonucleotide

SEQ ID NO: 632272 - DNA, 56 bp, Artificial; identical to SEQ ID NO: 248166
  Synthetic oligonucleotide

SEQ ID NO: 632273 - DNA, 54 bp, Artificial; identical to SEQ ID NO: 149257
  Synthetic oligonucleotide

SEQ ID NO: 632274 - DNA, 56 bp, Artificial; identical to SEQ ID NO: 243374
  Synthetic oligonucleotide

SEQ ID NO: 632275 - DNA, 51 bp, Artificial; identical to SEQ ID NO: 255737
  Synthetic oligonucleotide

SEQ ID NO: 632276 - DNA, 55 bp, Artificial; identical to SEQ ID NO: 208309
  Synthetic oligonucleotide

SEQ ID NO: 632277 - DNA, 53 bp, Artificial; identical to SEQ ID NO: 208717
  Synthetic oligonucleotide

SEQ ID NO: 632278 - DNA, 55 bp, Artificial; identical to SEQ ID NO: 154333
  Synthetic oligonucleotide

SEQ ID NO: 632279 - DNA, 55 bp, Artificial; identical to SEQ ID NO: 260007
  Synthetic oligonucleotide

SEQ ID NO: 632280 - DNA, 55 bp, Artificial; identical to SEQ ID NO: 159626
  Synthetic oligonucleotide

SEQ ID NO: 632281 - DNA, 60 bp, Artificial; identical to SEQ ID NO: 224167
  Synthetic oligonucleotide

SEQ ID NO: 632282 - DNA, 50 bp, Artificial; identical to SEQ ID NO: 141522
  Synthetic oligonucleotide

SEQ ID NO: 632283 - DNA, 55 bp, Artificial; identical to SEQ ID NO: 187882
  Synthetic oligonucleotide

SEQ ID NO: 632284 - DNA, 55 bp, Artificial; identical to SEQ ID NO: 210926
  Synthetic oligonucleotide

SEQ ID NO: 632285 - DNA, 55 bp, Artificial; identical to SEQ ID NO: 152584
  Synthetic oligonucleotide

SEQ ID NO: 632286 - DNA, 50 bp, Artificial; identical to SEQ ID NO: 241313
  Synthetic oligonucleotide

SEQ ID NO: 632287 - DNA, 58 bp, Artificial; identical to SEQ ID NO: 157420
  Synthetic oligonucleotide

SEQ ID NO: 632288 - DNA, 55 bp, Artificial; identical to SEQ ID NO: 199412
  Synthetic oligonucleotide

SEQ ID NO: 632289 - DNA, 55 bp, Artificial; identical to SEQ ID NO: 221074
  Synthetic oligonucleotide

SEQ ID NO: 632290 - DNA, 58 bp, Artificial; identical to SEQ ID NO: 210815
  Synthetic oligonucleotide

SEQ ID NO: 632291 - DNA, 52 bp, Artificial; identical to SEQ ID NO: 255540
  Synthetic oligonucleotide

SEQ ID NO: 632292 - DNA, 54 bp, Artificial; identical to SEQ ID NO: 154337
  Synthetic oligonucleotide

SEQ ID NO: 632293 - DNA, 52 bp, Artificial; identical to SEQ ID NO: 170137
  Synthetic oligonucleotide

SEQ ID NO: 632294 - DNA, 60 bp, Artificial; identical to SEQ ID NO: 243385
  Synthetic oligonucleotide

SEQ ID NO: 632295 - DNA, 60 bp, Artificial; identical to SEQ ID NO: 141774
  Synthetic oligonucleotide

SEQ ID NO: 632296 - DNA, 53 bp, Artificial; identical to SEQ ID NO: 210929
  Synthetic oligonucleotide

SEQ ID NO: 632297 - DNA, 55 bp, Artificial; identical to SEQ ID NO: 183170
  Synthetic oligonucleotide

SEQ ID NO: 632298 - DNA, 59 bp, Artificial; identical to SEQ ID NO: 177620
  Synthetic oligonucleotide

SEQ ID NO: 632299 - DNA, 56 bp, Artificial; identical to SEQ ID NO: 174891
  Synthetic oligonucleotide

SEQ ID NO: 632300 - DNA, 60 bp, Artificial; identical to SEQ ID NO: 153023
  Synthetic oligonucleotide

SEQ ID NO: 632301 - DNA, 55 bp, Artificial; identical to SEQ ID NO: 188871
  Synthetic oligonucleotide

SEQ ID NO: 632302 - DNA, 55 bp, Artificial; identical to SEQ ID NO: 266212
  Synthetic oligonucleotide

SEQ ID NO: 632303 - DNA, 52 bp, Artificial; identical to SEQ ID NO: 174462
  Synthetic oligonucleotide

SEQ ID NO: 632304 - DNA, 55 bp, Artificial; identical to SEQ ID NO: 263166
  Synthetic oligonucleotide

SEQ ID NO: 632305 - DNA, 54 bp, Artificial; identical to SEQ ID NO: 238583
  Synthetic oligonucleotide

SEQ ID NO: 632306 - DNA, 59 bp, Artificial; identical to SEQ ID NO: 225435
  Synthetic oligonucleotide

SEQ ID NO: 632307 - DNA, 55 bp, Artificial; identical to SEQ ID NO: 212544
  Synthetic oligonucleotide

SEQ ID NO: 632308 - DNA, 55 bp, Artificial; identical to SEQ ID NO: 221075
  Synthetic oligonucleotide

SEQ ID NO: 632309 - DNA, 55 bp, Artificial; identical to SEQ ID NO: 154338
  Synthetic oligonucleotide

SEQ ID NO: 632310 - DNA, 55 bp, Artificial; identical to SEQ ID NO: 194399
  Synthetic oligonucleotide

SEQ ID NO: 632311 - DNA, 55 bp, Artificial; identical to SEQ ID NO: 171230
  Synthetic oligonucleotide

SEQ ID NO: 632312 - DNA, 60 bp, Artificial; identical to SEQ ID NO: 177614
  Synthetic oligonucleotide

SEQ ID NO: 632313 - DNA, 55 bp, Artificial; identical to SEQ ID NO: 217906
  Synthetic oligonucleotide

SEQ ID NO: 632314 - DNA, 55 bp, Artificial; identical to SEQ ID NO: 256892
  Synthetic oligonucleotide

SEQ ID NO: 632315 - DNA, 52 bp, Artificial; identical to SEQ ID NO: 199407
  Synthetic oligonucleotide

SEQ ID NO: 632316 - DNA, 55 bp, Artificial; identical to SEQ ID NO: 196884
  Synthetic oligonucleotide

SEQ ID NO: 632317 - DNA, 60 bp, Artificial; identical to SEQ ID NO: 156976
  Synthetic oligonucleotide

SEQ ID NO: 632318 - DNA, 55 bp, Artificial; identical to SEQ ID NO: 245620
  Synthetic oligonucleotide

SEQ ID NO: 632319 - DNA, 55 bp, Artificial; identical to SEQ ID NO: 199447
  Synthetic oligonucleotide

SEQ ID NO: 632320 - DNA, 55 bp, Artificial; identical to SEQ ID NO: 171747
  Synthetic oligonucleotide

SEQ ID NO: 632321 - DNA, 51 bp, Artificial; identical to SEQ ID NO: 237185
  Synthetic oligonucleotide

SEQ ID NO: 632322 - DNA, 54 bp, Artificial; identical to SEQ ID NO: 190656
  Synthetic oligonucleotide

SEQ ID NO: 632323 - DNA, 55 bp, Artificial; identical to SEQ ID NO: 218805
  Synthetic oligonucleotide

SEQ ID NO: 632324 - DNA, 55 bp, Artificial; identical to SEQ ID NO: 184678
  Synthetic oligonucleotide

SEQ ID NO: 632325 - DNA, 52 bp, Artificial; identical to SEQ ID NO: 199926
  Synthetic oligonucleotide

SEQ ID NO: 632326 - DNA, 55 bp, Artificial; identical to SEQ ID NO: 221076
  Synthetic oligonucleotide

SEQ ID NO: 632327 - DNA, 58 bp, Artificial; identical to SEQ ID NO: 179621
  Synthetic oligonucleotide

SEQ ID NO: 632328 - DNA, 60 bp, Artificial; identical to SEQ ID NO: 241926
  Synthetic oligonucleotide

SEQ ID NO: 632329 - DNA, 55 bp, Artificial; identical to SEQ ID NO: 221077
  Synthetic oligonucleotide

SEQ ID NO: 632330 - DNA, 55 bp, Artificial; identical to SEQ ID NO: 184685
  Synthetic oligonucleotide

SEQ ID NO: 632331 - DNA, 55 bp, Artificial; identical to SEQ ID NO: 199444
  Synthetic oligonucleotide

SEQ ID NO: 632332 - DNA, 59 bp, Artificial; identical to SEQ ID NO: 241925
  Synthetic oligonucleotide

SEQ ID NO: 632333 - DNA, 55 bp, Artificial; identical to SEQ ID NO: 168263
  Synthetic oligonucleotide

SEQ ID NO: 632334 - DNA, 55 bp, Artificial; identical to SEQ ID NO: 234373
  Synthetic oligonucleotide

SEQ ID NO: 632335 - DNA, 55 bp, Artificial; identical to SEQ ID NO: 159132
  Synthetic oligonucleotide

SEQ ID NO: 632336 - DNA, 55 bp, Artificial; identical to SEQ ID NO: 159138
  Synthetic oligonucleotide

SEQ ID NO: 632337 - DNA, 55 bp, Artificial; identical to SEQ ID NO: 184695
  Synthetic oligonucleotide

SEQ ID NO: 632338 - DNA, 55 bp, Artificial; identical to SEQ ID NO: 199442
  Synthetic oligonucleotide

SEQ ID NO: 632339 - DNA, 51 bp, Artificial; identical to SEQ ID NO: 165300
  Synthetic oligonucleotide

SEQ ID NO: 632340 - DNA, 52 bp, Artificial; identical to SEQ ID NO: 261974
  Synthetic oligonucleotide

SEQ ID NO: 632341 - DNA, 56 bp, Artificial; identical to SEQ ID NO: 239317
  Synthetic oligonucleotide

SEQ ID NO: 632342 - DNA, 54 bp, Artificial; identical to SEQ ID NO: 258069
  Synthetic oligonucleotide

SEQ ID NO: 632343 - DNA, 55 bp, Artificial; identical to SEQ ID NO: 184697
  Synthetic oligonucleotide

SEQ ID NO: 632344 - DNA, 55 bp, Artificial; identical to SEQ ID NO: 224696
  Synthetic oligonucleotide

SEQ ID NO: 632345 - DNA, 55 bp, Artificial; identical to SEQ ID NO: 259026
  Synthetic oligonucleotide

SEQ ID NO: 632346 - DNA, 55 bp, Artificial; identical to SEQ ID NO: 242725
  Synthetic oligonucleotide

SEQ ID NO: 632347 - DNA, 60 bp, Artificial; identical to SEQ ID NO: 241924
  Synthetic oligonucleotide

SEQ ID NO: 632348 - DNA, 59 bp, Artificial; identical to SEQ ID NO: 201684
  Synthetic oligonucleotide

SEQ ID NO: 632349 - DNA, 60 bp, Artificial; identical to SEQ ID NO: 204180
  Synthetic oligonucleotide

SEQ ID NO: 632350 - DNA, 55 bp, Artificial; identical to SEQ ID NO: 242726
  Synthetic oligonucleotide

SEQ ID NO: 632351 - DNA, 55 bp, Artificial; identical to SEQ ID NO: 224698
  Synthetic oligonucleotide

SEQ ID NO: 632352 - DNA, 55 bp, Artificial; identical to SEQ ID NO: 184700
  Synthetic oligonucleotide

SEQ ID NO: 632353 - DNA, 55 bp, Artificial; identical to SEQ ID NO: 196889
  Synthetic oligonucleotide

SEQ ID NO: 632354 - DNA, 55 bp, Artificial; identical to SEQ ID NO: 168264
  Synthetic oligonucleotide

SEQ ID NO: 632355 - DNA, 55 bp, Artificial; identical to SEQ ID NO: 169781
  Synthetic oligonucleotide

SEQ ID NO: 632356 - DNA, 55 bp, Artificial; identical to SEQ ID NO: 256888
  Synthetic oligonucleotide

SEQ ID NO: 632357 - DNA, 55 bp, Artificial; identical to SEQ ID NO: 184636
  Synthetic oligonucleotide

SEQ ID NO: 632358 - DNA, 53 bp, Artificial; identical to SEQ ID NO: 255360
  Synthetic oligonucleotide

SEQ ID NO: 632359 - DNA, 58 bp, Artificial; identical to SEQ ID NO: 198503
  Synthetic oligonucleotide

SEQ ID NO: 632360 - DNA, 55 bp, Artificial; identical to SEQ ID NO: 199428
  Synthetic oligonucleotide

SEQ ID NO: 632361 - DNA, 55 bp, Artificial; identical to SEQ ID NO: 166362
  Synthetic oligonucleotide

SEQ ID NO: 632362 - DNA, 60 bp, Artificial; identical to SEQ ID NO: 150551
  Synthetic oligonucleotide

SEQ ID NO: 632363 - DNA, 55 bp, Artificial; identical to SEQ ID NO: 245672
  Synthetic oligonucleotide

SEQ ID NO: 632364 - DNA, 55 bp, Artificial; identical to SEQ ID NO: 196892
  Synthetic oligonucleotide

SEQ ID NO: 632365 - DNA, 53 bp, Artificial; identical to SEQ ID NO: 222701
  Synthetic oligonucleotide

SEQ ID NO: 632366 - DNA, 57 bp, Artificial; identical to SEQ ID NO: 239454
  Synthetic oligonucleotide

SEQ ID NO: 632367 - DNA, 55 bp, Artificial; identical to SEQ ID NO: 217907
  Synthetic oligonucleotide

SEQ ID NO: 632368 - DNA, 57 bp, Artificial; identical to SEQ ID NO: 147203
  Synthetic oligonucleotide

SEQ ID NO: 632369 - DNA, 53 bp, Artificial; identical to SEQ ID NO: 199817
  Synthetic oligonucleotide

SEQ ID NO: 632370 - DNA, 55 bp, Artificial; identical to SEQ ID NO: 209522
  Synthetic oligonucleotide

SEQ ID NO: 632371 - DNA, 55 bp, Artificial; identical to SEQ ID NO: 166361
  Synthetic oligonucleotide

SEQ ID NO: 632372 - DNA, 55 bp, Artificial; identical to SEQ ID NO: 212580
  Synthetic oligonucleotide

SEQ ID NO: 632373 - DNA, 59 bp, Artificial; identical to SEQ ID NO: 257104
  Synthetic oligonucleotide

SEQ ID NO: 632374 - DNA, 55 bp, Artificial; identical to SEQ ID NO: 221254
  Synthetic oligonucleotide

SEQ ID NO: 632375 - DNA, 60 bp, Artificial; identical to SEQ ID NO: 141818
  Synthetic oligonucleotide

SEQ ID NO: 632376 - DNA, 51 bp, Artificial; identical to SEQ ID NO: 186760
  Synthetic oligonucleotide

SEQ ID NO: 632377 - DNA, 54 bp, Artificial; identical to SEQ ID NO: 246171
  Synthetic oligonucleotide

SEQ ID NO: 632378 - DNA, 55 bp, Artificial; identical to SEQ ID NO: 159141
  Synthetic oligonucleotide

SEQ ID NO: 632379 - DNA, 55 bp, Artificial; identical to SEQ ID NO: 184641
  Synthetic oligonucleotide

SEQ ID NO: 632380 - DNA, 55 bp, Artificial; identical to SEQ ID NO: 184642
  Synthetic oligonucleotide

SEQ ID NO: 632381 - DNA, 52 bp, Artificial; identical to SEQ ID NO: 157516
  Synthetic oligonucleotide

SEQ ID NO: 632382 - DNA, 55 bp, Artificial; identical to SEQ ID NO: 261828
  Synthetic oligonucleotide

SEQ ID NO: 632383 - DNA, 60 bp, Artificial; identical to SEQ ID NO: 234153
  Synthetic oligonucleotide

SEQ ID NO: 632384 - DNA, 55 bp, Artificial; identical to SEQ ID NO: 245667
  Synthetic oligonucleotide

SEQ ID NO: 632385 - DNA, 54 bp, Artificial; identical to SEQ ID NO: 258070
  Synthetic oligonucleotide

SEQ ID NO: 632386 - DNA, 55 bp, Artificial; identical to SEQ ID NO: 147424
  Synthetic oligonucleotide

SEQ ID NO: 632387 - DNA, 55 bp, Artificial; identical to SEQ ID NO: 154063
  Synthetic oligonucleotide

SEQ ID NO: 632388 - DNA, 59 bp, Artificial; identical to SEQ ID NO: 170787
  Synthetic oligonucleotide

SEQ ID NO: 632389 - DNA, 60 bp, Artificial; identical to SEQ ID NO: 177326
  Synthetic oligonucleotide

SEQ ID NO: 632390 - DNA, 55 bp, Artificial; identical to SEQ ID NO: 184647
  Synthetic oligonucleotide

SEQ ID NO: 632391 - DNA, 55 bp, Artificial; identical to SEQ ID NO: 184650
  Synthetic oligonucleotide

SEQ ID NO: 632392 - DNA, 55 bp, Artificial; identical to SEQ ID NO: 262781
  Synthetic oligonucleotide

SEQ ID NO: 632393 - DNA, 60 bp, Artificial; identical to SEQ ID NO: 256436
  Synthetic oligonucleotide

SEQ ID NO: 632394 - DNA, 55 bp, Artificial; identical to SEQ ID NO: 207637
  Synthetic oligonucleotide

SEQ ID NO: 632395 - DNA, 55 bp, Artificial; identical to SEQ ID NO: 216375
  Synthetic oligonucleotide

SEQ ID NO: 632396 - DNA, 55 bp, Artificial; identical to SEQ ID NO: 215217
  Synthetic oligonucleotide

SEQ ID NO: 632397 - DNA, 55 bp, Artificial; identical to SEQ ID NO: 184653
  Synthetic oligonucleotide

SEQ ID NO: 632398 - DNA, 55 bp, Artificial; identical to SEQ ID NO: 209527
  Synthetic oligonucleotide

SEQ ID NO: 632399 - DNA, 55 bp, Artificial; identical to SEQ ID NO: 169803
  Synthetic oligonucleotide

SEQ ID NO: 632400 - DNA, 55 bp, Artificial; identical to SEQ ID NO: 190239
  Synthetic oligonucleotide

SEQ ID NO: 632401 - DNA, 55 bp, Artificial; identical to SEQ ID NO: 147414
  Synthetic oligonucleotide

SEQ ID NO: 632402 - DNA, 60 bp, Artificial; identical to SEQ ID NO: 246710
  Synthetic oligonucleotide

SEQ ID NO: 632403 - DNA, 53 bp, Artificial; identical to SEQ ID NO: 157441
  Synthetic oligonucleotide

SEQ ID NO: 632404 - DNA, 55 bp, Artificial; identical to SEQ ID NO: 245661
  Synthetic oligonucleotide

SEQ ID NO: 632405 - DNA, 60 bp, Artificial; identical to SEQ ID NO: 177323
  Synthetic oligonucleotide

SEQ ID NO: 632406 - DNA, 55 bp, Artificial; identical to SEQ ID NO: 259038
  Synthetic oligonucleotide

SEQ ID NO: 632407 - DNA, 55 bp, Artificial; identical to SEQ ID NO: 191769
  Synthetic oligonucleotide

SEQ ID NO: 632408 - DNA, 55 bp, Artificial; identical to SEQ ID NO: 187885
  Synthetic oligonucleotide

SEQ ID NO: 632409 - DNA, 60 bp, Artificial; identical to SEQ ID NO: 150558
  Synthetic oligonucleotide

SEQ ID NO: 632410 - DNA, 55 bp, Artificial; identical to SEQ ID NO: 233691
  Synthetic oligonucleotide

SEQ ID NO: 632411 - DNA, 55 bp, Artificial; identical to SEQ ID NO: 207638
  Synthetic oligonucleotide

SEQ ID NO: 632412 - DNA, 55 bp, Artificial; identical to SEQ ID NO: 221255
  Synthetic oligonucleotide

SEQ ID NO: 632413 - DNA, 55 bp, Artificial; identical to SEQ ID NO: 215206
  Synthetic oligonucleotide

SEQ ID NO: 632414 - DNA, 55 bp, Artificial; identical to SEQ ID NO: 171232
  Synthetic oligonucleotide

SEQ ID NO: 632415 - DNA, 54 bp, Artificial; identical to SEQ ID NO: 149267
  Synthetic oligonucleotide

SEQ ID NO: 632416 - DNA, 57 bp, Artificial; identical to SEQ ID NO: 198392
  Synthetic oligonucleotide

SEQ ID NO: 632417 - DNA, 55 bp, Artificial; identical to SEQ ID NO: 207639
  Synthetic oligonucleotide

SEQ ID NO: 632418 - DNA, 55 bp, Artificial; identical to SEQ ID NO: 240520
  Synthetic oligonucleotide

SEQ ID NO: 632419 - DNA, 59 bp, Artificial; identical to SEQ ID NO: 159934
  Synthetic oligonucleotide

SEQ ID NO: 632420 - DNA, 57 bp, Artificial; identical to SEQ ID NO: 206838
  Synthetic oligonucleotide

SEQ ID NO: 632421 - DNA, 51 bp, Artificial; identical to SEQ ID NO: 160832
  Synthetic oligonucleotide

SEQ ID NO: 632422 - DNA, 55 bp, Artificial; identical to SEQ ID NO: 184662
  Synthetic oligonucleotide

SEQ ID NO: 632423 - DNA, 51 bp, Artificial; identical to SEQ ID NO: 160576
  Synthetic oligonucleotide

SEQ ID NO: 632424 - DNA, 55 bp, Artificial; identical to SEQ ID NO: 147624
  Synthetic oligonucleotide

SEQ ID NO: 632425 - DNA, 55 bp, Artificial; identical to SEQ ID NO: 155744
  Synthetic oligonucleotide

SEQ ID NO: 632426 - DNA, 53 bp, Artificial; identical to SEQ ID NO: 199682
  Synthetic oligonucleotide

SEQ ID NO: 632427 - DNA, 58 bp, Artificial; identical to SEQ ID NO: 179399
  Synthetic oligonucleotide

SEQ ID NO: 632428 - DNA, 55 bp, Artificial; identical to SEQ ID NO: 245657
  Synthetic oligonucleotide

SEQ ID NO: 632429 - DNA, 55 bp, Artificial; identical to SEQ ID NO: 224701
  Synthetic oligonucleotide

SEQ ID NO: 632430 - DNA, 50 bp, Artificial; identical to SEQ ID NO: 150016
  Synthetic oligonucleotide

SEQ ID NO: 632431 - DNA, 55 bp, Artificial; identical to SEQ ID NO: 240521
  Synthetic oligonucleotide

SEQ ID NO: 632432 - DNA, 50 bp, Artificial; identical to SEQ ID NO: 160753
  Synthetic oligonucleotide

SEQ ID NO: 632433 - DNA, 51 bp, Artificial; identical to SEQ ID NO: 149924
  Synthetic oligonucleotide

SEQ ID NO: 632434 - DNA, 55 bp, Artificial; identical to SEQ ID NO: 261909
  Synthetic oligonucleotide

SEQ ID NO: 632435 - DNA, 58 bp, Artificial; identical to SEQ ID NO: 198281
  Synthetic oligonucleotide

SEQ ID NO: 632436 - DNA, 55 bp, Artificial; identical to SEQ ID NO: 151386
  Synthetic oligonucleotide

SEQ ID NO: 632437 - DNA, 60 bp, Artificial; identical to SEQ ID NO: 177317
  Synthetic oligonucleotide

SEQ ID NO: 632438 - DNA, 54 bp, Artificial; identical to SEQ ID NO: 191160
  Synthetic oligonucleotide

SEQ ID NO: 632439 - DNA, 60 bp, Artificial; identical to SEQ ID NO: 177315
  Synthetic oligonucleotide

SEQ ID NO: 632440 - DNA, 55 bp, Artificial; identical to SEQ ID NO: 171233
  Synthetic oligonucleotide

SEQ ID NO: 632441 - DNA, 55 bp, Artificial; identical to SEQ ID NO: 184742
  Synthetic oligonucleotide

SEQ ID NO: 632442 - DNA, 55 bp, Artificial; identical to SEQ ID NO: 256818
  Synthetic oligonucleotide

SEQ ID NO: 632443 - DNA, 55 bp, Artificial; identical to SEQ ID NO: 261850
  Synthetic oligonucleotide

SEQ ID NO: 632444 - DNA, 55 bp, Artificial; identical to SEQ ID NO: 217910
  Synthetic oligonucleotide

SEQ ID NO: 632445 - DNA, 56 bp, Artificial; identical to SEQ ID NO: 197879
  Synthetic oligonucleotide

SEQ ID NO: 632446 - DNA, 55 bp, Artificial; identical to SEQ ID NO: 256817
  Synthetic oligonucleotide

SEQ ID NO: 632447 - DNA, 51 bp, Artificial; identical to SEQ ID NO: 141352
  Synthetic oligonucleotide

SEQ ID NO: 632448 - DNA, 52 bp, Artificial; identical to SEQ ID NO: 186126
  Synthetic oligonucleotide

SEQ ID NO: 632449 - DNA, 55 bp, Artificial; identical to SEQ ID NO: 184744
  Synthetic oligonucleotide

SEQ ID NO: 632450 - DNA, 55 bp, Artificial; identical to SEQ ID NO: 224705
  Synthetic oligonucleotide

SEQ ID NO: 632451 - DNA, 57 bp, Artificial; identical to SEQ ID NO: 198170
  Synthetic oligonucleotide

SEQ ID NO: 632452 - DNA, 53 bp, Artificial; identical to SEQ ID NO: 185587
  Synthetic oligonucleotide

SEQ ID NO: 632453 - DNA, 56 bp, Artificial; identical to SEQ ID NO: 177314
  Synthetic oligonucleotide

SEQ ID NO: 632454 - DNA, 60 bp, Artificial; identical to SEQ ID NO: 153020
  Synthetic oligonucleotide

SEQ ID NO: 632455 - DNA, 55 bp, Artificial; identical to SEQ ID NO: 144295
  Synthetic oligonucleotide

SEQ ID NO: 632456 - DNA, 51 bp, Artificial; identical to SEQ ID NO: 186791
  Synthetic oligonucleotide

SEQ ID NO: 632457 - DNA, 51 bp, Artificial; identical to SEQ ID NO: 237162
  Synthetic oligonucleotide

SEQ ID NO: 632458 - DNA, 53 bp, Artificial; identical to SEQ ID NO: 188041
  Synthetic oligonucleotide

SEQ ID NO: 632459 - DNA, 53 bp, Artificial; identical to SEQ ID NO: 203597
  Synthetic oligonucleotide

SEQ ID NO: 632460 - DNA, 53 bp, Artificial; identical to SEQ ID NO: 160450
  Synthetic oligonucleotide

SEQ ID NO: 632461 - DNA, 55 bp, Artificial; identical to SEQ ID NO: 245651
  Synthetic oligonucleotide

SEQ ID NO: 632462 - DNA, 59 bp, Artificial; identical to SEQ ID NO: 177312
  Synthetic oligonucleotide

SEQ ID NO: 632463 - DNA, 56 bp, Artificial; identical to SEQ ID NO: 166085
  Synthetic oligonucleotide

SEQ ID NO: 632464 - DNA, 55 bp, Artificial; identical to SEQ ID NO: 159145
  Synthetic oligonucleotide

SEQ ID NO: 632465 - DNA, 55 bp, Artificial; identical to SEQ ID NO: 212579
  Synthetic oligonucleotide

SEQ ID NO: 632466 - DNA, 60 bp, Artificial; identical to SEQ ID NO: 152979
  Synthetic oligonucleotide

SEQ ID NO: 632467 - DNA, 56 bp, Artificial; identical to SEQ ID NO: 159808
  Synthetic oligonucleotide

SEQ ID NO: 632468 - DNA, 58 bp, Artificial; identical to SEQ ID NO: 141841
  Synthetic oligonucleotide

SEQ ID NO: 632469 - DNA, 55 bp, Artificial; identical to SEQ ID NO: 222897
  Synthetic oligonucleotide

SEQ ID NO: 632470 - DNA, 55 bp, Artificial; identical to SEQ ID NO: 184762
  Synthetic oligonucleotide

SEQ ID NO: 632471 - DNA, 55 bp, Artificial; identical to SEQ ID NO: 217914
  Synthetic oligonucleotide

SEQ ID NO: 632472 - DNA, 55 bp, Artificial; identical to SEQ ID NO: 184763
  Synthetic oligonucleotide

SEQ ID NO: 632473 - DNA, 50 bp, Artificial; identical to SEQ ID NO: 150563
  Synthetic oligonucleotide

SEQ ID NO: 632474 - DNA, 55 bp, Artificial; identical to SEQ ID NO: 240524
  Synthetic oligonucleotide

SEQ ID NO: 632475 - DNA, 55 bp, Artificial; identical to SEQ ID NO: 256814
  Synthetic oligonucleotide

SEQ ID NO: 632476 - DNA, 60 bp, Artificial; identical to SEQ ID NO: 177309
  Synthetic oligonucleotide

SEQ ID NO: 632477 - DNA, 55 bp, Artificial; identical to SEQ ID NO: 184768
  Synthetic oligonucleotide

SEQ ID NO: 632478 - DNA, 55 bp, Artificial; identical to SEQ ID NO: 256813
  Synthetic oligonucleotide

SEQ ID NO: 632479 - DNA, 60 bp, Artificial; identical to SEQ ID NO: 144887
  Synthetic oligonucleotide

SEQ ID NO: 632480 - DNA, 58 bp, Artificial; identical to SEQ ID NO: 201135
  Synthetic oligonucleotide

SEQ ID NO: 632481 - DNA, 55 bp, Artificial; identical to SEQ ID NO: 191300
  Synthetic oligonucleotide

SEQ ID NO: 632482 - DNA, 55 bp, Artificial; identical to SEQ ID NO: 184773
  Synthetic oligonucleotide

SEQ ID NO: 632483 - DNA, 57 bp, Artificial; identical to SEQ ID NO: 256495
  Synthetic oligonucleotide

SEQ ID NO: 632484 - DNA, 55 bp, Artificial; identical to SEQ ID NO: 224650
  Synthetic oligonucleotide

SEQ ID NO: 632485 - DNA, 50 bp, Artificial; identical to SEQ ID NO: 246846
  Synthetic oligonucleotide

SEQ ID NO: 632486 - DNA, 55 bp, Artificial; identical to SEQ ID NO: 159146
  Synthetic oligonucleotide

SEQ ID NO: 632487 - DNA, 55 bp, Artificial; identical to SEQ ID NO: 199480
  Synthetic oligonucleotide

SEQ ID NO: 632488 - DNA, 55 bp, Artificial; identical to SEQ ID NO: 184708
  Synthetic oligonucleotide

SEQ ID NO: 632489 - DNA, 55 bp, Artificial; identical to SEQ ID NO: 187888
  Synthetic oligonucleotide

SEQ ID NO: 632490 - DNA, 55 bp, Artificial; identical to SEQ ID NO: 173656
  Synthetic oligonucleotide

SEQ ID NO: 632491 - DNA, 52 bp, Artificial; identical to SEQ ID NO: 240957
  Synthetic oligonucleotide

SEQ ID NO: 632492 - DNA, 55 bp, Artificial; identical to SEQ ID NO: 171234
  Synthetic oligonucleotide

SEQ ID NO: 632493 - DNA, 55 bp, Artificial; identical to SEQ ID NO: 168266
  Synthetic oligonucleotide

SEQ ID NO: 632494 - DNA, 55 bp, Artificial; identical to SEQ ID NO: 196232
  Synthetic oligonucleotide

SEQ ID NO: 632495 - DNA, 51 bp, Artificial; identical to SEQ ID NO: 247994
  Synthetic oligonucleotide

SEQ ID NO: 632496 - DNA, 50 bp, Artificial; identical to SEQ ID NO: 206658
  Synthetic oligonucleotide

SEQ ID NO: 632497 - DNA, 55 bp, Artificial; identical to SEQ ID NO: 257644
  Synthetic oligonucleotide

SEQ ID NO: 632498 - DNA, 55 bp, Artificial; identical to SEQ ID NO: 221260
  Synthetic oligonucleotide

SEQ ID NO: 632499 - DNA, 57 bp, Artificial; identical to SEQ ID NO: 224246
  Synthetic oligonucleotide

SEQ ID NO: 632500 - DNA, 55 bp, Artificial; identical to SEQ ID NO: 212575
  Synthetic oligonucleotide

SEQ ID NO: 632501 - DNA, 55 bp, Artificial; identical to SEQ ID NO: 256812
  Synthetic oligonucleotide

SEQ ID NO: 632502 - DNA, 55 bp, Artificial; identical to SEQ ID NO: 196820
  Synthetic oligonucleotide

SEQ ID NO: 632503 - DNA, 55 bp, Artificial; identical to SEQ ID NO: 184714
  Synthetic oligonucleotide

SEQ ID NO: 632504 - DNA, 54 bp, Artificial; identical to SEQ ID NO: 246743
  Synthetic oligonucleotide

SEQ ID NO: 632505 - DNA, 55 bp, Artificial; identical to SEQ ID NO: 167008
  Synthetic oligonucleotide

SEQ ID NO: 632506 - DNA, 55 bp, Artificial; identical to SEQ ID NO: 184719
  Synthetic oligonucleotide

SEQ ID NO: 632507 - DNA, 57 bp, Artificial; identical to SEQ ID NO: 150565
  Synthetic oligonucleotide

SEQ ID NO: 632508 - DNA, 55 bp, Artificial; identical to SEQ ID NO: 234381
  Synthetic oligonucleotide

SEQ ID NO: 632509 - DNA, 52 bp, Artificial; identical to SEQ ID NO: 152529
  Synthetic oligonucleotide

SEQ ID NO: 632510 - DNA, 55 bp, Artificial; identical to SEQ ID NO: 153256
  Synthetic oligonucleotide

SEQ ID NO: 632511 - DNA, 55 bp, Artificial; identical to SEQ ID NO: 177303
  Synthetic oligonucleotide

SEQ ID NO: 632512 - DNA, 55 bp, Artificial; identical to SEQ ID NO: 256811
  Synthetic oligonucleotide

SEQ ID NO: 632513 - DNA, 55 bp, Artificial; identical to SEQ ID NO: 202005
  Synthetic oligonucleotide

SEQ ID NO: 632514 - DNA, 53 bp, Artificial; identical to SEQ ID NO: 240766
  Synthetic oligonucleotide

SEQ ID NO: 632515 - DNA, 60 bp, Artificial; identical to SEQ ID NO: 166278
  Synthetic oligonucleotide

SEQ ID NO: 632516 - DNA, 59 bp, Artificial; identical to SEQ ID NO: 177301
  Synthetic oligonucleotide

SEQ ID NO: 632517 - DNA, 55 bp, Artificial; identical to SEQ ID NO: 184724
  Synthetic oligonucleotide

SEQ ID NO: 632518 - DNA, 57 bp, Artificial; identical to SEQ ID NO: 166159
  Synthetic oligonucleotide

SEQ ID NO: 632519 - DNA, 59 bp, Artificial; identical to SEQ ID NO: 177300
  Synthetic oligonucleotide

SEQ ID NO: 632520 - DNA, 50 bp, Artificial; identical to SEQ ID NO: 266317
  Synthetic oligonucleotide

SEQ ID NO: 632521 - DNA, 51 bp, Artificial; identical to SEQ ID NO: 202569
  Synthetic oligonucleotide

SEQ ID NO: 632522 - DNA, 60 bp, Artificial; identical to SEQ ID NO: 243418
  Synthetic oligonucleotide

SEQ ID NO: 632523 - DNA, 55 bp, Artificial; identical to SEQ ID NO: 219664
  Synthetic oligonucleotide

SEQ ID NO: 632524 - DNA, 55 bp, Artificial; identical to SEQ ID NO: 171235
  Synthetic oligonucleotide

SEQ ID NO: 632525 - DNA, 55 bp, Artificial; identical to SEQ ID NO: 252689
  Synthetic oligonucleotide

SEQ ID NO: 632526 - DNA, 55 bp, Artificial; identical to SEQ ID NO: 141167
  Synthetic oligonucleotide

SEQ ID NO: 632527 - DNA, 52 bp, Artificial; identical to SEQ ID NO: 184731
  Synthetic oligonucleotide

SEQ ID NO: 632528 - DNA, 55 bp, Artificial; identical to SEQ ID NO: 245808
  Synthetic oligonucleotide

SEQ ID NO: 632529 - DNA, 58 bp, Artificial; identical to SEQ ID NO: 156420
  Synthetic oligonucleotide

SEQ ID NO: 632530 - DNA, 55 bp, Artificial; identical to SEQ ID NO: 184735
  Synthetic oligonucleotide

SEQ ID NO: 632531 - DNA, 59 bp, Artificial; identical to SEQ ID NO: 177354
  Synthetic oligonucleotide

SEQ ID NO: 632532 - DNA, 55 bp, Artificial; identical to SEQ ID NO: 259015
  Synthetic oligonucleotide

SEQ ID NO: 632533 - DNA, 51 bp, Artificial; identical to SEQ ID NO: 216774
  Synthetic oligonucleotide

SEQ ID NO: 632534 - DNA, 55 bp, Artificial; identical to SEQ ID NO: 252912
  Synthetic oligonucleotide

SEQ ID NO: 632535 - DNA, 55 bp, Artificial; identical to SEQ ID NO: 174470
  Synthetic oligonucleotide

SEQ ID NO: 632536 - DNA, 55 bp, Artificial; identical to SEQ ID NO: 159149
  Synthetic oligonucleotide

SEQ ID NO: 632537 - DNA, 55 bp, Artificial; identical to SEQ ID NO: 190245
  Synthetic oligonucleotide

SEQ ID NO: 632538 - DNA, 55 bp, Artificial; identical to SEQ ID NO: 159150
  Synthetic oligonucleotide

SEQ ID NO: 632539 - DNA, 55 bp, Artificial; identical to SEQ ID NO: 184538
  Synthetic oligonucleotide

SEQ ID NO: 632540 - DNA, 55 bp, Artificial; identical to SEQ ID NO: 184539
  Synthetic oligonucleotide

SEQ ID NO: 632541 - DNA, 60 bp, Artificial; identical to SEQ ID NO: 224227
  Synthetic oligonucleotide

SEQ ID NO: 632542 - DNA, 58 bp, Artificial; identical to SEQ ID NO: 212384
  Synthetic oligonucleotide

SEQ ID NO: 632543 - DNA, 54 bp, Artificial; identical to SEQ ID NO: 185217
  Synthetic oligonucleotide

SEQ ID NO: 632544 - DNA, 57 bp, Artificial; identical to SEQ ID NO: 187371
  Synthetic oligonucleotide

SEQ ID NO: 632545 - DNA, 55 bp, Artificial; identical to SEQ ID NO: 147542
  Synthetic oligonucleotide

SEQ ID NO: 632546 - DNA, 55 bp, Artificial; identical to SEQ ID NO: 202066
  Synthetic oligonucleotide

SEQ ID NO: 632547 - DNA, 55 bp, Artificial; identical to SEQ ID NO: 256809
  Synthetic oligonucleotide

SEQ ID NO: 632548 - DNA, 55 bp, Artificial; identical to SEQ ID NO: 166405
  Synthetic oligonucleotide

SEQ ID NO: 632549 - DNA, 54 bp, Artificial; identical to SEQ ID NO: 224361
  Synthetic oligonucleotide

SEQ ID NO: 632550 - DNA, 52 bp, Artificial; identical to SEQ ID NO: 165121
  Synthetic oligonucleotide

SEQ ID NO: 632551 - DNA, 55 bp, Artificial; identical to SEQ ID NO: 166404
  Synthetic oligonucleotide

SEQ ID NO: 632552 - DNA, 55 bp, Artificial; identical to SEQ ID NO: 191772
  Synthetic oligonucleotide

SEQ ID NO: 632553 - DNA, 55 bp, Artificial; identical to SEQ ID NO: 260222
  Synthetic oligonucleotide

SEQ ID NO: 632554 - DNA, 53 bp, Artificial; identical to SEQ ID NO: 185213
  Synthetic oligonucleotide

SEQ ID NO: 632555 - DNA, 59 bp, Artificial; identical to SEQ ID NO: 177352
  Synthetic oligonucleotide

SEQ ID NO: 632556 - DNA, 55 bp, Artificial; identical to SEQ ID NO: 245803
  Synthetic oligonucleotide

SEQ ID NO: 632557 - DNA, 51 bp, Artificial; identical to SEQ ID NO: 221262
  Synthetic oligonucleotide

SEQ ID NO: 632558 - DNA, 52 bp, Artificial; identical to SEQ ID NO: 241916
  Synthetic oligonucleotide

SEQ ID NO: 632559 - DNA, 55 bp, Artificial; identical to SEQ ID NO: 245802
  Synthetic oligonucleotide

SEQ ID NO: 632560 - DNA, 51 bp, Artificial; identical to SEQ ID NO: 177351
  Synthetic oligonucleotide

SEQ ID NO: 632561 - DNA, 60 bp, Artificial; identical to SEQ ID NO: 238259
  Synthetic oligonucleotide

SEQ ID NO: 632562 - DNA, 52 bp, Artificial; identical to SEQ ID NO: 149661
  Synthetic oligonucleotide

SEQ ID NO: 632563 - DNA, 55 bp, Artificial; identical to SEQ ID NO: 242727
  Synthetic oligonucleotide

SEQ ID NO: 632564 - DNA, 53 bp, Artificial; identical to SEQ ID NO: 168931
  Synthetic oligonucleotide

SEQ ID NO: 632565 - DNA, 51 bp, Artificial; identical to SEQ ID NO: 197694
  Synthetic oligonucleotide

SEQ ID NO: 632566 - DNA, 60 bp, Artificial; identical to SEQ ID NO: 241915
  Synthetic oligonucleotide

SEQ ID NO: 632567 - DNA, 51 bp, Artificial; identical to SEQ ID NO: 186866
  Synthetic oligonucleotide

SEQ ID NO: 632568 - DNA, 52 bp, Artificial; identical to SEQ ID NO: 188113
  Synthetic oligonucleotide

SEQ ID NO: 632569 - DNA, 59 bp, Artificial; identical to SEQ ID NO: 211080
  Synthetic oligonucleotide

SEQ ID NO: 632570 - DNA, 54 bp, Artificial; identical to SEQ ID NO: 147131
  Synthetic oligonucleotide

SEQ ID NO: 632571 - DNA, 55 bp, Artificial; identical to SEQ ID NO: 159152
  Synthetic oligonucleotide

SEQ ID NO: 632572 - DNA, 59 bp, Artificial; identical to SEQ ID NO: 177345
  Synthetic oligonucleotide

SEQ ID NO: 632573 - DNA, 51 bp, Artificial; identical to SEQ ID NO: 157860
  Synthetic oligonucleotide

SEQ ID NO: 632574 - DNA, 56 bp, Artificial; identical to SEQ ID NO: 256449
  Synthetic oligonucleotide

SEQ ID NO: 632575 - DNA, 55 bp, Artificial; identical to SEQ ID NO: 184554
  Synthetic oligonucleotide

SEQ ID NO: 632576 - DNA, 51 bp, Artificial; identical to SEQ ID NO: 160932
  Synthetic oligonucleotide

SEQ ID NO: 632577 - DNA, 51 bp, Artificial; identical to SEQ ID NO: 206491
  Synthetic oligonucleotide

SEQ ID NO: 632578 - DNA, 53 bp, Artificial; identical to SEQ ID NO: 189104
  Synthetic oligonucleotide

SEQ ID NO: 632579 - DNA, 55 bp, Artificial; identical to SEQ ID NO: 240529
  Synthetic oligonucleotide

SEQ ID NO: 632580 - DNA, 55 bp, Artificial; identical to SEQ ID NO: 190247
  Synthetic oligonucleotide

SEQ ID NO: 632581 - DNA, 57 bp, Artificial; identical to SEQ ID NO: 150567
  Synthetic oligonucleotide

SEQ ID NO: 632582 - DNA, 55 bp, Artificial; identical to SEQ ID NO: 184555
  Synthetic oligonucleotide

SEQ ID NO: 632583 - DNA, 55 bp, Artificial; identical to SEQ ID NO: 242990
  Synthetic oligonucleotide

SEQ ID NO: 632584 - DNA, 55 bp, Artificial; identical to SEQ ID NO: 245797
  Synthetic oligonucleotide

SEQ ID NO: 632585 - DNA, 58 bp, Artificial; identical to SEQ ID NO: 187805
  Synthetic oligonucleotide

SEQ ID NO: 632586 - DNA, 55 bp, Artificial; identical to SEQ ID NO: 184556
  Synthetic oligonucleotide

SEQ ID NO: 632587 - DNA, 55 bp, Artificial; identical to SEQ ID NO: 188910
  Synthetic oligonucleotide

SEQ ID NO: 632588 - DNA, 55 bp, Artificial; identical to SEQ ID NO: 194402
  Synthetic oligonucleotide

SEQ ID NO: 632589 - DNA, 55 bp, Artificial; identical to SEQ ID NO: 221478
  Synthetic oligonucleotide

SEQ ID NO: 632590 - DNA, 55 bp, Artificial; identical to SEQ ID NO: 147516
  Synthetic oligonucleotide

SEQ ID NO: 632591 - DNA, 55 bp, Artificial; identical to SEQ ID NO: 166399
  Synthetic oligonucleotide

SEQ ID NO: 632592 - DNA, 50 bp, Artificial; identical to SEQ ID NO: 152505
  Synthetic oligonucleotide

SEQ ID NO: 632593 - DNA, 60 bp, Artificial; identical to SEQ ID NO: 177344
  Synthetic oligonucleotide

SEQ ID NO: 632594 - DNA, 55 bp, Artificial; identical to SEQ ID NO: 147566
  Synthetic oligonucleotide

SEQ ID NO: 632595 - DNA, 55 bp, Artificial; identical to SEQ ID NO: 208313
  Synthetic oligonucleotide

SEQ ID NO: 632596 - DNA, 60 bp, Artificial; identical to SEQ ID NO: 166877
  Synthetic oligonucleotide

SEQ ID NO: 632597 - DNA, 54 bp, Artificial; identical to SEQ ID NO: 211069
  Synthetic oligonucleotide

SEQ ID NO: 632598 - DNA, 54 bp, Artificial; identical to SEQ ID NO: 155515
  Synthetic oligonucleotide

SEQ ID NO: 632599 - DNA, 55 bp, Artificial; identical to SEQ ID NO: 257100
  Synthetic oligonucleotide

SEQ ID NO: 632600 - DNA, 52 bp, Artificial; identical to SEQ ID NO: 246501
  Synthetic oligonucleotide

SEQ ID NO: 632601 - DNA, 55 bp, Artificial; identical to SEQ ID NO: 151388
  Synthetic oligonucleotide

SEQ ID NO: 632602 - DNA, 53 bp, Artificial; identical to SEQ ID NO: 185679
  Synthetic oligonucleotide

SEQ ID NO: 632603 - DNA, 55 bp, Artificial; identical to SEQ ID NO: 153252
  Synthetic oligonucleotide

SEQ ID NO: 632604 - DNA, 52 bp, Artificial; identical to SEQ ID NO: 199950
  Synthetic oligonucleotide

SEQ ID NO: 632605 - DNA, 55 bp, Artificial; identical to SEQ ID NO: 184565
  Synthetic oligonucleotide

SEQ ID NO: 632606 - DNA, 55 bp, Artificial; identical to SEQ ID NO: 155338
  Synthetic oligonucleotide

SEQ ID NO: 632607 - DNA, 55 bp, Artificial; identical to SEQ ID NO: 172936
  Synthetic oligonucleotide

SEQ ID NO: 632608 - DNA, 55 bp, Artificial; identical to SEQ ID NO: 224655
  Synthetic oligonucleotide

SEQ ID NO: 632609 - DNA, 59 bp, Artificial; identical to SEQ ID NO: 246799
  Synthetic oligonucleotide

SEQ ID NO: 632610 - DNA, 60 bp, Artificial; identical to SEQ ID NO: 155976
  Synthetic oligonucleotide

SEQ ID NO: 632611 - DNA, 55 bp, Artificial; identical to SEQ ID NO: 168271
  Synthetic oligonucleotide

SEQ ID NO: 632612 - DNA, 56 bp, Artificial; identical to SEQ ID NO: 248437
  Synthetic oligonucleotide

SEQ ID NO: 632613 - DNA, 55 bp, Artificial; identical to SEQ ID NO: 174471
  Synthetic oligonucleotide

SEQ ID NO: 632614 - DNA, 55 bp, Artificial; identical to SEQ ID NO: 252913
  Synthetic oligonucleotide

SEQ ID NO: 632615 - DNA, 55 bp, Artificial; identical to SEQ ID NO: 240532
  Synthetic oligonucleotide

SEQ ID NO: 632616 - DNA, 60 bp, Artificial; identical to SEQ ID NO: 238282
  Synthetic oligonucleotide

SEQ ID NO: 632617 - DNA, 55 bp, Artificial; identical to SEQ ID NO: 245792
  Synthetic oligonucleotide

SEQ ID NO: 632618 - DNA, 53 bp, Artificial; identical to SEQ ID NO: 212978
  Synthetic oligonucleotide

SEQ ID NO: 632619 - DNA, 55 bp, Artificial; identical to SEQ ID NO: 256806
  Synthetic oligonucleotide

SEQ ID NO: 632620 - DNA, 55 bp, Artificial; identical to SEQ ID NO: 215173
  Synthetic oligonucleotide

SEQ ID NO: 632621 - DNA, 55 bp, Artificial; identical to SEQ ID NO: 153251
  Synthetic oligonucleotide

SEQ ID NO: 632622 - DNA, 55 bp, Artificial; identical to SEQ ID NO: 158887
  Synthetic oligonucleotide

SEQ ID NO: 632623 - DNA, 55 bp, Artificial; identical to SEQ ID NO: 158909
  Synthetic oligonucleotide

SEQ ID NO: 632624 - DNA, 60 bp, Artificial; identical to SEQ ID NO: 243429
  Synthetic oligonucleotide

SEQ ID NO: 632625 - DNA, 55 bp, Artificial; identical to SEQ ID NO: 216542
  Synthetic oligonucleotide

SEQ ID NO: 632626 - DNA, 55 bp, Artificial; identical to SEQ ID NO: 245791
  Synthetic oligonucleotide

SEQ ID NO: 632627 - DNA, 55 bp, Artificial; identical to SEQ ID NO: 184509
  Synthetic oligonucleotide

SEQ ID NO: 632628 - DNA, 55 bp, Artificial; identical to SEQ ID NO: 154408
  Synthetic oligonucleotide

SEQ ID NO: 632629 - DNA, 51 bp, Artificial; identical to SEQ ID NO: 255751
  Synthetic oligonucleotide

SEQ ID NO: 632630 - DNA, 51 bp, Artificial; identical to SEQ ID NO: 186432
  Synthetic oligonucleotide

SEQ ID NO: 632631 - DNA, 55 bp, Artificial; identical to SEQ ID NO: 184511
  Synthetic oligonucleotide

SEQ ID NO: 632632 - DNA, 55 bp, Artificial; identical to SEQ ID NO: 196776
  Synthetic oligonucleotide

SEQ ID NO: 632633 - DNA, 55 bp, Artificial; identical to SEQ ID NO: 225152
  Synthetic oligonucleotide

SEQ ID NO: 632634 - DNA, 51 bp, Artificial; identical to SEQ ID NO: 153680
  Synthetic oligonucleotide

SEQ ID NO: 632635 - DNA, 55 bp, Artificial; identical to SEQ ID NO: 184513
  Synthetic oligonucleotide

SEQ ID NO: 632636 - DNA, 55 bp, Artificial; identical to SEQ ID NO: 184517
  Synthetic oligonucleotide

SEQ ID NO: 632637 - DNA, 55 bp, Artificial; identical to SEQ ID NO: 263369
  Synthetic oligonucleotide

SEQ ID NO: 632638 - DNA, 52 bp, Artificial; identical to SEQ ID NO: 247954
  Synthetic oligonucleotide

SEQ ID NO: 632639 - DNA, 55 bp, Artificial; identical to SEQ ID NO: 265636
  Synthetic oligonucleotide

SEQ ID NO: 632640 - DNA, 55 bp, Artificial; identical to SEQ ID NO: 169826
  Synthetic oligonucleotide

SEQ ID NO: 632641 - DNA, 60 bp, Artificial; identical to SEQ ID NO: 208540
  Synthetic oligonucleotide

SEQ ID NO: 632642 - DNA, 55 bp, Artificial; identical to SEQ ID NO: 199291
  Synthetic oligonucleotide

SEQ ID NO: 632643 - DNA, 57 bp, Artificial; identical to SEQ ID NO: 243440
  Synthetic oligonucleotide

SEQ ID NO: 632644 - DNA, 55 bp, Artificial; identical to SEQ ID NO: 152573
  Synthetic oligonucleotide

SEQ ID NO: 632645 - DNA, 55 bp, Artificial; identical to SEQ ID NO: 155337
  Synthetic oligonucleotide

SEQ ID NO: 632646 - DNA, 55 bp, Artificial; identical to SEQ ID NO: 205401
  Synthetic oligonucleotide

SEQ ID NO: 632647 - DNA, 60 bp, Artificial; identical to SEQ ID NO: 241908
  Synthetic oligonucleotide

SEQ ID NO: 632648 - DNA, 59 bp, Artificial; identical to SEQ ID NO: 177333
  Synthetic oligonucleotide

SEQ ID NO: 632649 - DNA, 54 bp, Artificial; identical to SEQ ID NO: 247779
  Synthetic oligonucleotide

SEQ ID NO: 632650 - DNA, 55 bp, Artificial; identical to SEQ ID NO: 184527
  Synthetic oligonucleotide

SEQ ID NO: 632651 - DNA, 55 bp, Artificial; identical to SEQ ID NO: 166397
  Synthetic oligonucleotide

SEQ ID NO: 632652 - DNA, 55 bp, Artificial; identical to SEQ ID NO: 256802
  Synthetic oligonucleotide

SEQ ID NO: 632653 - DNA, 60 bp, Artificial; identical to SEQ ID NO: 241906
  Synthetic oligonucleotide

SEQ ID NO: 632654 - DNA, 57 bp, Artificial; identical to SEQ ID NO: 241845
  Synthetic oligonucleotide

SEQ ID NO: 632655 - DNA, 55 bp, Artificial; identical to SEQ ID NO: 210889
  Synthetic oligonucleotide

SEQ ID NO: 632656 - DNA, 56 bp, Artificial; identical to SEQ ID NO: 209234
  Synthetic oligonucleotide

SEQ ID NO: 632657 - DNA, 58 bp, Artificial; identical to SEQ ID NO: 179573
  Synthetic oligonucleotide

SEQ ID NO: 632658 - DNA, 50 bp, Artificial; identical to SEQ ID NO: 145132
  Synthetic oligonucleotide

SEQ ID NO: 632659 - DNA, 55 bp, Artificial; identical to SEQ ID NO: 210890
  Synthetic oligonucleotide

SEQ ID NO: 632660 - DNA, 55 bp, Artificial; identical to SEQ ID NO: 245788
  Synthetic oligonucleotide

SEQ ID NO: 632661 - DNA, 50 bp, Artificial; identical to SEQ ID NO: 246851
  Synthetic oligonucleotide

SEQ ID NO: 632662 - DNA, 56 bp, Artificial; identical to SEQ ID NO: 202640
  Synthetic oligonucleotide

SEQ ID NO: 632663 - DNA, 50 bp, Artificial; identical to SEQ ID NO: 152246
  Synthetic oligonucleotide

SEQ ID NO: 632664 - DNA, 55 bp, Artificial; identical to SEQ ID NO: 256801
  Synthetic oligonucleotide

SEQ ID NO: 632665 - DNA, 55 bp, Artificial; identical to SEQ ID NO: 174473
  Synthetic oligonucleotide

SEQ ID NO: 632666 - DNA, 51 bp, Artificial; identical to SEQ ID NO: 197698
  Synthetic oligonucleotide

SEQ ID NO: 632667 - DNA, 60 bp, Artificial; identical to SEQ ID NO: 224647
  Synthetic oligonucleotide

SEQ ID NO: 632668 - DNA, 55 bp, Artificial; identical to SEQ ID NO: 184606
  Synthetic oligonucleotide

SEQ ID NO: 632669 - DNA, 55 bp, Artificial; identical to SEQ ID NO: 261579
  Synthetic oligonucleotide

SEQ ID NO: 632670 - DNA, 53 bp, Artificial; identical to SEQ ID NO: 184607
  Synthetic oligonucleotide

SEQ ID NO: 632671 - DNA, 54 bp, Artificial; identical to SEQ ID NO: 256800
  Synthetic oligonucleotide

SEQ ID NO: 632672 - DNA, 55 bp, Artificial; identical to SEQ ID NO: 166396
  Synthetic oligonucleotide

SEQ ID NO: 632673 - DNA, 54 bp, Artificial; identical to SEQ ID NO: 266382
  Synthetic oligonucleotide

SEQ ID NO: 632674 - DNA, 55 bp, Artificial; identical to SEQ ID NO: 184608
  Synthetic oligonucleotide

SEQ ID NO: 632675 - DNA, 51 bp, Artificial; identical to SEQ ID NO: 149938
  Synthetic oligonucleotide

SEQ ID NO: 632676 - DNA, 55 bp, Artificial; identical to SEQ ID NO: 199390
  Synthetic oligonucleotide

SEQ ID NO: 632677 - DNA, 58 bp, Artificial; identical to SEQ ID NO: 151444
  Synthetic oligonucleotide

SEQ ID NO: 632678 - DNA, 55 bp, Artificial; identical to SEQ ID NO: 256799
  Synthetic oligonucleotide

SEQ ID NO: 632679 - DNA, 53 bp, Artificial; identical to SEQ ID NO: 191776
  Synthetic oligonucleotide

SEQ ID NO: 632680 - DNA, 50 bp, Artificial; identical to SEQ ID NO: 176680
  Synthetic oligonucleotide

SEQ ID NO: 632681 - DNA, 53 bp, Artificial; identical to SEQ ID NO: 246330
  Synthetic oligonucleotide

SEQ ID NO: 632682 - DNA, 50 bp, Artificial; identical to SEQ ID NO: 150541
  Synthetic oligonucleotide

SEQ ID NO: 632683 - DNA, 55 bp, Artificial; identical to SEQ ID NO: 198059
  Synthetic oligonucleotide

SEQ ID NO: 632684 - DNA, 55 bp, Artificial; identical to SEQ ID NO: 256798
  Synthetic oligonucleotide

SEQ ID NO: 632685 - DNA, 53 bp, Artificial; identical to SEQ ID NO: 167252
  Synthetic oligonucleotide

SEQ ID NO: 632686 - DNA, 54 bp, Artificial; identical to SEQ ID NO: 187907
  Synthetic oligonucleotide

SEQ ID NO: 632687 - DNA, 52 bp, Artificial; identical to SEQ ID NO: 191210
  Synthetic oligonucleotide

SEQ ID NO: 632688 - DNA, 55 bp, Artificial; identical to SEQ ID NO: 153250
  Synthetic oligonucleotide

SEQ ID NO: 632689 - DNA, 55 bp, Artificial; identical to SEQ ID NO: 169837
  Synthetic oligonucleotide

SEQ ID NO: 632690 - DNA, 55 bp, Artificial; identical to SEQ ID NO: 240344
  Synthetic oligonucleotide

SEQ ID NO: 632691 - DNA, 54 bp, Artificial; identical to SEQ ID NO: 210893
  Synthetic oligonucleotide

SEQ ID NO: 632692 - DNA, 55 bp, Artificial; identical to SEQ ID NO: 166395
  Synthetic oligonucleotide

SEQ ID NO: 632693 - DNA, 53 bp, Artificial; identical to SEQ ID NO: 142529
  Synthetic oligonucleotide

SEQ ID NO: 632694 - DNA, 55 bp, Artificial; identical to SEQ ID NO: 218484
  Synthetic oligonucleotide

SEQ ID NO: 632695 - DNA, 54 bp, Artificial; identical to SEQ ID NO: 159815
  Synthetic oligonucleotide

SEQ ID NO: 632696 - DNA, 55 bp, Artificial; identical to SEQ ID NO: 146594
  Synthetic oligonucleotide

SEQ ID NO: 632697 - DNA, 51 bp, Artificial; identical to SEQ ID NO: 160592
  Synthetic oligonucleotide

SEQ ID NO: 632698 - DNA, 50 bp, Artificial; identical to SEQ ID NO: 243145
  Synthetic oligonucleotide

SEQ ID NO: 632699 - DNA, 55 bp, Artificial; identical to SEQ ID NO: 240345
  Synthetic oligonucleotide

SEQ ID NO: 632700 - DNA, 55 bp, Artificial; identical to SEQ ID NO: 191305
  Synthetic oligonucleotide

SEQ ID NO: 632701 - DNA, 60 bp, Artificial; identical to SEQ ID NO: 206909
  Synthetic oligonucleotide

SEQ ID NO: 632702 - DNA, 58 bp, Artificial; identical to SEQ ID NO: 197948
  Synthetic oligonucleotide

SEQ ID NO: 632703 - DNA, 54 bp, Artificial; identical to SEQ ID NO: 190119
  Synthetic oligonucleotide

SEQ ID NO: 632704 - DNA, 55 bp, Artificial; identical to SEQ ID NO: 233751
  Synthetic oligonucleotide

SEQ ID NO: 632705 - DNA, 55 bp, Artificial; identical to SEQ ID NO: 244002
  Synthetic oligonucleotide

SEQ ID NO: 632706 - DNA, 51 bp, Artificial; identical to SEQ ID NO: 187051
  Synthetic oligonucleotide

SEQ ID NO: 632707 - DNA, 52 bp, Artificial; identical to SEQ ID NO: 160386
  Synthetic oligonucleotide

SEQ ID NO: 632708 - DNA, 55 bp, Artificial; identical to SEQ ID NO: 242989
  Synthetic oligonucleotide

SEQ ID NO: 632709 - DNA, 54 bp, Artificial; identical to SEQ ID NO: 208668
  Synthetic oligonucleotide

SEQ ID NO: 632710 - DNA, 55 bp, Artificial; identical to SEQ ID NO: 147608
  Synthetic oligonucleotide

SEQ ID NO: 632711 - DNA, 55 bp, Artificial; identical to SEQ ID NO: 194403
  Synthetic oligonucleotide

SEQ ID NO: 632712 - DNA, 56 bp, Artificial; identical to SEQ ID NO: 197870
  Synthetic oligonucleotide

SEQ ID NO: 632713 - DNA, 55 bp, Artificial; identical to SEQ ID NO: 141164
  Synthetic oligonucleotide

SEQ ID NO: 632714 - DNA, 52 bp, Artificial; identical to SEQ ID NO: 241839
  Synthetic oligonucleotide

SEQ ID NO: 632715 - DNA, 58 bp, Artificial; identical to SEQ ID NO: 201271
  Synthetic oligonucleotide

SEQ ID NO: 632716 - DNA, 55 bp, Artificial; identical to SEQ ID NO: 166394
  Synthetic oligonucleotide

SEQ ID NO: 632717 - DNA, 55 bp, Artificial; identical to SEQ ID NO: 259037
  Synthetic oligonucleotide

SEQ ID NO: 632718 - DNA, 52 bp, Artificial; identical to SEQ ID NO: 149639
  Synthetic oligonucleotide

SEQ ID NO: 632719 - DNA, 60 bp, Artificial; identical to SEQ ID NO: 150544
  Synthetic oligonucleotide

SEQ ID NO: 632720 - DNA, 55 bp, Artificial; identical to SEQ ID NO: 184621
  Synthetic oligonucleotide

SEQ ID NO: 632721 - DNA, 53 bp, Artificial; identical to SEQ ID NO: 160465
  Synthetic oligonucleotide

SEQ ID NO: 632722 - DNA, 55 bp, Artificial; identical to SEQ ID NO: 246821
  Synthetic oligonucleotide

SEQ ID NO: 632723 - DNA, 51 bp, Artificial; identical to SEQ ID NO: 199358
  Synthetic oligonucleotide

SEQ ID NO: 632724 - DNA, 60 bp, Artificial; identical to SEQ ID NO: 206914
  Synthetic oligonucleotide

SEQ ID NO: 632725 - DNA, 59 bp, Artificial; identical to SEQ ID NO: 170791
  Synthetic oligonucleotide

SEQ ID NO: 632726 - DNA, 54 bp, Artificial; identical to SEQ ID NO: 177269
  Synthetic oligonucleotide

SEQ ID NO: 632727 - DNA, 55 bp, Artificial; identical to SEQ ID NO: 154062
  Synthetic oligonucleotide

SEQ ID NO: 632728 - DNA, 55 bp, Artificial; identical to SEQ ID NO: 174474
  Synthetic oligonucleotide

SEQ ID NO: 632729 - DNA, 56 bp, Artificial; identical to SEQ ID NO: 197837
  Synthetic oligonucleotide

SEQ ID NO: 632730 - DNA, 50 bp, Artificial; identical to SEQ ID NO: 216947
  Synthetic oligonucleotide

SEQ ID NO: 632731 - DNA, 60 bp, Artificial; identical to SEQ ID NO: 241836
  Synthetic oligonucleotide

SEQ ID NO: 632732 - DNA, 52 bp, Artificial; identical to SEQ ID NO: 152089
  Synthetic oligonucleotide

SEQ ID NO: 632733 - DNA, 55 bp, Artificial; identical to SEQ ID NO: 184623
  Synthetic oligonucleotide

SEQ ID NO: 632734 - DNA, 55 bp, Artificial; identical to SEQ ID NO: 240347
  Synthetic oligonucleotide

SEQ ID NO: 632735 - DNA, 55 bp, Artificial; identical to SEQ ID NO: 256794
  Synthetic oligonucleotide

SEQ ID NO: 632736 - DNA, 54 bp, Artificial; identical to SEQ ID NO: 142555
  Synthetic oligonucleotide

SEQ ID NO: 632737 - DNA, 55 bp, Artificial; identical to SEQ ID NO: 166392
  Synthetic oligonucleotide

SEQ ID NO: 632738 - DNA, 55 bp, Artificial; identical to SEQ ID NO: 221263
  Synthetic oligonucleotide

SEQ ID NO: 632739 - DNA, 55 bp, Artificial; identical to SEQ ID NO: 245836
  Synthetic oligonucleotide

SEQ ID NO: 632740 - DNA, 55 bp, Artificial; identical to SEQ ID NO: 166390
  Synthetic oligonucleotide

SEQ ID NO: 632741 - DNA, 60 bp, Artificial; identical to SEQ ID NO: 201137
  Synthetic oligonucleotide

SEQ ID NO: 632742 - DNA, 57 bp, Artificial; identical to SEQ ID NO: 191696
  Synthetic oligonucleotide

SEQ ID NO: 632743 - DNA, 55 bp, Artificial; identical to SEQ ID NO: 173645
  Synthetic oligonucleotide

SEQ ID NO: 632744 - DNA, 55 bp, Artificial; identical to SEQ ID NO: 194405
  Synthetic oligonucleotide

SEQ ID NO: 632745 - DNA, 55 bp, Artificial; identical to SEQ ID NO: 243001
  Synthetic oligonucleotide

SEQ ID NO: 632746 - DNA, 53 bp, Artificial; identical to SEQ ID NO: 266381
  Synthetic oligonucleotide

SEQ ID NO: 632747 - DNA, 55 bp, Artificial; identical to SEQ ID NO: 234382
  Synthetic oligonucleotide

SEQ ID NO: 632748 - DNA, 54 bp, Artificial; identical to SEQ ID NO: 144156
  Synthetic oligonucleotide

SEQ ID NO: 632749 - DNA, 55 bp, Artificial; identical to SEQ ID NO: 209537
  Synthetic oligonucleotide

SEQ ID NO: 632750 - DNA, 57 bp, Artificial; identical to SEQ ID NO: 160441
  Synthetic oligonucleotide

SEQ ID NO: 632751 - DNA, 50 bp, Artificial; identical to SEQ ID NO: 246861
  Synthetic oligonucleotide

SEQ ID NO: 632752 - DNA, 57 bp, Artificial; identical to SEQ ID NO: 256931
  Synthetic oligonucleotide

SEQ ID NO: 632753 - DNA, 55 bp, Artificial; identical to SEQ ID NO: 224656
  Synthetic oligonucleotide

SEQ ID NO: 632754 - DNA, 51 bp, Artificial; identical to SEQ ID NO: 209767
  Synthetic oligonucleotide

SEQ ID NO: 632755 - DNA, 59 bp, Artificial; identical to SEQ ID NO: 211058
  Synthetic oligonucleotide

SEQ ID NO: 632756 - DNA, 58 bp, Artificial; identical to SEQ ID NO: 238293
  Synthetic oligonucleotide

SEQ ID NO: 632757 - DNA, 50 bp, Artificial; identical to SEQ ID NO: 239164
  Synthetic oligonucleotide

SEQ ID NO: 632758 - DNA, 56 bp, Artificial; identical to SEQ ID NO: 239585
  Synthetic oligonucleotide

SEQ ID NO: 632759 - DNA, 60 bp, Artificial; identical to SEQ ID NO: 201026
  Synthetic oligonucleotide

SEQ ID NO: 632760 - DNA, 55 bp, Artificial; identical to SEQ ID NO: 199347
  Synthetic oligonucleotide

SEQ ID NO: 632761 - DNA, 51 bp, Artificial; identical to SEQ ID NO: 241066
  Synthetic oligonucleotide

SEQ ID NO: 632762 - DNA, 55 bp, Artificial; identical to SEQ ID NO: 224657
  Synthetic oligonucleotide

SEQ ID NO: 632763 - DNA, 56 bp, Artificial; identical to SEQ ID NO: 224398
  Synthetic oligonucleotide

SEQ ID NO: 632764 - DNA, 60 bp, Artificial; identical to SEQ ID NO: 241834
  Synthetic oligonucleotide

SEQ ID NO: 632765 - DNA, 55 bp, Artificial; identical to SEQ ID NO: 252870
  Synthetic oligonucleotide

SEQ ID NO: 632766 - DNA, 54 bp, Artificial; identical to SEQ ID NO: 144513
  Synthetic oligonucleotide

SEQ ID NO: 632767 - DNA, 55 bp, Artificial; identical to SEQ ID NO: 245831
  Synthetic oligonucleotide

SEQ ID NO: 632768 - DNA, 55 bp, Artificial; identical to SEQ ID NO: 199334
  Synthetic oligonucleotide

SEQ ID NO: 632769 - DNA, 55 bp, Artificial; identical to SEQ ID NO: 240351
  Synthetic oligonucleotide

SEQ ID NO: 632770 - DNA, 52 bp, Artificial; identical to SEQ ID NO: 200915
  Synthetic oligonucleotide

SEQ ID NO: 632771 - DNA, 55 bp, Artificial; identical to SEQ ID NO: 147622
  Synthetic oligonucleotide

SEQ ID NO: 632772 - DNA, 53 bp, Artificial; identical to SEQ ID NO: 159929
  Synthetic oligonucleotide

SEQ ID NO: 632773 - DNA, 55 bp, Artificial; identical to SEQ ID NO: 188216
  Synthetic oligonucleotide

SEQ ID NO: 632774 - DNA, 51 bp, Artificial; identical to SEQ ID NO: 249679
  Synthetic oligonucleotide

SEQ ID NO: 632775 - DNA, 55 bp, Artificial; identical to SEQ ID NO: 188215
  Synthetic oligonucleotide

SEQ ID NO: 632776 - DNA, 54 bp, Artificial; identical to SEQ ID NO: 164787
  Synthetic oligonucleotide

SEQ ID NO: 632777 - DNA, 53 bp, Artificial; identical to SEQ ID NO: 142478
  Synthetic oligonucleotide

SEQ ID NO: 632778 - DNA, 60 bp, Artificial; identical to SEQ ID NO: 246265
  Synthetic oligonucleotide

SEQ ID NO: 632779 - DNA, 55 bp, Artificial; identical to SEQ ID NO: 184570
  Synthetic oligonucleotide

SEQ ID NO: 632780 - DNA, 54 bp, Artificial; identical to SEQ ID NO: 246123
  Synthetic oligonucleotide

SEQ ID NO: 632781 - DNA, 54 bp, Artificial; identical to SEQ ID NO: 190122
  Synthetic oligonucleotide

SEQ ID NO: 632782 - DNA, 55 bp, Artificial; identical to SEQ ID NO: 243000
  Synthetic oligonucleotide

SEQ ID NO: 632783 - DNA, 55 bp, Artificial; identical to SEQ ID NO: 147619
  Synthetic oligonucleotide

SEQ ID NO: 632784 - DNA, 55 bp, Artificial; identical to SEQ ID NO: 245828
  Synthetic oligonucleotide

SEQ ID NO: 632785 - DNA, 55 bp, Artificial; identical to SEQ ID NO: 243002
  Synthetic oligonucleotide

SEQ ID NO: 632786 - DNA, 50 bp, Artificial; identical to SEQ ID NO: 176782
  Synthetic oligonucleotide

SEQ ID NO: 632787 - DNA, 51 bp, Artificial; identical to SEQ ID NO: 157856
  Synthetic oligonucleotide

SEQ ID NO: 632788 - DNA, 55 bp, Artificial; identical to SEQ ID NO: 166842
  Synthetic oligonucleotide

SEQ ID NO: 632789 - DNA, 55 bp, Artificial; identical to SEQ ID NO: 174475
  Synthetic oligonucleotide

SEQ ID NO: 632790 - DNA, 57 bp, Artificial; identical to SEQ ID NO: 166794
  Synthetic oligonucleotide

SEQ ID NO: 632791 - DNA, 52 bp, Artificial; identical to SEQ ID NO: 199960
  Synthetic oligonucleotide

SEQ ID NO: 632792 - DNA, 55 bp, Artificial; identical to SEQ ID NO: 221261
  Synthetic oligonucleotide

SEQ ID NO: 632793 - DNA, 60 bp, Artificial; identical to SEQ ID NO: 200804
  Synthetic oligonucleotide

SEQ ID NO: 632794 - DNA, 55 bp, Artificial; identical to SEQ ID NO: 184575
  Synthetic oligonucleotide

SEQ ID NO: 632795 - DNA, 55 bp, Artificial; identical to SEQ ID NO: 245826
  Synthetic oligonucleotide

SEQ ID NO: 632796 - DNA, 59 bp, Artificial; identical to SEQ ID NO: 216615
  Synthetic oligonucleotide

SEQ ID NO: 632797 - DNA, 59 bp, Artificial; identical to SEQ ID NO: 187583
  Synthetic oligonucleotide

SEQ ID NO: 632798 - DNA, 55 bp, Artificial; identical to SEQ ID NO: 166386
  Synthetic oligonucleotide

SEQ ID NO: 632799 - DNA, 60 bp, Artificial; identical to SEQ ID NO: 166145
  Synthetic oligonucleotide

SEQ ID NO: 632800 - DNA, 54 bp, Artificial; identical to SEQ ID NO: 207724
  Synthetic oligonucleotide

SEQ ID NO: 632801 - DNA, 54 bp, Artificial; identical to SEQ ID NO: 216595
  Synthetic oligonucleotide

SEQ ID NO: 632802 - DNA, 54 bp, Artificial; identical to SEQ ID NO: 166217
  Synthetic oligonucleotide

SEQ ID NO: 632803 - DNA, 55 bp, Artificial; identical to SEQ ID NO: 151368
  Synthetic oligonucleotide

SEQ ID NO: 632804 - DNA, 60 bp, Artificial; identical to SEQ ID NO: 202618
  Synthetic oligonucleotide

SEQ ID NO: 632805 - DNA, 52 bp, Artificial; identical to SEQ ID NO: 188117
  Synthetic oligonucleotide

SEQ ID NO: 632806 - DNA, 60 bp, Artificial; identical to SEQ ID NO: 200693
  Synthetic oligonucleotide

SEQ ID NO: 632807 - DNA, 53 bp, Artificial; identical to SEQ ID NO: 225508
  Synthetic oligonucleotide

SEQ ID NO: 632808 - DNA, 55 bp, Artificial; identical to SEQ ID NO: 190123
  Synthetic oligonucleotide

SEQ ID NO: 632809 - DNA, 55 bp, Artificial; identical to SEQ ID NO: 147367
  Synthetic oligonucleotide

SEQ ID NO: 632810 - DNA, 50 bp, Artificial; identical to SEQ ID NO: 241278
  Synthetic oligonucleotide

SEQ ID NO: 632811 - DNA, 53 bp, Artificial; identical to SEQ ID NO: 240771
  Synthetic oligonucleotide

SEQ ID NO: 632812 - DNA, 52 bp, Artificial; identical to SEQ ID NO: 241827
  Synthetic oligonucleotide

SEQ ID NO: 632813 - DNA, 51 bp, Artificial; identical to SEQ ID NO: 167605
  Synthetic oligonucleotide

SEQ ID NO: 632814 - DNA, 55 bp, Artificial; identical to SEQ ID NO: 153248
  Synthetic oligonucleotide

SEQ ID NO: 632815 - DNA, 55 bp, Artificial; identical to SEQ ID NO: 245822
  Synthetic oligonucleotide

SEQ ID NO: 632816 - DNA, 52 bp, Artificial; identical to SEQ ID NO: 255251
  Synthetic oligonucleotide

SEQ ID NO: 632817 - DNA, 55 bp, Artificial; identical to SEQ ID NO: 194406
  Synthetic oligonucleotide

SEQ ID NO: 632818 - DNA, 54 bp, Artificial; identical to SEQ ID NO: 170020
  Synthetic oligonucleotide

SEQ ID NO: 632819 - DNA, 55 bp, Artificial; identical to SEQ ID NO: 245820
  Synthetic oligonucleotide

SEQ ID NO: 632820 - DNA, 55 bp, Artificial; identical to SEQ ID NO: 154415
  Synthetic oligonucleotide

SEQ ID NO: 632821 - DNA, 55 bp, Artificial; identical to SEQ ID NO: 147384
  Synthetic oligonucleotide

SEQ ID NO: 632822 - DNA, 56 bp, Artificial; identical to SEQ ID NO: 246287
  Synthetic oligonucleotide

SEQ ID NO: 632823 - DNA, 50 bp, Artificial; identical to SEQ ID NO: 176781
  Synthetic oligonucleotide

SEQ ID NO: 632824 - DNA, 57 bp, Artificial; identical to SEQ ID NO: 256942
  Synthetic oligonucleotide

SEQ ID NO: 632825 - DNA, 55 bp, Artificial; identical to SEQ ID NO: 203591
  Synthetic oligonucleotide

SEQ ID NO: 632826 - DNA, 55 bp, Artificial; identical to SEQ ID NO: 144795
  Synthetic oligonucleotide

SEQ ID NO: 632827 - DNA, 55 bp, Artificial; identical to SEQ ID NO: 169846
  Synthetic oligonucleotide

SEQ ID NO: 632828 - DNA, 59 bp, Artificial; identical to SEQ ID NO: 200058
  Synthetic oligonucleotide

SEQ ID NO: 632829 - DNA, 55 bp, Artificial; identical to SEQ ID NO: 146592
  Synthetic oligonucleotide

SEQ ID NO: 632830 - DNA, 52 bp, Artificial; identical to SEQ ID NO: 240842
  Synthetic oligonucleotide

SEQ ID NO: 632831 - DNA, 55 bp, Artificial; identical to SEQ ID NO: 245819
  Synthetic oligonucleotide

SEQ ID NO: 632832 - DNA, 55 bp, Artificial; identical to SEQ ID NO: 266730
  Synthetic oligonucleotide

SEQ ID NO: 632833 - DNA, 51 bp, Artificial; identical to SEQ ID NO: 235149
  Synthetic oligonucleotide

SEQ ID NO: 632834 - DNA, 56 bp, Artificial; identical to SEQ ID NO: 147086
  Synthetic oligonucleotide

SEQ ID NO: 632835 - DNA, 55 bp, Artificial; identical to SEQ ID NO: 142554
  Synthetic oligonucleotide

SEQ ID NO: 632836 - DNA, 53 bp, Artificial; identical to SEQ ID NO: 149332
  Synthetic oligonucleotide

SEQ ID NO: 632837 - DNA, 59 bp, Artificial; identical to SEQ ID NO: 217246
  Synthetic oligonucleotide

SEQ ID NO: 632838 - DNA, 60 bp, Artificial; identical to SEQ ID NO: 150593
  Synthetic oligonucleotide

SEQ ID NO: 632839 - DNA, 54 bp, Artificial; identical to SEQ ID NO: 249465
  Synthetic oligonucleotide

SEQ ID NO: 632840 - DNA, 55 bp, Artificial; identical to SEQ ID NO: 209545
  Synthetic oligonucleotide

SEQ ID NO: 632841 - DNA, 55 bp, Artificial; identical to SEQ ID NO: 169847
  Synthetic oligonucleotide

SEQ ID NO: 632842 - DNA, 55 bp, Artificial; identical to SEQ ID NO: 245816
  Synthetic oligonucleotide

SEQ ID NO: 632843 - DNA, 60 bp, Artificial; identical to SEQ ID NO: 243444
  Synthetic oligonucleotide

SEQ ID NO: 632844 - DNA, 59 bp, Artificial; identical to SEQ ID NO: 166047
  Synthetic oligonucleotide

SEQ ID NO: 632845 - DNA, 55 bp, Artificial; identical to SEQ ID NO: 184585
  Synthetic oligonucleotide

SEQ ID NO: 632846 - DNA, 53 bp, Artificial; identical to SEQ ID NO: 171896
  Synthetic oligonucleotide

SEQ ID NO: 632847 - DNA, 55 bp, Artificial; identical to SEQ ID NO: 242993
  Synthetic oligonucleotide

SEQ ID NO: 632848 - DNA, 58 bp, Artificial; identical to SEQ ID NO: 241824
  Synthetic oligonucleotide

SEQ ID NO: 632849 - DNA, 55 bp, Artificial; identical to SEQ ID NO: 162211
  Synthetic oligonucleotide

SEQ ID NO: 632850 - DNA, 55 bp, Artificial; identical to SEQ ID NO: 252691
  Synthetic oligonucleotide

SEQ ID NO: 632851 - DNA, 55 bp, Artificial; identical to SEQ ID NO: 166569
  Synthetic oligonucleotide

SEQ ID NO: 632852 - DNA, 57 bp, Artificial; identical to SEQ ID NO: 209194
  Synthetic oligonucleotide

SEQ ID NO: 632853 - DNA, 55 bp, Artificial; identical to SEQ ID NO: 209544
  Synthetic oligonucleotide

SEQ ID NO: 632854 - DNA, 60 bp, Artificial; identical to SEQ ID NO: 238304
  Synthetic oligonucleotide

SEQ ID NO: 632855 - DNA, 52 bp, Artificial; identical to SEQ ID NO: 260235
  Synthetic oligonucleotide

SEQ ID NO: 632856 - DNA, 55 bp, Artificial; identical to SEQ ID NO: 166568
  Synthetic oligonucleotide

SEQ ID NO: 632857 - DNA, 50 bp, Artificial; identical to SEQ ID NO: 246867
  Synthetic oligonucleotide

SEQ ID NO: 632858 - DNA, 51 bp, Artificial; identical to SEQ ID NO: 191238
  Synthetic oligonucleotide

SEQ ID NO: 632859 - DNA, 55 bp, Artificial; identical to SEQ ID NO: 260220
  Synthetic oligonucleotide

SEQ ID NO: 632860 - DNA, 55 bp, Artificial; identical to SEQ ID NO: 252873
  Synthetic oligonucleotide

SEQ ID NO: 632861 - DNA, 55 bp, Artificial; identical to SEQ ID NO: 209524
  Synthetic oligonucleotide

SEQ ID NO: 632862 - DNA, 55 bp, Artificial; identical to SEQ ID NO: 193191
  Synthetic oligonucleotide

SEQ ID NO: 632863 - DNA, 56 bp, Artificial; identical to SEQ ID NO: 241823
  Synthetic oligonucleotide

SEQ ID NO: 632864 - DNA, 55 bp, Artificial; identical to SEQ ID NO: 245813
  Synthetic oligonucleotide

SEQ ID NO: 632865 - DNA, 55 bp, Artificial; identical to SEQ ID NO: 166565
  Synthetic oligonucleotide

SEQ ID NO: 632866 - DNA, 56 bp, Artificial; identical to SEQ ID NO: 152992
  Synthetic oligonucleotide

SEQ ID NO: 632867 - DNA, 55 bp, Artificial; identical to SEQ ID NO: 208316
  Synthetic oligonucleotide

SEQ ID NO: 632868 - DNA, 55 bp, Artificial; identical to SEQ ID NO: 147483
  Synthetic oligonucleotide

SEQ ID NO: 632869 - DNA, 51 bp, Artificial; identical to SEQ ID NO: 241073
  Synthetic oligonucleotide

SEQ ID NO: 632870 - DNA, 59 bp, Artificial; identical to SEQ ID NO: 221178
  Synthetic oligonucleotide

SEQ ID NO: 632871 - DNA, 55 bp, Artificial; identical to SEQ ID NO: 168273
  Synthetic oligonucleotide

SEQ ID NO: 632872 - DNA, 53 bp, Artificial; identical to SEQ ID NO: 196944
  Synthetic oligonucleotide

SEQ ID NO: 632873 - DNA, 50 bp, Artificial; identical to SEQ ID NO: 210555
  Synthetic oligonucleotide

SEQ ID NO: 632874 - DNA, 52 bp, Artificial; identical to SEQ ID NO: 220795
  Synthetic oligonucleotide

SEQ ID NO: 632875 - DNA, 57 bp, Artificial; identical to SEQ ID NO: 177254
  Synthetic oligonucleotide

SEQ ID NO: 632876 - DNA, 51 bp, Artificial; identical to SEQ ID NO: 159464
  Synthetic oligonucleotide

SEQ ID NO: 632877 - DNA, 55 bp, Artificial; identical to SEQ ID NO: 173589
  Synthetic oligonucleotide

SEQ ID NO: 632878 - DNA, 55 bp, Artificial; identical to SEQ ID NO: 144794
  Synthetic oligonucleotide

SEQ ID NO: 632879 - DNA, 55 bp, Artificial; identical to SEQ ID NO: 199288
  Synthetic oligonucleotide

SEQ ID NO: 632880 - DNA, 55 bp, Artificial; identical to SEQ ID NO: 196945
  Synthetic oligonucleotide

SEQ ID NO: 632881 - DNA, 55 bp, Artificial; identical to SEQ ID NO: 142819
  Synthetic oligonucleotide

SEQ ID NO: 632882 - DNA, 51 bp, Artificial; identical to SEQ ID NO: 246320
  Synthetic oligonucleotide

SEQ ID NO: 632883 - DNA, 59 bp, Artificial; identical to SEQ ID NO: 150596
  Synthetic oligonucleotide

SEQ ID NO: 632884 - DNA, 50 bp, Artificial; identical to SEQ ID NO: 209814
  Synthetic oligonucleotide

SEQ ID NO: 632885 - DNA, 55 bp, Artificial; identical to SEQ ID NO: 174258
  Synthetic oligonucleotide

SEQ ID NO: 632886 - DNA, 55 bp, Artificial; identical to SEQ ID NO: 196951
  Synthetic oligonucleotide

SEQ ID NO: 632887 - DNA, 55 bp, Artificial; identical to SEQ ID NO: 216514
  Synthetic oligonucleotide

SEQ ID NO: 632888 - DNA, 56 bp, Artificial; identical to SEQ ID NO: 177248
  Synthetic oligonucleotide

SEQ ID NO: 632889 - DNA, 50 bp, Artificial; identical to SEQ ID NO: 266311
  Synthetic oligonucleotide

SEQ ID NO: 632890 - DNA, 55 bp, Artificial; identical to SEQ ID NO: 216526
  Synthetic oligonucleotide

SEQ ID NO: 632891 - DNA, 53 bp, Artificial; identical to SEQ ID NO: 157480
  Synthetic oligonucleotide

SEQ ID NO: 632892 - DNA, 56 bp, Artificial; identical to SEQ ID NO: 150597
  Synthetic oligonucleotide

SEQ ID NO: 632893 - DNA, 54 bp, Artificial; identical to SEQ ID NO: 174808
  Synthetic oligonucleotide

SEQ ID NO: 632894 - DNA, 52 bp, Artificial; identical to SEQ ID NO: 147486
  Synthetic oligonucleotide

SEQ ID NO: 632895 - DNA, 55 bp, Artificial; identical to SEQ ID NO: 240357
  Synthetic oligonucleotide

SEQ ID NO: 632896 - DNA, 55 bp, Artificial; identical to SEQ ID NO: 211047
  Synthetic oligonucleotide

SEQ ID NO: 632897 - DNA, 57 bp, Artificial; identical to SEQ ID NO: 179807
  Synthetic oligonucleotide

SEQ ID NO: 632898 - DNA, 60 bp, Artificial; identical to SEQ ID NO: 150598
  Synthetic oligonucleotide

SEQ ID NO: 632899 - DNA, 52 bp, Artificial; identical to SEQ ID NO: 188733
  Synthetic oligonucleotide

SEQ ID NO: 632900 - DNA, 54 bp, Artificial; identical to SEQ ID NO: 187472
  Synthetic oligonucleotide

SEQ ID NO: 632901 - DNA, 55 bp, Artificial; identical to SEQ ID NO: 166564
  Synthetic oligonucleotide

SEQ ID NO: 632902 - DNA, 53 bp, Artificial; identical to SEQ ID NO: 164964
  Synthetic oligonucleotide

SEQ ID NO: 632903 - DNA, 55 bp, Artificial; identical to SEQ ID NO: 161746
  Synthetic oligonucleotide

SEQ ID NO: 632904 - DNA, 51 bp, Artificial; identical to SEQ ID NO: 144580
  Synthetic oligonucleotide

SEQ ID NO: 632905 - DNA, 53 bp, Artificial; identical to SEQ ID NO: 153121
  Synthetic oligonucleotide

SEQ ID NO: 632906 - DNA, 55 bp, Artificial; identical to SEQ ID NO: 238111
  Synthetic oligonucleotide

SEQ ID NO: 632907 - DNA, 55 bp, Artificial; identical to SEQ ID NO: 166562
  Synthetic oligonucleotide

SEQ ID NO: 632908 - DNA, 55 bp, Artificial; identical to SEQ ID NO: 154419
  Synthetic oligonucleotide

SEQ ID NO: 632909 - DNA, 55 bp, Artificial; identical to SEQ ID NO: 144793
  Synthetic oligonucleotide

SEQ ID NO: 632910 - DNA, 51 bp, Artificial; identical to SEQ ID NO: 170204
  Synthetic oligonucleotide

SEQ ID NO: 632911 - DNA, 60 bp, Artificial; identical to SEQ ID NO: 168245
  Synthetic oligonucleotide

SEQ ID NO: 632912 - DNA, 56 bp, Artificial; identical to SEQ ID NO: 225512
  Synthetic oligonucleotide

SEQ ID NO: 632913 - DNA, 55 bp, Artificial; identical to SEQ ID NO: 151369
  Synthetic oligonucleotide

SEQ ID NO: 632914 - DNA, 58 bp, Artificial; identical to SEQ ID NO: 206917
  Synthetic oligonucleotide

SEQ ID NO: 632915 - DNA, 54 bp, Artificial; identical to SEQ ID NO: 161287
  Synthetic oligonucleotide

SEQ ID NO: 632916 - DNA, 55 bp, Artificial; identical to SEQ ID NO: 184599
  Synthetic oligonucleotide

SEQ ID NO: 632917 - DNA, 54 bp, Artificial; identical to SEQ ID NO: 179395
  Synthetic oligonucleotide

SEQ ID NO: 632918 - DNA, 57 bp, Artificial; identical to SEQ ID NO: 205219
  Synthetic oligonucleotide

SEQ ID NO: 632919 - DNA, 55 bp, Artificial; identical to SEQ ID NO: 166845
  Synthetic oligonucleotide

SEQ ID NO: 632920 - DNA, 53 bp, Artificial; identical to SEQ ID NO: 185488
  Synthetic oligonucleotide

SEQ ID NO: 632921 - DNA, 58 bp, Artificial; identical to SEQ ID NO: 202595
  Synthetic oligonucleotide

SEQ ID NO: 632922 - DNA, 54 bp, Artificial; identical to SEQ ID NO: 239587
  Synthetic oligonucleotide

SEQ ID NO: 632923 - DNA, 60 bp, Artificial; identical to SEQ ID NO: 150604
  Synthetic oligonucleotide

SEQ ID NO: 632924 - DNA, 55 bp, Artificial; identical to SEQ ID NO: 147672
  Synthetic oligonucleotide

SEQ ID NO: 632925 - DNA, 55 bp, Artificial; identical to SEQ ID NO: 144043
  Synthetic oligonucleotide

SEQ ID NO: 632926 - DNA, 54 bp, Artificial; identical to SEQ ID NO: 221249
  Synthetic oligonucleotide

SEQ ID NO: 632927 - DNA, 52 bp, Artificial; identical to SEQ ID NO: 169384
  Synthetic oligonucleotide

SEQ ID NO: 632928 - DNA, 55 bp, Artificial; identical to SEQ ID NO: 166560
  Synthetic oligonucleotide

SEQ ID NO: 632929 - DNA, 53 bp, Artificial; identical to SEQ ID NO: 194969
  Synthetic oligonucleotide

SEQ ID NO: 632930 - DNA, 55 bp, Artificial; identical to SEQ ID NO: 224662
  Synthetic oligonucleotide

SEQ ID NO: 632931 - DNA, 54 bp, Artificial; identical to SEQ ID NO: 157158
  Synthetic oligonucleotide

SEQ ID NO: 632932 - DNA, 54 bp, Artificial; identical to SEQ ID NO: 256997
  Synthetic oligonucleotide

SEQ ID NO: 632933 - DNA, 51 bp, Artificial; identical to SEQ ID NO: 165202
  Synthetic oligonucleotide

SEQ ID NO: 632934 - DNA, 52 bp, Artificial; identical to SEQ ID NO: 243919
  Synthetic oligonucleotide

SEQ ID NO: 632935 - DNA, 52 bp, Artificial; identical to SEQ ID NO: 209551
  Synthetic oligonucleotide

SEQ ID NO: 632936 - DNA, 55 bp, Artificial; identical to SEQ ID NO: 199267
  Synthetic oligonucleotide

SEQ ID NO: 632937 - DNA, 55 bp, Artificial; identical to SEQ ID NO: 190133
  Synthetic oligonucleotide

SEQ ID NO: 632938 - DNA, 53 bp, Artificial; identical to SEQ ID NO: 164869
  Synthetic oligonucleotide

SEQ ID NO: 632939 - DNA, 55 bp, Artificial; identical to SEQ ID NO: 199330
  Synthetic oligonucleotide

SEQ ID NO: 632940 - DNA, 55 bp, Artificial; identical to SEQ ID NO: 194407
  Synthetic oligonucleotide

SEQ ID NO: 632941 - DNA, 57 bp, Artificial; identical to SEQ ID NO: 216504
  Synthetic oligonucleotide

SEQ ID NO: 632942 - DNA, 52 bp, Artificial; identical to SEQ ID NO: 164721
  Synthetic oligonucleotide

SEQ ID NO: 632943 - DNA, 55 bp, Artificial; identical to SEQ ID NO: 174477
  Synthetic oligonucleotide

SEQ ID NO: 632944 - DNA, 60 bp, Artificial; identical to SEQ ID NO: 246331
  Synthetic oligonucleotide

SEQ ID NO: 632945 - DNA, 60 bp, Artificial; identical to SEQ ID NO: 241816
  Synthetic oligonucleotide

SEQ ID NO: 632946 - DNA, 55 bp, Artificial; identical to SEQ ID NO: 166557
  Synthetic oligonucleotide

SEQ ID NO: 632947 - DNA, 55 bp, Artificial; identical to SEQ ID NO: 155335
  Synthetic oligonucleotide

SEQ ID NO: 632948 - DNA, 55 bp, Artificial; identical to SEQ ID NO: 199318
  Synthetic oligonucleotide

SEQ ID NO: 632949 - DNA, 55 bp, Artificial; identical to SEQ ID NO: 190134
  Synthetic oligonucleotide

SEQ ID NO: 632950 - DNA, 55 bp, Artificial; identical to SEQ ID NO: 238109
  Synthetic oligonucleotide

SEQ ID NO: 632951 - DNA, 55 bp, Artificial; identical to SEQ ID NO: 166556
  Synthetic oligonucleotide

SEQ ID NO: 632952 - DNA, 57 bp, Artificial; identical to SEQ ID NO: 238315
  Synthetic oligonucleotide

SEQ ID NO: 632953 - DNA, 58 bp, Artificial; identical to SEQ ID NO: 200583
  Synthetic oligonucleotide

SEQ ID NO: 632954 - DNA, 59 bp, Artificial; identical to SEQ ID NO: 175080
  Synthetic oligonucleotide

SEQ ID NO: 632955 - DNA, 55 bp, Artificial; identical to SEQ ID NO: 256854
  Synthetic oligonucleotide

SEQ ID NO: 632956 - DNA, 55 bp, Artificial; identical to SEQ ID NO: 242987
  Synthetic oligonucleotide

SEQ ID NO: 632957 - DNA, 55 bp, Artificial; identical to SEQ ID NO: 207624
  Synthetic oligonucleotide

SEQ ID NO: 632958 - DNA, 55 bp, Artificial; identical to SEQ ID NO: 142490
  Synthetic oligonucleotide

SEQ ID NO: 632959 - DNA, 56 bp, Artificial; identical to SEQ ID NO: 147344
  Synthetic oligonucleotide

SEQ ID NO: 632960 - DNA, 60 bp, Artificial; identical to SEQ ID NO: 200571
  Synthetic oligonucleotide

SEQ ID NO: 632961 - DNA, 55 bp, Artificial; identical to SEQ ID NO: 203588
  Synthetic oligonucleotide

SEQ ID NO: 632962 - DNA, 55 bp, Artificial; identical to SEQ ID NO: 184888
  Synthetic oligonucleotide

SEQ ID NO: 632963 - DNA, 58 bp, Artificial; identical to SEQ ID NO: 241874
  Synthetic oligonucleotide

SEQ ID NO: 632964 - DNA, 58 bp, Artificial; identical to SEQ ID NO: 194202
  Synthetic oligonucleotide

SEQ ID NO: 632965 - DNA, 51 bp, Artificial; identical to SEQ ID NO: 160944
  Synthetic oligonucleotide

SEQ ID NO: 632966 - DNA, 53 bp, Artificial; identical to SEQ ID NO: 246365
  Synthetic oligonucleotide

SEQ ID NO: 632967 - DNA, 54 bp, Artificial; identical to SEQ ID NO: 242984
  Synthetic oligonucleotide

SEQ ID NO: 632968 - DNA, 57 bp, Artificial; identical to SEQ ID NO: 241873
  Synthetic oligonucleotide

SEQ ID NO: 632969 - DNA, 53 bp, Artificial; identical to SEQ ID NO: 240776
  Synthetic oligonucleotide

SEQ ID NO: 632970 - DNA, 53 bp, Artificial; identical to SEQ ID NO: 245751
  Synthetic oligonucleotide

SEQ ID NO: 632971 - DNA, 55 bp, Artificial; identical to SEQ ID NO: 174478
  Synthetic oligonucleotide

SEQ ID NO: 632972 - DNA, 55 bp, Artificial; identical to SEQ ID NO: 174580
  Synthetic oligonucleotide

SEQ ID NO: 632973 - DNA, 58 bp, Artificial; identical to SEQ ID NO: 177244
  Synthetic oligonucleotide

SEQ ID NO: 632974 - DNA, 54 bp, Artificial; identical to SEQ ID NO: 246116
  Synthetic oligonucleotide

SEQ ID NO: 632975 - DNA, 55 bp, Artificial; identical to SEQ ID NO: 191786
  Synthetic oligonucleotide

SEQ ID NO: 632976 - DNA, 55 bp, Artificial; identical to SEQ ID NO: 202050
  Synthetic oligonucleotide

SEQ ID NO: 632977 - DNA, 55 bp, Artificial; identical to SEQ ID NO: 245749
  Synthetic oligonucleotide

SEQ ID NO: 632978 - DNA, 60 bp, Artificial; identical to SEQ ID NO: 141863
  Synthetic oligonucleotide

SEQ ID NO: 632979 - DNA, 60 bp, Artificial; identical to SEQ ID NO: 205564
  Synthetic oligonucleotide

SEQ ID NO: 632980 - DNA, 57 bp, Artificial; identical to SEQ ID NO: 151284
  Synthetic oligonucleotide

SEQ ID NO: 632981 - DNA, 55 bp, Artificial; identical to SEQ ID NO: 233762
  Synthetic oligonucleotide

SEQ ID NO: 632982 - DNA, 56 bp, Artificial; identical to SEQ ID NO: 177299
  Synthetic oligonucleotide

SEQ ID NO: 632983 - DNA, 56 bp, Artificial; identical to SEQ ID NO: 241868
  Synthetic oligonucleotide

SEQ ID NO: 632984 - DNA, 53 bp, Artificial; identical to SEQ ID NO: 225150
  Synthetic oligonucleotide

SEQ ID NO: 632985 - DNA, 55 bp, Artificial; identical to SEQ ID NO: 209556
  Synthetic oligonucleotide

SEQ ID NO: 632986 - DNA, 55 bp, Artificial; identical to SEQ ID NO: 233763
  Synthetic oligonucleotide

SEQ ID NO: 632987 - DNA, 55 bp, Artificial; identical to SEQ ID NO: 207622
  Synthetic oligonucleotide

SEQ ID NO: 632988 - DNA, 54 bp, Artificial; identical to SEQ ID NO: 157159
  Synthetic oligonucleotide

SEQ ID NO: 632989 - DNA, 55 bp, Artificial; identical to SEQ ID NO: 199301
  Synthetic oligonucleotide

SEQ ID NO: 632990 - DNA, 56 bp, Artificial; identical to SEQ ID NO: 239488
  Synthetic oligonucleotide

SEQ ID NO: 632991 - DNA, 54 bp, Artificial; identical to SEQ ID NO: 149277
  Synthetic oligonucleotide

SEQ ID NO: 632992 - DNA, 55 bp, Artificial; identical to SEQ ID NO: 142489
  Synthetic oligonucleotide

SEQ ID NO: 632993 - DNA, 60 bp, Artificial; identical to SEQ ID NO: 177297
  Synthetic oligonucleotide

SEQ ID NO: 632994 - DNA, 53 bp, Artificial; identical to SEQ ID NO: 185461
  Synthetic oligonucleotide

SEQ ID NO: 632995 - DNA, 55 bp, Artificial; identical to SEQ ID NO: 196955
  Synthetic oligonucleotide

SEQ ID NO: 632996 - DNA, 55 bp, Artificial; identical to SEQ ID NO: 233766
  Synthetic oligonucleotide

SEQ ID NO: 632997 - DNA, 55 bp, Artificial; identical to SEQ ID NO: 207620
  Synthetic oligonucleotide

SEQ ID NO: 632998 - DNA, 55 bp, Artificial; identical to SEQ ID NO: 257546
  Synthetic oligonucleotide

SEQ ID NO: 632999 - DNA, 55 bp, Artificial; identical to SEQ ID NO: 205350
  Synthetic oligonucleotide

SEQ ID NO: 633000 - DNA, 57 bp, Artificial; identical to SEQ ID NO: 179412
  Synthetic oligonucleotide

SEQ ID NO: 633001 - DNA, 55 bp, Artificial; identical to SEQ ID NO: 187927
  Synthetic oligonucleotide

SEQ ID NO: 633002 - DNA, 55 bp, Artificial; identical to SEQ ID NO: 196956
  Synthetic oligonucleotide

SEQ ID NO: 633003 - DNA, 54 bp, Artificial; identical to SEQ ID NO: 240644
  Synthetic oligonucleotide

SEQ ID NO: 633004 - DNA, 58 bp, Artificial; identical to SEQ ID NO: 179411
  Synthetic oligonucleotide

SEQ ID NO: 633005 - DNA, 54 bp, Artificial; identical to SEQ ID NO: 194366
  Synthetic oligonucleotide

SEQ ID NO: 633006 - DNA, 53 bp, Artificial; identical to SEQ ID NO: 246349
  Synthetic oligonucleotide

SEQ ID NO: 633007 - DNA, 60 bp, Artificial; identical to SEQ ID NO: 200560
  Synthetic oligonucleotide

SEQ ID NO: 633008 - DNA, 52 bp, Artificial; identical to SEQ ID NO: 200549
  Synthetic oligonucleotide

SEQ ID NO: 633009 - DNA, 52 bp, Artificial; identical to SEQ ID NO: 157648
  Synthetic oligonucleotide

SEQ ID NO: 633010 - DNA, 55 bp, Artificial; identical to SEQ ID NO: 190135
  Synthetic oligonucleotide

SEQ ID NO: 633011 - DNA, 51 bp, Artificial; identical to SEQ ID NO: 200161
  Synthetic oligonucleotide

SEQ ID NO: 633012 - DNA, 55 bp, Artificial; identical to SEQ ID NO: 147441
  Synthetic oligonucleotide

SEQ ID NO: 633013 - DNA, 55 bp, Artificial; identical to SEQ ID NO: 168280
  Synthetic oligonucleotide

SEQ ID NO: 633014 - DNA, 54 bp, Artificial; identical to SEQ ID NO: 185356
  Synthetic oligonucleotide

SEQ ID NO: 633015 - DNA, 52 bp, Artificial; identical to SEQ ID NO: 150570
  Synthetic oligonucleotide

SEQ ID NO: 633016 - DNA, 55 bp, Artificial; identical to SEQ ID NO: 166551
  Synthetic oligonucleotide

SEQ ID NO: 633017 - DNA, 55 bp, Artificial; identical to SEQ ID NO: 190136
  Synthetic oligonucleotide

SEQ ID NO: 633018 - DNA, 53 bp, Artificial; identical to SEQ ID NO: 154564
  Synthetic oligonucleotide

SEQ ID NO: 633019 - DNA, 60 bp, Artificial; identical to SEQ ID NO: 141885
  Synthetic oligonucleotide

SEQ ID NO: 633020 - DNA, 55 bp, Artificial; identical to SEQ ID NO: 262782
  Synthetic oligonucleotide

SEQ ID NO: 633021 - DNA, 50 bp, Artificial; identical to SEQ ID NO: 189303
  Synthetic oligonucleotide

SEQ ID NO: 633022 - DNA, 55 bp, Artificial; identical to SEQ ID NO: 144792
  Synthetic oligonucleotide

SEQ ID NO: 633023 - DNA, 55 bp, Artificial; identical to SEQ ID NO: 233765
  Synthetic oligonucleotide

SEQ ID NO: 633024 - DNA, 59 bp, Artificial; identical to SEQ ID NO: 254367
  Synthetic oligonucleotide

SEQ ID NO: 633025 - DNA, 56 bp, Artificial; identical to SEQ ID NO: 160552
  Synthetic oligonucleotide

SEQ ID NO: 633026 - DNA, 53 bp, Artificial; identical to SEQ ID NO: 190693
  Synthetic oligonucleotide

SEQ ID NO: 633027 - DNA, 60 bp, Artificial; identical to SEQ ID NO: 204169
  Synthetic oligonucleotide

SEQ ID NO: 633028 - DNA, 55 bp, Artificial; identical to SEQ ID NO: 151395
  Synthetic oligonucleotide

SEQ ID NO: 633029 - DNA, 55 bp, Artificial; identical to SEQ ID NO: 184930
  Synthetic oligonucleotide

SEQ ID NO: 633030 - DNA, 53 bp, Artificial; identical to SEQ ID NO: 246350
  Synthetic oligonucleotide

SEQ ID NO: 633031 - DNA, 55 bp, Artificial; identical to SEQ ID NO: 212565
  Synthetic oligonucleotide

SEQ ID NO: 633032 - DNA, 59 bp, Artificial; identical to SEQ ID NO: 246387
  Synthetic oligonucleotide

SEQ ID NO: 633033 - DNA, 55 bp, Artificial; identical to SEQ ID NO: 184929
  Synthetic oligonucleotide

SEQ ID NO: 633034 - DNA, 60 bp, Artificial; identical to SEQ ID NO: 150571
  Synthetic oligonucleotide

SEQ ID NO: 633035 - DNA, 54 bp, Artificial; identical to SEQ ID NO: 197423
  Synthetic oligonucleotide

SEQ ID NO: 633036 - DNA, 55 bp, Artificial; identical to SEQ ID NO: 202044
  Synthetic oligonucleotide

SEQ ID NO: 633037 - DNA, 55 bp, Artificial; identical to SEQ ID NO: 256850
  Synthetic oligonucleotide

SEQ ID NO: 633038 - DNA, 55 bp, Artificial; identical to SEQ ID NO: 245734
  Synthetic oligonucleotide

SEQ ID NO: 633039 - DNA, 55 bp, Artificial; identical to SEQ ID NO: 249956
  Synthetic oligonucleotide

SEQ ID NO: 633040 - DNA, 54 bp, Artificial; identical to SEQ ID NO: 174811
  Synthetic oligonucleotide

SEQ ID NO: 633041 - DNA, 55 bp, Artificial; identical to SEQ ID NO: 190140
  Synthetic oligonucleotide

SEQ ID NO: 633042 - DNA, 55 bp, Artificial; identical to SEQ ID NO: 224664
  Synthetic oligonucleotide

SEQ ID NO: 633043 - DNA, 51 bp, Artificial; identical to SEQ ID NO: 248041
  Synthetic oligonucleotide

SEQ ID NO: 633044 - DNA, 56 bp, Artificial; identical to SEQ ID NO: 256674
  Synthetic oligonucleotide

SEQ ID NO: 633045 - DNA, 60 bp, Artificial; identical to SEQ ID NO: 204158
  Synthetic oligonucleotide

SEQ ID NO: 633046 - DNA, 55 bp, Artificial; identical to SEQ ID NO: 202041
  Synthetic oligonucleotide

SEQ ID NO: 633047 - DNA, 52 bp, Artificial; identical to SEQ ID NO: 209690
  Synthetic oligonucleotide

SEQ ID NO: 633048 - DNA, 55 bp, Artificial; identical to SEQ ID NO: 258930
  Synthetic oligonucleotide

SEQ ID NO: 633049 - DNA, 58 bp, Artificial; identical to SEQ ID NO: 141160
  Synthetic oligonucleotide

SEQ ID NO: 633050 - DNA, 53 bp, Artificial; identical to SEQ ID NO: 190777
  Synthetic oligonucleotide

SEQ ID NO: 633051 - DNA, 54 bp, Artificial; identical to SEQ ID NO: 164810
  Synthetic oligonucleotide

SEQ ID NO: 633052 - DNA, 55 bp, Artificial; identical to SEQ ID NO: 245733
  Synthetic oligonucleotide

SEQ ID NO: 633053 - DNA, 55 bp, Artificial; identical to SEQ ID NO: 252874
  Synthetic oligonucleotide

SEQ ID NO: 633054 - DNA, 56 bp, Artificial; identical to SEQ ID NO: 147350
  Synthetic oligonucleotide

SEQ ID NO: 633055 - DNA, 53 bp, Artificial; identical to SEQ ID NO: 257542
  Synthetic oligonucleotide

SEQ ID NO: 633056 - DNA, 59 bp, Artificial; identical to SEQ ID NO: 191683
  Synthetic oligonucleotide

SEQ ID NO: 633057 - DNA, 55 bp, Artificial; identical to SEQ ID NO: 233730
  Synthetic oligonucleotide

SEQ ID NO: 633058 - DNA, 55 bp, Artificial; identical to SEQ ID NO: 171244
  Synthetic oligonucleotide

SEQ ID NO: 633059 - DNA, 55 bp, Artificial; identical to SEQ ID NO: 210898
  Synthetic oligonucleotide

SEQ ID NO: 633060 - DNA, 51 bp, Artificial; identical to SEQ ID NO: 193866
  Synthetic oligonucleotide

SEQ ID NO: 633061 - DNA, 51 bp, Artificial; identical to SEQ ID NO: 200160
  Synthetic oligonucleotide

SEQ ID NO: 633062 - DNA, 53 bp, Artificial; identical to SEQ ID NO: 255340
  Synthetic oligonucleotide

SEQ ID NO: 633063 - DNA, 52 bp, Artificial; identical to SEQ ID NO: 187361
  Synthetic oligonucleotide

SEQ ID NO: 633064 - DNA, 55 bp, Artificial; identical to SEQ ID NO: 194367
  Synthetic oligonucleotide

SEQ ID NO: 633065 - DNA, 55 bp, Artificial; identical to SEQ ID NO: 160016
  Synthetic oligonucleotide

SEQ ID NO: 633066 - DNA, 54 bp, Artificial; identical to SEQ ID NO: 201675
  Synthetic oligonucleotide

SEQ ID NO: 633067 - DNA, 53 bp, Artificial; identical to SEQ ID NO: 164844
  Synthetic oligonucleotide

SEQ ID NO: 633068 - DNA, 55 bp, Artificial; identical to SEQ ID NO: 245728
  Synthetic oligonucleotide

SEQ ID NO: 633069 - DNA, 54 bp, Artificial; identical to SEQ ID NO: 188434
  Synthetic oligonucleotide

SEQ ID NO: 633070 - DNA, 55 bp, Artificial; identical to SEQ ID NO: 166546
  Synthetic oligonucleotide

SEQ ID NO: 633071 - DNA, 55 bp, Artificial; identical to SEQ ID NO: 245779
  Synthetic oligonucleotide

SEQ ID NO: 633072 - DNA, 55 bp, Artificial; identical to SEQ ID NO: 245778
  Synthetic oligonucleotide

SEQ ID NO: 633073 - DNA, 60 bp, Artificial; identical to SEQ ID NO: 177289
  Synthetic oligonucleotide

SEQ ID NO: 633074 - DNA, 55 bp, Artificial; identical to SEQ ID NO: 245777
  Synthetic oligonucleotide

SEQ ID NO: 633075 - DNA, 50 bp, Artificial; identical to SEQ ID NO: 217723
  Synthetic oligonucleotide

SEQ ID NO: 633076 - DNA, 55 bp, Artificial; identical to SEQ ID NO: 257548
  Synthetic oligonucleotide

SEQ ID NO: 633077 - DNA, 55 bp, Artificial; identical to SEQ ID NO: 184919
  Synthetic oligonucleotide

SEQ ID NO: 633078 - DNA, 53 bp, Artificial; identical to SEQ ID NO: 211528
  Synthetic oligonucleotide

SEQ ID NO: 633079 - DNA, 55 bp, Artificial; identical to SEQ ID NO: 174481
  Synthetic oligonucleotide

SEQ ID NO: 633080 - DNA, 54 bp, Artificial; identical to SEQ ID NO: 209565
  Synthetic oligonucleotide

SEQ ID NO: 633081 - DNA, 55 bp, Artificial; identical to SEQ ID NO: 209525
  Synthetic oligonucleotide

SEQ ID NO: 633082 - DNA, 55 bp, Artificial; identical to SEQ ID NO: 256849
  Synthetic oligonucleotide

SEQ ID NO: 633083 - DNA, 56 bp, Artificial; identical to SEQ ID NO: 150577
  Synthetic oligonucleotide

SEQ ID NO: 633084 - DNA, 55 bp, Artificial; identical to SEQ ID NO: 190100
  Synthetic oligonucleotide

SEQ ID NO: 633085 - DNA, 55 bp, Artificial; identical to SEQ ID NO: 152590
  Synthetic oligonucleotide

SEQ ID NO: 633086 - DNA, 55 bp, Artificial; identical to SEQ ID NO: 142502
  Synthetic oligonucleotide

SEQ ID NO: 633087 - DNA, 55 bp, Artificial; identical to SEQ ID NO: 245774
  Synthetic oligonucleotide

SEQ ID NO: 633088 - DNA, 55 bp, Artificial; identical to SEQ ID NO: 166543
  Synthetic oligonucleotide

SEQ ID NO: 633089 - DNA, 50 bp, Artificial; identical to SEQ ID NO: 188582
  Synthetic oligonucleotide

SEQ ID NO: 633090 - DNA, 55 bp, Artificial; identical to SEQ ID NO: 208551
  Synthetic oligonucleotide

SEQ ID NO: 633091 - DNA, 54 bp, Artificial; identical to SEQ ID NO: 256848
  Synthetic oligonucleotide

SEQ ID NO: 633092 - DNA, 55 bp, Artificial; identical to SEQ ID NO: 260219
  Synthetic oligonucleotide

SEQ ID NO: 633093 - DNA, 54 bp, Artificial; identical to SEQ ID NO: 241866
  Synthetic oligonucleotide

SEQ ID NO: 633094 - DNA, 56 bp, Artificial; identical to SEQ ID NO: 147312
  Synthetic oligonucleotide

SEQ ID NO: 633095 - DNA, 55 bp, Artificial; identical to SEQ ID NO: 199487
  Synthetic oligonucleotide

SEQ ID NO: 633096 - DNA, 55 bp, Artificial; identical to SEQ ID NO: 248445
  Synthetic oligonucleotide

SEQ ID NO: 633097 - DNA, 55 bp, Artificial; identical to SEQ ID NO: 207619
  Synthetic oligonucleotide

SEQ ID NO: 633098 - DNA, 55 bp, Artificial; identical to SEQ ID NO: 184803
  Synthetic oligonucleotide

SEQ ID NO: 633099 - DNA, 55 bp, Artificial; identical to SEQ ID NO: 248800
  Synthetic oligonucleotide

SEQ ID NO: 633100 - DNA, 53 bp, Artificial; identical to SEQ ID NO: 205657
  Synthetic oligonucleotide

SEQ ID NO: 633101 - DNA, 53 bp, Artificial; identical to SEQ ID NO: 197500
  Synthetic oligonucleotide

SEQ ID NO: 633102 - DNA, 55 bp, Artificial; identical to SEQ ID NO: 166542
  Synthetic oligonucleotide

SEQ ID NO: 633103 - DNA, 59 bp, Artificial; identical to SEQ ID NO: 243918
  Synthetic oligonucleotide

SEQ ID NO: 633104 - DNA, 55 bp, Artificial; identical to SEQ ID NO: 234384
  Synthetic oligonucleotide

SEQ ID NO: 633105 - DNA, 56 bp, Artificial; identical to SEQ ID NO: 147307
  Synthetic oligonucleotide

SEQ ID NO: 633106 - DNA, 55 bp, Artificial; identical to SEQ ID NO: 194368
  Synthetic oligonucleotide

SEQ ID NO: 633107 - DNA, 51 bp, Artificial; identical to SEQ ID NO: 241075
  Synthetic oligonucleotide

SEQ ID NO: 633108 - DNA, 55 bp, Artificial; identical to SEQ ID NO: 203587
  Synthetic oligonucleotide

SEQ ID NO: 633109 - DNA, 55 bp, Artificial; identical to SEQ ID NO: 261907
  Synthetic oligonucleotide

SEQ ID NO: 633110 - DNA, 55 bp, Artificial; identical to SEQ ID NO: 155334
  Synthetic oligonucleotide

SEQ ID NO: 633111 - DNA, 54 bp, Artificial; identical to SEQ ID NO: 259005
  Synthetic oligonucleotide

SEQ ID NO: 633112 - DNA, 55 bp, Artificial; identical to SEQ ID NO: 151394
  Synthetic oligonucleotide

SEQ ID NO: 633113 - DNA, 55 bp, Artificial; identical to SEQ ID NO: 196961
  Synthetic oligonucleotide

SEQ ID NO: 633114 - DNA, 55 bp, Artificial; identical to SEQ ID NO: 245768
  Synthetic oligonucleotide

SEQ ID NO: 633115 - DNA, 50 bp, Artificial; identical to SEQ ID NO: 152244
  Synthetic oligonucleotide

SEQ ID NO: 633116 - DNA, 55 bp, Artificial; identical to SEQ ID NO: 190101
  Synthetic oligonucleotide

SEQ ID NO: 633117 - DNA, 55 bp, Artificial; identical to SEQ ID NO: 224665
  Synthetic oligonucleotide

SEQ ID NO: 633118 - DNA, 55 bp, Artificial; identical to SEQ ID NO: 191791
  Synthetic oligonucleotide

SEQ ID NO: 633119 - DNA, 55 bp, Artificial; identical to SEQ ID NO: 155333
  Synthetic oligonucleotide

SEQ ID NO: 633120 - DNA, 55 bp, Artificial; identical to SEQ ID NO: 151384
  Synthetic oligonucleotide

SEQ ID NO: 633121 - DNA, 54 bp, Artificial; identical to SEQ ID NO: 209073
  Synthetic oligonucleotide

SEQ ID NO: 633122 - DNA, 55 bp, Artificial; identical to SEQ ID NO: 147617
  Synthetic oligonucleotide

SEQ ID NO: 633123 - DNA, 55 bp, Artificial; identical to SEQ ID NO: 221085
  Synthetic oligonucleotide

SEQ ID NO: 633124 - DNA, 55 bp, Artificial; identical to SEQ ID NO: 216519
  Synthetic oligonucleotide

SEQ ID NO: 633125 - DNA, 60 bp, Artificial; identical to SEQ ID NO: 246431
  Synthetic oligonucleotide

SEQ ID NO: 633126 - DNA, 55 bp, Artificial; identical to SEQ ID NO: 184812
  Synthetic oligonucleotide

SEQ ID NO: 633127 - DNA, 55 bp, Artificial; identical to SEQ ID NO: 242994
  Synthetic oligonucleotide

SEQ ID NO: 633128 - DNA, 55 bp, Artificial; identical to SEQ ID NO: 169848
  Synthetic oligonucleotide

SEQ ID NO: 633129 - DNA, 52 bp, Artificial; identical to SEQ ID NO: 209682
  Synthetic oligonucleotide

SEQ ID NO: 633130 - DNA, 55 bp, Artificial; identical to SEQ ID NO: 212717
  Synthetic oligonucleotide

SEQ ID NO: 633131 - DNA, 51 bp, Artificial; identical to SEQ ID NO: 186497
  Synthetic oligonucleotide

SEQ ID NO: 633132 - DNA, 58 bp, Artificial; identical to SEQ ID NO: 150578
  Synthetic oligonucleotide

SEQ ID NO: 633133 - DNA, 55 bp, Artificial; identical to SEQ ID NO: 199453
  Synthetic oligonucleotide

SEQ ID NO: 633134 - DNA, 54 bp, Artificial; identical to SEQ ID NO: 243047
  Synthetic oligonucleotide

SEQ ID NO: 633135 - DNA, 55 bp, Artificial; identical to SEQ ID NO: 147654
  Synthetic oligonucleotide

SEQ ID NO: 633136 - DNA, 56 bp, Artificial; identical to SEQ ID NO: 201260
  Synthetic oligonucleotide

SEQ ID NO: 633137 - DNA, 60 bp, Artificial; identical to SEQ ID NO: 254433
  Synthetic oligonucleotide

SEQ ID NO: 633138 - DNA, 59 bp, Artificial; identical to SEQ ID NO: 241865
  Synthetic oligonucleotide

SEQ ID NO: 633139 - DNA, 53 bp, Artificial; identical to SEQ ID NO: 169356
  Synthetic oligonucleotide

SEQ ID NO: 633140 - DNA, 55 bp, Artificial; identical to SEQ ID NO: 239168
  Synthetic oligonucleotide

SEQ ID NO: 633141 - DNA, 53 bp, Artificial; identical to SEQ ID NO: 254445
  Synthetic oligonucleotide

SEQ ID NO: 633142 - DNA, 59 bp, Artificial; identical to SEQ ID NO: 200527
  Synthetic oligonucleotide

SEQ ID NO: 633143 - DNA, 57 bp, Artificial; identical to SEQ ID NO: 241862
  Synthetic oligonucleotide

SEQ ID NO: 633144 - DNA, 55 bp, Artificial; identical to SEQ ID NO: 245763
  Synthetic oligonucleotide

SEQ ID NO: 633145 - DNA, 52 bp, Artificial; identical to SEQ ID NO: 205431
  Synthetic oligonucleotide

SEQ ID NO: 633146 - DNA, 50 bp, Artificial; identical to SEQ ID NO: 209789
  Synthetic oligonucleotide

SEQ ID NO: 633147 - DNA, 54 bp, Artificial; identical to SEQ ID NO: 211485
  Synthetic oligonucleotide

SEQ ID NO: 633148 - DNA, 55 bp, Artificial; identical to SEQ ID NO: 184820
  Synthetic oligonucleotide

SEQ ID NO: 633149 - DNA, 52 bp, Artificial; identical to SEQ ID NO: 174299
  Synthetic oligonucleotide

SEQ ID NO: 633150 - DNA, 51 bp, Artificial; identical to SEQ ID NO: 186439
  Synthetic oligonucleotide

SEQ ID NO: 633151 - DNA, 55 bp, Artificial; identical to SEQ ID NO: 172937
  Synthetic oligonucleotide

SEQ ID NO: 633152 - DNA, 51 bp, Artificial; identical to SEQ ID NO: 200172
  Synthetic oligonucleotide

SEQ ID NO: 633153 - DNA, 51 bp, Artificial; identical to SEQ ID NO: 186416
  Synthetic oligonucleotide

SEQ ID NO: 633154 - DNA, 55 bp, Artificial; identical to SEQ ID NO: 184781
  Synthetic oligonucleotide

SEQ ID NO: 633155 - DNA, 55 bp, Artificial; identical to SEQ ID NO: 202033
  Synthetic oligonucleotide

SEQ ID NO: 633156 - DNA, 54 bp, Artificial; identical to SEQ ID NO: 164781
  Synthetic oligonucleotide

SEQ ID NO: 633157 - DNA, 55 bp, Artificial; identical to SEQ ID NO: 256847
  Synthetic oligonucleotide

SEQ ID NO: 633158 - DNA, 55 bp, Artificial; identical to SEQ ID NO: 245759
  Synthetic oligonucleotide

SEQ ID NO: 633159 - DNA, 55 bp, Artificial; identical to SEQ ID NO: 245758
  Synthetic oligonucleotide

SEQ ID NO: 633160 - DNA, 55 bp, Artificial; identical to SEQ ID NO: 266208
  Synthetic oligonucleotide

SEQ ID NO: 633161 - DNA, 54 bp, Artificial; identical to SEQ ID NO: 164747
  Synthetic oligonucleotide

SEQ ID NO: 633162 - DNA, 51 bp, Artificial; identical to SEQ ID NO: 255729
  Synthetic oligonucleotide

SEQ ID NO: 633163 - DNA, 51 bp, Artificial; identical to SEQ ID NO: 263530
  Synthetic oligonucleotide

SEQ ID NO: 633164 - DNA, 51 bp, Artificial; identical to SEQ ID NO: 170203
  Synthetic oligonucleotide

SEQ ID NO: 633165 - DNA, 55 bp, Artificial; identical to SEQ ID NO: 218262
  Synthetic oligonucleotide

SEQ ID NO: 633166 - DNA, 54 bp, Artificial; identical to SEQ ID NO: 144509
  Synthetic oligonucleotide

SEQ ID NO: 633167 - DNA, 57 bp, Artificial; identical to SEQ ID NO: 239199
  Synthetic oligonucleotide

SEQ ID NO: 633168 - DNA, 55 bp, Artificial; identical to SEQ ID NO: 245757
  Synthetic oligonucleotide

SEQ ID NO: 633169 - DNA, 55 bp, Artificial; identical to SEQ ID NO: 142479
  Synthetic oligonucleotide

SEQ ID NO: 633170 - DNA, 55 bp, Artificial; identical to SEQ ID NO: 159181
  Synthetic oligonucleotide

SEQ ID NO: 633171 - DNA, 55 bp, Artificial; identical to SEQ ID NO: 245756
  Synthetic oligonucleotide

SEQ ID NO: 633172 - DNA, 57 bp, Artificial; identical to SEQ ID NO: 202551
  Synthetic oligonucleotide

SEQ ID NO: 633173 - DNA, 55 bp, Artificial; identical to SEQ ID NO: 243003
  Synthetic oligonucleotide

SEQ ID NO: 633174 - DNA, 57 bp, Artificial; identical to SEQ ID NO: 141959
  Synthetic oligonucleotide

SEQ ID NO: 633175 - DNA, 59 bp, Artificial; identical to SEQ ID NO: 252682
  Synthetic oligonucleotide

SEQ ID NO: 633176 - DNA, 55 bp, Artificial; identical to SEQ ID NO: 159183
  Synthetic oligonucleotide

SEQ ID NO: 633177 - DNA, 55 bp, Artificial; identical to SEQ ID NO: 209531
  Synthetic oligonucleotide

SEQ ID NO: 633178 - DNA, 54 bp, Artificial; identical to SEQ ID NO: 199455
  Synthetic oligonucleotide

SEQ ID NO: 633179 - DNA, 60 bp, Artificial; identical to SEQ ID NO: 253430
  Synthetic oligonucleotide

SEQ ID NO: 633180 - DNA, 55 bp, Artificial; identical to SEQ ID NO: 207612
  Synthetic oligonucleotide

SEQ ID NO: 633181 - DNA, 55 bp, Artificial; identical to SEQ ID NO: 240306
  Synthetic oligonucleotide

SEQ ID NO: 633182 - DNA, 55 bp, Artificial; identical to SEQ ID NO: 191761
  Synthetic oligonucleotide

SEQ ID NO: 633183 - DNA, 51 bp, Artificial; identical to SEQ ID NO: 248050
  Synthetic oligonucleotide

SEQ ID NO: 633184 - DNA, 52 bp, Artificial; identical to SEQ ID NO: 186039
  Synthetic oligonucleotide

SEQ ID NO: 633185 - DNA, 55 bp, Artificial; identical to SEQ ID NO: 216518
  Synthetic oligonucleotide

SEQ ID NO: 633186 - DNA, 53 bp, Artificial; identical to SEQ ID NO: 243203
  Synthetic oligonucleotide

SEQ ID NO: 633187 - DNA, 53 bp, Artificial; identical to SEQ ID NO: 197499
  Synthetic oligonucleotide

SEQ ID NO: 633188 - DNA, 54 bp, Artificial; identical to SEQ ID NO: 155202
  Synthetic oligonucleotide

SEQ ID NO: 633189 - DNA, 59 bp, Artificial; identical to SEQ ID NO: 170795
  Synthetic oligonucleotide

SEQ ID NO: 633190 - DNA, 55 bp, Artificial; identical to SEQ ID NO: 245753
  Synthetic oligonucleotide

SEQ ID NO: 633191 - DNA, 60 bp, Artificial; identical to SEQ ID NO: 144694
  Synthetic oligonucleotide

SEQ ID NO: 633192 - DNA, 54 bp, Artificial; identical to SEQ ID NO: 221087
  Synthetic oligonucleotide

SEQ ID NO: 633193 - DNA, 58 bp, Artificial; identical to SEQ ID NO: 160619
  Synthetic oligonucleotide

SEQ ID NO: 633194 - DNA, 49 bp, Artificial; identical to SEQ ID NO: 177284
  Synthetic oligonucleotide

SEQ ID NO: 633195 - DNA, 54 bp, Artificial; identical to SEQ ID NO: 144041
  Synthetic oligonucleotide

SEQ ID NO: 633196 - DNA, 51 bp, Artificial; identical to SEQ ID NO: 208323
  Synthetic oligonucleotide

SEQ ID NO: 633197 - DNA, 51 bp, Artificial; identical to SEQ ID NO: 157888
  Synthetic oligonucleotide

SEQ ID NO: 633198 - DNA, 52 bp, Artificial; identical to SEQ ID NO: 240721
  Synthetic oligonucleotide

SEQ ID NO: 633199 - DNA, 58 bp, Artificial; identical to SEQ ID NO: 224335
  Synthetic oligonucleotide

SEQ ID NO: 633200 - DNA, 55 bp, Artificial; identical to SEQ ID NO: 242991
  Synthetic oligonucleotide

SEQ ID NO: 633201 - DNA, 58 bp, Artificial; identical to SEQ ID NO: 224414
  Synthetic oligonucleotide

SEQ ID NO: 633202 - DNA, 52 bp, Artificial; identical to SEQ ID NO: 153641
  Synthetic oligonucleotide

SEQ ID NO: 633203 - DNA, 55 bp, Artificial; identical to SEQ ID NO: 194369
  Synthetic oligonucleotide

SEQ ID NO: 633204 - DNA, 55 bp, Artificial; identical to SEQ ID NO: 184856
  Synthetic oligonucleotide

SEQ ID NO: 633205 - DNA, 55 bp, Artificial; identical to SEQ ID NO: 174412
  Synthetic oligonucleotide

SEQ ID NO: 633206 - DNA, 55 bp, Artificial; identical to SEQ ID NO: 190104
  Synthetic oligonucleotide

SEQ ID NO: 633207 - DNA, 51 bp, Artificial; identical to SEQ ID NO: 197699
  Synthetic oligonucleotide

SEQ ID NO: 633208 - DNA, 51 bp, Artificial; identical to SEQ ID NO: 205762
  Synthetic oligonucleotide

SEQ ID NO: 633209 - DNA, 53 bp, Artificial; identical to SEQ ID NO: 167036
  Synthetic oligonucleotide

SEQ ID NO: 633210 - DNA, 55 bp, Artificial; identical to SEQ ID NO: 196964
  Synthetic oligonucleotide

SEQ ID NO: 633211 - DNA, 55 bp, Artificial; identical to SEQ ID NO: 245837
  Synthetic oligonucleotide

SEQ ID NO: 633212 - DNA, 58 bp, Artificial; identical to SEQ ID NO: 150586
  Synthetic oligonucleotide

SEQ ID NO: 633213 - DNA, 60 bp, Artificial; identical to SEQ ID NO: 150587
  Synthetic oligonucleotide

SEQ ID NO: 633214 - DNA, 50 bp, Artificial; identical to SEQ ID NO: 206890
  Synthetic oligonucleotide

SEQ ID NO: 633215 - DNA, 59 bp, Artificial; identical to SEQ ID NO: 162336
  Synthetic oligonucleotide

SEQ ID NO: 633216 - DNA, 56 bp, Artificial; identical to SEQ ID NO: 257531
  Synthetic oligonucleotide

SEQ ID NO: 633217 - DNA, 59 bp, Artificial; identical to SEQ ID NO: 160630
  Synthetic oligonucleotide

SEQ ID NO: 633218 - DNA, 53 bp, Artificial; identical to SEQ ID NO: 189107
  Synthetic oligonucleotide

SEQ ID NO: 633219 - DNA, 55 bp, Artificial; identical to SEQ ID NO: 188903
  Synthetic oligonucleotide

SEQ ID NO: 633220 - DNA, 55 bp, Artificial; identical to SEQ ID NO: 142593
  Synthetic oligonucleotide

SEQ ID NO: 633221 - DNA, 55 bp, Artificial; identical to SEQ ID NO: 188722
  Synthetic oligonucleotide

SEQ ID NO: 633222 - DNA, 50 bp, Artificial; identical to SEQ ID NO: 192221
  Synthetic oligonucleotide

SEQ ID NO: 633223 - DNA, 55 bp, Artificial; identical to SEQ ID NO: 184863
  Synthetic oligonucleotide

SEQ ID NO: 633224 - DNA, 60 bp, Artificial; identical to SEQ ID NO: 267325
  Synthetic oligonucleotide

SEQ ID NO: 633225 - DNA, 55 bp, Artificial; identical to SEQ ID NO: 224667
  Synthetic oligonucleotide

SEQ ID NO: 633226 - DNA, 51 bp, Artificial; identical to SEQ ID NO: 203025
  Synthetic oligonucleotide

SEQ ID NO: 633227 - DNA, 50 bp, Artificial; identical to SEQ ID NO: 233352
  Synthetic oligonucleotide

SEQ ID NO: 633228 - DNA, 52 bp, Artificial; identical to SEQ ID NO: 174878
  Synthetic oligonucleotide

SEQ ID NO: 633229 - DNA, 54 bp, Artificial; identical to SEQ ID NO: 238564
  Synthetic oligonucleotide

SEQ ID NO: 633230 - DNA, 60 bp, Artificial; identical to SEQ ID NO: 150588
  Synthetic oligonucleotide

SEQ ID NO: 633231 - DNA, 55 bp, Artificial; identical to SEQ ID NO: 184864
  Synthetic oligonucleotide

SEQ ID NO: 633232 - DNA, 59 bp, Artificial; identical to SEQ ID NO: 224392
  Synthetic oligonucleotide

SEQ ID NO: 633233 - DNA, 55 bp, Artificial; identical to SEQ ID NO: 142851
  Synthetic oligonucleotide

SEQ ID NO: 633234 - DNA, 54 bp, Artificial; identical to SEQ ID NO: 202540
  Synthetic oligonucleotide

SEQ ID NO: 633235 - DNA, 51 bp, Artificial; identical to SEQ ID NO: 210347
  Synthetic oligonucleotide

SEQ ID NO: 633236 - DNA, 55 bp, Artificial; identical to SEQ ID NO: 184868
  Synthetic oligonucleotide

SEQ ID NO: 633237 - DNA, 52 bp, Artificial; identical to SEQ ID NO: 208755
  Synthetic oligonucleotide

SEQ ID NO: 633238 - DNA, 54 bp, Artificial; identical to SEQ ID NO: 266267
  Synthetic oligonucleotide

SEQ ID NO: 633239 - DNA, 55 bp, Artificial; identical to SEQ ID NO: 256844
  Synthetic oligonucleotide

SEQ ID NO: 633240 - DNA, 59 bp, Artificial; identical to SEQ ID NO: 177278
  Synthetic oligonucleotide

SEQ ID NO: 633241 - DNA, 52 bp, Artificial; identical to SEQ ID NO: 165009
  Synthetic oligonucleotide

SEQ ID NO: 633242 - DNA, 60 bp, Artificial; identical to SEQ ID NO: 194437
  Synthetic oligonucleotide

SEQ ID NO: 633243 - DNA, 58 bp, Artificial; identical to SEQ ID NO: 147129
  Synthetic oligonucleotide

SEQ ID NO: 633244 - DNA, 59 bp, Artificial; identical to SEQ ID NO: 217501
  Synthetic oligonucleotide

SEQ ID NO: 633245 - DNA, 53 bp, Artificial; identical to SEQ ID NO: 245668
  Synthetic oligonucleotide

SEQ ID NO: 633246 - DNA, 54 bp, Artificial; identical to SEQ ID NO: 217311
  Synthetic oligonucleotide

SEQ ID NO: 633247 - DNA, 55 bp, Artificial; identical to SEQ ID NO: 147554
  Synthetic oligonucleotide

SEQ ID NO: 633248 - DNA, 53 bp, Artificial; identical to SEQ ID NO: 150589
  Synthetic oligonucleotide

SEQ ID NO: 633249 - DNA, 55 bp, Artificial; identical to SEQ ID NO: 256843
  Synthetic oligonucleotide

SEQ ID NO: 633250 - DNA, 55 bp, Artificial; identical to SEQ ID NO: 194371
  Synthetic oligonucleotide

SEQ ID NO: 633251 - DNA, 50 bp, Artificial; identical to SEQ ID NO: 255958
  Synthetic oligonucleotide

SEQ ID NO: 633252 - DNA, 60 bp, Artificial; identical to SEQ ID NO: 177273
  Synthetic oligonucleotide

SEQ ID NO: 633253 - DNA, 54 bp, Artificial; identical to SEQ ID NO: 152423
  Synthetic oligonucleotide

SEQ ID NO: 633254 - DNA, 54 bp, Artificial; identical to SEQ ID NO: 184842
  Synthetic oligonucleotide

SEQ ID NO: 633255 - DNA, 55 bp, Artificial; identical to SEQ ID NO: 238057
  Synthetic oligonucleotide

SEQ ID NO: 633256 - DNA, 55 bp, Artificial; identical to SEQ ID NO: 206896
  Synthetic oligonucleotide

SEQ ID NO: 633257 - DNA, 54 bp, Artificial; identical to SEQ ID NO: 157127
  Synthetic oligonucleotide

SEQ ID NO: 633258 - DNA, 51 bp, Artificial; identical to SEQ ID NO: 197874
  Synthetic oligonucleotide

SEQ ID NO: 633259 - DNA, 55 bp, Artificial; identical to SEQ ID NO: 220887
  Synthetic oligonucleotide

SEQ ID NO: 633260 - DNA, 60 bp, Artificial; identical to SEQ ID NO: 141840
  Synthetic oligonucleotide

SEQ ID NO: 633261 - DNA, 52 bp, Artificial; identical to SEQ ID NO: 200503
  Synthetic oligonucleotide

SEQ ID NO: 633262 - DNA, 55 bp, Artificial; identical to SEQ ID NO: 209532
  Synthetic oligonucleotide

SEQ ID NO: 633263 - DNA, 55 bp, Artificial; identical to SEQ ID NO: 199307
  Synthetic oligonucleotide

SEQ ID NO: 633264 - DNA, 60 bp, Artificial; identical to SEQ ID NO: 141951
  Synthetic oligonucleotide

SEQ ID NO: 633265 - DNA, 50 bp, Artificial; identical to SEQ ID NO: 165999
  Synthetic oligonucleotide

SEQ ID NO: 633266 - DNA, 57 bp, Artificial; identical to SEQ ID NO: 211025
  Synthetic oligonucleotide

SEQ ID NO: 633267 - DNA, 58 bp, Artificial; identical to SEQ ID NO: 241856
  Synthetic oligonucleotide

SEQ ID NO: 633268 - DNA, 55 bp, Artificial; identical to SEQ ID NO: 184843
  Synthetic oligonucleotide

SEQ ID NO: 633269 - DNA, 55 bp, Artificial; identical to SEQ ID NO: 166848
  Synthetic oligonucleotide

SEQ ID NO: 633270 - DNA, 54 bp, Artificial; identical to SEQ ID NO: 241854
  Synthetic oligonucleotide

SEQ ID NO: 633271 - DNA, 55 bp, Artificial; identical to SEQ ID NO: 246487
  Synthetic oligonucleotide

SEQ ID NO: 633272 - DNA, 60 bp, Artificial; identical to SEQ ID NO: 177442
  Synthetic oligonucleotide

SEQ ID NO: 633273 - DNA, 55 bp, Artificial; identical to SEQ ID NO: 188242
  Synthetic oligonucleotide

SEQ ID NO: 633274 - DNA, 57 bp, Artificial; identical to SEQ ID NO: 200281
  Synthetic oligonucleotide

SEQ ID NO: 633275 - DNA, 49 bp, Artificial; identical to SEQ ID NO: 202529
  Synthetic oligonucleotide

SEQ ID NO: 633276 - DNA, 52 bp, Artificial; identical to SEQ ID NO: 196731
  Synthetic oligonucleotide

SEQ ID NO: 633277 - DNA, 52 bp, Artificial; identical to SEQ ID NO: 206897
  Synthetic oligonucleotide

SEQ ID NO: 633278 - DNA, 60 bp, Artificial; identical to SEQ ID NO: 243450
  Synthetic oligonucleotide

SEQ ID NO: 633279 - DNA, 54 bp, Artificial; identical to SEQ ID NO: 147286
  Synthetic oligonucleotide

SEQ ID NO: 633280 - DNA, 58 bp, Artificial; identical to SEQ ID NO: 243451
  Synthetic oligonucleotide

SEQ ID NO: 633281 - DNA, 50 bp, Artificial; identical to SEQ ID NO: 242538
  Synthetic oligonucleotide

SEQ ID NO: 633282 - DNA, 51 bp, Artificial; identical to SEQ ID NO: 237937
  Synthetic oligonucleotide

SEQ ID NO: 633283 - DNA, 54 bp, Artificial; identical to SEQ ID NO: 149737
  Synthetic oligonucleotide

SEQ ID NO: 633284 - DNA, 52 bp, Artificial; identical to SEQ ID NO: 149749
  Synthetic oligonucleotide

SEQ ID NO: 633285 - DNA, 53 bp, Artificial; identical to SEQ ID NO: 149760
  Synthetic oligonucleotide

SEQ ID NO: 633286 - DNA, 57 bp, Artificial; identical to SEQ ID NO: 177436
  Synthetic oligonucleotide

SEQ ID NO: 633287 - DNA, 52 bp, Artificial; identical to SEQ ID NO: 142518
  Synthetic oligonucleotide

SEQ ID NO: 633288 - DNA, 60 bp, Artificial; identical to SEQ ID NO: 200170
  Synthetic oligonucleotide

SEQ ID NO: 633289 - DNA, 50 bp, Artificial; identical to SEQ ID NO: 255951
  Synthetic oligonucleotide

SEQ ID NO: 633290 - DNA, 55 bp, Artificial; identical to SEQ ID NO: 220909
  Synthetic oligonucleotide

SEQ ID NO: 633291 - DNA, 55 bp, Artificial; identical to SEQ ID NO: 216512
  Synthetic oligonucleotide

SEQ ID NO: 633292 - DNA, 58 bp, Artificial; identical to SEQ ID NO: 210820
  Synthetic oligonucleotide

SEQ ID NO: 633293 - DNA, 52 bp, Artificial; identical to SEQ ID NO: 147459
  Synthetic oligonucleotide

SEQ ID NO: 633294 - DNA, 55 bp, Artificial; identical to SEQ ID NO: 174484
  Synthetic oligonucleotide

SEQ ID NO: 633295 - DNA, 51 bp, Artificial; identical to SEQ ID NO: 188523
  Synthetic oligonucleotide

SEQ ID NO: 633296 - DNA, 60 bp, Artificial; identical to SEQ ID NO: 177435
  Synthetic oligonucleotide

SEQ ID NO: 633297 - DNA, 51 bp, Artificial; identical to SEQ ID NO: 167611
  Synthetic oligonucleotide

SEQ ID NO: 633298 - DNA, 55 bp, Artificial; identical to SEQ ID NO: 147430
  Synthetic oligonucleotide

SEQ ID NO: 633299 - DNA, 59 bp, Artificial; identical to SEQ ID NO: 243452
  Synthetic oligonucleotide

SEQ ID NO: 633300 - DNA, 53 bp, Artificial; identical to SEQ ID NO: 248804
  Synthetic oligonucleotide

SEQ ID NO: 633301 - DNA, 55 bp, Artificial; identical to SEQ ID NO: 242904
  Synthetic oligonucleotide

SEQ ID NO: 633302 - DNA, 53 bp, Artificial; identical to SEQ ID NO: 199283
  Synthetic oligonucleotide

SEQ ID NO: 633303 - DNA, 55 bp, Artificial; identical to SEQ ID NO: 238061
  Synthetic oligonucleotide

SEQ ID NO: 633304 - DNA, 55 bp, Artificial; identical to SEQ ID NO: 199289
  Synthetic oligonucleotide

SEQ ID NO: 633305 - DNA, 52 bp, Artificial; identical to SEQ ID NO: 206483
  Synthetic oligonucleotide

SEQ ID NO: 633306 - DNA, 60 bp, Artificial; identical to SEQ ID NO: 202518
  Synthetic oligonucleotide

SEQ ID NO: 633307 - DNA, 60 bp, Artificial; identical to SEQ ID NO: 160586
  Synthetic oligonucleotide

SEQ ID NO: 633308 - DNA, 55 bp, Artificial; identical to SEQ ID NO: 199371
  Synthetic oligonucleotide

SEQ ID NO: 633309 - DNA, 55 bp, Artificial; identical to SEQ ID NO: 257554
  Synthetic oligonucleotide

SEQ ID NO: 633310 - DNA, 55 bp, Artificial; identical to SEQ ID NO: 249921
  Synthetic oligonucleotide

SEQ ID NO: 633311 - DNA, 55 bp, Artificial; identical to SEQ ID NO: 256838
  Synthetic oligonucleotide

SEQ ID NO: 633312 - DNA, 55 bp, Artificial; identical to SEQ ID NO: 236444
  Synthetic oligonucleotide

SEQ ID NO: 633313 - DNA, 51 bp, Artificial; identical to SEQ ID NO: 144579
  Synthetic oligonucleotide

SEQ ID NO: 633314 - DNA, 55 bp, Artificial; identical to SEQ ID NO: 252881
  Synthetic oligonucleotide

SEQ ID NO: 633315 - DNA, 53 bp, Artificial; identical to SEQ ID NO: 152052
  Synthetic oligonucleotide

SEQ ID NO: 633316 - DNA, 59 bp, Artificial; identical to SEQ ID NO: 152568
  Synthetic oligonucleotide

SEQ ID NO: 633317 - DNA, 55 bp, Artificial; identical to SEQ ID NO: 209535
  Synthetic oligonucleotide

SEQ ID NO: 633318 - DNA, 51 bp, Artificial; identical to SEQ ID NO: 200039
  Synthetic oligonucleotide

SEQ ID NO: 633319 - DNA, 55 bp, Artificial; identical to SEQ ID NO: 184834
  Synthetic oligonucleotide

SEQ ID NO: 633320 - DNA, 55 bp, Artificial; identical to SEQ ID NO: 199331
  Synthetic oligonucleotide

SEQ ID NO: 633321 - DNA, 55 bp, Artificial; identical to SEQ ID NO: 245722
  Synthetic oligonucleotide

SEQ ID NO: 633322 - DNA, 55 bp, Artificial; identical to SEQ ID NO: 253794
  Synthetic oligonucleotide

SEQ ID NO: 633323 - DNA, 60 bp, Artificial; identical to SEQ ID NO: 206901
  Synthetic oligonucleotide

SEQ ID NO: 633324 - DNA, 50 bp, Artificial; identical to SEQ ID NO: 246839
  Synthetic oligonucleotide

SEQ ID NO: 633325 - DNA, 60 bp, Artificial; identical to SEQ ID NO: 177433
  Synthetic oligonucleotide

SEQ ID NO: 633326 - DNA, 54 bp, Artificial; identical to SEQ ID NO: 157129
  Synthetic oligonucleotide

SEQ ID NO: 633327 - DNA, 59 bp, Artificial; identical to SEQ ID NO: 247374
  Synthetic oligonucleotide

SEQ ID NO: 633328 - DNA, 58 bp, Artificial; identical to SEQ ID NO: 239280
  Synthetic oligonucleotide

SEQ ID NO: 633329 - DNA, 55 bp, Artificial; identical to SEQ ID NO: 203583
  Synthetic oligonucleotide

SEQ ID NO: 633330 - DNA, 57 bp, Artificial; identical to SEQ ID NO: 153053
  Synthetic oligonucleotide

SEQ ID NO: 633331 - DNA, 51 bp, Artificial; identical to SEQ ID NO: 170709
  Synthetic oligonucleotide

SEQ ID NO: 633332 - DNA, 51 bp, Artificial; identical to SEQ ID NO: 186463
  Synthetic oligonucleotide

SEQ ID NO: 633333 - DNA, 53 bp, Artificial; identical to SEQ ID NO: 185485
  Synthetic oligonucleotide

SEQ ID NO: 633334 - DNA, 50 bp, Artificial; identical to SEQ ID NO: 200373
  Synthetic oligonucleotide

SEQ ID NO: 633335 - DNA, 50 bp, Artificial; identical to SEQ ID NO: 167949
  Synthetic oligonucleotide

SEQ ID NO: 633336 - DNA, 59 bp, Artificial; identical to SEQ ID NO: 142062
  Synthetic oligonucleotide

SEQ ID NO: 633337 - DNA, 55 bp, Artificial; identical to SEQ ID NO: 142463
  Synthetic oligonucleotide

SEQ ID NO: 633338 - DNA, 60 bp, Artificial; identical to SEQ ID NO: 144689
  Synthetic oligonucleotide

SEQ ID NO: 633339 - DNA, 54 bp, Artificial; identical to SEQ ID NO: 208562
  Synthetic oligonucleotide

SEQ ID NO: 633340 - DNA, 55 bp, Artificial; identical to SEQ ID NO: 188211
  Synthetic oligonucleotide

SEQ ID NO: 633341 - DNA, 52 bp, Artificial; identical to SEQ ID NO: 203960
  Synthetic oligonucleotide

SEQ ID NO: 633342 - DNA, 55 bp, Artificial; identical to SEQ ID NO: 184850
  Synthetic oligonucleotide

SEQ ID NO: 633343 - DNA, 55 bp, Artificial; identical to SEQ ID NO: 142471
  Synthetic oligonucleotide

SEQ ID NO: 633344 - DNA, 54 bp, Artificial; identical to SEQ ID NO: 184847
  Synthetic oligonucleotide

SEQ ID NO: 633345 - DNA, 56 bp, Artificial; identical to SEQ ID NO: 246498
  Synthetic oligonucleotide

SEQ ID NO: 633346 - DNA, 51 bp, Artificial; identical to SEQ ID NO: 193124
  Synthetic oligonucleotide

SEQ ID NO: 633347 - DNA, 56 bp, Artificial; identical to SEQ ID NO: 257439
  Synthetic oligonucleotide

SEQ ID NO: 633348 - DNA, 54 bp, Artificial; identical to SEQ ID NO: 243106
  Synthetic oligonucleotide

SEQ ID NO: 633349 - DNA, 55 bp, Artificial; identical to SEQ ID NO: 199336
  Synthetic oligonucleotide

SEQ ID NO: 633350 - DNA, 52 bp, Artificial; identical to SEQ ID NO: 211616
  Synthetic oligonucleotide

SEQ ID NO: 633351 - DNA, 52 bp, Artificial; identical to SEQ ID NO: 223709
  Synthetic oligonucleotide

SEQ ID NO: 633352 - DNA, 53 bp, Artificial; identical to SEQ ID NO: 185451
  Synthetic oligonucleotide

SEQ ID NO: 633353 - DNA, 56 bp, Artificial; identical to SEQ ID NO: 147347
  Synthetic oligonucleotide

SEQ ID NO: 633354 - DNA, 56 bp, Artificial; identical to SEQ ID NO: 202682
  Synthetic oligonucleotide

SEQ ID NO: 633355 - DNA, 52 bp, Artificial; identical to SEQ ID NO: 255560
  Synthetic oligonucleotide

SEQ ID NO: 633356 - DNA, 56 bp, Artificial; identical to SEQ ID NO: 141990
  Synthetic oligonucleotide

SEQ ID NO: 633357 - DNA, 55 bp, Artificial; identical to SEQ ID NO: 245990
  Synthetic oligonucleotide

SEQ ID NO: 633358 - DNA, 57 bp, Artificial; identical to SEQ ID NO: 217391
  Synthetic oligonucleotide

SEQ ID NO: 633359 - DNA, 55 bp, Artificial; identical to SEQ ID NO: 209541
  Synthetic oligonucleotide

SEQ ID NO: 633360 - DNA, 55 bp, Artificial; identical to SEQ ID NO: 159191
  Synthetic oligonucleotide

SEQ ID NO: 633361 - DNA, 53 bp, Artificial; identical to SEQ ID NO: 160422
  Synthetic oligonucleotide

SEQ ID NO: 633362 - DNA, 56 bp, Artificial; identical to SEQ ID NO: 177430
  Synthetic oligonucleotide

SEQ ID NO: 633363 - DNA, 55 bp, Artificial; identical to SEQ ID NO: 242905
  Synthetic oligonucleotide

SEQ ID NO: 633364 - DNA, 58 bp, Artificial; identical to SEQ ID NO: 247458
  Synthetic oligonucleotide

SEQ ID NO: 633365 - DNA, 55 bp, Artificial; identical to SEQ ID NO: 238100
  Synthetic oligonucleotide

SEQ ID NO: 633366 - DNA, 52 bp, Artificial; identical to SEQ ID NO: 208324
  Synthetic oligonucleotide

SEQ ID NO: 633367 - DNA, 55 bp, Artificial; identical to SEQ ID NO: 242906
  Synthetic oligonucleotide

SEQ ID NO: 633368 - DNA, 60 bp, Artificial; identical to SEQ ID NO: 237949
  Synthetic oligonucleotide

SEQ ID NO: 633369 - DNA, 57 bp, Artificial; identical to SEQ ID NO: 241849
  Synthetic oligonucleotide

SEQ ID NO: 633370 - DNA, 55 bp, Artificial; identical to SEQ ID NO: 162213
  Synthetic oligonucleotide

SEQ ID NO: 633371 - DNA, 54 bp, Artificial; identical to SEQ ID NO: 253262
  Synthetic oligonucleotide

SEQ ID NO: 633372 - DNA, 55 bp, Artificial; identical to SEQ ID NO: 245959
  Synthetic oligonucleotide

SEQ ID NO: 633373 - DNA, 55 bp, Artificial; identical to SEQ ID NO: 245963
  Synthetic oligonucleotide

SEQ ID NO: 633374 - DNA, 55 bp, Artificial; identical to SEQ ID NO: 179463
  Synthetic oligonucleotide

SEQ ID NO: 633375 - DNA, 55 bp, Artificial; identical to SEQ ID NO: 147463
  Synthetic oligonucleotide

SEQ ID NO: 633376 - DNA, 53 bp, Artificial; identical to SEQ ID NO: 142477
  Synthetic oligonucleotide

SEQ ID NO: 633377 - DNA, 56 bp, Artificial; identical to SEQ ID NO: 256287
  Synthetic oligonucleotide

SEQ ID NO: 633378 - DNA, 56 bp, Artificial; identical to SEQ ID NO: 177426
  Synthetic oligonucleotide

SEQ ID NO: 633379 - DNA, 52 bp, Artificial; identical to SEQ ID NO: 141276
  Synthetic oligonucleotide

SEQ ID NO: 633380 - DNA, 52 bp, Artificial; identical to SEQ ID NO: 208753
  Synthetic oligonucleotide

SEQ ID NO: 633381 - DNA, 53 bp, Artificial; identical to SEQ ID NO: 243565
  Synthetic oligonucleotide

SEQ ID NO: 633382 - DNA, 58 bp, Artificial; identical to SEQ ID NO: 223961
  Synthetic oligonucleotide

SEQ ID NO: 633383 - DNA, 60 bp, Artificial; identical to SEQ ID NO: 177425
  Synthetic oligonucleotide

SEQ ID NO: 633384 - DNA, 55 bp, Artificial; identical to SEQ ID NO: 171296
  Synthetic oligonucleotide

SEQ ID NO: 633385 - DNA, 53 bp, Artificial; identical to SEQ ID NO: 168300
  Synthetic oligonucleotide

SEQ ID NO: 633386 - DNA, 55 bp, Artificial; identical to SEQ ID NO: 220920
  Synthetic oligonucleotide

SEQ ID NO: 633387 - DNA, 57 bp, Artificial; identical to SEQ ID NO: 149782
  Synthetic oligonucleotide

SEQ ID NO: 633388 - DNA, 56 bp, Artificial; identical to SEQ ID NO: 177424
  Synthetic oligonucleotide

SEQ ID NO: 633389 - DNA, 55 bp, Artificial; identical to SEQ ID NO: 233396
  Synthetic oligonucleotide

SEQ ID NO: 633390 - DNA, 50 bp, Artificial; identical to SEQ ID NO: 212916
  Synthetic oligonucleotide

SEQ ID NO: 633391 - DNA, 54 bp, Artificial; identical to SEQ ID NO: 243082
  Synthetic oligonucleotide

SEQ ID NO: 633392 - DNA, 51 bp, Artificial; identical to SEQ ID NO: 202507
  Synthetic oligonucleotide

SEQ ID NO: 633393 - DNA, 54 bp, Artificial; identical to SEQ ID NO: 199638
  Synthetic oligonucleotide

SEQ ID NO: 633394 - DNA, 51 bp, Artificial; identical to SEQ ID NO: 209744
  Synthetic oligonucleotide

SEQ ID NO: 633395 - DNA, 52 bp, Artificial; identical to SEQ ID NO: 172940
  Synthetic oligonucleotide

SEQ ID NO: 633396 - DNA, 52 bp, Artificial; identical to SEQ ID NO: 168943
  Synthetic oligonucleotide

SEQ ID NO: 633397 - DNA, 55 bp, Artificial; identical to SEQ ID NO: 209543
  Synthetic oligonucleotide

SEQ ID NO: 633398 - DNA, 53 bp, Artificial; identical to SEQ ID NO: 177423
  Synthetic oligonucleotide

SEQ ID NO: 633399 - DNA, 55 bp, Artificial; identical to SEQ ID NO: 256833
  Synthetic oligonucleotide

SEQ ID NO: 633400 - DNA, 52 bp, Artificial; identical to SEQ ID NO: 162331
  Synthetic oligonucleotide

SEQ ID NO: 633401 - DNA, 50 bp, Artificial; identical to SEQ ID NO: 209796
  Synthetic oligonucleotide

SEQ ID NO: 633402 - DNA, 55 bp, Artificial; identical to SEQ ID NO: 234389
  Synthetic oligonucleotide

SEQ ID NO: 633403 - DNA, 54 bp, Artificial; identical to SEQ ID NO: 147183
  Synthetic oligonucleotide

SEQ ID NO: 633404 - DNA, 51 bp, Artificial; identical to SEQ ID NO: 246590
  Synthetic oligonucleotide

SEQ ID NO: 633405 - DNA, 55 bp, Artificial; identical to SEQ ID NO: 166587
  Synthetic oligonucleotide

SEQ ID NO: 633406 - DNA, 51 bp, Artificial; identical to SEQ ID NO: 223939
  Synthetic oligonucleotide

SEQ ID NO: 633407 - DNA, 55 bp, Artificial; identical to SEQ ID NO: 144789
  Synthetic oligonucleotide

SEQ ID NO: 633408 - DNA, 54 bp, Artificial; identical to SEQ ID NO: 238102
  Synthetic oligonucleotide

SEQ ID NO: 633409 - DNA, 51 bp, Artificial; identical to SEQ ID NO: 142284
  Synthetic oligonucleotide

SEQ ID NO: 633410 - DNA, 58 bp, Artificial; identical to SEQ ID NO: 149804
  Synthetic oligonucleotide

SEQ ID NO: 633411 - DNA, 56 bp, Artificial; identical to SEQ ID NO: 241847
  Synthetic oligonucleotide

SEQ ID NO: 633412 - DNA, 59 bp, Artificial; identical to SEQ ID NO: 153036
  Synthetic oligonucleotide

SEQ ID NO: 633413 - DNA, 55 bp, Artificial; identical to SEQ ID NO: 256829
  Synthetic oligonucleotide

SEQ ID NO: 633414 - DNA, 56 bp, Artificial; identical to SEQ ID NO: 246531
  Synthetic oligonucleotide

SEQ ID NO: 633415 - DNA, 55 bp, Artificial; identical to SEQ ID NO: 187502
  Synthetic oligonucleotide

SEQ ID NO: 633416 - DNA, 60 bp, Artificial; identical to SEQ ID NO: 177419
  Synthetic oligonucleotide

SEQ ID NO: 633417 - DNA, 58 bp, Artificial; identical to SEQ ID NO: 246542
  Synthetic oligonucleotide

SEQ ID NO: 633418 - DNA, 53 bp, Artificial; identical to SEQ ID NO: 241846
  Synthetic oligonucleotide

SEQ ID NO: 633419 - DNA, 55 bp, Artificial; identical to SEQ ID NO: 144167
  Synthetic oligonucleotide

SEQ ID NO: 633420 - DNA, 58 bp, Artificial; identical to SEQ ID NO: 166112
  Synthetic oligonucleotide

SEQ ID NO: 633421 - DNA, 60 bp, Artificial; identical to SEQ ID NO: 212387
  Synthetic oligonucleotide

SEQ ID NO: 633422 - DNA, 55 bp, Artificial; identical to SEQ ID NO: 194372
  Synthetic oligonucleotide

SEQ ID NO: 633423 - DNA, 55 bp, Artificial; identical to SEQ ID NO: 166585
  Synthetic oligonucleotide

SEQ ID NO: 633424 - DNA, 50 bp, Artificial; identical to SEQ ID NO: 246842
  Synthetic oligonucleotide

SEQ ID NO: 633425 - DNA, 53 bp, Artificial; identical to SEQ ID NO: 190769
  Synthetic oligonucleotide

SEQ ID NO: 633426 - DNA, 57 bp, Artificial; identical to SEQ ID NO: 209209
  Synthetic oligonucleotide

SEQ ID NO: 633427 - DNA, 54 bp, Artificial; identical to SEQ ID NO: 202701
  Synthetic oligonucleotide

SEQ ID NO: 633428 - DNA, 48 bp, Artificial; identical to SEQ ID NO: 149826
  Synthetic oligonucleotide

SEQ ID NO: 633429 - DNA, 60 bp, Artificial; identical to SEQ ID NO: 194770
  Synthetic oligonucleotide

SEQ ID NO: 633430 - DNA, 52 bp, Artificial; identical to SEQ ID NO: 141269
  Synthetic oligonucleotide

SEQ ID NO: 633431 - DNA, 51 bp, Artificial; identical to SEQ ID NO: 209736
  Synthetic oligonucleotide

SEQ ID NO: 633432 - DNA, 53 bp, Artificial; identical to SEQ ID NO: 160963
  Synthetic oligonucleotide

SEQ ID NO: 633433 - DNA, 52 bp, Artificial; identical to SEQ ID NO: 253725
  Synthetic oligonucleotide

SEQ ID NO: 633434 - DNA, 50 bp, Artificial; identical to SEQ ID NO: 186992
  Synthetic oligonucleotide

SEQ ID NO: 633435 - DNA, 55 bp, Artificial; identical to SEQ ID NO: 147395
  Synthetic oligonucleotide

SEQ ID NO: 633436 - DNA, 55 bp, Artificial; identical to SEQ ID NO: 242907
  Synthetic oligonucleotide

SEQ ID NO: 633437 - DNA, 55 bp, Artificial; identical to SEQ ID NO: 256828
  Synthetic oligonucleotide

SEQ ID NO: 633438 - DNA, 52 bp, Artificial; identical to SEQ ID NO: 186074
  Synthetic oligonucleotide

SEQ ID NO: 633439 - DNA, 52 bp, Artificial; identical to SEQ ID NO: 261883
  Synthetic oligonucleotide

SEQ ID NO: 633440 - DNA, 55 bp, Artificial; identical to SEQ ID NO: 242909
  Synthetic oligonucleotide

SEQ ID NO: 633441 - DNA, 55 bp, Artificial; identical to SEQ ID NO: 166583
  Synthetic oligonucleotide

SEQ ID NO: 633442 - DNA, 55 bp, Artificial; identical to SEQ ID NO: 208325
  Synthetic oligonucleotide

SEQ ID NO: 633443 - DNA, 58 bp, Artificial; identical to SEQ ID NO: 157143
  Synthetic oligonucleotide

SEQ ID NO: 633444 - DNA, 51 bp, Artificial; identical to SEQ ID NO: 155595
  Synthetic oligonucleotide

SEQ ID NO: 633445 - DNA, 50 bp, Artificial; identical to SEQ ID NO: 261895
  Synthetic oligonucleotide

SEQ ID NO: 633446 - DNA, 60 bp, Artificial; identical to SEQ ID NO: 155089
  Synthetic oligonucleotide

SEQ ID NO: 633447 - DNA, 55 bp, Artificial; identical to SEQ ID NO: 245934
  Synthetic oligonucleotide

SEQ ID NO: 633448 - DNA, 55 bp, Artificial; identical to SEQ ID NO: 162216
  Synthetic oligonucleotide

SEQ ID NO: 633449 - DNA, 57 bp, Artificial; identical to SEQ ID NO: 205520
  Synthetic oligonucleotide

SEQ ID NO: 633450 - DNA, 51 bp, Artificial; identical to SEQ ID NO: 243089
  Synthetic oligonucleotide

SEQ ID NO: 633451 - DNA, 55 bp, Artificial; identical to SEQ ID NO: 171298
  Synthetic oligonucleotide

SEQ ID NO: 633452 - DNA, 58 bp, Artificial; identical to SEQ ID NO: 246553
  Synthetic oligonucleotide

SEQ ID NO: 633453 - DNA, 60 bp, Artificial; identical to SEQ ID NO: 177414
  Synthetic oligonucleotide

SEQ ID NO: 633454 - DNA, 55 bp, Artificial; identical to SEQ ID NO: 238108
  Synthetic oligonucleotide

SEQ ID NO: 633455 - DNA, 54 bp, Artificial; identical to SEQ ID NO: 149177
  Synthetic oligonucleotide

SEQ ID NO: 633456 - DNA, 55 bp, Artificial; identical to SEQ ID NO: 184898
  Synthetic oligonucleotide

SEQ ID NO: 633457 - DNA, 53 bp, Artificial; identical to SEQ ID NO: 247859
  Synthetic oligonucleotide

SEQ ID NO: 633458 - DNA, 55 bp, Artificial; identical to SEQ ID NO: 147434
  Synthetic oligonucleotide

SEQ ID NO: 633459 - DNA, 55 bp, Artificial; identical to SEQ ID NO: 202043
  Synthetic oligonucleotide

SEQ ID NO: 633460 - DNA, 60 bp, Artificial; identical to SEQ ID NO: 243577
  Synthetic oligonucleotide

SEQ ID NO: 633461 - DNA, 55 bp, Artificial; identical to SEQ ID NO: 147436
  Synthetic oligonucleotide

SEQ ID NO: 633462 - DNA, 57 bp, Artificial; identical to SEQ ID NO: 177413
  Synthetic oligonucleotide

SEQ ID NO: 633463 - DNA, 57 bp, Artificial; identical to SEQ ID NO: 192167
  Synthetic oligonucleotide

SEQ ID NO: 633464 - DNA, 54 bp, Artificial; identical to SEQ ID NO: 199725
  Synthetic oligonucleotide

SEQ ID NO: 633465 - DNA, 55 bp, Artificial; identical to SEQ ID NO: 184912
  Synthetic oligonucleotide

SEQ ID NO: 633466 - DNA, 60 bp, Artificial; identical to SEQ ID NO: 177468
  Synthetic oligonucleotide

SEQ ID NO: 633467 - DNA, 60 bp, Artificial; identical to SEQ ID NO: 223861
  Synthetic oligonucleotide

SEQ ID NO: 633468 - DNA, 51 bp, Artificial; identical to SEQ ID NO: 243316
  Synthetic oligonucleotide

SEQ ID NO: 633469 - DNA, 56 bp, Artificial; identical to SEQ ID NO: 209249
  Synthetic oligonucleotide

SEQ ID NO: 633470 - DNA, 55 bp, Artificial; identical to SEQ ID NO: 153301
  Synthetic oligonucleotide

SEQ ID NO: 633471 - DNA, 55 bp, Artificial; identical to SEQ ID NO: 147445
  Synthetic oligonucleotide

SEQ ID NO: 633472 - DNA, 55 bp, Artificial; identical to SEQ ID NO: 190111
  Synthetic oligonucleotide

SEQ ID NO: 633473 - DNA, 55 bp, Artificial; identical to SEQ ID NO: 184878
  Synthetic oligonucleotide

SEQ ID NO: 633474 - DNA, 59 bp, Artificial; identical to SEQ ID NO: 243913
  Synthetic oligonucleotide

SEQ ID NO: 633475 - DNA, 60 bp, Artificial; identical to SEQ ID NO: 206883
  Synthetic oligonucleotide

SEQ ID NO: 633476 - DNA, 52 bp, Artificial; identical to SEQ ID NO: 246513
  Synthetic oligonucleotide

SEQ ID NO: 633477 - DNA, 60 bp, Artificial; identical to SEQ ID NO: 168334
  Synthetic oligonucleotide

SEQ ID NO: 633478 - DNA, 55 bp, Artificial; identical to SEQ ID NO: 147450
  Synthetic oligonucleotide

SEQ ID NO: 633479 - DNA, 55 bp, Artificial; identical to SEQ ID NO: 166579
  Synthetic oligonucleotide

SEQ ID NO: 633480 - DNA, 55 bp, Artificial; identical to SEQ ID NO: 208327
  Synthetic oligonucleotide

SEQ ID NO: 633481 - DNA, 55 bp, Artificial; identical to SEQ ID NO: 209084
  Synthetic oligonucleotide

SEQ ID NO: 633482 - DNA, 55 bp, Artificial; identical to SEQ ID NO: 166577
  Synthetic oligonucleotide

SEQ ID NO: 633483 - DNA, 52 bp, Artificial; identical to SEQ ID NO: 168942
  Synthetic oligonucleotide

SEQ ID NO: 633484 - DNA, 55 bp, Artificial; identical to SEQ ID NO: 209540
  Synthetic oligonucleotide

SEQ ID NO: 633485 - DNA, 55 bp, Artificial; identical to SEQ ID NO: 159197
  Synthetic oligonucleotide

SEQ ID NO: 633486 - DNA, 55 bp, Artificial; identical to SEQ ID NO: 144178
  Synthetic oligonucleotide

SEQ ID NO: 633487 - DNA, 51 bp, Artificial; identical to SEQ ID NO: 213072
  Synthetic oligonucleotide

SEQ ID NO: 633488 - DNA, 51 bp, Artificial; identical to SEQ ID NO: 216821
  Synthetic oligonucleotide

SEQ ID NO: 633489 - DNA, 53 bp, Artificial; identical to SEQ ID NO: 210833
  Synthetic oligonucleotide

SEQ ID NO: 633490 - DNA, 55 bp, Artificial; identical to SEQ ID NO: 196898
  Synthetic oligonucleotide

SEQ ID NO: 633491 - DNA, 49 bp, Artificial; identical to SEQ ID NO: 217280
  Synthetic oligonucleotide

SEQ ID NO: 633492 - DNA, 55 bp, Artificial; identical to SEQ ID NO: 196900
  Synthetic oligonucleotide

SEQ ID NO: 633493 - DNA, 55 bp, Artificial; identical to SEQ ID NO: 141972
  Synthetic oligonucleotide

SEQ ID NO: 633494 - DNA, 55 bp, Artificial; identical to SEQ ID NO: 171301
  Synthetic oligonucleotide

SEQ ID NO: 633495 - DNA, 55 bp, Artificial; identical to SEQ ID NO: 248673
  Synthetic oligonucleotide

SEQ ID NO: 633496 - DNA, 51 bp, Artificial; identical to SEQ ID NO: 170200
  Synthetic oligonucleotide

SEQ ID NO: 633497 - DNA, 55 bp, Artificial; identical to SEQ ID NO: 172941
  Synthetic oligonucleotide

SEQ ID NO: 633498 - DNA, 53 bp, Artificial; identical to SEQ ID NO: 185498
  Synthetic oligonucleotide

SEQ ID NO: 633499 - DNA, 55 bp, Artificial; identical to SEQ ID NO: 242911
  Synthetic oligonucleotide

SEQ ID NO: 633500 - DNA, 55 bp, Artificial; identical to SEQ ID NO: 209538
  Synthetic oligonucleotide

SEQ ID NO: 633501 - DNA, 60 bp, Artificial; identical to SEQ ID NO: 177467
  Synthetic oligonucleotide

SEQ ID NO: 633502 - DNA, 55 bp, Artificial; identical to SEQ ID NO: 147461
  Synthetic oligonucleotide

SEQ ID NO: 633503 - DNA, 55 bp, Artificial; identical to SEQ ID NO: 184126
  Synthetic oligonucleotide

SEQ ID NO: 633504 - DNA, 55 bp, Artificial; identical to SEQ ID NO: 249810
  Synthetic oligonucleotide

SEQ ID NO: 633505 - DNA, 55 bp, Artificial; identical to SEQ ID NO: 169849
  Synthetic oligonucleotide

SEQ ID NO: 633506 - DNA, 56 bp, Artificial; identical to SEQ ID NO: 159805
  Synthetic oligonucleotide

SEQ ID NO: 633507 - DNA, 55 bp, Artificial; identical to SEQ ID NO: 212723
  Synthetic oligonucleotide

SEQ ID NO: 633508 - DNA, 54 bp, Artificial; identical to SEQ ID NO: 187496
  Synthetic oligonucleotide

SEQ ID NO: 633509 - DNA, 55 bp, Artificial; identical to SEQ ID NO: 220975
  Synthetic oligonucleotide

SEQ ID NO: 633510 - DNA, 54 bp, Artificial; identical to SEQ ID NO: 243588
  Synthetic oligonucleotide

SEQ ID NO: 633511 - DNA, 55 bp, Artificial; identical to SEQ ID NO: 244525
  Synthetic oligonucleotide

SEQ ID NO: 633512 - DNA, 51 bp, Artificial; identical to SEQ ID NO: 149950
  Synthetic oligonucleotide

SEQ ID NO: 633513 - DNA, 55 bp, Artificial; identical to SEQ ID NO: 169850
  Synthetic oligonucleotide

SEQ ID NO: 633514 - DNA, 54 bp, Artificial; identical to SEQ ID NO: 153255
  Synthetic oligonucleotide

SEQ ID NO: 633515 - DNA, 54 bp, Artificial; identical to SEQ ID NO: 155506
  Synthetic oligonucleotide

SEQ ID NO: 633516 - DNA, 55 bp, Artificial; identical to SEQ ID NO: 252882
  Synthetic oligonucleotide

SEQ ID NO: 633517 - DNA, 60 bp, Artificial; identical to SEQ ID NO: 237971
  Synthetic oligonucleotide

SEQ ID NO: 633518 - DNA, 55 bp, Artificial; identical to SEQ ID NO: 188901
  Synthetic oligonucleotide

SEQ ID NO: 633519 - DNA, 55 bp, Artificial; identical to SEQ ID NO: 151584
  Synthetic oligonucleotide

SEQ ID NO: 633520 - DNA, 57 bp, Artificial; identical to SEQ ID NO: 159957
  Synthetic oligonucleotide

SEQ ID NO: 633521 - DNA, 52 bp, Artificial; identical to SEQ ID NO: 223710
  Synthetic oligonucleotide

SEQ ID NO: 633522 - DNA, 55 bp, Artificial; identical to SEQ ID NO: 244523
  Synthetic oligonucleotide

SEQ ID NO: 633523 - DNA, 52 bp, Artificial; identical to SEQ ID NO: 193747
  Synthetic oligonucleotide

SEQ ID NO: 633524 - DNA, 60 bp, Artificial; identical to SEQ ID NO: 199392
  Synthetic oligonucleotide

SEQ ID NO: 633525 - DNA, 55 bp, Artificial; identical to SEQ ID NO: 159156
  Synthetic oligonucleotide

SEQ ID NO: 633526 - DNA, 56 bp, Artificial; identical to SEQ ID NO: 210969
  Synthetic oligonucleotide

SEQ ID NO: 633527 - DNA, 55 bp, Artificial; identical to SEQ ID NO: 240310
  Synthetic oligonucleotide

SEQ ID NO: 633528 - DNA, 55 bp, Artificial; identical to SEQ ID NO: 166575
  Synthetic oligonucleotide

SEQ ID NO: 633529 - DNA, 55 bp, Artificial; identical to SEQ ID NO: 168586
  Synthetic oligonucleotide

SEQ ID NO: 633530 - DNA, 52 bp, Artificial; identical to SEQ ID NO: 203963
  Synthetic oligonucleotide

SEQ ID NO: 633531 - DNA, 60 bp, Artificial; identical to SEQ ID NO: 141161
  Synthetic oligonucleotide

SEQ ID NO: 633532 - DNA, 59 bp, Artificial; identical to SEQ ID NO: 242024
  Synthetic oligonucleotide

SEQ ID NO: 633533 - DNA, 51 bp, Artificial; identical to SEQ ID NO: 218377
  Synthetic oligonucleotide

SEQ ID NO: 633534 - DNA, 55 bp, Artificial; identical to SEQ ID NO: 224738
  Synthetic oligonucleotide

SEQ ID NO: 633535 - DNA, 55 bp, Artificial; identical to SEQ ID NO: 209534
  Synthetic oligonucleotide

SEQ ID NO: 633536 - DNA, 56 bp, Artificial; identical to SEQ ID NO: 234586
  Synthetic oligonucleotide

SEQ ID NO: 633537 - DNA, 55 bp, Artificial; identical to SEQ ID NO: 209533
  Synthetic oligonucleotide

SEQ ID NO: 633538 - DNA, 55 bp, Artificial; identical to SEQ ID NO: 162218
  Synthetic oligonucleotide

SEQ ID NO: 633539 - DNA, 55 bp, Artificial; identical to SEQ ID NO: 240311
  Synthetic oligonucleotide

SEQ ID NO: 633540 - DNA, 60 bp, Artificial; identical to SEQ ID NO: 205542
  Synthetic oligonucleotide

SEQ ID NO: 633541 - DNA, 58 bp, Artificial; identical to SEQ ID NO: 247461
  Synthetic oligonucleotide

SEQ ID NO: 633542 - DNA, 58 bp, Artificial; identical to SEQ ID NO: 179630
  Synthetic oligonucleotide

SEQ ID NO: 633543 - DNA, 53 bp, Artificial; identical to SEQ ID NO: 208328
  Synthetic oligonucleotide

SEQ ID NO: 633544 - DNA, 53 bp, Artificial; identical to SEQ ID NO: 141383
  Synthetic oligonucleotide

SEQ ID NO: 633545 - DNA, 55 bp, Artificial; identical to SEQ ID NO: 249588
  Synthetic oligonucleotide

SEQ ID NO: 633546 - DNA, 60 bp, Artificial; identical to SEQ ID NO: 237982
  Synthetic oligonucleotide

SEQ ID NO: 633547 - DNA, 55 bp, Artificial; identical to SEQ ID NO: 199479
  Synthetic oligonucleotide

SEQ ID NO: 633548 - DNA, 57 bp, Artificial; identical to SEQ ID NO: 157654
  Synthetic oligonucleotide

SEQ ID NO: 633549 - DNA, 51 bp, Artificial; identical to SEQ ID NO: 157886
  Synthetic oligonucleotide

SEQ ID NO: 633550 - DNA, 55 bp, Artificial; identical to SEQ ID NO: 244519
  Synthetic oligonucleotide

SEQ ID NO: 633551 - DNA, 52 bp, Artificial; identical to SEQ ID NO: 149235
  Synthetic oligonucleotide

SEQ ID NO: 633552 - DNA, 56 bp, Artificial; identical to SEQ ID NO: 256110
  Synthetic oligonucleotide

SEQ ID NO: 633553 - DNA, 57 bp, Artificial; identical to SEQ ID NO: 239234
  Synthetic oligonucleotide

SEQ ID NO: 633554 - DNA, 55 bp, Artificial; identical to SEQ ID NO: 244518
  Synthetic oligonucleotide

SEQ ID NO: 633555 - DNA, 54 bp, Artificial; identical to SEQ ID NO: 212919
  Synthetic oligonucleotide

SEQ ID NO: 633556 - DNA, 58 bp, Artificial; identical to SEQ ID NO: 171728
  Synthetic oligonucleotide

SEQ ID NO: 633557 - DNA, 58 bp, Artificial; identical to SEQ ID NO: 191703
  Synthetic oligonucleotide

SEQ ID NO: 633558 - DNA, 55 bp, Artificial; identical to SEQ ID NO: 184079
  Synthetic oligonucleotide

SEQ ID NO: 633559 - DNA, 55 bp, Artificial; identical to SEQ ID NO: 202045
  Synthetic oligonucleotide

SEQ ID NO: 633560 - DNA, 55 bp, Artificial; identical to SEQ ID NO: 265752
  Synthetic oligonucleotide

SEQ ID NO: 633561 - DNA, 55 bp, Artificial; identical to SEQ ID NO: 253795
  Synthetic oligonucleotide

SEQ ID NO: 633562 - DNA, 55 bp, Artificial; identical to SEQ ID NO: 153298
  Synthetic oligonucleotide

SEQ ID NO: 633563 - DNA, 55 bp, Artificial; identical to SEQ ID NO: 164756
  Synthetic oligonucleotide

SEQ ID NO: 633564 - DNA, 54 bp, Artificial; identical to SEQ ID NO: 260228
  Synthetic oligonucleotide

SEQ ID NO: 633565 - DNA, 55 bp, Artificial; identical to SEQ ID NO: 147473
  Synthetic oligonucleotide

SEQ ID NO: 633566 - DNA, 55 bp, Artificial; identical to SEQ ID NO: 171304
  Synthetic oligonucleotide

SEQ ID NO: 633567 - DNA, 55 bp, Artificial; identical to SEQ ID NO: 166574
  Synthetic oligonucleotide

SEQ ID NO: 633568 - DNA, 54 bp, Artificial; identical to SEQ ID NO: 155201
  Synthetic oligonucleotide

SEQ ID NO: 633569 - DNA, 55 bp, Artificial; identical to SEQ ID NO: 154382
  Synthetic oligonucleotide

SEQ ID NO: 633570 - DNA, 55 bp, Artificial; identical to SEQ ID NO: 159162
  Synthetic oligonucleotide

SEQ ID NO: 633571 - DNA, 53 bp, Artificial; identical to SEQ ID NO: 154563
  Synthetic oligonucleotide

SEQ ID NO: 633572 - DNA, 60 bp, Artificial; identical to SEQ ID NO: 242019
  Synthetic oligonucleotide

SEQ ID NO: 633573 - DNA, 59 bp, Artificial; identical to SEQ ID NO: 177460
  Synthetic oligonucleotide

SEQ ID NO: 633574 - DNA, 55 bp, Artificial; identical to SEQ ID NO: 184083
  Synthetic oligonucleotide

SEQ ID NO: 633575 - DNA, 54 bp, Artificial; identical to SEQ ID NO: 157115
  Synthetic oligonucleotide

SEQ ID NO: 633576 - DNA, 51 bp, Artificial; identical to SEQ ID NO: 160593
  Synthetic oligonucleotide

SEQ ID NO: 633577 - DNA, 60 bp, Artificial; identical to SEQ ID NO: 170742
  Synthetic oligonucleotide

SEQ ID NO: 633578 - DNA, 53 bp, Artificial; identical to SEQ ID NO: 259055
  Synthetic oligonucleotide

SEQ ID NO: 633579 - DNA, 53 bp, Artificial; identical to SEQ ID NO: 223602
  Synthetic oligonucleotide

SEQ ID NO: 633580 - DNA, 58 bp, Artificial; identical to SEQ ID NO: 246520
  Synthetic oligonucleotide

SEQ ID NO: 633581 - DNA, 51 bp, Artificial; identical to SEQ ID NO: 241086
  Synthetic oligonucleotide

SEQ ID NO: 633582 - DNA, 55 bp, Artificial; identical to SEQ ID NO: 159163
  Synthetic oligonucleotide

SEQ ID NO: 633583 - DNA, 51 bp, Artificial; identical to SEQ ID NO: 170234
  Synthetic oligonucleotide

SEQ ID NO: 633584 - DNA, 50 bp, Artificial; identical to SEQ ID NO: 209830
  Synthetic oligonucleotide

SEQ ID NO: 633585 - DNA, 55 bp, Artificial; identical to SEQ ID NO: 209529
  Synthetic oligonucleotide

SEQ ID NO: 633586 - DNA, 60 bp, Artificial; identical to SEQ ID NO: 242016
  Synthetic oligonucleotide

SEQ ID NO: 633587 - DNA, 55 bp, Artificial; identical to SEQ ID NO: 224739
  Synthetic oligonucleotide

SEQ ID NO: 633588 - DNA, 55 bp, Artificial; identical to SEQ ID NO: 147466
  Synthetic oligonucleotide

SEQ ID NO: 633589 - DNA, 55 bp, Artificial; identical to SEQ ID NO: 151587
  Synthetic oligonucleotide

SEQ ID NO: 633590 - DNA, 52 bp, Artificial; identical to SEQ ID NO: 209678
  Synthetic oligonucleotide

SEQ ID NO: 633591 - DNA, 53 bp, Artificial; identical to SEQ ID NO: 149366
  Synthetic oligonucleotide

SEQ ID NO: 633592 - DNA, 55 bp, Artificial; identical to SEQ ID NO: 184087
  Synthetic oligonucleotide

SEQ ID NO: 633593 - DNA, 55 bp, Artificial; identical to SEQ ID NO: 252883
  Synthetic oligonucleotide

SEQ ID NO: 633594 - DNA, 54 bp, Artificial; identical to SEQ ID NO: 247808
  Synthetic oligonucleotide

SEQ ID NO: 633595 - DNA, 55 bp, Artificial; identical to SEQ ID NO: 166572
  Synthetic oligonucleotide

SEQ ID NO: 633596 - DNA, 56 bp, Artificial; identical to SEQ ID NO: 147331
  Synthetic oligonucleotide

SEQ ID NO: 633597 - DNA, 55 bp, Artificial; identical to SEQ ID NO: 159164
  Synthetic oligonucleotide

SEQ ID NO: 633598 - DNA, 52 bp, Artificial; identical to SEQ ID NO: 222720
  Synthetic oligonucleotide

SEQ ID NO: 633599 - DNA, 54 bp, Artificial; identical to SEQ ID NO: 199398
  Synthetic oligonucleotide

SEQ ID NO: 633600 - DNA, 58 bp, Artificial; identical to SEQ ID NO: 207036
  Synthetic oligonucleotide

SEQ ID NO: 633601 - DNA, 55 bp, Artificial; identical to SEQ ID NO: 199423
  Synthetic oligonucleotide

SEQ ID NO: 633602 - DNA, 53 bp, Artificial; identical to SEQ ID NO: 223493
  Synthetic oligonucleotide

SEQ ID NO: 633603 - DNA, 60 bp, Artificial; identical to SEQ ID NO: 158864
  Synthetic oligonucleotide

SEQ ID NO: 633604 - DNA, 59 bp, Artificial; identical to SEQ ID NO: 177457
  Synthetic oligonucleotide

SEQ ID NO: 633605 - DNA, 54 bp, Artificial; identical to SEQ ID NO: 147391
  Synthetic oligonucleotide

SEQ ID NO: 633606 - DNA, 58 bp, Artificial; identical to SEQ ID NO: 201249
  Synthetic oligonucleotide

SEQ ID NO: 633607 - DNA, 55 bp, Artificial; identical to SEQ ID NO: 144039
  Synthetic oligonucleotide

SEQ ID NO: 633608 - DNA, 55 bp, Artificial; identical to SEQ ID NO: 188172
  Synthetic oligonucleotide

SEQ ID NO: 633609 - DNA, 50 bp, Artificial; identical to SEQ ID NO: 241334
  Synthetic oligonucleotide

SEQ ID NO: 633610 - DNA, 55 bp, Artificial; identical to SEQ ID NO: 162219
  Synthetic oligonucleotide

SEQ ID NO: 633611 - DNA, 55 bp, Artificial; identical to SEQ ID NO: 184098
  Synthetic oligonucleotide

SEQ ID NO: 633612 - DNA, 55 bp, Artificial; identical to SEQ ID NO: 166571
  Synthetic oligonucleotide

SEQ ID NO: 633613 - DNA, 50 bp, Artificial; identical to SEQ ID NO: 170572
  Synthetic oligonucleotide

SEQ ID NO: 633614 - DNA, 53 bp, Artificial; identical to SEQ ID NO: 142872
  Synthetic oligonucleotide

SEQ ID NO: 633615 - DNA, 55 bp, Artificial; identical to SEQ ID NO: 184102
  Synthetic oligonucleotide

SEQ ID NO: 633616 - DNA, 55 bp, Artificial; identical to SEQ ID NO: 221209
  Synthetic oligonucleotide

SEQ ID NO: 633617 - DNA, 54 bp, Artificial; identical to SEQ ID NO: 221236
  Synthetic oligonucleotide

SEQ ID NO: 633618 - DNA, 54 bp, Artificial; identical to SEQ ID NO: 147381
  Synthetic oligonucleotide

SEQ ID NO: 633619 - DNA, 55 bp, Artificial; identical to SEQ ID NO: 187490
  Synthetic oligonucleotide

SEQ ID NO: 633620 - DNA, 56 bp, Artificial; identical to SEQ ID NO: 242015
  Synthetic oligonucleotide

SEQ ID NO: 633621 - DNA, 58 bp, Artificial; identical to SEQ ID NO: 162370
  Synthetic oligonucleotide

SEQ ID NO: 633622 - DNA, 54 bp, Artificial; identical to SEQ ID NO: 243136
  Synthetic oligonucleotide

SEQ ID NO: 633623 - DNA, 53 bp, Artificial; identical to SEQ ID NO: 167080
  Synthetic oligonucleotide

SEQ ID NO: 633624 - DNA, 55 bp, Artificial; identical to SEQ ID NO: 244513
  Synthetic oligonucleotide

SEQ ID NO: 633625 - DNA, 54 bp, Artificial; identical to SEQ ID NO: 144502
  Synthetic oligonucleotide

SEQ ID NO: 633626 - DNA, 55 bp, Artificial; identical to SEQ ID NO: 199432
  Synthetic oligonucleotide

SEQ ID NO: 633627 - DNA, 51 bp, Artificial; identical to SEQ ID NO: 170239
  Synthetic oligonucleotide

SEQ ID NO: 633628 - DNA, 55 bp, Artificial; identical to SEQ ID NO: 166507
  Synthetic oligonucleotide

SEQ ID NO: 633629 - DNA, 51 bp, Artificial; identical to SEQ ID NO: 188538
  Synthetic oligonucleotide

SEQ ID NO: 633630 - DNA, 55 bp, Artificial; identical to SEQ ID NO: 248677
  Synthetic oligonucleotide

SEQ ID NO: 633631 - DNA, 54 bp, Artificial; identical to SEQ ID NO: 209585
  Synthetic oligonucleotide

SEQ ID NO: 633632 - DNA, 52 bp, Artificial; identical to SEQ ID NO: 240909
  Synthetic oligonucleotide

SEQ ID NO: 633633 - DNA, 55 bp, Artificial; identical to SEQ ID NO: 194376
  Synthetic oligonucleotide

SEQ ID NO: 633634 - DNA, 55 bp, Artificial; identical to SEQ ID NO: 155327
  Synthetic oligonucleotide

SEQ ID NO: 633635 - DNA, 56 bp, Artificial; identical to SEQ ID NO: 158420
  Synthetic oligonucleotide

SEQ ID NO: 633636 - DNA, 60 bp, Artificial; identical to SEQ ID NO: 153332
  Synthetic oligonucleotide

SEQ ID NO: 633637 - DNA, 55 bp, Artificial; identical to SEQ ID NO: 196901
  Synthetic oligonucleotide

SEQ ID NO: 633638 - DNA, 59 bp, Artificial; identical to SEQ ID NO: 158198
  Synthetic oligonucleotide

SEQ ID NO: 633639 - DNA, 55 bp, Artificial; identical to SEQ ID NO: 153294
  Synthetic oligonucleotide

SEQ ID NO: 633640 - DNA, 55 bp, Artificial; identical to SEQ ID NO: 243599
  Synthetic oligonucleotide

SEQ ID NO: 633641 - DNA, 53 bp, Artificial; identical to SEQ ID NO: 237009
  Synthetic oligonucleotide

SEQ ID NO: 633642 - DNA, 55 bp, Artificial; identical to SEQ ID NO: 184109
  Synthetic oligonucleotide

SEQ ID NO: 633643 - DNA, 52 bp, Artificial; identical to SEQ ID NO: 199946
  Synthetic oligonucleotide

SEQ ID NO: 633644 - DNA, 55 bp, Artificial; identical to SEQ ID NO: 234256
  Synthetic oligonucleotide

SEQ ID NO: 633645 - DNA, 55 bp, Artificial; identical to SEQ ID NO: 161892
  Synthetic oligonucleotide

SEQ ID NO: 633646 - DNA, 53 bp, Artificial; identical to SEQ ID NO: 185852
  Synthetic oligonucleotide

SEQ ID NO: 633647 - DNA, 55 bp, Artificial; identical to SEQ ID NO: 159173
  Synthetic oligonucleotide

SEQ ID NO: 633648 - DNA, 55 bp, Artificial; identical to SEQ ID NO: 215522
  Synthetic oligonucleotide

SEQ ID NO: 633649 - DNA, 55 bp, Artificial; identical to SEQ ID NO: 242917
  Synthetic oligonucleotide

SEQ ID NO: 633650 - DNA, 57 bp, Artificial; identical to SEQ ID NO: 188169
  Synthetic oligonucleotide

SEQ ID NO: 633651 - DNA, 56 bp, Artificial; identical to SEQ ID NO: 153366
  Synthetic oligonucleotide

SEQ ID NO: 633652 - DNA, 59 bp, Artificial; identical to SEQ ID NO: 238004
  Synthetic oligonucleotide

SEQ ID NO: 633653 - DNA, 55 bp, Artificial; identical to SEQ ID NO: 142468
  Synthetic oligonucleotide

SEQ ID NO: 633654 - DNA, 55 bp, Artificial; identical to SEQ ID NO: 240322
  Synthetic oligonucleotide

SEQ ID NO: 633655 - DNA, 55 bp, Artificial; identical to SEQ ID NO: 199441
  Synthetic oligonucleotide

SEQ ID NO: 633656 - DNA, 54 bp, Artificial; identical to SEQ ID NO: 201187
  Synthetic oligonucleotide

SEQ ID NO: 633657 - DNA, 55 bp, Artificial; identical to SEQ ID NO: 159174
  Synthetic oligonucleotide

SEQ ID NO: 633658 - DNA, 55 bp, Artificial; identical to SEQ ID NO: 147368
  Synthetic oligonucleotide

SEQ ID NO: 633659 - DNA, 55 bp, Artificial; identical to SEQ ID NO: 261905
  Synthetic oligonucleotide

SEQ ID NO: 633660 - DNA, 56 bp, Artificial; identical to SEQ ID NO: 157787
  Synthetic oligonucleotide

SEQ ID NO: 633661 - DNA, 60 bp, Artificial; identical to SEQ ID NO: 151292
  Synthetic oligonucleotide

SEQ ID NO: 633662 - DNA, 60 bp, Artificial; identical to SEQ ID NO: 199170
  Synthetic oligonucleotide

SEQ ID NO: 633663 - DNA, 55 bp, Artificial; identical to SEQ ID NO: 203578
  Synthetic oligonucleotide

SEQ ID NO: 633664 - DNA, 55 bp, Artificial; identical to SEQ ID NO: 258931
  Synthetic oligonucleotide

SEQ ID NO: 633665 - DNA, 55 bp, Artificial; identical to SEQ ID NO: 166504
  Synthetic oligonucleotide

SEQ ID NO: 633666 - DNA, 55 bp, Artificial; identical to SEQ ID NO: 194377
  Synthetic oligonucleotide

SEQ ID NO: 633667 - DNA, 58 bp, Artificial; identical to SEQ ID NO: 203360
  Synthetic oligonucleotide

SEQ ID NO: 633668 - DNA, 55 bp, Artificial; identical to SEQ ID NO: 212724
  Synthetic oligonucleotide

SEQ ID NO: 633669 - DNA, 53 bp, Artificial; identical to SEQ ID NO: 240723
  Synthetic oligonucleotide

SEQ ID NO: 633670 - DNA, 54 bp, Artificial; identical to SEQ ID NO: 142867
  Synthetic oligonucleotide

SEQ ID NO: 633671 - DNA, 55 bp, Artificial; identical to SEQ ID NO: 208287
  Synthetic oligonucleotide

SEQ ID NO: 633672 - DNA, 55 bp, Artificial; identical to SEQ ID NO: 161752
  Synthetic oligonucleotide

SEQ ID NO: 633673 - DNA, 55 bp, Artificial; identical to SEQ ID NO: 159177
  Synthetic oligonucleotide

SEQ ID NO: 633674 - DNA, 53 bp, Artificial; identical to SEQ ID NO: 243621
  Synthetic oligonucleotide

SEQ ID NO: 633675 - DNA, 55 bp, Artificial; identical to SEQ ID NO: 207180
  Synthetic oligonucleotide

SEQ ID NO: 633676 - DNA, 56 bp, Artificial; identical to SEQ ID NO: 243945
  Synthetic oligonucleotide

SEQ ID NO: 633677 - DNA, 60 bp, Artificial; identical to SEQ ID NO: 149915
  Synthetic oligonucleotide

SEQ ID NO: 633678 - DNA, 51 bp, Artificial; identical to SEQ ID NO: 165332
  Synthetic oligonucleotide

SEQ ID NO: 633679 - DNA, 50 bp, Artificial; identical to SEQ ID NO: 241336
  Synthetic oligonucleotide

SEQ ID NO: 633680 - DNA, 55 bp, Artificial; identical to SEQ ID NO: 184214
  Synthetic oligonucleotide

SEQ ID NO: 633681 - DNA, 53 bp, Artificial; identical to SEQ ID NO: 255380
  Synthetic oligonucleotide

SEQ ID NO: 633682 - DNA, 56 bp, Artificial; identical to SEQ ID NO: 209244
  Synthetic oligonucleotide

SEQ ID NO: 633683 - DNA, 55 bp, Artificial; identical to SEQ ID NO: 199400
  Synthetic oligonucleotide

SEQ ID NO: 633684 - DNA, 58 bp, Artificial; identical to SEQ ID NO: 197792
  Synthetic oligonucleotide

SEQ ID NO: 633685 - DNA, 55 bp, Artificial; identical to SEQ ID NO: 171310
  Synthetic oligonucleotide

SEQ ID NO: 633686 - DNA, 55 bp, Artificial; identical to SEQ ID NO: 168587
  Synthetic oligonucleotide

SEQ ID NO: 633687 - DNA, 56 bp, Artificial; identical to SEQ ID NO: 244067
  Synthetic oligonucleotide

SEQ ID NO: 633688 - DNA, 51 bp, Artificial; identical to SEQ ID NO: 161385
  Synthetic oligonucleotide

SEQ ID NO: 633689 - DNA, 55 bp, Artificial; identical to SEQ ID NO: 244064
  Synthetic oligonucleotide

SEQ ID NO: 633690 - DNA, 55 bp, Artificial; identical to SEQ ID NO: 211151
  Synthetic oligonucleotide

SEQ ID NO: 633691 - DNA, 53 bp, Artificial; identical to SEQ ID NO: 164932
  Synthetic oligonucleotide

SEQ ID NO: 633692 - DNA, 55 bp, Artificial; identical to SEQ ID NO: 166501
  Synthetic oligonucleotide

SEQ ID NO: 633693 - DNA, 58 bp, Artificial; identical to SEQ ID NO: 189626
  Synthetic oligonucleotide

SEQ ID NO: 633694 - DNA, 54 bp, Artificial; identical to SEQ ID NO: 220744
  Synthetic oligonucleotide

SEQ ID NO: 633695 - DNA, 55 bp, Artificial; identical to SEQ ID NO: 147423
  Synthetic oligonucleotide

SEQ ID NO: 633696 - DNA, 59 bp, Artificial; identical to SEQ ID NO: 199059
  Synthetic oligonucleotide

SEQ ID NO: 633697 - DNA, 55 bp, Artificial; identical to SEQ ID NO: 149937
  Synthetic oligonucleotide

SEQ ID NO: 633698 - DNA, 55 bp, Artificial; identical to SEQ ID NO: 166499
  Synthetic oligonucleotide

SEQ ID NO: 633699 - DNA, 58 bp, Artificial; identical to SEQ ID NO: 177452
  Synthetic oligonucleotide

SEQ ID NO: 633700 - DNA, 55 bp, Artificial; identical to SEQ ID NO: 208289
  Synthetic oligonucleotide

SEQ ID NO: 633701 - DNA, 51 bp, Artificial; identical to SEQ ID NO: 165335
  Synthetic oligonucleotide

SEQ ID NO: 633702 - DNA, 55 bp, Artificial; identical to SEQ ID NO: 252885
  Synthetic oligonucleotide

SEQ ID NO: 633703 - DNA, 53 bp, Artificial; identical to SEQ ID NO: 177449
  Synthetic oligonucleotide

SEQ ID NO: 633704 - DNA, 53 bp, Artificial; identical to SEQ ID NO: 215527
  Synthetic oligonucleotide

SEQ ID NO: 633705 - DNA, 54 bp, Artificial; identical to SEQ ID NO: 149515
  Synthetic oligonucleotide

SEQ ID NO: 633706 - DNA, 51 bp, Artificial; identical to SEQ ID NO: 146506
  Synthetic oligonucleotide

SEQ ID NO: 633707 - DNA, 53 bp, Artificial; identical to SEQ ID NO: 185867
  Synthetic oligonucleotide

SEQ ID NO: 633708 - DNA, 55 bp, Artificial; identical to SEQ ID NO: 260218
  Synthetic oligonucleotide

SEQ ID NO: 633709 - DNA, 55 bp, Artificial; identical to SEQ ID NO: 171311
  Synthetic oligonucleotide

SEQ ID NO: 633710 - DNA, 52 bp, Artificial; identical to SEQ ID NO: 169386
  Synthetic oligonucleotide

SEQ ID NO: 633711 - DNA, 54 bp, Artificial; identical to SEQ ID NO: 199524
  Synthetic oligonucleotide

SEQ ID NO: 633712 - DNA, 55 bp, Artificial; identical to SEQ ID NO: 187488
  Synthetic oligonucleotide

SEQ ID NO: 633713 - DNA, 55 bp, Artificial; identical to SEQ ID NO: 240329
  Synthetic oligonucleotide

SEQ ID NO: 633714 - DNA, 53 bp, Artificial; identical to SEQ ID NO: 187486
  Synthetic oligonucleotide

SEQ ID NO: 633715 - DNA, 55 bp, Artificial; identical to SEQ ID NO: 184205
  Synthetic oligonucleotide

SEQ ID NO: 633716 - DNA, 54 bp, Artificial; identical to SEQ ID NO: 185302
  Synthetic oligonucleotide

SEQ ID NO: 633717 - DNA, 55 bp, Artificial; identical to SEQ ID NO: 184201
  Synthetic oligonucleotide

SEQ ID NO: 633718 - DNA, 57 bp, Artificial; identical to SEQ ID NO: 201220
  Synthetic oligonucleotide

SEQ ID NO: 633719 - DNA, 60 bp, Artificial; identical to SEQ ID NO: 248449
  Synthetic oligonucleotide

SEQ ID NO: 633720 - DNA, 50 bp, Artificial; identical to SEQ ID NO: 158041
  Synthetic oligonucleotide

SEQ ID NO: 633721 - DNA, 60 bp, Artificial; identical to SEQ ID NO: 177446
  Synthetic oligonucleotide

SEQ ID NO: 633722 - DNA, 51 bp, Artificial; identical to SEQ ID NO: 199987
  Synthetic oligonucleotide

SEQ ID NO: 633723 - DNA, 55 bp, Artificial; identical to SEQ ID NO: 194379
  Synthetic oligonucleotide

SEQ ID NO: 633724 - DNA, 60 bp, Artificial; identical to SEQ ID NO: 198270
  Synthetic oligonucleotide

SEQ ID NO: 633725 - DNA, 54 bp, Artificial; identical to SEQ ID NO: 164807
  Synthetic oligonucleotide

SEQ ID NO: 633726 - DNA, 54 bp, Artificial; identical to SEQ ID NO: 202496
  Synthetic oligonucleotide

SEQ ID NO: 633727 - DNA, 57 bp, Artificial; identical to SEQ ID NO: 254222
  Synthetic oligonucleotide

SEQ ID NO: 633728 - DNA, 55 bp, Artificial; identical to SEQ ID NO: 199300
  Synthetic oligonucleotide

SEQ ID NO: 633729 - DNA, 55 bp, Artificial; identical to SEQ ID NO: 244509
  Synthetic oligonucleotide

SEQ ID NO: 633730 - DNA, 60 bp, Artificial; identical to SEQ ID NO: 254888
  Synthetic oligonucleotide

SEQ ID NO: 633731 - DNA, 60 bp, Artificial; identical to SEQ ID NO: 209095
  Synthetic oligonucleotide

SEQ ID NO: 633732 - DNA, 55 bp, Artificial; identical to SEQ ID NO: 244508
  Synthetic oligonucleotide

SEQ ID NO: 633733 - DNA, 53 bp, Artificial; identical to SEQ ID NO: 239289
  Synthetic oligonucleotide

SEQ ID NO: 633734 - DNA, 60 bp, Artificial; identical to SEQ ID NO: 141563
  Synthetic oligonucleotide

SEQ ID NO: 633735 - DNA, 60 bp, Artificial; identical to SEQ ID NO: 238015
  Synthetic oligonucleotide

SEQ ID NO: 633736 - DNA, 55 bp, Artificial; identical to SEQ ID NO: 199321
  Synthetic oligonucleotide

SEQ ID NO: 633737 - DNA, 56 bp, Artificial; identical to SEQ ID NO: 243632
  Synthetic oligonucleotide

SEQ ID NO: 633738 - DNA, 55 bp, Artificial; identical to SEQ ID NO: 198259
  Synthetic oligonucleotide

SEQ ID NO: 633739 - DNA, 51 bp, Artificial; identical to SEQ ID NO: 243643
  Synthetic oligonucleotide

SEQ ID NO: 633740 - DNA, 55 bp, Artificial; identical to SEQ ID NO: 168588
  Synthetic oligonucleotide

SEQ ID NO: 633741 - DNA, 56 bp, Artificial; identical to SEQ ID NO: 149538
  Synthetic oligonucleotide

SEQ ID NO: 633742 - DNA, 60 bp, Artificial; identical to SEQ ID NO: 257106
  Synthetic oligonucleotide

SEQ ID NO: 633743 - DNA, 51 bp, Artificial; identical to SEQ ID NO: 186414
  Synthetic oligonucleotide

SEQ ID NO: 633744 - DNA, 55 bp, Artificial; identical to SEQ ID NO: 209523
  Synthetic oligonucleotide

SEQ ID NO: 633745 - DNA, 55 bp, Artificial; identical to SEQ ID NO: 152583
  Synthetic oligonucleotide

SEQ ID NO: 633746 - DNA, 55 bp, Artificial; identical to SEQ ID NO: 244507
  Synthetic oligonucleotide

SEQ ID NO: 633747 - DNA, 54 bp, Artificial; identical to SEQ ID NO: 234407
  Synthetic oligonucleotide

SEQ ID NO: 633748 - DNA, 55 bp, Artificial; identical to SEQ ID NO: 147401
  Synthetic oligonucleotide

SEQ ID NO: 633749 - DNA, 55 bp, Artificial; identical to SEQ ID NO: 152585
  Synthetic oligonucleotide

SEQ ID NO: 633750 - DNA, 55 bp, Artificial; identical to SEQ ID NO: 216539
  Synthetic oligonucleotide

SEQ ID NO: 633751 - DNA, 55 bp, Artificial; identical to SEQ ID NO: 179887
  Synthetic oligonucleotide

SEQ ID NO: 633752 - DNA, 55 bp, Artificial; identical to SEQ ID NO: 184154
  Synthetic oligonucleotide

SEQ ID NO: 633753 - DNA, 54 bp, Artificial; identical to SEQ ID NO: 185346
  Synthetic oligonucleotide

SEQ ID NO: 633754 - DNA, 55 bp, Artificial; identical to SEQ ID NO: 201787
  Synthetic oligonucleotide

SEQ ID NO: 633755 - DNA, 55 bp, Artificial; identical to SEQ ID NO: 233431
  Synthetic oligonucleotide

SEQ ID NO: 633756 - DNA, 55 bp, Artificial; identical to SEQ ID NO: 239279
  Synthetic oligonucleotide

SEQ ID NO: 633757 - DNA, 55 bp, Artificial; identical to SEQ ID NO: 256586
  Synthetic oligonucleotide

SEQ ID NO: 633758 - DNA, 56 bp, Artificial; identical to SEQ ID NO: 247550
  Synthetic oligonucleotide

SEQ ID NO: 633759 - DNA, 55 bp, Artificial; identical to SEQ ID NO: 221337
  Synthetic oligonucleotide

SEQ ID NO: 633760 - DNA, 54 bp, Artificial; identical to SEQ ID NO: 202473
  Synthetic oligonucleotide

SEQ ID NO: 633761 - DNA, 55 bp, Artificial; identical to SEQ ID NO: 194380
  Synthetic oligonucleotide

SEQ ID NO: 633762 - DNA, 55 bp, Artificial; identical to SEQ ID NO: 257009
  Synthetic oligonucleotide

SEQ ID NO: 633763 - DNA, 55 bp, Artificial; identical to SEQ ID NO: 242006
  Synthetic oligonucleotide

SEQ ID NO: 633764 - DNA, 55 bp, Artificial; identical to SEQ ID NO: 257007
  Synthetic oligonucleotide

SEQ ID NO: 633765 - DNA, 55 bp, Artificial; identical to SEQ ID NO: 152586
  Synthetic oligonucleotide

SEQ ID NO: 633766 - DNA, 58 bp, Artificial; identical to SEQ ID NO: 198248
  Synthetic oligonucleotide

SEQ ID NO: 633767 - DNA, 51 bp, Artificial; identical to SEQ ID NO: 246609
  Synthetic oligonucleotide

SEQ ID NO: 633768 - DNA, 55 bp, Artificial; identical to SEQ ID NO: 184162
  Synthetic oligonucleotide

SEQ ID NO: 633769 - DNA, 55 bp, Artificial; identical to SEQ ID NO: 242925
  Synthetic oligonucleotide

SEQ ID NO: 633770 - DNA, 51 bp, Artificial; identical to SEQ ID NO: 203028
  Synthetic oligonucleotide

SEQ ID NO: 633771 - DNA, 55 bp, Artificial; identical to SEQ ID NO: 260217
  Synthetic oligonucleotide

SEQ ID NO: 633772 - DNA, 51 bp, Artificial; identical to SEQ ID NO: 216823
  Synthetic oligonucleotide

SEQ ID NO: 633773 - DNA, 58 bp, Artificial; identical to SEQ ID NO: 247475
  Synthetic oligonucleotide

SEQ ID NO: 633774 - DNA, 60 bp, Artificial; identical to SEQ ID NO: 198237
  Synthetic oligonucleotide

SEQ ID NO: 633775 - DNA, 57 bp, Artificial; identical to SEQ ID NO: 243944
  Synthetic oligonucleotide

SEQ ID NO: 633776 - DNA, 51 bp, Artificial; identical to SEQ ID NO: 239555
  Synthetic oligonucleotide

SEQ ID NO: 633777 - DNA, 51 bp, Artificial; identical to SEQ ID NO: 174895
  Synthetic oligonucleotide

SEQ ID NO: 633778 - DNA, 55 bp, Artificial; identical to SEQ ID NO: 191829
  Synthetic oligonucleotide

SEQ ID NO: 633779 - DNA, 55 bp, Artificial; identical to SEQ ID NO: 202699
  Synthetic oligonucleotide

SEQ ID NO: 633780 - DNA, 56 bp, Artificial; identical to SEQ ID NO: 147310
  Synthetic oligonucleotide

SEQ ID NO: 633781 - DNA, 55 bp, Artificial; identical to SEQ ID NO: 147616
  Synthetic oligonucleotide

SEQ ID NO: 633782 - DNA, 55 bp, Artificial; identical to SEQ ID NO: 184178
  Synthetic oligonucleotide

SEQ ID NO: 633783 - DNA, 55 bp, Artificial; identical to SEQ ID NO: 217925
  Synthetic oligonucleotide

SEQ ID NO: 633784 - DNA, 60 bp, Artificial; identical to SEQ ID NO: 177377
  Synthetic oligonucleotide

SEQ ID NO: 633785 - DNA, 55 bp, Artificial; identical to SEQ ID NO: 162220
  Synthetic oligonucleotide

SEQ ID NO: 633786 - DNA, 58 bp, Artificial; identical to SEQ ID NO: 187348
  Synthetic oligonucleotide

SEQ ID NO: 633787 - DNA, 53 bp, Artificial; identical to SEQ ID NO: 221713
  Synthetic oligonucleotide

SEQ ID NO: 633788 - DNA, 53 bp, Artificial; identical to SEQ ID NO: 253291
  Synthetic oligonucleotide

SEQ ID NO: 633789 - DNA, 54 bp, Artificial; identical to SEQ ID NO: 197422
  Synthetic oligonucleotide

SEQ ID NO: 633790 - DNA, 55 bp, Artificial; identical to SEQ ID NO: 169851
  Synthetic oligonucleotide

SEQ ID NO: 633791 - DNA, 55 bp, Artificial; identical to SEQ ID NO: 237981
  Synthetic oligonucleotide

SEQ ID NO: 633792 - DNA, 55 bp, Artificial; identical to SEQ ID NO: 144788
  Synthetic oligonucleotide

SEQ ID NO: 633793 - DNA, 55 bp, Artificial; identical to SEQ ID NO: 196905
  Synthetic oligonucleotide

SEQ ID NO: 633794 - DNA, 60 bp, Artificial; identical to SEQ ID NO: 149571
  Synthetic oligonucleotide

SEQ ID NO: 633795 - DNA, 57 bp, Artificial; identical to SEQ ID NO: 243676
  Synthetic oligonucleotide

SEQ ID NO: 633796 - DNA, 55 bp, Artificial; identical to SEQ ID NO: 184170
  Synthetic oligonucleotide

SEQ ID NO: 633797 - DNA, 55 bp, Artificial; identical to SEQ ID NO: 199286
  Synthetic oligonucleotide

SEQ ID NO: 633798 - DNA, 51 bp, Artificial; identical to SEQ ID NO: 255776
  Synthetic oligonucleotide

SEQ ID NO: 633799 - DNA, 52 bp, Artificial; identical to SEQ ID NO: 157621
  Synthetic oligonucleotide

SEQ ID NO: 633800 - DNA, 55 bp, Artificial; identical to SEQ ID NO: 154396
  Synthetic oligonucleotide

SEQ ID NO: 633801 - DNA, 54 bp, Artificial; identical to SEQ ID NO: 153580
  Synthetic oligonucleotide

SEQ ID NO: 633802 - DNA, 54 bp, Artificial; identical to SEQ ID NO: 190117
  Synthetic oligonucleotide

SEQ ID NO: 633803 - DNA, 56 bp, Artificial; identical to SEQ ID NO: 164689
  Synthetic oligonucleotide

SEQ ID NO: 633804 - DNA, 55 bp, Artificial; identical to SEQ ID NO: 149582
  Synthetic oligonucleotide

SEQ ID NO: 633805 - DNA, 50 bp, Artificial; identical to SEQ ID NO: 201741
  Synthetic oligonucleotide

SEQ ID NO: 633806 - DNA, 55 bp, Artificial; identical to SEQ ID NO: 263311
  Synthetic oligonucleotide

SEQ ID NO: 633807 - DNA, 60 bp, Artificial; identical to SEQ ID NO: 246476
  Synthetic oligonucleotide

SEQ ID NO: 633808 - DNA, 55 bp, Artificial; identical to SEQ ID NO: 147625
  Synthetic oligonucleotide

SEQ ID NO: 633809 - DNA, 60 bp, Artificial; identical to SEQ ID NO: 194836
  Synthetic oligonucleotide

SEQ ID NO: 633810 - DNA, 58 bp, Artificial; identical to SEQ ID NO: 187550
  Synthetic oligonucleotide

SEQ ID NO: 633811 - DNA, 55 bp, Artificial; identical to SEQ ID NO: 161881
  Synthetic oligonucleotide

SEQ ID NO: 633812 - DNA, 52 bp, Artificial; identical to SEQ ID NO: 201703
  Synthetic oligonucleotide

SEQ ID NO: 633813 - DNA, 55 bp, Artificial; identical to SEQ ID NO: 184166
  Synthetic oligonucleotide

SEQ ID NO: 633814 - DNA, 60 bp, Artificial; identical to SEQ ID NO: 177374
  Synthetic oligonucleotide

SEQ ID NO: 633815 - DNA, 55 bp, Artificial; identical to SEQ ID NO: 244556
  Synthetic oligonucleotide

SEQ ID NO: 633816 - DNA, 55 bp, Artificial; identical to SEQ ID NO: 224743
  Synthetic oligonucleotide

SEQ ID NO: 633817 - DNA, 53 bp, Artificial; identical to SEQ ID NO: 202989
  Synthetic oligonucleotide

SEQ ID NO: 633818 - DNA, 60 bp, Artificial; identical to SEQ ID NO: 242005
  Synthetic oligonucleotide

SEQ ID NO: 633819 - DNA, 55 bp, Artificial; identical to SEQ ID NO: 154397
  Synthetic oligonucleotide

SEQ ID NO: 633820 - DNA, 60 bp, Artificial; identical to SEQ ID NO: 208596
  Synthetic oligonucleotide

SEQ ID NO: 633821 - DNA, 55 bp, Artificial; identical to SEQ ID NO: 248687
  Synthetic oligonucleotide

SEQ ID NO: 633822 - DNA, 55 bp, Artificial; identical to SEQ ID NO: 144038
  Synthetic oligonucleotide

SEQ ID NO: 633823 - DNA, 51 bp, Artificial; identical to SEQ ID NO: 186664
  Synthetic oligonucleotide

SEQ ID NO: 633824 - DNA, 55 bp, Artificial; identical to SEQ ID NO: 174257
  Synthetic oligonucleotide

SEQ ID NO: 633825 - DNA, 55 bp, Artificial; identical to SEQ ID NO: 244555
  Synthetic oligonucleotide

SEQ ID NO: 633826 - DNA, 55 bp, Artificial; identical to SEQ ID NO: 159999
  Synthetic oligonucleotide

SEQ ID NO: 633827 - DNA, 59 bp, Artificial; identical to SEQ ID NO: 198215
  Synthetic oligonucleotide

SEQ ID NO: 633828 - DNA, 55 bp, Artificial; identical to SEQ ID NO: 147631
  Synthetic oligonucleotide

SEQ ID NO: 633829 - DNA, 55 bp, Artificial; identical to SEQ ID NO: 215517
  Synthetic oligonucleotide

SEQ ID NO: 633830 - DNA, 55 bp, Artificial; identical to SEQ ID NO: 161756
  Synthetic oligonucleotide

SEQ ID NO: 633831 - DNA, 60 bp, Artificial; identical to SEQ ID NO: 164678
  Synthetic oligonucleotide

SEQ ID NO: 633832 - DNA, 55 bp, Artificial; identical to SEQ ID NO: 257005
  Synthetic oligonucleotide

SEQ ID NO: 633833 - DNA, 57 bp, Artificial; identical to SEQ ID NO: 239298
  Synthetic oligonucleotide

SEQ ID NO: 633834 - DNA, 55 bp, Artificial; identical to SEQ ID NO: 244553
  Synthetic oligonucleotide

SEQ ID NO: 633835 - DNA, 56 bp, Artificial; identical to SEQ ID NO: 147265
  Synthetic oligonucleotide

SEQ ID NO: 633836 - DNA, 55 bp, Artificial; identical to SEQ ID NO: 158310
  Synthetic oligonucleotide

SEQ ID NO: 633837 - DNA, 55 bp, Artificial; identical to SEQ ID NO: 233432
  Synthetic oligonucleotide

SEQ ID NO: 633838 - DNA, 54 bp, Artificial; identical to SEQ ID NO: 243140
  Synthetic oligonucleotide

SEQ ID NO: 633839 - DNA, 57 bp, Artificial; identical to SEQ ID NO: 166793
  Synthetic oligonucleotide

SEQ ID NO: 633840 - DNA, 52 bp, Artificial; identical to SEQ ID NO: 233835
  Synthetic oligonucleotide

SEQ ID NO: 633841 - DNA, 60 bp, Artificial; identical to SEQ ID NO: 149593
  Synthetic oligonucleotide

SEQ ID NO: 633842 - DNA, 55 bp, Artificial; identical to SEQ ID NO: 242004
  Synthetic oligonucleotide

SEQ ID NO: 633843 - DNA, 50 bp, Artificial; identical to SEQ ID NO: 241340
  Synthetic oligonucleotide

SEQ ID NO: 633844 - DNA, 54 bp, Artificial; identical to SEQ ID NO: 242003
  Synthetic oligonucleotide

SEQ ID NO: 633845 - DNA, 50 bp, Artificial; identical to SEQ ID NO: 187480
  Synthetic oligonucleotide

SEQ ID NO: 633846 - DNA, 55 bp, Artificial; identical to SEQ ID NO: 147598
  Synthetic oligonucleotide

SEQ ID NO: 633847 - DNA, 55 bp, Artificial; identical to SEQ ID NO: 211155
  Synthetic oligonucleotide

SEQ ID NO: 633848 - DNA, 55 bp, Artificial; identical to SEQ ID NO: 243688
  Synthetic oligonucleotide

SEQ ID NO: 633849 - DNA, 51 bp, Artificial; identical to SEQ ID NO: 237146
  Synthetic oligonucleotide

SEQ ID NO: 633850 - DNA, 54 bp, Artificial; identical to SEQ ID NO: 243028
  Synthetic oligonucleotide

SEQ ID NO: 633851 - DNA, 55 bp, Artificial; identical to SEQ ID NO: 184004
  Synthetic oligonucleotide

SEQ ID NO: 633852 - DNA, 60 bp, Artificial; identical to SEQ ID NO: 141574
  Synthetic oligonucleotide

SEQ ID NO: 633853 - DNA, 60 bp, Artificial; identical to SEQ ID NO: 238048
  Synthetic oligonucleotide

SEQ ID NO: 633854 - DNA, 56 bp, Artificial; identical to SEQ ID NO: 243699
  Synthetic oligonucleotide

SEQ ID NO: 633855 - DNA, 59 bp, Artificial; identical to SEQ ID NO: 194725
  Synthetic oligonucleotide

SEQ ID NO: 633856 - DNA, 53 bp, Artificial; identical to SEQ ID NO: 189115
  Synthetic oligonucleotide

SEQ ID NO: 633857 - DNA, 60 bp, Artificial; identical to SEQ ID NO: 248455
  Synthetic oligonucleotide

SEQ ID NO: 633858 - DNA, 55 bp, Artificial; identical to SEQ ID NO: 152587
  Synthetic oligonucleotide

SEQ ID NO: 633859 - DNA, 52 bp, Artificial; identical to SEQ ID NO: 222721
  Synthetic oligonucleotide

SEQ ID NO: 633860 - DNA, 59 bp, Artificial; identical to SEQ ID NO: 242000
  Synthetic oligonucleotide

SEQ ID NO: 633861 - DNA, 55 bp, Artificial; identical to SEQ ID NO: 188207
  Synthetic oligonucleotide

SEQ ID NO: 633862 - DNA, 52 bp, Artificial; identical to SEQ ID NO: 199944
  Synthetic oligonucleotide

SEQ ID NO: 633863 - DNA, 58 bp, Artificial; identical to SEQ ID NO: 157531
  Synthetic oligonucleotide

SEQ ID NO: 633864 - DNA, 55 bp, Artificial; identical to SEQ ID NO: 147600
  Synthetic oligonucleotide

SEQ ID NO: 633865 - DNA, 57 bp, Artificial; identical to SEQ ID NO: 170763
  Synthetic oligonucleotide

SEQ ID NO: 633866 - DNA, 53 bp, Artificial; identical to SEQ ID NO: 164838
  Synthetic oligonucleotide

SEQ ID NO: 633867 - DNA, 55 bp, Artificial; identical to SEQ ID NO: 209560
  Synthetic oligonucleotide

SEQ ID NO: 633868 - DNA, 55 bp, Artificial; identical to SEQ ID NO: 188206
  Synthetic oligonucleotide

SEQ ID NO: 633869 - DNA, 55 bp, Artificial; identical to SEQ ID NO: 244552
  Synthetic oligonucleotide

SEQ ID NO: 633870 - DNA, 55 bp, Artificial; identical to SEQ ID NO: 217943
  Synthetic oligonucleotide

SEQ ID NO: 633871 - DNA, 55 bp, Artificial; identical to SEQ ID NO: 160774
  Synthetic oligonucleotide

SEQ ID NO: 633872 - DNA, 57 bp, Artificial; identical to SEQ ID NO: 242486
  Synthetic oligonucleotide

SEQ ID NO: 633873 - DNA, 56 bp, Artificial; identical to SEQ ID NO: 179928
  Synthetic oligonucleotide

SEQ ID NO: 633874 - DNA, 60 bp, Artificial; identical to SEQ ID NO: 202451
  Synthetic oligonucleotide

SEQ ID NO: 633875 - DNA, 60 bp, Artificial; identical to SEQ ID NO: 177363
  Synthetic oligonucleotide

SEQ ID NO: 633876 - DNA, 55 bp, Artificial; identical to SEQ ID NO: 183995
  Synthetic oligonucleotide

SEQ ID NO: 633877 - DNA, 50 bp, Artificial; identical to SEQ ID NO: 246830
  Synthetic oligonucleotide

SEQ ID NO: 633878 - DNA, 55 bp, Artificial; identical to SEQ ID NO: 257529
  Synthetic oligonucleotide

SEQ ID NO: 633879 - DNA, 55 bp, Artificial; identical to SEQ ID NO: 256606
  Synthetic oligonucleotide

SEQ ID NO: 633880 - DNA, 55 bp, Artificial; identical to SEQ ID NO: 252889
  Synthetic oligonucleotide

SEQ ID NO: 633881 - DNA, 56 bp, Artificial; identical to SEQ ID NO: 166220
  Synthetic oligonucleotide

SEQ ID NO: 633882 - DNA, 55 bp, Artificial; identical to SEQ ID NO: 244551
  Synthetic oligonucleotide

SEQ ID NO: 633883 - DNA, 52 bp, Artificial; identical to SEQ ID NO: 246525
  Synthetic oligonucleotide

SEQ ID NO: 633884 - DNA, 58 bp, Artificial; identical to SEQ ID NO: 141585
  Synthetic oligonucleotide

SEQ ID NO: 633885 - DNA, 57 bp, Artificial; identical to SEQ ID NO: 257438
  Synthetic oligonucleotide

SEQ ID NO: 633886 - DNA, 52 bp, Artificial; identical to SEQ ID NO: 240407
  Synthetic oligonucleotide

SEQ ID NO: 633887 - DNA, 55 bp, Artificial; identical to SEQ ID NO: 244550
  Synthetic oligonucleotide

SEQ ID NO: 633888 - DNA, 60 bp, Artificial; identical to SEQ ID NO: 209106
  Synthetic oligonucleotide

SEQ ID NO: 633889 - DNA, 55 bp, Artificial; identical to SEQ ID NO: 147664
  Synthetic oligonucleotide

SEQ ID NO: 633890 - DNA, 59 bp, Artificial; identical to SEQ ID NO: 198204
  Synthetic oligonucleotide

SEQ ID NO: 633891 - DNA, 51 bp, Artificial; identical to SEQ ID NO: 149626
  Synthetic oligonucleotide

SEQ ID NO: 633892 - DNA, 55 bp, Artificial; identical to SEQ ID NO: 211156
  Synthetic oligonucleotide

SEQ ID NO: 633893 - DNA, 55 bp, Artificial; identical to SEQ ID NO: 265929
  Synthetic oligonucleotide

SEQ ID NO: 633894 - DNA, 55 bp, Artificial; identical to SEQ ID NO: 253796
  Synthetic oligonucleotide

SEQ ID NO: 633895 - DNA, 50 bp, Artificial; identical to SEQ ID NO: 243430
  Synthetic oligonucleotide

SEQ ID NO: 633896 - DNA, 55 bp, Artificial; identical to SEQ ID NO: 183991
  Synthetic oligonucleotide

SEQ ID NO: 633897 - DNA, 55 bp, Artificial; identical to SEQ ID NO: 166852
  Synthetic oligonucleotide

SEQ ID NO: 633898 - DNA, 58 bp, Artificial; identical to SEQ ID NO: 266377
  Synthetic oligonucleotide

SEQ ID NO: 633899 - DNA, 56 bp, Artificial; identical to SEQ ID NO: 198193
  Synthetic oligonucleotide

SEQ ID NO: 633900 - DNA, 51 bp, Artificial; identical to SEQ ID NO: 200016
  Synthetic oligonucleotide

SEQ ID NO: 633901 - DNA, 55 bp, Artificial; identical to SEQ ID NO: 158365
  Synthetic oligonucleotide

SEQ ID NO: 633902 - DNA, 50 bp, Artificial; identical to SEQ ID NO: 150194
  Synthetic oligonucleotide

SEQ ID NO: 633903 - DNA, 55 bp, Artificial; identical to SEQ ID NO: 234263
  Synthetic oligonucleotide

SEQ ID NO: 633904 - DNA, 60 bp, Artificial; identical to SEQ ID NO: 151277
  Synthetic oligonucleotide

SEQ ID NO: 633905 - DNA, 59 bp, Artificial; identical to SEQ ID NO: 191685
  Synthetic oligonucleotide

SEQ ID NO: 633906 - DNA, 55 bp, Artificial; identical to SEQ ID NO: 160005
  Synthetic oligonucleotide

SEQ ID NO: 633907 - DNA, 55 bp, Artificial; identical to SEQ ID NO: 194503
  Synthetic oligonucleotide

SEQ ID NO: 633908 - DNA, 54 bp, Artificial; identical to SEQ ID NO: 244549
  Synthetic oligonucleotide

SEQ ID NO: 633909 - DNA, 51 bp, Artificial; identical to SEQ ID NO: 167616
  Synthetic oligonucleotide

SEQ ID NO: 633910 - DNA, 60 bp, Artificial; identical to SEQ ID NO: 141596
  Synthetic oligonucleotide

SEQ ID NO: 633911 - DNA, 55 bp, Artificial; identical to SEQ ID NO: 234265
  Synthetic oligonucleotide

SEQ ID NO: 633912 - DNA, 55 bp, Artificial; identical to SEQ ID NO: 221332
  Synthetic oligonucleotide

SEQ ID NO: 633913 - DNA, 51 bp, Artificial; identical to SEQ ID NO: 216767
  Synthetic oligonucleotide

SEQ ID NO: 633914 - DNA, 55 bp, Artificial; identical to SEQ ID NO: 244548
  Synthetic oligonucleotide

SEQ ID NO: 633915 - DNA, 55 bp, Artificial; identical to SEQ ID NO: 237902
  Synthetic oligonucleotide

SEQ ID NO: 633916 - DNA, 55 bp, Artificial; identical to SEQ ID NO: 183942
  Synthetic oligonucleotide

SEQ ID NO: 633917 - DNA, 55 bp, Artificial; identical to SEQ ID NO: 183943
  Synthetic oligonucleotide

SEQ ID NO: 633918 - DNA, 54 bp, Artificial; identical to SEQ ID NO: 149225
  Synthetic oligonucleotide

SEQ ID NO: 633919 - DNA, 55 bp, Artificial; identical to SEQ ID NO: 199360
  Synthetic oligonucleotide

SEQ ID NO: 633920 - DNA, 58 bp, Artificial; identical to SEQ ID NO: 159954
  Synthetic oligonucleotide

SEQ ID NO: 633921 - DNA, 55 bp, Artificial; identical to SEQ ID NO: 187479
  Synthetic oligonucleotide

SEQ ID NO: 633922 - DNA, 59 bp, Artificial; identical to SEQ ID NO: 206921
  Synthetic oligonucleotide

SEQ ID NO: 633923 - DNA, 55 bp, Artificial; identical to SEQ ID NO: 149649
  Synthetic oligonucleotide

SEQ ID NO: 633924 - DNA, 50 bp, Artificial; identical to SEQ ID NO: 176160
  Synthetic oligonucleotide

SEQ ID NO: 633925 - DNA, 55 bp, Artificial; identical to SEQ ID NO: 257002
  Synthetic oligonucleotide

SEQ ID NO: 633926 - DNA, 59 bp, Artificial; identical to SEQ ID NO: 156576
  Synthetic oligonucleotide

SEQ ID NO: 633927 - DNA, 50 bp, Artificial; identical to SEQ ID NO: 215272
  Synthetic oligonucleotide

SEQ ID NO: 633928 - DNA, 55 bp, Artificial; identical to SEQ ID NO: 242929
  Synthetic oligonucleotide

SEQ ID NO: 633929 - DNA, 60 bp, Artificial; identical to SEQ ID NO: 242482
  Synthetic oligonucleotide

SEQ ID NO: 633930 - DNA, 55 bp, Artificial; identical to SEQ ID NO: 155325
  Synthetic oligonucleotide

SEQ ID NO: 633931 - DNA, 55 bp, Artificial; identical to SEQ ID NO: 218718
  Synthetic oligonucleotide

SEQ ID NO: 633932 - DNA, 56 bp, Artificial; identical to SEQ ID NO: 179957
  Synthetic oligonucleotide

SEQ ID NO: 633933 - DNA, 55 bp, Artificial; identical to SEQ ID NO: 242876
  Synthetic oligonucleotide

SEQ ID NO: 633934 - DNA, 52 bp, Artificial; identical to SEQ ID NO: 170124
  Synthetic oligonucleotide

SEQ ID NO: 633935 - DNA, 56 bp, Artificial; identical to SEQ ID NO: 217403
  Synthetic oligonucleotide

SEQ ID NO: 633936 - DNA, 55 bp, Artificial; identical to SEQ ID NO: 144200
  Synthetic oligonucleotide

SEQ ID NO: 633937 - DNA, 55 bp, Artificial; identical to SEQ ID NO: 183948
  Synthetic oligonucleotide

SEQ ID NO: 633938 - DNA, 55 bp, Artificial; identical to SEQ ID NO: 188899
  Synthetic oligonucleotide

SEQ ID NO: 633939 - DNA, 55 bp, Artificial; identical to SEQ ID NO: 158010
  Synthetic oligonucleotide

SEQ ID NO: 633940 - DNA, 60 bp, Artificial; identical to SEQ ID NO: 223562
  Synthetic oligonucleotide

SEQ ID NO: 633941 - DNA, 60 bp, Artificial; identical to SEQ ID NO: 206919
  Synthetic oligonucleotide

SEQ ID NO: 633942 - DNA, 55 bp, Artificial; identical to SEQ ID NO: 221331
  Synthetic oligonucleotide

SEQ ID NO: 633943 - DNA, 55 bp, Artificial; identical to SEQ ID NO: 183950
  Synthetic oligonucleotide

SEQ ID NO: 633944 - DNA, 59 bp, Artificial; identical to SEQ ID NO: 177408
  Synthetic oligonucleotide

SEQ ID NO: 633945 - DNA, 55 bp, Artificial; identical to SEQ ID NO: 208291
  Synthetic oligonucleotide

SEQ ID NO: 633946 - DNA, 54 bp, Artificial; identical to SEQ ID NO: 208681
  Synthetic oligonucleotide

SEQ ID NO: 633947 - DNA, 55 bp, Artificial; identical to SEQ ID NO: 183953
  Synthetic oligonucleotide

SEQ ID NO: 633948 - DNA, 55 bp, Artificial; identical to SEQ ID NO: 158043
  Synthetic oligonucleotide

SEQ ID NO: 633949 - DNA, 55 bp, Artificial; identical to SEQ ID NO: 244547
  Synthetic oligonucleotide

SEQ ID NO: 633950 - DNA, 55 bp, Artificial; identical to SEQ ID NO: 166486
  Synthetic oligonucleotide

SEQ ID NO: 633951 - DNA, 54 bp, Artificial; identical to SEQ ID NO: 212517
  Synthetic oligonucleotide

SEQ ID NO: 633952 - DNA, 58 bp, Artificial; identical to SEQ ID NO: 193163
  Synthetic oligonucleotide

SEQ ID NO: 633953 - DNA, 57 bp, Artificial; identical to SEQ ID NO: 192134
  Synthetic oligonucleotide

SEQ ID NO: 633954 - DNA, 54 bp, Artificial; identical to SEQ ID NO: 246246
  Synthetic oligonucleotide

SEQ ID NO: 633955 - DNA, 55 bp, Artificial; identical to SEQ ID NO: 144036
  Synthetic oligonucleotide

SEQ ID NO: 633956 - DNA, 55 bp, Artificial; identical to SEQ ID NO: 189506
  Synthetic oligonucleotide

SEQ ID NO: 633957 - DNA, 51 bp, Artificial; identical to SEQ ID NO: 223809
  Synthetic oligonucleotide

SEQ ID NO: 633958 - DNA, 50 bp, Artificial; identical to SEQ ID NO: 165590
  Synthetic oligonucleotide

SEQ ID NO: 633959 - DNA, 53 bp, Artificial; identical to SEQ ID NO: 188049
  Synthetic oligonucleotide

SEQ ID NO: 633960 - DNA, 58 bp, Artificial; identical to SEQ ID NO: 225532
  Synthetic oligonucleotide

SEQ ID NO: 633961 - DNA, 60 bp, Artificial; identical to SEQ ID NO: 257437
  Synthetic oligonucleotide

SEQ ID NO: 633962 - DNA, 53 bp, Artificial; identical to SEQ ID NO: 164881
  Synthetic oligonucleotide

SEQ ID NO: 633963 - DNA, 60 bp, Artificial; identical to SEQ ID NO: 205741
  Synthetic oligonucleotide

SEQ ID NO: 633964 - DNA, 54 bp, Artificial; identical to SEQ ID NO: 168842
  Synthetic oligonucleotide

SEQ ID NO: 633965 - DNA, 52 bp, Artificial; identical to SEQ ID NO: 141280
  Synthetic oligonucleotide

SEQ ID NO: 633966 - DNA, 55 bp, Artificial; identical to SEQ ID NO: 154400
  Synthetic oligonucleotide

SEQ ID NO: 633967 - DNA, 60 bp, Artificial; identical to SEQ ID NO: 256709
  Synthetic oligonucleotide

SEQ ID NO: 633968 - DNA, 51 bp, Artificial; identical to SEQ ID NO: 157879
  Synthetic oligonucleotide

SEQ ID NO: 633969 - DNA, 60 bp, Artificial; identical to SEQ ID NO: 153687
  Synthetic oligonucleotide

SEQ ID NO: 633970 - DNA, 58 bp, Artificial; identical to SEQ ID NO: 238071
  Synthetic oligonucleotide

SEQ ID NO: 633971 - DNA, 55 bp, Artificial; identical to SEQ ID NO: 153284
  Synthetic oligonucleotide

SEQ ID NO: 633972 - DNA, 55 bp, Artificial; identical to SEQ ID NO: 183959
  Synthetic oligonucleotide

SEQ ID NO: 633973 - DNA, 55 bp, Artificial; identical to SEQ ID NO: 147639
  Synthetic oligonucleotide

SEQ ID NO: 633974 - DNA, 55 bp, Artificial; identical to SEQ ID NO: 183961
  Synthetic oligonucleotide

SEQ ID NO: 633975 - DNA, 55 bp, Artificial; identical to SEQ ID NO: 238230
  Synthetic oligonucleotide

SEQ ID NO: 633976 - DNA, 50 bp, Artificial; identical to SEQ ID NO: 233896
  Synthetic oligonucleotide

SEQ ID NO: 633977 - DNA, 56 bp, Artificial; identical to SEQ ID NO: 177407
  Synthetic oligonucleotide

SEQ ID NO: 633978 - DNA, 60 bp, Artificial; identical to SEQ ID NO: 198182
  Synthetic oligonucleotide

SEQ ID NO: 633979 - DNA, 55 bp, Artificial; identical to SEQ ID NO: 169854
  Synthetic oligonucleotide

SEQ ID NO: 633980 - DNA, 55 bp, Artificial; identical to SEQ ID NO: 183964
  Synthetic oligonucleotide

SEQ ID NO: 633981 - DNA, 55 bp, Artificial; identical to SEQ ID NO: 234271
  Synthetic oligonucleotide

SEQ ID NO: 633982 - DNA, 55 bp, Artificial; identical to SEQ ID NO: 257534
  Synthetic oligonucleotide

SEQ ID NO: 633983 - DNA, 54 bp, Artificial; identical to SEQ ID NO: 157218
  Synthetic oligonucleotide

SEQ ID NO: 633984 - DNA, 60 bp, Artificial; identical to SEQ ID NO: 170765
  Synthetic oligonucleotide

SEQ ID NO: 633985 - DNA, 55 bp, Artificial; identical to SEQ ID NO: 158065
  Synthetic oligonucleotide

SEQ ID NO: 633986 - DNA, 52 bp, Artificial; identical to SEQ ID NO: 170123
  Synthetic oligonucleotide

SEQ ID NO: 633987 - DNA, 55 bp, Artificial; identical to SEQ ID NO: 147641
  Synthetic oligonucleotide

SEQ ID NO: 633988 - DNA, 55 bp, Artificial; identical to SEQ ID NO: 183965
  Synthetic oligonucleotide

SEQ ID NO: 633989 - DNA, 55 bp, Artificial; identical to SEQ ID NO: 212726
  Synthetic oligonucleotide

SEQ ID NO: 633990 - DNA, 55 bp, Artificial; identical to SEQ ID NO: 258915
  Synthetic oligonucleotide

SEQ ID NO: 633991 - DNA, 59 bp, Artificial; identical to SEQ ID NO: 223484
  Synthetic oligonucleotide

SEQ ID NO: 633992 - DNA, 53 bp, Artificial; identical to SEQ ID NO: 189109
  Synthetic oligonucleotide

SEQ ID NO: 633993 - DNA, 54 bp, Artificial; identical to SEQ ID NO: 185339
  Synthetic oligonucleotide

SEQ ID NO: 633994 - DNA, 52 bp, Artificial; identical to SEQ ID NO: 169388
  Synthetic oligonucleotide

SEQ ID NO: 633995 - DNA, 57 bp, Artificial; identical to SEQ ID NO: 256731
  Synthetic oligonucleotide

SEQ ID NO: 633996 - DNA, 55 bp, Artificial; identical to SEQ ID NO: 242444
  Synthetic oligonucleotide

SEQ ID NO: 633997 - DNA, 55 bp, Artificial; identical to SEQ ID NO: 166485
  Synthetic oligonucleotide

SEQ ID NO: 633998 - DNA, 55 bp, Artificial; identical to SEQ ID NO: 183970
  Synthetic oligonucleotide

SEQ ID NO: 633999 - DNA, 55 bp, Artificial; identical to SEQ ID NO: 244542
  Synthetic oligonucleotide

SEQ ID NO: 634000 - DNA, 60 bp, Artificial; identical to SEQ ID NO: 164634
  Synthetic oligonucleotide

SEQ ID NO: 634001 - DNA, 53 bp, Artificial; identical to SEQ ID NO: 208738
  Synthetic oligonucleotide

SEQ ID NO: 634002 - DNA, 52 bp, Artificial; identical to SEQ ID NO: 195034
  Synthetic oligonucleotide

SEQ ID NO: 634003 - DNA, 55 bp, Artificial; identical to SEQ ID NO: 242877
  Synthetic oligonucleotide

SEQ ID NO: 634004 - DNA, 55 bp, Artificial; identical to SEQ ID NO: 218707
  Synthetic oligonucleotide

SEQ ID NO: 634005 - DNA, 60 bp, Artificial; identical to SEQ ID NO: 248456
  Synthetic oligonucleotide

SEQ ID NO: 634006 - DNA, 55 bp, Artificial; identical to SEQ ID NO: 242878
  Synthetic oligonucleotide

SEQ ID NO: 634007 - DNA, 53 bp, Artificial; identical to SEQ ID NO: 207741
  Synthetic oligonucleotide

SEQ ID NO: 634008 - DNA, 55 bp, Artificial; identical to SEQ ID NO: 184048
  Synthetic oligonucleotide

SEQ ID NO: 634009 - DNA, 54 bp, Artificial; identical to SEQ ID NO: 185344
  Synthetic oligonucleotide

SEQ ID NO: 634010 - DNA, 55 bp, Artificial; identical to SEQ ID NO: 221330
  Synthetic oligonucleotide

SEQ ID NO: 634011 - DNA, 55 bp, Artificial; identical to SEQ ID NO: 168591
  Synthetic oligonucleotide

SEQ ID NO: 634012 - DNA, 54 bp, Artificial; identical to SEQ ID NO: 216414
  Synthetic oligonucleotide

SEQ ID NO: 634013 - DNA, 54 bp, Artificial; identical to SEQ ID NO: 203849
  Synthetic oligonucleotide

SEQ ID NO: 634014 - DNA, 55 bp, Artificial; identical to SEQ ID NO: 171269
  Synthetic oligonucleotide

SEQ ID NO: 634015 - DNA, 54 bp, Artificial; identical to SEQ ID NO: 189510
  Synthetic oligonucleotide

SEQ ID NO: 634016 - DNA, 55 bp, Artificial; identical to SEQ ID NO: 249472
  Synthetic oligonucleotide

SEQ ID NO: 634017 - DNA, 53 bp, Artificial; identical to SEQ ID NO: 256775
  Synthetic oligonucleotide

SEQ ID NO: 634018 - DNA, 55 bp, Artificial; identical to SEQ ID NO: 196911
  Synthetic oligonucleotide

SEQ ID NO: 634019 - DNA, 55 bp, Artificial; identical to SEQ ID NO: 243732
  Synthetic oligonucleotide

SEQ ID NO: 634020 - DNA, 55 bp, Artificial; identical to SEQ ID NO: 244541
  Synthetic oligonucleotide

SEQ ID NO: 634021 - DNA, 55 bp, Artificial; identical to SEQ ID NO: 203576
  Synthetic oligonucleotide

SEQ ID NO: 634022 - DNA, 55 bp, Artificial; identical to SEQ ID NO: 221324
  Synthetic oligonucleotide

SEQ ID NO: 634023 - DNA, 60 bp, Artificial; identical to SEQ ID NO: 177400
  Synthetic oligonucleotide

SEQ ID NO: 634024 - DNA, 55 bp, Artificial; identical to SEQ ID NO: 248669
  Synthetic oligonucleotide

SEQ ID NO: 634025 - DNA, 55 bp, Artificial; identical to SEQ ID NO: 158099
  Synthetic oligonucleotide

SEQ ID NO: 634026 - DNA, 55 bp, Artificial; identical to SEQ ID NO: 199375
  Synthetic oligonucleotide

SEQ ID NO: 634027 - DNA, 60 bp, Artificial; identical to SEQ ID NO: 263535
  Synthetic oligonucleotide

SEQ ID NO: 634028 - DNA, 60 bp, Artificial; identical to SEQ ID NO: 256786
  Synthetic oligonucleotide

SEQ ID NO: 634029 - DNA, 54 bp, Artificial; identical to SEQ ID NO: 242050
  Synthetic oligonucleotide

SEQ ID NO: 634030 - DNA, 55 bp, Artificial; identical to SEQ ID NO: 199276
  Synthetic oligonucleotide

SEQ ID NO: 634031 - DNA, 53 bp, Artificial; identical to SEQ ID NO: 149361
  Synthetic oligonucleotide

SEQ ID NO: 634032 - DNA, 60 bp, Artificial; identical to SEQ ID NO: 168367
  Synthetic oligonucleotide

SEQ ID NO: 634033 - DNA, 55 bp, Artificial; identical to SEQ ID NO: 252781
  Synthetic oligonucleotide

SEQ ID NO: 634034 - DNA, 54 bp, Artificial; identical to SEQ ID NO: 184054
  Synthetic oligonucleotide

SEQ ID NO: 634035 - DNA, 55 bp, Artificial; identical to SEQ ID NO: 218662
  Synthetic oligonucleotide

SEQ ID NO: 634036 - DNA, 55 bp, Artificial; identical to SEQ ID NO: 216535
  Synthetic oligonucleotide

SEQ ID NO: 634037 - DNA, 55 bp, Artificial; identical to SEQ ID NO: 244539
  Synthetic oligonucleotide

SEQ ID NO: 634038 - DNA, 55 bp, Artificial; identical to SEQ ID NO: 209558
  Synthetic oligonucleotide

SEQ ID NO: 634039 - DNA, 56 bp, Artificial; identical to SEQ ID NO: 246409
  Synthetic oligonucleotide

SEQ ID NO: 634040 - DNA, 55 bp, Artificial; identical to SEQ ID NO: 144785
  Synthetic oligonucleotide

SEQ ID NO: 634041 - DNA, 55 bp, Artificial; identical to SEQ ID NO: 256999
  Synthetic oligonucleotide

SEQ ID NO: 634042 - DNA, 55 bp, Artificial; identical to SEQ ID NO: 171271
  Synthetic oligonucleotide

SEQ ID NO: 634043 - DNA, 55 bp, Artificial; identical to SEQ ID NO: 166853
  Synthetic oligonucleotide

SEQ ID NO: 634044 - DNA, 55 bp, Artificial; identical to SEQ ID NO: 238201
  Synthetic oligonucleotide

SEQ ID NO: 634045 - DNA, 51 bp, Artificial; identical to SEQ ID NO: 237176
  Synthetic oligonucleotide

SEQ ID NO: 634046 - DNA, 55 bp, Artificial; identical to SEQ ID NO: 253797
  Synthetic oligonucleotide

SEQ ID NO: 634047 - DNA, 55 bp, Artificial; identical to SEQ ID NO: 147652
  Synthetic oligonucleotide

SEQ ID NO: 634048 - DNA, 59 bp, Artificial; identical to SEQ ID NO: 149682
  Synthetic oligonucleotide

SEQ ID NO: 634049 - DNA, 54 bp, Artificial; identical to SEQ ID NO: 171712
  Synthetic oligonucleotide

SEQ ID NO: 634050 - DNA, 55 bp, Artificial; identical to SEQ ID NO: 242880
  Synthetic oligonucleotide

SEQ ID NO: 634051 - DNA, 55 bp, Artificial; identical to SEQ ID NO: 147653
  Synthetic oligonucleotide

SEQ ID NO: 634052 - DNA, 56 bp, Artificial; identical to SEQ ID NO: 222876
  Synthetic oligonucleotide

SEQ ID NO: 634053 - DNA, 56 bp, Artificial; identical to SEQ ID NO: 248596
  Synthetic oligonucleotide

SEQ ID NO: 634054 - DNA, 55 bp, Artificial; identical to SEQ ID NO: 220998
  Synthetic oligonucleotide

SEQ ID NO: 634055 - DNA, 55 bp, Artificial; identical to SEQ ID NO: 184077
  Synthetic oligonucleotide

SEQ ID NO: 634056 - DNA, 51 bp, Artificial; identical to SEQ ID NO: 200021
  Synthetic oligonucleotide

SEQ ID NO: 634057 - DNA, 56 bp, Artificial; identical to SEQ ID NO: 248636
  Synthetic oligonucleotide

SEQ ID NO: 634058 - DNA, 55 bp, Artificial; identical to SEQ ID NO: 169855
  Synthetic oligonucleotide

SEQ ID NO: 634059 - DNA, 55 bp, Artificial; identical to SEQ ID NO: 153282
  Synthetic oligonucleotide

SEQ ID NO: 634060 - DNA, 55 bp, Artificial; identical to SEQ ID NO: 244535
  Synthetic oligonucleotide

SEQ ID NO: 634061 - DNA, 55 bp, Artificial; identical to SEQ ID NO: 187475
  Synthetic oligonucleotide

SEQ ID NO: 634062 - DNA, 56 bp, Artificial; identical to SEQ ID NO: 179893
  Synthetic oligonucleotide

SEQ ID NO: 634063 - DNA, 58 bp, Artificial; identical to SEQ ID NO: 177399
  Synthetic oligonucleotide

SEQ ID NO: 634064 - DNA, 60 bp, Artificial; identical to SEQ ID NO: 205963
  Synthetic oligonucleotide

SEQ ID NO: 634065 - DNA, 55 bp, Artificial; identical to SEQ ID NO: 184072
  Synthetic oligonucleotide

SEQ ID NO: 634066 - DNA, 54 bp, Artificial; identical to SEQ ID NO: 149214
  Synthetic oligonucleotide

SEQ ID NO: 634067 - DNA, 58 bp, Artificial; identical to SEQ ID NO: 149693
  Synthetic oligonucleotide

SEQ ID NO: 634068 - DNA, 56 bp, Artificial; identical to SEQ ID NO: 166208
  Synthetic oligonucleotide

SEQ ID NO: 634069 - DNA, 54 bp, Artificial; identical to SEQ ID NO: 204136
  Synthetic oligonucleotide

SEQ ID NO: 634070 - DNA, 55 bp, Artificial; identical to SEQ ID NO: 202689
  Synthetic oligonucleotide

SEQ ID NO: 634071 - DNA, 55 bp, Artificial; identical to SEQ ID NO: 166482
  Synthetic oligonucleotide

SEQ ID NO: 634072 - DNA, 55 bp, Artificial; identical to SEQ ID NO: 184069
  Synthetic oligonucleotide

SEQ ID NO: 634073 - DNA, 55 bp, Artificial; identical to SEQ ID NO: 240410
  Synthetic oligonucleotide

SEQ ID NO: 634074 - DNA, 55 bp, Artificial; identical to SEQ ID NO: 147655
  Synthetic oligonucleotide

SEQ ID NO: 634075 - DNA, 55 bp, Artificial; identical to SEQ ID NO: 166481
  Synthetic oligonucleotide

SEQ ID NO: 634076 - DNA, 55 bp, Artificial; identical to SEQ ID NO: 166480
  Synthetic oligonucleotide

SEQ ID NO: 634077 - DNA, 58 bp, Artificial; identical to SEQ ID NO: 205187
  Synthetic oligonucleotide

SEQ ID NO: 634078 - DNA, 57 bp, Artificial; identical to SEQ ID NO: 151334
  Synthetic oligonucleotide

SEQ ID NO: 634079 - DNA, 59 bp, Artificial; identical to SEQ ID NO: 156476
  Synthetic oligonucleotide

SEQ ID NO: 634080 - DNA, 50 bp, Artificial; identical to SEQ ID NO: 150187
  Synthetic oligonucleotide

SEQ ID NO: 634081 - DNA, 52 bp, Artificial; identical to SEQ ID NO: 243977
  Synthetic oligonucleotide

SEQ ID NO: 634082 - DNA, 55 bp, Artificial; identical to SEQ ID NO: 242480
  Synthetic oligonucleotide

SEQ ID NO: 634083 - DNA, 53 bp, Artificial; identical to SEQ ID NO: 247862
  Synthetic oligonucleotide

SEQ ID NO: 634084 - DNA, 60 bp, Artificial; identical to SEQ ID NO: 177398
  Synthetic oligonucleotide

SEQ ID NO: 634085 - DNA, 54 bp, Artificial; identical to SEQ ID NO: 161296
  Synthetic oligonucleotide

SEQ ID NO: 634086 - DNA, 55 bp, Artificial; identical to SEQ ID NO: 188204
  Synthetic oligonucleotide

SEQ ID NO: 634087 - DNA, 55 bp, Artificial; identical to SEQ ID NO: 168593
  Synthetic oligonucleotide

SEQ ID NO: 634088 - DNA, 56 bp, Artificial; identical to SEQ ID NO: 242539
  Synthetic oligonucleotide

SEQ ID NO: 634089 - DNA, 55 bp, Artificial; identical to SEQ ID NO: 256996
  Synthetic oligonucleotide

SEQ ID NO: 634090 - DNA, 52 bp, Artificial; identical to SEQ ID NO: 242478
  Synthetic oligonucleotide

SEQ ID NO: 634091 - DNA, 55 bp, Artificial; identical to SEQ ID NO: 217409
  Synthetic oligonucleotide

SEQ ID NO: 634092 - DNA, 55 bp, Artificial; identical to SEQ ID NO: 205398
  Synthetic oligonucleotide

SEQ ID NO: 634093 - DNA, 54 bp, Artificial; identical to SEQ ID NO: 201786
  Synthetic oligonucleotide

SEQ ID NO: 634094 - DNA, 55 bp, Artificial; identical to SEQ ID NO: 207186
  Synthetic oligonucleotide

SEQ ID NO: 634095 - DNA, 55 bp, Artificial; identical to SEQ ID NO: 221353
  Synthetic oligonucleotide

SEQ ID NO: 634096 - DNA, 55 bp, Artificial; identical to SEQ ID NO: 256995
  Synthetic oligonucleotide

SEQ ID NO: 634097 - DNA, 55 bp, Artificial; identical to SEQ ID NO: 211160
  Synthetic oligonucleotide

SEQ ID NO: 634098 - DNA, 55 bp, Artificial; identical to SEQ ID NO: 242882
  Synthetic oligonucleotide

SEQ ID NO: 634099 - DNA, 58 bp, Artificial; identical to SEQ ID NO: 149715
  Synthetic oligonucleotide

SEQ ID NO: 634100 - DNA, 52 bp, Artificial; identical to SEQ ID NO: 213018
  Synthetic oligonucleotide

SEQ ID NO: 634101 - DNA, 56 bp, Artificial; identical to SEQ ID NO: 141619
  Synthetic oligonucleotide

SEQ ID NO: 634102 - DNA, 57 bp, Artificial; identical to SEQ ID NO: 177391
  Synthetic oligonucleotide

SEQ ID NO: 634103 - DNA, 53 bp, Artificial; identical to SEQ ID NO: 246389
  Synthetic oligonucleotide

SEQ ID NO: 634104 - DNA, 51 bp, Artificial; identical to SEQ ID NO: 246579
  Synthetic oligonucleotide

SEQ ID NO: 634105 - DNA, 55 bp, Artificial; identical to SEQ ID NO: 224753
  Synthetic oligonucleotide

SEQ ID NO: 634106 - DNA, 55 bp, Artificial; identical to SEQ ID NO: 248724
  Synthetic oligonucleotide

SEQ ID NO: 634107 - DNA, 55 bp, Artificial; identical to SEQ ID NO: 196912
  Synthetic oligonucleotide

SEQ ID NO: 634108 - DNA, 55 bp, Artificial; identical to SEQ ID NO: 151596
  Synthetic oligonucleotide

SEQ ID NO: 634109 - DNA, 55 bp, Artificial; identical to SEQ ID NO: 168594
  Synthetic oligonucleotide

SEQ ID NO: 634110 - DNA, 55 bp, Artificial; identical to SEQ ID NO: 199316
  Synthetic oligonucleotide

SEQ ID NO: 634111 - DNA, 57 bp, Artificial; identical to SEQ ID NO: 177388
  Synthetic oligonucleotide

SEQ ID NO: 634112 - DNA, 53 bp, Artificial; identical to SEQ ID NO: 157316
  Synthetic oligonucleotide

SEQ ID NO: 634113 - DNA, 50 bp, Artificial; identical to SEQ ID NO: 176242
  Synthetic oligonucleotide

SEQ ID NO: 634114 - DNA, 55 bp, Artificial; identical to SEQ ID NO: 238244
  Synthetic oligonucleotide

SEQ ID NO: 634115 - DNA, 52 bp, Artificial; identical to SEQ ID NO: 240669
  Synthetic oligonucleotide

SEQ ID NO: 634116 - DNA, 55 bp, Artificial; identical to SEQ ID NO: 166538
  Synthetic oligonucleotide

SEQ ID NO: 634117 - DNA, 52 bp, Artificial; identical to SEQ ID NO: 247863
  Synthetic oligonucleotide

SEQ ID NO: 634118 - DNA, 55 bp, Artificial; identical to SEQ ID NO: 238252
  Synthetic oligonucleotide

SEQ ID NO: 634119 - DNA, 54 bp, Artificial; identical to SEQ ID NO: 185241
  Synthetic oligonucleotide

SEQ ID NO: 634120 - DNA, 54 bp, Artificial; identical to SEQ ID NO: 234428
  Synthetic oligonucleotide

SEQ ID NO: 634121 - DNA, 55 bp, Artificial; identical to SEQ ID NO: 248725
  Synthetic oligonucleotide

SEQ ID NO: 634122 - DNA, 50 bp, Artificial; identical to SEQ ID NO: 150185
  Synthetic oligonucleotide

SEQ ID NO: 634123 - DNA, 54 bp, Artificial; identical to SEQ ID NO: 152006
  Synthetic oligonucleotide

SEQ ID NO: 634124 - DNA, 55 bp, Artificial; identical to SEQ ID NO: 217410
  Synthetic oligonucleotide

SEQ ID NO: 634125 - DNA, 55 bp, Artificial; identical to SEQ ID NO: 147525
  Synthetic oligonucleotide

SEQ ID NO: 634126 - DNA, 60 bp, Artificial; identical to SEQ ID NO: 212354
  Synthetic oligonucleotide

SEQ ID NO: 634127 - DNA, 55 bp, Artificial; identical to SEQ ID NO: 256993
  Synthetic oligonucleotide

SEQ ID NO: 634128 - DNA, 59 bp, Artificial; identical to SEQ ID NO: 212355
  Synthetic oligonucleotide

SEQ ID NO: 634129 - DNA, 55 bp, Artificial; identical to SEQ ID NO: 166536
  Synthetic oligonucleotide

SEQ ID NO: 634130 - DNA, 59 bp, Artificial; identical to SEQ ID NO: 150181
  Synthetic oligonucleotide

SEQ ID NO: 634131 - DNA, 55 bp, Artificial; identical to SEQ ID NO: 153281
  Synthetic oligonucleotide

SEQ ID NO: 634132 - DNA, 55 bp, Artificial; identical to SEQ ID NO: 261904
  Synthetic oligonucleotide

SEQ ID NO: 634133 - DNA, 54 bp, Artificial; identical to SEQ ID NO: 147533
  Synthetic oligonucleotide

SEQ ID NO: 634134 - DNA, 52 bp, Artificial; identical to SEQ ID NO: 258185
  Synthetic oligonucleotide

SEQ ID NO: 634135 - DNA, 55 bp, Artificial; identical to SEQ ID NO: 196916
  Synthetic oligonucleotide

SEQ ID NO: 634136 - DNA, 55 bp, Artificial; identical to SEQ ID NO: 219668
  Synthetic oligonucleotide

SEQ ID NO: 634137 - DNA, 59 bp, Artificial; identical to SEQ ID NO: 179295
  Synthetic oligonucleotide

SEQ ID NO: 634138 - DNA, 54 bp, Artificial; identical to SEQ ID NO: 240411
  Synthetic oligonucleotide

SEQ ID NO: 634139 - DNA, 55 bp, Artificial; identical to SEQ ID NO: 212728
  Synthetic oligonucleotide

SEQ ID NO: 634140 - DNA, 50 bp, Artificial; identical to SEQ ID NO: 188584
  Synthetic oligonucleotide

SEQ ID NO: 634141 - DNA, 52 bp, Artificial; identical to SEQ ID NO: 167249
  Synthetic oligonucleotide

SEQ ID NO: 634142 - DNA, 55 bp, Artificial; identical to SEQ ID NO: 196917
  Synthetic oligonucleotide

SEQ ID NO: 634143 - DNA, 55 bp, Artificial; identical to SEQ ID NO: 244530
  Synthetic oligonucleotide

SEQ ID NO: 634144 - DNA, 55 bp, Artificial; identical to SEQ ID NO: 158654
  Synthetic oligonucleotide

SEQ ID NO: 634145 - DNA, 60 bp, Artificial; identical to SEQ ID NO: 177386
  Synthetic oligonucleotide

SEQ ID NO: 634146 - DNA, 55 bp, Artificial; identical to SEQ ID NO: 212729
  Synthetic oligonucleotide

SEQ ID NO: 634147 - DNA, 60 bp, Artificial; identical to SEQ ID NO: 238093
  Synthetic oligonucleotide

SEQ ID NO: 634148 - DNA, 55 bp, Artificial; identical to SEQ ID NO: 256992
  Synthetic oligonucleotide

SEQ ID NO: 634149 - DNA, 50 bp, Artificial; identical to SEQ ID NO: 266352
  Synthetic oligonucleotide

SEQ ID NO: 634150 - DNA, 60 bp, Artificial; identical to SEQ ID NO: 252730
  Synthetic oligonucleotide

SEQ ID NO: 634151 - DNA, 56 bp, Artificial; identical to SEQ ID NO: 203400
  Synthetic oligonucleotide

SEQ ID NO: 634152 - DNA, 52 bp, Artificial; identical to SEQ ID NO: 186158
  Synthetic oligonucleotide

SEQ ID NO: 634153 - DNA, 55 bp, Artificial; identical to SEQ ID NO: 171276
  Synthetic oligonucleotide

SEQ ID NO: 634154 - DNA, 51 bp, Artificial; identical to SEQ ID NO: 223807
  Synthetic oligonucleotide

SEQ ID NO: 634155 - DNA, 55 bp, Artificial; identical to SEQ ID NO: 160009
  Synthetic oligonucleotide

SEQ ID NO: 634156 - DNA, 50 bp, Artificial; identical to SEQ ID NO: 198159
  Synthetic oligonucleotide

SEQ ID NO: 634157 - DNA, 52 bp, Artificial; identical to SEQ ID NO: 199484
  Synthetic oligonucleotide

SEQ ID NO: 634158 - DNA, 55 bp, Artificial; identical to SEQ ID NO: 168596
  Synthetic oligonucleotide

SEQ ID NO: 634159 - DNA, 57 bp, Artificial; identical to SEQ ID NO: 142738
  Synthetic oligonucleotide

SEQ ID NO: 634160 - DNA, 55 bp, Artificial; identical to SEQ ID NO: 184033
  Synthetic oligonucleotide

SEQ ID NO: 634161 - DNA, 55 bp, Artificial; identical to SEQ ID NO: 168597
  Synthetic oligonucleotide

SEQ ID NO: 634162 - DNA, 55 bp, Artificial; identical to SEQ ID NO: 224756
  Synthetic oligonucleotide

SEQ ID NO: 634163 - DNA, 57 bp, Artificial; identical to SEQ ID NO: 189737
  Synthetic oligonucleotide

SEQ ID NO: 634164 - DNA, 54 bp, Artificial; identical to SEQ ID NO: 198148
  Synthetic oligonucleotide

SEQ ID NO: 634165 - DNA, 57 bp, Artificial; identical to SEQ ID NO: 246376
  Synthetic oligonucleotide

SEQ ID NO: 634166 - DNA, 59 bp, Artificial; identical to SEQ ID NO: 256498
  Synthetic oligonucleotide

SEQ ID NO: 634167 - DNA, 55 bp, Artificial; identical to SEQ ID NO: 187536
  Synthetic oligonucleotide

SEQ ID NO: 634168 - DNA, 55 bp, Artificial; identical to SEQ ID NO: 244470
  Synthetic oligonucleotide

SEQ ID NO: 634169 - DNA, 54 bp, Artificial; identical to SEQ ID NO: 156409
  Synthetic oligonucleotide

SEQ ID NO: 634170 - DNA, 55 bp, Artificial; identical to SEQ ID NO: 151602
  Synthetic oligonucleotide

SEQ ID NO: 634171 - DNA, 55 bp, Artificial; identical to SEQ ID NO: 199465
  Synthetic oligonucleotide

SEQ ID NO: 634172 - DNA, 56 bp, Artificial; identical to SEQ ID NO: 166179
  Synthetic oligonucleotide

SEQ ID NO: 634173 - DNA, 54 bp, Artificial; identical to SEQ ID NO: 212929
  Synthetic oligonucleotide

SEQ ID NO: 634174 - DNA, 55 bp, Artificial; identical to SEQ ID NO: 266183
  Synthetic oligonucleotide

SEQ ID NO: 634175 - DNA, 55 bp, Artificial; identical to SEQ ID NO: 158731
  Synthetic oligonucleotide

SEQ ID NO: 634176 - DNA, 55 bp, Artificial; identical to SEQ ID NO: 184026
  Synthetic oligonucleotide

SEQ ID NO: 634177 - DNA, 56 bp, Artificial; identical to SEQ ID NO: 179016
  Synthetic oligonucleotide

SEQ ID NO: 634178 - DNA, 55 bp, Artificial; identical to SEQ ID NO: 191833
  Synthetic oligonucleotide

SEQ ID NO: 634179 - DNA, 60 bp, Artificial; identical to SEQ ID NO: 179005
  Synthetic oligonucleotide

SEQ ID NO: 634180 - DNA, 55 bp, Artificial; identical to SEQ ID NO: 199482
  Synthetic oligonucleotide

SEQ ID NO: 634181 - DNA, 55 bp, Artificial; identical to SEQ ID NO: 184398
  Synthetic oligonucleotide

SEQ ID NO: 634182 - DNA, 55 bp, Artificial; identical to SEQ ID NO: 256990
  Synthetic oligonucleotide

SEQ ID NO: 634183 - DNA, 55 bp, Artificial; identical to SEQ ID NO: 252770
  Synthetic oligonucleotide

SEQ ID NO: 634184 - DNA, 54 bp, Artificial; identical to SEQ ID NO: 185207
  Synthetic oligonucleotide

SEQ ID NO: 634185 - DNA, 55 bp, Artificial; identical to SEQ ID NO: 240414
  Synthetic oligonucleotide

SEQ ID NO: 634186 - DNA, 60 bp, Artificial; identical to SEQ ID NO: 209295
  Synthetic oligonucleotide

SEQ ID NO: 634187 - DNA, 53 bp, Artificial; identical to SEQ ID NO: 185718
  Synthetic oligonucleotide

SEQ ID NO: 634188 - DNA, 54 bp, Artificial; identical to SEQ ID NO: 203881
  Synthetic oligonucleotide

SEQ ID NO: 634189 - DNA, 55 bp, Artificial; identical to SEQ ID NO: 184402
  Synthetic oligonucleotide

SEQ ID NO: 634190 - DNA, 53 bp, Artificial; identical to SEQ ID NO: 246339
  Synthetic oligonucleotide

SEQ ID NO: 634191 - DNA, 55 bp, Artificial; identical to SEQ ID NO: 215495
  Synthetic oligonucleotide

SEQ ID NO: 634192 - DNA, 54 bp, Artificial; identical to SEQ ID NO: 151603
  Synthetic oligonucleotide

SEQ ID NO: 634193 - DNA, 55 bp, Artificial; identical to SEQ ID NO: 166856
  Synthetic oligonucleotide

SEQ ID NO: 634194 - DNA, 55 bp, Artificial; identical to SEQ ID NO: 166529
  Synthetic oligonucleotide

SEQ ID NO: 634195 - DNA, 55 bp, Artificial; identical to SEQ ID NO: 184429
  Synthetic oligonucleotide

SEQ ID NO: 634196 - DNA, 53 bp, Artificial; identical to SEQ ID NO: 152438
  Synthetic oligonucleotide

SEQ ID NO: 634197 - DNA, 55 bp, Artificial; identical to SEQ ID NO: 168602
  Synthetic oligonucleotide

SEQ ID NO: 634198 - DNA, 54 bp, Artificial; identical to SEQ ID NO: 185211
  Synthetic oligonucleotide

SEQ ID NO: 634199 - DNA, 55 bp, Artificial; identical to SEQ ID NO: 184424
  Synthetic oligonucleotide

SEQ ID NO: 634200 - DNA, 50 bp, Artificial; identical to SEQ ID NO: 202616
  Synthetic oligonucleotide

SEQ ID NO: 634201 - DNA, 55 bp, Artificial; identical to SEQ ID NO: 161988
  Synthetic oligonucleotide

SEQ ID NO: 634202 - DNA, 55 bp, Artificial; identical to SEQ ID NO: 224759
  Synthetic oligonucleotide

SEQ ID NO: 634203 - DNA, 55 bp, Artificial; identical to SEQ ID NO: 187535
  Synthetic oligonucleotide

SEQ ID NO: 634204 - DNA, 55 bp, Artificial; identical to SEQ ID NO: 158754
  Synthetic oligonucleotide

SEQ ID NO: 634205 - DNA, 57 bp, Artificial; identical to SEQ ID NO: 152944
  Synthetic oligonucleotide

SEQ ID NO: 634206 - DNA, 55 bp, Artificial; identical to SEQ ID NO: 171278
  Synthetic oligonucleotide

SEQ ID NO: 634207 - DNA, 55 bp, Artificial; identical to SEQ ID NO: 242886
  Synthetic oligonucleotide

SEQ ID NO: 634208 - DNA, 55 bp, Artificial; identical to SEQ ID NO: 238149
  Synthetic oligonucleotide

SEQ ID NO: 634209 - DNA, 60 bp, Artificial; identical to SEQ ID NO: 248461
  Synthetic oligonucleotide

SEQ ID NO: 634210 - DNA, 55 bp, Artificial; identical to SEQ ID NO: 199438
  Synthetic oligonucleotide

SEQ ID NO: 634211 - DNA, 54 bp, Artificial; identical to SEQ ID NO: 218311
  Synthetic oligonucleotide

SEQ ID NO: 634212 - DNA, 54 bp, Artificial; identical to SEQ ID NO: 188025
  Synthetic oligonucleotide

SEQ ID NO: 634213 - DNA, 53 bp, Artificial; identical to SEQ ID NO: 150215
  Synthetic oligonucleotide

SEQ ID NO: 634214 - DNA, 55 bp, Artificial; identical to SEQ ID NO: 257584
  Synthetic oligonucleotide

SEQ ID NO: 634215 - DNA, 56 bp, Artificial; identical to SEQ ID NO: 198137
  Synthetic oligonucleotide

SEQ ID NO: 634216 - DNA, 55 bp, Artificial; identical to SEQ ID NO: 194433
  Synthetic oligonucleotide

SEQ ID NO: 634217 - DNA, 55 bp, Artificial; identical to SEQ ID NO: 161233
  Synthetic oligonucleotide

SEQ ID NO: 634218 - DNA, 55 bp, Artificial; identical to SEQ ID NO: 160010
  Synthetic oligonucleotide

SEQ ID NO: 634219 - DNA, 55 bp, Artificial; identical to SEQ ID NO: 158809
  Synthetic oligonucleotide

SEQ ID NO: 634220 - DNA, 55 bp, Artificial; identical to SEQ ID NO: 184419
  Synthetic oligonucleotide

SEQ ID NO: 634221 - DNA, 58 bp, Artificial; identical to SEQ ID NO: 142710
  Synthetic oligonucleotide

SEQ ID NO: 634222 - DNA, 60 bp, Artificial; identical to SEQ ID NO: 178971
  Synthetic oligonucleotide

SEQ ID NO: 634223 - DNA, 58 bp, Artificial; identical to SEQ ID NO: 178960
  Synthetic oligonucleotide

SEQ ID NO: 634224 - DNA, 51 bp, Artificial; identical to SEQ ID NO: 266301
  Synthetic oligonucleotide

SEQ ID NO: 634225 - DNA, 55 bp, Artificial; identical to SEQ ID NO: 158820
  Synthetic oligonucleotide

SEQ ID NO: 634226 - DNA, 60 bp, Artificial; identical to SEQ ID NO: 212357
  Synthetic oligonucleotide

SEQ ID NO: 634227 - DNA, 55 bp, Artificial; identical to SEQ ID NO: 201523
  Synthetic oligonucleotide

SEQ ID NO: 634228 - DNA, 57 bp, Artificial; identical to SEQ ID NO: 194326
  Synthetic oligonucleotide

SEQ ID NO: 634229 - DNA, 55 bp, Artificial; identical to SEQ ID NO: 244468
  Synthetic oligonucleotide

SEQ ID NO: 634230 - DNA, 53 bp, Artificial; identical to SEQ ID NO: 185791
  Synthetic oligonucleotide

SEQ ID NO: 634231 - DNA, 55 bp, Artificial; identical to SEQ ID NO: 158476
  Synthetic oligonucleotide

SEQ ID NO: 634232 - DNA, 53 bp, Artificial; identical to SEQ ID NO: 149352
  Synthetic oligonucleotide

SEQ ID NO: 634233 - DNA, 60 bp, Artificial; identical to SEQ ID NO: 208618
  Synthetic oligonucleotide

SEQ ID NO: 634234 - DNA, 55 bp, Artificial; identical to SEQ ID NO: 188893
  Synthetic oligonucleotide

SEQ ID NO: 634235 - DNA, 55 bp, Artificial; identical to SEQ ID NO: 217413
  Synthetic oligonucleotide

SEQ ID NO: 634236 - DNA, 50 bp, Artificial; identical to SEQ ID NO: 175310
  Synthetic oligonucleotide

SEQ ID NO: 634237 - DNA, 55 bp, Artificial; identical to SEQ ID NO: 242887
  Synthetic oligonucleotide

SEQ ID NO: 634238 - DNA, 59 bp, Artificial; identical to SEQ ID NO: 147104
  Synthetic oligonucleotide

SEQ ID NO: 634239 - DNA, 55 bp, Artificial; identical to SEQ ID NO: 190175
  Synthetic oligonucleotide

SEQ ID NO: 634240 - DNA, 53 bp, Artificial; identical to SEQ ID NO: 152439
  Synthetic oligonucleotide

SEQ ID NO: 634241 - DNA, 51 bp, Artificial; identical to SEQ ID NO: 169431
  Synthetic oligonucleotide

SEQ ID NO: 634242 - DNA, 55 bp, Artificial; identical to SEQ ID NO: 166527
  Synthetic oligonucleotide

SEQ ID NO: 634243 - DNA, 60 bp, Artificial; identical to SEQ ID NO: 150237
  Synthetic oligonucleotide

SEQ ID NO: 634244 - DNA, 55 bp, Artificial; identical to SEQ ID NO: 234273
  Synthetic oligonucleotide

SEQ ID NO: 634245 - DNA, 55 bp, Artificial; identical to SEQ ID NO: 151604
  Synthetic oligonucleotide

SEQ ID NO: 634246 - DNA, 55 bp, Artificial; identical to SEQ ID NO: 256988
  Synthetic oligonucleotide

SEQ ID NO: 634247 - DNA, 55 bp, Artificial; identical to SEQ ID NO: 147503
  Synthetic oligonucleotide

SEQ ID NO: 634248 - DNA, 55 bp, Artificial; identical to SEQ ID NO: 144412
  Synthetic oligonucleotide

SEQ ID NO: 634249 - DNA, 51 bp, Artificial; identical to SEQ ID NO: 165310
  Synthetic oligonucleotide

SEQ ID NO: 634250 - DNA, 55 bp, Artificial; identical to SEQ ID NO: 184364
  Synthetic oligonucleotide

SEQ ID NO: 634251 - DNA, 55 bp, Artificial; identical to SEQ ID NO: 184365
  Synthetic oligonucleotide

SEQ ID NO: 634252 - DNA, 55 bp, Artificial; identical to SEQ ID NO: 147505
  Synthetic oligonucleotide

SEQ ID NO: 634253 - DNA, 56 bp, Artificial; identical to SEQ ID NO: 242045
  Synthetic oligonucleotide

SEQ ID NO: 634254 - DNA, 60 bp, Artificial; identical to SEQ ID NO: 246354
  Synthetic oligonucleotide

SEQ ID NO: 634255 - DNA, 55 bp, Artificial; identical to SEQ ID NO: 234228
  Synthetic oligonucleotide

SEQ ID NO: 634256 - DNA, 55 bp, Artificial; identical to SEQ ID NO: 240416
  Synthetic oligonucleotide

SEQ ID NO: 634257 - DNA, 60 bp, Artificial; identical to SEQ ID NO: 170769
  Synthetic oligonucleotide

SEQ ID NO: 634258 - DNA, 57 bp, Artificial; identical to SEQ ID NO: 247541
  Synthetic oligonucleotide

SEQ ID NO: 634259 - DNA, 55 bp, Artificial; identical to SEQ ID NO: 184367
  Synthetic oligonucleotide

SEQ ID NO: 634260 - DNA, 55 bp, Artificial; identical to SEQ ID NO: 184369
  Synthetic oligonucleotide

SEQ ID NO: 634261 - DNA, 55 bp, Artificial; identical to SEQ ID NO: 171279
  Synthetic oligonucleotide

SEQ ID NO: 634262 - DNA, 55 bp, Artificial; identical to SEQ ID NO: 153278
  Synthetic oligonucleotide

SEQ ID NO: 634263 - DNA, 55 bp, Artificial; identical to SEQ ID NO: 184370
  Synthetic oligonucleotide

SEQ ID NO: 634264 - DNA, 56 bp, Artificial; identical to SEQ ID NO: 225080
  Synthetic oligonucleotide

SEQ ID NO: 634265 - DNA, 55 bp, Artificial; identical to SEQ ID NO: 256987
  Synthetic oligonucleotide

SEQ ID NO: 634266 - DNA, 55 bp, Artificial; identical to SEQ ID NO: 158487
  Synthetic oligonucleotide

SEQ ID NO: 634267 - DNA, 55 bp, Artificial; identical to SEQ ID NO: 142498
  Synthetic oligonucleotide

SEQ ID NO: 634268 - DNA, 55 bp, Artificial; identical to SEQ ID NO: 244458
  Synthetic oligonucleotide

SEQ ID NO: 634269 - DNA, 55 bp, Artificial; identical to SEQ ID NO: 151605
  Synthetic oligonucleotide

SEQ ID NO: 634270 - DNA, 59 bp, Artificial; identical to SEQ ID NO: 141630
  Synthetic oligonucleotide

SEQ ID NO: 634271 - DNA, 55 bp, Artificial; identical to SEQ ID NO: 222612
  Synthetic oligonucleotide

SEQ ID NO: 634272 - DNA, 55 bp, Artificial; identical to SEQ ID NO: 158509
  Synthetic oligonucleotide

SEQ ID NO: 634273 - DNA, 55 bp, Artificial; identical to SEQ ID NO: 144781
  Synthetic oligonucleotide

SEQ ID NO: 634274 - DNA, 55 bp, Artificial; identical to SEQ ID NO: 202067
  Synthetic oligonucleotide

SEQ ID NO: 634275 - DNA, 55 bp, Artificial; identical to SEQ ID NO: 171281
  Synthetic oligonucleotide

SEQ ID NO: 634276 - DNA, 54 bp, Artificial; identical to SEQ ID NO: 185221
  Synthetic oligonucleotide

SEQ ID NO: 634277 - DNA, 54 bp, Artificial; identical to SEQ ID NO: 185223
  Synthetic oligonucleotide

SEQ ID NO: 634278 - DNA, 54 bp, Artificial; identical to SEQ ID NO: 198114
  Synthetic oligonucleotide

SEQ ID NO: 634279 - DNA, 50 bp, Artificial; identical to SEQ ID NO: 176108
  Synthetic oligonucleotide

SEQ ID NO: 634280 - DNA, 54 bp, Artificial; identical to SEQ ID NO: 222870
  Synthetic oligonucleotide

SEQ ID NO: 634281 - DNA, 55 bp, Artificial; identical to SEQ ID NO: 169526
  Synthetic oligonucleotide

SEQ ID NO: 634282 - DNA, 51 bp, Artificial; identical to SEQ ID NO: 241120
  Synthetic oligonucleotide

SEQ ID NO: 634283 - DNA, 54 bp, Artificial; identical to SEQ ID NO: 233435
  Synthetic oligonucleotide

SEQ ID NO: 634284 - DNA, 55 bp, Artificial; identical to SEQ ID NO: 242889
  Synthetic oligonucleotide

SEQ ID NO: 634285 - DNA, 60 bp, Artificial; identical to SEQ ID NO: 150248
  Synthetic oligonucleotide

SEQ ID NO: 634286 - DNA, 55 bp, Artificial; identical to SEQ ID NO: 153275
  Synthetic oligonucleotide

SEQ ID NO: 634287 - DNA, 55 bp, Artificial; identical to SEQ ID NO: 202008
  Synthetic oligonucleotide

SEQ ID NO: 634288 - DNA, 55 bp, Artificial; identical to SEQ ID NO: 217416
  Synthetic oligonucleotide

SEQ ID NO: 634289 - DNA, 55 bp, Artificial; identical to SEQ ID NO: 265998
  Synthetic oligonucleotide

SEQ ID NO: 634290 - DNA, 55 bp, Artificial; identical to SEQ ID NO: 202009
  Synthetic oligonucleotide

SEQ ID NO: 634291 - DNA, 52 bp, Artificial; identical to SEQ ID NO: 147567
  Synthetic oligonucleotide

SEQ ID NO: 634292 - DNA, 58 bp, Artificial; identical to SEQ ID NO: 204113
  Synthetic oligonucleotide

SEQ ID NO: 634293 - DNA, 53 bp, Artificial; identical to SEQ ID NO: 185809
  Synthetic oligonucleotide

SEQ ID NO: 634294 - DNA, 55 bp, Artificial; identical to SEQ ID NO: 172945
  Synthetic oligonucleotide

SEQ ID NO: 634295 - DNA, 55 bp, Artificial; identical to SEQ ID NO: 184383
  Synthetic oligonucleotide

SEQ ID NO: 634296 - DNA, 55 bp, Artificial; identical to SEQ ID NO: 184385
  Synthetic oligonucleotide

SEQ ID NO: 634297 - DNA, 59 bp, Artificial; identical to SEQ ID NO: 246309
  Synthetic oligonucleotide

SEQ ID NO: 634298 - DNA, 51 bp, Artificial; identical to SEQ ID NO: 205765
  Synthetic oligonucleotide

SEQ ID NO: 634299 - DNA, 55 bp, Artificial; identical to SEQ ID NO: 147569
  Synthetic oligonucleotide

SEQ ID NO: 634300 - DNA, 55 bp, Artificial; identical to SEQ ID NO: 256985
  Synthetic oligonucleotide

SEQ ID NO: 634301 - DNA, 60 bp, Artificial; identical to SEQ ID NO: 223684
  Synthetic oligonucleotide

SEQ ID NO: 634302 - DNA, 60 bp, Artificial; identical to SEQ ID NO: 257435
  Synthetic oligonucleotide

SEQ ID NO: 634303 - DNA, 55 bp, Artificial; identical to SEQ ID NO: 224761
  Synthetic oligonucleotide

SEQ ID NO: 634304 - DNA, 54 bp, Artificial; identical to SEQ ID NO: 243046
  Synthetic oligonucleotide

SEQ ID NO: 634305 - DNA, 55 bp, Artificial; identical to SEQ ID NO: 184387
  Synthetic oligonucleotide

SEQ ID NO: 634306 - DNA, 54 bp, Artificial; identical to SEQ ID NO: 244455
  Synthetic oligonucleotide

SEQ ID NO: 634307 - DNA, 55 bp, Artificial; identical to SEQ ID NO: 193584
  Synthetic oligonucleotide

SEQ ID NO: 634308 - DNA, 55 bp, Artificial; identical to SEQ ID NO: 147576
  Synthetic oligonucleotide

SEQ ID NO: 634309 - DNA, 55 bp, Artificial; identical to SEQ ID NO: 147578
  Synthetic oligonucleotide

SEQ ID NO: 634310 - DNA, 55 bp, Artificial; identical to SEQ ID NO: 154332
  Synthetic oligonucleotide

SEQ ID NO: 634311 - DNA, 55 bp, Artificial; identical to SEQ ID NO: 244453
  Synthetic oligonucleotide

SEQ ID NO: 634312 - DNA, 55 bp, Artificial; identical to SEQ ID NO: 184389
  Synthetic oligonucleotide

SEQ ID NO: 634313 - DNA, 60 bp, Artificial; identical to SEQ ID NO: 170770
  Synthetic oligonucleotide

SEQ ID NO: 634314 - DNA, 58 bp, Artificial; identical to SEQ ID NO: 237927
  Synthetic oligonucleotide

SEQ ID NO: 634315 - DNA, 55 bp, Artificial; identical to SEQ ID NO: 184392
  Synthetic oligonucleotide

SEQ ID NO: 634316 - DNA, 55 bp, Artificial; identical to SEQ ID NO: 187533
  Synthetic oligonucleotide

SEQ ID NO: 634317 - DNA, 51 bp, Artificial; identical to SEQ ID NO: 186695
  Synthetic oligonucleotide

SEQ ID NO: 634318 - DNA, 58 bp, Artificial; identical to SEQ ID NO: 141641
  Synthetic oligonucleotide

SEQ ID NO: 634319 - DNA, 55 bp, Artificial; identical to SEQ ID NO: 196919
  Synthetic oligonucleotide

SEQ ID NO: 634320 - DNA, 55 bp, Artificial; identical to SEQ ID NO: 242891
  Synthetic oligonucleotide

SEQ ID NO: 634321 - DNA, 60 bp, Artificial; identical to SEQ ID NO: 187528
  Synthetic oligonucleotide

SEQ ID NO: 634322 - DNA, 55 bp, Artificial; identical to SEQ ID NO: 244452
  Synthetic oligonucleotide

SEQ ID NO: 634323 - DNA, 52 bp, Artificial; identical to SEQ ID NO: 174877
  Synthetic oligonucleotide

SEQ ID NO: 634324 - DNA, 58 bp, Artificial; identical to SEQ ID NO: 209284
  Synthetic oligonucleotide

SEQ ID NO: 634325 - DNA, 55 bp, Artificial; identical to SEQ ID NO: 147579
  Synthetic oligonucleotide

SEQ ID NO: 634326 - DNA, 55 bp, Artificial; identical to SEQ ID NO: 153274
  Synthetic oligonucleotide

SEQ ID NO: 634327 - DNA, 55 bp, Artificial; identical to SEQ ID NO: 259518
  Synthetic oligonucleotide

SEQ ID NO: 634328 - DNA, 54 bp, Artificial; identical to SEQ ID NO: 224763
  Synthetic oligonucleotide

SEQ ID NO: 634329 - DNA, 53 bp, Artificial; identical to SEQ ID NO: 242892
  Synthetic oligonucleotide

SEQ ID NO: 634330 - DNA, 55 bp, Artificial; identical to SEQ ID NO: 240419
  Synthetic oligonucleotide

SEQ ID NO: 634331 - DNA, 55 bp, Artificial; identical to SEQ ID NO: 202685
  Synthetic oligonucleotide

SEQ ID NO: 634332 - DNA, 57 bp, Artificial; identical to SEQ ID NO: 204102
  Synthetic oligonucleotide

SEQ ID NO: 634333 - DNA, 50 bp, Artificial; identical to SEQ ID NO: 150097
  Synthetic oligonucleotide

SEQ ID NO: 634334 - DNA, 54 bp, Artificial; identical to SEQ ID NO: 184472
  Synthetic oligonucleotide

SEQ ID NO: 634335 - DNA, 55 bp, Artificial; identical to SEQ ID NO: 147587
  Synthetic oligonucleotide

SEQ ID NO: 634336 - DNA, 55 bp, Artificial; identical to SEQ ID NO: 252768
  Synthetic oligonucleotide

SEQ ID NO: 634337 - DNA, 55 bp, Artificial; identical to SEQ ID NO: 184473
  Synthetic oligonucleotide

SEQ ID NO: 634338 - DNA, 58 bp, Artificial; identical to SEQ ID NO: 238126
  Synthetic oligonucleotide

SEQ ID NO: 634339 - DNA, 55 bp, Artificial; identical to SEQ ID NO: 252769
  Synthetic oligonucleotide

SEQ ID NO: 634340 - DNA, 55 bp, Artificial; identical to SEQ ID NO: 262784
  Synthetic oligonucleotide

SEQ ID NO: 634341 - DNA, 52 bp, Artificial; identical to SEQ ID NO: 149612
  Synthetic oligonucleotide

SEQ ID NO: 634342 - DNA, 59 bp, Artificial; identical to SEQ ID NO: 166029
  Synthetic oligonucleotide

SEQ ID NO: 634343 - DNA, 55 bp, Artificial; identical to SEQ ID NO: 166526
  Synthetic oligonucleotide

SEQ ID NO: 634344 - DNA, 55 bp, Artificial; identical to SEQ ID NO: 168604
  Synthetic oligonucleotide

SEQ ID NO: 634345 - DNA, 55 bp, Artificial; identical to SEQ ID NO: 242443
  Synthetic oligonucleotide

SEQ ID NO: 634346 - DNA, 55 bp, Artificial; identical to SEQ ID NO: 198111
  Synthetic oligonucleotide

SEQ ID NO: 634347 - DNA, 55 bp, Artificial; identical to SEQ ID NO: 244449
  Synthetic oligonucleotide

SEQ ID NO: 634348 - DNA, 55 bp, Artificial; identical to SEQ ID NO: 242040
  Synthetic oligonucleotide

SEQ ID NO: 634349 - DNA, 55 bp, Artificial; identical to SEQ ID NO: 188892
  Synthetic oligonucleotide

SEQ ID NO: 634350 - DNA, 60 bp, Artificial; identical to SEQ ID NO: 178871
  Synthetic oligonucleotide

SEQ ID NO: 634351 - DNA, 55 bp, Artificial; identical to SEQ ID NO: 244448
  Synthetic oligonucleotide

SEQ ID NO: 634352 - DNA, 55 bp, Artificial; identical to SEQ ID NO: 194435
  Synthetic oligonucleotide

SEQ ID NO: 634353 - DNA, 55 bp, Artificial; identical to SEQ ID NO: 166857
  Synthetic oligonucleotide

SEQ ID NO: 634354 - DNA, 55 bp, Artificial; identical to SEQ ID NO: 218651
  Synthetic oligonucleotide

SEQ ID NO: 634355 - DNA, 55 bp, Artificial; identical to SEQ ID NO: 257577
  Synthetic oligonucleotide

SEQ ID NO: 634356 - DNA, 57 bp, Artificial; identical to SEQ ID NO: 237777
  Synthetic oligonucleotide

SEQ ID NO: 634357 - DNA, 60 bp, Artificial; identical to SEQ ID NO: 159852
  Synthetic oligonucleotide

SEQ ID NO: 634358 - DNA, 52 bp, Artificial; identical to SEQ ID NO: 217436
  Synthetic oligonucleotide

SEQ ID NO: 634359 - DNA, 50 bp, Artificial; identical to SEQ ID NO: 241314
  Synthetic oligonucleotide

SEQ ID NO: 634360 - DNA, 55 bp, Artificial; identical to SEQ ID NO: 158532
  Synthetic oligonucleotide

SEQ ID NO: 634361 - DNA, 60 bp, Artificial; identical to SEQ ID NO: 178849
  Synthetic oligonucleotide

SEQ ID NO: 634362 - DNA, 51 bp, Artificial; identical to SEQ ID NO: 255626
  Synthetic oligonucleotide

SEQ ID NO: 634363 - DNA, 58 bp, Artificial; identical to SEQ ID NO: 171045
  Synthetic oligonucleotide

SEQ ID NO: 634364 - DNA, 60 bp, Artificial; identical to SEQ ID NO: 190942
  Synthetic oligonucleotide

SEQ ID NO: 634365 - DNA, 55 bp, Artificial; identical to SEQ ID NO: 261818
  Synthetic oligonucleotide

SEQ ID NO: 634366 - DNA, 55 bp, Artificial; identical to SEQ ID NO: 224764
  Synthetic oligonucleotide

SEQ ID NO: 634367 - DNA, 55 bp, Artificial; identical to SEQ ID NO: 158543
  Synthetic oligonucleotide

SEQ ID NO: 634368 - DNA, 50 bp, Artificial; identical to SEQ ID NO: 246864
  Synthetic oligonucleotide

SEQ ID NO: 634369 - DNA, 55 bp, Artificial; identical to SEQ ID NO: 184483
  Synthetic oligonucleotide

SEQ ID NO: 634370 - DNA, 55 bp, Artificial; identical to SEQ ID NO: 184484
  Synthetic oligonucleotide

SEQ ID NO: 634371 - DNA, 60 bp, Artificial; identical to SEQ ID NO: 142162
  Synthetic oligonucleotide

SEQ ID NO: 634372 - DNA, 51 bp, Artificial; identical to SEQ ID NO: 192171
  Synthetic oligonucleotide

SEQ ID NO: 634373 - DNA, 54 bp, Artificial; identical to SEQ ID NO: 191149
  Synthetic oligonucleotide

SEQ ID NO: 634374 - DNA, 55 bp, Artificial; identical to SEQ ID NO: 252773
  Synthetic oligonucleotide

SEQ ID NO: 634375 - DNA, 58 bp, Artificial; identical to SEQ ID NO: 236438
  Synthetic oligonucleotide

SEQ ID NO: 634376 - DNA, 55 bp, Artificial; identical to SEQ ID NO: 196920
  Synthetic oligonucleotide

SEQ ID NO: 634377 - DNA, 54 bp, Artificial; identical to SEQ ID NO: 221345
  Synthetic oligonucleotide

SEQ ID NO: 634378 - DNA, 55 bp, Artificial; identical to SEQ ID NO: 190179
  Synthetic oligonucleotide

SEQ ID NO: 634379 - DNA, 53 bp, Artificial; identical to SEQ ID NO: 141256
  Synthetic oligonucleotide

SEQ ID NO: 634380 - DNA, 55 bp, Artificial; identical to SEQ ID NO: 166524
  Synthetic oligonucleotide

SEQ ID NO: 634381 - DNA, 60 bp, Artificial; identical to SEQ ID NO: 210936
  Synthetic oligonucleotide

SEQ ID NO: 634382 - DNA, 55 bp, Artificial; identical to SEQ ID NO: 208298
  Synthetic oligonucleotide

SEQ ID NO: 634383 - DNA, 55 bp, Artificial; identical to SEQ ID NO: 256983
  Synthetic oligonucleotide

SEQ ID NO: 634384 - DNA, 54 bp, Artificial; identical to SEQ ID NO: 248463
  Synthetic oligonucleotide

SEQ ID NO: 634385 - DNA, 55 bp, Artificial; identical to SEQ ID NO: 256982
  Synthetic oligonucleotide

SEQ ID NO: 634386 - DNA, 55 bp, Artificial; identical to SEQ ID NO: 160984
  Synthetic oligonucleotide

SEQ ID NO: 634387 - DNA, 55 bp, Artificial; identical to SEQ ID NO: 240424
  Synthetic oligonucleotide

SEQ ID NO: 634388 - DNA, 55 bp, Artificial; identical to SEQ ID NO: 153209
  Synthetic oligonucleotide

SEQ ID NO: 634389 - DNA, 58 bp, Artificial; identical to SEQ ID NO: 150281
  Synthetic oligonucleotide

SEQ ID NO: 634390 - DNA, 51 bp, Artificial; identical to SEQ ID NO: 266299
  Synthetic oligonucleotide

SEQ ID NO: 634391 - DNA, 54 bp, Artificial; identical to SEQ ID NO: 166523
  Synthetic oligonucleotide

SEQ ID NO: 634392 - DNA, 56 bp, Artificial; identical to SEQ ID NO: 191739
  Synthetic oligonucleotide

SEQ ID NO: 634393 - DNA, 55 bp, Artificial; identical to SEQ ID NO: 194436
  Synthetic oligonucleotide

SEQ ID NO: 634394 - DNA, 55 bp, Artificial; identical to SEQ ID NO: 234230
  Synthetic oligonucleotide

SEQ ID NO: 634395 - DNA, 55 bp, Artificial; identical to SEQ ID NO: 201526
  Synthetic oligonucleotide

SEQ ID NO: 634396 - DNA, 60 bp, Artificial; identical to SEQ ID NO: 225024
  Synthetic oligonucleotide

SEQ ID NO: 634397 - DNA, 56 bp, Artificial; identical to SEQ ID NO: 242038
  Synthetic oligonucleotide

SEQ ID NO: 634398 - DNA, 55 bp, Artificial; identical to SEQ ID NO: 256981
  Synthetic oligonucleotide

SEQ ID NO: 634399 - DNA, 55 bp, Artificial; identical to SEQ ID NO: 184498
  Synthetic oligonucleotide

SEQ ID NO: 634400 - DNA, 50 bp, Artificial; identical to SEQ ID NO: 145134
  Synthetic oligonucleotide

SEQ ID NO: 634401 - DNA, 60 bp, Artificial; identical to SEQ ID NO: 142174
  Synthetic oligonucleotide

SEQ ID NO: 634402 - DNA, 60 bp, Artificial; identical to SEQ ID NO: 246276
  Synthetic oligonucleotide

SEQ ID NO: 634403 - DNA, 55 bp, Artificial; identical to SEQ ID NO: 211164
  Synthetic oligonucleotide

SEQ ID NO: 634404 - DNA, 58 bp, Artificial; identical to SEQ ID NO: 209154
  Synthetic oligonucleotide

SEQ ID NO: 634405 - DNA, 50 bp, Artificial; identical to SEQ ID NO: 223849
  Synthetic oligonucleotide

SEQ ID NO: 634406 - DNA, 55 bp, Artificial; identical to SEQ ID NO: 212732
  Synthetic oligonucleotide

SEQ ID NO: 634407 - DNA, 55 bp, Artificial; identical to SEQ ID NO: 184492
  Synthetic oligonucleotide

SEQ ID NO: 634408 - DNA, 60 bp, Artificial; identical to SEQ ID NO: 243776
  Synthetic oligonucleotide

SEQ ID NO: 634409 - DNA, 52 bp, Artificial; identical to SEQ ID NO: 186151
  Synthetic oligonucleotide

SEQ ID NO: 634410 - DNA, 55 bp, Artificial; identical to SEQ ID NO: 208299
  Synthetic oligonucleotide

SEQ ID NO: 634411 - DNA, 55 bp, Artificial; identical to SEQ ID NO: 187530
  Synthetic oligonucleotide

SEQ ID NO: 634412 - DNA, 56 bp, Artificial; identical to SEQ ID NO: 180097
  Synthetic oligonucleotide

SEQ ID NO: 634413 - DNA, 60 bp, Artificial; identical to SEQ ID NO: 178783
  Synthetic oligonucleotide

SEQ ID NO: 634414 - DNA, 55 bp, Artificial; identical to SEQ ID NO: 184436
  Synthetic oligonucleotide

SEQ ID NO: 634415 - DNA, 52 bp, Artificial; identical to SEQ ID NO: 246497
  Synthetic oligonucleotide

SEQ ID NO: 634416 - DNA, 51 bp, Artificial; identical to SEQ ID NO: 170242
  Synthetic oligonucleotide

SEQ ID NO: 634417 - DNA, 55 bp, Artificial; identical to SEQ ID NO: 171283
  Synthetic oligonucleotide

SEQ ID NO: 634418 - DNA, 53 bp, Artificial; identical to SEQ ID NO: 168897
  Synthetic oligonucleotide

SEQ ID NO: 634419 - DNA, 53 bp, Artificial; identical to SEQ ID NO: 157338
  Synthetic oligonucleotide

SEQ ID NO: 634420 - DNA, 51 bp, Artificial; identical to SEQ ID NO: 241127
  Synthetic oligonucleotide

SEQ ID NO: 634421 - DNA, 55 bp, Artificial; identical to SEQ ID NO: 244441
  Synthetic oligonucleotide

SEQ ID NO: 634422 - DNA, 55 bp, Artificial; identical to SEQ ID NO: 263167
  Synthetic oligonucleotide

SEQ ID NO: 634423 - DNA, 51 bp, Artificial; identical to SEQ ID NO: 221801
  Synthetic oligonucleotide

SEQ ID NO: 634424 - DNA, 57 bp, Artificial; identical to SEQ ID NO: 179305
  Synthetic oligonucleotide

SEQ ID NO: 634425 - DNA, 57 bp, Artificial; identical to SEQ ID NO: 209207
  Synthetic oligonucleotide

SEQ ID NO: 634426 - DNA, 60 bp, Artificial; identical to SEQ ID NO: 266109
  Synthetic oligonucleotide

SEQ ID NO: 634427 - DNA, 51 bp, Artificial; identical to SEQ ID NO: 186551
  Synthetic oligonucleotide

SEQ ID NO: 634428 - DNA, 55 bp, Artificial; identical to SEQ ID NO: 256980
  Synthetic oligonucleotide

SEQ ID NO: 634429 - DNA, 60 bp, Artificial; identical to SEQ ID NO: 242036
  Synthetic oligonucleotide

SEQ ID NO: 634430 - DNA, 60 bp, Artificial; identical to SEQ ID NO: 212360
  Synthetic oligonucleotide

SEQ ID NO: 634431 - DNA, 60 bp, Artificial; identical to SEQ ID NO: 159901
  Synthetic oligonucleotide

SEQ ID NO: 634432 - DNA, 55 bp, Artificial; identical to SEQ ID NO: 158565
  Synthetic oligonucleotide

SEQ ID NO: 634433 - DNA, 59 bp, Artificial; identical to SEQ ID NO: 246854
  Synthetic oligonucleotide

SEQ ID NO: 634434 - DNA, 60 bp, Artificial; identical to SEQ ID NO: 255722
  Synthetic oligonucleotide

SEQ ID NO: 634435 - DNA, 55 bp, Artificial; identical to SEQ ID NO: 166518
  Synthetic oligonucleotide

SEQ ID NO: 634436 - DNA, 54 bp, Artificial; identical to SEQ ID NO: 202963
  Synthetic oligonucleotide

SEQ ID NO: 634437 - DNA, 60 bp, Artificial; identical to SEQ ID NO: 164578
  Synthetic oligonucleotide

SEQ ID NO: 634438 - DNA, 55 bp, Artificial; identical to SEQ ID NO: 205406
  Synthetic oligonucleotide

SEQ ID NO: 634439 - DNA, 55 bp, Artificial; identical to SEQ ID NO: 179294
  Synthetic oligonucleotide

SEQ ID NO: 634440 - DNA, 53 bp, Artificial; identical to SEQ ID NO: 179283
  Synthetic oligonucleotide

SEQ ID NO: 634441 - DNA, 55 bp, Artificial; identical to SEQ ID NO: 147559
  Synthetic oligonucleotide

SEQ ID NO: 634442 - DNA, 55 bp, Artificial; identical to SEQ ID NO: 168605
  Synthetic oligonucleotide

SEQ ID NO: 634443 - DNA, 55 bp, Artificial; identical to SEQ ID NO: 166515
  Synthetic oligonucleotide

SEQ ID NO: 634444 - DNA, 60 bp, Artificial; identical to SEQ ID NO: 144686
  Synthetic oligonucleotide

SEQ ID NO: 634445 - DNA, 55 bp, Artificial; identical to SEQ ID NO: 155195
  Synthetic oligonucleotide

SEQ ID NO: 634446 - DNA, 56 bp, Artificial; identical to SEQ ID NO: 147354
  Synthetic oligonucleotide

SEQ ID NO: 634447 - DNA, 55 bp, Artificial; identical to SEQ ID NO: 198102
  Synthetic oligonucleotide

SEQ ID NO: 634448 - DNA, 58 bp, Artificial; identical to SEQ ID NO: 179272
  Synthetic oligonucleotide

SEQ ID NO: 634449 - DNA, 53 bp, Artificial; identical to SEQ ID NO: 192082
  Synthetic oligonucleotide

SEQ ID NO: 634450 - DNA, 55 bp, Artificial; identical to SEQ ID NO: 257040
  Synthetic oligonucleotide

SEQ ID NO: 634451 - DNA, 60 bp, Artificial; identical to SEQ ID NO: 248467
  Synthetic oligonucleotide

SEQ ID NO: 634452 - DNA, 55 bp, Artificial; identical to SEQ ID NO: 208300
  Synthetic oligonucleotide

SEQ ID NO: 634453 - DNA, 52 bp, Artificial; identical to SEQ ID NO: 166513
  Synthetic oligonucleotide

SEQ ID NO: 634454 - DNA, 59 bp, Artificial; identical to SEQ ID NO: 242035
  Synthetic oligonucleotide

SEQ ID NO: 634455 - DNA, 60 bp, Artificial; identical to SEQ ID NO: 242034
  Synthetic oligonucleotide

SEQ ID NO: 634456 - DNA, 58 bp, Artificial; identical to SEQ ID NO: 166095
  Synthetic oligonucleotide

SEQ ID NO: 634457 - DNA, 55 bp, Artificial; identical to SEQ ID NO: 142588
  Synthetic oligonucleotide

SEQ ID NO: 634458 - DNA, 55 bp, Artificial; identical to SEQ ID NO: 198101
  Synthetic oligonucleotide

SEQ ID NO: 634459 - DNA, 52 bp, Artificial; identical to SEQ ID NO: 218640
  Synthetic oligonucleotide

SEQ ID NO: 634460 - DNA, 60 bp, Artificial; identical to SEQ ID NO: 246843
  Synthetic oligonucleotide

SEQ ID NO: 634461 - DNA, 56 bp, Artificial; identical to SEQ ID NO: 242033
  Synthetic oligonucleotide

SEQ ID NO: 634462 - DNA, 55 bp, Artificial; identical to SEQ ID NO: 203572
  Synthetic oligonucleotide

SEQ ID NO: 634463 - DNA, 59 bp, Artificial; identical to SEQ ID NO: 243787
  Synthetic oligonucleotide

SEQ ID NO: 634464 - DNA, 55 bp, Artificial; identical to SEQ ID NO: 153206
  Synthetic oligonucleotide

SEQ ID NO: 634465 - DNA, 55 bp, Artificial; identical to SEQ ID NO: 184462
  Synthetic oligonucleotide

SEQ ID NO: 634466 - DNA, 55 bp, Artificial; identical to SEQ ID NO: 184458
  Synthetic oligonucleotide

SEQ ID NO: 634467 - DNA, 54 bp, Artificial; identical to SEQ ID NO: 160405
  Synthetic oligonucleotide

SEQ ID NO: 634468 - DNA, 55 bp, Artificial; identical to SEQ ID NO: 187526
  Synthetic oligonucleotide

SEQ ID NO: 634469 - DNA, 55 bp, Artificial; identical to SEQ ID NO: 159315
  Synthetic oligonucleotide

SEQ ID NO: 634470 - DNA, 55 bp, Artificial; identical to SEQ ID NO: 142585
  Synthetic oligonucleotide

SEQ ID NO: 634471 - DNA, 54 bp, Artificial; identical to SEQ ID NO: 147656
  Synthetic oligonucleotide

SEQ ID NO: 634472 - DNA, 52 bp, Artificial; identical to SEQ ID NO: 141292
  Synthetic oligonucleotide

SEQ ID NO: 634473 - DNA, 52 bp, Artificial; identical to SEQ ID NO: 166510
  Synthetic oligonucleotide

SEQ ID NO: 634474 - DNA, 51 bp, Artificial; identical to SEQ ID NO: 202564
  Synthetic oligonucleotide

SEQ ID NO: 634475 - DNA, 55 bp, Artificial; identical to SEQ ID NO: 160138
  Synthetic oligonucleotide

SEQ ID NO: 634476 - DNA, 55 bp, Artificial; identical to SEQ ID NO: 211167
  Synthetic oligonucleotide

SEQ ID NO: 634477 - DNA, 55 bp, Artificial; identical to SEQ ID NO: 236442
  Synthetic oligonucleotide

SEQ ID NO: 634478 - DNA, 57 bp, Artificial; identical to SEQ ID NO: 239468
  Synthetic oligonucleotide

SEQ ID NO: 634479 - DNA, 53 bp, Artificial; identical to SEQ ID NO: 144539
  Synthetic oligonucleotide

SEQ ID NO: 634480 - DNA, 55 bp, Artificial; identical to SEQ ID NO: 224709
  Synthetic oligonucleotide

SEQ ID NO: 634481 - DNA, 55 bp, Artificial; identical to SEQ ID NO: 203108
  Synthetic oligonucleotide

SEQ ID NO: 634482 - DNA, 60 bp, Artificial; identical to SEQ ID NO: 248468
  Synthetic oligonucleotide

SEQ ID NO: 634483 - DNA, 55 bp, Artificial; identical to SEQ ID NO: 171285
  Synthetic oligonucleotide

SEQ ID NO: 634484 - DNA, 55 bp, Artificial; identical to SEQ ID NO: 187524
  Synthetic oligonucleotide

SEQ ID NO: 634485 - DNA, 60 bp, Artificial; identical to SEQ ID NO: 165112
  Synthetic oligonucleotide

SEQ ID NO: 634486 - DNA, 55 bp, Artificial; identical to SEQ ID NO: 184456
  Synthetic oligonucleotide

SEQ ID NO: 634487 - DNA, 53 bp, Artificial; identical to SEQ ID NO: 155543
  Synthetic oligonucleotide

SEQ ID NO: 634488 - DNA, 55 bp, Artificial; identical to SEQ ID NO: 198100
  Synthetic oligonucleotide

SEQ ID NO: 634489 - DNA, 55 bp, Artificial; identical to SEQ ID NO: 196921
  Synthetic oligonucleotide

SEQ ID NO: 634490 - DNA, 51 bp, Artificial; identical to SEQ ID NO: 240429
  Synthetic oligonucleotide

SEQ ID NO: 634491 - DNA, 52 bp, Artificial; identical to SEQ ID NO: 187002
  Synthetic oligonucleotide

SEQ ID NO: 634492 - DNA, 55 bp, Artificial; identical to SEQ ID NO: 203107
  Synthetic oligonucleotide

SEQ ID NO: 634493 - DNA, 52 bp, Artificial; identical to SEQ ID NO: 154597
  Synthetic oligonucleotide

SEQ ID NO: 634494 - DNA, 56 bp, Artificial; identical to SEQ ID NO: 201986
  Synthetic oligonucleotide

SEQ ID NO: 634495 - DNA, 56 bp, Artificial; identical to SEQ ID NO: 246832
  Synthetic oligonucleotide

SEQ ID NO: 634496 - DNA, 55 bp, Artificial; identical to SEQ ID NO: 249888
  Synthetic oligonucleotide

SEQ ID NO: 634497 - DNA, 55 bp, Artificial; identical to SEQ ID NO: 152565
  Synthetic oligonucleotide

SEQ ID NO: 634498 - DNA, 53 bp, Artificial; identical to SEQ ID NO: 249661
  Synthetic oligonucleotide

SEQ ID NO: 634499 - DNA, 56 bp, Artificial; identical to SEQ ID NO: 223373
  Synthetic oligonucleotide

SEQ ID NO: 634500 - DNA, 55 bp, Artificial; identical to SEQ ID NO: 238161
  Synthetic oligonucleotide

SEQ ID NO: 634501 - DNA, 59 bp, Artificial; identical to SEQ ID NO: 243929
  Synthetic oligonucleotide

SEQ ID NO: 634502 - DNA, 55 bp, Artificial; identical to SEQ ID NO: 184450
  Synthetic oligonucleotide

SEQ ID NO: 634503 - DNA, 50 bp, Artificial; identical to SEQ ID NO: 141410
  Synthetic oligonucleotide

SEQ ID NO: 634504 - DNA, 54 bp, Artificial; identical to SEQ ID NO: 207038
  Synthetic oligonucleotide

SEQ ID NO: 634505 - DNA, 55 bp, Artificial; identical to SEQ ID NO: 190182
  Synthetic oligonucleotide

SEQ ID NO: 634506 - DNA, 55 bp, Artificial; identical to SEQ ID NO: 184253
  Synthetic oligonucleotide

SEQ ID NO: 634507 - DNA, 52 bp, Artificial; identical to SEQ ID NO: 142196
  Synthetic oligonucleotide

SEQ ID NO: 634508 - DNA, 57 bp, Artificial; identical to SEQ ID NO: 179868
  Synthetic oligonucleotide

SEQ ID NO: 634509 - DNA, 51 bp, Artificial; identical to SEQ ID NO: 157829
  Synthetic oligonucleotide

SEQ ID NO: 634510 - DNA, 56 bp, Artificial; identical to SEQ ID NO: 204080
  Synthetic oligonucleotide

SEQ ID NO: 634511 - DNA, 51 bp, Artificial; identical to SEQ ID NO: 165304
  Synthetic oligonucleotide

SEQ ID NO: 634512 - DNA, 58 bp, Artificial; identical to SEQ ID NO: 170771
  Synthetic oligonucleotide

SEQ ID NO: 634513 - DNA, 56 bp, Artificial; identical to SEQ ID NO: 179217
  Synthetic oligonucleotide

SEQ ID NO: 634514 - DNA, 53 bp, Artificial; identical to SEQ ID NO: 240740
  Synthetic oligonucleotide

SEQ ID NO: 634515 - DNA, 60 bp, Artificial; identical to SEQ ID NO: 201851
  Synthetic oligonucleotide

SEQ ID NO: 634516 - DNA, 57 bp, Artificial; identical to SEQ ID NO: 207040
  Synthetic oligonucleotide

SEQ ID NO: 634517 - DNA, 54 bp, Artificial; identical to SEQ ID NO: 220746
  Synthetic oligonucleotide

SEQ ID NO: 634518 - DNA, 51 bp, Artificial; identical to SEQ ID NO: 165303
  Synthetic oligonucleotide

SEQ ID NO: 634519 - DNA, 51 bp, Artificial; identical to SEQ ID NO: 243351
  Synthetic oligonucleotide

SEQ ID NO: 634520 - DNA, 53 bp, Artificial; identical to SEQ ID NO: 170772
  Synthetic oligonucleotide

SEQ ID NO: 634521 - DNA, 52 bp, Artificial; identical to SEQ ID NO: 247983
  Synthetic oligonucleotide

SEQ ID NO: 634522 - DNA, 56 bp, Artificial; identical to SEQ ID NO: 165101
  Synthetic oligonucleotide

SEQ ID NO: 634523 - DNA, 55 bp, Artificial; identical to SEQ ID NO: 244493
  Synthetic oligonucleotide

SEQ ID NO: 634524 - DNA, 55 bp, Artificial; identical to SEQ ID NO: 244492
  Synthetic oligonucleotide

SEQ ID NO: 634525 - DNA, 55 bp, Artificial; identical to SEQ ID NO: 242898
  Synthetic oligonucleotide

SEQ ID NO: 634526 - DNA, 55 bp, Artificial; identical to SEQ ID NO: 198126
  Synthetic oligonucleotide

SEQ ID NO: 634527 - DNA, 55 bp, Artificial; identical to SEQ ID NO: 184264
  Synthetic oligonucleotide

SEQ ID NO: 634528 - DNA, 55 bp, Artificial; identical to SEQ ID NO: 184267
  Synthetic oligonucleotide

SEQ ID NO: 634529 - DNA, 58 bp, Artificial; identical to SEQ ID NO: 203376
  Synthetic oligonucleotide

SEQ ID NO: 634530 - DNA, 60 bp, Artificial; identical to SEQ ID NO: 248403
  Synthetic oligonucleotide

SEQ ID NO: 634531 - DNA, 55 bp, Artificial; identical to SEQ ID NO: 258922
  Synthetic oligonucleotide

SEQ ID NO: 634532 - DNA, 55 bp, Artificial; identical to SEQ ID NO: 211123
  Synthetic oligonucleotide

SEQ ID NO: 634533 - DNA, 60 bp, Artificial; identical to SEQ ID NO: 159828
  Synthetic oligonucleotide

SEQ ID NO: 634534 - DNA, 60 bp, Artificial; identical to SEQ ID NO: 150338
  Synthetic oligonucleotide

SEQ ID NO: 634535 - DNA, 55 bp, Artificial; identical to SEQ ID NO: 244491
  Synthetic oligonucleotide

SEQ ID NO: 634536 - DNA, 60 bp, Artificial; identical to SEQ ID NO: 142207
  Synthetic oligonucleotide

SEQ ID NO: 634537 - DNA, 60 bp, Artificial; identical to SEQ ID NO: 143761
  Synthetic oligonucleotide

SEQ ID NO: 634538 - DNA, 60 bp, Artificial; identical to SEQ ID NO: 179193
  Synthetic oligonucleotide

SEQ ID NO: 634539 - DNA, 55 bp, Artificial; identical to SEQ ID NO: 166508
  Synthetic oligonucleotide

SEQ ID NO: 634540 - DNA, 55 bp, Artificial; identical to SEQ ID NO: 252780
  Synthetic oligonucleotide

SEQ ID NO: 634541 - DNA, 54 bp, Artificial; identical to SEQ ID NO: 174823
  Synthetic oligonucleotide

SEQ ID NO: 634542 - DNA, 55 bp, Artificial; identical to SEQ ID NO: 249877
  Synthetic oligonucleotide

SEQ ID NO: 634543 - DNA, 55 bp, Artificial; identical to SEQ ID NO: 248701
  Synthetic oligonucleotide

SEQ ID NO: 634544 - DNA, 52 bp, Artificial; identical to SEQ ID NO: 199851
  Synthetic oligonucleotide

SEQ ID NO: 634545 - DNA, 55 bp, Artificial; identical to SEQ ID NO: 184269
  Synthetic oligonucleotide

SEQ ID NO: 634546 - DNA, 50 bp, Artificial; identical to SEQ ID NO: 170570
  Synthetic oligonucleotide

SEQ ID NO: 634547 - DNA, 55 bp, Artificial; identical to SEQ ID NO: 147365
  Synthetic oligonucleotide

SEQ ID NO: 634548 - DNA, 60 bp, Artificial; identical to SEQ ID NO: 179160
  Synthetic oligonucleotide

SEQ ID NO: 634549 - DNA, 55 bp, Artificial; identical to SEQ ID NO: 257037
  Synthetic oligonucleotide

SEQ ID NO: 634550 - DNA, 55 bp, Artificial; identical to SEQ ID NO: 252782
  Synthetic oligonucleotide

SEQ ID NO: 634551 - DNA, 55 bp, Artificial; identical to SEQ ID NO: 244490
  Synthetic oligonucleotide

SEQ ID NO: 634552 - DNA, 60 bp, Artificial; identical to SEQ ID NO: 143773
  Synthetic oligonucleotide

SEQ ID NO: 634553 - DNA, 51 bp, Artificial; identical to SEQ ID NO: 209752
  Synthetic oligonucleotide

SEQ ID NO: 634554 - DNA, 55 bp, Artificial; identical to SEQ ID NO: 244489
  Synthetic oligonucleotide

SEQ ID NO: 634555 - DNA, 55 bp, Artificial; identical to SEQ ID NO: 147502
  Synthetic oligonucleotide

SEQ ID NO: 634556 - DNA, 56 bp, Artificial; identical to SEQ ID NO: 243799
  Synthetic oligonucleotide

SEQ ID NO: 634557 - DNA, 55 bp, Artificial; identical to SEQ ID NO: 242899
  Synthetic oligonucleotide

SEQ ID NO: 634558 - DNA, 56 bp, Artificial; identical to SEQ ID NO: 142218
  Synthetic oligonucleotide

SEQ ID NO: 634559 - DNA, 52 bp, Artificial; identical to SEQ ID NO: 185985
  Synthetic oligonucleotide

SEQ ID NO: 634560 - DNA, 58 bp, Artificial; identical to SEQ ID NO: 223428
  Synthetic oligonucleotide

SEQ ID NO: 634561 - DNA, 55 bp, Artificial; identical to SEQ ID NO: 169537
  Synthetic oligonucleotide

SEQ ID NO: 634562 - DNA, 51 bp, Artificial; identical to SEQ ID NO: 187058
  Synthetic oligonucleotide

SEQ ID NO: 634563 - DNA, 55 bp, Artificial; identical to SEQ ID NO: 218629
  Synthetic oligonucleotide

SEQ ID NO: 634564 - DNA, 55 bp, Artificial; identical to SEQ ID NO: 191315
  Synthetic oligonucleotide

SEQ ID NO: 634565 - DNA, 58 bp, Artificial; identical to SEQ ID NO: 159936
  Synthetic oligonucleotide

SEQ ID NO: 634566 - DNA, 55 bp, Artificial; identical to SEQ ID NO: 217419
  Synthetic oligonucleotide

SEQ ID NO: 634567 - DNA, 56 bp, Artificial; identical to SEQ ID NO: 150382
  Synthetic oligonucleotide

SEQ ID NO: 634568 - DNA, 55 bp, Artificial; identical to SEQ ID NO: 202021
  Synthetic oligonucleotide

SEQ ID NO: 634569 - DNA, 56 bp, Artificial; identical to SEQ ID NO: 203402
  Synthetic oligonucleotide

SEQ ID NO: 634570 - DNA, 57 bp, Artificial; identical to SEQ ID NO: 201850
  Synthetic oligonucleotide

SEQ ID NO: 634571 - DNA, 55 bp, Artificial; identical to SEQ ID NO: 201189
  Synthetic oligonucleotide

SEQ ID NO: 634572 - DNA, 56 bp, Artificial; identical to SEQ ID NO: 237976
  Synthetic oligonucleotide

SEQ ID NO: 634573 - DNA, 54 bp, Artificial; identical to SEQ ID NO: 197359
  Synthetic oligonucleotide

SEQ ID NO: 634574 - DNA, 60 bp, Artificial; identical to SEQ ID NO: 248405
  Synthetic oligonucleotide

SEQ ID NO: 634575 - DNA, 55 bp, Artificial; identical to SEQ ID NO: 184277
  Synthetic oligonucleotide

SEQ ID NO: 634576 - DNA, 54 bp, Artificial; identical to SEQ ID NO: 240651
  Synthetic oligonucleotide

SEQ ID NO: 634577 - DNA, 57 bp, Artificial; identical to SEQ ID NO: 149959
  Synthetic oligonucleotide

SEQ ID NO: 634578 - DNA, 53 bp, Artificial; identical to SEQ ID NO: 257036
  Synthetic oligonucleotide

SEQ ID NO: 634579 - DNA, 60 bp, Artificial; identical to SEQ ID NO: 156687
  Synthetic oligonucleotide

SEQ ID NO: 634580 - DNA, 55 bp, Artificial; identical to SEQ ID NO: 184276
  Synthetic oligonucleotide

SEQ ID NO: 634581 - DNA, 55 bp, Artificial; identical to SEQ ID NO: 184275
  Synthetic oligonucleotide

SEQ ID NO: 634582 - DNA, 55 bp, Artificial; identical to SEQ ID NO: 203624
  Synthetic oligonucleotide

SEQ ID NO: 634583 - DNA, 56 bp, Artificial; identical to SEQ ID NO: 233354
  Synthetic oligonucleotide

SEQ ID NO: 634584 - DNA, 55 bp, Artificial; identical to SEQ ID NO: 151565
  Synthetic oligonucleotide

SEQ ID NO: 634585 - DNA, 55 bp, Artificial; identical to SEQ ID NO: 221294
  Synthetic oligonucleotide

SEQ ID NO: 634586 - DNA, 51 bp, Artificial; identical to SEQ ID NO: 206492
  Synthetic oligonucleotide

SEQ ID NO: 634587 - DNA, 55 bp, Artificial; identical to SEQ ID NO: 162012
  Synthetic oligonucleotide

SEQ ID NO: 634588 - DNA, 55 bp, Artificial; identical to SEQ ID NO: 222613
  Synthetic oligonucleotide

SEQ ID NO: 634589 - DNA, 55 bp, Artificial; identical to SEQ ID NO: 191840
  Synthetic oligonucleotide

SEQ ID NO: 634590 - DNA, 55 bp, Artificial; identical to SEQ ID NO: 153203
  Synthetic oligonucleotide

SEQ ID NO: 634591 - DNA, 50 bp, Artificial; identical to SEQ ID NO: 141389
  Synthetic oligonucleotide

SEQ ID NO: 634592 - DNA, 57 bp, Artificial; identical to SEQ ID NO: 208629
  Synthetic oligonucleotide

SEQ ID NO: 634593 - DNA, 55 bp, Artificial; identical to SEQ ID NO: 184220
  Synthetic oligonucleotide

SEQ ID NO: 634594 - DNA, 54 bp, Artificial; identical to SEQ ID NO: 157238
  Synthetic oligonucleotide

SEQ ID NO: 634595 - DNA, 55 bp, Artificial; identical to SEQ ID NO: 198099
  Synthetic oligonucleotide

SEQ ID NO: 634596 - DNA, 55 bp, Artificial; identical to SEQ ID NO: 159323
  Synthetic oligonucleotide

SEQ ID NO: 634597 - DNA, 52 bp, Artificial; identical to SEQ ID NO: 190880
  Synthetic oligonucleotide

SEQ ID NO: 634598 - DNA, 55 bp, Artificial; identical to SEQ ID NO: 168609
  Synthetic oligonucleotide

SEQ ID NO: 634599 - DNA, 55 bp, Artificial; identical to SEQ ID NO: 242900
  Synthetic oligonucleotide

SEQ ID NO: 634600 - DNA, 55 bp, Artificial; identical to SEQ ID NO: 202023
  Synthetic oligonucleotide

SEQ ID NO: 634601 - DNA, 52 bp, Artificial; identical to SEQ ID NO: 189176
  Synthetic oligonucleotide

SEQ ID NO: 634602 - DNA, 57 bp, Artificial; identical to SEQ ID NO: 166911
  Synthetic oligonucleotide

SEQ ID NO: 634603 - DNA, 55 bp, Artificial; identical to SEQ ID NO: 160136
  Synthetic oligonucleotide

SEQ ID NO: 634604 - DNA, 55 bp, Artificial; identical to SEQ ID NO: 166861
  Synthetic oligonucleotide

SEQ ID NO: 634605 - DNA, 55 bp, Artificial; identical to SEQ ID NO: 184222
  Synthetic oligonucleotide

SEQ ID NO: 634606 - DNA, 55 bp, Artificial; identical to SEQ ID NO: 205369
  Synthetic oligonucleotide

SEQ ID NO: 634607 - DNA, 55 bp, Artificial; identical to SEQ ID NO: 154340
  Synthetic oligonucleotide

SEQ ID NO: 634608 - DNA, 59 bp, Artificial; identical to SEQ ID NO: 194095
  Synthetic oligonucleotide

SEQ ID NO: 634609 - DNA, 55 bp, Artificial; identical to SEQ ID NO: 171290
  Synthetic oligonucleotide

SEQ ID NO: 634610 - DNA, 60 bp, Artificial; identical to SEQ ID NO: 198115
  Synthetic oligonucleotide

SEQ ID NO: 634611 - DNA, 55 bp, Artificial; identical to SEQ ID NO: 184226
  Synthetic oligonucleotide

SEQ ID NO: 634612 - DNA, 55 bp, Artificial; identical to SEQ ID NO: 159328
  Synthetic oligonucleotide

SEQ ID NO: 634613 - DNA, 55 bp, Artificial; identical to SEQ ID NO: 257031
  Synthetic oligonucleotide

SEQ ID NO: 634614 - DNA, 55 bp, Artificial; identical to SEQ ID NO: 252786
  Synthetic oligonucleotide

SEQ ID NO: 634615 - DNA, 53 bp, Artificial; identical to SEQ ID NO: 195020
  Synthetic oligonucleotide

SEQ ID NO: 634616 - DNA, 52 bp, Artificial; identical to SEQ ID NO: 187003
  Synthetic oligonucleotide

SEQ ID NO: 634617 - DNA, 55 bp, Artificial; identical to SEQ ID NO: 208302
  Synthetic oligonucleotide

SEQ ID NO: 634618 - DNA, 55 bp, Artificial; identical to SEQ ID NO: 240436
  Synthetic oligonucleotide

SEQ ID NO: 634619 - DNA, 52 bp, Artificial; identical to SEQ ID NO: 201691
  Synthetic oligonucleotide

SEQ ID NO: 634620 - DNA, 55 bp, Artificial; identical to SEQ ID NO: 198097
  Synthetic oligonucleotide

SEQ ID NO: 634621 - DNA, 59 bp, Artificial; identical to SEQ ID NO: 170775
  Synthetic oligonucleotide

SEQ ID NO: 634622 - DNA, 52 bp, Artificial; identical to SEQ ID NO: 240887
  Synthetic oligonucleotide

SEQ ID NO: 634623 - DNA, 55 bp, Artificial; identical to SEQ ID NO: 188201
  Synthetic oligonucleotide

SEQ ID NO: 634624 - DNA, 55 bp, Artificial; identical to SEQ ID NO: 166244
  Synthetic oligonucleotide

SEQ ID NO: 634625 - DNA, 55 bp, Artificial; identical to SEQ ID NO: 205372
  Synthetic oligonucleotide

SEQ ID NO: 634626 - DNA, 51 bp, Artificial; identical to SEQ ID NO: 237123
  Synthetic oligonucleotide

SEQ ID NO: 634627 - DNA, 55 bp, Artificial; identical to SEQ ID NO: 240374
  Synthetic oligonucleotide

SEQ ID NO: 634628 - DNA, 60 bp, Artificial; identical to SEQ ID NO: 257434
  Synthetic oligonucleotide

SEQ ID NO: 634629 - DNA, 55 bp, Artificial; identical to SEQ ID NO: 188890
  Synthetic oligonucleotide

SEQ ID NO: 634630 - DNA, 55 bp, Artificial; identical to SEQ ID NO: 257571
  Synthetic oligonucleotide

SEQ ID NO: 634631 - DNA, 55 bp, Artificial; identical to SEQ ID NO: 144414
  Synthetic oligonucleotide

SEQ ID NO: 634632 - DNA, 59 bp, Artificial; identical to SEQ ID NO: 168163
  Synthetic oligonucleotide

SEQ ID NO: 634633 - DNA, 55 bp, Artificial; identical to SEQ ID NO: 220686
  Synthetic oligonucleotide

SEQ ID NO: 634634 - DNA, 55 bp, Artificial; identical to SEQ ID NO: 244483
  Synthetic oligonucleotide

SEQ ID NO: 634635 - DNA, 55 bp, Artificial; identical to SEQ ID NO: 184236
  Synthetic oligonucleotide

SEQ ID NO: 634636 - DNA, 51 bp, Artificial; identical to SEQ ID NO: 155598
  Synthetic oligonucleotide

SEQ ID NO: 634637 - DNA, 55 bp, Artificial; identical to SEQ ID NO: 162022
  Synthetic oligonucleotide

SEQ ID NO: 634638 - DNA, 55 bp, Artificial; identical to SEQ ID NO: 159330
  Synthetic oligonucleotide

SEQ ID NO: 634639 - DNA, 60 bp, Artificial; identical to SEQ ID NO: 149971
  Synthetic oligonucleotide

SEQ ID NO: 634640 - DNA, 55 bp, Artificial; identical to SEQ ID NO: 205376
  Synthetic oligonucleotide

SEQ ID NO: 634641 - DNA, 60 bp, Artificial; identical to SEQ ID NO: 258904
  Synthetic oligonucleotide

SEQ ID NO: 634642 - DNA, 55 bp, Artificial; identical to SEQ ID NO: 242902
  Synthetic oligonucleotide

SEQ ID NO: 634643 - DNA, 51 bp, Artificial; identical to SEQ ID NO: 186595
  Synthetic oligonucleotide

SEQ ID NO: 634644 - DNA, 55 bp, Artificial; identical to SEQ ID NO: 203622
  Synthetic oligonucleotide

SEQ ID NO: 634645 - DNA, 55 bp, Artificial; identical to SEQ ID NO: 146565
  Synthetic oligonucleotide

SEQ ID NO: 634646 - DNA, 55 bp, Artificial; identical to SEQ ID NO: 142583
  Synthetic oligonucleotide

SEQ ID NO: 634647 - DNA, 55 bp, Artificial; identical to SEQ ID NO: 147547
  Synthetic oligonucleotide

SEQ ID NO: 634648 - DNA, 55 bp, Artificial; identical to SEQ ID NO: 159333
  Synthetic oligonucleotide

SEQ ID NO: 634649 - DNA, 57 bp, Artificial; identical to SEQ ID NO: 153052
  Synthetic oligonucleotide

SEQ ID NO: 634650 - DNA, 53 bp, Artificial; identical to SEQ ID NO: 195017
  Synthetic oligonucleotide

SEQ ID NO: 634651 - DNA, 55 bp, Artificial; identical to SEQ ID NO: 161984
  Synthetic oligonucleotide

SEQ ID NO: 634652 - DNA, 55 bp, Artificial; identical to SEQ ID NO: 184243
  Synthetic oligonucleotide

SEQ ID NO: 634653 - DNA, 53 bp, Artificial; identical to SEQ ID NO: 164817
  Synthetic oligonucleotide

SEQ ID NO: 634654 - DNA, 54 bp, Artificial; identical to SEQ ID NO: 171291
  Synthetic oligonucleotide

SEQ ID NO: 634655 - DNA, 55 bp, Artificial; identical to SEQ ID NO: 238194
  Synthetic oligonucleotide

SEQ ID NO: 634656 - DNA, 53 bp, Artificial; identical to SEQ ID NO: 209648
  Synthetic oligonucleotide

SEQ ID NO: 634657 - DNA, 55 bp, Artificial; identical to SEQ ID NO: 190141
  Synthetic oligonucleotide

SEQ ID NO: 634658 - DNA, 55 bp, Artificial; identical to SEQ ID NO: 160135
  Synthetic oligonucleotide

SEQ ID NO: 634659 - DNA, 55 bp, Artificial; identical to SEQ ID NO: 217420
  Synthetic oligonucleotide

SEQ ID NO: 634660 - DNA, 55 bp, Artificial; identical to SEQ ID NO: 202030
  Synthetic oligonucleotide

SEQ ID NO: 634661 - DNA, 60 bp, Artificial; identical to SEQ ID NO: 248406
  Synthetic oligonucleotide

SEQ ID NO: 634662 - DNA, 55 bp, Artificial; identical to SEQ ID NO: 155321
  Synthetic oligonucleotide

SEQ ID NO: 634663 - DNA, 55 bp, Artificial; identical to SEQ ID NO: 159334
  Synthetic oligonucleotide

SEQ ID NO: 634664 - DNA, 55 bp, Artificial; identical to SEQ ID NO: 188889
  Synthetic oligonucleotide

SEQ ID NO: 634665 - DNA, 55 bp, Artificial; identical to SEQ ID NO: 190144
  Synthetic oligonucleotide

SEQ ID NO: 634666 - DNA, 55 bp, Artificial; identical to SEQ ID NO: 196137
  Synthetic oligonucleotide

SEQ ID NO: 634667 - DNA, 55 bp, Artificial; identical to SEQ ID NO: 248706
  Synthetic oligonucleotide

SEQ ID NO: 634668 - DNA, 55 bp, Artificial; identical to SEQ ID NO: 257570
  Synthetic oligonucleotide

SEQ ID NO: 634669 - DNA, 55 bp, Artificial; identical to SEQ ID NO: 257025
  Synthetic oligonucleotide

SEQ ID NO: 634670 - DNA, 54 bp, Artificial; identical to SEQ ID NO: 198104
  Synthetic oligonucleotide

SEQ ID NO: 634671 - DNA, 50 bp, Artificial; identical to SEQ ID NO: 255880
  Synthetic oligonucleotide

SEQ ID NO: 634672 - DNA, 60 bp, Artificial; identical to SEQ ID NO: 212362
  Synthetic oligonucleotide

SEQ ID NO: 634673 - DNA, 55 bp, Artificial; identical to SEQ ID NO: 196924
  Synthetic oligonucleotide

SEQ ID NO: 634674 - DNA, 57 bp, Artificial; identical to SEQ ID NO: 225479
  Synthetic oligonucleotide

SEQ ID NO: 634675 - DNA, 55 bp, Artificial; identical to SEQ ID NO: 184246
  Synthetic oligonucleotide

SEQ ID NO: 634676 - DNA, 60 bp, Artificial; identical to SEQ ID NO: 178461
  Synthetic oligonucleotide

SEQ ID NO: 634677 - DNA, 55 bp, Artificial; identical to SEQ ID NO: 198095
  Synthetic oligonucleotide

SEQ ID NO: 634678 - DNA, 55 bp, Artificial; identical to SEQ ID NO: 211126
  Synthetic oligonucleotide

SEQ ID NO: 634679 - DNA, 57 bp, Artificial; identical to SEQ ID NO: 243821
  Synthetic oligonucleotide

SEQ ID NO: 634680 - DNA, 55 bp, Artificial; identical to SEQ ID NO: 242958
  Synthetic oligonucleotide

SEQ ID NO: 634681 - DNA, 55 bp, Artificial; identical to SEQ ID NO: 184250
  Synthetic oligonucleotide

SEQ ID NO: 634682 - DNA, 55 bp, Artificial; identical to SEQ ID NO: 257023
  Synthetic oligonucleotide

SEQ ID NO: 634683 - DNA, 55 bp, Artificial; identical to SEQ ID NO: 240375
  Synthetic oligonucleotide

SEQ ID NO: 634684 - DNA, 58 bp, Artificial; identical to SEQ ID NO: 255988
  Synthetic oligonucleotide

SEQ ID NO: 634685 - DNA, 55 bp, Artificial; identical to SEQ ID NO: 184251
  Synthetic oligonucleotide

SEQ ID NO: 634686 - DNA, 51 bp, Artificial; identical to SEQ ID NO: 157827
  Synthetic oligonucleotide

SEQ ID NO: 634687 - DNA, 55 bp, Artificial; identical to SEQ ID NO: 196925
  Synthetic oligonucleotide

SEQ ID NO: 634688 - DNA, 55 bp, Artificial; identical to SEQ ID NO: 147545
  Synthetic oligonucleotide

SEQ ID NO: 634689 - DNA, 55 bp, Artificial; identical to SEQ ID NO: 217422
  Synthetic oligonucleotide

SEQ ID NO: 634690 - DNA, 56 bp, Artificial; identical to SEQ ID NO: 157876
  Synthetic oligonucleotide

SEQ ID NO: 634691 - DNA, 51 bp, Artificial; identical to SEQ ID NO: 255636
  Synthetic oligonucleotide

SEQ ID NO: 634692 - DNA, 55 bp, Artificial; identical to SEQ ID NO: 198094
  Synthetic oligonucleotide

SEQ ID NO: 634693 - DNA, 55 bp, Artificial; identical to SEQ ID NO: 142582
  Synthetic oligonucleotide

SEQ ID NO: 634694 - DNA, 55 bp, Artificial; identical to SEQ ID NO: 257022
  Synthetic oligonucleotide

SEQ ID NO: 634695 - DNA, 52 bp, Artificial; identical to SEQ ID NO: 203966
  Synthetic oligonucleotide

SEQ ID NO: 634696 - DNA, 55 bp, Artificial; identical to SEQ ID NO: 212700
  Synthetic oligonucleotide

SEQ ID NO: 634697 - DNA, 55 bp, Artificial; identical to SEQ ID NO: 212701
  Synthetic oligonucleotide

SEQ ID NO: 634698 - DNA, 60 bp, Artificial; identical to SEQ ID NO: 246776
  Synthetic oligonucleotide

SEQ ID NO: 634699 - DNA, 55 bp, Artificial; identical to SEQ ID NO: 166236
  Synthetic oligonucleotide

SEQ ID NO: 634700 - DNA, 60 bp, Artificial; identical to SEQ ID NO: 201848
  Synthetic oligonucleotide

SEQ ID NO: 634701 - DNA, 52 bp, Artificial; identical to SEQ ID NO: 170115
  Synthetic oligonucleotide

SEQ ID NO: 634702 - DNA, 55 bp, Artificial; identical to SEQ ID NO: 159294
  Synthetic oligonucleotide

SEQ ID NO: 634703 - DNA, 52 bp, Artificial; identical to SEQ ID NO: 178427
  Synthetic oligonucleotide

SEQ ID NO: 634704 - DNA, 55 bp, Artificial; identical to SEQ ID NO: 184325
  Synthetic oligonucleotide

SEQ ID NO: 634705 - DNA, 55 bp, Artificial; identical to SEQ ID NO: 257567
  Synthetic oligonucleotide

SEQ ID NO: 634706 - DNA, 55 bp, Artificial; identical to SEQ ID NO: 184330
  Synthetic oligonucleotide

SEQ ID NO: 634707 - DNA, 55 bp, Artificial; identical to SEQ ID NO: 184331
  Synthetic oligonucleotide

SEQ ID NO: 634708 - DNA, 55 bp, Artificial; identical to SEQ ID NO: 198092
  Synthetic oligonucleotide

SEQ ID NO: 634709 - DNA, 60 bp, Artificial; identical to SEQ ID NO: 241960
  Synthetic oligonucleotide

SEQ ID NO: 634710 - DNA, 55 bp, Artificial; identical to SEQ ID NO: 236451
  Synthetic oligonucleotide

SEQ ID NO: 634711 - DNA, 55 bp, Artificial; identical to SEQ ID NO: 153201
  Synthetic oligonucleotide

SEQ ID NO: 634712 - DNA, 52 bp, Artificial; identical to SEQ ID NO: 255563
  Synthetic oligonucleotide

SEQ ID NO: 634713 - DNA, 56 bp, Artificial; identical to SEQ ID NO: 180026
  Synthetic oligonucleotide

SEQ ID NO: 634714 - DNA, 55 bp, Artificial; identical to SEQ ID NO: 144032
  Synthetic oligonucleotide

SEQ ID NO: 634715 - DNA, 55 bp, Artificial; identical to SEQ ID NO: 155194
  Synthetic oligonucleotide

SEQ ID NO: 634716 - DNA, 55 bp, Artificial; identical to SEQ ID NO: 222614
  Synthetic oligonucleotide

SEQ ID NO: 634717 - DNA, 55 bp, Artificial; identical to SEQ ID NO: 159295
  Synthetic oligonucleotide

SEQ ID NO: 634718 - DNA, 51 bp, Artificial; identical to SEQ ID NO: 235152
  Synthetic oligonucleotide

SEQ ID NO: 634719 - DNA, 55 bp, Artificial; identical to SEQ ID NO: 147584
  Synthetic oligonucleotide

SEQ ID NO: 634720 - DNA, 54 bp, Artificial; identical to SEQ ID NO: 238593
  Synthetic oligonucleotide

SEQ ID NO: 634721 - DNA, 55 bp, Artificial; identical to SEQ ID NO: 257021
  Synthetic oligonucleotide

SEQ ID NO: 634722 - DNA, 55 bp, Artificial; identical to SEQ ID NO: 266189
  Synthetic oligonucleotide

SEQ ID NO: 634723 - DNA, 55 bp, Artificial; identical to SEQ ID NO: 196927
  Synthetic oligonucleotide

SEQ ID NO: 634724 - DNA, 55 bp, Artificial; identical to SEQ ID NO: 240377
  Synthetic oligonucleotide

SEQ ID NO: 634725 - DNA, 55 bp, Artificial; identical to SEQ ID NO: 194442
  Synthetic oligonucleotide

SEQ ID NO: 634726 - DNA, 60 bp, Artificial; identical to SEQ ID NO: 178372
  Synthetic oligonucleotide

SEQ ID NO: 634727 - DNA, 51 bp, Artificial; identical to SEQ ID NO: 169406
  Synthetic oligonucleotide

SEQ ID NO: 634728 - DNA, 55 bp, Artificial; identical to SEQ ID NO: 184339
  Synthetic oligonucleotide

SEQ ID NO: 634729 - DNA, 55 bp, Artificial; identical to SEQ ID NO: 172926
  Synthetic oligonucleotide

SEQ ID NO: 634730 - DNA, 55 bp, Artificial; identical to SEQ ID NO: 219669
  Synthetic oligonucleotide

SEQ ID NO: 634731 - DNA, 51 bp, Artificial; identical to SEQ ID NO: 237199
  Synthetic oligonucleotide

SEQ ID NO: 634732 - DNA, 55 bp, Artificial; identical to SEQ ID NO: 159297
  Synthetic oligonucleotide

SEQ ID NO: 634733 - DNA, 55 bp, Artificial; identical to SEQ ID NO: 147583
  Synthetic oligonucleotide

SEQ ID NO: 634734 - DNA, 59 bp, Artificial; identical to SEQ ID NO: 142229
  Synthetic oligonucleotide

SEQ ID NO: 634735 - DNA, 55 bp, Artificial; identical to SEQ ID NO: 171268
  Synthetic oligonucleotide

SEQ ID NO: 634736 - DNA, 60 bp, Artificial; identical to SEQ ID NO: 243832
  Synthetic oligonucleotide

SEQ ID NO: 634737 - DNA, 60 bp, Artificial; identical to SEQ ID NO: 198093
  Synthetic oligonucleotide

SEQ ID NO: 634738 - DNA, 55 bp, Artificial; identical to SEQ ID NO: 221313
  Synthetic oligonucleotide

SEQ ID NO: 634739 - DNA, 52 bp, Artificial; identical to SEQ ID NO: 147096
  Synthetic oligonucleotide

SEQ ID NO: 634740 - DNA, 54 bp, Artificial; identical to SEQ ID NO: 207695
  Synthetic oligonucleotide

SEQ ID NO: 634741 - DNA, 55 bp, Artificial; identical to SEQ ID NO: 160133
  Synthetic oligonucleotide

SEQ ID NO: 634742 - DNA, 55 bp, Artificial; identical to SEQ ID NO: 208304
  Synthetic oligonucleotide

SEQ ID NO: 634743 - DNA, 55 bp, Artificial; identical to SEQ ID NO: 198091
  Synthetic oligonucleotide

SEQ ID NO: 634744 - DNA, 55 bp, Artificial; identical to SEQ ID NO: 147577
  Synthetic oligonucleotide

SEQ ID NO: 634745 - DNA, 53 bp, Artificial; identical to SEQ ID NO: 216640
  Synthetic oligonucleotide

SEQ ID NO: 634746 - DNA, 55 bp, Artificial; identical to SEQ ID NO: 244475
  Synthetic oligonucleotide

SEQ ID NO: 634747 - DNA, 57 bp, Artificial; identical to SEQ ID NO: 198082
  Synthetic oligonucleotide

SEQ ID NO: 634748 - DNA, 60 bp, Artificial; identical to SEQ ID NO: 170764
  Synthetic oligonucleotide

SEQ ID NO: 634749 - DNA, 56 bp, Artificial; identical to SEQ ID NO: 256066
  Synthetic oligonucleotide

SEQ ID NO: 634750 - DNA, 55 bp, Artificial; identical to SEQ ID NO: 198090
  Synthetic oligonucleotide

SEQ ID NO: 634751 - DNA, 55 bp, Artificial; identical to SEQ ID NO: 184355
  Synthetic oligonucleotide

SEQ ID NO: 634752 - DNA, 55 bp, Artificial; identical to SEQ ID NO: 198089
  Synthetic oligonucleotide

SEQ ID NO: 634753 - DNA, 55 bp, Artificial; identical to SEQ ID NO: 154455
  Synthetic oligonucleotide

SEQ ID NO: 634754 - DNA, 55 bp, Artificial; identical to SEQ ID NO: 240378
  Synthetic oligonucleotide

SEQ ID NO: 634755 - DNA, 55 bp, Artificial; identical to SEQ ID NO: 160132
  Synthetic oligonucleotide

SEQ ID NO: 634756 - DNA, 55 bp, Artificial; identical to SEQ ID NO: 233403
  Synthetic oligonucleotide

SEQ ID NO: 634757 - DNA, 55 bp, Artificial; identical to SEQ ID NO: 166266
  Synthetic oligonucleotide

SEQ ID NO: 634758 - DNA, 55 bp, Artificial; identical to SEQ ID NO: 234233
  Synthetic oligonucleotide

SEQ ID NO: 634759 - DNA, 54 bp, Artificial; identical to SEQ ID NO: 238585
  Synthetic oligonucleotide

SEQ ID NO: 634760 - DNA, 60 bp, Artificial; identical to SEQ ID NO: 248410
  Synthetic oligonucleotide

SEQ ID NO: 634761 - DNA, 51 bp, Artificial; identical to SEQ ID NO: 144576
  Synthetic oligonucleotide

SEQ ID NO: 634762 - DNA, 52 bp, Artificial; identical to SEQ ID NO: 255549
  Synthetic oligonucleotide

SEQ ID NO: 634763 - DNA, 55 bp, Artificial; identical to SEQ ID NO: 258993
  Synthetic oligonucleotide

SEQ ID NO: 634764 - DNA, 55 bp, Artificial; identical to SEQ ID NO: 257565
  Synthetic oligonucleotide

SEQ ID NO: 634765 - DNA, 50 bp, Artificial; identical to SEQ ID NO: 255954
  Synthetic oligonucleotide

SEQ ID NO: 634766 - DNA, 55 bp, Artificial; identical to SEQ ID NO: 224718
  Synthetic oligonucleotide

SEQ ID NO: 634767 - DNA, 50 bp, Artificial; identical to SEQ ID NO: 189299
  Synthetic oligonucleotide

SEQ ID NO: 634768 - DNA, 55 bp, Artificial; identical to SEQ ID NO: 159299
  Synthetic oligonucleotide

SEQ ID NO: 634769 - DNA, 55 bp, Artificial; identical to SEQ ID NO: 217423
  Synthetic oligonucleotide

SEQ ID NO: 634770 - DNA, 55 bp, Artificial; identical to SEQ ID NO: 257020
  Synthetic oligonucleotide

SEQ ID NO: 634771 - DNA, 59 bp, Artificial; identical to SEQ ID NO: 241958
  Synthetic oligonucleotide

SEQ ID NO: 634772 - DNA, 55 bp, Artificial; identical to SEQ ID NO: 257018
  Synthetic oligonucleotide

SEQ ID NO: 634773 - DNA, 55 bp, Artificial; identical to SEQ ID NO: 217424
  Synthetic oligonucleotide

SEQ ID NO: 634774 - DNA, 55 bp, Artificial; identical to SEQ ID NO: 244474
  Synthetic oligonucleotide

SEQ ID NO: 634775 - DNA, 55 bp, Artificial; identical to SEQ ID NO: 174441
  Synthetic oligonucleotide

SEQ ID NO: 634776 - DNA, 51 bp, Artificial; identical to SEQ ID NO: 241136
  Synthetic oligonucleotide

SEQ ID NO: 634777 - DNA, 55 bp, Artificial; identical to SEQ ID NO: 191842
  Synthetic oligonucleotide

SEQ ID NO: 634778 - DNA, 57 bp, Artificial; identical to SEQ ID NO: 239416
  Synthetic oligonucleotide

SEQ ID NO: 634779 - DNA, 55 bp, Artificial; identical to SEQ ID NO: 184346
  Synthetic oligonucleotide

SEQ ID NO: 634780 - DNA, 50 bp, Artificial; identical to SEQ ID NO: 198088
  Synthetic oligonucleotide

SEQ ID NO: 634781 - DNA, 54 bp, Artificial; identical to SEQ ID NO: 171313
  Synthetic oligonucleotide

SEQ ID NO: 634782 - DNA, 56 bp, Artificial; identical to SEQ ID NO: 206839
  Synthetic oligonucleotide

SEQ ID NO: 634783 - DNA, 56 bp, Artificial; identical to SEQ ID NO: 189102
  Synthetic oligonucleotide

SEQ ID NO: 634784 - DNA, 54 bp, Artificial; identical to SEQ ID NO: 153688
  Synthetic oligonucleotide

SEQ ID NO: 634785 - DNA, 55 bp, Artificial; identical to SEQ ID NO: 198087
  Synthetic oligonucleotide

SEQ ID NO: 634786 - DNA, 55 bp, Artificial; identical to SEQ ID NO: 248714
  Synthetic oligonucleotide

SEQ ID NO: 634787 - DNA, 55 bp, Artificial; identical to SEQ ID NO: 144415
  Synthetic oligonucleotide

SEQ ID NO: 634788 - DNA, 55 bp, Artificial; identical to SEQ ID NO: 166255
  Synthetic oligonucleotide

SEQ ID NO: 634789 - DNA, 58 bp, Artificial; identical to SEQ ID NO: 243843
  Synthetic oligonucleotide

SEQ ID NO: 634790 - DNA, 55 bp, Artificial; identical to SEQ ID NO: 201783
  Synthetic oligonucleotide

SEQ ID NO: 634791 - DNA, 52 bp, Artificial; identical to SEQ ID NO: 205705
  Synthetic oligonucleotide

SEQ ID NO: 634792 - DNA, 55 bp, Artificial; identical to SEQ ID NO: 198147
  Synthetic oligonucleotide

SEQ ID NO: 634793 - DNA, 51 bp, Artificial; identical to SEQ ID NO: 223798
  Synthetic oligonucleotide

SEQ ID NO: 634794 - DNA, 60 bp, Artificial; identical to SEQ ID NO: 257433
  Synthetic oligonucleotide

SEQ ID NO: 634795 - DNA, 55 bp, Artificial; identical to SEQ ID NO: 198146
  Synthetic oligonucleotide

SEQ ID NO: 634796 - DNA, 58 bp, Artificial; identical to SEQ ID NO: 192001
  Synthetic oligonucleotide

SEQ ID NO: 634797 - DNA, 55 bp, Artificial; identical to SEQ ID NO: 184344
  Synthetic oligonucleotide

SEQ ID NO: 634798 - DNA, 52 bp, Artificial; identical to SEQ ID NO: 209663
  Synthetic oligonucleotide

SEQ ID NO: 634799 - DNA, 55 bp, Artificial; identical to SEQ ID NO: 187512
  Synthetic oligonucleotide

SEQ ID NO: 634800 - DNA, 51 bp, Artificial; identical to SEQ ID NO: 223800
  Synthetic oligonucleotide

SEQ ID NO: 634801 - DNA, 55 bp, Artificial; identical to SEQ ID NO: 221310
  Synthetic oligonucleotide

SEQ ID NO: 634802 - DNA, 56 bp, Artificial; identical to SEQ ID NO: 171091
  Synthetic oligonucleotide

SEQ ID NO: 634803 - DNA, 55 bp, Artificial; identical to SEQ ID NO: 252784
  Synthetic oligonucleotide

SEQ ID NO: 634804 - DNA, 58 bp, Artificial; identical to SEQ ID NO: 246754
  Synthetic oligonucleotide

SEQ ID NO: 634805 - DNA, 55 bp, Artificial; identical to SEQ ID NO: 161977
  Synthetic oligonucleotide

SEQ ID NO: 634806 - DNA, 52 bp, Artificial; identical to SEQ ID NO: 201379
  Synthetic oligonucleotide

SEQ ID NO: 634807 - DNA, 55 bp, Artificial; identical to SEQ ID NO: 153194
  Synthetic oligonucleotide

SEQ ID NO: 634808 - DNA, 55 bp, Artificial; identical to SEQ ID NO: 241956
  Synthetic oligonucleotide

SEQ ID NO: 634809 - DNA, 54 bp, Artificial; identical to SEQ ID NO: 246111
  Synthetic oligonucleotide

SEQ ID NO: 634810 - DNA, 55 bp, Artificial; identical to SEQ ID NO: 235123
  Synthetic oligonucleotide

SEQ ID NO: 634811 - DNA, 55 bp, Artificial; identical to SEQ ID NO: 240380
  Synthetic oligonucleotide

SEQ ID NO: 634812 - DNA, 58 bp, Artificial; identical to SEQ ID NO: 160959
  Synthetic oligonucleotide

SEQ ID NO: 634813 - DNA, 55 bp, Artificial; identical to SEQ ID NO: 253798
  Synthetic oligonucleotide

SEQ ID NO: 634814 - DNA, 53 bp, Artificial; identical to SEQ ID NO: 220691
  Synthetic oligonucleotide

SEQ ID NO: 634815 - DNA, 53 bp, Artificial; identical to SEQ ID NO: 258104
  Synthetic oligonucleotide

SEQ ID NO: 634816 - DNA, 55 bp, Artificial; identical to SEQ ID NO: 190147
  Synthetic oligonucleotide

SEQ ID NO: 634817 - DNA, 55 bp, Artificial; identical to SEQ ID NO: 198145
  Synthetic oligonucleotide

SEQ ID NO: 634818 - DNA, 55 bp, Artificial; identical to SEQ ID NO: 197319
  Synthetic oligonucleotide

SEQ ID NO: 634819 - DNA, 55 bp, Artificial; identical to SEQ ID NO: 238129
  Synthetic oligonucleotide

SEQ ID NO: 634820 - DNA, 55 bp, Artificial; identical to SEQ ID NO: 209278
  Synthetic oligonucleotide

SEQ ID NO: 634821 - DNA, 55 bp, Artificial; identical to SEQ ID NO: 240382
  Synthetic oligonucleotide

SEQ ID NO: 634822 - DNA, 59 bp, Artificial; identical to SEQ ID NO: 153843
  Synthetic oligonucleotide

SEQ ID NO: 634823 - DNA, 55 bp, Artificial; identical to SEQ ID NO: 220694
  Synthetic oligonucleotide

SEQ ID NO: 634824 - DNA, 55 bp, Artificial; identical to SEQ ID NO: 265928
  Synthetic oligonucleotide

SEQ ID NO: 634825 - DNA, 54 bp, Artificial; identical to SEQ ID NO: 144281
  Synthetic oligonucleotide

SEQ ID NO: 634826 - DNA, 55 bp, Artificial; identical to SEQ ID NO: 244644
  Synthetic oligonucleotide

SEQ ID NO: 634827 - DNA, 53 bp, Artificial; identical to SEQ ID NO: 142616
  Synthetic oligonucleotide

SEQ ID NO: 634828 - DNA, 55 bp, Artificial; identical to SEQ ID NO: 252778
  Synthetic oligonucleotide

SEQ ID NO: 634829 - DNA, 56 bp, Artificial; identical to SEQ ID NO: 178283
  Synthetic oligonucleotide

SEQ ID NO: 634830 - DNA, 55 bp, Artificial; identical to SEQ ID NO: 155318
  Synthetic oligonucleotide

SEQ ID NO: 634831 - DNA, 50 bp, Artificial; identical to SEQ ID NO: 144416
  Synthetic oligonucleotide

SEQ ID NO: 634832 - DNA, 50 bp, Artificial; identical to SEQ ID NO: 160981
  Synthetic oligonucleotide

SEQ ID NO: 634833 - DNA, 55 bp, Artificial; identical to SEQ ID NO: 184289
  Synthetic oligonucleotide

SEQ ID NO: 634834 - DNA, 55 bp, Artificial; identical to SEQ ID NO: 217427
  Synthetic oligonucleotide

SEQ ID NO: 634835 - DNA, 55 bp, Artificial; identical to SEQ ID NO: 159300
  Synthetic oligonucleotide

SEQ ID NO: 634836 - DNA, 51 bp, Artificial; identical to SEQ ID NO: 174904
  Synthetic oligonucleotide

SEQ ID NO: 634837 - DNA, 55 bp, Artificial; identical to SEQ ID NO: 184292
  Synthetic oligonucleotide

SEQ ID NO: 634838 - DNA, 53 bp, Artificial; identical to SEQ ID NO: 157295
  Synthetic oligonucleotide

SEQ ID NO: 634839 - DNA, 55 bp, Artificial; identical to SEQ ID NO: 220695
  Synthetic oligonucleotide

SEQ ID NO: 634840 - DNA, 55 bp, Artificial; identical to SEQ ID NO: 197317
  Synthetic oligonucleotide

SEQ ID NO: 634841 - DNA, 55 bp, Artificial; identical to SEQ ID NO: 191318
  Synthetic oligonucleotide

SEQ ID NO: 634842 - DNA, 56 bp, Artificial; identical to SEQ ID NO: 248640
  Synthetic oligonucleotide

SEQ ID NO: 634843 - DNA, 60 bp, Artificial; identical to SEQ ID NO: 150026
  Synthetic oligonucleotide

SEQ ID NO: 634844 - DNA, 55 bp, Artificial; identical to SEQ ID NO: 248990
  Synthetic oligonucleotide

SEQ ID NO: 634845 - DNA, 55 bp, Artificial; identical to SEQ ID NO: 147570
  Synthetic oligonucleotide

SEQ ID NO: 634846 - DNA, 59 bp, Artificial; identical to SEQ ID NO: 210809
  Synthetic oligonucleotide

SEQ ID NO: 634847 - DNA, 55 bp, Artificial; identical to SEQ ID NO: 240383
  Synthetic oligonucleotide

SEQ ID NO: 634848 - DNA, 55 bp, Artificial; identical to SEQ ID NO: 190151
  Synthetic oligonucleotide

SEQ ID NO: 634849 - DNA, 54 bp, Artificial; identical to SEQ ID NO: 194943
  Synthetic oligonucleotide

SEQ ID NO: 634850 - DNA, 60 bp, Artificial; identical to SEQ ID NO: 142240
  Synthetic oligonucleotide

SEQ ID NO: 634851 - DNA, 55 bp, Artificial; identical to SEQ ID NO: 202019
  Synthetic oligonucleotide

SEQ ID NO: 634852 - DNA, 55 bp, Artificial; identical to SEQ ID NO: 159303
  Synthetic oligonucleotide

SEQ ID NO: 634853 - DNA, 55 bp, Artificial; identical to SEQ ID NO: 151568
  Synthetic oligonucleotide

SEQ ID NO: 634854 - DNA, 55 bp, Artificial; identical to SEQ ID NO: 257014
  Synthetic oligonucleotide

SEQ ID NO: 634855 - DNA, 56 bp, Artificial; identical to SEQ ID NO: 241952
  Synthetic oligonucleotide

SEQ ID NO: 634856 - DNA, 55 bp, Artificial; identical to SEQ ID NO: 194445
  Synthetic oligonucleotide

SEQ ID NO: 634857 - DNA, 55 bp, Artificial; identical to SEQ ID NO: 201782
  Synthetic oligonucleotide

SEQ ID NO: 634858 - DNA, 58 bp, Artificial; identical to SEQ ID NO: 179513
  Synthetic oligonucleotide

SEQ ID NO: 634859 - DNA, 55 bp, Artificial; identical to SEQ ID NO: 248991
  Synthetic oligonucleotide

SEQ ID NO: 634860 - DNA, 55 bp, Artificial; identical to SEQ ID NO: 224719
  Synthetic oligonucleotide

SEQ ID NO: 634861 - DNA, 58 bp, Artificial; identical to SEQ ID NO: 198060
  Synthetic oligonucleotide

SEQ ID NO: 634862 - DNA, 55 bp, Artificial; identical to SEQ ID NO: 168558
  Synthetic oligonucleotide

SEQ ID NO: 634863 - DNA, 55 bp, Artificial; identical to SEQ ID NO: 160129
  Synthetic oligonucleotide

SEQ ID NO: 634864 - DNA, 60 bp, Artificial; identical to SEQ ID NO: 152892
  Synthetic oligonucleotide

SEQ ID NO: 634865 - DNA, 55 bp, Artificial; identical to SEQ ID NO: 155361
  Synthetic oligonucleotide

SEQ ID NO: 634866 - DNA, 55 bp, Artificial; identical to SEQ ID NO: 211129
  Synthetic oligonucleotide

SEQ ID NO: 634867 - DNA, 53 bp, Artificial; identical to SEQ ID NO: 210925
  Synthetic oligonucleotide

SEQ ID NO: 634868 - DNA, 59 bp, Artificial; identical to SEQ ID NO: 248413
  Synthetic oligonucleotide

SEQ ID NO: 634869 - DNA, 55 bp, Artificial; identical to SEQ ID NO: 184301
  Synthetic oligonucleotide

SEQ ID NO: 634870 - DNA, 55 bp, Artificial; identical to SEQ ID NO: 154485
  Synthetic oligonucleotide

SEQ ID NO: 634871 - DNA, 59 bp, Artificial; identical to SEQ ID NO: 262720
  Synthetic oligonucleotide

SEQ ID NO: 634872 - DNA, 50 bp, Artificial; identical to SEQ ID NO: 186990
  Synthetic oligonucleotide

SEQ ID NO: 634873 - DNA, 55 bp, Artificial; identical to SEQ ID NO: 217429
  Synthetic oligonucleotide

SEQ ID NO: 634874 - DNA, 52 bp, Artificial; identical to SEQ ID NO: 149587
  Synthetic oligonucleotide

SEQ ID NO: 634875 - DNA, 55 bp, Artificial; identical to SEQ ID NO: 166863
  Synthetic oligonucleotide

SEQ ID NO: 634876 - DNA, 58 bp, Artificial; identical to SEQ ID NO: 224334
  Synthetic oligonucleotide

SEQ ID NO: 634877 - DNA, 52 bp, Artificial; identical to SEQ ID NO: 157655
  Synthetic oligonucleotide

SEQ ID NO: 634878 - DNA, 56 bp, Artificial; identical to SEQ ID NO: 241950
  Synthetic oligonucleotide

SEQ ID NO: 634879 - DNA, 54 bp, Artificial; identical to SEQ ID NO: 185446
  Synthetic oligonucleotide

SEQ ID NO: 634880 - DNA, 55 bp, Artificial; identical to SEQ ID NO: 160980
  Synthetic oligonucleotide

SEQ ID NO: 634881 - DNA, 58 bp, Artificial; identical to SEQ ID NO: 206875
  Synthetic oligonucleotide

SEQ ID NO: 634882 - DNA, 57 bp, Artificial; identical to SEQ ID NO: 255811
  Synthetic oligonucleotide

SEQ ID NO: 634883 - DNA, 55 bp, Artificial; identical to SEQ ID NO: 257012
  Synthetic oligonucleotide

SEQ ID NO: 634884 - DNA, 54 bp, Artificial; identical to SEQ ID NO: 189509
  Synthetic oligonucleotide

SEQ ID NO: 634885 - DNA, 53 bp, Artificial; identical to SEQ ID NO: 160917
  Synthetic oligonucleotide

SEQ ID NO: 634886 - DNA, 54 bp, Artificial; identical to SEQ ID NO: 239423
  Synthetic oligonucleotide

SEQ ID NO: 634887 - DNA, 55 bp, Artificial; identical to SEQ ID NO: 190155
  Synthetic oligonucleotide

SEQ ID NO: 634888 - DNA, 54 bp, Artificial; identical to SEQ ID NO: 147134
  Synthetic oligonucleotide

SEQ ID NO: 634889 - DNA, 55 bp, Artificial; identical to SEQ ID NO: 169581
  Synthetic oligonucleotide

SEQ ID NO: 634890 - DNA, 55 bp, Artificial; identical to SEQ ID NO: 153241
  Synthetic oligonucleotide

SEQ ID NO: 634891 - DNA, 55 bp, Artificial; identical to SEQ ID NO: 207170
  Synthetic oligonucleotide

SEQ ID NO: 634892 - DNA, 55 bp, Artificial; identical to SEQ ID NO: 224721
  Synthetic oligonucleotide

SEQ ID NO: 634893 - DNA, 54 bp, Artificial; identical to SEQ ID NO: 247820
  Synthetic oligonucleotide

SEQ ID NO: 634894 - DNA, 55 bp, Artificial; identical to SEQ ID NO: 169593
  Synthetic oligonucleotide

SEQ ID NO: 634895 - DNA, 55 bp, Artificial; identical to SEQ ID NO: 178239
  Synthetic oligonucleotide

SEQ ID NO: 634896 - DNA, 54 bp, Artificial; identical to SEQ ID NO: 141205
  Synthetic oligonucleotide

SEQ ID NO: 634897 - DNA, 55 bp, Artificial; identical to SEQ ID NO: 151570
  Synthetic oligonucleotide

SEQ ID NO: 634898 - DNA, 55 bp, Artificial; identical to SEQ ID NO: 193585
  Synthetic oligonucleotide

SEQ ID NO: 634899 - DNA, 55 bp, Artificial; identical to SEQ ID NO: 244639
  Synthetic oligonucleotide

SEQ ID NO: 634900 - DNA, 59 bp, Artificial; identical to SEQ ID NO: 187327
  Synthetic oligonucleotide

SEQ ID NO: 634901 - DNA, 55 bp, Artificial; identical to SEQ ID NO: 172925
  Synthetic oligonucleotide

SEQ ID NO: 634902 - DNA, 55 bp, Artificial; identical to SEQ ID NO: 184317
  Synthetic oligonucleotide

SEQ ID NO: 634903 - DNA, 52 bp, Artificial; identical to SEQ ID NO: 170103
  Synthetic oligonucleotide

SEQ ID NO: 634904 - DNA, 55 bp, Artificial; identical to SEQ ID NO: 224723
  Synthetic oligonucleotide

SEQ ID NO: 634905 - DNA, 59 bp, Artificial; identical to SEQ ID NO: 179385
  Synthetic oligonucleotide

SEQ ID NO: 634906 - DNA, 57 bp, Artificial; identical to SEQ ID NO: 178205
  Synthetic oligonucleotide

SEQ ID NO: 634907 - DNA, 53 bp, Artificial; identical to SEQ ID NO: 146411
  Synthetic oligonucleotide

SEQ ID NO: 634908 - DNA, 54 bp, Artificial; identical to SEQ ID NO: 207685
  Synthetic oligonucleotide

SEQ ID NO: 634909 - DNA, 60 bp, Artificial; identical to SEQ ID NO: 234086
  Synthetic oligonucleotide

SEQ ID NO: 634910 - DNA, 55 bp, Artificial; identical to SEQ ID NO: 147519
  Synthetic oligonucleotide

SEQ ID NO: 634911 - DNA, 59 bp, Artificial; identical to SEQ ID NO: 241948
  Synthetic oligonucleotide

SEQ ID NO: 634912 - DNA, 53 bp, Artificial; identical to SEQ ID NO: 188055
  Synthetic oligonucleotide

SEQ ID NO: 634913 - DNA, 53 bp, Artificial; identical to SEQ ID NO: 178738
  Synthetic oligonucleotide

SEQ ID NO: 634914 - DNA, 50 bp, Artificial; identical to SEQ ID NO: 152513
  Synthetic oligonucleotide

SEQ ID NO: 634915 - DNA, 55 bp, Artificial; identical to SEQ ID NO: 209275
  Synthetic oligonucleotide

SEQ ID NO: 634916 - DNA, 57 bp, Artificial; identical to SEQ ID NO: 167273
  Synthetic oligonucleotide

SEQ ID NO: 634917 - DNA, 53 bp, Artificial; identical to SEQ ID NO: 238128
  Synthetic oligonucleotide

SEQ ID NO: 634918 - DNA, 58 bp, Artificial; identical to SEQ ID NO: 142251
  Synthetic oligonucleotide

SEQ ID NO: 634919 - DNA, 52 bp, Artificial; identical to SEQ ID NO: 160412
  Synthetic oligonucleotide

SEQ ID NO: 634920 - DNA, 60 bp, Artificial; identical to SEQ ID NO: 178705
  Synthetic oligonucleotide

SEQ ID NO: 634921 - DNA, 55 bp, Artificial; identical to SEQ ID NO: 252821
  Synthetic oligonucleotide

SEQ ID NO: 634922 - DNA, 59 bp, Artificial; identical to SEQ ID NO: 156609
  Synthetic oligonucleotide

SEQ ID NO: 634923 - DNA, 55 bp, Artificial; identical to SEQ ID NO: 224724
  Synthetic oligonucleotide

SEQ ID NO: 634924 - DNA, 55 bp, Artificial; identical to SEQ ID NO: 244638
  Synthetic oligonucleotide

SEQ ID NO: 634925 - DNA, 55 bp, Artificial; identical to SEQ ID NO: 244637
  Synthetic oligonucleotide

SEQ ID NO: 634926 - DNA, 53 bp, Artificial; identical to SEQ ID NO: 167082
  Synthetic oligonucleotide

SEQ ID NO: 634927 - DNA, 58 bp, Artificial; identical to SEQ ID NO: 201175
  Synthetic oligonucleotide

SEQ ID NO: 634928 - DNA, 55 bp, Artificial; identical to SEQ ID NO: 202012
  Synthetic oligonucleotide

SEQ ID NO: 634929 - DNA, 55 bp, Artificial; identical to SEQ ID NO: 166232
  Synthetic oligonucleotide

SEQ ID NO: 634930 - DNA, 57 bp, Artificial; identical to SEQ ID NO: 150037
  Synthetic oligonucleotide

SEQ ID NO: 634931 - DNA, 54 bp, Artificial; identical to SEQ ID NO: 256949
  Synthetic oligonucleotide

SEQ ID NO: 634932 - DNA, 55 bp, Artificial; identical to SEQ ID NO: 151571
  Synthetic oligonucleotide

SEQ ID NO: 634933 - DNA, 55 bp, Artificial; identical to SEQ ID NO: 147513
  Synthetic oligonucleotide

SEQ ID NO: 634934 - DNA, 55 bp, Artificial; identical to SEQ ID NO: 233406
  Synthetic oligonucleotide

SEQ ID NO: 634935 - DNA, 55 bp, Artificial; identical to SEQ ID NO: 154480
  Synthetic oligonucleotide

SEQ ID NO: 634936 - DNA, 57 bp, Artificial; identical to SEQ ID NO: 209189
  Synthetic oligonucleotide

SEQ ID NO: 634937 - DNA, 55 bp, Artificial; identical to SEQ ID NO: 144383
  Synthetic oligonucleotide

SEQ ID NO: 634938 - DNA, 58 bp, Artificial; identical to SEQ ID NO: 192239
  Synthetic oligonucleotide

SEQ ID NO: 634939 - DNA, 55 bp, Artificial; identical to SEQ ID NO: 224726
  Synthetic oligonucleotide

SEQ ID NO: 634940 - DNA, 55 bp, Artificial; identical to SEQ ID NO: 166231
  Synthetic oligonucleotide

SEQ ID NO: 634941 - DNA, 55 bp, Artificial; identical to SEQ ID NO: 256948
  Synthetic oligonucleotide

SEQ ID NO: 634942 - DNA, 57 bp, Artificial; identical to SEQ ID NO: 179825
  Synthetic oligonucleotide

SEQ ID NO: 634943 - DNA, 51 bp, Artificial; identical to SEQ ID NO: 246629
  Synthetic oligonucleotide

SEQ ID NO: 634944 - DNA, 54 bp, Artificial; identical to SEQ ID NO: 212934
  Synthetic oligonucleotide

SEQ ID NO: 634945 - DNA, 53 bp, Artificial; identical to SEQ ID NO: 256947
  Synthetic oligonucleotide

SEQ ID NO: 634946 - DNA, 58 bp, Artificial; identical to SEQ ID NO: 167271
  Synthetic oligonucleotide

SEQ ID NO: 634947 - DNA, 55 bp, Artificial; identical to SEQ ID NO: 180886
  Synthetic oligonucleotide

SEQ ID NO: 634948 - DNA, 55 bp, Artificial; identical to SEQ ID NO: 151572
  Synthetic oligonucleotide

SEQ ID NO: 634949 - DNA, 55 bp, Artificial; identical to SEQ ID NO: 190158
  Synthetic oligonucleotide

SEQ ID NO: 634950 - DNA, 55 bp, Artificial; identical to SEQ ID NO: 252819
  Synthetic oligonucleotide

SEQ ID NO: 634951 - DNA, 55 bp, Artificial; identical to SEQ ID NO: 147512
  Synthetic oligonucleotide

SEQ ID NO: 634952 - DNA, 55 bp, Artificial; identical to SEQ ID NO: 166242
  Synthetic oligonucleotide

SEQ ID NO: 634953 - DNA, 55 bp, Artificial; identical to SEQ ID NO: 238125
  Synthetic oligonucleotide

SEQ ID NO: 634954 - DNA, 55 bp, Artificial; identical to SEQ ID NO: 144031
  Synthetic oligonucleotide

SEQ ID NO: 634955 - DNA, 53 bp, Artificial; identical to SEQ ID NO: 247898
  Synthetic oligonucleotide

SEQ ID NO: 634956 - DNA, 55 bp, Artificial; identical to SEQ ID NO: 153239
  Synthetic oligonucleotide

SEQ ID NO: 634957 - DNA, 55 bp, Artificial; identical to SEQ ID NO: 238156
  Synthetic oligonucleotide

SEQ ID NO: 634958 - DNA, 55 bp, Artificial; identical to SEQ ID NO: 198140
  Synthetic oligonucleotide

SEQ ID NO: 634959 - DNA, 55 bp, Artificial; identical to SEQ ID NO: 197314
  Synthetic oligonucleotide

SEQ ID NO: 634960 - DNA, 55 bp, Artificial; identical to SEQ ID NO: 244635
  Synthetic oligonucleotide

SEQ ID NO: 634961 - DNA, 59 bp, Artificial; identical to SEQ ID NO: 153388
  Synthetic oligonucleotide

SEQ ID NO: 634962 - DNA, 55 bp, Artificial; identical to SEQ ID NO: 159312
  Synthetic oligonucleotide

SEQ ID NO: 634963 - DNA, 55 bp, Artificial; identical to SEQ ID NO: 240385
  Synthetic oligonucleotide

SEQ ID NO: 634964 - DNA, 60 bp, Artificial; identical to SEQ ID NO: 223761
  Synthetic oligonucleotide

SEQ ID NO: 634965 - DNA, 52 bp, Artificial; identical to SEQ ID NO: 141285
  Synthetic oligonucleotide

SEQ ID NO: 634966 - DNA, 55 bp, Artificial; identical to SEQ ID NO: 242961
  Synthetic oligonucleotide

SEQ ID NO: 634967 - DNA, 55 bp, Artificial; identical to SEQ ID NO: 191862
  Synthetic oligonucleotide

SEQ ID NO: 634968 - DNA, 55 bp, Artificial; identical to SEQ ID NO: 187438
  Synthetic oligonucleotide

SEQ ID NO: 634969 - DNA, 51 bp, Artificial; identical to SEQ ID NO: 153672
  Synthetic oligonucleotide

SEQ ID NO: 634970 - DNA, 55 bp, Artificial; identical to SEQ ID NO: 168562
  Synthetic oligonucleotide

SEQ ID NO: 634971 - DNA, 51 bp, Artificial; identical to SEQ ID NO: 246668
  Synthetic oligonucleotide

SEQ ID NO: 634972 - DNA, 55 bp, Artificial; identical to SEQ ID NO: 187435
  Synthetic oligonucleotide

SEQ ID NO: 634973 - DNA, 60 bp, Artificial; identical to SEQ ID NO: 206873
  Synthetic oligonucleotide

SEQ ID NO: 634974 - DNA, 60 bp, Artificial; identical to SEQ ID NO: 178616
  Synthetic oligonucleotide

SEQ ID NO: 634975 - DNA, 55 bp, Artificial; identical to SEQ ID NO: 244631
  Synthetic oligonucleotide

SEQ ID NO: 634976 - DNA, 54 bp, Artificial; identical to SEQ ID NO: 255210
  Synthetic oligonucleotide

SEQ ID NO: 634977 - DNA, 55 bp, Artificial; identical to SEQ ID NO: 202144
  Synthetic oligonucleotide

SEQ ID NO: 634978 - DNA, 55 bp, Artificial; identical to SEQ ID NO: 256946
  Synthetic oligonucleotide

SEQ ID NO: 634979 - DNA, 54 bp, Artificial; identical to SEQ ID NO: 262811
  Synthetic oligonucleotide

SEQ ID NO: 634980 - DNA, 55 bp, Artificial; identical to SEQ ID NO: 180874
  Synthetic oligonucleotide

SEQ ID NO: 634981 - DNA, 56 bp, Artificial; identical to SEQ ID NO: 236503
  Synthetic oligonucleotide

SEQ ID NO: 634982 - DNA, 55 bp, Artificial; identical to SEQ ID NO: 198481
  Synthetic oligonucleotide

SEQ ID NO: 634983 - DNA, 55 bp, Artificial; identical to SEQ ID NO: 171243
  Synthetic oligonucleotide

SEQ ID NO: 634984 - DNA, 51 bp, Artificial; identical to SEQ ID NO: 255602
  Synthetic oligonucleotide

SEQ ID NO: 634985 - DNA, 54 bp, Artificial; identical to SEQ ID NO: 160124
  Synthetic oligonucleotide

SEQ ID NO: 634986 - DNA, 56 bp, Artificial; identical to SEQ ID NO: 178583
  Synthetic oligonucleotide

SEQ ID NO: 634987 - DNA, 56 bp, Artificial; identical to SEQ ID NO: 201767
  Synthetic oligonucleotide

SEQ ID NO: 634988 - DNA, 55 bp, Artificial; identical to SEQ ID NO: 242962
  Synthetic oligonucleotide

SEQ ID NO: 634989 - DNA, 56 bp, Artificial; identical to SEQ ID NO: 187389
  Synthetic oligonucleotide

SEQ ID NO: 634990 - DNA, 55 bp, Artificial; identical to SEQ ID NO: 147501
  Synthetic oligonucleotide

SEQ ID NO: 634991 - DNA, 55 bp, Artificial; identical to SEQ ID NO: 208288
  Synthetic oligonucleotide

SEQ ID NO: 634992 - DNA, 55 bp, Artificial; identical to SEQ ID NO: 220699
  Synthetic oligonucleotide

SEQ ID NO: 634993 - DNA, 55 bp, Artificial; identical to SEQ ID NO: 147539
  Synthetic oligonucleotide

SEQ ID NO: 634994 - DNA, 55 bp, Artificial; identical to SEQ ID NO: 180872
  Synthetic oligonucleotide

SEQ ID NO: 634995 - DNA, 55 bp, Artificial; identical to SEQ ID NO: 180869
  Synthetic oligonucleotide

SEQ ID NO: 634996 - DNA, 60 bp, Artificial; identical to SEQ ID NO: 206865
  Synthetic oligonucleotide

SEQ ID NO: 634997 - DNA, 55 bp, Artificial; identical to SEQ ID NO: 187431
  Synthetic oligonucleotide

SEQ ID NO: 634998 - DNA, 60 bp, Artificial; identical to SEQ ID NO: 170793
  Synthetic oligonucleotide

SEQ ID NO: 634999 - DNA, 55 bp, Artificial; identical to SEQ ID NO: 198138
  Synthetic oligonucleotide

SEQ ID NO: 635000 - DNA, 57 bp, Artificial; identical to SEQ ID NO: 256503
  Synthetic oligonucleotide

SEQ ID NO: 635001 - DNA, 53 bp, Artificial; identical to SEQ ID NO: 265715
  Synthetic oligonucleotide

SEQ ID NO: 635002 - DNA, 55 bp, Artificial; identical to SEQ ID NO: 154475
  Synthetic oligonucleotide

SEQ ID NO: 635003 - DNA, 55 bp, Artificial; identical to SEQ ID NO: 240386
  Synthetic oligonucleotide

SEQ ID NO: 635004 - DNA, 60 bp, Artificial; identical to SEQ ID NO: 159835
  Synthetic oligonucleotide

SEQ ID NO: 635005 - DNA, 55 bp, Artificial; identical to SEQ ID NO: 219670
  Synthetic oligonucleotide

SEQ ID NO: 635006 - DNA, 50 bp, Artificial; identical to SEQ ID NO: 153866
  Synthetic oligonucleotide

SEQ ID NO: 635007 - DNA, 51 bp, Artificial; identical to SEQ ID NO: 213087
  Synthetic oligonucleotide

SEQ ID NO: 635008 - DNA, 55 bp, Artificial; identical to SEQ ID NO: 207175
  Synthetic oligonucleotide

SEQ ID NO: 635009 - DNA, 54 bp, Artificial; identical to SEQ ID NO: 209272
  Synthetic oligonucleotide

SEQ ID NO: 635010 - DNA, 55 bp, Artificial; identical to SEQ ID NO: 198136
  Synthetic oligonucleotide

SEQ ID NO: 635011 - DNA, 55 bp, Artificial; identical to SEQ ID NO: 246699
  Synthetic oligonucleotide

SEQ ID NO: 635012 - DNA, 55 bp, Artificial; identical to SEQ ID NO: 244628
  Synthetic oligonucleotide

SEQ ID NO: 635013 - DNA, 58 bp, Artificial; identical to SEQ ID NO: 209157
  Synthetic oligonucleotide

SEQ ID NO: 635014 - DNA, 55 bp, Artificial; identical to SEQ ID NO: 244627
  Synthetic oligonucleotide

SEQ ID NO: 635015 - DNA, 59 bp, Artificial; identical to SEQ ID NO: 212368
  Synthetic oligonucleotide

SEQ ID NO: 635016 - DNA, 60 bp, Artificial; identical to SEQ ID NO: 142262
  Synthetic oligonucleotide

SEQ ID NO: 635017 - DNA, 51 bp, Artificial; identical to SEQ ID NO: 255677
  Synthetic oligonucleotide

SEQ ID NO: 635018 - DNA, 59 bp, Artificial; identical to SEQ ID NO: 241938
  Synthetic oligonucleotide

SEQ ID NO: 635019 - DNA, 55 bp, Artificial; identical to SEQ ID NO: 151574
  Synthetic oligonucleotide

SEQ ID NO: 635020 - DNA, 56 bp, Artificial; identical to SEQ ID NO: 155965
  Synthetic oligonucleotide

SEQ ID NO: 635021 - DNA, 58 bp, Artificial; identical to SEQ ID NO: 248418
  Synthetic oligonucleotide

SEQ ID NO: 635022 - DNA, 57 bp, Artificial; identical to SEQ ID NO: 222875
  Synthetic oligonucleotide

SEQ ID NO: 635023 - DNA, 55 bp, Artificial; identical to SEQ ID NO: 203111
  Synthetic oligonucleotide

SEQ ID NO: 635024 - DNA, 60 bp, Artificial; identical to SEQ ID NO: 212437
  Synthetic oligonucleotide

SEQ ID NO: 635025 - DNA, 55 bp, Artificial; identical to SEQ ID NO: 147529
  Synthetic oligonucleotide

SEQ ID NO: 635026 - DNA, 50 bp, Artificial; identical to SEQ ID NO: 200433
  Synthetic oligonucleotide

SEQ ID NO: 635027 - DNA, 55 bp, Artificial; identical to SEQ ID NO: 198135
  Synthetic oligonucleotide

SEQ ID NO: 635028 - DNA, 55 bp, Artificial; identical to SEQ ID NO: 244626
  Synthetic oligonucleotide

SEQ ID NO: 635029 - DNA, 59 bp, Artificial; identical to SEQ ID NO: 150104
  Synthetic oligonucleotide

SEQ ID NO: 635030 - DNA, 57 bp, Artificial; identical to SEQ ID NO: 178494
  Synthetic oligonucleotide

SEQ ID NO: 635031 - DNA, 54 bp, Artificial; identical to SEQ ID NO: 218596
  Synthetic oligonucleotide

SEQ ID NO: 635032 - DNA, 55 bp, Artificial; identical to SEQ ID NO: 159366
  Synthetic oligonucleotide

SEQ ID NO: 635033 - DNA, 54 bp, Artificial; identical to SEQ ID NO: 190160
  Synthetic oligonucleotide

SEQ ID NO: 635034 - DNA, 55 bp, Artificial; identical to SEQ ID NO: 147524
  Synthetic oligonucleotide

SEQ ID NO: 635035 - DNA, 56 bp, Artificial; identical to SEQ ID NO: 246688
  Synthetic oligonucleotide

SEQ ID NO: 635036 - DNA, 50 bp, Artificial; identical to SEQ ID NO: 154039
  Synthetic oligonucleotide

SEQ ID NO: 635037 - DNA, 53 bp, Artificial; identical to SEQ ID NO: 241992
  Synthetic oligonucleotide

SEQ ID NO: 635038 - DNA, 60 bp, Artificial; identical to SEQ ID NO: 159836
  Synthetic oligonucleotide

SEQ ID NO: 635039 - DNA, 55 bp, Artificial; identical to SEQ ID NO: 147523
  Synthetic oligonucleotide

SEQ ID NO: 635040 - DNA, 50 bp, Artificial; identical to SEQ ID NO: 152239
  Synthetic oligonucleotide

SEQ ID NO: 635041 - DNA, 52 bp, Artificial; identical to SEQ ID NO: 186017
  Synthetic oligonucleotide

SEQ ID NO: 635042 - DNA, 55 bp, Artificial; identical to SEQ ID NO: 159368
  Synthetic oligonucleotide

SEQ ID NO: 635043 - DNA, 57 bp, Artificial; identical to SEQ ID NO: 191708
  Synthetic oligonucleotide

SEQ ID NO: 635044 - DNA, 54 bp, Artificial; identical to SEQ ID NO: 243076
  Synthetic oligonucleotide

SEQ ID NO: 635045 - DNA, 53 bp, Artificial; identical to SEQ ID NO: 164955
  Synthetic oligonucleotide

SEQ ID NO: 635046 - DNA, 55 bp, Artificial; identical to SEQ ID NO: 198130
  Synthetic oligonucleotide

SEQ ID NO: 635047 - DNA, 55 bp, Artificial; identical to SEQ ID NO: 142273
  Synthetic oligonucleotide

SEQ ID NO: 635048 - DNA, 55 bp, Artificial; identical to SEQ ID NO: 211131
  Synthetic oligonucleotide

SEQ ID NO: 635049 - DNA, 53 bp, Artificial; identical to SEQ ID NO: 147521
  Synthetic oligonucleotide

SEQ ID NO: 635050 - DNA, 55 bp, Artificial; identical to SEQ ID NO: 151576
  Synthetic oligonucleotide

SEQ ID NO: 635051 - DNA, 52 bp, Artificial; identical to SEQ ID NO: 246554
  Synthetic oligonucleotide

SEQ ID NO: 635052 - DNA, 55 bp, Artificial; identical to SEQ ID NO: 161982
  Synthetic oligonucleotide

SEQ ID NO: 635053 - DNA, 55 bp, Artificial; identical to SEQ ID NO: 244624
  Synthetic oligonucleotide

SEQ ID NO: 635054 - DNA, 60 bp, Artificial; identical to SEQ ID NO: 242562
  Synthetic oligonucleotide

SEQ ID NO: 635055 - DNA, 60 bp, Artificial; identical to SEQ ID NO: 241989
  Synthetic oligonucleotide

SEQ ID NO: 635056 - DNA, 57 bp, Artificial; identical to SEQ ID NO: 243465
  Synthetic oligonucleotide

SEQ ID NO: 635057 - DNA, 57 bp, Artificial; identical to SEQ ID NO: 237779
  Synthetic oligonucleotide

SEQ ID NO: 635058 - DNA, 55 bp, Artificial; identical to SEQ ID NO: 244623
  Synthetic oligonucleotide

SEQ ID NO: 635059 - DNA, 60 bp, Artificial; identical to SEQ ID NO: 255944
  Synthetic oligonucleotide

SEQ ID NO: 635060 - DNA, 55 bp, Artificial; identical to SEQ ID NO: 180908
  Synthetic oligonucleotide

SEQ ID NO: 635061 - DNA, 54 bp, Artificial; identical to SEQ ID NO: 209273
  Synthetic oligonucleotide

SEQ ID NO: 635062 - DNA, 51 bp, Artificial; identical to SEQ ID NO: 216780
  Synthetic oligonucleotide

SEQ ID NO: 635063 - DNA, 58 bp, Artificial; identical to SEQ ID NO: 239319
  Synthetic oligonucleotide

SEQ ID NO: 635064 - DNA, 52 bp, Artificial; identical to SEQ ID NO: 209664
  Synthetic oligonucleotide

SEQ ID NO: 635065 - DNA, 55 bp, Artificial; identical to SEQ ID NO: 159369
  Synthetic oligonucleotide

SEQ ID NO: 635066 - DNA, 56 bp, Artificial; identical to SEQ ID NO: 246676
  Synthetic oligonucleotide

SEQ ID NO: 635067 - DNA, 57 bp, Artificial; identical to SEQ ID NO: 246665
  Synthetic oligonucleotide

SEQ ID NO: 635068 - DNA, 60 bp, Artificial; identical to SEQ ID NO: 241988
  Synthetic oligonucleotide

SEQ ID NO: 635069 - DNA, 60 bp, Artificial; identical to SEQ ID NO: 170792
  Synthetic oligonucleotide

SEQ ID NO: 635070 - DNA, 55 bp, Artificial; identical to SEQ ID NO: 266191
  Synthetic oligonucleotide

SEQ ID NO: 635071 - DNA, 57 bp, Artificial; identical to SEQ ID NO: 180138
  Synthetic oligonucleotide

SEQ ID NO: 635072 - DNA, 55 bp, Artificial; identical to SEQ ID NO: 244620
  Synthetic oligonucleotide

SEQ ID NO: 635073 - DNA, 52 bp, Artificial; identical to SEQ ID NO: 187351
  Synthetic oligonucleotide

SEQ ID NO: 635074 - DNA, 53 bp, Artificial; identical to SEQ ID NO: 194972
  Synthetic oligonucleotide

SEQ ID NO: 635075 - DNA, 53 bp, Artificial; identical to SEQ ID NO: 205656
  Synthetic oligonucleotide

SEQ ID NO: 635076 - DNA, 52 bp, Artificial; identical to SEQ ID NO: 246550
  Synthetic oligonucleotide

SEQ ID NO: 635077 - DNA, 60 bp, Artificial; identical to SEQ ID NO: 150126
  Synthetic oligonucleotide

SEQ ID NO: 635078 - DNA, 54 bp, Artificial; identical to SEQ ID NO: 199496
  Synthetic oligonucleotide

SEQ ID NO: 635079 - DNA, 53 bp, Artificial; identical to SEQ ID NO: 164924
  Synthetic oligonucleotide

SEQ ID NO: 635080 - DNA, 50 bp, Artificial; identical to SEQ ID NO: 233917
  Synthetic oligonucleotide

SEQ ID NO: 635081 - DNA, 60 bp, Artificial; identical to SEQ ID NO: 265630
  Synthetic oligonucleotide

SEQ ID NO: 635082 - DNA, 52 bp, Artificial; identical to SEQ ID NO: 208757
  Synthetic oligonucleotide

SEQ ID NO: 635083 - DNA, 55 bp, Artificial; identical to SEQ ID NO: 256941
  Synthetic oligonucleotide

SEQ ID NO: 635084 - DNA, 60 bp, Artificial; identical to SEQ ID NO: 252975
  Synthetic oligonucleotide

SEQ ID NO: 635085 - DNA, 55 bp, Artificial; identical to SEQ ID NO: 260215
  Synthetic oligonucleotide

SEQ ID NO: 635086 - DNA, 54 bp, Artificial; identical to SEQ ID NO: 202437
  Synthetic oligonucleotide

SEQ ID NO: 635087 - DNA, 55 bp, Artificial; identical to SEQ ID NO: 144214
  Synthetic oligonucleotide

SEQ ID NO: 635088 - DNA, 51 bp, Artificial; identical to SEQ ID NO: 197720
  Synthetic oligonucleotide

SEQ ID NO: 635089 - DNA, 51 bp, Artificial; identical to SEQ ID NO: 186620
  Synthetic oligonucleotide

SEQ ID NO: 635090 - DNA, 56 bp, Artificial; identical to SEQ ID NO: 165034
  Synthetic oligonucleotide

SEQ ID NO: 635091 - DNA, 55 bp, Artificial; identical to SEQ ID NO: 244619
  Synthetic oligonucleotide

SEQ ID NO: 635092 - DNA, 60 bp, Artificial; identical to SEQ ID NO: 150137
  Synthetic oligonucleotide

SEQ ID NO: 635093 - DNA, 60 bp, Artificial; identical to SEQ ID NO: 241985
  Synthetic oligonucleotide

SEQ ID NO: 635094 - DNA, 56 bp, Artificial; identical to SEQ ID NO: 180093
  Synthetic oligonucleotide

SEQ ID NO: 635095 - DNA, 55 bp, Artificial; identical to SEQ ID NO: 208311
  Synthetic oligonucleotide

SEQ ID NO: 635096 - DNA, 59 bp, Artificial; identical to SEQ ID NO: 157076
  Synthetic oligonucleotide

SEQ ID NO: 635097 - DNA, 53 bp, Artificial; identical to SEQ ID NO: 210850
  Synthetic oligonucleotide

SEQ ID NO: 635098 - DNA, 52 bp, Artificial; identical to SEQ ID NO: 243268
  Synthetic oligonucleotide

SEQ ID NO: 635099 - DNA, 55 bp, Artificial; identical to SEQ ID NO: 180901
  Synthetic oligonucleotide

SEQ ID NO: 635100 - DNA, 57 bp, Artificial; identical to SEQ ID NO: 159898
  Synthetic oligonucleotide

SEQ ID NO: 635101 - DNA, 51 bp, Artificial; identical to SEQ ID NO: 157824
  Synthetic oligonucleotide

SEQ ID NO: 635102 - DNA, 55 bp, Artificial; identical to SEQ ID NO: 153234
  Synthetic oligonucleotide

SEQ ID NO: 635103 - DNA, 55 bp, Artificial; identical to SEQ ID NO: 147647
  Synthetic oligonucleotide

SEQ ID NO: 635104 - DNA, 55 bp, Artificial; identical to SEQ ID NO: 147643
  Synthetic oligonucleotide

SEQ ID NO: 635105 - DNA, 51 bp, Artificial; identical to SEQ ID NO: 187061
  Synthetic oligonucleotide

SEQ ID NO: 635106 - DNA, 58 bp, Artificial; identical to SEQ ID NO: 150170
  Synthetic oligonucleotide

SEQ ID NO: 635107 - DNA, 52 bp, Artificial; identical to SEQ ID NO: 180060
  Synthetic oligonucleotide

SEQ ID NO: 635108 - DNA, 51 bp, Artificial; identical to SEQ ID NO: 255679
  Synthetic oligonucleotide

SEQ ID NO: 635109 - DNA, 58 bp, Artificial; identical to SEQ ID NO: 170783
  Synthetic oligonucleotide

SEQ ID NO: 635110 - DNA, 55 bp, Artificial; identical to SEQ ID NO: 166253
  Synthetic oligonucleotide

SEQ ID NO: 635111 - DNA, 59 bp, Artificial; identical to SEQ ID NO: 201114
  Synthetic oligonucleotide

SEQ ID NO: 635112 - DNA, 51 bp, Artificial; identical to SEQ ID NO: 241141
  Synthetic oligonucleotide

SEQ ID NO: 635113 - DNA, 57 bp, Artificial; identical to SEQ ID NO: 242475
  Synthetic oligonucleotide

SEQ ID NO: 635114 - DNA, 50 bp, Artificial; identical to SEQ ID NO: 206652
  Synthetic oligonucleotide

SEQ ID NO: 635115 - DNA, 51 bp, Artificial; identical to SEQ ID NO: 153670
  Synthetic oligonucleotide

SEQ ID NO: 635116 - DNA, 56 bp, Artificial; identical to SEQ ID NO: 208082
  Synthetic oligonucleotide

SEQ ID NO: 635117 - DNA, 60 bp, Artificial; identical to SEQ ID NO: 194110
  Synthetic oligonucleotide

SEQ ID NO: 635118 - DNA, 55 bp, Artificial; identical to SEQ ID NO: 180896
  Synthetic oligonucleotide

SEQ ID NO: 635119 - DNA, 55 bp, Artificial; identical to SEQ ID NO: 190161
  Synthetic oligonucleotide

SEQ ID NO: 635120 - DNA, 55 bp, Artificial; identical to SEQ ID NO: 198125
  Synthetic oligonucleotide

SEQ ID NO: 635121 - DNA, 56 bp, Artificial; identical to SEQ ID NO: 207072
  Synthetic oligonucleotide

SEQ ID NO: 635122 - DNA, 59 bp, Artificial; identical to SEQ ID NO: 201110
  Synthetic oligonucleotide

SEQ ID NO: 635123 - DNA, 57 bp, Artificial; identical to SEQ ID NO: 159961
  Synthetic oligonucleotide

SEQ ID NO: 635124 - DNA, 51 bp, Artificial; identical to SEQ ID NO: 160572
  Synthetic oligonucleotide

SEQ ID NO: 635125 - DNA, 55 bp, Artificial; identical to SEQ ID NO: 147640
  Synthetic oligonucleotide

SEQ ID NO: 635126 - DNA, 55 bp, Artificial; identical to SEQ ID NO: 166260
  Synthetic oligonucleotide

SEQ ID NO: 635127 - DNA, 54 bp, Artificial; identical to SEQ ID NO: 168825
  Synthetic oligonucleotide

SEQ ID NO: 635128 - DNA, 55 bp, Artificial; identical to SEQ ID NO: 160978
  Synthetic oligonucleotide

SEQ ID NO: 635129 - DNA, 53 bp, Artificial; identical to SEQ ID NO: 150727
  Synthetic oligonucleotide

SEQ ID NO: 635130 - DNA, 55 bp, Artificial; identical to SEQ ID NO: 191322
  Synthetic oligonucleotide

SEQ ID NO: 635131 - DNA, 55 bp, Artificial; identical to SEQ ID NO: 256940
  Synthetic oligonucleotide

SEQ ID NO: 635132 - DNA, 53 bp, Artificial; identical to SEQ ID NO: 241983
  Synthetic oligonucleotide

SEQ ID NO: 635133 - DNA, 55 bp, Artificial; identical to SEQ ID NO: 142025
  Synthetic oligonucleotide

SEQ ID NO: 635134 - DNA, 55 bp, Artificial; identical to SEQ ID NO: 209271
  Synthetic oligonucleotide

SEQ ID NO: 635135 - DNA, 53 bp, Artificial; identical to SEQ ID NO: 149317
  Synthetic oligonucleotide

SEQ ID NO: 635136 - DNA, 55 bp, Artificial; identical to SEQ ID NO: 166263
  Synthetic oligonucleotide

SEQ ID NO: 635137 - DNA, 53 bp, Artificial; identical to SEQ ID NO: 160435
  Synthetic oligonucleotide

SEQ ID NO: 635138 - DNA, 60 bp, Artificial; identical to SEQ ID NO: 150728
  Synthetic oligonucleotide

SEQ ID NO: 635139 - DNA, 59 bp, Artificial; identical to SEQ ID NO: 194107
  Synthetic oligonucleotide

SEQ ID NO: 635140 - DNA, 52 bp, Artificial; identical to SEQ ID NO: 187006
  Synthetic oligonucleotide

SEQ ID NO: 635141 - DNA, 51 bp, Artificial; identical to SEQ ID NO: 193833
  Synthetic oligonucleotide

SEQ ID NO: 635142 - DNA, 55 bp, Artificial; identical to SEQ ID NO: 159379
  Synthetic oligonucleotide

SEQ ID NO: 635143 - DNA, 55 bp, Artificial; identical to SEQ ID NO: 180893
  Synthetic oligonucleotide

SEQ ID NO: 635144 - DNA, 55 bp, Artificial; identical to SEQ ID NO: 155193
  Synthetic oligonucleotide

SEQ ID NO: 635145 - DNA, 60 bp, Artificial; identical to SEQ ID NO: 198448
  Synthetic oligonucleotide

SEQ ID NO: 635146 - DNA, 55 bp, Artificial; identical to SEQ ID NO: 217447
  Synthetic oligonucleotide

SEQ ID NO: 635147 - DNA, 55 bp, Artificial; identical to SEQ ID NO: 233416
  Synthetic oligonucleotide

SEQ ID NO: 635148 - DNA, 59 bp, Artificial; identical to SEQ ID NO: 180027
  Synthetic oligonucleotide

SEQ ID NO: 635149 - DNA, 60 bp, Artificial; identical to SEQ ID NO: 254722
  Synthetic oligonucleotide

SEQ ID NO: 635150 - DNA, 55 bp, Artificial; identical to SEQ ID NO: 174443
  Synthetic oligonucleotide

SEQ ID NO: 635151 - DNA, 60 bp, Artificial; identical to SEQ ID NO: 165001
  Synthetic oligonucleotide

SEQ ID NO: 635152 - DNA, 53 bp, Artificial; identical to SEQ ID NO: 243070
  Synthetic oligonucleotide

SEQ ID NO: 635153 - DNA, 55 bp, Artificial; identical to SEQ ID NO: 198124
  Synthetic oligonucleotide

SEQ ID NO: 635154 - DNA, 55 bp, Artificial; identical to SEQ ID NO: 147678
  Synthetic oligonucleotide

SEQ ID NO: 635155 - DNA, 57 bp, Artificial; identical to SEQ ID NO: 246643
  Synthetic oligonucleotide

SEQ ID NO: 635156 - DNA, 55 bp, Artificial; identical to SEQ ID NO: 198123
  Synthetic oligonucleotide

SEQ ID NO: 635157 - DNA, 55 bp, Artificial; identical to SEQ ID NO: 221911
  Synthetic oligonucleotide

SEQ ID NO: 635158 - DNA, 60 bp, Artificial; identical to SEQ ID NO: 150729
  Synthetic oligonucleotide

SEQ ID NO: 635159 - DNA, 60 bp, Artificial; identical to SEQ ID NO: 262698
  Synthetic oligonucleotide

SEQ ID NO: 635160 - DNA, 55 bp, Artificial; identical to SEQ ID NO: 190163
  Synthetic oligonucleotide

SEQ ID NO: 635161 - DNA, 50 bp, Artificial; identical to SEQ ID NO: 246955
  Synthetic oligonucleotide

SEQ ID NO: 635162 - DNA, 58 bp, Artificial; identical to SEQ ID NO: 239350
  Synthetic oligonucleotide

SEQ ID NO: 635163 - DNA, 55 bp, Artificial; identical to SEQ ID NO: 198120
  Synthetic oligonucleotide

SEQ ID NO: 635164 - DNA, 52 bp, Artificial; identical to SEQ ID NO: 159904
  Synthetic oligonucleotide

SEQ ID NO: 635165 - DNA, 51 bp, Artificial; identical to SEQ ID NO: 266297
  Synthetic oligonucleotide

SEQ ID NO: 635166 - DNA, 51 bp, Artificial; identical to SEQ ID NO: 155600
  Synthetic oligonucleotide

SEQ ID NO: 635167 - DNA, 58 bp, Artificial; identical to SEQ ID NO: 246632
  Synthetic oligonucleotide

SEQ ID NO: 635168 - DNA, 60 bp, Artificial; identical to SEQ ID NO: 246621
  Synthetic oligonucleotide

SEQ ID NO: 635169 - DNA, 58 bp, Artificial; identical to SEQ ID NO: 241979
  Synthetic oligonucleotide

SEQ ID NO: 635170 - DNA, 55 bp, Artificial; identical to SEQ ID NO: 191860
  Synthetic oligonucleotide

SEQ ID NO: 635171 - DNA, 51 bp, Artificial; identical to SEQ ID NO: 241142
  Synthetic oligonucleotide

SEQ ID NO: 635172 - DNA, 56 bp, Artificial; identical to SEQ ID NO: 150730
  Synthetic oligonucleotide

SEQ ID NO: 635173 - DNA, 52 bp, Artificial; identical to SEQ ID NO: 211132
  Synthetic oligonucleotide

SEQ ID NO: 635174 - DNA, 55 bp, Artificial; identical to SEQ ID NO: 180889
  Synthetic oligonucleotide

SEQ ID NO: 635175 - DNA, 50 bp, Artificial; identical to SEQ ID NO: 158844
  Synthetic oligonucleotide

SEQ ID NO: 635176 - DNA, 54 bp, Artificial; identical to SEQ ID NO: 185403
  Synthetic oligonucleotide

SEQ ID NO: 635177 - DNA, 54 bp, Artificial; identical to SEQ ID NO: 172792
  Synthetic oligonucleotide

SEQ ID NO: 635178 - DNA, 59 bp, Artificial; identical to SEQ ID NO: 198426
  Synthetic oligonucleotide

SEQ ID NO: 635179 - DNA, 51 bp, Artificial; identical to SEQ ID NO: 186609
  Synthetic oligonucleotide

SEQ ID NO: 635180 - DNA, 60 bp, Artificial; identical to SEQ ID NO: 223795
  Synthetic oligonucleotide

SEQ ID NO: 635181 - DNA, 60 bp, Artificial; identical to SEQ ID NO: 243576
  Synthetic oligonucleotide

SEQ ID NO: 635182 - DNA, 55 bp, Artificial; identical to SEQ ID NO: 252815
  Synthetic oligonucleotide

SEQ ID NO: 635183 - DNA, 55 bp, Artificial; identical to SEQ ID NO: 187422
  Synthetic oligonucleotide

SEQ ID NO: 635184 - DNA, 53 bp, Artificial; identical to SEQ ID NO: 185906
  Synthetic oligonucleotide

SEQ ID NO: 635185 - DNA, 55 bp, Artificial; identical to SEQ ID NO: 142042
  Synthetic oligonucleotide

SEQ ID NO: 635186 - DNA, 55 bp, Artificial; identical to SEQ ID NO: 242970
  Synthetic oligonucleotide

SEQ ID NO: 635187 - DNA, 55 bp, Artificial; identical to SEQ ID NO: 265927
  Synthetic oligonucleotide

SEQ ID NO: 635188 - DNA, 50 bp, Artificial; identical to SEQ ID NO: 150117
  Synthetic oligonucleotide

SEQ ID NO: 635189 - DNA, 57 bp, Artificial; identical to SEQ ID NO: 233349
  Synthetic oligonucleotide

SEQ ID NO: 635190 - DNA, 54 bp, Artificial; identical to SEQ ID NO: 185400
  Synthetic oligonucleotide

SEQ ID NO: 635191 - DNA, 50 bp, Artificial; identical to SEQ ID NO: 216954
  Synthetic oligonucleotide

SEQ ID NO: 635192 - DNA, 58 bp, Artificial; identical to SEQ ID NO: 217265
  Synthetic oligonucleotide

SEQ ID NO: 635193 - DNA, 60 bp, Artificial; identical to SEQ ID NO: 187517
  Synthetic oligonucleotide

SEQ ID NO: 635194 - DNA, 60 bp, Artificial; identical to SEQ ID NO: 242473
  Synthetic oligonucleotide

SEQ ID NO: 635195 - DNA, 55 bp, Artificial; identical to SEQ ID NO: 191859
  Synthetic oligonucleotide

SEQ ID NO: 635196 - DNA, 55 bp, Artificial; identical to SEQ ID NO: 211133
  Synthetic oligonucleotide

SEQ ID NO: 635197 - DNA, 55 bp, Artificial; identical to SEQ ID NO: 244671
  Synthetic oligonucleotide

SEQ ID NO: 635198 - DNA, 55 bp, Artificial; identical to SEQ ID NO: 217381
  Synthetic oligonucleotide

SEQ ID NO: 635199 - DNA, 56 bp, Artificial; identical to SEQ ID NO: 241977
  Synthetic oligonucleotide

SEQ ID NO: 635200 - DNA, 53 bp, Artificial; identical to SEQ ID NO: 243687
  Synthetic oligonucleotide

SEQ ID NO: 635201 - DNA, 55 bp, Artificial; identical to SEQ ID NO: 180839
  Synthetic oligonucleotide

SEQ ID NO: 635202 - DNA, 54 bp, Artificial; identical to SEQ ID NO: 160394
  Synthetic oligonucleotide

SEQ ID NO: 635203 - DNA, 60 bp, Artificial; identical to SEQ ID NO: 253053
  Synthetic oligonucleotide

SEQ ID NO: 635204 - DNA, 59 bp, Artificial; identical to SEQ ID NO: 241974
  Synthetic oligonucleotide

SEQ ID NO: 635205 - DNA, 60 bp, Artificial; identical to SEQ ID NO: 243798
  Synthetic oligonucleotide

SEQ ID NO: 635206 - DNA, 50 bp, Artificial; identical to SEQ ID NO: 160631
  Synthetic oligonucleotide

SEQ ID NO: 635207 - DNA, 57 bp, Artificial; identical to SEQ ID NO: 243909
  Synthetic oligonucleotide

SEQ ID NO: 635208 - DNA, 60 bp, Artificial; identical to SEQ ID NO: 198415
  Synthetic oligonucleotide

SEQ ID NO: 635209 - DNA, 57 bp, Artificial; identical to SEQ ID NO: 239409
  Synthetic oligonucleotide

SEQ ID NO: 635210 - DNA, 55 bp, Artificial; identical to SEQ ID NO: 198054
  Synthetic oligonucleotide

SEQ ID NO: 635211 - DNA, 58 bp, Artificial; identical to SEQ ID NO: 160960
  Synthetic oligonucleotide

SEQ ID NO: 635212 - DNA, 55 bp, Artificial; identical to SEQ ID NO: 147668
  Synthetic oligonucleotide

SEQ ID NO: 635213 - DNA, 55 bp, Artificial; identical to SEQ ID NO: 206864
  Synthetic oligonucleotide

SEQ ID NO: 635214 - DNA, 55 bp, Artificial; identical to SEQ ID NO: 240395
  Synthetic oligonucleotide

SEQ ID NO: 635215 - DNA, 55 bp, Artificial; identical to SEQ ID NO: 260006
  Synthetic oligonucleotide

SEQ ID NO: 635216 - DNA, 55 bp, Artificial; identical to SEQ ID NO: 221922
  Synthetic oligonucleotide

SEQ ID NO: 635217 - DNA, 57 bp, Artificial; identical to SEQ ID NO: 223806
  Synthetic oligonucleotide

SEQ ID NO: 635218 - DNA, 59 bp, Artificial; identical to SEQ ID NO: 144338
  Synthetic oligonucleotide

SEQ ID NO: 635219 - DNA, 60 bp, Artificial; identical to SEQ ID NO: 170782
  Synthetic oligonucleotide

SEQ ID NO: 635220 - DNA, 51 bp, Artificial; identical to SEQ ID NO: 149838
  Synthetic oligonucleotide

SEQ ID NO: 635221 - DNA, 55 bp, Artificial; identical to SEQ ID NO: 147667
  Synthetic oligonucleotide

SEQ ID NO: 635222 - DNA, 55 bp, Artificial; identical to SEQ ID NO: 244670
  Synthetic oligonucleotide

SEQ ID NO: 635223 - DNA, 60 bp, Artificial; identical to SEQ ID NO: 204036
  Synthetic oligonucleotide

SEQ ID NO: 635224 - DNA, 55 bp, Artificial; identical to SEQ ID NO: 159339
  Synthetic oligonucleotide

SEQ ID NO: 635225 - DNA, 55 bp, Artificial; identical to SEQ ID NO: 142080
  Synthetic oligonucleotide

SEQ ID NO: 635226 - DNA, 53 bp, Artificial; identical to SEQ ID NO: 142296
  Synthetic oligonucleotide

SEQ ID NO: 635227 - DNA, 55 bp, Artificial; identical to SEQ ID NO: 240396
  Synthetic oligonucleotide

SEQ ID NO: 635228 - DNA, 55 bp, Artificial; identical to SEQ ID NO: 256938
  Synthetic oligonucleotide

SEQ ID NO: 635229 - DNA, 50 bp, Artificial; identical to SEQ ID NO: 209770
  Synthetic oligonucleotide

SEQ ID NO: 635230 - DNA, 55 bp, Artificial; identical to SEQ ID NO: 180833
  Synthetic oligonucleotide

SEQ ID NO: 635231 - DNA, 55 bp, Artificial; identical to SEQ ID NO: 240397
  Synthetic oligonucleotide

SEQ ID NO: 635232 - DNA, 55 bp, Artificial; identical to SEQ ID NO: 190162
  Synthetic oligonucleotide

SEQ ID NO: 635233 - DNA, 51 bp, Artificial; identical to SEQ ID NO: 204004
  Synthetic oligonucleotide

SEQ ID NO: 635234 - DNA, 51 bp, Artificial; identical to SEQ ID NO: 161390
  Synthetic oligonucleotide

SEQ ID NO: 635235 - DNA, 53 bp, Artificial; identical to SEQ ID NO: 240666
  Synthetic oligonucleotide

SEQ ID NO: 635236 - DNA, 54 bp, Artificial; identical to SEQ ID NO: 238605
  Synthetic oligonucleotide

SEQ ID NO: 635237 - DNA, 51 bp, Artificial; identical to SEQ ID NO: 220824
  Synthetic oligonucleotide

SEQ ID NO: 635238 - DNA, 60 bp, Artificial; identical to SEQ ID NO: 187506
  Synthetic oligonucleotide

SEQ ID NO: 635239 - DNA, 55 bp, Artificial; identical to SEQ ID NO: 190159
  Synthetic oligonucleotide

SEQ ID NO: 635240 - DNA, 55 bp, Artificial; identical to SEQ ID NO: 198053
  Synthetic oligonucleotide

SEQ ID NO: 635241 - DNA, 60 bp, Artificial; identical to SEQ ID NO: 201846
  Synthetic oligonucleotide

SEQ ID NO: 635242 - DNA, 58 bp, Artificial; identical to SEQ ID NO: 147177
  Synthetic oligonucleotide

SEQ ID NO: 635243 - DNA, 60 bp, Artificial; identical to SEQ ID NO: 144765
  Synthetic oligonucleotide

SEQ ID NO: 635244 - DNA, 55 bp, Artificial; identical to SEQ ID NO: 155359
  Synthetic oligonucleotide

SEQ ID NO: 635245 - DNA, 53 bp, Artificial; identical to SEQ ID NO: 202492
  Synthetic oligonucleotide

SEQ ID NO: 635246 - DNA, 51 bp, Artificial; identical to SEQ ID NO: 149842
  Synthetic oligonucleotide

SEQ ID NO: 635247 - DNA, 56 bp, Artificial; identical to SEQ ID NO: 201844
  Synthetic oligonucleotide

SEQ ID NO: 635248 - DNA, 55 bp, Artificial; identical to SEQ ID NO: 238139
  Synthetic oligonucleotide

SEQ ID NO: 635249 - DNA, 55 bp, Artificial; identical to SEQ ID NO: 147663
  Synthetic oligonucleotide

SEQ ID NO: 635250 - DNA, 55 bp, Artificial; identical to SEQ ID NO: 256936
  Synthetic oligonucleotide

SEQ ID NO: 635251 - DNA, 59 bp, Artificial; identical to SEQ ID NO: 210807
  Synthetic oligonucleotide

SEQ ID NO: 635252 - DNA, 55 bp, Artificial; identical to SEQ ID NO: 194409
  Synthetic oligonucleotide

SEQ ID NO: 635253 - DNA, 55 bp, Artificial; identical to SEQ ID NO: 166332
  Synthetic oligonucleotide

SEQ ID NO: 635254 - DNA, 54 bp, Artificial; identical to SEQ ID NO: 147329
  Synthetic oligonucleotide

SEQ ID NO: 635255 - DNA, 55 bp, Artificial; identical to SEQ ID NO: 147659
  Synthetic oligonucleotide

SEQ ID NO: 635256 - DNA, 55 bp, Artificial; identical to SEQ ID NO: 208248
  Synthetic oligonucleotide

SEQ ID NO: 635257 - DNA, 55 bp, Artificial; identical to SEQ ID NO: 166063
  Synthetic oligonucleotide

SEQ ID NO: 635258 - DNA, 55 bp, Artificial; identical to SEQ ID NO: 162010
  Synthetic oligonucleotide

SEQ ID NO: 635259 - DNA, 51 bp, Artificial; identical to SEQ ID NO: 169424
  Synthetic oligonucleotide

SEQ ID NO: 635260 - DNA, 54 bp, Artificial; identical to SEQ ID NO: 249844
  Synthetic oligonucleotide

SEQ ID NO: 635261 - DNA, 57 bp, Artificial; identical to SEQ ID NO: 201213
  Synthetic oligonucleotide

SEQ ID NO: 635262 - DNA, 55 bp, Artificial; identical to SEQ ID NO: 187414
  Synthetic oligonucleotide

SEQ ID NO: 635263 - DNA, 52 bp, Artificial; identical to SEQ ID NO: 202136
  Synthetic oligonucleotide

SEQ ID NO: 635264 - DNA, 53 bp, Artificial; identical to SEQ ID NO: 189099
  Synthetic oligonucleotide

SEQ ID NO: 635265 - DNA, 60 bp, Artificial; identical to SEQ ID NO: 180427
  Synthetic oligonucleotide

SEQ ID NO: 635266 - DNA, 55 bp, Artificial; identical to SEQ ID NO: 147658
  Synthetic oligonucleotide

SEQ ID NO: 635267 - DNA, 55 bp, Artificial; identical to SEQ ID NO: 202135
  Synthetic oligonucleotide

SEQ ID NO: 635268 - DNA, 55 bp, Artificial; identical to SEQ ID NO: 151579
  Synthetic oligonucleotide

SEQ ID NO: 635269 - DNA, 52 bp, Artificial; identical to SEQ ID NO: 203971
  Synthetic oligonucleotide

SEQ ID NO: 635270 - DNA, 55 bp, Artificial; identical to SEQ ID NO: 218584
  Synthetic oligonucleotide

SEQ ID NO: 635271 - DNA, 51 bp, Artificial; identical to SEQ ID NO: 155601
  Synthetic oligonucleotide

SEQ ID NO: 635272 - DNA, 56 bp, Artificial; identical to SEQ ID NO: 142307
  Synthetic oligonucleotide

SEQ ID NO: 635273 - DNA, 56 bp, Artificial; identical to SEQ ID NO: 192230
  Synthetic oligonucleotide

SEQ ID NO: 635274 - DNA, 55 bp, Artificial; identical to SEQ ID NO: 147657
  Synthetic oligonucleotide

SEQ ID NO: 635275 - DNA, 55 bp, Artificial; identical to SEQ ID NO: 188665
  Synthetic oligonucleotide

SEQ ID NO: 635276 - DNA, 56 bp, Artificial; identical to SEQ ID NO: 239527
  Synthetic oligonucleotide

SEQ ID NO: 635277 - DNA, 57 bp, Artificial; identical to SEQ ID NO: 172824
  Synthetic oligonucleotide

SEQ ID NO: 635278 - DNA, 51 bp, Artificial; identical to SEQ ID NO: 209719
  Synthetic oligonucleotide

SEQ ID NO: 635279 - DNA, 55 bp, Artificial; identical to SEQ ID NO: 180826
  Synthetic oligonucleotide

SEQ ID NO: 635280 - DNA, 56 bp, Artificial; identical to SEQ ID NO: 179973
  Synthetic oligonucleotide

SEQ ID NO: 635281 - DNA, 53 bp, Artificial; identical to SEQ ID NO: 217457
  Synthetic oligonucleotide

SEQ ID NO: 635282 - DNA, 52 bp, Artificial; identical to SEQ ID NO: 165102
  Synthetic oligonucleotide

SEQ ID NO: 635283 - DNA, 55 bp, Artificial; identical to SEQ ID NO: 169604
  Synthetic oligonucleotide

SEQ ID NO: 635284 - DNA, 58 bp, Artificial; identical to SEQ ID NO: 248421
  Synthetic oligonucleotide

SEQ ID NO: 635285 - DNA, 54 bp, Artificial; identical to SEQ ID NO: 187413
  Synthetic oligonucleotide

SEQ ID NO: 635286 - DNA, 50 bp, Artificial; identical to SEQ ID NO: 266353
  Synthetic oligonucleotide

SEQ ID NO: 635287 - DNA, 57 bp, Artificial; identical to SEQ ID NO: 224316
  Synthetic oligonucleotide

SEQ ID NO: 635288 - DNA, 55 bp, Artificial; identical to SEQ ID NO: 180372
  Synthetic oligonucleotide

SEQ ID NO: 635289 - DNA, 55 bp, Artificial; identical to SEQ ID NO: 144813
  Synthetic oligonucleotide

SEQ ID NO: 635290 - DNA, 58 bp, Artificial; identical to SEQ ID NO: 209262
  Synthetic oligonucleotide

SEQ ID NO: 635291 - DNA, 60 bp, Artificial; identical to SEQ ID NO: 246599
  Synthetic oligonucleotide

SEQ ID NO: 635292 - DNA, 55 bp, Artificial; identical to SEQ ID NO: 233418
  Synthetic oligonucleotide

SEQ ID NO: 635293 - DNA, 55 bp, Artificial; identical to SEQ ID NO: 169615
  Synthetic oligonucleotide

SEQ ID NO: 635294 - DNA, 60 bp, Artificial; identical to SEQ ID NO: 170777
  Synthetic oligonucleotide

SEQ ID NO: 635295 - DNA, 55 bp, Artificial; identical to SEQ ID NO: 154171
  Synthetic oligonucleotide

SEQ ID NO: 635296 - DNA, 55 bp, Artificial; identical to SEQ ID NO: 212707
  Synthetic oligonucleotide

SEQ ID NO: 635297 - DNA, 55 bp, Artificial; identical to SEQ ID NO: 202686
  Synthetic oligonucleotide

SEQ ID NO: 635298 - DNA, 56 bp, Artificial; identical to SEQ ID NO: 197842
  Synthetic oligonucleotide

SEQ ID NO: 635299 - DNA, 57 bp, Artificial; identical to SEQ ID NO: 160961
  Synthetic oligonucleotide

SEQ ID NO: 635300 - DNA, 55 bp, Artificial; identical to SEQ ID NO: 198047
  Synthetic oligonucleotide

SEQ ID NO: 635301 - DNA, 54 bp, Artificial; identical to SEQ ID NO: 238598
  Synthetic oligonucleotide

SEQ ID NO: 635302 - DNA, 55 bp, Artificial; identical to SEQ ID NO: 256934
  Synthetic oligonucleotide

SEQ ID NO: 635303 - DNA, 50 bp, Artificial; identical to SEQ ID NO: 237496
  Synthetic oligonucleotide

SEQ ID NO: 635304 - DNA, 60 bp, Artificial; identical to SEQ ID NO: 201843
  Synthetic oligonucleotide

SEQ ID NO: 635305 - DNA, 55 bp, Artificial; identical to SEQ ID NO: 217383
  Synthetic oligonucleotide

SEQ ID NO: 635306 - DNA, 55 bp, Artificial; identical to SEQ ID NO: 147602
  Synthetic oligonucleotide

SEQ ID NO: 635307 - DNA, 60 bp, Artificial; identical to SEQ ID NO: 246588
  Synthetic oligonucleotide

SEQ ID NO: 635308 - DNA, 53 bp, Artificial; identical to SEQ ID NO: 157296
  Synthetic oligonucleotide

SEQ ID NO: 635309 - DNA, 55 bp, Artificial; identical to SEQ ID NO: 180823
  Synthetic oligonucleotide

SEQ ID NO: 635310 - DNA, 55 bp, Artificial; identical to SEQ ID NO: 147601
  Synthetic oligonucleotide

SEQ ID NO: 635311 - DNA, 55 bp, Artificial; identical to SEQ ID NO: 248999
  Synthetic oligonucleotide

SEQ ID NO: 635312 - DNA, 60 bp, Artificial; identical to SEQ ID NO: 150736
  Synthetic oligonucleotide

SEQ ID NO: 635313 - DNA, 55 bp, Artificial; identical to SEQ ID NO: 197306
  Synthetic oligonucleotide

SEQ ID NO: 635314 - DNA, 55 bp, Artificial; identical to SEQ ID NO: 238249
  Synthetic oligonucleotide

SEQ ID NO: 635315 - DNA, 51 bp, Artificial; identical to SEQ ID NO: 167627
  Synthetic oligonucleotide

SEQ ID NO: 635316 - DNA, 60 bp, Artificial; identical to SEQ ID NO: 180315
  Synthetic oligonucleotide

SEQ ID NO: 635317 - DNA, 53 bp, Artificial; identical to SEQ ID NO: 188471
  Synthetic oligonucleotide

SEQ ID NO: 635318 - DNA, 52 bp, Artificial; identical to SEQ ID NO: 153629
  Synthetic oligonucleotide

SEQ ID NO: 635319 - DNA, 60 bp, Artificial; identical to SEQ ID NO: 205192
  Synthetic oligonucleotide

SEQ ID NO: 635320 - DNA, 54 bp, Artificial; identical to SEQ ID NO: 207697
  Synthetic oligonucleotide

SEQ ID NO: 635321 - DNA, 59 bp, Artificial; identical to SEQ ID NO: 256549
  Synthetic oligonucleotide

SEQ ID NO: 635322 - DNA, 51 bp, Artificial; identical to SEQ ID NO: 149846
  Synthetic oligonucleotide

SEQ ID NO: 635323 - DNA, 50 bp, Artificial; identical to SEQ ID NO: 241332
  Synthetic oligonucleotide

SEQ ID NO: 635324 - DNA, 57 bp, Artificial; identical to SEQ ID NO: 166790
  Synthetic oligonucleotide

SEQ ID NO: 635325 - DNA, 55 bp, Artificial; identical to SEQ ID NO: 244664
  Synthetic oligonucleotide

SEQ ID NO: 635326 - DNA, 60 bp, Artificial; identical to SEQ ID NO: 198393
  Synthetic oligonucleotide

SEQ ID NO: 635327 - DNA, 55 bp, Artificial; identical to SEQ ID NO: 172923
  Synthetic oligonucleotide

SEQ ID NO: 635328 - DNA, 60 bp, Artificial; identical to SEQ ID NO: 142318
  Synthetic oligonucleotide

SEQ ID NO: 635329 - DNA, 55 bp, Artificial; identical to SEQ ID NO: 187412
  Synthetic oligonucleotide

SEQ ID NO: 635330 - DNA, 55 bp, Artificial; identical to SEQ ID NO: 249001
  Synthetic oligonucleotide

SEQ ID NO: 635331 - DNA, 55 bp, Artificial; identical to SEQ ID NO: 240401
  Synthetic oligonucleotide

SEQ ID NO: 635332 - DNA, 55 bp, Artificial; identical to SEQ ID NO: 166330
  Synthetic oligonucleotide

SEQ ID NO: 635333 - DNA, 55 bp, Artificial; identical to SEQ ID NO: 194410
  Synthetic oligonucleotide

SEQ ID NO: 635334 - DNA, 54 bp, Artificial; identical to SEQ ID NO: 218573
  Synthetic oligonucleotide

SEQ ID NO: 635335 - DNA, 53 bp, Artificial; identical to SEQ ID NO: 209637
  Synthetic oligonucleotide

SEQ ID NO: 635336 - DNA, 55 bp, Artificial; identical to SEQ ID NO: 147595
  Synthetic oligonucleotide

SEQ ID NO: 635337 - DNA, 52 bp, Artificial; identical to SEQ ID NO: 167093
  Synthetic oligonucleotide

SEQ ID NO: 635338 - DNA, 55 bp, Artificial; identical to SEQ ID NO: 240403
  Synthetic oligonucleotide

SEQ ID NO: 635339 - DNA, 60 bp, Artificial; identical to SEQ ID NO: 142329
  Synthetic oligonucleotide

SEQ ID NO: 635340 - DNA, 55 bp, Artificial; identical to SEQ ID NO: 217384
  Synthetic oligonucleotide

SEQ ID NO: 635341 - DNA, 56 bp, Artificial; identical to SEQ ID NO: 171096
  Synthetic oligonucleotide

SEQ ID NO: 635342 - DNA, 55 bp, Artificial; identical to SEQ ID NO: 190157
  Synthetic oligonucleotide

SEQ ID NO: 635343 - DNA, 54 bp, Artificial; identical to SEQ ID NO: 146383
  Synthetic oligonucleotide

SEQ ID NO: 635344 - DNA, 55 bp, Artificial; identical to SEQ ID NO: 194411
  Synthetic oligonucleotide

SEQ ID NO: 635345 - DNA, 55 bp, Artificial; identical to SEQ ID NO: 179972
  Synthetic oligonucleotide

SEQ ID NO: 635346 - DNA, 55 bp, Artificial; identical to SEQ ID NO: 147594
  Synthetic oligonucleotide

SEQ ID NO: 635347 - DNA, 51 bp, Artificial; identical to SEQ ID NO: 186530
  Synthetic oligonucleotide

SEQ ID NO: 635348 - DNA, 52 bp, Artificial; identical to SEQ ID NO: 258164
  Synthetic oligonucleotide

SEQ ID NO: 635349 - DNA, 55 bp, Artificial; identical to SEQ ID NO: 142082
  Synthetic oligonucleotide

SEQ ID NO: 635350 - DNA, 55 bp, Artificial; identical to SEQ ID NO: 159344
  Synthetic oligonucleotide

SEQ ID NO: 635351 - DNA, 55 bp, Artificial; identical to SEQ ID NO: 249002
  Synthetic oligonucleotide

SEQ ID NO: 635352 - DNA, 57 bp, Artificial; identical to SEQ ID NO: 239405
  Synthetic oligonucleotide

SEQ ID NO: 635353 - DNA, 54 bp, Artificial; identical to SEQ ID NO: 199658
  Synthetic oligonucleotide

SEQ ID NO: 635354 - DNA, 58 bp, Artificial; identical to SEQ ID NO: 241967
  Synthetic oligonucleotide

SEQ ID NO: 635355 - DNA, 57 bp, Artificial; identical to SEQ ID NO: 166143
  Synthetic oligonucleotide

SEQ ID NO: 635356 - DNA, 57 bp, Artificial; identical to SEQ ID NO: 254500
  Synthetic oligonucleotide

SEQ ID NO: 635357 - DNA, 58 bp, Artificial; identical to SEQ ID NO: 239333
  Synthetic oligonucleotide

SEQ ID NO: 635358 - DNA, 55 bp, Artificial; identical to SEQ ID NO: 180821
  Synthetic oligonucleotide

SEQ ID NO: 635359 - DNA, 54 bp, Artificial; identical to SEQ ID NO: 170003
  Synthetic oligonucleotide

SEQ ID NO: 635360 - DNA, 55 bp, Artificial; identical to SEQ ID NO: 180863
  Synthetic oligonucleotide

SEQ ID NO: 635361 - DNA, 54 bp, Artificial; identical to SEQ ID NO: 243069
  Synthetic oligonucleotide

SEQ ID NO: 635362 - DNA, 60 bp, Artificial; identical to SEQ ID NO: 160286
  Synthetic oligonucleotide

SEQ ID NO: 635363 - DNA, 55 bp, Artificial; identical to SEQ ID NO: 167293
  Synthetic oligonucleotide

SEQ ID NO: 635364 - DNA, 60 bp, Artificial; identical to SEQ ID NO: 170487
  Synthetic oligonucleotide

SEQ ID NO: 635365 - DNA, 54 bp, Artificial; identical to SEQ ID NO: 146384
  Synthetic oligonucleotide

SEQ ID NO: 635366 - DNA, 59 bp, Artificial; identical to SEQ ID NO: 212459
  Synthetic oligonucleotide

SEQ ID NO: 635367 - DNA, 55 bp, Artificial; identical to SEQ ID NO: 188661
  Synthetic oligonucleotide

SEQ ID NO: 635368 - DNA, 55 bp, Artificial; identical to SEQ ID NO: 155356
  Synthetic oligonucleotide

SEQ ID NO: 635369 - DNA, 56 bp, Artificial; identical to SEQ ID NO: 241969
  Synthetic oligonucleotide

SEQ ID NO: 635370 - DNA, 52 bp, Artificial; identical to SEQ ID NO: 186008
  Synthetic oligonucleotide

SEQ ID NO: 635371 - DNA, 60 bp, Artificial; identical to SEQ ID NO: 194948
  Synthetic oligonucleotide

SEQ ID NO: 635372 - DNA, 60 bp, Artificial; identical to SEQ ID NO: 180271
  Synthetic oligonucleotide

SEQ ID NO: 635373 - DNA, 55 bp, Artificial; identical to SEQ ID NO: 201493
  Synthetic oligonucleotide

SEQ ID NO: 635374 - DNA, 55 bp, Artificial; identical to SEQ ID NO: 224728
  Synthetic oligonucleotide

SEQ ID NO: 635375 - DNA, 60 bp, Artificial; identical to SEQ ID NO: 180260
  Synthetic oligonucleotide

SEQ ID NO: 635376 - DNA, 60 bp, Artificial; identical to SEQ ID NO: 162292
  Synthetic oligonucleotide

SEQ ID NO: 635377 - DNA, 55 bp, Artificial; identical to SEQ ID NO: 207223
  Synthetic oligonucleotide

SEQ ID NO: 635378 - DNA, 55 bp, Artificial; identical to SEQ ID NO: 166328
  Synthetic oligonucleotide

SEQ ID NO: 635379 - DNA, 57 bp, Artificial; identical to SEQ ID NO: 212513
  Synthetic oligonucleotide

SEQ ID NO: 635380 - DNA, 55 bp, Artificial; identical to SEQ ID NO: 238245
  Synthetic oligonucleotide

SEQ ID NO: 635381 - DNA, 60 bp, Artificial; identical to SEQ ID NO: 223839
  Synthetic oligonucleotide

SEQ ID NO: 635382 - DNA, 51 bp, Artificial; identical to SEQ ID NO: 243335
  Synthetic oligonucleotide

SEQ ID NO: 635383 - DNA, 55 bp, Artificial; identical to SEQ ID NO: 161993
  Synthetic oligonucleotide

SEQ ID NO: 635384 - DNA, 55 bp, Artificial; identical to SEQ ID NO: 212710
  Synthetic oligonucleotide

SEQ ID NO: 635385 - DNA, 60 bp, Artificial; identical to SEQ ID NO: 150738
  Synthetic oligonucleotide

SEQ ID NO: 635386 - DNA, 60 bp, Artificial; identical to SEQ ID NO: 198381
  Synthetic oligonucleotide

SEQ ID NO: 635387 - DNA, 55 bp, Artificial; identical to SEQ ID NO: 180859
  Synthetic oligonucleotide

SEQ ID NO: 635388 - DNA, 55 bp, Artificial; identical to SEQ ID NO: 239649
  Synthetic oligonucleotide

SEQ ID NO: 635389 - DNA, 59 bp, Artificial; identical to SEQ ID NO: 142340
  Synthetic oligonucleotide

SEQ ID NO: 635390 - DNA, 55 bp, Artificial; identical to SEQ ID NO: 222617
  Synthetic oligonucleotide

SEQ ID NO: 635391 - DNA, 55 bp, Artificial; identical to SEQ ID NO: 198046
  Synthetic oligonucleotide

SEQ ID NO: 635392 - DNA, 59 bp, Artificial; identical to SEQ ID NO: 254533
  Synthetic oligonucleotide

SEQ ID NO: 635393 - DNA, 55 bp, Artificial; identical to SEQ ID NO: 202132
  Synthetic oligonucleotide

SEQ ID NO: 635394 - DNA, 56 bp, Artificial; identical to SEQ ID NO: 197895
  Synthetic oligonucleotide

SEQ ID NO: 635395 - DNA, 55 bp, Artificial; identical to SEQ ID NO: 194413
  Synthetic oligonucleotide

SEQ ID NO: 635396 - DNA, 55 bp, Artificial; identical to SEQ ID NO: 198045
  Synthetic oligonucleotide

SEQ ID NO: 635397 - DNA, 55 bp, Artificial; identical to SEQ ID NO: 190152
  Synthetic oligonucleotide

SEQ ID NO: 635398 - DNA, 60 bp, Artificial; identical to SEQ ID NO: 241971
  Synthetic oligonucleotide

SEQ ID NO: 635399 - DNA, 60 bp, Artificial; identical to SEQ ID NO: 241972
  Synthetic oligonucleotide

SEQ ID NO: 635400 - DNA, 60 bp, Artificial; identical to SEQ ID NO: 150742
  Synthetic oligonucleotide

SEQ ID NO: 635401 - DNA, 55 bp, Artificial; identical to SEQ ID NO: 142086
  Synthetic oligonucleotide

SEQ ID NO: 635402 - DNA, 51 bp, Artificial; identical to SEQ ID NO: 152114
  Synthetic oligonucleotide

SEQ ID NO: 635403 - DNA, 55 bp, Artificial; identical to SEQ ID NO: 159346
  Synthetic oligonucleotide

SEQ ID NO: 635404 - DNA, 60 bp, Artificial; identical to SEQ ID NO: 164900
  Synthetic oligonucleotide

SEQ ID NO: 635405 - DNA, 55 bp, Artificial; identical to SEQ ID NO: 147620
  Synthetic oligonucleotide

SEQ ID NO: 635406 - DNA, 60 bp, Artificial; identical to SEQ ID NO: 154802
  Synthetic oligonucleotide

SEQ ID NO: 635407 - DNA, 55 bp, Artificial; identical to SEQ ID NO: 159347
  Synthetic oligonucleotide

SEQ ID NO: 635408 - DNA, 55 bp, Artificial; identical to SEQ ID NO: 224729
  Synthetic oligonucleotide

SEQ ID NO: 635409 - DNA, 55 bp, Artificial; identical to SEQ ID NO: 180856
  Synthetic oligonucleotide

SEQ ID NO: 635410 - DNA, 55 bp, Artificial; identical to SEQ ID NO: 180238
  Synthetic oligonucleotide

SEQ ID NO: 635411 - DNA, 55 bp, Artificial; identical to SEQ ID NO: 190149
  Synthetic oligonucleotide

SEQ ID NO: 635412 - DNA, 60 bp, Artificial; identical to SEQ ID NO: 180227
  Synthetic oligonucleotide

SEQ ID NO: 635413 - DNA, 59 bp, Artificial; identical to SEQ ID NO: 222871
  Synthetic oligonucleotide

SEQ ID NO: 635414 - DNA, 55 bp, Artificial; identical to SEQ ID NO: 159348
  Synthetic oligonucleotide

SEQ ID NO: 635415 - DNA, 55 bp, Artificial; identical to SEQ ID NO: 252813
  Synthetic oligonucleotide

SEQ ID NO: 635416 - DNA, 55 bp, Artificial; identical to SEQ ID NO: 190185
  Synthetic oligonucleotide

SEQ ID NO: 635417 - DNA, 57 bp, Artificial; identical to SEQ ID NO: 237784
  Synthetic oligonucleotide

SEQ ID NO: 635418 - DNA, 60 bp, Artificial; identical to SEQ ID NO: 266331
  Synthetic oligonucleotide

SEQ ID NO: 635419 - DNA, 55 bp, Artificial; identical to SEQ ID NO: 198042
  Synthetic oligonucleotide

SEQ ID NO: 635420 - DNA, 53 bp, Artificial; identical to SEQ ID NO: 170476
  Synthetic oligonucleotide

SEQ ID NO: 635421 - DNA, 51 bp, Artificial; identical to SEQ ID NO: 200061
  Synthetic oligonucleotide

SEQ ID NO: 635422 - DNA, 50 bp, Artificial; identical to SEQ ID NO: 255929
  Synthetic oligonucleotide

SEQ ID NO: 635423 - DNA, 55 bp, Artificial; identical to SEQ ID NO: 224730
  Synthetic oligonucleotide

SEQ ID NO: 635424 - DNA, 60 bp, Artificial; identical to SEQ ID NO: 179605
  Synthetic oligonucleotide

SEQ ID NO: 635425 - DNA, 60 bp, Artificial; identical to SEQ ID NO: 142351
  Synthetic oligonucleotide

SEQ ID NO: 635426 - DNA, 55 bp, Artificial; identical to SEQ ID NO: 147614
  Synthetic oligonucleotide

SEQ ID NO: 635427 - DNA, 55 bp, Artificial; identical to SEQ ID NO: 208277
  Synthetic oligonucleotide

SEQ ID NO: 635428 - DNA, 52 bp, Artificial; identical to SEQ ID NO: 157497
  Synthetic oligonucleotide

SEQ ID NO: 635429 - DNA, 55 bp, Artificial; identical to SEQ ID NO: 151582
  Synthetic oligonucleotide

SEQ ID NO: 635430 - DNA, 52 bp, Artificial; identical to SEQ ID NO: 222077
  Synthetic oligonucleotide

SEQ ID NO: 635431 - DNA, 55 bp, Artificial; identical to SEQ ID NO: 252812
  Synthetic oligonucleotide

SEQ ID NO: 635432 - DNA, 55 bp, Artificial; identical to SEQ ID NO: 166325
  Synthetic oligonucleotide

SEQ ID NO: 635433 - DNA, 55 bp, Artificial; identical to SEQ ID NO: 239651
  Synthetic oligonucleotide

SEQ ID NO: 635434 - DNA, 55 bp, Artificial; identical to SEQ ID NO: 239652
  Synthetic oligonucleotide

SEQ ID NO: 635435 - DNA, 55 bp, Artificial; identical to SEQ ID NO: 224731
  Synthetic oligonucleotide

SEQ ID NO: 635436 - DNA, 54 bp, Artificial; identical to SEQ ID NO: 210903
  Synthetic oligonucleotide

SEQ ID NO: 635437 - DNA, 55 bp, Artificial; identical to SEQ ID NO: 188660
  Synthetic oligonucleotide

SEQ ID NO: 635438 - DNA, 55 bp, Artificial; identical to SEQ ID NO: 194416
  Synthetic oligonucleotide

SEQ ID NO: 635439 - DNA, 55 bp, Artificial; identical to SEQ ID NO: 169648
  Synthetic oligonucleotide

SEQ ID NO: 635440 - DNA, 60 bp, Artificial; identical to SEQ ID NO: 179572
  Synthetic oligonucleotide

SEQ ID NO: 635441 - DNA, 59 bp, Artificial; identical to SEQ ID NO: 254567
  Synthetic oligonucleotide

SEQ ID NO: 635442 - DNA, 55 bp, Artificial; identical to SEQ ID NO: 190184
  Synthetic oligonucleotide

SEQ ID NO: 635443 - DNA, 55 bp, Artificial; identical to SEQ ID NO: 191857
  Synthetic oligonucleotide

SEQ ID NO: 635444 - DNA, 53 bp, Artificial; identical to SEQ ID NO: 241973
  Synthetic oligonucleotide

SEQ ID NO: 635445 - DNA, 50 bp, Artificial; identical to SEQ ID NO: 249687
  Synthetic oligonucleotide

SEQ ID NO: 635446 - DNA, 54 bp, Artificial; identical to SEQ ID NO: 246153
  Synthetic oligonucleotide

SEQ ID NO: 635447 - DNA, 55 bp, Artificial; identical to SEQ ID NO: 215473
  Synthetic oligonucleotide

SEQ ID NO: 635448 - DNA, 55 bp, Artificial; identical to SEQ ID NO: 202130
  Synthetic oligonucleotide

SEQ ID NO: 635449 - DNA, 60 bp, Artificial; identical to SEQ ID NO: 203257
  Synthetic oligonucleotide

SEQ ID NO: 635450 - DNA, 59 bp, Artificial; identical to SEQ ID NO: 263533
  Synthetic oligonucleotide

SEQ ID NO: 635451 - DNA, 51 bp, Artificial; identical to SEQ ID NO: 223802
  Synthetic oligonucleotide

SEQ ID NO: 635452 - DNA, 55 bp, Artificial; identical to SEQ ID NO: 238240
  Synthetic oligonucleotide

SEQ ID NO: 635453 - DNA, 52 bp, Artificial; identical to SEQ ID NO: 149606
  Synthetic oligonucleotide

SEQ ID NO: 635454 - DNA, 55 bp, Artificial; identical to SEQ ID NO: 198040
  Synthetic oligonucleotide

SEQ ID NO: 635455 - DNA, 55 bp, Artificial; identical to SEQ ID NO: 159349
  Synthetic oligonucleotide

SEQ ID NO: 635456 - DNA, 55 bp, Artificial; identical to SEQ ID NO: 198039
  Synthetic oligonucleotide

SEQ ID NO: 635457 - DNA, 55 bp, Artificial; identical to SEQ ID NO: 211138
  Synthetic oligonucleotide

SEQ ID NO: 635458 - DNA, 55 bp, Artificial; identical to SEQ ID NO: 211139
  Synthetic oligonucleotide

SEQ ID NO: 635459 - DNA, 55 bp, Artificial; identical to SEQ ID NO: 238235
  Synthetic oligonucleotide

SEQ ID NO: 635460 - DNA, 55 bp, Artificial; identical to SEQ ID NO: 161975
  Synthetic oligonucleotide

SEQ ID NO: 635461 - DNA, 59 bp, Artificial; identical to SEQ ID NO: 207902
  Synthetic oligonucleotide

SEQ ID NO: 635462 - DNA, 55 bp, Artificial; identical to SEQ ID NO: 257561
  Synthetic oligonucleotide

SEQ ID NO: 635463 - DNA, 55 bp, Artificial; identical to SEQ ID NO: 168568
  Synthetic oligonucleotide

SEQ ID NO: 635464 - DNA, 57 bp, Artificial; identical to SEQ ID NO: 237785
  Synthetic oligonucleotide

SEQ ID NO: 635465 - DNA, 55 bp, Artificial; identical to SEQ ID NO: 218551
  Synthetic oligonucleotide

SEQ ID NO: 635466 - DNA, 55 bp, Artificial; identical to SEQ ID NO: 252811
  Synthetic oligonucleotide

SEQ ID NO: 635467 - DNA, 55 bp, Artificial; identical to SEQ ID NO: 244657
  Synthetic oligonucleotide

SEQ ID NO: 635468 - DNA, 54 bp, Artificial; identical to SEQ ID NO: 212940
  Synthetic oligonucleotide

SEQ ID NO: 635469 - DNA, 55 bp, Artificial; identical to SEQ ID NO: 180976
  Synthetic oligonucleotide

SEQ ID NO: 635470 - DNA, 55 bp, Artificial; identical to SEQ ID NO: 180975
  Synthetic oligonucleotide

SEQ ID NO: 635471 - DNA, 56 bp, Artificial; identical to SEQ ID NO: 210892
  Synthetic oligonucleotide

SEQ ID NO: 635472 - DNA, 55 bp, Artificial; identical to SEQ ID NO: 244656
  Synthetic oligonucleotide

SEQ ID NO: 635473 - DNA, 59 bp, Artificial; identical to SEQ ID NO: 233936
  Synthetic oligonucleotide

SEQ ID NO: 635474 - DNA, 55 bp, Artificial; identical to SEQ ID NO: 190178
  Synthetic oligonucleotide

SEQ ID NO: 635475 - DNA, 55 bp, Artificial; identical to SEQ ID NO: 159350
  Synthetic oligonucleotide

SEQ ID NO: 635476 - DNA, 55 bp, Artificial; identical to SEQ ID NO: 190923
  Synthetic oligonucleotide

SEQ ID NO: 635477 - DNA, 55 bp, Artificial; identical to SEQ ID NO: 188659
  Synthetic oligonucleotide

SEQ ID NO: 635478 - DNA, 51 bp, Artificial; identical to SEQ ID NO: 167624
  Synthetic oligonucleotide

SEQ ID NO: 635479 - DNA, 55 bp, Artificial; identical to SEQ ID NO: 147397
  Synthetic oligonucleotide

SEQ ID NO: 635480 - DNA, 58 bp, Artificial; identical to SEQ ID NO: 245954
  Synthetic oligonucleotide

SEQ ID NO: 635481 - DNA, 55 bp, Artificial; identical to SEQ ID NO: 162026
  Synthetic oligonucleotide

SEQ ID NO: 635482 - DNA, 55 bp, Artificial; identical to SEQ ID NO: 180974
  Synthetic oligonucleotide

SEQ ID NO: 635483 - DNA, 51 bp, Artificial; identical to SEQ ID NO: 186563
  Synthetic oligonucleotide

SEQ ID NO: 635484 - DNA, 55 bp, Artificial; identical to SEQ ID NO: 190924
  Synthetic oligonucleotide

SEQ ID NO: 635485 - DNA, 57 bp, Artificial; identical to SEQ ID NO: 201188
  Synthetic oligonucleotide

SEQ ID NO: 635486 - DNA, 55 bp, Artificial; identical to SEQ ID NO: 238272
  Synthetic oligonucleotide

SEQ ID NO: 635487 - DNA, 60 bp, Artificial; identical to SEQ ID NO: 179450
  Synthetic oligonucleotide

SEQ ID NO: 635488 - DNA, 55 bp, Artificial; identical to SEQ ID NO: 159352
  Synthetic oligonucleotide

SEQ ID NO: 635489 - DNA, 50 bp, Artificial; identical to SEQ ID NO: 246948
  Synthetic oligonucleotide

SEQ ID NO: 635490 - DNA, 51 bp, Artificial; identical to SEQ ID NO: 248004
  Synthetic oligonucleotide

SEQ ID NO: 635491 - DNA, 56 bp, Artificial; identical to SEQ ID NO: 141981
  Synthetic oligonucleotide

SEQ ID NO: 635492 - DNA, 55 bp, Artificial; identical to SEQ ID NO: 153226
  Synthetic oligonucleotide

SEQ ID NO: 635493 - DNA, 55 bp, Artificial; identical to SEQ ID NO: 244653
  Synthetic oligonucleotide

SEQ ID NO: 635494 - DNA, 60 bp, Artificial; identical to SEQ ID NO: 201522
  Synthetic oligonucleotide

SEQ ID NO: 635495 - DNA, 55 bp, Artificial; identical to SEQ ID NO: 207224
  Synthetic oligonucleotide

SEQ ID NO: 635496 - DNA, 55 bp, Artificial; identical to SEQ ID NO: 265926
  Synthetic oligonucleotide

SEQ ID NO: 635497 - DNA, 51 bp, Artificial; identical to SEQ ID NO: 142880
  Synthetic oligonucleotide

SEQ ID NO: 635498 - DNA, 55 bp, Artificial; identical to SEQ ID NO: 194418
  Synthetic oligonucleotide

SEQ ID NO: 635499 - DNA, 55 bp, Artificial; identical to SEQ ID NO: 198036
  Synthetic oligonucleotide

SEQ ID NO: 635500 - DNA, 60 bp, Artificial; identical to SEQ ID NO: 210880
  Synthetic oligonucleotide

SEQ ID NO: 635501 - DNA, 50 bp, Artificial; identical to SEQ ID NO: 193969
  Synthetic oligonucleotide

SEQ ID NO: 635502 - DNA, 55 bp, Artificial; identical to SEQ ID NO: 190173
  Synthetic oligonucleotide

SEQ ID NO: 635503 - DNA, 55 bp, Artificial; identical to SEQ ID NO: 244652
  Synthetic oligonucleotide

SEQ ID NO: 635504 - DNA, 55 bp, Artificial; identical to SEQ ID NO: 244651
  Synthetic oligonucleotide

SEQ ID NO: 635505 - DNA, 56 bp, Artificial; identical to SEQ ID NO: 244042
  Synthetic oligonucleotide

SEQ ID NO: 635506 - DNA, 59 bp, Artificial; identical to SEQ ID NO: 241994
  Synthetic oligonucleotide

SEQ ID NO: 635507 - DNA, 53 bp, Artificial; identical to SEQ ID NO: 190168
  Synthetic oligonucleotide

SEQ ID NO: 635508 - DNA, 55 bp, Artificial; identical to SEQ ID NO: 242975
  Synthetic oligonucleotide

SEQ ID NO: 635509 - DNA, 60 bp, Artificial; identical to SEQ ID NO: 142699
  Synthetic oligonucleotide

SEQ ID NO: 635510 - DNA, 60 bp, Artificial; identical to SEQ ID NO: 217468
  Synthetic oligonucleotide

SEQ ID NO: 635511 - DNA, 59 bp, Artificial; identical to SEQ ID NO: 198359
  Synthetic oligonucleotide

SEQ ID NO: 635512 - DNA, 55 bp, Artificial; identical to SEQ ID NO: 216373
  Synthetic oligonucleotide

SEQ ID NO: 635513 - DNA, 57 bp, Artificial; identical to SEQ ID NO: 198348
  Synthetic oligonucleotide

SEQ ID NO: 635514 - DNA, 50 bp, Artificial; identical to SEQ ID NO: 150073
  Synthetic oligonucleotide

SEQ ID NO: 635515 - DNA, 60 bp, Artificial; identical to SEQ ID NO: 241946
  Synthetic oligonucleotide

SEQ ID NO: 635516 - DNA, 50 bp, Artificial; identical to SEQ ID NO: 150074
  Synthetic oligonucleotide

SEQ ID NO: 635517 - DNA, 60 bp, Artificial; identical to SEQ ID NO: 150706
  Synthetic oligonucleotide

SEQ ID NO: 635518 - DNA, 58 bp, Artificial; identical to SEQ ID NO: 194814
  Synthetic oligonucleotide

SEQ ID NO: 635519 - DNA, 51 bp, Artificial; identical to SEQ ID NO: 201726
  Synthetic oligonucleotide

SEQ ID NO: 635520 - DNA, 53 bp, Artificial; identical to SEQ ID NO: 189131
  Synthetic oligonucleotide

SEQ ID NO: 635521 - DNA, 55 bp, Artificial; identical to SEQ ID NO: 239623
  Synthetic oligonucleotide

SEQ ID NO: 635522 - DNA, 55 bp, Artificial; identical to SEQ ID NO: 208410
  Synthetic oligonucleotide

SEQ ID NO: 635523 - DNA, 55 bp, Artificial; identical to SEQ ID NO: 180969
  Synthetic oligonucleotide

SEQ ID NO: 635524 - DNA, 55 bp, Artificial; identical to SEQ ID NO: 166813
  Synthetic oligonucleotide

SEQ ID NO: 635525 - DNA, 55 bp, Artificial; identical to SEQ ID NO: 208401
  Synthetic oligonucleotide

SEQ ID NO: 635526 - DNA, 55 bp, Artificial; identical to SEQ ID NO: 257559
  Synthetic oligonucleotide

SEQ ID NO: 635527 - DNA, 57 bp, Artificial; identical to SEQ ID NO: 241955
  Synthetic oligonucleotide

SEQ ID NO: 635528 - DNA, 55 bp, Artificial; identical to SEQ ID NO: 263514
  Synthetic oligonucleotide

SEQ ID NO: 635529 - DNA, 60 bp, Artificial; identical to SEQ ID NO: 179405
  Synthetic oligonucleotide

SEQ ID NO: 635530 - DNA, 55 bp, Artificial; identical to SEQ ID NO: 187470
  Synthetic oligonucleotide

SEQ ID NO: 635531 - DNA, 60 bp, Artificial; identical to SEQ ID NO: 206987
  Synthetic oligonucleotide

SEQ ID NO: 635532 - DNA, 53 bp, Artificial; identical to SEQ ID NO: 152440
  Synthetic oligonucleotide

SEQ ID NO: 635533 - DNA, 56 bp, Artificial; identical to SEQ ID NO: 239196
  Synthetic oligonucleotide

SEQ ID NO: 635534 - DNA, 59 bp, Artificial; identical to SEQ ID NO: 241957
  Synthetic oligonucleotide

SEQ ID NO: 635535 - DNA, 55 bp, Artificial; identical to SEQ ID NO: 239631
  Synthetic oligonucleotide

SEQ ID NO: 635536 - DNA, 55 bp, Artificial; identical to SEQ ID NO: 209148
  Synthetic oligonucleotide

SEQ ID NO: 635537 - DNA, 55 bp, Artificial; identical to SEQ ID NO: 160117
  Synthetic oligonucleotide

SEQ ID NO: 635538 - DNA, 54 bp, Artificial; identical to SEQ ID NO: 243065
  Synthetic oligonucleotide

SEQ ID NO: 635539 - DNA, 55 bp, Artificial; identical to SEQ ID NO: 244650
  Synthetic oligonucleotide

SEQ ID NO: 635540 - DNA, 53 bp, Artificial; identical to SEQ ID NO: 253279
  Synthetic oligonucleotide

SEQ ID NO: 635541 - DNA, 57 bp, Artificial; identical to SEQ ID NO: 242563
  Synthetic oligonucleotide

SEQ ID NO: 635542 - DNA, 59 bp, Artificial; identical to SEQ ID NO: 166022
  Synthetic oligonucleotide

SEQ ID NO: 635543 - DNA, 55 bp, Artificial; identical to SEQ ID NO: 180967
  Synthetic oligonucleotide

SEQ ID NO: 635544 - DNA, 60 bp, Artificial; identical to SEQ ID NO: 201838
  Synthetic oligonucleotide

SEQ ID NO: 635545 - DNA, 50 bp, Artificial; identical to SEQ ID NO: 211143
  Synthetic oligonucleotide

SEQ ID NO: 635546 - DNA, 58 bp, Artificial; identical to SEQ ID NO: 179394
  Synthetic oligonucleotide

SEQ ID NO: 635547 - DNA, 53 bp, Artificial; identical to SEQ ID NO: 216643
  Synthetic oligonucleotide

SEQ ID NO: 635548 - DNA, 60 bp, Artificial; identical to SEQ ID NO: 241959
  Synthetic oligonucleotide

SEQ ID NO: 635549 - DNA, 56 bp, Artificial; identical to SEQ ID NO: 194317
  Synthetic oligonucleotide

SEQ ID NO: 635550 - DNA, 51 bp, Artificial; identical to SEQ ID NO: 170214
  Synthetic oligonucleotide

SEQ ID NO: 635551 - DNA, 56 bp, Artificial; identical to SEQ ID NO: 241963
  Synthetic oligonucleotide

SEQ ID NO: 635552 - DNA, 55 bp, Artificial; identical to SEQ ID NO: 168569
  Synthetic oligonucleotide

SEQ ID NO: 635553 - DNA, 52 bp, Artificial; identical to SEQ ID NO: 223670
  Synthetic oligonucleotide

SEQ ID NO: 635554 - DNA, 52 bp, Artificial; identical to SEQ ID NO: 187009
  Synthetic oligonucleotide

SEQ ID NO: 635555 - DNA, 56 bp, Artificial; identical to SEQ ID NO: 254622
  Synthetic oligonucleotide

SEQ ID NO: 635556 - DNA, 51 bp, Artificial; identical to SEQ ID NO: 186553
  Synthetic oligonucleotide

SEQ ID NO: 635557 - DNA, 55 bp, Artificial; identical to SEQ ID NO: 207228
  Synthetic oligonucleotide

SEQ ID NO: 635558 - DNA, 55 bp, Artificial; identical to SEQ ID NO: 180965
  Synthetic oligonucleotide

SEQ ID NO: 635559 - DNA, 57 bp, Artificial; identical to SEQ ID NO: 239373
  Synthetic oligonucleotide

SEQ ID NO: 635560 - DNA, 59 bp, Artificial; identical to SEQ ID NO: 241965
  Synthetic oligonucleotide

SEQ ID NO: 635561 - DNA, 53 bp, Artificial; identical to SEQ ID NO: 157403
  Synthetic oligonucleotide

SEQ ID NO: 635562 - DNA, 60 bp, Artificial; identical to SEQ ID NO: 245921
  Synthetic oligonucleotide

SEQ ID NO: 635563 - DNA, 55 bp, Artificial; identical to SEQ ID NO: 234304
  Synthetic oligonucleotide

SEQ ID NO: 635564 - DNA, 55 bp, Artificial; identical to SEQ ID NO: 154238
  Synthetic oligonucleotide

SEQ ID NO: 635565 - DNA, 55 bp, Artificial; identical to SEQ ID NO: 265753
  Synthetic oligonucleotide

SEQ ID NO: 635566 - DNA, 59 bp, Artificial; identical to SEQ ID NO: 155821
  Synthetic oligonucleotide

SEQ ID NO: 635567 - DNA, 52 bp, Artificial; identical to SEQ ID NO: 209671
  Synthetic oligonucleotide

SEQ ID NO: 635568 - DNA, 52 bp, Artificial; identical to SEQ ID NO: 258166
  Synthetic oligonucleotide

SEQ ID NO: 635569 - DNA, 52 bp, Artificial; identical to SEQ ID NO: 190116
  Synthetic oligonucleotide

SEQ ID NO: 635570 - DNA, 53 bp, Artificial; identical to SEQ ID NO: 247900
  Synthetic oligonucleotide

SEQ ID NO: 635571 - DNA, 55 bp, Artificial; identical to SEQ ID NO: 153225
  Synthetic oligonucleotide

SEQ ID NO: 635572 - DNA, 50 bp, Artificial; identical to SEQ ID NO: 165653
  Synthetic oligonucleotide

SEQ ID NO: 635573 - DNA, 55 bp, Artificial; identical to SEQ ID NO: 190115
  Synthetic oligonucleotide

SEQ ID NO: 635574 - DNA, 55 bp, Artificial; identical to SEQ ID NO: 159224
  Synthetic oligonucleotide

SEQ ID NO: 635575 - DNA, 55 bp, Artificial; identical to SEQ ID NO: 207229
  Synthetic oligonucleotide

SEQ ID NO: 635576 - DNA, 56 bp, Artificial; identical to SEQ ID NO: 142362
  Synthetic oligonucleotide

SEQ ID NO: 635577 - DNA, 55 bp, Artificial; identical to SEQ ID NO: 244584
  Synthetic oligonucleotide

SEQ ID NO: 635578 - DNA, 54 bp, Artificial; identical to SEQ ID NO: 246156
  Synthetic oligonucleotide

SEQ ID NO: 635579 - DNA, 59 bp, Artificial; identical to SEQ ID NO: 188231
  Synthetic oligonucleotide

SEQ ID NO: 635580 - DNA, 58 bp, Artificial; identical to SEQ ID NO: 206985
  Synthetic oligonucleotide

SEQ ID NO: 635581 - DNA, 55 bp, Artificial; identical to SEQ ID NO: 222110
  Synthetic oligonucleotide

SEQ ID NO: 635582 - DNA, 56 bp, Artificial; identical to SEQ ID NO: 266106
  Synthetic oligonucleotide

SEQ ID NO: 635583 - DNA, 53 bp, Artificial; identical to SEQ ID NO: 149473
  Synthetic oligonucleotide

SEQ ID NO: 635584 - DNA, 55 bp, Artificial; identical to SEQ ID NO: 166318
  Synthetic oligonucleotide

SEQ ID NO: 635585 - DNA, 53 bp, Artificial; identical to SEQ ID NO: 240743
  Synthetic oligonucleotide

SEQ ID NO: 635586 - DNA, 55 bp, Artificial; identical to SEQ ID NO: 150710
  Synthetic oligonucleotide

SEQ ID NO: 635587 - DNA, 60 bp, Artificial; identical to SEQ ID NO: 150711
  Synthetic oligonucleotide

SEQ ID NO: 635588 - DNA, 55 bp, Artificial; identical to SEQ ID NO: 244582
  Synthetic oligonucleotide

SEQ ID NO: 635589 - DNA, 55 bp, Artificial; identical to SEQ ID NO: 202126
  Synthetic oligonucleotide

SEQ ID NO: 635590 - DNA, 60 bp, Artificial; identical to SEQ ID NO: 253153
  Synthetic oligonucleotide

SEQ ID NO: 635591 - DNA, 60 bp, Artificial; identical to SEQ ID NO: 241966
  Synthetic oligonucleotide

SEQ ID NO: 635592 - DNA, 56 bp, Artificial; identical to SEQ ID NO: 179592
  Synthetic oligonucleotide

SEQ ID NO: 635593 - DNA, 55 bp, Artificial; identical to SEQ ID NO: 194420
  Synthetic oligonucleotide

SEQ ID NO: 635594 - DNA, 60 bp, Artificial; identical to SEQ ID NO: 266375
  Synthetic oligonucleotide

SEQ ID NO: 635595 - DNA, 55 bp, Artificial; identical to SEQ ID NO: 159225
  Synthetic oligonucleotide

SEQ ID NO: 635596 - DNA, 55 bp, Artificial; identical to SEQ ID NO: 224564
  Synthetic oligonucleotide

SEQ ID NO: 635597 - DNA, 50 bp, Artificial; identical to SEQ ID NO: 222808
  Synthetic oligonucleotide

SEQ ID NO: 635598 - DNA, 55 bp, Artificial; identical to SEQ ID NO: 174450
  Synthetic oligonucleotide

SEQ ID NO: 635599 - DNA, 51 bp, Artificial; identical to SEQ ID NO: 241133
  Synthetic oligonucleotide

SEQ ID NO: 635600 - DNA, 59 bp, Artificial; identical to SEQ ID NO: 205206
  Synthetic oligonucleotide

SEQ ID NO: 635601 - DNA, 57 bp, Artificial; identical to SEQ ID NO: 242027
  Synthetic oligonucleotide

SEQ ID NO: 635602 - DNA, 50 bp, Artificial; identical to SEQ ID NO: 246947
  Synthetic oligonucleotide

SEQ ID NO: 635603 - DNA, 56 bp, Artificial; identical to SEQ ID NO: 237963
  Synthetic oligonucleotide

SEQ ID NO: 635604 - DNA, 60 bp, Artificial; identical to SEQ ID NO: 253164
  Synthetic oligonucleotide

SEQ ID NO: 635605 - DNA, 52 bp, Artificial; identical to SEQ ID NO: 219484
  Synthetic oligonucleotide

SEQ ID NO: 635606 - DNA, 52 bp, Artificial; identical to SEQ ID NO: 155211
  Synthetic oligonucleotide

SEQ ID NO: 635607 - DNA, 54 bp, Artificial; identical to SEQ ID NO: 152003
  Synthetic oligonucleotide

SEQ ID NO: 635608 - DNA, 52 bp, Artificial; identical to SEQ ID NO: 160492
  Synthetic oligonucleotide

SEQ ID NO: 635609 - DNA, 55 bp, Artificial; identical to SEQ ID NO: 238264
  Synthetic oligonucleotide

SEQ ID NO: 635610 - DNA, 60 bp, Artificial; identical to SEQ ID NO: 242785
  Synthetic oligonucleotide

SEQ ID NO: 635611 - DNA, 60 bp, Artificial; identical to SEQ ID NO: 151877
  Synthetic oligonucleotide

SEQ ID NO: 635612 - DNA, 60 bp, Artificial; identical to SEQ ID NO: 150713
  Synthetic oligonucleotide

SEQ ID NO: 635613 - DNA, 52 bp, Artificial; identical to SEQ ID NO: 157505
  Synthetic oligonucleotide

SEQ ID NO: 635614 - DNA, 51 bp, Artificial; identical to SEQ ID NO: 210341
  Synthetic oligonucleotide

SEQ ID NO: 635615 - DNA, 58 bp, Artificial; identical to SEQ ID NO: 243007
  Synthetic oligonucleotide

SEQ ID NO: 635616 - DNA, 51 bp, Artificial; identical to SEQ ID NO: 255695
  Synthetic oligonucleotide

SEQ ID NO: 635617 - DNA, 52 bp, Artificial; identical to SEQ ID NO: 179760
  Synthetic oligonucleotide

SEQ ID NO: 635618 - DNA, 50 bp, Artificial; identical to SEQ ID NO: 243409
  Synthetic oligonucleotide

SEQ ID NO: 635619 - DNA, 53 bp, Artificial; identical to SEQ ID NO: 185781
  Synthetic oligonucleotide

SEQ ID NO: 635620 - DNA, 55 bp, Artificial; identical to SEQ ID NO: 180956
  Synthetic oligonucleotide

SEQ ID NO: 635621 - DNA, 55 bp, Artificial; identical to SEQ ID NO: 239638
  Synthetic oligonucleotide

SEQ ID NO: 635622 - DNA, 60 bp, Artificial; identical to SEQ ID NO: 179727
  Synthetic oligonucleotide

SEQ ID NO: 635623 - DNA, 55 bp, Artificial; identical to SEQ ID NO: 242978
  Synthetic oligonucleotide

SEQ ID NO: 635624 - DNA, 54 bp, Artificial; identical to SEQ ID NO: 217479
  Synthetic oligonucleotide

SEQ ID NO: 635625 - DNA, 55 bp, Artificial; identical to SEQ ID NO: 160116
  Synthetic oligonucleotide

SEQ ID NO: 635626 - DNA, 52 bp, Artificial; identical to SEQ ID NO: 165071
  Synthetic oligonucleotide

SEQ ID NO: 635627 - DNA, 58 bp, Artificial; identical to SEQ ID NO: 150716
  Synthetic oligonucleotide

SEQ ID NO: 635628 - DNA, 50 bp, Artificial; identical to SEQ ID NO: 255782
  Synthetic oligonucleotide

SEQ ID NO: 635629 - DNA, 51 bp, Artificial; identical to SEQ ID NO: 186540
  Synthetic oligonucleotide

SEQ ID NO: 635630 - DNA, 58 bp, Artificial; identical to SEQ ID NO: 150717
  Synthetic oligonucleotide

SEQ ID NO: 635631 - DNA, 55 bp, Artificial; identical to SEQ ID NO: 256925
  Synthetic oligonucleotide

SEQ ID NO: 635632 - DNA, 58 bp, Artificial; identical to SEQ ID NO: 179643
  Synthetic oligonucleotide

SEQ ID NO: 635633 - DNA, 55 bp, Artificial; identical to SEQ ID NO: 244581
  Synthetic oligonucleotide

SEQ ID NO: 635634 - DNA, 60 bp, Artificial; identical to SEQ ID NO: 189965
  Synthetic oligonucleotide

SEQ ID NO: 635635 - DNA, 54 bp, Artificial; identical to SEQ ID NO: 185287
  Synthetic oligonucleotide

SEQ ID NO: 635636 - DNA, 54 bp, Artificial; identical to SEQ ID NO: 180999
  Synthetic oligonucleotide

SEQ ID NO: 635637 - DNA, 53 bp, Artificial; identical to SEQ ID NO: 218529
  Synthetic oligonucleotide

SEQ ID NO: 635638 - DNA, 55 bp, Artificial; identical to SEQ ID NO: 144810
  Synthetic oligonucleotide

SEQ ID NO: 635639 - DNA, 55 bp, Artificial; identical to SEQ ID NO: 147366
  Synthetic oligonucleotide

SEQ ID NO: 635640 - DNA, 56 bp, Artificial; identical to SEQ ID NO: 233939
  Synthetic oligonucleotide

SEQ ID NO: 635641 - DNA, 53 bp, Artificial; identical to SEQ ID NO: 155546
  Synthetic oligonucleotide

SEQ ID NO: 635642 - DNA, 53 bp, Artificial; identical to SEQ ID NO: 161319
  Synthetic oligonucleotide

SEQ ID NO: 635643 - DNA, 53 bp, Artificial; identical to SEQ ID NO: 149468
  Synthetic oligonucleotide

SEQ ID NO: 635644 - DNA, 51 bp, Artificial; identical to SEQ ID NO: 209715
  Synthetic oligonucleotide

SEQ ID NO: 635645 - DNA, 54 bp, Artificial; identical to SEQ ID NO: 149276
  Synthetic oligonucleotide

SEQ ID NO: 635646 - DNA, 55 bp, Artificial; identical to SEQ ID NO: 239639
  Synthetic oligonucleotide

SEQ ID NO: 635647 - DNA, 56 bp, Artificial; identical to SEQ ID NO: 207060
  Synthetic oligonucleotide

SEQ ID NO: 635648 - DNA, 55 bp, Artificial; identical to SEQ ID NO: 244580
  Synthetic oligonucleotide

SEQ ID NO: 635649 - DNA, 54 bp, Artificial; identical to SEQ ID NO: 153564
  Synthetic oligonucleotide

SEQ ID NO: 635650 - DNA, 55 bp, Artificial; identical to SEQ ID NO: 154251
  Synthetic oligonucleotide

SEQ ID NO: 635651 - DNA, 58 bp, Artificial; identical to SEQ ID NO: 239254
  Synthetic oligonucleotide

SEQ ID NO: 635652 - DNA, 55 bp, Artificial; identical to SEQ ID NO: 142104
  Synthetic oligonucleotide

SEQ ID NO: 635653 - DNA, 51 bp, Artificial; identical to SEQ ID NO: 213068
  Synthetic oligonucleotide

SEQ ID NO: 635654 - DNA, 55 bp, Artificial; identical to SEQ ID NO: 267323
  Synthetic oligonucleotide

SEQ ID NO: 635655 - DNA, 51 bp, Artificial; identical to SEQ ID NO: 188832
  Synthetic oligonucleotide

SEQ ID NO: 635656 - DNA, 55 bp, Artificial; identical to SEQ ID NO: 161229
  Synthetic oligonucleotide

SEQ ID NO: 635657 - DNA, 59 bp, Artificial; identical to SEQ ID NO: 142373
  Synthetic oligonucleotide

SEQ ID NO: 635658 - DNA, 55 bp, Artificial; identical to SEQ ID NO: 160838
  Synthetic oligonucleotide

SEQ ID NO: 635659 - DNA, 53 bp, Artificial; identical to SEQ ID NO: 199694
  Synthetic oligonucleotide

SEQ ID NO: 635660 - DNA, 55 bp, Artificial; identical to SEQ ID NO: 197303
  Synthetic oligonucleotide

SEQ ID NO: 635661 - DNA, 54 bp, Artificial; identical to SEQ ID NO: 217490
  Synthetic oligonucleotide

SEQ ID NO: 635662 - DNA, 55 bp, Artificial; identical to SEQ ID NO: 162007
  Synthetic oligonucleotide

SEQ ID NO: 635663 - DNA, 49 bp, Artificial; identical to SEQ ID NO: 242028
  Synthetic oligonucleotide

SEQ ID NO: 635664 - DNA, 54 bp, Artificial; identical to SEQ ID NO: 187464
  Synthetic oligonucleotide

SEQ ID NO: 635665 - DNA, 58 bp, Artificial; identical to SEQ ID NO: 242029
  Synthetic oligonucleotide

SEQ ID NO: 635666 - DNA, 59 bp, Artificial; identical to SEQ ID NO: 150720
  Synthetic oligonucleotide

SEQ ID NO: 635667 - DNA, 55 bp, Artificial; identical to SEQ ID NO: 217393
  Synthetic oligonucleotide

SEQ ID NO: 635668 - DNA, 57 bp, Artificial; identical to SEQ ID NO: 242032
  Synthetic oligonucleotide

SEQ ID NO: 635669 - DNA, 52 bp, Artificial; identical to SEQ ID NO: 190898
  Synthetic oligonucleotide

SEQ ID NO: 635670 - DNA, 52 bp, Artificial; identical to SEQ ID NO: 170454
  Synthetic oligonucleotide

SEQ ID NO: 635671 - DNA, 51 bp, Artificial; identical to SEQ ID NO: 243229
  Synthetic oligonucleotide

SEQ ID NO: 635672 - DNA, 56 bp, Artificial; identical to SEQ ID NO: 242037
  Synthetic oligonucleotide

SEQ ID NO: 635673 - DNA, 54 bp, Artificial; identical to SEQ ID NO: 240678
  Synthetic oligonucleotide

SEQ ID NO: 635674 - DNA, 56 bp, Artificial; identical to SEQ ID NO: 197891
  Synthetic oligonucleotide

SEQ ID NO: 635675 - DNA, 50 bp, Artificial; identical to SEQ ID NO: 189731
  Synthetic oligonucleotide

SEQ ID NO: 635676 - DNA, 55 bp, Artificial; identical to SEQ ID NO: 180998
  Synthetic oligonucleotide

SEQ ID NO: 635677 - DNA, 55 bp, Artificial; identical to SEQ ID NO: 194421
  Synthetic oligonucleotide

SEQ ID NO: 635678 - DNA, 59 bp, Artificial; identical to SEQ ID NO: 179289
  Synthetic oligonucleotide

SEQ ID NO: 635679 - DNA, 55 bp, Artificial; identical to SEQ ID NO: 180996
  Synthetic oligonucleotide

SEQ ID NO: 635680 - DNA, 55 bp, Artificial; identical to SEQ ID NO: 159226
  Synthetic oligonucleotide

SEQ ID NO: 635681 - DNA, 55 bp, Artificial; identical to SEQ ID NO: 252810
  Synthetic oligonucleotide

SEQ ID NO: 635682 - DNA, 55 bp, Artificial; identical to SEQ ID NO: 190107
  Synthetic oligonucleotide

SEQ ID NO: 635683 - DNA, 52 bp, Artificial; identical to SEQ ID NO: 191204
  Synthetic oligonucleotide

SEQ ID NO: 635684 - DNA, 53 bp, Artificial; identical to SEQ ID NO: 237005
  Synthetic oligonucleotide

SEQ ID NO: 635685 - DNA, 55 bp, Artificial; identical to SEQ ID NO: 151988
  Synthetic oligonucleotide

SEQ ID NO: 635686 - DNA, 55 bp, Artificial; identical to SEQ ID NO: 211194
  Synthetic oligonucleotide

SEQ ID NO: 635687 - DNA, 55 bp, Artificial; identical to SEQ ID NO: 238262
  Synthetic oligonucleotide

SEQ ID NO: 635688 - DNA, 51 bp, Artificial; identical to SEQ ID NO: 255699
  Synthetic oligonucleotide

SEQ ID NO: 635689 - DNA, 55 bp, Artificial; identical to SEQ ID NO: 239645
  Synthetic oligonucleotide

SEQ ID NO: 635690 - DNA, 54 bp, Artificial; identical to SEQ ID NO: 216620
  Synthetic oligonucleotide

SEQ ID NO: 635691 - DNA, 55 bp, Artificial; identical to SEQ ID NO: 217394
  Synthetic oligonucleotide

SEQ ID NO: 635692 - DNA, 56 bp, Artificial; identical to SEQ ID NO: 147328
  Synthetic oligonucleotide

SEQ ID NO: 635693 - DNA, 55 bp, Artificial; identical to SEQ ID NO: 180989
  Synthetic oligonucleotide

SEQ ID NO: 635694 - DNA, 57 bp, Artificial; identical to SEQ ID NO: 242041
  Synthetic oligonucleotide

SEQ ID NO: 635695 - DNA, 57 bp, Artificial; identical to SEQ ID NO: 150721
  Synthetic oligonucleotide

SEQ ID NO: 635696 - DNA, 60 bp, Artificial; identical to SEQ ID NO: 187484
  Synthetic oligonucleotide

SEQ ID NO: 635697 - DNA, 55 bp, Artificial; identical to SEQ ID NO: 169659
  Synthetic oligonucleotide

SEQ ID NO: 635698 - DNA, 57 bp, Artificial; identical to SEQ ID NO: 154225
  Synthetic oligonucleotide

SEQ ID NO: 635699 - DNA, 59 bp, Artificial; identical to SEQ ID NO: 187473
  Synthetic oligonucleotide

SEQ ID NO: 635700 - DNA, 55 bp, Artificial; identical to SEQ ID NO: 198027
  Synthetic oligonucleotide

SEQ ID NO: 635701 - DNA, 55 bp, Artificial; identical to SEQ ID NO: 244573
  Synthetic oligonucleotide

SEQ ID NO: 635702 - DNA, 55 bp, Artificial; identical to SEQ ID NO: 220704
  Synthetic oligonucleotide

SEQ ID NO: 635703 - DNA, 56 bp, Artificial; identical to SEQ ID NO: 239577
  Synthetic oligonucleotide

SEQ ID NO: 635704 - DNA, 52 bp, Artificial; identical to SEQ ID NO: 206469
  Synthetic oligonucleotide

SEQ ID NO: 635705 - DNA, 60 bp, Artificial; identical to SEQ ID NO: 179649
  Synthetic oligonucleotide

SEQ ID NO: 635706 - DNA, 55 bp, Artificial; identical to SEQ ID NO: 147390
  Synthetic oligonucleotide

SEQ ID NO: 635707 - DNA, 55 bp, Artificial; identical to SEQ ID NO: 252808
  Synthetic oligonucleotide

SEQ ID NO: 635708 - DNA, 56 bp, Artificial; identical to SEQ ID NO: 205229
  Synthetic oligonucleotide

SEQ ID NO: 635709 - DNA, 60 bp, Artificial; identical to SEQ ID NO: 242043
  Synthetic oligonucleotide

SEQ ID NO: 635710 - DNA, 60 bp, Artificial; identical to SEQ ID NO: 242044
  Synthetic oligonucleotide

SEQ ID NO: 635711 - DNA, 54 bp, Artificial; identical to SEQ ID NO: 199564
  Synthetic oligonucleotide

SEQ ID NO: 635712 - DNA, 50 bp, Artificial; identical to SEQ ID NO: 258342
  Synthetic oligonucleotide

SEQ ID NO: 635713 - DNA, 55 bp, Artificial; identical to SEQ ID NO: 252807
  Synthetic oligonucleotide

SEQ ID NO: 635714 - DNA, 58 bp, Artificial; identical to SEQ ID NO: 179638
  Synthetic oligonucleotide

SEQ ID NO: 635715 - DNA, 55 bp, Artificial; identical to SEQ ID NO: 217395
  Synthetic oligonucleotide

SEQ ID NO: 635716 - DNA, 55 bp, Artificial; identical to SEQ ID NO: 196246
  Synthetic oligonucleotide

SEQ ID NO: 635717 - DNA, 55 bp, Artificial; identical to SEQ ID NO: 180983
  Synthetic oligonucleotide

SEQ ID NO: 635718 - DNA, 55 bp, Artificial; identical to SEQ ID NO: 217396
  Synthetic oligonucleotide

SEQ ID NO: 635719 - DNA, 60 bp, Artificial; identical to SEQ ID NO: 198315
  Synthetic oligonucleotide

SEQ ID NO: 635720 - DNA, 55 bp, Artificial; identical to SEQ ID NO: 207199
  Synthetic oligonucleotide

SEQ ID NO: 635721 - DNA, 55 bp, Artificial; identical to SEQ ID NO: 180981
  Synthetic oligonucleotide

SEQ ID NO: 635722 - DNA, 55 bp, Artificial; identical to SEQ ID NO: 142047
  Synthetic oligonucleotide

SEQ ID NO: 635723 - DNA, 55 bp, Artificial; identical to SEQ ID NO: 147376
  Synthetic oligonucleotide

SEQ ID NO: 635724 - DNA, 55 bp, Artificial; identical to SEQ ID NO: 242980
  Synthetic oligonucleotide

SEQ ID NO: 635725 - DNA, 55 bp, Artificial; identical to SEQ ID NO: 147468
  Synthetic oligonucleotide

SEQ ID NO: 635726 - DNA, 55 bp, Artificial; identical to SEQ ID NO: 166358
  Synthetic oligonucleotide

SEQ ID NO: 635727 - DNA, 55 bp, Artificial; identical to SEQ ID NO: 256979
  Synthetic oligonucleotide

SEQ ID NO: 635728 - DNA, 54 bp, Artificial; identical to SEQ ID NO: 202436
  Synthetic oligonucleotide

SEQ ID NO: 635729 - DNA, 51 bp, Artificial; identical to SEQ ID NO: 247445
  Synthetic oligonucleotide

SEQ ID NO: 635730 - DNA, 55 bp, Artificial; identical to SEQ ID NO: 159228
  Synthetic oligonucleotide

SEQ ID NO: 635731 - DNA, 55 bp, Artificial; identical to SEQ ID NO: 211196
  Synthetic oligonucleotide

SEQ ID NO: 635732 - DNA, 60 bp, Artificial; identical to SEQ ID NO: 174991
  Synthetic oligonucleotide

SEQ ID NO: 635733 - DNA, 51 bp, Artificial; identical to SEQ ID NO: 246597
  Synthetic oligonucleotide

SEQ ID NO: 635734 - DNA, 60 bp, Artificial; identical to SEQ ID NO: 266386
  Synthetic oligonucleotide

SEQ ID NO: 635735 - DNA, 53 bp, Artificial; identical to SEQ ID NO: 185818
  Synthetic oligonucleotide

SEQ ID NO: 635736 - DNA, 52 bp, Artificial; identical to SEQ ID NO: 154613
  Synthetic oligonucleotide

SEQ ID NO: 635737 - DNA, 51 bp, Artificial; identical to SEQ ID NO: 208397
  Synthetic oligonucleotide

SEQ ID NO: 635738 - DNA, 55 bp, Artificial; identical to SEQ ID NO: 209267
  Synthetic oligonucleotide

SEQ ID NO: 635739 - DNA, 55 bp, Artificial; identical to SEQ ID NO: 143763
  Synthetic oligonucleotide

SEQ ID NO: 635740 - DNA, 55 bp, Artificial; identical to SEQ ID NO: 142849
  Synthetic oligonucleotide

SEQ ID NO: 635741 - DNA, 55 bp, Artificial; identical to SEQ ID NO: 256977
  Synthetic oligonucleotide

SEQ ID NO: 635742 - DNA, 53 bp, Artificial; identical to SEQ ID NO: 248425
  Synthetic oligonucleotide

SEQ ID NO: 635743 - DNA, 55 bp, Artificial; identical to SEQ ID NO: 242981
  Synthetic oligonucleotide

SEQ ID NO: 635744 - DNA, 56 bp, Artificial; identical to SEQ ID NO: 180083
  Synthetic oligonucleotide

SEQ ID NO: 635745 - DNA, 57 bp, Artificial; identical to SEQ ID NO: 212503
  Synthetic oligonucleotide

SEQ ID NO: 635746 - DNA, 55 bp, Artificial; identical to SEQ ID NO: 244570
  Synthetic oligonucleotide

SEQ ID NO: 635747 - DNA, 55 bp, Artificial; identical to SEQ ID NO: 233415
  Synthetic oligonucleotide

SEQ ID NO: 635748 - DNA, 51 bp, Artificial; identical to SEQ ID NO: 142638
  Synthetic oligonucleotide

SEQ ID NO: 635749 - DNA, 60 bp, Artificial; identical to SEQ ID NO: 252875
  Synthetic oligonucleotide

SEQ ID NO: 635750 - DNA, 55 bp, Artificial; identical to SEQ ID NO: 249010
  Synthetic oligonucleotide

SEQ ID NO: 635751 - DNA, 55 bp, Artificial; identical to SEQ ID NO: 242982
  Synthetic oligonucleotide

SEQ ID NO: 635752 - DNA, 55 bp, Artificial; identical to SEQ ID NO: 217398
  Synthetic oligonucleotide

SEQ ID NO: 635753 - DNA, 55 bp, Artificial; identical to SEQ ID NO: 171250
  Synthetic oligonucleotide

SEQ ID NO: 635754 - DNA, 55 bp, Artificial; identical to SEQ ID NO: 191855
  Synthetic oligonucleotide

SEQ ID NO: 635755 - DNA, 55 bp, Artificial; identical to SEQ ID NO: 205302
  Synthetic oligonucleotide

SEQ ID NO: 635756 - DNA, 55 bp, Artificial; identical to SEQ ID NO: 256973
  Synthetic oligonucleotide

SEQ ID NO: 635757 - DNA, 55 bp, Artificial; identical to SEQ ID NO: 198025
  Synthetic oligonucleotide

SEQ ID NO: 635758 - DNA, 55 bp, Artificial; identical to SEQ ID NO: 180931
  Synthetic oligonucleotide

SEQ ID NO: 635759 - DNA, 55 bp, Artificial; identical to SEQ ID NO: 207202
  Synthetic oligonucleotide

SEQ ID NO: 635760 - DNA, 59 bp, Artificial; identical to SEQ ID NO: 242046
  Synthetic oligonucleotide

SEQ ID NO: 635761 - DNA, 55 bp, Artificial; identical to SEQ ID NO: 191854
  Synthetic oligonucleotide

SEQ ID NO: 635762 - DNA, 55 bp, Artificial; identical to SEQ ID NO: 203256
  Synthetic oligonucleotide

SEQ ID NO: 635763 - DNA, 55 bp, Artificial; identical to SEQ ID NO: 257580
  Synthetic oligonucleotide

SEQ ID NO: 635764 - DNA, 51 bp, Artificial; identical to SEQ ID NO: 200149
  Synthetic oligonucleotide

SEQ ID NO: 635765 - DNA, 55 bp, Artificial; identical to SEQ ID NO: 174451
  Synthetic oligonucleotide

SEQ ID NO: 635766 - DNA, 54 bp, Artificial; identical to SEQ ID NO: 220747
  Synthetic oligonucleotide

SEQ ID NO: 635767 - DNA, 55 bp, Artificial; identical to SEQ ID NO: 168571
  Synthetic oligonucleotide

SEQ ID NO: 635768 - DNA, 55 bp, Artificial; identical to SEQ ID NO: 242983
  Synthetic oligonucleotide

SEQ ID NO: 635769 - DNA, 55 bp, Artificial; identical to SEQ ID NO: 242931
  Synthetic oligonucleotide

SEQ ID NO: 635770 - DNA, 55 bp, Artificial; identical to SEQ ID NO: 261990
  Synthetic oligonucleotide

SEQ ID NO: 635771 - DNA, 55 bp, Artificial; identical to SEQ ID NO: 147472
  Synthetic oligonucleotide

SEQ ID NO: 635772 - DNA, 55 bp, Artificial; identical to SEQ ID NO: 198024
  Synthetic oligonucleotide

SEQ ID NO: 635773 - DNA, 55 bp, Artificial; identical to SEQ ID NO: 159236
  Synthetic oligonucleotide

SEQ ID NO: 635774 - DNA, 55 bp, Artificial; identical to SEQ ID NO: 166354
  Synthetic oligonucleotide

SEQ ID NO: 635775 - DNA, 55 bp, Artificial; identical to SEQ ID NO: 166815
  Synthetic oligonucleotide

SEQ ID NO: 635776 - DNA, 54 bp, Artificial; identical to SEQ ID NO: 185267
  Synthetic oligonucleotide

SEQ ID NO: 635777 - DNA, 55 bp, Artificial; identical to SEQ ID NO: 212711
  Synthetic oligonucleotide

SEQ ID NO: 635778 - DNA, 55 bp, Artificial; identical to SEQ ID NO: 188857
  Synthetic oligonucleotide

SEQ ID NO: 635779 - DNA, 59 bp, Artificial; identical to SEQ ID NO: 255223
  Synthetic oligonucleotide

SEQ ID NO: 635780 - DNA, 60 bp, Artificial; identical to SEQ ID NO: 233927
  Synthetic oligonucleotide

SEQ ID NO: 635781 - DNA, 55 bp, Artificial; identical to SEQ ID NO: 198084
  Synthetic oligonucleotide

SEQ ID NO: 635782 - DNA, 53 bp, Artificial; identical to SEQ ID NO: 168467
  Synthetic oligonucleotide

SEQ ID NO: 635783 - DNA, 56 bp, Artificial; identical to SEQ ID NO: 187335
  Synthetic oligonucleotide

SEQ ID NO: 635784 - DNA, 55 bp, Artificial; identical to SEQ ID NO: 203609
  Synthetic oligonucleotide

SEQ ID NO: 635785 - DNA, 55 bp, Artificial; identical to SEQ ID NO: 249011
  Synthetic oligonucleotide

SEQ ID NO: 635786 - DNA, 55 bp, Artificial; identical to SEQ ID NO: 211197
  Synthetic oligonucleotide

SEQ ID NO: 635787 - DNA, 55 bp, Artificial; identical to SEQ ID NO: 244568
  Synthetic oligonucleotide

SEQ ID NO: 635788 - DNA, 51 bp, Artificial; identical to SEQ ID NO: 186687
  Synthetic oligonucleotide

SEQ ID NO: 635789 - DNA, 59 bp, Artificial; identical to SEQ ID NO: 168164
  Synthetic oligonucleotide

SEQ ID NO: 635790 - DNA, 55 bp, Artificial; identical to SEQ ID NO: 217401
  Synthetic oligonucleotide

SEQ ID NO: 635791 - DNA, 55 bp, Artificial; identical to SEQ ID NO: 244567
  Synthetic oligonucleotide

SEQ ID NO: 635792 - DNA, 51 bp, Artificial; identical to SEQ ID NO: 241155
  Synthetic oligonucleotide

SEQ ID NO: 635793 - DNA, 53 bp, Artificial; identical to SEQ ID NO: 253270
  Synthetic oligonucleotide

SEQ ID NO: 635794 - DNA, 56 bp, Artificial; identical to SEQ ID NO: 266102
  Synthetic oligonucleotide

SEQ ID NO: 635795 - DNA, 55 bp, Artificial; identical to SEQ ID NO: 160115
  Synthetic oligonucleotide

SEQ ID NO: 635796 - DNA, 55 bp, Artificial; identical to SEQ ID NO: 244566
  Synthetic oligonucleotide

SEQ ID NO: 635797 - DNA, 55 bp, Artificial; identical to SEQ ID NO: 180924
  Synthetic oligonucleotide

SEQ ID NO: 635798 - DNA, 60 bp, Artificial; identical to SEQ ID NO: 241996
  Synthetic oligonucleotide

SEQ ID NO: 635799 - DNA, 55 bp, Artificial; identical to SEQ ID NO: 174452
  Synthetic oligonucleotide

SEQ ID NO: 635800 - DNA, 50 bp, Artificial; identical to SEQ ID NO: 160604
  Synthetic oligonucleotide

SEQ ID NO: 635801 - DNA, 55 bp, Artificial; identical to SEQ ID NO: 234313
  Synthetic oligonucleotide

SEQ ID NO: 635802 - DNA, 55 bp, Artificial; identical to SEQ ID NO: 244564
  Synthetic oligonucleotide

SEQ ID NO: 635803 - DNA, 54 bp, Artificial; identical to SEQ ID NO: 208663
  Synthetic oligonucleotide

SEQ ID NO: 635804 - DNA, 58 bp, Artificial; identical to SEQ ID NO: 144676
  Synthetic oligonucleotide

SEQ ID NO: 635805 - DNA, 60 bp, Artificial; identical to SEQ ID NO: 242001
  Synthetic oligonucleotide

SEQ ID NO: 635806 - DNA, 56 bp, Artificial; identical to SEQ ID NO: 212527
  Synthetic oligonucleotide

SEQ ID NO: 635807 - DNA, 52 bp, Artificial; identical to SEQ ID NO: 180922
  Synthetic oligonucleotide

SEQ ID NO: 635808 - DNA, 55 bp, Artificial; identical to SEQ ID NO: 256971
  Synthetic oligonucleotide

SEQ ID NO: 635809 - DNA, 55 bp, Artificial; identical to SEQ ID NO: 244563
  Synthetic oligonucleotide

SEQ ID NO: 635810 - DNA, 60 bp, Artificial; identical to SEQ ID NO: 206972
  Synthetic oligonucleotide

SEQ ID NO: 635811 - DNA, 60 bp, Artificial; identical to SEQ ID NO: 233346
  Synthetic oligonucleotide

SEQ ID NO: 635812 - DNA, 58 bp, Artificial; identical to SEQ ID NO: 257432
  Synthetic oligonucleotide

SEQ ID NO: 635813 - DNA, 55 bp, Artificial; identical to SEQ ID NO: 224568
  Synthetic oligonucleotide

SEQ ID NO: 635814 - DNA, 55 bp, Artificial; identical to SEQ ID NO: 198083
  Synthetic oligonucleotide

SEQ ID NO: 635815 - DNA, 55 bp, Artificial; identical to SEQ ID NO: 166352
  Synthetic oligonucleotide

SEQ ID NO: 635816 - DNA, 53 bp, Artificial; identical to SEQ ID NO: 150725
  Synthetic oligonucleotide

SEQ ID NO: 635817 - DNA, 54 bp, Artificial; identical to SEQ ID NO: 253254
  Synthetic oligonucleotide

SEQ ID NO: 635818 - DNA, 60 bp, Artificial; identical to SEQ ID NO: 242477
  Synthetic oligonucleotide

SEQ ID NO: 635819 - DNA, 55 bp, Artificial; identical to SEQ ID NO: 257536
  Synthetic oligonucleotide

SEQ ID NO: 635820 - DNA, 51 bp, Artificial; identical to SEQ ID NO: 165331
  Synthetic oligonucleotide

SEQ ID NO: 635821 - DNA, 59 bp, Artificial; identical to SEQ ID NO: 188869
  Synthetic oligonucleotide

SEQ ID NO: 635822 - DNA, 54 bp, Artificial; identical to SEQ ID NO: 180918
  Synthetic oligonucleotide

SEQ ID NO: 635823 - DNA, 60 bp, Artificial; identical to SEQ ID NO: 224347
  Synthetic oligonucleotide

SEQ ID NO: 635824 - DNA, 53 bp, Artificial; identical to SEQ ID NO: 149464
  Synthetic oligonucleotide

SEQ ID NO: 635825 - DNA, 55 bp, Artificial; identical to SEQ ID NO: 159237
  Synthetic oligonucleotide

SEQ ID NO: 635826 - DNA, 54 bp, Artificial; identical to SEQ ID NO: 142597
  Synthetic oligonucleotide

SEQ ID NO: 635827 - DNA, 55 bp, Artificial; identical to SEQ ID NO: 257533
  Synthetic oligonucleotide

SEQ ID NO: 635828 - DNA, 55 bp, Artificial; identical to SEQ ID NO: 160114
  Synthetic oligonucleotide

SEQ ID NO: 635829 - DNA, 59 bp, Artificial; identical to SEQ ID NO: 242002
  Synthetic oligonucleotide

SEQ ID NO: 635830 - DNA, 57 bp, Artificial; identical to SEQ ID NO: 183993
  Synthetic oligonucleotide

SEQ ID NO: 635831 - DNA, 51 bp, Artificial; identical to SEQ ID NO: 241153
  Synthetic oligonucleotide

SEQ ID NO: 635832 - DNA, 60 bp, Artificial; identical to SEQ ID NO: 243340
  Synthetic oligonucleotide

SEQ ID NO: 635833 - DNA, 60 bp, Artificial; identical to SEQ ID NO: 210858
  Synthetic oligonucleotide

SEQ ID NO: 635834 - DNA, 55 bp, Artificial; identical to SEQ ID NO: 239709
  Synthetic oligonucleotide

SEQ ID NO: 635835 - DNA, 55 bp, Artificial; identical to SEQ ID NO: 233408
  Synthetic oligonucleotide

SEQ ID NO: 635836 - DNA, 60 bp, Artificial; identical to SEQ ID NO: 212525
  Synthetic oligonucleotide

SEQ ID NO: 635837 - DNA, 60 bp, Artificial; identical to SEQ ID NO: 242007
  Synthetic oligonucleotide

SEQ ID NO: 635838 - DNA, 55 bp, Artificial; identical to SEQ ID NO: 198081
  Synthetic oligonucleotide

SEQ ID NO: 635839 - DNA, 55 bp, Artificial; identical to SEQ ID NO: 221633
  Synthetic oligonucleotide

SEQ ID NO: 635840 - DNA, 55 bp, Artificial; identical to SEQ ID NO: 180914
  Synthetic oligonucleotide

SEQ ID NO: 635841 - DNA, 56 bp, Artificial; identical to SEQ ID NO: 166229
  Synthetic oligonucleotide

SEQ ID NO: 635842 - DNA, 55 bp, Artificial; identical to SEQ ID NO: 187452
  Synthetic oligonucleotide

SEQ ID NO: 635843 - DNA, 55 bp, Artificial; identical to SEQ ID NO: 198079
  Synthetic oligonucleotide

SEQ ID NO: 635844 - DNA, 51 bp, Artificial; identical to SEQ ID NO: 160113
  Synthetic oligonucleotide

SEQ ID NO: 635845 - DNA, 55 bp, Artificial; identical to SEQ ID NO: 180913
  Synthetic oligonucleotide

SEQ ID NO: 635846 - DNA, 52 bp, Artificial; identical to SEQ ID NO: 191203
  Synthetic oligonucleotide

SEQ ID NO: 635847 - DNA, 55 bp, Artificial; identical to SEQ ID NO: 205308
  Synthetic oligonucleotide

SEQ ID NO: 635848 - DNA, 55 bp, Artificial; identical to SEQ ID NO: 224570
  Synthetic oligonucleotide

SEQ ID NO: 635849 - DNA, 55 bp, Artificial; identical to SEQ ID NO: 180954
  Synthetic oligonucleotide

SEQ ID NO: 635850 - DNA, 55 bp, Artificial; identical to SEQ ID NO: 205314
  Synthetic oligonucleotide

SEQ ID NO: 635851 - DNA, 55 bp, Artificial; identical to SEQ ID NO: 168573
  Synthetic oligonucleotide

SEQ ID NO: 635852 - DNA, 55 bp, Artificial; identical to SEQ ID NO: 252805
  Synthetic oligonucleotide

SEQ ID NO: 635853 - DNA, 55 bp, Artificial; identical to SEQ ID NO: 239712
  Synthetic oligonucleotide

SEQ ID NO: 635854 - DNA, 55 bp, Artificial; identical to SEQ ID NO: 147489
  Synthetic oligonucleotide

SEQ ID NO: 635855 - DNA, 55 bp, Artificial; identical to SEQ ID NO: 217405
  Synthetic oligonucleotide

SEQ ID NO: 635856 - DNA, 55 bp, Artificial; identical to SEQ ID NO: 249012
  Synthetic oligonucleotide

SEQ ID NO: 635857 - DNA, 53 bp, Artificial; identical to SEQ ID NO: 168930
  Synthetic oligonucleotide

SEQ ID NO: 635858 - DNA, 55 bp, Artificial; identical to SEQ ID NO: 160112
  Synthetic oligonucleotide

SEQ ID NO: 635859 - DNA, 58 bp, Artificial; identical to SEQ ID NO: 243966
  Synthetic oligonucleotide

SEQ ID NO: 635860 - DNA, 60 bp, Artificial; identical to SEQ ID NO: 237789
  Synthetic oligonucleotide

SEQ ID NO: 635861 - DNA, 51 bp, Artificial; identical to SEQ ID NO: 165329
  Synthetic oligonucleotide

SEQ ID NO: 635862 - DNA, 55 bp, Artificial; identical to SEQ ID NO: 171935
  Synthetic oligonucleotide

SEQ ID NO: 635863 - DNA, 57 bp, Artificial; identical to SEQ ID NO: 239412
  Synthetic oligonucleotide

SEQ ID NO: 635864 - DNA, 55 bp, Artificial; identical to SEQ ID NO: 147487
  Synthetic oligonucleotide

SEQ ID NO: 635865 - DNA, 54 bp, Artificial; identical to SEQ ID NO: 198293
  Synthetic oligonucleotide

SEQ ID NO: 635866 - DNA, 55 bp, Artificial; identical to SEQ ID NO: 194425
  Synthetic oligonucleotide

SEQ ID NO: 635867 - DNA, 60 bp, Artificial; identical to SEQ ID NO: 209250
  Synthetic oligonucleotide

SEQ ID NO: 635868 - DNA, 56 bp, Artificial; identical to SEQ ID NO: 174326
  Synthetic oligonucleotide

SEQ ID NO: 635869 - DNA, 60 bp, Artificial; identical to SEQ ID NO: 242008
  Synthetic oligonucleotide

SEQ ID NO: 635870 - DNA, 55 bp, Artificial; identical to SEQ ID NO: 239715
  Synthetic oligonucleotide

SEQ ID NO: 635871 - DNA, 55 bp, Artificial; identical to SEQ ID NO: 239407
  Synthetic oligonucleotide

SEQ ID NO: 635872 - DNA, 56 bp, Artificial; identical to SEQ ID NO: 244028
  Synthetic oligonucleotide

SEQ ID NO: 635873 - DNA, 57 bp, Artificial; identical to SEQ ID NO: 160608
  Synthetic oligonucleotide

SEQ ID NO: 635874 - DNA, 55 bp, Artificial; identical to SEQ ID NO: 146231
  Synthetic oligonucleotide

SEQ ID NO: 635875 - DNA, 50 bp, Artificial; identical to SEQ ID NO: 153218
  Synthetic oligonucleotide

SEQ ID NO: 635876 - DNA, 53 bp, Artificial; identical to SEQ ID NO: 240724
  Synthetic oligonucleotide

SEQ ID NO: 635877 - DNA, 55 bp, Artificial; identical to SEQ ID NO: 168574
  Synthetic oligonucleotide

SEQ ID NO: 635878 - DNA, 55 bp, Artificial; identical to SEQ ID NO: 256968
  Synthetic oligonucleotide

SEQ ID NO: 635879 - DNA, 60 bp, Artificial; identical to SEQ ID NO: 170343
  Synthetic oligonucleotide

SEQ ID NO: 635880 - DNA, 58 bp, Artificial; identical to SEQ ID NO: 243443
  Synthetic oligonucleotide

SEQ ID NO: 635881 - DNA, 60 bp, Artificial; identical to SEQ ID NO: 242010
  Synthetic oligonucleotide

SEQ ID NO: 635882 - DNA, 59 bp, Artificial; identical to SEQ ID NO: 242011
  Synthetic oligonucleotide

SEQ ID NO: 635883 - DNA, 55 bp, Artificial; identical to SEQ ID NO: 224571
  Synthetic oligonucleotide

SEQ ID NO: 635884 - DNA, 55 bp, Artificial; identical to SEQ ID NO: 187449
  Synthetic oligonucleotide

SEQ ID NO: 635885 - DNA, 57 bp, Artificial; identical to SEQ ID NO: 242013
  Synthetic oligonucleotide

SEQ ID NO: 635886 - DNA, 59 bp, Artificial; identical to SEQ ID NO: 261902
  Synthetic oligonucleotide

SEQ ID NO: 635887 - DNA, 55 bp, Artificial; identical to SEQ ID NO: 147437
  Synthetic oligonucleotide

SEQ ID NO: 635888 - DNA, 55 bp, Artificial; identical to SEQ ID NO: 188685
  Synthetic oligonucleotide

SEQ ID NO: 635889 - DNA, 55 bp, Artificial; identical to SEQ ID NO: 167302
  Synthetic oligonucleotide

SEQ ID NO: 635890 - DNA, 55 bp, Artificial; identical to SEQ ID NO: 175655
  Synthetic oligonucleotide

SEQ ID NO: 635891 - DNA, 55 bp, Artificial; identical to SEQ ID NO: 198077
  Synthetic oligonucleotide

SEQ ID NO: 635892 - DNA, 54 bp, Artificial; identical to SEQ ID NO: 208685
  Synthetic oligonucleotide

SEQ ID NO: 635893 - DNA, 55 bp, Artificial; identical to SEQ ID NO: 160975
  Synthetic oligonucleotide

SEQ ID NO: 635894 - DNA, 55 bp, Artificial; identical to SEQ ID NO: 142053
  Synthetic oligonucleotide

SEQ ID NO: 635895 - DNA, 55 bp, Artificial; identical to SEQ ID NO: 208343
  Synthetic oligonucleotide

SEQ ID NO: 635896 - DNA, 55 bp, Artificial; identical to SEQ ID NO: 147440
  Synthetic oligonucleotide

SEQ ID NO: 635897 - DNA, 52 bp, Artificial; identical to SEQ ID NO: 160491
  Synthetic oligonucleotide

SEQ ID NO: 635898 - DNA, 55 bp, Artificial; identical to SEQ ID NO: 146229
  Synthetic oligonucleotide

SEQ ID NO: 635899 - DNA, 55 bp, Artificial; identical to SEQ ID NO: 239719
  Synthetic oligonucleotide

SEQ ID NO: 635900 - DNA, 52 bp, Artificial; identical to SEQ ID NO: 170142
  Synthetic oligonucleotide

SEQ ID NO: 635901 - DNA, 60 bp, Artificial; identical to SEQ ID NO: 150772
  Synthetic oligonucleotide

SEQ ID NO: 635902 - DNA, 55 bp, Artificial; identical to SEQ ID NO: 256967
  Synthetic oligonucleotide

SEQ ID NO: 635903 - DNA, 55 bp, Artificial; identical to SEQ ID NO: 256966
  Synthetic oligonucleotide

SEQ ID NO: 635904 - DNA, 54 bp, Artificial; identical to SEQ ID NO: 164728
  Synthetic oligonucleotide

SEQ ID NO: 635905 - DNA, 55 bp, Artificial; identical to SEQ ID NO: 147456
  Synthetic oligonucleotide

SEQ ID NO: 635906 - DNA, 55 bp, Artificial; identical to SEQ ID NO: 166339
  Synthetic oligonucleotide

SEQ ID NO: 635907 - DNA, 55 bp, Artificial; identical to SEQ ID NO: 159245
  Synthetic oligonucleotide

SEQ ID NO: 635908 - DNA, 55 bp, Artificial; identical to SEQ ID NO: 190132
  Synthetic oligonucleotide

SEQ ID NO: 635909 - DNA, 60 bp, Artificial; identical to SEQ ID NO: 209239
  Synthetic oligonucleotide

SEQ ID NO: 635910 - DNA, 55 bp, Artificial; identical to SEQ ID NO: 147455
  Synthetic oligonucleotide

SEQ ID NO: 635911 - DNA, 55 bp, Artificial; identical to SEQ ID NO: 202169
  Synthetic oligonucleotide

SEQ ID NO: 635912 - DNA, 55 bp, Artificial; identical to SEQ ID NO: 151631
  Synthetic oligonucleotide

SEQ ID NO: 635913 - DNA, 53 bp, Artificial; identical to SEQ ID NO: 191182
  Synthetic oligonucleotide

SEQ ID NO: 635914 - DNA, 51 bp, Artificial; identical to SEQ ID NO: 157817
  Synthetic oligonucleotide

SEQ ID NO: 635915 - DNA, 55 bp, Artificial; identical to SEQ ID NO: 257527
  Synthetic oligonucleotide

SEQ ID NO: 635916 - DNA, 55 bp, Artificial; identical to SEQ ID NO: 151632
  Synthetic oligonucleotide

SEQ ID NO: 635917 - DNA, 55 bp, Artificial; identical to SEQ ID NO: 159201
  Synthetic oligonucleotide

SEQ ID NO: 635918 - DNA, 52 bp, Artificial; identical to SEQ ID NO: 149598
  Synthetic oligonucleotide

SEQ ID NO: 635919 - DNA, 55 bp, Artificial; identical to SEQ ID NO: 198074
  Synthetic oligonucleotide

SEQ ID NO: 635920 - DNA, 55 bp, Artificial; identical to SEQ ID NO: 180945
  Synthetic oligonucleotide

SEQ ID NO: 635921 - DNA, 52 bp, Artificial; identical to SEQ ID NO: 173584
  Synthetic oligonucleotide

SEQ ID NO: 635922 - DNA, 54 bp, Artificial; identical to SEQ ID NO: 234432
  Synthetic oligonucleotide

SEQ ID NO: 635923 - DNA, 55 bp, Artificial; identical to SEQ ID NO: 233402
  Synthetic oligonucleotide

SEQ ID NO: 635924 - DNA, 55 bp, Artificial; identical to SEQ ID NO: 244609
  Synthetic oligonucleotide

SEQ ID NO: 635925 - DNA, 59 bp, Artificial; identical to SEQ ID NO: 201070
  Synthetic oligonucleotide

SEQ ID NO: 635926 - DNA, 55 bp, Artificial; identical to SEQ ID NO: 244606
  Synthetic oligonucleotide

SEQ ID NO: 635927 - DNA, 51 bp, Artificial; identical to SEQ ID NO: 255707
  Synthetic oligonucleotide

SEQ ID NO: 635928 - DNA, 55 bp, Artificial; identical to SEQ ID NO: 209259
  Synthetic oligonucleotide

SEQ ID NO: 635929 - DNA, 55 bp, Artificial; identical to SEQ ID NO: 212713
  Synthetic oligonucleotide

SEQ ID NO: 635930 - DNA, 55 bp, Artificial; identical to SEQ ID NO: 198072
  Synthetic oligonucleotide

SEQ ID NO: 635931 - DNA, 55 bp, Artificial; identical to SEQ ID NO: 159204
  Synthetic oligonucleotide

SEQ ID NO: 635932 - DNA, 56 bp, Artificial; identical to SEQ ID NO: 180045
  Synthetic oligonucleotide

SEQ ID NO: 635933 - DNA, 55 bp, Artificial; identical to SEQ ID NO: 159205
  Synthetic oligonucleotide

SEQ ID NO: 635934 - DNA, 56 bp, Artificial; identical to SEQ ID NO: 181882
  Synthetic oligonucleotide

SEQ ID NO: 635935 - DNA, 54 bp, Artificial; identical to SEQ ID NO: 243035
  Synthetic oligonucleotide

SEQ ID NO: 635936 - DNA, 55 bp, Artificial; identical to SEQ ID NO: 159206
  Synthetic oligonucleotide

SEQ ID NO: 635937 - DNA, 60 bp, Artificial; identical to SEQ ID NO: 217502
  Synthetic oligonucleotide

SEQ ID NO: 635938 - DNA, 55 bp, Artificial; identical to SEQ ID NO: 180943
  Synthetic oligonucleotide

SEQ ID NO: 635939 - DNA, 55 bp, Artificial; identical to SEQ ID NO: 244601
  Synthetic oligonucleotide

SEQ ID NO: 635940 - DNA, 55 bp, Artificial; identical to SEQ ID NO: 147453
  Synthetic oligonucleotide

SEQ ID NO: 635941 - DNA, 55 bp, Artificial; identical to SEQ ID NO: 238260
  Synthetic oligonucleotide

SEQ ID NO: 635942 - DNA, 55 bp, Artificial; identical to SEQ ID NO: 147451
  Synthetic oligonucleotide

SEQ ID NO: 635943 - DNA, 60 bp, Artificial; identical to SEQ ID NO: 153588
  Synthetic oligonucleotide

SEQ ID NO: 635944 - DNA, 55 bp, Artificial; identical to SEQ ID NO: 249013
  Synthetic oligonucleotide

SEQ ID NO: 635945 - DNA, 52 bp, Artificial; identical to SEQ ID NO: 160490
  Synthetic oligonucleotide

SEQ ID NO: 635946 - DNA, 57 bp, Artificial; identical to SEQ ID NO: 242018
  Synthetic oligonucleotide

SEQ ID NO: 635947 - DNA, 55 bp, Artificial; identical to SEQ ID NO: 203605
  Synthetic oligonucleotide

SEQ ID NO: 635948 - DNA, 55 bp, Artificial; identical to SEQ ID NO: 198069
  Synthetic oligonucleotide

SEQ ID NO: 635949 - DNA, 53 bp, Artificial; identical to SEQ ID NO: 255381
  Synthetic oligonucleotide

SEQ ID NO: 635950 - DNA, 55 bp, Artificial; identical to SEQ ID NO: 252804
  Synthetic oligonucleotide

SEQ ID NO: 635951 - DNA, 59 bp, Artificial; identical to SEQ ID NO: 141900
  Synthetic oligonucleotide

SEQ ID NO: 635952 - DNA, 55 bp, Artificial; identical to SEQ ID NO: 171374
  Synthetic oligonucleotide

SEQ ID NO: 635953 - DNA, 55 bp, Artificial; identical to SEQ ID NO: 142061
  Synthetic oligonucleotide

SEQ ID NO: 635954 - DNA, 55 bp, Artificial; identical to SEQ ID NO: 180941
  Synthetic oligonucleotide

SEQ ID NO: 635955 - DNA, 55 bp, Artificial; identical to SEQ ID NO: 166288
  Synthetic oligonucleotide

SEQ ID NO: 635956 - DNA, 55 bp, Artificial; identical to SEQ ID NO: 211203
  Synthetic oligonucleotide

SEQ ID NO: 635957 - DNA, 60 bp, Artificial; identical to SEQ ID NO: 167602
  Synthetic oligonucleotide

SEQ ID NO: 635958 - DNA, 51 bp, Artificial; identical to SEQ ID NO: 223812
  Synthetic oligonucleotide

SEQ ID NO: 635959 - DNA, 55 bp, Artificial; identical to SEQ ID NO: 198067
  Synthetic oligonucleotide

SEQ ID NO: 635960 - DNA, 55 bp, Artificial; identical to SEQ ID NO: 146228
  Synthetic oligonucleotide

SEQ ID NO: 635961 - DNA, 55 bp, Artificial; identical to SEQ ID NO: 160109
  Synthetic oligonucleotide

SEQ ID NO: 635962 - DNA, 53 bp, Artificial; identical to SEQ ID NO: 150776
  Synthetic oligonucleotide

SEQ ID NO: 635963 - DNA, 55 bp, Artificial; identical to SEQ ID NO: 242934
  Synthetic oligonucleotide

SEQ ID NO: 635964 - DNA, 57 bp, Artificial; identical to SEQ ID NO: 239406
  Synthetic oligonucleotide

SEQ ID NO: 635965 - DNA, 55 bp, Artificial; identical to SEQ ID NO: 160974
  Synthetic oligonucleotide

SEQ ID NO: 635966 - DNA, 55 bp, Artificial; identical to SEQ ID NO: 244597
  Synthetic oligonucleotide

SEQ ID NO: 635967 - DNA, 52 bp, Artificial; identical to SEQ ID NO: 168948
  Synthetic oligonucleotide

SEQ ID NO: 635968 - DNA, 55 bp, Artificial; identical to SEQ ID NO: 151635
  Synthetic oligonucleotide

SEQ ID NO: 635969 - DNA, 60 bp, Artificial; identical to SEQ ID NO: 242023
  Synthetic oligonucleotide

SEQ ID NO: 635970 - DNA, 55 bp, Artificial; identical to SEQ ID NO: 154276
  Synthetic oligonucleotide

SEQ ID NO: 635971 - DNA, 55 bp, Artificial; identical to SEQ ID NO: 154279
  Synthetic oligonucleotide

SEQ ID NO: 635972 - DNA, 54 bp, Artificial; identical to SEQ ID NO: 169346
  Synthetic oligonucleotide

SEQ ID NO: 635973 - DNA, 55 bp, Artificial; identical to SEQ ID NO: 159210
  Synthetic oligonucleotide

SEQ ID NO: 635974 - DNA, 55 bp, Artificial; identical to SEQ ID NO: 169670
  Synthetic oligonucleotide

SEQ ID NO: 635975 - DNA, 55 bp, Artificial; identical to SEQ ID NO: 244592
  Synthetic oligonucleotide

SEQ ID NO: 635976 - DNA, 55 bp, Artificial; identical to SEQ ID NO: 266397
  Synthetic oligonucleotide

SEQ ID NO: 635977 - DNA, 57 bp, Artificial; identical to SEQ ID NO: 203255
  Synthetic oligonucleotide

SEQ ID NO: 635978 - DNA, 55 bp, Artificial; identical to SEQ ID NO: 190129
  Synthetic oligonucleotide

SEQ ID NO: 635979 - DNA, 51 bp, Artificial; identical to SEQ ID NO: 155603
  Synthetic oligonucleotide

SEQ ID NO: 635980 - DNA, 54 bp, Artificial; identical to SEQ ID NO: 149187
  Synthetic oligonucleotide

SEQ ID NO: 635981 - DNA, 51 bp, Artificial; identical to SEQ ID NO: 153667
  Synthetic oligonucleotide

SEQ ID NO: 635982 - DNA, 57 bp, Artificial; identical to SEQ ID NO: 212536
  Synthetic oligonucleotide

SEQ ID NO: 635983 - DNA, 55 bp, Artificial; identical to SEQ ID NO: 159212
  Synthetic oligonucleotide

SEQ ID NO: 635984 - DNA, 55 bp, Artificial; identical to SEQ ID NO: 168579
  Synthetic oligonucleotide

SEQ ID NO: 635985 - DNA, 55 bp, Artificial; identical to SEQ ID NO: 257765
  Synthetic oligonucleotide

SEQ ID NO: 635986 - DNA, 55 bp, Artificial; identical to SEQ ID NO: 161998
  Synthetic oligonucleotide

SEQ ID NO: 635987 - DNA, 53 bp, Artificial; identical to SEQ ID NO: 168928
  Synthetic oligonucleotide

SEQ ID NO: 635988 - DNA, 55 bp, Artificial; identical to SEQ ID NO: 180935
  Synthetic oligonucleotide

SEQ ID NO: 635989 - DNA, 55 bp, Artificial; identical to SEQ ID NO: 169681
  Synthetic oligonucleotide

SEQ ID NO: 635990 - DNA, 55 bp, Artificial; identical to SEQ ID NO: 146227
  Synthetic oligonucleotide

SEQ ID NO: 635991 - DNA, 60 bp, Artificial; identical to SEQ ID NO: 245699
  Synthetic oligonucleotide

SEQ ID NO: 635992 - DNA, 54 bp, Artificial; identical to SEQ ID NO: 149185
  Synthetic oligonucleotide

SEQ ID NO: 635993 - DNA, 55 bp, Artificial; identical to SEQ ID NO: 194429
  Synthetic oligonucleotide

SEQ ID NO: 635994 - DNA, 55 bp, Artificial; identical to SEQ ID NO: 244591
  Synthetic oligonucleotide

SEQ ID NO: 635995 - DNA, 54 bp, Artificial; identical to SEQ ID NO: 154544
  Synthetic oligonucleotide

SEQ ID NO: 635996 - DNA, 54 bp, Artificial; identical to SEQ ID NO: 225210
  Synthetic oligonucleotide

SEQ ID NO: 635997 - DNA, 55 bp, Artificial; identical to SEQ ID NO: 160816
  Synthetic oligonucleotide

SEQ ID NO: 635998 - DNA, 55 bp, Artificial; identical to SEQ ID NO: 194430
  Synthetic oligonucleotide

SEQ ID NO: 635999 - DNA, 55 bp, Artificial; identical to SEQ ID NO: 208356
  Synthetic oligonucleotide

SEQ ID NO: 636000 - DNA, 55 bp, Artificial; identical to SEQ ID NO: 208352
  Synthetic oligonucleotide

SEQ ID NO: 636001 - DNA, 55 bp, Artificial; identical to SEQ ID NO: 198065
  Synthetic oligonucleotide

SEQ ID NO: 636002 - DNA, 55 bp, Artificial; identical to SEQ ID NO: 198064
  Synthetic oligonucleotide

SEQ ID NO: 636003 - DNA, 55 bp, Artificial; identical to SEQ ID NO: 171396
  Synthetic oligonucleotide

SEQ ID NO: 636004 - DNA, 55 bp, Artificial; identical to SEQ ID NO: 161226
  Synthetic oligonucleotide

SEQ ID NO: 636005 - DNA, 55 bp, Artificial; identical to SEQ ID NO: 205282
  Synthetic oligonucleotide

SEQ ID NO: 636006 - DNA, 56 bp, Artificial; identical to SEQ ID NO: 179547
  Synthetic oligonucleotide

SEQ ID NO: 636007 - DNA, 55 bp, Artificial; identical to SEQ ID NO: 144806
  Synthetic oligonucleotide

SEQ ID NO: 636008 - DNA, 51 bp, Artificial; identical to SEQ ID NO: 248003
  Synthetic oligonucleotide

SEQ ID NO: 636009 - DNA, 55 bp, Artificial; identical to SEQ ID NO: 202167
  Synthetic oligonucleotide

SEQ ID NO: 636010 - DNA, 60 bp, Artificial; identical to SEQ ID NO: 186326
  Synthetic oligonucleotide

SEQ ID NO: 636011 - DNA, 59 bp, Artificial; identical to SEQ ID NO: 201511
  Synthetic oligonucleotide

SEQ ID NO: 636012 - DNA, 55 bp, Artificial; identical to SEQ ID NO: 193587
  Synthetic oligonucleotide

SEQ ID NO: 636013 - DNA, 54 bp, Artificial; identical to SEQ ID NO: 210746
  Synthetic oligonucleotide

SEQ ID NO: 636014 - DNA, 51 bp, Artificial; identical to SEQ ID NO: 200101
  Synthetic oligonucleotide

SEQ ID NO: 636015 - DNA, 55 bp, Artificial; identical to SEQ ID NO: 152612
  Synthetic oligonucleotide

SEQ ID NO: 636016 - DNA, 55 bp, Artificial; identical to SEQ ID NO: 198061
  Synthetic oligonucleotide

SEQ ID NO: 636017 - DNA, 60 bp, Artificial; identical to SEQ ID NO: 150777
  Synthetic oligonucleotide

SEQ ID NO: 636018 - DNA, 55 bp, Artificial; identical to SEQ ID NO: 239672
  Synthetic oligonucleotide

SEQ ID NO: 636019 - DNA, 55 bp, Artificial; identical to SEQ ID NO: 203601
  Synthetic oligonucleotide

SEQ ID NO: 636020 - DNA, 56 bp, Artificial; identical to SEQ ID NO: 187393
  Synthetic oligonucleotide

SEQ ID NO: 636021 - DNA, 55 bp, Artificial; identical to SEQ ID NO: 147402
  Synthetic oligonucleotide

SEQ ID NO: 636022 - DNA, 55 bp, Artificial; identical to SEQ ID NO: 171393
  Synthetic oligonucleotide

SEQ ID NO: 636023 - DNA, 55 bp, Artificial; identical to SEQ ID NO: 146225
  Synthetic oligonucleotide

SEQ ID NO: 636024 - DNA, 58 bp, Artificial; identical to SEQ ID NO: 206941
  Synthetic oligonucleotide

SEQ ID NO: 636025 - DNA, 55 bp, Artificial; identical to SEQ ID NO: 147302
  Synthetic oligonucleotide

SEQ ID NO: 636026 - DNA, 55 bp, Artificial; identical to SEQ ID NO: 202166
  Synthetic oligonucleotide

SEQ ID NO: 636027 - DNA, 58 bp, Artificial; identical to SEQ ID NO: 208069
  Synthetic oligonucleotide

SEQ ID NO: 636028 - DNA, 60 bp, Artificial; identical to SEQ ID NO: 242025
  Synthetic oligonucleotide

SEQ ID NO: 636029 - DNA, 51 bp, Artificial; identical to SEQ ID NO: 258223
  Synthetic oligonucleotide

SEQ ID NO: 636030 - DNA, 55 bp, Artificial; identical to SEQ ID NO: 224575
  Synthetic oligonucleotide

SEQ ID NO: 636031 - DNA, 55 bp, Artificial; identical to SEQ ID NO: 146224
  Synthetic oligonucleotide

SEQ ID NO: 636032 - DNA, 51 bp, Artificial; identical to SEQ ID NO: 204011
  Synthetic oligonucleotide

SEQ ID NO: 636033 - DNA, 55 bp, Artificial; identical to SEQ ID NO: 212715
  Synthetic oligonucleotide

SEQ ID NO: 636034 - DNA, 60 bp, Artificial; identical to SEQ ID NO: 266408
  Synthetic oligonucleotide

SEQ ID NO: 636035 - DNA, 55 bp, Artificial; identical to SEQ ID NO: 180709
  Synthetic oligonucleotide

SEQ ID NO: 636036 - DNA, 55 bp, Artificial; identical to SEQ ID NO: 180708
  Synthetic oligonucleotide

SEQ ID NO: 636037 - DNA, 55 bp, Artificial; identical to SEQ ID NO: 190128
  Synthetic oligonucleotide

SEQ ID NO: 636038 - DNA, 55 bp, Artificial; identical to SEQ ID NO: 180707
  Synthetic oligonucleotide

SEQ ID NO: 636039 - DNA, 55 bp, Artificial; identical to SEQ ID NO: 244590
  Synthetic oligonucleotide

SEQ ID NO: 636040 - DNA, 55 bp, Artificial; identical to SEQ ID NO: 180706
  Synthetic oligonucleotide

SEQ ID NO: 636041 - DNA, 60 bp, Artificial; identical to SEQ ID NO: 222863
  Synthetic oligonucleotide

SEQ ID NO: 636042 - DNA, 53 bp, Artificial; identical to SEQ ID NO: 199704
  Synthetic oligonucleotide

SEQ ID NO: 636043 - DNA, 51 bp, Artificial; identical to SEQ ID NO: 197645
  Synthetic oligonucleotide

SEQ ID NO: 636044 - DNA, 55 bp, Artificial; identical to SEQ ID NO: 160973
  Synthetic oligonucleotide

SEQ ID NO: 636045 - DNA, 57 bp, Artificial; identical to SEQ ID NO: 193130
  Synthetic oligonucleotide

SEQ ID NO: 636046 - DNA, 55 bp, Artificial; identical to SEQ ID NO: 169715
  Synthetic oligonucleotide

SEQ ID NO: 636047 - DNA, 55 bp, Artificial; identical to SEQ ID NO: 256959
  Synthetic oligonucleotide

SEQ ID NO: 636048 - DNA, 51 bp, Artificial; identical to SEQ ID NO: 186713
  Synthetic oligonucleotide

SEQ ID NO: 636049 - DNA, 55 bp, Artificial; identical to SEQ ID NO: 159221
  Synthetic oligonucleotide

SEQ ID NO: 636050 - DNA, 54 bp, Artificial; identical to SEQ ID NO: 174453
  Synthetic oligonucleotide

SEQ ID NO: 636051 - DNA, 55 bp, Artificial; identical to SEQ ID NO: 212559
  Synthetic oligonucleotide

SEQ ID NO: 636052 - DNA, 55 bp, Artificial; identical to SEQ ID NO: 202165
  Synthetic oligonucleotide

SEQ ID NO: 636053 - DNA, 54 bp, Artificial; identical to SEQ ID NO: 192048
  Synthetic oligonucleotide

SEQ ID NO: 636054 - DNA, 51 bp, Artificial; identical to SEQ ID NO: 141325
  Synthetic oligonucleotide

SEQ ID NO: 636055 - DNA, 55 bp, Artificial; identical to SEQ ID NO: 224576
  Synthetic oligonucleotide

SEQ ID NO: 636056 - DNA, 55 bp, Artificial; identical to SEQ ID NO: 242936
  Synthetic oligonucleotide

SEQ ID NO: 636057 - DNA, 55 bp, Artificial; identical to SEQ ID NO: 239674
  Synthetic oligonucleotide

SEQ ID NO: 636058 - DNA, 54 bp, Artificial; identical to SEQ ID NO: 193240
  Synthetic oligonucleotide

SEQ ID NO: 636059 - DNA, 51 bp, Artificial; identical to SEQ ID NO: 218378
  Synthetic oligonucleotide

SEQ ID NO: 636060 - DNA, 55 bp, Artificial; identical to SEQ ID NO: 151638
  Synthetic oligonucleotide

SEQ ID NO: 636061 - DNA, 60 bp, Artificial; identical to SEQ ID NO: 252765
  Synthetic oligonucleotide

SEQ ID NO: 636062 - DNA, 57 bp, Artificial; identical to SEQ ID NO: 239399
  Synthetic oligonucleotide

SEQ ID NO: 636063 - DNA, 54 bp, Artificial; identical to SEQ ID NO: 246142
  Synthetic oligonucleotide

SEQ ID NO: 636064 - DNA, 55 bp, Artificial; identical to SEQ ID NO: 194335
  Synthetic oligonucleotide

SEQ ID NO: 636065 - DNA, 55 bp, Artificial; identical to SEQ ID NO: 153213
  Synthetic oligonucleotide

SEQ ID NO: 636066 - DNA, 55 bp, Artificial; identical to SEQ ID NO: 153211
  Synthetic oligonucleotide

SEQ ID NO: 636067 - DNA, 55 bp, Artificial; identical to SEQ ID NO: 180701
  Synthetic oligonucleotide

SEQ ID NO: 636068 - DNA, 59 bp, Artificial; identical to SEQ ID NO: 241860
  Synthetic oligonucleotide

SEQ ID NO: 636069 - DNA, 50 bp, Artificial; identical to SEQ ID NO: 241288
  Synthetic oligonucleotide

SEQ ID NO: 636070 - DNA, 55 bp, Artificial; identical to SEQ ID NO: 233398
  Synthetic oligonucleotide

SEQ ID NO: 636071 - DNA, 54 bp, Artificial; identical to SEQ ID NO: 243009
  Synthetic oligonucleotide

SEQ ID NO: 636072 - DNA, 55 bp, Artificial; identical to SEQ ID NO: 166280
  Synthetic oligonucleotide

SEQ ID NO: 636073 - DNA, 52 bp, Artificial; identical to SEQ ID NO: 221732
  Synthetic oligonucleotide

SEQ ID NO: 636074 - DNA, 57 bp, Artificial; identical to SEQ ID NO: 179745
  Synthetic oligonucleotide

SEQ ID NO: 636075 - DNA, 55 bp, Artificial; identical to SEQ ID NO: 171341
  Synthetic oligonucleotide

SEQ ID NO: 636076 - DNA, 55 bp, Artificial; identical to SEQ ID NO: 187441
  Synthetic oligonucleotide

SEQ ID NO: 636077 - DNA, 55 bp, Artificial; identical to SEQ ID NO: 207215
  Synthetic oligonucleotide

SEQ ID NO: 636078 - DNA, 60 bp, Artificial; identical to SEQ ID NO: 167824
  Synthetic oligonucleotide

SEQ ID NO: 636079 - DNA, 55 bp, Artificial; identical to SEQ ID NO: 191850
  Synthetic oligonucleotide

SEQ ID NO: 636080 - DNA, 55 bp, Artificial; identical to SEQ ID NO: 180699
  Synthetic oligonucleotide

SEQ ID NO: 636081 - DNA, 55 bp, Artificial; identical to SEQ ID NO: 188942
  Synthetic oligonucleotide

SEQ ID NO: 636082 - DNA, 55 bp, Artificial; identical to SEQ ID NO: 256958
  Synthetic oligonucleotide

SEQ ID NO: 636083 - DNA, 53 bp, Artificial; identical to SEQ ID NO: 185707
  Synthetic oligonucleotide

SEQ ID NO: 636084 - DNA, 55 bp, Artificial; identical to SEQ ID NO: 162000
  Synthetic oligonucleotide

SEQ ID NO: 636085 - DNA, 55 bp, Artificial; identical to SEQ ID NO: 257767
  Synthetic oligonucleotide

SEQ ID NO: 636086 - DNA, 60 bp, Artificial; identical to SEQ ID NO: 223450
  Synthetic oligonucleotide

SEQ ID NO: 636087 - DNA, 55 bp, Artificial; identical to SEQ ID NO: 238254
  Synthetic oligonucleotide

SEQ ID NO: 636088 - DNA, 55 bp, Artificial; identical to SEQ ID NO: 168584
  Synthetic oligonucleotide

SEQ ID NO: 636089 - DNA, 60 bp, Artificial; identical to SEQ ID NO: 153632
  Synthetic oligonucleotide

SEQ ID NO: 636090 - DNA, 50 bp, Artificial; identical to SEQ ID NO: 241284
  Synthetic oligonucleotide

SEQ ID NO: 636091 - DNA, 55 bp, Artificial; identical to SEQ ID NO: 180696
  Synthetic oligonucleotide

SEQ ID NO: 636092 - DNA, 60 bp, Artificial; identical to SEQ ID NO: 170520
  Synthetic oligonucleotide

SEQ ID NO: 636093 - DNA, 55 bp, Artificial; identical to SEQ ID NO: 160169
  Synthetic oligonucleotide

SEQ ID NO: 636094 - DNA, 56 bp, Artificial; identical to SEQ ID NO: 241863
  Synthetic oligonucleotide

SEQ ID NO: 636095 - DNA, 59 bp, Artificial; identical to SEQ ID NO: 171005
  Synthetic oligonucleotide

SEQ ID NO: 636096 - DNA, 55 bp, Artificial; identical to SEQ ID NO: 180695
  Synthetic oligonucleotide

SEQ ID NO: 636097 - DNA, 60 bp, Artificial; identical to SEQ ID NO: 144595
  Synthetic oligonucleotide

SEQ ID NO: 636098 - DNA, 56 bp, Artificial; identical to SEQ ID NO: 141897
  Synthetic oligonucleotide

SEQ ID NO: 636099 - DNA, 55 bp, Artificial; identical to SEQ ID NO: 253801
  Synthetic oligonucleotide

SEQ ID NO: 636100 - DNA, 54 bp, Artificial; identical to SEQ ID NO: 147405
  Synthetic oligonucleotide

SEQ ID NO: 636101 - DNA, 55 bp, Artificial; identical to SEQ ID NO: 171324
  Synthetic oligonucleotide

SEQ ID NO: 636102 - DNA, 54 bp, Artificial; identical to SEQ ID NO: 212942
  Synthetic oligonucleotide

SEQ ID NO: 636103 - DNA, 55 bp, Artificial; identical to SEQ ID NO: 266241
  Synthetic oligonucleotide

SEQ ID NO: 636104 - DNA, 55 bp, Artificial; identical to SEQ ID NO: 166313
  Synthetic oligonucleotide

SEQ ID NO: 636105 - DNA, 55 bp, Artificial; identical to SEQ ID NO: 198057
  Synthetic oligonucleotide

SEQ ID NO: 636106 - DNA, 55 bp, Artificial; identical to SEQ ID NO: 217407
  Synthetic oligonucleotide

SEQ ID NO: 636107 - DNA, 60 bp, Artificial; identical to SEQ ID NO: 265999
  Synthetic oligonucleotide

SEQ ID NO: 636108 - DNA, 55 bp, Artificial; identical to SEQ ID NO: 242938
  Synthetic oligonucleotide

SEQ ID NO: 636109 - DNA, 53 bp, Artificial; identical to SEQ ID NO: 240777
  Synthetic oligonucleotide

SEQ ID NO: 636110 - DNA, 55 bp, Artificial; identical to SEQ ID NO: 142071
  Synthetic oligonucleotide

SEQ ID NO: 636111 - DNA, 55 bp, Artificial; identical to SEQ ID NO: 217459
  Synthetic oligonucleotide

SEQ ID NO: 636112 - DNA, 55 bp, Artificial; identical to SEQ ID NO: 203085
  Synthetic oligonucleotide

SEQ ID NO: 636113 - DNA, 53 bp, Artificial; identical to SEQ ID NO: 189121
  Synthetic oligonucleotide

SEQ ID NO: 636114 - DNA, 55 bp, Artificial; identical to SEQ ID NO: 187638
  Synthetic oligonucleotide

SEQ ID NO: 636115 - DNA, 55 bp, Artificial; identical to SEQ ID NO: 239684
  Synthetic oligonucleotide

SEQ ID NO: 636116 - DNA, 55 bp, Artificial; identical to SEQ ID NO: 190244
  Synthetic oligonucleotide

SEQ ID NO: 636117 - DNA, 60 bp, Artificial; identical to SEQ ID NO: 150783
  Synthetic oligonucleotide

SEQ ID NO: 636118 - DNA, 52 bp, Artificial; identical to SEQ ID NO: 216748
  Synthetic oligonucleotide

SEQ ID NO: 636119 - DNA, 60 bp, Artificial; identical to SEQ ID NO: 185437
  Synthetic oligonucleotide

SEQ ID NO: 636120 - DNA, 55 bp, Artificial; identical to SEQ ID NO: 180692
  Synthetic oligonucleotide

SEQ ID NO: 636121 - DNA, 55 bp, Artificial; identical to SEQ ID NO: 247683
  Synthetic oligonucleotide

SEQ ID NO: 636122 - DNA, 55 bp, Artificial; identical to SEQ ID NO: 212716
  Synthetic oligonucleotide

SEQ ID NO: 636123 - DNA, 55 bp, Artificial; identical to SEQ ID NO: 239686
  Synthetic oligonucleotide

SEQ ID NO: 636124 - DNA, 55 bp, Artificial; identical to SEQ ID NO: 166310
  Synthetic oligonucleotide

SEQ ID NO: 636125 - DNA, 53 bp, Artificial; identical to SEQ ID NO: 154126
  Synthetic oligonucleotide

SEQ ID NO: 636126 - DNA, 55 bp, Artificial; identical to SEQ ID NO: 180690
  Synthetic oligonucleotide

SEQ ID NO: 636127 - DNA, 55 bp, Artificial; identical to SEQ ID NO: 180689
  Synthetic oligonucleotide

SEQ ID NO: 636128 - DNA, 55 bp, Artificial; identical to SEQ ID NO: 239687
  Synthetic oligonucleotide

SEQ ID NO: 636129 - DNA, 55 bp, Artificial; identical to SEQ ID NO: 180688
  Synthetic oligonucleotide

SEQ ID NO: 636130 - DNA, 55 bp, Artificial; identical to SEQ ID NO: 239688
  Synthetic oligonucleotide

SEQ ID NO: 636131 - DNA, 55 bp, Artificial; identical to SEQ ID NO: 239689
  Synthetic oligonucleotide

SEQ ID NO: 636132 - DNA, 57 bp, Artificial; identical to SEQ ID NO: 241869
  Synthetic oligonucleotide

SEQ ID NO: 636133 - DNA, 55 bp, Artificial; identical to SEQ ID NO: 180732
  Synthetic oligonucleotide

SEQ ID NO: 636134 - DNA, 55 bp, Artificial; identical to SEQ ID NO: 171320
  Synthetic oligonucleotide

SEQ ID NO: 636135 - DNA, 60 bp, Artificial; identical to SEQ ID NO: 185215
  Synthetic oligonucleotide

SEQ ID NO: 636136 - DNA, 55 bp, Artificial; identical to SEQ ID NO: 203539
  Synthetic oligonucleotide

SEQ ID NO: 636137 - DNA, 55 bp, Artificial; identical to SEQ ID NO: 147433
  Synthetic oligonucleotide

SEQ ID NO: 636138 - DNA, 55 bp, Artificial; identical to SEQ ID NO: 208130
  Synthetic oligonucleotide

SEQ ID NO: 636139 - DNA, 55 bp, Artificial; identical to SEQ ID NO: 247681
  Synthetic oligonucleotide

SEQ ID NO: 636140 - DNA, 55 bp, Artificial; identical to SEQ ID NO: 146223
  Synthetic oligonucleotide

SEQ ID NO: 636141 - DNA, 52 bp, Artificial; identical to SEQ ID NO: 149595
  Synthetic oligonucleotide

SEQ ID NO: 636142 - DNA, 55 bp, Artificial; identical to SEQ ID NO: 221186
  Synthetic oligonucleotide

SEQ ID NO: 636143 - DNA, 55 bp, Artificial; identical to SEQ ID NO: 171319
  Synthetic oligonucleotide

SEQ ID NO: 636144 - DNA, 51 bp, Artificial; identical to SEQ ID NO: 204015
  Synthetic oligonucleotide

SEQ ID NO: 636145 - DNA, 55 bp, Artificial; identical to SEQ ID NO: 224581
  Synthetic oligonucleotide

SEQ ID NO: 636146 - DNA, 55 bp, Artificial; identical to SEQ ID NO: 161225
  Synthetic oligonucleotide

SEQ ID NO: 636147 - DNA, 55 bp, Artificial; identical to SEQ ID NO: 260213
  Synthetic oligonucleotide

SEQ ID NO: 636148 - DNA, 55 bp, Artificial; identical to SEQ ID NO: 261817
  Synthetic oligonucleotide

SEQ ID NO: 636149 - DNA, 55 bp, Artificial; identical to SEQ ID NO: 153212
  Synthetic oligonucleotide

SEQ ID NO: 636150 - DNA, 55 bp, Artificial; identical to SEQ ID NO: 257768
  Synthetic oligonucleotide

SEQ ID NO: 636151 - DNA, 55 bp, Artificial; identical to SEQ ID NO: 159273
  Synthetic oligonucleotide

SEQ ID NO: 636152 - DNA, 60 bp, Artificial; identical to SEQ ID NO: 210744
  Synthetic oligonucleotide

SEQ ID NO: 636153 - DNA, 60 bp, Artificial; identical to SEQ ID NO: 184882
  Synthetic oligonucleotide

SEQ ID NO: 636154 - DNA, 53 bp, Artificial; identical to SEQ ID NO: 145001
  Synthetic oligonucleotide

SEQ ID NO: 636155 - DNA, 50 bp, Artificial; identical to SEQ ID NO: 209825
  Synthetic oligonucleotide

SEQ ID NO: 636156 - DNA, 53 bp, Artificial; identical to SEQ ID NO: 185698
  Synthetic oligonucleotide

SEQ ID NO: 636157 - DNA, 55 bp, Artificial; identical to SEQ ID NO: 142095
  Synthetic oligonucleotide

SEQ ID NO: 636158 - DNA, 55 bp, Artificial; identical to SEQ ID NO: 168647
  Synthetic oligonucleotide

SEQ ID NO: 636159 - DNA, 55 bp, Artificial; identical to SEQ ID NO: 239694
  Synthetic oligonucleotide

SEQ ID NO: 636160 - DNA, 54 bp, Artificial; identical to SEQ ID NO: 234403
  Synthetic oligonucleotide

SEQ ID NO: 636161 - DNA, 55 bp, Artificial; identical to SEQ ID NO: 169317
  Synthetic oligonucleotide

SEQ ID NO: 636162 - DNA, 55 bp, Artificial; identical to SEQ ID NO: 205293
  Synthetic oligonucleotide

SEQ ID NO: 636163 - DNA, 55 bp, Artificial; identical to SEQ ID NO: 180726
  Synthetic oligonucleotide

SEQ ID NO: 636164 - DNA, 55 bp, Artificial; identical to SEQ ID NO: 224582
  Synthetic oligonucleotide

SEQ ID NO: 636165 - DNA, 58 bp, Artificial; identical to SEQ ID NO: 209228
  Synthetic oligonucleotide

SEQ ID NO: 636166 - DNA, 60 bp, Artificial; identical to SEQ ID NO: 224136
  Synthetic oligonucleotide

SEQ ID NO: 636167 - DNA, 55 bp, Artificial; identical to SEQ ID NO: 242940
  Synthetic oligonucleotide

SEQ ID NO: 636168 - DNA, 60 bp, Artificial; identical to SEQ ID NO: 202676
  Synthetic oligonucleotide

SEQ ID NO: 636169 - DNA, 59 bp, Artificial; identical to SEQ ID NO: 141929
  Synthetic oligonucleotide

SEQ ID NO: 636170 - DNA, 50 bp, Artificial; identical to SEQ ID NO: 192184
  Synthetic oligonucleotide

SEQ ID NO: 636171 - DNA, 55 bp, Artificial; identical to SEQ ID NO: 234283
  Synthetic oligonucleotide

SEQ ID NO: 636172 - DNA, 59 bp, Artificial; identical to SEQ ID NO: 161939
  Synthetic oligonucleotide

SEQ ID NO: 636173 - DNA, 55 bp, Artificial; identical to SEQ ID NO: 252802
  Synthetic oligonucleotide

SEQ ID NO: 636174 - DNA, 60 bp, Artificial; identical to SEQ ID NO: 209217
  Synthetic oligonucleotide

SEQ ID NO: 636175 - DNA, 57 bp, Artificial; identical to SEQ ID NO: 212570
  Synthetic oligonucleotide

SEQ ID NO: 636176 - DNA, 57 bp, Artificial; identical to SEQ ID NO: 205218
  Synthetic oligonucleotide

SEQ ID NO: 636177 - DNA, 52 bp, Artificial; identical to SEQ ID NO: 247973
  Synthetic oligonucleotide

SEQ ID NO: 636178 - DNA, 56 bp, Artificial; identical to SEQ ID NO: 257522
  Synthetic oligonucleotide

SEQ ID NO: 636179 - DNA, 55 bp, Artificial; identical to SEQ ID NO: 209256
  Synthetic oligonucleotide

SEQ ID NO: 636180 - DNA, 52 bp, Artificial; identical to SEQ ID NO: 165089
  Synthetic oligonucleotide

SEQ ID NO: 636181 - DNA, 55 bp, Artificial; identical to SEQ ID NO: 198238
  Synthetic oligonucleotide

SEQ ID NO: 636182 - DNA, 55 bp, Artificial; identical to SEQ ID NO: 194339
  Synthetic oligonucleotide

SEQ ID NO: 636183 - DNA, 55 bp, Artificial; identical to SEQ ID NO: 238209
  Synthetic oligonucleotide

SEQ ID NO: 636184 - DNA, 55 bp, Artificial; identical to SEQ ID NO: 154325
  Synthetic oligonucleotide

SEQ ID NO: 636185 - DNA, 51 bp, Artificial; identical to SEQ ID NO: 157850
  Synthetic oligonucleotide

SEQ ID NO: 636186 - DNA, 55 bp, Artificial; identical to SEQ ID NO: 205609
  Synthetic oligonucleotide

SEQ ID NO: 636187 - DNA, 55 bp, Artificial; identical to SEQ ID NO: 239596
  Synthetic oligonucleotide

SEQ ID NO: 636188 - DNA, 55 bp, Artificial; identical to SEQ ID NO: 198236
  Synthetic oligonucleotide

SEQ ID NO: 636189 - DNA, 55 bp, Artificial; identical to SEQ ID NO: 215439
  Synthetic oligonucleotide

SEQ ID NO: 636190 - DNA, 55 bp, Artificial; identical to SEQ ID NO: 187637
  Synthetic oligonucleotide

SEQ ID NO: 636191 - DNA, 52 bp, Artificial; identical to SEQ ID NO: 152063
  Synthetic oligonucleotide

SEQ ID NO: 636192 - DNA, 55 bp, Artificial; identical to SEQ ID NO: 160972
  Synthetic oligonucleotide

SEQ ID NO: 636193 - DNA, 55 bp, Artificial; identical to SEQ ID NO: 187636
  Synthetic oligonucleotide

SEQ ID NO: 636194 - DNA, 55 bp, Artificial; identical to SEQ ID NO: 247671
  Synthetic oligonucleotide

SEQ ID NO: 636195 - DNA, 55 bp, Artificial; identical to SEQ ID NO: 159278
  Synthetic oligonucleotide

SEQ ID NO: 636196 - DNA, 53 bp, Artificial; identical to SEQ ID NO: 153612
  Synthetic oligonucleotide

SEQ ID NO: 636197 - DNA, 55 bp, Artificial; identical to SEQ ID NO: 211208
  Synthetic oligonucleotide

SEQ ID NO: 636198 - DNA, 53 bp, Artificial; identical to SEQ ID NO: 197516
  Synthetic oligonucleotide

SEQ ID NO: 636199 - DNA, 55 bp, Artificial; identical to SEQ ID NO: 266244
  Synthetic oligonucleotide

SEQ ID NO: 636200 - DNA, 55 bp, Artificial; identical to SEQ ID NO: 160168
  Synthetic oligonucleotide

SEQ ID NO: 636201 - DNA, 54 bp, Artificial; identical to SEQ ID NO: 144973
  Synthetic oligonucleotide

SEQ ID NO: 636202 - DNA, 55 bp, Artificial; identical to SEQ ID NO: 151640
  Synthetic oligonucleotide

SEQ ID NO: 636203 - DNA, 50 bp, Artificial; identical to SEQ ID NO: 176154
  Synthetic oligonucleotide

SEQ ID NO: 636204 - DNA, 55 bp, Artificial; identical to SEQ ID NO: 207216
  Synthetic oligonucleotide

SEQ ID NO: 636205 - DNA, 55 bp, Artificial; identical to SEQ ID NO: 198235
  Synthetic oligonucleotide

SEQ ID NO: 636206 - DNA, 55 bp, Artificial; identical to SEQ ID NO: 155047
  Synthetic oligonucleotide

SEQ ID NO: 636207 - DNA, 55 bp, Artificial; identical to SEQ ID NO: 197334
  Synthetic oligonucleotide

SEQ ID NO: 636208 - DNA, 57 bp, Artificial; identical to SEQ ID NO: 141931
  Synthetic oligonucleotide

SEQ ID NO: 636209 - DNA, 55 bp, Artificial; identical to SEQ ID NO: 217461
  Synthetic oligonucleotide

SEQ ID NO: 636210 - DNA, 55 bp, Artificial; identical to SEQ ID NO: 151641
  Synthetic oligonucleotide

SEQ ID NO: 636211 - DNA, 55 bp, Artificial; identical to SEQ ID NO: 209258
  Synthetic oligonucleotide

SEQ ID NO: 636212 - DNA, 53 bp, Artificial; identical to SEQ ID NO: 199712
  Synthetic oligonucleotide

SEQ ID NO: 636213 - DNA, 57 bp, Artificial; identical to SEQ ID NO: 190686
  Synthetic oligonucleotide

SEQ ID NO: 636214 - DNA, 55 bp, Artificial; identical to SEQ ID NO: 205607
  Synthetic oligonucleotide

SEQ ID NO: 636215 - DNA, 55 bp, Artificial; identical to SEQ ID NO: 146222
  Synthetic oligonucleotide

SEQ ID NO: 636216 - DNA, 55 bp, Artificial; identical to SEQ ID NO: 143768
  Synthetic oligonucleotide

SEQ ID NO: 636217 - DNA, 55 bp, Artificial; identical to SEQ ID NO: 180713
  Synthetic oligonucleotide

SEQ ID NO: 636218 - DNA, 55 bp, Artificial; identical to SEQ ID NO: 197333
  Synthetic oligonucleotide

SEQ ID NO: 636219 - DNA, 58 bp, Artificial; identical to SEQ ID NO: 224331
  Synthetic oligonucleotide

SEQ ID NO: 636220 - DNA, 55 bp, Artificial; identical to SEQ ID NO: 198233
  Synthetic oligonucleotide

SEQ ID NO: 636221 - DNA, 55 bp, Artificial; identical to SEQ ID NO: 180711
  Synthetic oligonucleotide

SEQ ID NO: 636222 - DNA, 55 bp, Artificial; identical to SEQ ID NO: 218891
  Synthetic oligonucleotide

SEQ ID NO: 636223 - DNA, 55 bp, Artificial; identical to SEQ ID NO: 217462
  Synthetic oligonucleotide

SEQ ID NO: 636224 - DNA, 55 bp, Artificial; identical to SEQ ID NO: 220683
  Synthetic oligonucleotide

SEQ ID NO: 636225 - DNA, 57 bp, Artificial; identical to SEQ ID NO: 241818
  Synthetic oligonucleotide

SEQ ID NO: 636226 - DNA, 53 bp, Artificial; identical to SEQ ID NO: 199716
  Synthetic oligonucleotide

SEQ ID NO: 636227 - DNA, 51 bp, Artificial; identical to SEQ ID NO: 243322
  Synthetic oligonucleotide

SEQ ID NO: 636228 - DNA, 55 bp, Artificial; identical to SEQ ID NO: 218890
  Synthetic oligonucleotide

SEQ ID NO: 636229 - DNA, 60 bp, Artificial; identical to SEQ ID NO: 241819
  Synthetic oligonucleotide

SEQ ID NO: 636230 - DNA, 51 bp, Artificial; identical to SEQ ID NO: 187063
  Synthetic oligonucleotide

SEQ ID NO: 636231 - DNA, 55 bp, Artificial; identical to SEQ ID NO: 249777
  Synthetic oligonucleotide

SEQ ID NO: 636232 - DNA, 55 bp, Artificial; identical to SEQ ID NO: 207217
  Synthetic oligonucleotide

SEQ ID NO: 636233 - DNA, 60 bp, Artificial; identical to SEQ ID NO: 178882
  Synthetic oligonucleotide

SEQ ID NO: 636234 - DNA, 60 bp, Artificial; identical to SEQ ID NO: 241825
  Synthetic oligonucleotide

SEQ ID NO: 636235 - DNA, 55 bp, Artificial; identical to SEQ ID NO: 166303
  Synthetic oligonucleotide

SEQ ID NO: 636236 - DNA, 56 bp, Artificial; identical to SEQ ID NO: 179904
  Synthetic oligonucleotide

SEQ ID NO: 636237 - DNA, 58 bp, Artificial; identical to SEQ ID NO: 212489
  Synthetic oligonucleotide

SEQ ID NO: 636238 - DNA, 58 bp, Artificial; identical to SEQ ID NO: 246243
  Synthetic oligonucleotide

SEQ ID NO: 636239 - DNA, 53 bp, Artificial; identical to SEQ ID NO: 196163
  Synthetic oligonucleotide

SEQ ID NO: 636240 - DNA, 57 bp, Artificial; identical to SEQ ID NO: 187368
  Synthetic oligonucleotide

SEQ ID NO: 636241 - DNA, 55 bp, Artificial; identical to SEQ ID NO: 151643
  Synthetic oligonucleotide

SEQ ID NO: 636242 - DNA, 59 bp, Artificial; identical to SEQ ID NO: 248432
  Synthetic oligonucleotide

SEQ ID NO: 636243 - DNA, 55 bp, Artificial; identical to SEQ ID NO: 180658
  Synthetic oligonucleotide

SEQ ID NO: 636244 - DNA, 60 bp, Artificial; identical to SEQ ID NO: 170848
  Synthetic oligonucleotide

SEQ ID NO: 636245 - DNA, 55 bp, Artificial; identical to SEQ ID NO: 146221
  Synthetic oligonucleotide

SEQ ID NO: 636246 - DNA, 55 bp, Artificial; identical to SEQ ID NO: 153216
  Synthetic oligonucleotide

SEQ ID NO: 636247 - DNA, 55 bp, Artificial; identical to SEQ ID NO: 198231
  Synthetic oligonucleotide

SEQ ID NO: 636248 - DNA, 60 bp, Artificial; identical to SEQ ID NO: 241826
  Synthetic oligonucleotide

SEQ ID NO: 636249 - DNA, 55 bp, Artificial; identical to SEQ ID NO: 207096
  Synthetic oligonucleotide

SEQ ID NO: 636250 - DNA, 55 bp, Artificial; identical to SEQ ID NO: 180656
  Synthetic oligonucleotide

SEQ ID NO: 636251 - DNA, 60 bp, Artificial; identical to SEQ ID NO: 206063
  Synthetic oligonucleotide

SEQ ID NO: 636252 - DNA, 56 bp, Artificial; identical to SEQ ID NO: 201215
  Synthetic oligonucleotide

SEQ ID NO: 636253 - DNA, 55 bp, Artificial; identical to SEQ ID NO: 190237
  Synthetic oligonucleotide

SEQ ID NO: 636254 - DNA, 55 bp, Artificial; identical to SEQ ID NO: 180654
  Synthetic oligonucleotide

SEQ ID NO: 636255 - DNA, 52 bp, Artificial; identical to SEQ ID NO: 187012
  Synthetic oligonucleotide

SEQ ID NO: 636256 - DNA, 55 bp, Artificial; identical to SEQ ID NO: 155339
  Synthetic oligonucleotide

SEQ ID NO: 636257 - DNA, 59 bp, Artificial; identical to SEQ ID NO: 246220
  Synthetic oligonucleotide

SEQ ID NO: 636258 - DNA, 51 bp, Artificial; identical to SEQ ID NO: 206540
  Synthetic oligonucleotide

SEQ ID NO: 636259 - DNA, 55 bp, Artificial; identical to SEQ ID NO: 198230
  Synthetic oligonucleotide

SEQ ID NO: 636260 - DNA, 55 bp, Artificial; identical to SEQ ID NO: 247700
  Synthetic oligonucleotide

SEQ ID NO: 636261 - DNA, 58 bp, Artificial; identical to SEQ ID NO: 179537
  Synthetic oligonucleotide

SEQ ID NO: 636262 - DNA, 53 bp, Artificial; identical to SEQ ID NO: 209632
  Synthetic oligonucleotide

SEQ ID NO: 636263 - DNA, 55 bp, Artificial; identical to SEQ ID NO: 203083
  Synthetic oligonucleotide

SEQ ID NO: 636264 - DNA, 57 bp, Artificial; identical to SEQ ID NO: 160430
  Synthetic oligonucleotide

SEQ ID NO: 636265 - DNA, 56 bp, Artificial; identical to SEQ ID NO: 239571
  Synthetic oligonucleotide

SEQ ID NO: 636266 - DNA, 59 bp, Artificial; identical to SEQ ID NO: 241828
  Synthetic oligonucleotide

SEQ ID NO: 636267 - DNA, 56 bp, Artificial; identical to SEQ ID NO: 241833
  Synthetic oligonucleotide

SEQ ID NO: 636268 - DNA, 55 bp, Artificial; identical to SEQ ID NO: 217463
  Synthetic oligonucleotide

SEQ ID NO: 636269 - DNA, 55 bp, Artificial; identical to SEQ ID NO: 233962
  Synthetic oligonucleotide

SEQ ID NO: 636270 - DNA, 52 bp, Artificial; identical to SEQ ID NO: 186054
  Synthetic oligonucleotide

SEQ ID NO: 636271 - DNA, 59 bp, Artificial; identical to SEQ ID NO: 144732
  Synthetic oligonucleotide

SEQ ID NO: 636272 - DNA, 51 bp, Artificial; identical to SEQ ID NO: 208814
  Synthetic oligonucleotide

SEQ ID NO: 636273 - DNA, 60 bp, Artificial; identical to SEQ ID NO: 206934
  Synthetic oligonucleotide

SEQ ID NO: 636274 - DNA, 55 bp, Artificial; identical to SEQ ID NO: 188682
  Synthetic oligonucleotide

SEQ ID NO: 636275 - DNA, 55 bp, Artificial; identical to SEQ ID NO: 187629
  Synthetic oligonucleotide

SEQ ID NO: 636276 - DNA, 60 bp, Artificial; identical to SEQ ID NO: 212636
  Synthetic oligonucleotide

SEQ ID NO: 636277 - DNA, 51 bp, Artificial; identical to SEQ ID NO: 253396
  Synthetic oligonucleotide

SEQ ID NO: 636278 - DNA, 55 bp, Artificial; identical to SEQ ID NO: 166296
  Synthetic oligonucleotide

SEQ ID NO: 636279 - DNA, 55 bp, Artificial; identical to SEQ ID NO: 159282
  Synthetic oligonucleotide

SEQ ID NO: 636280 - DNA, 52 bp, Artificial; identical to SEQ ID NO: 157555
  Synthetic oligonucleotide

SEQ ID NO: 636281 - DNA, 55 bp, Artificial; identical to SEQ ID NO: 208153
  Synthetic oligonucleotide

SEQ ID NO: 636282 - DNA, 51 bp, Artificial; identical to SEQ ID NO: 200135
  Synthetic oligonucleotide

SEQ ID NO: 636283 - DNA, 60 bp, Artificial; identical to SEQ ID NO: 170844
  Synthetic oligonucleotide

SEQ ID NO: 636284 - DNA, 55 bp, Artificial; identical to SEQ ID NO: 233436
  Synthetic oligonucleotide

SEQ ID NO: 636285 - DNA, 55 bp, Artificial; identical to SEQ ID NO: 155058
  Synthetic oligonucleotide

SEQ ID NO: 636286 - DNA, 59 bp, Artificial; identical to SEQ ID NO: 194881
  Synthetic oligonucleotide

SEQ ID NO: 636287 - DNA, 55 bp, Artificial; identical to SEQ ID NO: 188681
  Synthetic oligonucleotide

SEQ ID NO: 636288 - DNA, 55 bp, Artificial; identical to SEQ ID NO: 180648
  Synthetic oligonucleotide

SEQ ID NO: 636289 - DNA, 55 bp, Artificial; identical to SEQ ID NO: 239612
  Synthetic oligonucleotide

SEQ ID NO: 636290 - DNA, 51 bp, Artificial; identical to SEQ ID NO: 141332
  Synthetic oligonucleotide

SEQ ID NO: 636291 - DNA, 50 bp, Artificial; identical to SEQ ID NO: 237509
  Synthetic oligonucleotide

SEQ ID NO: 636292 - DNA, 55 bp, Artificial; identical to SEQ ID NO: 238208
  Synthetic oligonucleotide

SEQ ID NO: 636293 - DNA, 55 bp, Artificial; identical to SEQ ID NO: 144215
  Synthetic oligonucleotide

SEQ ID NO: 636294 - DNA, 51 bp, Artificial; identical to SEQ ID NO: 161389
  Synthetic oligonucleotide

SEQ ID NO: 636295 - DNA, 51 bp, Artificial; identical to SEQ ID NO: 190913
  Synthetic oligonucleotide

SEQ ID NO: 636296 - DNA, 55 bp, Artificial; identical to SEQ ID NO: 209307
  Synthetic oligonucleotide

SEQ ID NO: 636297 - DNA, 53 bp, Artificial; identical to SEQ ID NO: 199711
  Synthetic oligonucleotide

SEQ ID NO: 636298 - DNA, 52 bp, Artificial; identical to SEQ ID NO: 165096
  Synthetic oligonucleotide

SEQ ID NO: 636299 - DNA, 60 bp, Artificial; identical to SEQ ID NO: 233923
  Synthetic oligonucleotide

SEQ ID NO: 636300 - DNA, 58 bp, Artificial; identical to SEQ ID NO: 247477
  Synthetic oligonucleotide

SEQ ID NO: 636301 - DNA, 60 bp, Artificial; identical to SEQ ID NO: 241841
  Synthetic oligonucleotide

SEQ ID NO: 636302 - DNA, 54 bp, Artificial; identical to SEQ ID NO: 164702
  Synthetic oligonucleotide

SEQ ID NO: 636303 - DNA, 52 bp, Artificial; identical to SEQ ID NO: 216756
  Synthetic oligonucleotide

SEQ ID NO: 636304 - DNA, 55 bp, Artificial; identical to SEQ ID NO: 188952
  Synthetic oligonucleotide

SEQ ID NO: 636305 - DNA, 60 bp, Artificial; identical to SEQ ID NO: 203251
  Synthetic oligonucleotide

SEQ ID NO: 636306 - DNA, 55 bp, Artificial; identical to SEQ ID NO: 164423
  Synthetic oligonucleotide

SEQ ID NO: 636307 - DNA, 59 bp, Artificial; identical to SEQ ID NO: 153043
  Synthetic oligonucleotide

SEQ ID NO: 636308 - DNA, 55 bp, Artificial; identical to SEQ ID NO: 239607
  Synthetic oligonucleotide

SEQ ID NO: 636309 - DNA, 55 bp, Artificial; identical to SEQ ID NO: 166293
  Synthetic oligonucleotide

SEQ ID NO: 636310 - DNA, 55 bp, Artificial; identical to SEQ ID NO: 202159
  Synthetic oligonucleotide

SEQ ID NO: 636311 - DNA, 55 bp, Artificial; identical to SEQ ID NO: 166299
  Synthetic oligonucleotide

SEQ ID NO: 636312 - DNA, 55 bp, Artificial; identical to SEQ ID NO: 180645
  Synthetic oligonucleotide

SEQ ID NO: 636313 - DNA, 57 bp, Artificial; identical to SEQ ID NO: 246187
  Synthetic oligonucleotide

SEQ ID NO: 636314 - DNA, 55 bp, Artificial; identical to SEQ ID NO: 256702
  Synthetic oligonucleotide

SEQ ID NO: 636315 - DNA, 57 bp, Artificial; identical to SEQ ID NO: 217513
  Synthetic oligonucleotide

SEQ ID NO: 636316 - DNA, 60 bp, Artificial; identical to SEQ ID NO: 150786
  Synthetic oligonucleotide

SEQ ID NO: 636317 - DNA, 55 bp, Artificial; identical to SEQ ID NO: 171109
  Synthetic oligonucleotide

SEQ ID NO: 636318 - DNA, 50 bp, Artificial; identical to SEQ ID NO: 243416
  Synthetic oligonucleotide

SEQ ID NO: 636319 - DNA, 60 bp, Artificial; identical to SEQ ID NO: 243477
  Synthetic oligonucleotide

SEQ ID NO: 636320 - DNA, 55 bp, Artificial; identical to SEQ ID NO: 221182
  Synthetic oligonucleotide

SEQ ID NO: 636321 - DNA, 56 bp, Artificial; identical to SEQ ID NO: 179946
  Synthetic oligonucleotide

SEQ ID NO: 636322 - DNA, 51 bp, Artificial; identical to SEQ ID NO: 154668
  Synthetic oligonucleotide

SEQ ID NO: 636323 - DNA, 55 bp, Artificial; identical to SEQ ID NO: 166291
  Synthetic oligonucleotide

SEQ ID NO: 636324 - DNA, 55 bp, Artificial; identical to SEQ ID NO: 171120
  Synthetic oligonucleotide

SEQ ID NO: 636325 - DNA, 55 bp, Artificial; identical to SEQ ID NO: 147387
  Synthetic oligonucleotide

SEQ ID NO: 636326 - DNA, 55 bp, Artificial; identical to SEQ ID NO: 198229
  Synthetic oligonucleotide

SEQ ID NO: 636327 - DNA, 55 bp, Artificial; identical to SEQ ID NO: 211170
  Synthetic oligonucleotide

SEQ ID NO: 636328 - DNA, 55 bp, Artificial; identical to SEQ ID NO: 159285
  Synthetic oligonucleotide

SEQ ID NO: 636329 - DNA, 55 bp, Artificial; identical to SEQ ID NO: 194362
  Synthetic oligonucleotide

SEQ ID NO: 636330 - DNA, 58 bp, Artificial; identical to SEQ ID NO: 209185
  Synthetic oligonucleotide

SEQ ID NO: 636331 - DNA, 57 bp, Artificial; identical to SEQ ID NO: 177771
  Synthetic oligonucleotide

SEQ ID NO: 636332 - DNA, 60 bp, Artificial; identical to SEQ ID NO: 241844
  Synthetic oligonucleotide

SEQ ID NO: 636333 - DNA, 55 bp, Artificial; identical to SEQ ID NO: 151646
  Synthetic oligonucleotide

SEQ ID NO: 636334 - DNA, 56 bp, Artificial; identical to SEQ ID NO: 209170
  Synthetic oligonucleotide

SEQ ID NO: 636335 - DNA, 58 bp, Artificial; identical to SEQ ID NO: 159938
  Synthetic oligonucleotide

SEQ ID NO: 636336 - DNA, 58 bp, Artificial; identical to SEQ ID NO: 209172
  Synthetic oligonucleotide

SEQ ID NO: 636337 - DNA, 53 bp, Artificial; identical to SEQ ID NO: 208726
  Synthetic oligonucleotide

SEQ ID NO: 636338 - DNA, 55 bp, Artificial; identical to SEQ ID NO: 159286
  Synthetic oligonucleotide

SEQ ID NO: 636339 - DNA, 60 bp, Artificial; identical to SEQ ID NO: 243488
  Synthetic oligonucleotide

SEQ ID NO: 636340 - DNA, 55 bp, Artificial; identical to SEQ ID NO: 233430
  Synthetic oligonucleotide

SEQ ID NO: 636341 - DNA, 60 bp, Artificial; identical to SEQ ID NO: 233932
  Synthetic oligonucleotide

SEQ ID NO: 636342 - DNA, 60 bp, Artificial; identical to SEQ ID NO: 248433
  Synthetic oligonucleotide

SEQ ID NO: 636343 - DNA, 52 bp, Artificial; identical to SEQ ID NO: 240869
  Synthetic oligonucleotide

SEQ ID NO: 636344 - DNA, 51 bp, Artificial; identical to SEQ ID NO: 204020
  Synthetic oligonucleotide

SEQ ID NO: 636345 - DNA, 56 bp, Artificial; identical to SEQ ID NO: 142510
  Synthetic oligonucleotide

SEQ ID NO: 636346 - DNA, 51 bp, Artificial; identical to SEQ ID NO: 149811
  Synthetic oligonucleotide

SEQ ID NO: 636347 - DNA, 60 bp, Artificial; identical to SEQ ID NO: 248436
  Synthetic oligonucleotide

SEQ ID NO: 636348 - DNA, 55 bp, Artificial; identical to SEQ ID NO: 147380
  Synthetic oligonucleotide

SEQ ID NO: 636349 - DNA, 51 bp, Artificial; identical to SEQ ID NO: 174941
  Synthetic oligonucleotide

SEQ ID NO: 636350 - DNA, 60 bp, Artificial; identical to SEQ ID NO: 258984
  Synthetic oligonucleotide

SEQ ID NO: 636351 - DNA, 55 bp, Artificial; identical to SEQ ID NO: 180687
  Synthetic oligonucleotide

SEQ ID NO: 636352 - DNA, 55 bp, Artificial; identical to SEQ ID NO: 197331
  Synthetic oligonucleotide

SEQ ID NO: 636353 - DNA, 55 bp, Artificial; identical to SEQ ID NO: 166275
  Synthetic oligonucleotide

SEQ ID NO: 636354 - DNA, 55 bp, Artificial; identical to SEQ ID NO: 256698
  Synthetic oligonucleotide

SEQ ID NO: 636355 - DNA, 57 bp, Artificial; identical to SEQ ID NO: 253630
  Synthetic oligonucleotide

SEQ ID NO: 636356 - DNA, 55 bp, Artificial; identical to SEQ ID NO: 190233
  Synthetic oligonucleotide

SEQ ID NO: 636357 - DNA, 55 bp, Artificial; identical to SEQ ID NO: 171122
  Synthetic oligonucleotide

SEQ ID NO: 636358 - DNA, 60 bp, Artificial; identical to SEQ ID NO: 255034
  Synthetic oligonucleotide

SEQ ID NO: 636359 - DNA, 60 bp, Artificial; identical to SEQ ID NO: 255012
  Synthetic oligonucleotide

SEQ ID NO: 636360 - DNA, 55 bp, Artificial; identical to SEQ ID NO: 146220
  Synthetic oligonucleotide

SEQ ID NO: 636361 - DNA, 55 bp, Artificial; identical to SEQ ID NO: 247689
  Synthetic oligonucleotide

SEQ ID NO: 636362 - DNA, 55 bp, Artificial; identical to SEQ ID NO: 194361
  Synthetic oligonucleotide

SEQ ID NO: 636363 - DNA, 55 bp, Artificial; identical to SEQ ID NO: 198227
  Synthetic oligonucleotide

SEQ ID NO: 636364 - DNA, 55 bp, Artificial; identical to SEQ ID NO: 198225
  Synthetic oligonucleotide

SEQ ID NO: 636365 - DNA, 55 bp, Artificial; identical to SEQ ID NO: 159289
  Synthetic oligonucleotide

SEQ ID NO: 636366 - DNA, 55 bp, Artificial; identical to SEQ ID NO: 191274
  Synthetic oligonucleotide

SEQ ID NO: 636367 - DNA, 53 bp, Artificial; identical to SEQ ID NO: 233802
  Synthetic oligonucleotide

SEQ ID NO: 636368 - DNA, 53 bp, Artificial; identical to SEQ ID NO: 203532
  Synthetic oligonucleotide

SEQ ID NO: 636369 - DNA, 54 bp, Artificial; identical to SEQ ID NO: 201357
  Synthetic oligonucleotide

SEQ ID NO: 636370 - DNA, 52 bp, Artificial; identical to SEQ ID NO: 186065
  Synthetic oligonucleotide

SEQ ID NO: 636371 - DNA, 60 bp, Artificial; identical to SEQ ID NO: 217524
  Synthetic oligonucleotide

SEQ ID NO: 636372 - DNA, 55 bp, Artificial; identical to SEQ ID NO: 180684
  Synthetic oligonucleotide

SEQ ID NO: 636373 - DNA, 55 bp, Artificial; identical to SEQ ID NO: 180682
  Synthetic oligonucleotide

SEQ ID NO: 636374 - DNA, 55 bp, Artificial; identical to SEQ ID NO: 224593
  Synthetic oligonucleotide

SEQ ID NO: 636375 - DNA, 57 bp, Artificial; identical to SEQ ID NO: 177438
  Synthetic oligonucleotide

SEQ ID NO: 636376 - DNA, 55 bp, Artificial; identical to SEQ ID NO: 147421
  Synthetic oligonucleotide

SEQ ID NO: 636377 - DNA, 57 bp, Artificial; identical to SEQ ID NO: 208075
  Synthetic oligonucleotide

SEQ ID NO: 636378 - DNA, 56 bp, Artificial; identical to SEQ ID NO: 201492
  Synthetic oligonucleotide

SEQ ID NO: 636379 - DNA, 60 bp, Artificial; identical to SEQ ID NO: 202675
  Synthetic oligonucleotide

SEQ ID NO: 636380 - DNA, 55 bp, Artificial; identical to SEQ ID NO: 180680
  Synthetic oligonucleotide

SEQ ID NO: 636381 - DNA, 54 bp, Artificial; identical to SEQ ID NO: 240630
  Synthetic oligonucleotide

SEQ ID NO: 636382 - DNA, 55 bp, Artificial; identical to SEQ ID NO: 168649
  Synthetic oligonucleotide

SEQ ID NO: 636383 - DNA, 52 bp, Artificial; identical to SEQ ID NO: 219481
  Synthetic oligonucleotide

SEQ ID NO: 636384 - DNA, 55 bp, Artificial; identical to SEQ ID NO: 242946
  Synthetic oligonucleotide

SEQ ID NO: 636385 - DNA, 58 bp, Artificial; identical to SEQ ID NO: 167269
  Synthetic oligonucleotide

SEQ ID NO: 636386 - DNA, 55 bp, Artificial; identical to SEQ ID NO: 224537
  Synthetic oligonucleotide

SEQ ID NO: 636387 - DNA, 60 bp, Artificial; identical to SEQ ID NO: 237791
  Synthetic oligonucleotide

SEQ ID NO: 636388 - DNA, 54 bp, Artificial; identical to SEQ ID NO: 240629
  Synthetic oligonucleotide

SEQ ID NO: 636389 - DNA, 55 bp, Artificial; identical to SEQ ID NO: 252797
  Synthetic oligonucleotide

SEQ ID NO: 636390 - DNA, 55 bp, Artificial; identical to SEQ ID NO: 144804
  Synthetic oligonucleotide

SEQ ID NO: 636391 - DNA, 58 bp, Artificial; identical to SEQ ID NO: 233953
  Synthetic oligonucleotide

SEQ ID NO: 636392 - DNA, 55 bp, Artificial; identical to SEQ ID NO: 252796
  Synthetic oligonucleotide

SEQ ID NO: 636393 - DNA, 56 bp, Artificial; identical to SEQ ID NO: 179382
  Synthetic oligonucleotide

SEQ ID NO: 636394 - DNA, 55 bp, Artificial; identical to SEQ ID NO: 159246
  Synthetic oligonucleotide

SEQ ID NO: 636395 - DNA, 55 bp, Artificial; identical to SEQ ID NO: 194360
  Synthetic oligonucleotide

SEQ ID NO: 636396 - DNA, 53 bp, Artificial; identical to SEQ ID NO: 164966
  Synthetic oligonucleotide

SEQ ID NO: 636397 - DNA, 55 bp, Artificial; identical to SEQ ID NO: 194358
  Synthetic oligonucleotide

SEQ ID NO: 636398 - DNA, 55 bp, Artificial; identical to SEQ ID NO: 190270
  Synthetic oligonucleotide

SEQ ID NO: 636399 - DNA, 50 bp, Artificial; identical to SEQ ID NO: 243410
  Synthetic oligonucleotide

SEQ ID NO: 636400 - DNA, 55 bp, Artificial; identical to SEQ ID NO: 166286
  Synthetic oligonucleotide

SEQ ID NO: 636401 - DNA, 55 bp, Artificial; identical to SEQ ID NO: 151607
  Synthetic oligonucleotide

SEQ ID NO: 636402 - DNA, 60 bp, Artificial; identical to SEQ ID NO: 176104
  Synthetic oligonucleotide

SEQ ID NO: 636403 - DNA, 55 bp, Artificial; identical to SEQ ID NO: 247635
  Synthetic oligonucleotide

SEQ ID NO: 636404 - DNA, 55 bp, Artificial; identical to SEQ ID NO: 242947
  Synthetic oligonucleotide

SEQ ID NO: 636405 - DNA, 58 bp, Artificial; identical to SEQ ID NO: 166082
  Synthetic oligonucleotide

SEQ ID NO: 636406 - DNA, 55 bp, Artificial; identical to SEQ ID NO: 187620
  Synthetic oligonucleotide

SEQ ID NO: 636407 - DNA, 55 bp, Artificial; identical to SEQ ID NO: 174351
  Synthetic oligonucleotide

SEQ ID NO: 636408 - DNA, 55 bp, Artificial; identical to SEQ ID NO: 205604
  Synthetic oligonucleotide

SEQ ID NO: 636409 - DNA, 55 bp, Artificial; identical to SEQ ID NO: 256704
  Synthetic oligonucleotide

SEQ ID NO: 636410 - DNA, 55 bp, Artificial; identical to SEQ ID NO: 147408
  Synthetic oligonucleotide

SEQ ID NO: 636411 - DNA, 55 bp, Artificial; identical to SEQ ID NO: 168652
  Synthetic oligonucleotide

SEQ ID NO: 636412 - DNA, 57 bp, Artificial; identical to SEQ ID NO: 182548
  Synthetic oligonucleotide

SEQ ID NO: 636413 - DNA, 55 bp, Artificial; identical to SEQ ID NO: 265688
  Synthetic oligonucleotide

SEQ ID NO: 636414 - DNA, 56 bp, Artificial; identical to SEQ ID NO: 224836
  Synthetic oligonucleotide

SEQ ID NO: 636415 - DNA, 55 bp, Artificial; identical to SEQ ID NO: 142688
  Synthetic oligonucleotide

SEQ ID NO: 636416 - DNA, 55 bp, Artificial; identical to SEQ ID NO: 142531
  Synthetic oligonucleotide

SEQ ID NO: 636417 - DNA, 55 bp, Artificial; identical to SEQ ID NO: 147407
  Synthetic oligonucleotide

SEQ ID NO: 636418 - DNA, 55 bp, Artificial; identical to SEQ ID NO: 248960
  Synthetic oligonucleotide

SEQ ID NO: 636419 - DNA, 57 bp, Artificial; identical to SEQ ID NO: 150789
  Synthetic oligonucleotide

SEQ ID NO: 636420 - DNA, 60 bp, Artificial; identical to SEQ ID NO: 241911
  Synthetic oligonucleotide

SEQ ID NO: 636421 - DNA, 52 bp, Artificial; identical to SEQ ID NO: 190878
  Synthetic oligonucleotide

SEQ ID NO: 636422 - DNA, 53 bp, Artificial; identical to SEQ ID NO: 162301
  Synthetic oligonucleotide

SEQ ID NO: 636423 - DNA, 57 bp, Artificial; identical to SEQ ID NO: 150791
  Synthetic oligonucleotide

SEQ ID NO: 636424 - DNA, 55 bp, Artificial; identical to SEQ ID NO: 198222
  Synthetic oligonucleotide

SEQ ID NO: 636425 - DNA, 55 bp, Artificial; identical to SEQ ID NO: 209145
  Synthetic oligonucleotide

SEQ ID NO: 636426 - DNA, 58 bp, Artificial; identical to SEQ ID NO: 241912
  Synthetic oligonucleotide

SEQ ID NO: 636427 - DNA, 60 bp, Artificial; identical to SEQ ID NO: 241913
  Synthetic oligonucleotide

SEQ ID NO: 636428 - DNA, 60 bp, Artificial; identical to SEQ ID NO: 210743
  Synthetic oligonucleotide

SEQ ID NO: 636429 - DNA, 55 bp, Artificial; identical to SEQ ID NO: 239930
  Synthetic oligonucleotide

SEQ ID NO: 636430 - DNA, 55 bp, Artificial; identical to SEQ ID NO: 256705
  Synthetic oligonucleotide

SEQ ID NO: 636431 - DNA, 53 bp, Artificial; identical to SEQ ID NO: 160829
  Synthetic oligonucleotide

SEQ ID NO: 636432 - DNA, 55 bp, Artificial; identical to SEQ ID NO: 248961
  Synthetic oligonucleotide

SEQ ID NO: 636433 - DNA, 55 bp, Artificial; identical to SEQ ID NO: 168653
  Synthetic oligonucleotide

SEQ ID NO: 636434 - DNA, 52 bp, Artificial; identical to SEQ ID NO: 201373
  Synthetic oligonucleotide

SEQ ID NO: 636435 - DNA, 55 bp, Artificial; identical to SEQ ID NO: 174459
  Synthetic oligonucleotide

SEQ ID NO: 636436 - DNA, 55 bp, Artificial; identical to SEQ ID NO: 168654
  Synthetic oligonucleotide

SEQ ID NO: 636437 - DNA, 55 bp, Artificial; identical to SEQ ID NO: 180669
  Synthetic oligonucleotide

SEQ ID NO: 636438 - DNA, 52 bp, Artificial; identical to SEQ ID NO: 153626
  Synthetic oligonucleotide

SEQ ID NO: 636439 - DNA, 55 bp, Artificial; identical to SEQ ID NO: 198221
  Synthetic oligonucleotide

SEQ ID NO: 636440 - DNA, 54 bp, Artificial; identical to SEQ ID NO: 199553
  Synthetic oligonucleotide

SEQ ID NO: 636441 - DNA, 53 bp, Artificial; identical to SEQ ID NO: 185886
  Synthetic oligonucleotide

SEQ ID NO: 636442 - DNA, 60 bp, Artificial; identical to SEQ ID NO: 241917
  Synthetic oligonucleotide

SEQ ID NO: 636443 - DNA, 53 bp, Artificial; identical to SEQ ID NO: 189125
  Synthetic oligonucleotide

SEQ ID NO: 636444 - DNA, 55 bp, Artificial; identical to SEQ ID NO: 224869
  Synthetic oligonucleotide

SEQ ID NO: 636445 - DNA, 60 bp, Artificial; identical to SEQ ID NO: 241918
  Synthetic oligonucleotide

SEQ ID NO: 636446 - DNA, 55 bp, Artificial; identical to SEQ ID NO: 160165
  Synthetic oligonucleotide

SEQ ID NO: 636447 - DNA, 55 bp, Artificial; identical to SEQ ID NO: 166290
  Synthetic oligonucleotide

SEQ ID NO: 636448 - DNA, 50 bp, Artificial; identical to SEQ ID NO: 165358
  Synthetic oligonucleotide

SEQ ID NO: 636449 - DNA, 55 bp, Artificial; identical to SEQ ID NO: 171160
  Synthetic oligonucleotide

SEQ ID NO: 636450 - DNA, 55 bp, Artificial; identical to SEQ ID NO: 243499
  Synthetic oligonucleotide

SEQ ID NO: 636451 - DNA, 55 bp, Artificial; identical to SEQ ID NO: 153219
  Synthetic oligonucleotide

SEQ ID NO: 636452 - DNA, 52 bp, Artificial; identical to SEQ ID NO: 243282
  Synthetic oligonucleotide

SEQ ID NO: 636453 - DNA, 55 bp, Artificial; identical to SEQ ID NO: 242949
  Synthetic oligonucleotide

SEQ ID NO: 636454 - DNA, 55 bp, Artificial; identical to SEQ ID NO: 180665
  Synthetic oligonucleotide

SEQ ID NO: 636455 - DNA, 50 bp, Artificial; identical to SEQ ID NO: 200509
  Synthetic oligonucleotide

SEQ ID NO: 636456 - DNA, 50 bp, Artificial; identical to SEQ ID NO: 162382
  Synthetic oligonucleotide

SEQ ID NO: 636457 - DNA, 55 bp, Artificial; identical to SEQ ID NO: 207103
  Synthetic oligonucleotide

SEQ ID NO: 636458 - DNA, 55 bp, Artificial; identical to SEQ ID NO: 148072
  Synthetic oligonucleotide

SEQ ID NO: 636459 - DNA, 54 bp, Artificial; identical to SEQ ID NO: 180797
  Synthetic oligonucleotide

SEQ ID NO: 636460 - DNA, 55 bp, Artificial; identical to SEQ ID NO: 247661
  Synthetic oligonucleotide

SEQ ID NO: 636461 - DNA, 50 bp, Artificial; identical to SEQ ID NO: 169435
  Synthetic oligonucleotide

SEQ ID NO: 636462 - DNA, 55 bp, Artificial; identical to SEQ ID NO: 194352
  Synthetic oligonucleotide

SEQ ID NO: 636463 - DNA, 55 bp, Artificial; identical to SEQ ID NO: 154057
  Synthetic oligonucleotide

SEQ ID NO: 636464 - DNA, 55 bp, Artificial; identical to SEQ ID NO: 198220
  Synthetic oligonucleotide

SEQ ID NO: 636465 - DNA, 55 bp, Artificial; identical to SEQ ID NO: 247660
  Synthetic oligonucleotide

SEQ ID NO: 636466 - DNA, 55 bp, Artificial; identical to SEQ ID NO: 203080
  Synthetic oligonucleotide

SEQ ID NO: 636467 - DNA, 51 bp, Artificial; identical to SEQ ID NO: 240763
  Synthetic oligonucleotide

SEQ ID NO: 636468 - DNA, 54 bp, Artificial; identical to SEQ ID NO: 255302
  Synthetic oligonucleotide

SEQ ID NO: 636469 - DNA, 55 bp, Artificial; identical to SEQ ID NO: 222621
  Synthetic oligonucleotide

SEQ ID NO: 636470 - DNA, 55 bp, Artificial; identical to SEQ ID NO: 148073
  Synthetic oligonucleotide

SEQ ID NO: 636471 - DNA, 55 bp, Artificial; identical to SEQ ID NO: 168655
  Synthetic oligonucleotide

SEQ ID NO: 636472 - DNA, 59 bp, Artificial; identical to SEQ ID NO: 194266
  Synthetic oligonucleotide

SEQ ID NO: 636473 - DNA, 55 bp, Artificial; identical to SEQ ID NO: 180796
  Synthetic oligonucleotide

SEQ ID NO: 636474 - DNA, 56 bp, Artificial; identical to SEQ ID NO: 194171
  Synthetic oligonucleotide

SEQ ID NO: 636475 - DNA, 60 bp, Artificial; identical to SEQ ID NO: 255156
  Synthetic oligonucleotide

SEQ ID NO: 636476 - DNA, 53 bp, Artificial; identical to SEQ ID NO: 185901
  Synthetic oligonucleotide

SEQ ID NO: 636477 - DNA, 58 bp, Artificial; identical to SEQ ID NO: 224913
  Synthetic oligonucleotide

SEQ ID NO: 636478 - DNA, 55 bp, Artificial; identical to SEQ ID NO: 212436
  Synthetic oligonucleotide

SEQ ID NO: 636479 - DNA, 55 bp, Artificial; identical to SEQ ID NO: 252794
  Synthetic oligonucleotide

SEQ ID NO: 636480 - DNA, 60 bp, Artificial; identical to SEQ ID NO: 150750
  Synthetic oligonucleotide

SEQ ID NO: 636481 - DNA, 55 bp, Artificial; identical to SEQ ID NO: 166824
  Synthetic oligonucleotide

SEQ ID NO: 636482 - DNA, 60 bp, Artificial; identical to SEQ ID NO: 180993
  Synthetic oligonucleotide

SEQ ID NO: 636483 - DNA, 55 bp, Artificial; identical to SEQ ID NO: 180795
  Synthetic oligonucleotide

SEQ ID NO: 636484 - DNA, 60 bp, Artificial; identical to SEQ ID NO: 141952
  Synthetic oligonucleotide

SEQ ID NO: 636485 - DNA, 58 bp, Artificial; identical to SEQ ID NO: 201204
  Synthetic oligonucleotide

SEQ ID NO: 636486 - DNA, 52 bp, Artificial; identical to SEQ ID NO: 255583
  Synthetic oligonucleotide

SEQ ID NO: 636487 - DNA, 53 bp, Artificial; identical to SEQ ID NO: 248962
  Synthetic oligonucleotide

SEQ ID NO: 636488 - DNA, 55 bp, Artificial; identical to SEQ ID NO: 198217
  Synthetic oligonucleotide

SEQ ID NO: 636489 - DNA, 50 bp, Artificial; identical to SEQ ID NO: 187147
  Synthetic oligonucleotide

SEQ ID NO: 636490 - DNA, 55 bp, Artificial; identical to SEQ ID NO: 207107
  Synthetic oligonucleotide

SEQ ID NO: 636491 - DNA, 55 bp, Artificial; identical to SEQ ID NO: 256694
  Synthetic oligonucleotide

SEQ ID NO: 636492 - DNA, 53 bp, Artificial; identical to SEQ ID NO: 185844
  Synthetic oligonucleotide

SEQ ID NO: 636493 - DNA, 54 bp, Artificial; identical to SEQ ID NO: 266268
  Synthetic oligonucleotide

SEQ ID NO: 636494 - DNA, 51 bp, Artificial; identical to SEQ ID NO: 192131
  Synthetic oligonucleotide

SEQ ID NO: 636495 - DNA, 53 bp, Artificial; identical to SEQ ID NO: 241919
  Synthetic oligonucleotide

SEQ ID NO: 636496 - DNA, 55 bp, Artificial; identical to SEQ ID NO: 220680
  Synthetic oligonucleotide

SEQ ID NO: 636497 - DNA, 56 bp, Artificial; identical to SEQ ID NO: 150751
  Synthetic oligonucleotide

SEQ ID NO: 636498 - DNA, 50 bp, Artificial; identical to SEQ ID NO: 255857
  Synthetic oligonucleotide

SEQ ID NO: 636499 - DNA, 55 bp, Artificial; identical to SEQ ID NO: 159257
  Synthetic oligonucleotide

SEQ ID NO: 636500 - DNA, 55 bp, Artificial; identical to SEQ ID NO: 221205
  Synthetic oligonucleotide

SEQ ID NO: 636501 - DNA, 55 bp, Artificial; identical to SEQ ID NO: 148074
  Synthetic oligonucleotide

SEQ ID NO: 636502 - DNA, 54 bp, Artificial; identical to SEQ ID NO: 144977
  Synthetic oligonucleotide

SEQ ID NO: 636503 - DNA, 52 bp, Artificial; identical to SEQ ID NO: 180660
  Synthetic oligonucleotide

SEQ ID NO: 636504 - DNA, 57 bp, Artificial; identical to SEQ ID NO: 243510
  Synthetic oligonucleotide

SEQ ID NO: 636505 - DNA, 51 bp, Artificial; identical to SEQ ID NO: 149821
  Synthetic oligonucleotide

SEQ ID NO: 636506 - DNA, 55 bp, Artificial; identical to SEQ ID NO: 207109
  Synthetic oligonucleotide

SEQ ID NO: 636507 - DNA, 52 bp, Artificial; identical to SEQ ID NO: 256693
  Synthetic oligonucleotide

SEQ ID NO: 636508 - DNA, 55 bp, Artificial; identical to SEQ ID NO: 256769
  Synthetic oligonucleotide

SEQ ID NO: 636509 - DNA, 55 bp, Artificial; identical to SEQ ID NO: 239923
  Synthetic oligonucleotide

SEQ ID NO: 636510 - DNA, 55 bp, Artificial; identical to SEQ ID NO: 233421
  Synthetic oligonucleotide

SEQ ID NO: 636511 - DNA, 52 bp, Artificial; identical to SEQ ID NO: 246413
  Synthetic oligonucleotide

SEQ ID NO: 636512 - DNA, 55 bp, Artificial; identical to SEQ ID NO: 208114
  Synthetic oligonucleotide

SEQ ID NO: 636513 - DNA, 52 bp, Artificial; identical to SEQ ID NO: 157559
  Synthetic oligonucleotide

SEQ ID NO: 636514 - DNA, 55 bp, Artificial; identical to SEQ ID NO: 148075
  Synthetic oligonucleotide

SEQ ID NO: 636515 - DNA, 55 bp, Artificial; identical to SEQ ID NO: 190263
  Synthetic oligonucleotide

SEQ ID NO: 636516 - DNA, 55 bp, Artificial; identical to SEQ ID NO: 159258
  Synthetic oligonucleotide

SEQ ID NO: 636517 - DNA, 55 bp, Artificial; identical to SEQ ID NO: 154055
  Synthetic oligonucleotide

SEQ ID NO: 636518 - DNA, 55 bp, Artificial; identical to SEQ ID NO: 256768
  Synthetic oligonucleotide

SEQ ID NO: 636519 - DNA, 55 bp, Artificial; identical to SEQ ID NO: 174727
  Synthetic oligonucleotide

SEQ ID NO: 636520 - DNA, 55 bp, Artificial; identical to SEQ ID NO: 190262
  Synthetic oligonucleotide

SEQ ID NO: 636521 - DNA, 55 bp, Artificial; identical to SEQ ID NO: 238203
  Synthetic oligonucleotide

SEQ ID NO: 636522 - DNA, 60 bp, Artificial; identical to SEQ ID NO: 237794
  Synthetic oligonucleotide

SEQ ID NO: 636523 - DNA, 55 bp, Artificial; identical to SEQ ID NO: 171737
  Synthetic oligonucleotide

SEQ ID NO: 636524 - DNA, 55 bp, Artificial; identical to SEQ ID NO: 203528
  Synthetic oligonucleotide

SEQ ID NO: 636525 - DNA, 55 bp, Artificial; identical to SEQ ID NO: 209300
  Synthetic oligonucleotide

SEQ ID NO: 636526 - DNA, 52 bp, Artificial; identical to SEQ ID NO: 257776
  Synthetic oligonucleotide

SEQ ID NO: 636527 - DNA, 55 bp, Artificial; identical to SEQ ID NO: 159260
  Synthetic oligonucleotide

SEQ ID NO: 636528 - DNA, 55 bp, Artificial; identical to SEQ ID NO: 224541
  Synthetic oligonucleotide

SEQ ID NO: 636529 - DNA, 55 bp, Artificial; identical to SEQ ID NO: 253497
  Synthetic oligonucleotide

SEQ ID NO: 636530 - DNA, 55 bp, Artificial; identical to SEQ ID NO: 180787
  Synthetic oligonucleotide

SEQ ID NO: 636531 - DNA, 55 bp, Artificial; identical to SEQ ID NO: 159262
  Synthetic oligonucleotide

SEQ ID NO: 636532 - DNA, 50 bp, Artificial; identical to SEQ ID NO: 193951
  Synthetic oligonucleotide

SEQ ID NO: 636533 - DNA, 55 bp, Artificial; identical to SEQ ID NO: 152645
  Synthetic oligonucleotide

SEQ ID NO: 636534 - DNA, 55 bp, Artificial; identical to SEQ ID NO: 180786
  Synthetic oligonucleotide

SEQ ID NO: 636535 - DNA, 55 bp, Artificial; identical to SEQ ID NO: 180785
  Synthetic oligonucleotide

SEQ ID NO: 636536 - DNA, 52 bp, Artificial; identical to SEQ ID NO: 157563
  Synthetic oligonucleotide

SEQ ID NO: 636537 - DNA, 58 bp, Artificial; identical to SEQ ID NO: 179568
  Synthetic oligonucleotide

SEQ ID NO: 636538 - DNA, 55 bp, Artificial; identical to SEQ ID NO: 252792
  Synthetic oligonucleotide

SEQ ID NO: 636539 - DNA, 51 bp, Artificial; identical to SEQ ID NO: 186652
  Synthetic oligonucleotide

SEQ ID NO: 636540 - DNA, 55 bp, Artificial; identical to SEQ ID NO: 160162
  Synthetic oligonucleotide

SEQ ID NO: 636541 - DNA, 55 bp, Artificial; identical to SEQ ID NO: 233420
  Synthetic oligonucleotide

SEQ ID NO: 636542 - DNA, 60 bp, Artificial; identical to SEQ ID NO: 180215
  Synthetic oligonucleotide

SEQ ID NO: 636543 - DNA, 55 bp, Artificial; identical to SEQ ID NO: 202150
  Synthetic oligonucleotide

SEQ ID NO: 636544 - DNA, 60 bp, Artificial; identical to SEQ ID NO: 202029
  Synthetic oligonucleotide

SEQ ID NO: 636545 - DNA, 53 bp, Artificial; identical to SEQ ID NO: 152053
  Synthetic oligonucleotide

SEQ ID NO: 636546 - DNA, 55 bp, Artificial; identical to SEQ ID NO: 180782
  Synthetic oligonucleotide

SEQ ID NO: 636547 - DNA, 54 bp, Artificial; identical to SEQ ID NO: 202149
  Synthetic oligonucleotide

SEQ ID NO: 636548 - DNA, 55 bp, Artificial; identical to SEQ ID NO: 188680
  Synthetic oligonucleotide

SEQ ID NO: 636549 - DNA, 51 bp, Artificial; identical to SEQ ID NO: 243291
  Synthetic oligonucleotide

SEQ ID NO: 636550 - DNA, 51 bp, Artificial; identical to SEQ ID NO: 160600
  Synthetic oligonucleotide

SEQ ID NO: 636551 - DNA, 55 bp, Artificial; identical to SEQ ID NO: 194340
  Synthetic oligonucleotide

SEQ ID NO: 636552 - DNA, 55 bp, Artificial; identical to SEQ ID NO: 166212
  Synthetic oligonucleotide

SEQ ID NO: 636553 - DNA, 55 bp, Artificial; identical to SEQ ID NO: 256760
  Synthetic oligonucleotide

SEQ ID NO: 636554 - DNA, 55 bp, Artificial; identical to SEQ ID NO: 256759
  Synthetic oligonucleotide

SEQ ID NO: 636555 - DNA, 55 bp, Artificial; identical to SEQ ID NO: 208116
  Synthetic oligonucleotide

SEQ ID NO: 636556 - DNA, 54 bp, Artificial; identical to SEQ ID NO: 157203
  Synthetic oligonucleotide

SEQ ID NO: 636557 - DNA, 52 bp, Artificial; identical to SEQ ID NO: 186041
  Synthetic oligonucleotide

SEQ ID NO: 636558 - DNA, 55 bp, Artificial; identical to SEQ ID NO: 151613
  Synthetic oligonucleotide

SEQ ID NO: 636559 - DNA, 54 bp, Artificial; identical to SEQ ID NO: 166320
  Synthetic oligonucleotide

SEQ ID NO: 636560 - DNA, 52 bp, Artificial; identical to SEQ ID NO: 161338
  Synthetic oligonucleotide

SEQ ID NO: 636561 - DNA, 55 bp, Artificial; identical to SEQ ID NO: 202148
  Synthetic oligonucleotide

SEQ ID NO: 636562 - DNA, 55 bp, Artificial; identical to SEQ ID NO: 234291
  Synthetic oligonucleotide

SEQ ID NO: 636563 - DNA, 55 bp, Artificial; identical to SEQ ID NO: 150752
  Synthetic oligonucleotide

SEQ ID NO: 636564 - DNA, 55 bp, Artificial; identical to SEQ ID NO: 203527
  Synthetic oligonucleotide

SEQ ID NO: 636565 - DNA, 55 bp, Artificial; identical to SEQ ID NO: 208217
  Synthetic oligonucleotide

SEQ ID NO: 636566 - DNA, 51 bp, Artificial; identical to SEQ ID NO: 154666
  Synthetic oligonucleotide

SEQ ID NO: 636567 - DNA, 54 bp, Artificial; identical to SEQ ID NO: 157202
  Synthetic oligonucleotide

SEQ ID NO: 636568 - DNA, 55 bp, Artificial; identical to SEQ ID NO: 161222
  Synthetic oligonucleotide

SEQ ID NO: 636569 - DNA, 60 bp, Artificial; identical to SEQ ID NO: 212547
  Synthetic oligonucleotide

SEQ ID NO: 636570 - DNA, 54 bp, Artificial; identical to SEQ ID NO: 157200
  Synthetic oligonucleotide

SEQ ID NO: 636571 - DNA, 55 bp, Artificial; identical to SEQ ID NO: 142006
  Synthetic oligonucleotide

SEQ ID NO: 636572 - DNA, 55 bp, Artificial; identical to SEQ ID NO: 180778
  Synthetic oligonucleotide

SEQ ID NO: 636573 - DNA, 52 bp, Artificial; identical to SEQ ID NO: 199976
  Synthetic oligonucleotide

SEQ ID NO: 636574 - DNA, 55 bp, Artificial; identical to SEQ ID NO: 168658
  Synthetic oligonucleotide

SEQ ID NO: 636575 - DNA, 55 bp, Artificial; identical to SEQ ID NO: 180777
  Synthetic oligonucleotide

SEQ ID NO: 636576 - DNA, 55 bp, Artificial; identical to SEQ ID NO: 180776
  Synthetic oligonucleotide

SEQ ID NO: 636577 - DNA, 55 bp, Artificial; identical to SEQ ID NO: 247651
  Synthetic oligonucleotide

SEQ ID NO: 636578 - DNA, 55 bp, Artificial; identical to SEQ ID NO: 167472
  Synthetic oligonucleotide

SEQ ID NO: 636579 - DNA, 55 bp, Artificial; identical to SEQ ID NO: 180820
  Synthetic oligonucleotide

SEQ ID NO: 636580 - DNA, 55 bp, Artificial; identical to SEQ ID NO: 188679
  Synthetic oligonucleotide

SEQ ID NO: 636581 - DNA, 60 bp, Artificial; identical to SEQ ID NO: 234408
  Synthetic oligonucleotide

SEQ ID NO: 636582 - DNA, 55 bp, Artificial; identical to SEQ ID NO: 247649
  Synthetic oligonucleotide

SEQ ID NO: 636583 - DNA, 55 bp, Artificial; identical to SEQ ID NO: 180819
  Synthetic oligonucleotide

SEQ ID NO: 636584 - DNA, 53 bp, Artificial; identical to SEQ ID NO: 185828
  Synthetic oligonucleotide

SEQ ID NO: 636585 - DNA, 55 bp, Artificial; identical to SEQ ID NO: 190260
  Synthetic oligonucleotide

SEQ ID NO: 636586 - DNA, 60 bp, Artificial; identical to SEQ ID NO: 192111
  Synthetic oligonucleotide

SEQ ID NO: 636587 - DNA, 56 bp, Artificial; identical to SEQ ID NO: 157742
  Synthetic oligonucleotide

SEQ ID NO: 636588 - DNA, 55 bp, Artificial; identical to SEQ ID NO: 208216
  Synthetic oligonucleotide

SEQ ID NO: 636589 - DNA, 54 bp, Artificial; identical to SEQ ID NO: 185307
  Synthetic oligonucleotide

SEQ ID NO: 636590 - DNA, 60 bp, Artificial; identical to SEQ ID NO: 179993
  Synthetic oligonucleotide

SEQ ID NO: 636591 - DNA, 58 bp, Artificial; identical to SEQ ID NO: 241923
  Synthetic oligonucleotide

SEQ ID NO: 636592 - DNA, 60 bp, Artificial; identical to SEQ ID NO: 205764
  Synthetic oligonucleotide

SEQ ID NO: 636593 - DNA, 55 bp, Artificial; identical to SEQ ID NO: 201502
  Synthetic oligonucleotide

SEQ ID NO: 636594 - DNA, 55 bp, Artificial; identical to SEQ ID NO: 256755
  Synthetic oligonucleotide

SEQ ID NO: 636595 - DNA, 55 bp, Artificial; identical to SEQ ID NO: 143779
  Synthetic oligonucleotide

SEQ ID NO: 636596 - DNA, 54 bp, Artificial; identical to SEQ ID NO: 179564
  Synthetic oligonucleotide

SEQ ID NO: 636597 - DNA, 55 bp, Artificial; identical to SEQ ID NO: 148078
  Synthetic oligonucleotide

SEQ ID NO: 636598 - DNA, 55 bp, Artificial; identical to SEQ ID NO: 190259
  Synthetic oligonucleotide

SEQ ID NO: 636599 - DNA, 55 bp, Artificial; identical to SEQ ID NO: 168659
  Synthetic oligonucleotide

SEQ ID NO: 636600 - DNA, 55 bp, Artificial; identical to SEQ ID NO: 212760
  Synthetic oligonucleotide

SEQ ID NO: 636601 - DNA, 55 bp, Artificial; identical to SEQ ID NO: 224544
  Synthetic oligonucleotide

SEQ ID NO: 636602 - DNA, 55 bp, Artificial; identical to SEQ ID NO: 148079
  Synthetic oligonucleotide

SEQ ID NO: 636603 - DNA, 55 bp, Artificial; identical to SEQ ID NO: 256754
  Synthetic oligonucleotide

SEQ ID NO: 636604 - DNA, 54 bp, Artificial; identical to SEQ ID NO: 157195
  Synthetic oligonucleotide

SEQ ID NO: 636605 - DNA, 59 bp, Artificial; identical to SEQ ID NO: 156032
  Synthetic oligonucleotide

SEQ ID NO: 636606 - DNA, 55 bp, Artificial; identical to SEQ ID NO: 211176
  Synthetic oligonucleotide

SEQ ID NO: 636607 - DNA, 54 bp, Artificial; identical to SEQ ID NO: 185303
  Synthetic oligonucleotide

SEQ ID NO: 636608 - DNA, 54 bp, Artificial; identical to SEQ ID NO: 166826
  Synthetic oligonucleotide

SEQ ID NO: 636609 - DNA, 55 bp, Artificial; identical to SEQ ID NO: 256752
  Synthetic oligonucleotide

SEQ ID NO: 636610 - DNA, 55 bp, Artificial; identical to SEQ ID NO: 239918
  Synthetic oligonucleotide

SEQ ID NO: 636611 - DNA, 60 bp, Artificial; identical to SEQ ID NO: 192000
  Synthetic oligonucleotide

SEQ ID NO: 636612 - DNA, 55 bp, Artificial; identical to SEQ ID NO: 168661
  Synthetic oligonucleotide

SEQ ID NO: 636613 - DNA, 55 bp, Artificial; identical to SEQ ID NO: 198213
  Synthetic oligonucleotide

SEQ ID NO: 636614 - DNA, 55 bp, Artificial; identical to SEQ ID NO: 180809
  Synthetic oligonucleotide

SEQ ID NO: 636615 - DNA, 55 bp, Artificial; identical to SEQ ID NO: 198212
  Synthetic oligonucleotide

SEQ ID NO: 636616 - DNA, 55 bp, Artificial; identical to SEQ ID NO: 207114
  Synthetic oligonucleotide

SEQ ID NO: 636617 - DNA, 57 bp, Artificial; identical to SEQ ID NO: 179850
  Synthetic oligonucleotide

SEQ ID NO: 636618 - DNA, 55 bp, Artificial; identical to SEQ ID NO: 198211
  Synthetic oligonucleotide

SEQ ID NO: 636619 - DNA, 50 bp, Artificial; identical to SEQ ID NO: 142648
  Synthetic oligonucleotide

SEQ ID NO: 636620 - DNA, 55 bp, Artificial; identical to SEQ ID NO: 198268
  Synthetic oligonucleotide

SEQ ID NO: 636621 - DNA, 52 bp, Artificial; identical to SEQ ID NO: 165048
  Synthetic oligonucleotide

SEQ ID NO: 636622 - DNA, 57 bp, Artificial; identical to SEQ ID NO: 153488
  Synthetic oligonucleotide

SEQ ID NO: 636623 - DNA, 55 bp, Artificial; identical to SEQ ID NO: 156279
  Synthetic oligonucleotide

SEQ ID NO: 636624 - DNA, 54 bp, Artificial; identical to SEQ ID NO: 153227
  Synthetic oligonucleotide

SEQ ID NO: 636625 - DNA, 55 bp, Artificial; identical to SEQ ID NO: 162015
  Synthetic oligonucleotide

SEQ ID NO: 636626 - DNA, 54 bp, Artificial; identical to SEQ ID NO: 185301
  Synthetic oligonucleotide

SEQ ID NO: 636627 - DNA, 55 bp, Artificial; identical to SEQ ID NO: 180807
  Synthetic oligonucleotide

SEQ ID NO: 636628 - DNA, 55 bp, Artificial; identical to SEQ ID NO: 148084
  Synthetic oligonucleotide

SEQ ID NO: 636629 - DNA, 60 bp, Artificial; identical to SEQ ID NO: 141974
  Synthetic oligonucleotide

SEQ ID NO: 636630 - DNA, 51 bp, Artificial; identical to SEQ ID NO: 197638
  Synthetic oligonucleotide

SEQ ID NO: 636631 - DNA, 55 bp, Artificial; identical to SEQ ID NO: 252791
  Synthetic oligonucleotide

SEQ ID NO: 636632 - DNA, 55 bp, Artificial; identical to SEQ ID NO: 180806
  Synthetic oligonucleotide

SEQ ID NO: 636633 - DNA, 55 bp, Artificial; identical to SEQ ID NO: 194341
  Synthetic oligonucleotide

SEQ ID NO: 636634 - DNA, 52 bp, Artificial; identical to SEQ ID NO: 266685
  Synthetic oligonucleotide

SEQ ID NO: 636635 - DNA, 56 bp, Artificial; identical to SEQ ID NO: 247584
  Synthetic oligonucleotide

SEQ ID NO: 636636 - DNA, 55 bp, Artificial; identical to SEQ ID NO: 162016
  Synthetic oligonucleotide

SEQ ID NO: 636637 - DNA, 54 bp, Artificial; identical to SEQ ID NO: 185299
  Synthetic oligonucleotide

SEQ ID NO: 636638 - DNA, 55 bp, Artificial; identical to SEQ ID NO: 166827
  Synthetic oligonucleotide

SEQ ID NO: 636639 - DNA, 55 bp, Artificial; identical to SEQ ID NO: 154836
  Synthetic oligonucleotide

SEQ ID NO: 636640 - DNA, 52 bp, Artificial; identical to SEQ ID NO: 167129
  Synthetic oligonucleotide

SEQ ID NO: 636641 - DNA, 55 bp, Artificial; identical to SEQ ID NO: 161221
  Synthetic oligonucleotide

SEQ ID NO: 636642 - DNA, 59 bp, Artificial; identical to SEQ ID NO: 170998
  Synthetic oligonucleotide

SEQ ID NO: 636643 - DNA, 54 bp, Artificial; identical to SEQ ID NO: 166329
  Synthetic oligonucleotide

SEQ ID NO: 636644 - DNA, 51 bp, Artificial; identical to SEQ ID NO: 145066
  Synthetic oligonucleotide

SEQ ID NO: 636645 - DNA, 60 bp, Artificial; identical to SEQ ID NO: 201182
  Synthetic oligonucleotide

SEQ ID NO: 636646 - DNA, 55 bp, Artificial; identical to SEQ ID NO: 180803
  Synthetic oligonucleotide

SEQ ID NO: 636647 - DNA, 55 bp, Artificial; identical to SEQ ID NO: 191792
  Synthetic oligonucleotide

SEQ ID NO: 636648 - DNA, 55 bp, Artificial; identical to SEQ ID NO: 153228
  Synthetic oligonucleotide

SEQ ID NO: 636649 - DNA, 55 bp, Artificial; identical to SEQ ID NO: 153229
  Synthetic oligonucleotide

SEQ ID NO: 636650 - DNA, 54 bp, Artificial; identical to SEQ ID NO: 240639
  Synthetic oligonucleotide

SEQ ID NO: 636651 - DNA, 55 bp, Artificial; identical to SEQ ID NO: 256774
  Synthetic oligonucleotide

SEQ ID NO: 636652 - DNA, 55 bp, Artificial; identical to SEQ ID NO: 148086
  Synthetic oligonucleotide

SEQ ID NO: 636653 - DNA, 55 bp, Artificial; identical to SEQ ID NO: 256771
  Synthetic oligonucleotide

SEQ ID NO: 636654 - DNA, 60 bp, Artificial; identical to SEQ ID NO: 241927
  Synthetic oligonucleotide

SEQ ID NO: 636655 - DNA, 60 bp, Artificial; identical to SEQ ID NO: 241932
  Synthetic oligonucleotide

SEQ ID NO: 636656 - DNA, 55 bp, Artificial; identical to SEQ ID NO: 202145
  Synthetic oligonucleotide

SEQ ID NO: 636657 - DNA, 50 bp, Artificial; identical to SEQ ID NO: 176864
  Synthetic oligonucleotide

SEQ ID NO: 636658 - DNA, 55 bp, Artificial; identical to SEQ ID NO: 252790
  Synthetic oligonucleotide

SEQ ID NO: 636659 - DNA, 55 bp, Artificial; identical to SEQ ID NO: 256729
  Synthetic oligonucleotide

SEQ ID NO: 636660 - DNA, 55 bp, Artificial; identical to SEQ ID NO: 180798
  Synthetic oligonucleotide

SEQ ID NO: 636661 - DNA, 60 bp, Artificial; identical to SEQ ID NO: 187439
  Synthetic oligonucleotide

SEQ ID NO: 636662 - DNA, 56 bp, Artificial; identical to SEQ ID NO: 206959
  Synthetic oligonucleotide

SEQ ID NO: 636663 - DNA, 51 bp, Artificial; identical to SEQ ID NO: 186431
  Synthetic oligonucleotide

SEQ ID NO: 636664 - DNA, 55 bp, Artificial; identical to SEQ ID NO: 144397
  Synthetic oligonucleotide

SEQ ID NO: 636665 - DNA, 58 bp, Artificial; identical to SEQ ID NO: 246065
  Synthetic oligonucleotide

SEQ ID NO: 636666 - DNA, 55 bp, Artificial; identical to SEQ ID NO: 171139
  Synthetic oligonucleotide

SEQ ID NO: 636667 - DNA, 53 bp, Artificial; identical to SEQ ID NO: 168882
  Synthetic oligonucleotide

SEQ ID NO: 636668 - DNA, 55 bp, Artificial; identical to SEQ ID NO: 217472
  Synthetic oligonucleotide

SEQ ID NO: 636669 - DNA, 55 bp, Artificial; identical to SEQ ID NO: 151616
  Synthetic oligonucleotide

SEQ ID NO: 636670 - DNA, 55 bp, Artificial; identical to SEQ ID NO: 142015
  Synthetic oligonucleotide

SEQ ID NO: 636671 - DNA, 53 bp, Artificial; identical to SEQ ID NO: 247897
  Synthetic oligonucleotide

SEQ ID NO: 636672 - DNA, 60 bp, Artificial; identical to SEQ ID NO: 241933
  Synthetic oligonucleotide

SEQ ID NO: 636673 - DNA, 55 bp, Artificial; identical to SEQ ID NO: 188676
  Synthetic oligonucleotide

SEQ ID NO: 636674 - DNA, 60 bp, Artificial; identical to SEQ ID NO: 201171
  Synthetic oligonucleotide

SEQ ID NO: 636675 - DNA, 55 bp, Artificial; identical to SEQ ID NO: 238225
  Synthetic oligonucleotide

SEQ ID NO: 636676 - DNA, 55 bp, Artificial; identical to SEQ ID NO: 196146
  Synthetic oligonucleotide

SEQ ID NO: 636677 - DNA, 55 bp, Artificial; identical to SEQ ID NO: 160160
  Synthetic oligonucleotide

SEQ ID NO: 636678 - DNA, 60 bp, Artificial; identical to SEQ ID NO: 266010
  Synthetic oligonucleotide

SEQ ID NO: 636679 - DNA, 55 bp, Artificial; identical to SEQ ID NO: 253772
  Synthetic oligonucleotide

SEQ ID NO: 636680 - DNA, 55 bp, Artificial; identical to SEQ ID NO: 155291
  Synthetic oligonucleotide

SEQ ID NO: 636681 - DNA, 55 bp, Artificial; identical to SEQ ID NO: 166829
  Synthetic oligonucleotide

SEQ ID NO: 636682 - DNA, 55 bp, Artificial; identical to SEQ ID NO: 256724
  Synthetic oligonucleotide

SEQ ID NO: 636683 - DNA, 55 bp, Artificial; identical to SEQ ID NO: 188918
  Synthetic oligonucleotide

SEQ ID NO: 636684 - DNA, 55 bp, Artificial; identical to SEQ ID NO: 207088
  Synthetic oligonucleotide

SEQ ID NO: 636685 - DNA, 55 bp, Artificial; identical to SEQ ID NO: 220677
  Synthetic oligonucleotide

SEQ ID NO: 636686 - DNA, 54 bp, Artificial; identical to SEQ ID NO: 190626
  Synthetic oligonucleotide

SEQ ID NO: 636687 - DNA, 55 bp, Artificial; identical to SEQ ID NO: 217473
  Synthetic oligonucleotide

SEQ ID NO: 636688 - DNA, 54 bp, Artificial; identical to SEQ ID NO: 199512
  Synthetic oligonucleotide

SEQ ID NO: 636689 - DNA, 55 bp, Artificial; identical to SEQ ID NO: 154869
  Synthetic oligonucleotide

SEQ ID NO: 636690 - DNA, 59 bp, Artificial; identical to SEQ ID NO: 177849
  Synthetic oligonucleotide

SEQ ID NO: 636691 - DNA, 55 bp, Artificial; identical to SEQ ID NO: 162017
  Synthetic oligonucleotide

SEQ ID NO: 636692 - DNA, 55 bp, Artificial; identical to SEQ ID NO: 244411
  Synthetic oligonucleotide

SEQ ID NO: 636693 - DNA, 55 bp, Artificial; identical to SEQ ID NO: 180748
  Synthetic oligonucleotide

SEQ ID NO: 636694 - DNA, 52 bp, Artificial; identical to SEQ ID NO: 258168
  Synthetic oligonucleotide

SEQ ID NO: 636695 - DNA, 60 bp, Artificial; identical to SEQ ID NO: 255755
  Synthetic oligonucleotide

SEQ ID NO: 636696 - DNA, 55 bp, Artificial; identical to SEQ ID NO: 221192
  Synthetic oligonucleotide

SEQ ID NO: 636697 - DNA, 55 bp, Artificial; identical to SEQ ID NO: 198263
  Synthetic oligonucleotide

SEQ ID NO: 636698 - DNA, 51 bp, Artificial; identical to SEQ ID NO: 189645
  Synthetic oligonucleotide

SEQ ID NO: 636699 - DNA, 53 bp, Artificial; identical to SEQ ID NO: 157361
  Synthetic oligonucleotide

SEQ ID NO: 636700 - DNA, 55 bp, Artificial; identical to SEQ ID NO: 238222
  Synthetic oligonucleotide

SEQ ID NO: 636701 - DNA, 55 bp, Artificial; identical to SEQ ID NO: 171219
  Synthetic oligonucleotide

SEQ ID NO: 636702 - DNA, 55 bp, Artificial; identical to SEQ ID NO: 148051
  Synthetic oligonucleotide

SEQ ID NO: 636703 - DNA, 51 bp, Artificial; identical to SEQ ID NO: 165315
  Synthetic oligonucleotide

SEQ ID NO: 636704 - DNA, 55 bp, Artificial; identical to SEQ ID NO: 208208
  Synthetic oligonucleotide

SEQ ID NO: 636705 - DNA, 55 bp, Artificial; identical to SEQ ID NO: 156283
  Synthetic oligonucleotide

SEQ ID NO: 636706 - DNA, 60 bp, Artificial; identical to SEQ ID NO: 168201
  Synthetic oligonucleotide

SEQ ID NO: 636707 - DNA, 55 bp, Artificial; identical to SEQ ID NO: 148053
  Synthetic oligonucleotide

SEQ ID NO: 636708 - DNA, 52 bp, Artificial; identical to SEQ ID NO: 185854
  Synthetic oligonucleotide

SEQ ID NO: 636709 - DNA, 55 bp, Artificial; identical to SEQ ID NO: 209297
  Synthetic oligonucleotide

SEQ ID NO: 636710 - DNA, 51 bp, Artificial; identical to SEQ ID NO: 241117
  Synthetic oligonucleotide

SEQ ID NO: 636711 - DNA, 55 bp, Artificial; identical to SEQ ID NO: 209294
  Synthetic oligonucleotide

SEQ ID NO: 636712 - DNA, 55 bp, Artificial; identical to SEQ ID NO: 256721
  Synthetic oligonucleotide

SEQ ID NO: 636713 - DNA, 55 bp, Artificial; identical to SEQ ID NO: 201504
  Synthetic oligonucleotide

SEQ ID NO: 636714 - DNA, 55 bp, Artificial; identical to SEQ ID NO: 174730
  Synthetic oligonucleotide

SEQ ID NO: 636715 - DNA, 55 bp, Artificial; identical to SEQ ID NO: 160158
  Synthetic oligonucleotide

SEQ ID NO: 636716 - DNA, 55 bp, Artificial; identical to SEQ ID NO: 221149
  Synthetic oligonucleotide

SEQ ID NO: 636717 - DNA, 55 bp, Artificial; identical to SEQ ID NO: 205569
  Synthetic oligonucleotide

SEQ ID NO: 636718 - DNA, 55 bp, Artificial; identical to SEQ ID NO: 174731
  Synthetic oligonucleotide

SEQ ID NO: 636719 - DNA, 50 bp, Artificial; identical to SEQ ID NO: 233913
  Synthetic oligonucleotide

SEQ ID NO: 636720 - DNA, 55 bp, Artificial; identical to SEQ ID NO: 248966
  Synthetic oligonucleotide

SEQ ID NO: 636721 - DNA, 52 bp, Artificial; identical to SEQ ID NO: 161341
  Synthetic oligonucleotide

SEQ ID NO: 636722 - DNA, 55 bp, Artificial; identical to SEQ ID NO: 252788
  Synthetic oligonucleotide

SEQ ID NO: 636723 - DNA, 51 bp, Artificial; identical to SEQ ID NO: 192165
  Synthetic oligonucleotide

SEQ ID NO: 636724 - DNA, 59 bp, Artificial; identical to SEQ ID NO: 168223
  Synthetic oligonucleotide

SEQ ID NO: 636725 - DNA, 57 bp, Artificial; identical to SEQ ID NO: 241877
  Synthetic oligonucleotide

SEQ ID NO: 636726 - DNA, 59 bp, Artificial; identical to SEQ ID NO: 253464
  Synthetic oligonucleotide

SEQ ID NO: 636727 - DNA, 57 bp, Artificial; identical to SEQ ID NO: 241878
  Synthetic oligonucleotide

SEQ ID NO: 636728 - DNA, 55 bp, Artificial; identical to SEQ ID NO: 152298
  Synthetic oligonucleotide

SEQ ID NO: 636729 - DNA, 55 bp, Artificial; identical to SEQ ID NO: 248967
  Synthetic oligonucleotide

SEQ ID NO: 636730 - DNA, 55 bp, Artificial; identical to SEQ ID NO: 143735
  Synthetic oligonucleotide

SEQ ID NO: 636731 - DNA, 55 bp, Artificial; identical to SEQ ID NO: 256715
  Synthetic oligonucleotide

SEQ ID NO: 636732 - DNA, 51 bp, Artificial; identical to SEQ ID NO: 211178
  Synthetic oligonucleotide

SEQ ID NO: 636733 - DNA, 54 bp, Artificial; identical to SEQ ID NO: 217568
  Synthetic oligonucleotide

SEQ ID NO: 636734 - DNA, 55 bp, Artificial; identical to SEQ ID NO: 180743
  Synthetic oligonucleotide

SEQ ID NO: 636735 - DNA, 55 bp, Artificial; identical to SEQ ID NO: 218473
  Synthetic oligonucleotide

SEQ ID NO: 636736 - DNA, 55 bp, Artificial; identical to SEQ ID NO: 256714
  Synthetic oligonucleotide

SEQ ID NO: 636737 - DNA, 55 bp, Artificial; identical to SEQ ID NO: 205567
  Synthetic oligonucleotide

SEQ ID NO: 636738 - DNA, 55 bp, Artificial; identical to SEQ ID NO: 155290
  Synthetic oligonucleotide

SEQ ID NO: 636739 - DNA, 53 bp, Artificial; identical to SEQ ID NO: 266665
  Synthetic oligonucleotide

SEQ ID NO: 636740 - DNA, 55 bp, Artificial; identical to SEQ ID NO: 144217
  Synthetic oligonucleotide

SEQ ID NO: 636741 - DNA, 58 bp, Artificial; identical to SEQ ID NO: 177805
  Synthetic oligonucleotide

SEQ ID NO: 636742 - DNA, 55 bp, Artificial; identical to SEQ ID NO: 249711
  Synthetic oligonucleotide

SEQ ID NO: 636743 - DNA, 50 bp, Artificial; identical to SEQ ID NO: 241301
  Synthetic oligonucleotide

SEQ ID NO: 636744 - DNA, 55 bp, Artificial; identical to SEQ ID NO: 190251
  Synthetic oligonucleotide

SEQ ID NO: 636745 - DNA, 55 bp, Artificial; identical to SEQ ID NO: 218859
  Synthetic oligonucleotide

SEQ ID NO: 636746 - DNA, 52 bp, Artificial; identical to SEQ ID NO: 168946
  Synthetic oligonucleotide

SEQ ID NO: 636747 - DNA, 55 bp, Artificial; identical to SEQ ID NO: 256711
  Synthetic oligonucleotide

SEQ ID NO: 636748 - DNA, 55 bp, Artificial; identical to SEQ ID NO: 190204
  Synthetic oligonucleotide

SEQ ID NO: 636749 - DNA, 55 bp, Artificial; identical to SEQ ID NO: 180739
  Synthetic oligonucleotide

SEQ ID NO: 636750 - DNA, 55 bp, Artificial; identical to SEQ ID NO: 144263
  Synthetic oligonucleotide

SEQ ID NO: 636751 - DNA, 54 bp, Artificial; identical to SEQ ID NO: 190201
  Synthetic oligonucleotide

SEQ ID NO: 636752 - DNA, 55 bp, Artificial; identical to SEQ ID NO: 160157
  Synthetic oligonucleotide

SEQ ID NO: 636753 - DNA, 55 bp, Artificial; identical to SEQ ID NO: 256710
  Synthetic oligonucleotide

SEQ ID NO: 636754 - DNA, 51 bp, Artificial; identical to SEQ ID NO: 192162
  Synthetic oligonucleotide

SEQ ID NO: 636755 - DNA, 55 bp, Artificial; identical to SEQ ID NO: 188921
  Synthetic oligonucleotide

SEQ ID NO: 636756 - DNA, 55 bp, Artificial; identical to SEQ ID NO: 210742
  Synthetic oligonucleotide

SEQ ID NO: 636757 - DNA, 55 bp, Artificial; identical to SEQ ID NO: 248968
  Synthetic oligonucleotide

SEQ ID NO: 636758 - DNA, 57 bp, Artificial; identical to SEQ ID NO: 243543
  Synthetic oligonucleotide

SEQ ID NO: 636759 - DNA, 60 bp, Artificial; identical to SEQ ID NO: 241879
  Synthetic oligonucleotide

SEQ ID NO: 636760 - DNA, 60 bp, Artificial; identical to SEQ ID NO: 215250
  Synthetic oligonucleotide

SEQ ID NO: 636761 - DNA, 55 bp, Artificial; identical to SEQ ID NO: 244405
  Synthetic oligonucleotide

SEQ ID NO: 636762 - DNA, 53 bp, Artificial; identical to SEQ ID NO: 255342
  Synthetic oligonucleotide

SEQ ID NO: 636763 - DNA, 53 bp, Artificial; identical to SEQ ID NO: 255343
  Synthetic oligonucleotide

SEQ ID NO: 636764 - DNA, 55 bp, Artificial; identical to SEQ ID NO: 180775
  Synthetic oligonucleotide

SEQ ID NO: 636765 - DNA, 55 bp, Artificial; identical to SEQ ID NO: 154814
  Synthetic oligonucleotide

SEQ ID NO: 636766 - DNA, 55 bp, Artificial; identical to SEQ ID NO: 148058
  Synthetic oligonucleotide

SEQ ID NO: 636767 - DNA, 55 bp, Artificial; identical to SEQ ID NO: 256748
  Synthetic oligonucleotide

SEQ ID NO: 636768 - DNA, 55 bp, Artificial; identical to SEQ ID NO: 211182
  Synthetic oligonucleotide

SEQ ID NO: 636769 - DNA, 55 bp, Artificial; identical to SEQ ID NO: 148060
  Synthetic oligonucleotide

SEQ ID NO: 636770 - DNA, 51 bp, Artificial; identical to SEQ ID NO: 157845
  Synthetic oligonucleotide

SEQ ID NO: 636771 - DNA, 60 bp, Artificial; identical to SEQ ID NO: 256409
  Synthetic oligonucleotide

SEQ ID NO: 636772 - DNA, 60 bp, Artificial; identical to SEQ ID NO: 208751
  Synthetic oligonucleotide

SEQ ID NO: 636773 - DNA, 55 bp, Artificial; identical to SEQ ID NO: 155288
  Synthetic oligonucleotide

SEQ ID NO: 636774 - DNA, 53 bp, Artificial; identical to SEQ ID NO: 144111
  Synthetic oligonucleotide

SEQ ID NO: 636775 - DNA, 58 bp, Artificial; identical to SEQ ID NO: 177760
  Synthetic oligonucleotide

SEQ ID NO: 636776 - DNA, 54 bp, Artificial; identical to SEQ ID NO: 234413
  Synthetic oligonucleotide

SEQ ID NO: 636777 - DNA, 54 bp, Artificial; identical to SEQ ID NO: 185321
  Synthetic oligonucleotide

SEQ ID NO: 636778 - DNA, 55 bp, Artificial; identical to SEQ ID NO: 188824
  Synthetic oligonucleotide

SEQ ID NO: 636779 - DNA, 55 bp, Artificial; identical to SEQ ID NO: 156288
  Synthetic oligonucleotide

SEQ ID NO: 636780 - DNA, 53 bp, Artificial; identical to SEQ ID NO: 243177
  Synthetic oligonucleotide

SEQ ID NO: 636781 - DNA, 52 bp, Artificial; identical to SEQ ID NO: 187014
  Synthetic oligonucleotide

SEQ ID NO: 636782 - DNA, 55 bp, Artificial; identical to SEQ ID NO: 220675
  Synthetic oligonucleotide

SEQ ID NO: 636783 - DNA, 55 bp, Artificial; identical to SEQ ID NO: 180767
  Synthetic oligonucleotide

SEQ ID NO: 636784 - DNA, 55 bp, Artificial; identical to SEQ ID NO: 142100
  Synthetic oligonucleotide

SEQ ID NO: 636785 - DNA, 52 bp, Artificial; identical to SEQ ID NO: 186073
  Synthetic oligonucleotide

SEQ ID NO: 636786 - DNA, 55 bp, Artificial; identical to SEQ ID NO: 148063
  Synthetic oligonucleotide

SEQ ID NO: 636787 - DNA, 55 bp, Artificial; identical to SEQ ID NO: 190193
  Synthetic oligonucleotide

SEQ ID NO: 636788 - DNA, 60 bp, Artificial; identical to SEQ ID NO: 212769
  Synthetic oligonucleotide

SEQ ID NO: 636789 - DNA, 55 bp, Artificial; identical to SEQ ID NO: 253029
  Synthetic oligonucleotide

SEQ ID NO: 636790 - DNA, 55 bp, Artificial; identical to SEQ ID NO: 208205
  Synthetic oligonucleotide

SEQ ID NO: 636791 - DNA, 55 bp, Artificial; identical to SEQ ID NO: 166262
  Synthetic oligonucleotide

SEQ ID NO: 636792 - DNA, 57 bp, Artificial; identical to SEQ ID NO: 212510
  Synthetic oligonucleotide

SEQ ID NO: 636793 - DNA, 55 bp, Artificial; identical to SEQ ID NO: 144261
  Synthetic oligonucleotide

SEQ ID NO: 636794 - DNA, 55 bp, Artificial; identical to SEQ ID NO: 180766
  Synthetic oligonucleotide

SEQ ID NO: 636795 - DNA, 51 bp, Artificial; identical to SEQ ID NO: 170225
  Synthetic oligonucleotide

SEQ ID NO: 636796 - DNA, 55 bp, Artificial; identical to SEQ ID NO: 221143
  Synthetic oligonucleotide

SEQ ID NO: 636797 - DNA, 55 bp, Artificial; identical to SEQ ID NO: 224554
  Synthetic oligonucleotide

SEQ ID NO: 636798 - DNA, 55 bp, Artificial; identical to SEQ ID NO: 194363
  Synthetic oligonucleotide

SEQ ID NO: 636799 - DNA, 55 bp, Artificial; identical to SEQ ID NO: 221140
  Synthetic oligonucleotide

SEQ ID NO: 636800 - DNA, 53 bp, Artificial; identical to SEQ ID NO: 190756
  Synthetic oligonucleotide

SEQ ID NO: 636801 - DNA, 51 bp, Artificial; identical to SEQ ID NO: 216789
  Synthetic oligonucleotide

SEQ ID NO: 636802 - DNA, 55 bp, Artificial; identical to SEQ ID NO: 217476
  Synthetic oligonucleotide

SEQ ID NO: 636803 - DNA, 55 bp, Artificial; identical to SEQ ID NO: 188675
  Synthetic oligonucleotide

SEQ ID NO: 636804 - DNA, 55 bp, Artificial; identical to SEQ ID NO: 238010
  Synthetic oligonucleotide

SEQ ID NO: 636805 - DNA, 55 bp, Artificial; identical to SEQ ID NO: 198260
  Synthetic oligonucleotide

SEQ ID NO: 636806 - DNA, 52 bp, Artificial; identical to SEQ ID NO: 193786
  Synthetic oligonucleotide

SEQ ID NO: 636807 - DNA, 55 bp, Artificial; identical to SEQ ID NO: 239944
  Synthetic oligonucleotide

SEQ ID NO: 636808 - DNA, 60 bp, Artificial; identical to SEQ ID NO: 177738
  Synthetic oligonucleotide

SEQ ID NO: 636809 - DNA, 60 bp, Artificial; identical to SEQ ID NO: 244154
  Synthetic oligonucleotide

SEQ ID NO: 636810 - DNA, 55 bp, Artificial; identical to SEQ ID NO: 217477
  Synthetic oligonucleotide

SEQ ID NO: 636811 - DNA, 58 bp, Artificial; identical to SEQ ID NO: 205964
  Synthetic oligonucleotide

SEQ ID NO: 636812 - DNA, 55 bp, Artificial; identical to SEQ ID NO: 256747
  Synthetic oligonucleotide

SEQ ID NO: 636813 - DNA, 53 bp, Artificial; identical to SEQ ID NO: 211572
  Synthetic oligonucleotide

SEQ ID NO: 636814 - DNA, 55 bp, Artificial; identical to SEQ ID NO: 194364
  Synthetic oligonucleotide

SEQ ID NO: 636815 - DNA, 60 bp, Artificial; identical to SEQ ID NO: 152917
  Synthetic oligonucleotide

SEQ ID NO: 636816 - DNA, 55 bp, Artificial; identical to SEQ ID NO: 166250
  Synthetic oligonucleotide

SEQ ID NO: 636817 - DNA, 52 bp, Artificial; identical to SEQ ID NO: 152903
  Synthetic oligonucleotide

SEQ ID NO: 636818 - DNA, 57 bp, Artificial; identical to SEQ ID NO: 150760
  Synthetic oligonucleotide

SEQ ID NO: 636819 - DNA, 55 bp, Artificial; identical to SEQ ID NO: 191796
  Synthetic oligonucleotide

SEQ ID NO: 636820 - DNA, 55 bp, Artificial; identical to SEQ ID NO: 208204
  Synthetic oligonucleotide

SEQ ID NO: 636821 - DNA, 55 bp, Artificial; identical to SEQ ID NO: 248973
  Synthetic oligonucleotide

SEQ ID NO: 636822 - DNA, 55 bp, Artificial; identical to SEQ ID NO: 144758
  Synthetic oligonucleotide

SEQ ID NO: 636823 - DNA, 55 bp, Artificial; identical to SEQ ID NO: 242955
  Synthetic oligonucleotide

SEQ ID NO: 636824 - DNA, 52 bp, Artificial; identical to SEQ ID NO: 225242
  Synthetic oligonucleotide

SEQ ID NO: 636825 - DNA, 55 bp, Artificial; identical to SEQ ID NO: 217478
  Synthetic oligonucleotide

SEQ ID NO: 636826 - DNA, 55 bp, Artificial; identical to SEQ ID NO: 161218
  Synthetic oligonucleotide

SEQ ID NO: 636827 - DNA, 55 bp, Artificial; identical to SEQ ID NO: 194338
  Synthetic oligonucleotide

SEQ ID NO: 636828 - DNA, 55 bp, Artificial; identical to SEQ ID NO: 180758
  Synthetic oligonucleotide

SEQ ID NO: 636829 - DNA, 57 bp, Artificial; identical to SEQ ID NO: 151899
  Synthetic oligonucleotide

SEQ ID NO: 636830 - DNA, 59 bp, Artificial; identical to SEQ ID NO: 248630
  Synthetic oligonucleotide

SEQ ID NO: 636831 - DNA, 55 bp, Artificial; identical to SEQ ID NO: 180757
  Synthetic oligonucleotide

SEQ ID NO: 636832 - DNA, 55 bp, Artificial; identical to SEQ ID NO: 224557
  Synthetic oligonucleotide

SEQ ID NO: 636833 - DNA, 55 bp, Artificial; identical to SEQ ID NO: 212762
  Synthetic oligonucleotide

SEQ ID NO: 636834 - DNA, 59 bp, Artificial; identical to SEQ ID NO: 174980
  Synthetic oligonucleotide

SEQ ID NO: 636835 - DNA, 55 bp, Artificial; identical to SEQ ID NO: 257779
  Synthetic oligonucleotide

SEQ ID NO: 636836 - DNA, 57 bp, Artificial; identical to SEQ ID NO: 239387
  Synthetic oligonucleotide

SEQ ID NO: 636837 - DNA, 55 bp, Artificial; identical to SEQ ID NO: 207093
  Synthetic oligonucleotide

SEQ ID NO: 636838 - DNA, 55 bp, Artificial; identical to SEQ ID NO: 198258
  Synthetic oligonucleotide

SEQ ID NO: 636839 - DNA, 55 bp, Artificial; identical to SEQ ID NO: 171177
  Synthetic oligonucleotide

SEQ ID NO: 636840 - DNA, 60 bp, Artificial; identical to SEQ ID NO: 156054
  Synthetic oligonucleotide

SEQ ID NO: 636841 - DNA, 50 bp, Artificial; identical to SEQ ID NO: 241401
  Synthetic oligonucleotide

SEQ ID NO: 636842 - DNA, 55 bp, Artificial; identical to SEQ ID NO: 239943
  Synthetic oligonucleotide

SEQ ID NO: 636843 - DNA, 52 bp, Artificial; identical to SEQ ID NO: 161343
  Synthetic oligonucleotide

SEQ ID NO: 636844 - DNA, 55 bp, Artificial; identical to SEQ ID NO: 142048
  Synthetic oligonucleotide

SEQ ID NO: 636845 - DNA, 52 bp, Artificial; identical to SEQ ID NO: 222714
  Synthetic oligonucleotide

SEQ ID NO: 636846 - DNA, 55 bp, Artificial; identical to SEQ ID NO: 217480
  Synthetic oligonucleotide

SEQ ID NO: 636847 - DNA, 59 bp, Artificial; identical to SEQ ID NO: 203249
  Synthetic oligonucleotide

SEQ ID NO: 636848 - DNA, 51 bp, Artificial; identical to SEQ ID NO: 167160
  Synthetic oligonucleotide

SEQ ID NO: 636849 - DNA, 55 bp, Artificial; identical to SEQ ID NO: 253030
  Synthetic oligonucleotide

SEQ ID NO: 636850 - DNA, 55 bp, Artificial; identical to SEQ ID NO: 194357
  Synthetic oligonucleotide

SEQ ID NO: 636851 - DNA, 55 bp, Artificial; identical to SEQ ID NO: 171937
  Synthetic oligonucleotide

SEQ ID NO: 636852 - DNA, 49 bp, Artificial; identical to SEQ ID NO: 217579
  Synthetic oligonucleotide

SEQ ID NO: 636853 - DNA, 55 bp, Artificial; identical to SEQ ID NO: 238009
  Synthetic oligonucleotide

SEQ ID NO: 636854 - DNA, 55 bp, Artificial; identical to SEQ ID NO: 197328
  Synthetic oligonucleotide

SEQ ID NO: 636855 - DNA, 56 bp, Artificial; identical to SEQ ID NO: 241884
  Synthetic oligonucleotide

SEQ ID NO: 636856 - DNA, 52 bp, Artificial; identical to SEQ ID NO: 208775
  Synthetic oligonucleotide

SEQ ID NO: 636857 - DNA, 55 bp, Artificial; identical to SEQ ID NO: 180755
  Synthetic oligonucleotide

SEQ ID NO: 636858 - DNA, 55 bp, Artificial; identical to SEQ ID NO: 244397
  Synthetic oligonucleotide

SEQ ID NO: 636859 - DNA, 54 bp, Artificial; identical to SEQ ID NO: 148065
  Synthetic oligonucleotide

SEQ ID NO: 636860 - DNA, 55 bp, Artificial; identical to SEQ ID NO: 153185
  Synthetic oligonucleotide

SEQ ID NO: 636861 - DNA, 55 bp, Artificial; identical to SEQ ID NO: 169309
  Synthetic oligonucleotide

SEQ ID NO: 636862 - DNA, 55 bp, Artificial; identical to SEQ ID NO: 169308
  Synthetic oligonucleotide

SEQ ID NO: 636863 - DNA, 55 bp, Artificial; identical to SEQ ID NO: 224562
  Synthetic oligonucleotide

SEQ ID NO: 636864 - DNA, 55 bp, Artificial; identical to SEQ ID NO: 171176
  Synthetic oligonucleotide

SEQ ID NO: 636865 - DNA, 52 bp, Artificial; identical to SEQ ID NO: 234507
  Synthetic oligonucleotide

SEQ ID NO: 636866 - DNA, 54 bp, Artificial; identical to SEQ ID NO: 208233
  Synthetic oligonucleotide

SEQ ID NO: 636867 - DNA, 55 bp, Artificial; identical to SEQ ID NO: 234298
  Synthetic oligonucleotide

SEQ ID NO: 636868 - DNA, 51 bp, Artificial; identical to SEQ ID NO: 200102
  Synthetic oligonucleotide

SEQ ID NO: 636869 - DNA, 55 bp, Artificial; identical to SEQ ID NO: 194345
  Synthetic oligonucleotide

SEQ ID NO: 636870 - DNA, 55 bp, Artificial; identical to SEQ ID NO: 208232
  Synthetic oligonucleotide

SEQ ID NO: 636871 - DNA, 54 bp, Artificial; identical to SEQ ID NO: 203518
  Synthetic oligonucleotide

SEQ ID NO: 636872 - DNA, 55 bp, Artificial; identical to SEQ ID NO: 248976
  Synthetic oligonucleotide

SEQ ID NO: 636873 - DNA, 55 bp, Artificial; identical to SEQ ID NO: 234300
  Synthetic oligonucleotide

SEQ ID NO: 636874 - DNA, 55 bp, Artificial; identical to SEQ ID NO: 211184
  Synthetic oligonucleotide

SEQ ID NO: 636875 - DNA, 55 bp, Artificial; identical to SEQ ID NO: 148066
  Synthetic oligonucleotide

SEQ ID NO: 636876 - DNA, 55 bp, Artificial; identical to SEQ ID NO: 144756
  Synthetic oligonucleotide

SEQ ID NO: 636877 - DNA, 55 bp, Artificial; identical to SEQ ID NO: 156294
  Synthetic oligonucleotide

SEQ ID NO: 636878 - DNA, 55 bp, Artificial; identical to SEQ ID NO: 169307
  Synthetic oligonucleotide

SEQ ID NO: 636879 - DNA, 60 bp, Artificial; identical to SEQ ID NO: 141985
  Synthetic oligonucleotide

SEQ ID NO: 636880 - DNA, 54 bp, Artificial; identical to SEQ ID NO: 188922
  Synthetic oligonucleotide

SEQ ID NO: 636881 - DNA, 55 bp, Artificial; identical to SEQ ID NO: 156295
  Synthetic oligonucleotide

SEQ ID NO: 636882 - DNA, 55 bp, Artificial; identical to SEQ ID NO: 221137
  Synthetic oligonucleotide

SEQ ID NO: 636883 - DNA, 55 bp, Artificial; identical to SEQ ID NO: 203517
  Synthetic oligonucleotide

SEQ ID NO: 636884 - DNA, 55 bp, Artificial; identical to SEQ ID NO: 156296
  Synthetic oligonucleotide

SEQ ID NO: 636885 - DNA, 55 bp, Artificial; identical to SEQ ID NO: 171175
  Synthetic oligonucleotide

SEQ ID NO: 636886 - DNA, 60 bp, Artificial; identical to SEQ ID NO: 212991
  Synthetic oligonucleotide

SEQ ID NO: 636887 - DNA, 55 bp, Artificial; identical to SEQ ID NO: 202089
  Synthetic oligonucleotide

SEQ ID NO: 636888 - DNA, 53 bp, Artificial; identical to SEQ ID NO: 246367
  Synthetic oligonucleotide

SEQ ID NO: 636889 - DNA, 55 bp, Artificial; identical to SEQ ID NO: 201505
  Synthetic oligonucleotide

SEQ ID NO: 636890 - DNA, 56 bp, Artificial; identical to SEQ ID NO: 157776
  Synthetic oligonucleotide

SEQ ID NO: 636891 - DNA, 55 bp, Artificial; identical to SEQ ID NO: 142056
  Synthetic oligonucleotide

SEQ ID NO: 636892 - DNA, 57 bp, Artificial; identical to SEQ ID NO: 193119
  Synthetic oligonucleotide

SEQ ID NO: 636893 - DNA, 55 bp, Artificial; identical to SEQ ID NO: 249624
  Synthetic oligonucleotide

SEQ ID NO: 636894 - DNA, 54 bp, Artificial; identical to SEQ ID NO: 152028
  Synthetic oligonucleotide

SEQ ID NO: 636895 - DNA, 55 bp, Artificial; identical to SEQ ID NO: 164037
  Synthetic oligonucleotide

SEQ ID NO: 636896 - DNA, 57 bp, Artificial; identical to SEQ ID NO: 155164
  Synthetic oligonucleotide

SEQ ID NO: 636897 - DNA, 51 bp, Artificial; identical to SEQ ID NO: 242479
  Synthetic oligonucleotide

SEQ ID NO: 636898 - DNA, 52 bp, Artificial; identical to SEQ ID NO: 165053
  Synthetic oligonucleotide

SEQ ID NO: 636899 - DNA, 52 bp, Artificial; identical to SEQ ID NO: 157583
  Synthetic oligonucleotide

SEQ ID NO: 636900 - DNA, 55 bp, Artificial; identical to SEQ ID NO: 212765
  Synthetic oligonucleotide

SEQ ID NO: 636901 - DNA, 55 bp, Artificial; identical to SEQ ID NO: 148067
  Synthetic oligonucleotide

SEQ ID NO: 636902 - DNA, 56 bp, Artificial; identical to SEQ ID NO: 244066
  Synthetic oligonucleotide

SEQ ID NO: 636903 - DNA, 55 bp, Artificial; identical to SEQ ID NO: 187668
  Synthetic oligonucleotide

SEQ ID NO: 636904 - DNA, 55 bp, Artificial; identical to SEQ ID NO: 180754
  Synthetic oligonucleotide

SEQ ID NO: 636905 - DNA, 55 bp, Artificial; identical to SEQ ID NO: 154714
  Synthetic oligonucleotide

SEQ ID NO: 636906 - DNA, 60 bp, Artificial; identical to SEQ ID NO: 248641
  Synthetic oligonucleotide

SEQ ID NO: 636907 - DNA, 59 bp, Artificial; identical to SEQ ID NO: 207344
  Synthetic oligonucleotide

SEQ ID NO: 636908 - DNA, 54 bp, Artificial; identical to SEQ ID NO: 185309
  Synthetic oligonucleotide

SEQ ID NO: 636909 - DNA, 55 bp, Artificial; identical to SEQ ID NO: 187667
  Synthetic oligonucleotide

SEQ ID NO: 636910 - DNA, 55 bp, Artificial; identical to SEQ ID NO: 148108
  Synthetic oligonucleotide

SEQ ID NO: 636911 - DNA, 55 bp, Artificial; identical to SEQ ID NO: 148109
  Synthetic oligonucleotide

SEQ ID NO: 636912 - DNA, 55 bp, Artificial; identical to SEQ ID NO: 190190
  Synthetic oligonucleotide

SEQ ID NO: 636913 - DNA, 54 bp, Artificial; identical to SEQ ID NO: 209292
  Synthetic oligonucleotide

SEQ ID NO: 636914 - DNA, 55 bp, Artificial; identical to SEQ ID NO: 266251
  Synthetic oligonucleotide

SEQ ID NO: 636915 - DNA, 55 bp, Artificial; identical to SEQ ID NO: 244395
  Synthetic oligonucleotide

SEQ ID NO: 636916 - DNA, 55 bp, Artificial; identical to SEQ ID NO: 197327
  Synthetic oligonucleotide

SEQ ID NO: 636917 - DNA, 51 bp, Artificial; identical to SEQ ID NO: 186500
  Synthetic oligonucleotide

SEQ ID NO: 636918 - DNA, 55 bp, Artificial; identical to SEQ ID NO: 220674
  Synthetic oligonucleotide

SEQ ID NO: 636919 - DNA, 55 bp, Artificial; identical to SEQ ID NO: 218440
  Synthetic oligonucleotide

SEQ ID NO: 636920 - DNA, 55 bp, Artificial; identical to SEQ ID NO: 188674
  Synthetic oligonucleotide

SEQ ID NO: 636921 - DNA, 53 bp, Artificial; identical to SEQ ID NO: 142058
  Synthetic oligonucleotide

SEQ ID NO: 636922 - DNA, 54 bp, Artificial; identical to SEQ ID NO: 185317
  Synthetic oligonucleotide

SEQ ID NO: 636923 - DNA, 55 bp, Artificial; identical to SEQ ID NO: 181239
  Synthetic oligonucleotide

SEQ ID NO: 636924 - DNA, 55 bp, Artificial; identical to SEQ ID NO: 253032
  Synthetic oligonucleotide

SEQ ID NO: 636925 - DNA, 59 bp, Artificial; identical to SEQ ID NO: 241888
  Synthetic oligonucleotide

SEQ ID NO: 636926 - DNA, 55 bp, Artificial; identical to SEQ ID NO: 256740
  Synthetic oligonucleotide

SEQ ID NO: 636927 - DNA, 55 bp, Artificial; identical to SEQ ID NO: 169306
  Synthetic oligonucleotide

SEQ ID NO: 636928 - DNA, 55 bp, Artificial; identical to SEQ ID NO: 244393
  Synthetic oligonucleotide

SEQ ID NO: 636929 - DNA, 60 bp, Artificial; identical to SEQ ID NO: 156099
  Synthetic oligonucleotide

SEQ ID NO: 636930 - DNA, 52 bp, Artificial; identical to SEQ ID NO: 258188
  Synthetic oligonucleotide

SEQ ID NO: 636931 - DNA, 55 bp, Artificial; identical to SEQ ID NO: 191797
  Synthetic oligonucleotide

SEQ ID NO: 636932 - DNA, 55 bp, Artificial; identical to SEQ ID NO: 197325
  Synthetic oligonucleotide

SEQ ID NO: 636933 - DNA, 51 bp, Artificial; identical to SEQ ID NO: 238003
  Synthetic oligonucleotide

SEQ ID NO: 636934 - DNA, 55 bp, Artificial; identical to SEQ ID NO: 201777
  Synthetic oligonucleotide

SEQ ID NO: 636935 - DNA, 55 bp, Artificial; identical to SEQ ID NO: 171735
  Synthetic oligonucleotide

SEQ ID NO: 636936 - DNA, 55 bp, Artificial; identical to SEQ ID NO: 194344
  Synthetic oligonucleotide

SEQ ID NO: 636937 - DNA, 55 bp, Artificial; identical to SEQ ID NO: 257121
  Synthetic oligonucleotide

SEQ ID NO: 636938 - DNA, 55 bp, Artificial; identical to SEQ ID NO: 197324
  Synthetic oligonucleotide

SEQ ID NO: 636939 - DNA, 55 bp, Artificial; identical to SEQ ID NO: 156301
  Synthetic oligonucleotide

SEQ ID NO: 636940 - DNA, 55 bp, Artificial; identical to SEQ ID NO: 233371
  Synthetic oligonucleotide

SEQ ID NO: 636941 - DNA, 55 bp, Artificial; identical to SEQ ID NO: 253033
  Synthetic oligonucleotide

SEQ ID NO: 636942 - DNA, 55 bp, Artificial; identical to SEQ ID NO: 207136
  Synthetic oligonucleotide

SEQ ID NO: 636943 - DNA, 55 bp, Artificial; identical to SEQ ID NO: 260036
  Synthetic oligonucleotide

SEQ ID NO: 636944 - DNA, 55 bp, Artificial; identical to SEQ ID NO: 181231
  Synthetic oligonucleotide

SEQ ID NO: 636945 - DNA, 57 bp, Artificial; identical to SEQ ID NO: 189976
  Synthetic oligonucleotide

SEQ ID NO: 636946 - DNA, 54 bp, Artificial; identical to SEQ ID NO: 252684
  Synthetic oligonucleotide

SEQ ID NO: 636947 - DNA, 55 bp, Artificial; identical to SEQ ID NO: 198253
  Synthetic oligonucleotide

SEQ ID NO: 636948 - DNA, 55 bp, Artificial; identical to SEQ ID NO: 167462
  Synthetic oligonucleotide

SEQ ID NO: 636949 - DNA, 55 bp, Artificial; identical to SEQ ID NO: 142064
  Synthetic oligonucleotide

SEQ ID NO: 636950 - DNA, 55 bp, Artificial; identical to SEQ ID NO: 256734
  Synthetic oligonucleotide

SEQ ID NO: 636951 - DNA, 55 bp, Artificial; identical to SEQ ID NO: 208224
  Synthetic oligonucleotide

SEQ ID NO: 636952 - DNA, 55 bp, Artificial; identical to SEQ ID NO: 256735
  Synthetic oligonucleotide

SEQ ID NO: 636953 - DNA, 56 bp, Artificial; identical to SEQ ID NO: 178194
  Synthetic oligonucleotide

SEQ ID NO: 636954 - DNA, 55 bp, Artificial; identical to SEQ ID NO: 224626
  Synthetic oligonucleotide

SEQ ID NO: 636955 - DNA, 55 bp, Artificial; identical to SEQ ID NO: 148110
  Synthetic oligonucleotide

SEQ ID NO: 636956 - DNA, 55 bp, Artificial; identical to SEQ ID NO: 143756
  Synthetic oligonucleotide

SEQ ID NO: 636957 - DNA, 60 bp, Artificial; identical to SEQ ID NO: 237796
  Synthetic oligonucleotide

SEQ ID NO: 636958 - DNA, 55 bp, Artificial; identical to SEQ ID NO: 151626
  Synthetic oligonucleotide

SEQ ID NO: 636959 - DNA, 55 bp, Artificial; identical to SEQ ID NO: 144753
  Synthetic oligonucleotide

SEQ ID NO: 636960 - DNA, 60 bp, Artificial; identical to SEQ ID NO: 178183
  Synthetic oligonucleotide

SEQ ID NO: 636961 - DNA, 55 bp, Artificial; identical to SEQ ID NO: 220673
  Synthetic oligonucleotide

SEQ ID NO: 636962 - DNA, 55 bp, Artificial; identical to SEQ ID NO: 161214
  Synthetic oligonucleotide

SEQ ID NO: 636963 - DNA, 55 bp, Artificial; identical to SEQ ID NO: 153187
  Synthetic oligonucleotide

SEQ ID NO: 636964 - DNA, 54 bp, Artificial; identical to SEQ ID NO: 202088
  Synthetic oligonucleotide

SEQ ID NO: 636965 - DNA, 55 bp, Artificial; identical to SEQ ID NO: 155287
  Synthetic oligonucleotide

SEQ ID NO: 636966 - DNA, 55 bp, Artificial; identical to SEQ ID NO: 181259
  Synthetic oligonucleotide

SEQ ID NO: 636967 - DNA, 55 bp, Artificial; identical to SEQ ID NO: 151501
  Synthetic oligonucleotide

SEQ ID NO: 636968 - DNA, 55 bp, Artificial; identical to SEQ ID NO: 197323
  Synthetic oligonucleotide

SEQ ID NO: 636969 - DNA, 55 bp, Artificial; identical to SEQ ID NO: 208223
  Synthetic oligonucleotide

SEQ ID NO: 636970 - DNA, 52 bp, Artificial; identical to SEQ ID NO: 148111
  Synthetic oligonucleotide

SEQ ID NO: 636971 - DNA, 53 bp, Artificial; identical to SEQ ID NO: 205668
  Synthetic oligonucleotide

SEQ ID NO: 636972 - DNA, 55 bp, Artificial; identical to SEQ ID NO: 249623
  Synthetic oligonucleotide

SEQ ID NO: 636973 - DNA, 55 bp, Artificial; identical to SEQ ID NO: 181257
  Synthetic oligonucleotide

SEQ ID NO: 636974 - DNA, 55 bp, Artificial; identical to SEQ ID NO: 198251
  Synthetic oligonucleotide

SEQ ID NO: 636975 - DNA, 55 bp, Artificial; identical to SEQ ID NO: 205556
  Synthetic oligonucleotide

SEQ ID NO: 636976 - DNA, 54 bp, Artificial; identical to SEQ ID NO: 239933
  Synthetic oligonucleotide

SEQ ID NO: 636977 - DNA, 55 bp, Artificial; identical to SEQ ID NO: 203093
  Synthetic oligonucleotide

SEQ ID NO: 636978 - DNA, 55 bp, Artificial; identical to SEQ ID NO: 190226
  Synthetic oligonucleotide

SEQ ID NO: 636979 - DNA, 55 bp, Artificial; identical to SEQ ID NO: 191798
  Synthetic oligonucleotide

SEQ ID NO: 636980 - DNA, 55 bp, Artificial; identical to SEQ ID NO: 151503
  Synthetic oligonucleotide

SEQ ID NO: 636981 - DNA, 55 bp, Artificial; identical to SEQ ID NO: 248979
  Synthetic oligonucleotide

SEQ ID NO: 636982 - DNA, 55 bp, Artificial; identical to SEQ ID NO: 181255
  Synthetic oligonucleotide

SEQ ID NO: 636983 - DNA, 56 bp, Artificial; identical to SEQ ID NO: 248686
  Synthetic oligonucleotide

SEQ ID NO: 636984 - DNA, 58 bp, Artificial; identical to SEQ ID NO: 208718
  Synthetic oligonucleotide

SEQ ID NO: 636985 - DNA, 55 bp, Artificial; identical to SEQ ID NO: 234095
  Synthetic oligonucleotide

SEQ ID NO: 636986 - DNA, 55 bp, Artificial; identical to SEQ ID NO: 188673
  Synthetic oligonucleotide

SEQ ID NO: 636987 - DNA, 55 bp, Artificial; identical to SEQ ID NO: 156250
  Synthetic oligonucleotide

SEQ ID NO: 636988 - DNA, 55 bp, Artificial; identical to SEQ ID NO: 217483
  Synthetic oligonucleotide

SEQ ID NO: 636989 - DNA, 55 bp, Artificial; identical to SEQ ID NO: 198249
  Synthetic oligonucleotide

SEQ ID NO: 636990 - DNA, 55 bp, Artificial; identical to SEQ ID NO: 211052
  Synthetic oligonucleotide

SEQ ID NO: 636991 - DNA, 55 bp, Artificial; identical to SEQ ID NO: 181251
  Synthetic oligonucleotide

SEQ ID NO: 636992 - DNA, 55 bp, Artificial; identical to SEQ ID NO: 153189
  Synthetic oligonucleotide

SEQ ID NO: 636993 - DNA, 55 bp, Artificial; identical to SEQ ID NO: 142075
  Synthetic oligonucleotide

SEQ ID NO: 636994 - DNA, 54 bp, Artificial; identical to SEQ ID NO: 170859
  Synthetic oligonucleotide

SEQ ID NO: 636995 - DNA, 54 bp, Artificial; identical to SEQ ID NO: 187664
  Synthetic oligonucleotide

SEQ ID NO: 636996 - DNA, 55 bp, Artificial; identical to SEQ ID NO: 211053
  Synthetic oligonucleotide

SEQ ID NO: 636997 - DNA, 55 bp, Artificial; identical to SEQ ID NO: 266253
  Synthetic oligonucleotide

SEQ ID NO: 636998 - DNA, 55 bp, Artificial; identical to SEQ ID NO: 154172
  Synthetic oligonucleotide

SEQ ID NO: 636999 - DNA, 51 bp, Artificial; identical to SEQ ID NO: 186451
  Synthetic oligonucleotide

SEQ ID NO: 637000 - DNA, 54 bp, Artificial; identical to SEQ ID NO: 167536
  Synthetic oligonucleotide

SEQ ID NO: 637001 - DNA, 55 bp, Artificial; identical to SEQ ID NO: 221169
  Synthetic oligonucleotide

SEQ ID NO: 637002 - DNA, 57 bp, Artificial; identical to SEQ ID NO: 178117
  Synthetic oligonucleotide

SEQ ID NO: 637003 - DNA, 51 bp, Artificial; identical to SEQ ID NO: 248697
  Synthetic oligonucleotide

SEQ ID NO: 637004 - DNA, 60 bp, Artificial; identical to SEQ ID NO: 155175
  Synthetic oligonucleotide

SEQ ID NO: 637005 - DNA, 55 bp, Artificial; identical to SEQ ID NO: 244168
  Synthetic oligonucleotide

SEQ ID NO: 637006 - DNA, 52 bp, Artificial; identical to SEQ ID NO: 249671
  Synthetic oligonucleotide

SEQ ID NO: 637007 - DNA, 55 bp, Artificial; identical to SEQ ID NO: 164033
  Synthetic oligonucleotide

SEQ ID NO: 637008 - DNA, 55 bp, Artificial; identical to SEQ ID NO: 218407
  Synthetic oligonucleotide

SEQ ID NO: 637009 - DNA, 52 bp, Artificial; identical to SEQ ID NO: 170858
  Synthetic oligonucleotide

SEQ ID NO: 637010 - DNA, 55 bp, Artificial; identical to SEQ ID NO: 217484
  Synthetic oligonucleotide

SEQ ID NO: 637011 - DNA, 51 bp, Artificial; identical to SEQ ID NO: 201389
  Synthetic oligonucleotide

SEQ ID NO: 637012 - DNA, 54 bp, Artificial; identical to SEQ ID NO: 211055
  Synthetic oligonucleotide

SEQ ID NO: 637013 - DNA, 55 bp, Artificial; identical to SEQ ID NO: 239931
  Synthetic oligonucleotide

SEQ ID NO: 637014 - DNA, 55 bp, Artificial; identical to SEQ ID NO: 181243
  Synthetic oligonucleotide

SEQ ID NO: 637015 - DNA, 55 bp, Artificial; identical to SEQ ID NO: 259067
  Synthetic oligonucleotide

SEQ ID NO: 637016 - DNA, 55 bp, Artificial; identical to SEQ ID NO: 181200
  Synthetic oligonucleotide

SEQ ID NO: 637017 - DNA, 55 bp, Artificial; identical to SEQ ID NO: 256744
  Synthetic oligonucleotide

SEQ ID NO: 637018 - DNA, 55 bp, Artificial; identical to SEQ ID NO: 207138
  Synthetic oligonucleotide

SEQ ID NO: 637019 - DNA, 54 bp, Artificial; identical to SEQ ID NO: 233794
  Synthetic oligonucleotide

SEQ ID NO: 637020 - DNA, 55 bp, Artificial; identical to SEQ ID NO: 194346
  Synthetic oligonucleotide

SEQ ID NO: 637021 - DNA, 55 bp, Artificial; identical to SEQ ID NO: 207139
  Synthetic oligonucleotide

SEQ ID NO: 637022 - DNA, 60 bp, Artificial; identical to SEQ ID NO: 178106
  Synthetic oligonucleotide

SEQ ID NO: 637023 - DNA, 60 bp, Artificial; identical to SEQ ID NO: 210741
  Synthetic oligonucleotide

SEQ ID NO: 637024 - DNA, 55 bp, Artificial; identical to SEQ ID NO: 215406
  Synthetic oligonucleotide

SEQ ID NO: 637025 - DNA, 58 bp, Artificial; identical to SEQ ID NO: 209163
  Synthetic oligonucleotide

SEQ ID NO: 637026 - DNA, 60 bp, Artificial; identical to SEQ ID NO: 257428
  Synthetic oligonucleotide

SEQ ID NO: 637027 - DNA, 60 bp, Artificial; identical to SEQ ID NO: 208707
  Synthetic oligonucleotide

SEQ ID NO: 637028 - DNA, 55 bp, Artificial; identical to SEQ ID NO: 181198
  Synthetic oligonucleotide

SEQ ID NO: 637029 - DNA, 55 bp, Artificial; identical to SEQ ID NO: 217434
  Synthetic oligonucleotide

SEQ ID NO: 637030 - DNA, 55 bp, Artificial; identical to SEQ ID NO: 174741
  Synthetic oligonucleotide

SEQ ID NO: 637031 - DNA, 55 bp, Artificial; identical to SEQ ID NO: 174742
  Synthetic oligonucleotide

SEQ ID NO: 637032 - DNA, 50 bp, Artificial; identical to SEQ ID NO: 189899
  Synthetic oligonucleotide

SEQ ID NO: 637033 - DNA, 55 bp, Artificial; identical to SEQ ID NO: 234189
  Synthetic oligonucleotide

SEQ ID NO: 637034 - DNA, 52 bp, Artificial; identical to SEQ ID NO: 266291
  Synthetic oligonucleotide

SEQ ID NO: 637035 - DNA, 55 bp, Artificial; identical to SEQ ID NO: 153192
  Synthetic oligonucleotide

SEQ ID NO: 637036 - DNA, 55 bp, Artificial; identical to SEQ ID NO: 148114
  Synthetic oligonucleotide

SEQ ID NO: 637037 - DNA, 55 bp, Artificial; identical to SEQ ID NO: 244434
  Synthetic oligonucleotide

SEQ ID NO: 637038 - DNA, 55 bp, Artificial; identical to SEQ ID NO: 164031
  Synthetic oligonucleotide

SEQ ID NO: 637039 - DNA, 55 bp, Artificial; identical to SEQ ID NO: 181194
  Synthetic oligonucleotide

SEQ ID NO: 637040 - DNA, 55 bp, Artificial; identical to SEQ ID NO: 181192
  Synthetic oligonucleotide

SEQ ID NO: 637041 - DNA, 55 bp, Artificial; identical to SEQ ID NO: 224628
  Synthetic oligonucleotide

SEQ ID NO: 637042 - DNA, 55 bp, Artificial; identical to SEQ ID NO: 190225
  Synthetic oligonucleotide

SEQ ID NO: 637043 - DNA, 57 bp, Artificial; identical to SEQ ID NO: 237941
  Synthetic oligonucleotide

SEQ ID NO: 637044 - DNA, 55 bp, Artificial; identical to SEQ ID NO: 181191
  Synthetic oligonucleotide

SEQ ID NO: 637045 - DNA, 60 bp, Artificial; identical to SEQ ID NO: 224239
  Synthetic oligonucleotide

SEQ ID NO: 637046 - DNA, 51 bp, Artificial; identical to SEQ ID NO: 157838
  Synthetic oligonucleotide

SEQ ID NO: 637047 - DNA, 55 bp, Artificial; identical to SEQ ID NO: 151505
  Synthetic oligonucleotide

SEQ ID NO: 637048 - DNA, 55 bp, Artificial; identical to SEQ ID NO: 234201
  Synthetic oligonucleotide

SEQ ID NO: 637049 - DNA, 55 bp, Artificial; identical to SEQ ID NO: 156255
  Synthetic oligonucleotide

SEQ ID NO: 637050 - DNA, 51 bp, Artificial; identical to SEQ ID NO: 225267
  Synthetic oligonucleotide

SEQ ID NO: 637051 - DNA, 54 bp, Artificial; identical to SEQ ID NO: 207703
  Synthetic oligonucleotide

SEQ ID NO: 637052 - DNA, 55 bp, Artificial; identical to SEQ ID NO: 256745
  Synthetic oligonucleotide

SEQ ID NO: 637053 - DNA, 53 bp, Artificial; identical to SEQ ID NO: 244060
  Synthetic oligonucleotide

SEQ ID NO: 637054 - DNA, 55 bp, Artificial; identical to SEQ ID NO: 187660
  Synthetic oligonucleotide

SEQ ID NO: 637055 - DNA, 60 bp, Artificial; identical to SEQ ID NO: 210740
  Synthetic oligonucleotide

SEQ ID NO: 637056 - DNA, 55 bp, Artificial; identical to SEQ ID NO: 160156
  Synthetic oligonucleotide

SEQ ID NO: 637057 - DNA, 55 bp, Artificial; identical to SEQ ID NO: 203099
  Synthetic oligonucleotide

SEQ ID NO: 637058 - DNA, 50 bp, Artificial; identical to SEQ ID NO: 258956
  Synthetic oligonucleotide

SEQ ID NO: 637059 - DNA, 55 bp, Artificial; identical to SEQ ID NO: 181189
  Synthetic oligonucleotide

SEQ ID NO: 637060 - DNA, 55 bp, Artificial; identical to SEQ ID NO: 188802
  Synthetic oligonucleotide

SEQ ID NO: 637061 - DNA, 55 bp, Artificial; identical to SEQ ID NO: 197321
  Synthetic oligonucleotide

SEQ ID NO: 637062 - DNA, 50 bp, Artificial; identical to SEQ ID NO: 150142
  Synthetic oligonucleotide

SEQ ID NO: 637063 - DNA, 55 bp, Artificial; identical to SEQ ID NO: 198247
  Synthetic oligonucleotide

SEQ ID NO: 637064 - DNA, 52 bp, Artificial; identical to SEQ ID NO: 187015
  Synthetic oligonucleotide

SEQ ID NO: 637065 - DNA, 55 bp, Artificial; identical to SEQ ID NO: 148115
  Synthetic oligonucleotide

SEQ ID NO: 637066 - DNA, 57 bp, Artificial; identical to SEQ ID NO: 253397
  Synthetic oligonucleotide

SEQ ID NO: 637067 - DNA, 56 bp, Artificial; identical to SEQ ID NO: 147292
  Synthetic oligonucleotide

SEQ ID NO: 637068 - DNA, 52 bp, Artificial; identical to SEQ ID NO: 192126
  Synthetic oligonucleotide

SEQ ID NO: 637069 - DNA, 57 bp, Artificial; identical to SEQ ID NO: 239220
  Synthetic oligonucleotide

SEQ ID NO: 637070 - DNA, 55 bp, Artificial; identical to SEQ ID NO: 198245
  Synthetic oligonucleotide

SEQ ID NO: 637071 - DNA, 54 bp, Artificial; identical to SEQ ID NO: 181187
  Synthetic oligonucleotide

SEQ ID NO: 637072 - DNA, 55 bp, Artificial; identical to SEQ ID NO: 198244
  Synthetic oligonucleotide

SEQ ID NO: 637073 - DNA, 55 bp, Artificial; identical to SEQ ID NO: 207142
  Synthetic oligonucleotide

SEQ ID NO: 637074 - DNA, 55 bp, Artificial; identical to SEQ ID NO: 181186
  Synthetic oligonucleotide

SEQ ID NO: 637075 - DNA, 55 bp, Artificial; identical to SEQ ID NO: 256776
  Synthetic oligonucleotide

SEQ ID NO: 637076 - DNA, 55 bp, Artificial; identical to SEQ ID NO: 238035
  Synthetic oligonucleotide

SEQ ID NO: 637077 - DNA, 55 bp, Artificial; identical to SEQ ID NO: 194347
  Synthetic oligonucleotide

SEQ ID NO: 637078 - DNA, 55 bp, Artificial; identical to SEQ ID NO: 259515
  Synthetic oligonucleotide

SEQ ID NO: 637079 - DNA, 55 bp, Artificial; identical to SEQ ID NO: 239890
  Synthetic oligonucleotide

SEQ ID NO: 637080 - DNA, 55 bp, Artificial; identical to SEQ ID NO: 243988
  Synthetic oligonucleotide

SEQ ID NO: 637081 - DNA, 55 bp, Artificial; identical to SEQ ID NO: 144259
  Synthetic oligonucleotide

SEQ ID NO: 637082 - DNA, 56 bp, Artificial; identical to SEQ ID NO: 257516
  Synthetic oligonucleotide

SEQ ID NO: 637083 - DNA, 55 bp, Artificial; identical to SEQ ID NO: 164029
  Synthetic oligonucleotide

SEQ ID NO: 637084 - DNA, 55 bp, Artificial; identical to SEQ ID NO: 168675
  Synthetic oligonucleotide

SEQ ID NO: 637085 - DNA, 55 bp, Artificial; identical to SEQ ID NO: 144750
  Synthetic oligonucleotide

SEQ ID NO: 637086 - DNA, 56 bp, Artificial; identical to SEQ ID NO: 141960
  Synthetic oligonucleotide

SEQ ID NO: 637087 - DNA, 59 bp, Artificial; identical to SEQ ID NO: 213102
  Synthetic oligonucleotide

SEQ ID NO: 637088 - DNA, 55 bp, Artificial; identical to SEQ ID NO: 194350
  Synthetic oligonucleotide

SEQ ID NO: 637089 - DNA, 60 bp, Artificial; identical to SEQ ID NO: 178071
  Synthetic oligonucleotide

SEQ ID NO: 637090 - DNA, 55 bp, Artificial; identical to SEQ ID NO: 217435
  Synthetic oligonucleotide

SEQ ID NO: 637091 - DNA, 52 bp, Artificial; identical to SEQ ID NO: 255591
  Synthetic oligonucleotide

SEQ ID NO: 637092 - DNA, 55 bp, Artificial; identical to SEQ ID NO: 190223
  Synthetic oligonucleotide

SEQ ID NO: 637093 - DNA, 60 bp, Artificial; identical to SEQ ID NO: 194124
  Synthetic oligonucleotide

SEQ ID NO: 637094 - DNA, 58 bp, Artificial; identical to SEQ ID NO: 156199
  Synthetic oligonucleotide

SEQ ID NO: 637095 - DNA, 55 bp, Artificial; identical to SEQ ID NO: 156260
  Synthetic oligonucleotide

SEQ ID NO: 637096 - DNA, 51 bp, Artificial; identical to SEQ ID NO: 170213
  Synthetic oligonucleotide

SEQ ID NO: 637097 - DNA, 53 bp, Artificial; identical to SEQ ID NO: 170058
  Synthetic oligonucleotide

SEQ ID NO: 637098 - DNA, 55 bp, Artificial; identical to SEQ ID NO: 244426
  Synthetic oligonucleotide

SEQ ID NO: 637099 - DNA, 54 bp, Artificial; identical to SEQ ID NO: 156261
  Synthetic oligonucleotide

SEQ ID NO: 637100 - DNA, 60 bp, Artificial; identical to SEQ ID NO: 170810
  Synthetic oligonucleotide

SEQ ID NO: 637101 - DNA, 55 bp, Artificial; identical to SEQ ID NO: 208169
  Synthetic oligonucleotide

SEQ ID NO: 637102 - DNA, 57 bp, Artificial; identical to SEQ ID NO: 257427
  Synthetic oligonucleotide

SEQ ID NO: 637103 - DNA, 55 bp, Artificial; identical to SEQ ID NO: 233372
  Synthetic oligonucleotide

SEQ ID NO: 637104 - DNA, 57 bp, Artificial; identical to SEQ ID NO: 166139
  Synthetic oligonucleotide

SEQ ID NO: 637105 - DNA, 52 bp, Artificial; identical to SEQ ID NO: 161352
  Synthetic oligonucleotide

SEQ ID NO: 637106 - DNA, 55 bp, Artificial; identical to SEQ ID NO: 244423
  Synthetic oligonucleotide

SEQ ID NO: 637107 - DNA, 52 bp, Artificial; identical to SEQ ID NO: 186094
  Synthetic oligonucleotide

SEQ ID NO: 637108 - DNA, 60 bp, Artificial; identical to SEQ ID NO: 164279
  Synthetic oligonucleotide

SEQ ID NO: 637109 - DNA, 55 bp, Artificial; identical to SEQ ID NO: 203100
  Synthetic oligonucleotide

SEQ ID NO: 637110 - DNA, 60 bp, Artificial; identical to SEQ ID NO: 241896
  Synthetic oligonucleotide

SEQ ID NO: 637111 - DNA, 60 bp, Artificial; identical to SEQ ID NO: 224244
  Synthetic oligonucleotide

SEQ ID NO: 637112 - DNA, 52 bp, Artificial; identical to SEQ ID NO: 190896
  Synthetic oligonucleotide

SEQ ID NO: 637113 - DNA, 59 bp, Artificial; identical to SEQ ID NO: 217214
  Synthetic oligonucleotide

SEQ ID NO: 637114 - DNA, 60 bp, Artificial; identical to SEQ ID NO: 241901
  Synthetic oligonucleotide

SEQ ID NO: 637115 - DNA, 55 bp, Artificial; identical to SEQ ID NO: 244422
  Synthetic oligonucleotide

SEQ ID NO: 637116 - DNA, 55 bp, Artificial; identical to SEQ ID NO: 156262
  Synthetic oligonucleotide

SEQ ID NO: 637117 - DNA, 59 bp, Artificial; identical to SEQ ID NO: 187417
  Synthetic oligonucleotide

SEQ ID NO: 637118 - DNA, 55 bp, Artificial; identical to SEQ ID NO: 155284
  Synthetic oligonucleotide

SEQ ID NO: 637119 - DNA, 50 bp, Artificial; identical to SEQ ID NO: 256188
  Synthetic oligonucleotide

SEQ ID NO: 637120 - DNA, 55 bp, Artificial; identical to SEQ ID NO: 198243
  Synthetic oligonucleotide

SEQ ID NO: 637121 - DNA, 55 bp, Artificial; identical to SEQ ID NO: 194353
  Synthetic oligonucleotide

SEQ ID NO: 637122 - DNA, 54 bp, Artificial; identical to SEQ ID NO: 144958
  Synthetic oligonucleotide

SEQ ID NO: 637123 - DNA, 53 bp, Artificial; identical to SEQ ID NO: 252721
  Synthetic oligonucleotide

SEQ ID NO: 637124 - DNA, 55 bp, Artificial; identical to SEQ ID NO: 148118
  Synthetic oligonucleotide

SEQ ID NO: 637125 - DNA, 52 bp, Artificial; identical to SEQ ID NO: 209680
  Synthetic oligonucleotide

SEQ ID NO: 637126 - DNA, 55 bp, Artificial; identical to SEQ ID NO: 162024
  Synthetic oligonucleotide

SEQ ID NO: 637127 - DNA, 55 bp, Artificial; identical to SEQ ID NO: 162027
  Synthetic oligonucleotide

SEQ ID NO: 637128 - DNA, 60 bp, Artificial; identical to SEQ ID NO: 224296
  Synthetic oligonucleotide

SEQ ID NO: 637129 - DNA, 55 bp, Artificial; identical to SEQ ID NO: 248981
  Synthetic oligonucleotide

SEQ ID NO: 637130 - DNA, 55 bp, Artificial; identical to SEQ ID NO: 207148
  Synthetic oligonucleotide

SEQ ID NO: 637131 - DNA, 55 bp, Artificial; identical to SEQ ID NO: 168615
  Synthetic oligonucleotide

SEQ ID NO: 637132 - DNA, 55 bp, Artificial; identical to SEQ ID NO: 253035
  Synthetic oligonucleotide

SEQ ID NO: 637133 - DNA, 55 bp, Artificial; identical to SEQ ID NO: 198242
  Synthetic oligonucleotide

SEQ ID NO: 637134 - DNA, 60 bp, Artificial; identical to SEQ ID NO: 248719
  Synthetic oligonucleotide

SEQ ID NO: 637135 - DNA, 55 bp, Artificial; identical to SEQ ID NO: 168616
  Synthetic oligonucleotide

SEQ ID NO: 637136 - DNA, 55 bp, Artificial; identical to SEQ ID NO: 164026
  Synthetic oligonucleotide

SEQ ID NO: 637137 - DNA, 55 bp, Artificial; identical to SEQ ID NO: 171146
  Synthetic oligonucleotide

SEQ ID NO: 637138 - DNA, 55 bp, Artificial; identical to SEQ ID NO: 164025
  Synthetic oligonucleotide

SEQ ID NO: 637139 - DNA, 55 bp, Artificial; identical to SEQ ID NO: 161862
  Synthetic oligonucleotide

SEQ ID NO: 637140 - DNA, 55 bp, Artificial; identical to SEQ ID NO: 239883
  Synthetic oligonucleotide

SEQ ID NO: 637141 - DNA, 53 bp, Artificial; identical to SEQ ID NO: 203923
  Synthetic oligonucleotide

SEQ ID NO: 637142 - DNA, 55 bp, Artificial; identical to SEQ ID NO: 221165
  Synthetic oligonucleotide

SEQ ID NO: 637143 - DNA, 55 bp, Artificial; identical to SEQ ID NO: 171144
  Synthetic oligonucleotide

SEQ ID NO: 637144 - DNA, 52 bp, Artificial; identical to SEQ ID NO: 157533
  Synthetic oligonucleotide

SEQ ID NO: 637145 - DNA, 55 bp, Artificial; identical to SEQ ID NO: 161971
  Synthetic oligonucleotide

SEQ ID NO: 637146 - DNA, 55 bp, Artificial; identical to SEQ ID NO: 156263
  Synthetic oligonucleotide

SEQ ID NO: 637147 - DNA, 55 bp, Artificial; identical to SEQ ID NO: 154176
  Synthetic oligonucleotide

SEQ ID NO: 637148 - DNA, 55 bp, Artificial; identical to SEQ ID NO: 238030
  Synthetic oligonucleotide

SEQ ID NO: 637149 - DNA, 55 bp, Artificial; identical to SEQ ID NO: 248983
  Synthetic oligonucleotide

SEQ ID NO: 637150 - DNA, 55 bp, Artificial; identical to SEQ ID NO: 190221
  Synthetic oligonucleotide

SEQ ID NO: 637151 - DNA, 52 bp, Artificial; identical to SEQ ID NO: 157535
  Synthetic oligonucleotide

SEQ ID NO: 637152 - DNA, 57 bp, Artificial; identical to SEQ ID NO: 142007
  Synthetic oligonucleotide

SEQ ID NO: 637153 - DNA, 51 bp, Artificial; identical to SEQ ID NO: 209737
  Synthetic oligonucleotide

SEQ ID NO: 637154 - DNA, 55 bp, Artificial; identical to SEQ ID NO: 220671
  Synthetic oligonucleotide

SEQ ID NO: 637155 - DNA, 55 bp, Artificial; identical to SEQ ID NO: 164021
  Synthetic oligonucleotide

SEQ ID NO: 637156 - DNA, 55 bp, Artificial; identical to SEQ ID NO: 190213
  Synthetic oligonucleotide

SEQ ID NO: 637157 - DNA, 51 bp, Artificial; identical to SEQ ID NO: 157836
  Synthetic oligonucleotide

SEQ ID NO: 637158 - DNA, 55 bp, Artificial; identical to SEQ ID NO: 181180
  Synthetic oligonucleotide

SEQ ID NO: 637159 - DNA, 53 bp, Artificial; identical to SEQ ID NO: 164020
  Synthetic oligonucleotide

SEQ ID NO: 637160 - DNA, 55 bp, Artificial; identical to SEQ ID NO: 166832
  Synthetic oligonucleotide

SEQ ID NO: 637161 - DNA, 55 bp, Artificial; identical to SEQ ID NO: 238025
  Synthetic oligonucleotide

SEQ ID NO: 637162 - DNA, 55 bp, Artificial; identical to SEQ ID NO: 253036
  Synthetic oligonucleotide

SEQ ID NO: 637163 - DNA, 55 bp, Artificial; identical to SEQ ID NO: 181223
  Synthetic oligonucleotide

SEQ ID NO: 637164 - DNA, 55 bp, Artificial; identical to SEQ ID NO: 181222
  Synthetic oligonucleotide

SEQ ID NO: 637165 - DNA, 60 bp, Artificial; identical to SEQ ID NO: 217236
  Synthetic oligonucleotide

SEQ ID NO: 637166 - DNA, 60 bp, Artificial; identical to SEQ ID NO: 153765
  Synthetic oligonucleotide

SEQ ID NO: 637167 - DNA, 59 bp, Artificial; identical to SEQ ID NO: 178005
  Synthetic oligonucleotide

SEQ ID NO: 637168 - DNA, 55 bp, Artificial; identical to SEQ ID NO: 161211
  Synthetic oligonucleotide

SEQ ID NO: 637169 - DNA, 56 bp, Artificial; identical to SEQ ID NO: 180098
  Synthetic oligonucleotide

SEQ ID NO: 637170 - DNA, 55 bp, Artificial; identical to SEQ ID NO: 168617
  Synthetic oligonucleotide

SEQ ID NO: 637171 - DNA, 55 bp, Artificial; identical to SEQ ID NO: 234132
  Synthetic oligonucleotide

SEQ ID NO: 637172 - DNA, 55 bp, Artificial; identical to SEQ ID NO: 181214
  Synthetic oligonucleotide

SEQ ID NO: 637173 - DNA, 55 bp, Artificial; identical to SEQ ID NO: 156264
  Synthetic oligonucleotide

SEQ ID NO: 637174 - DNA, 55 bp, Artificial; identical to SEQ ID NO: 142018
  Synthetic oligonucleotide

SEQ ID NO: 637175 - DNA, 55 bp, Artificial; identical to SEQ ID NO: 198241
  Synthetic oligonucleotide

SEQ ID NO: 637176 - DNA, 55 bp, Artificial; identical to SEQ ID NO: 156266
  Synthetic oligonucleotide

SEQ ID NO: 637177 - DNA, 55 bp, Artificial; identical to SEQ ID NO: 234133
  Synthetic oligonucleotide

SEQ ID NO: 637178 - DNA, 55 bp, Artificial; identical to SEQ ID NO: 151509
  Synthetic oligonucleotide

SEQ ID NO: 637179 - DNA, 60 bp, Artificial; identical to SEQ ID NO: 257426
  Synthetic oligonucleotide

SEQ ID NO: 637180 - DNA, 51 bp, Artificial; identical to SEQ ID NO: 142029
  Synthetic oligonucleotide

SEQ ID NO: 637181 - DNA, 55 bp, Artificial; identical to SEQ ID NO: 256784
  Synthetic oligonucleotide

SEQ ID NO: 637182 - DNA, 55 bp, Artificial; identical to SEQ ID NO: 181212
  Synthetic oligonucleotide

SEQ ID NO: 637183 - DNA, 55 bp, Artificial; identical to SEQ ID NO: 249473
  Synthetic oligonucleotide

SEQ ID NO: 637184 - DNA, 60 bp, Artificial; identical to SEQ ID NO: 222841
  Synthetic oligonucleotide

SEQ ID NO: 637185 - DNA, 55 bp, Artificial; identical to SEQ ID NO: 208201
  Synthetic oligonucleotide

SEQ ID NO: 637186 - DNA, 55 bp, Artificial; identical to SEQ ID NO: 257747
  Synthetic oligonucleotide

SEQ ID NO: 637187 - DNA, 55 bp, Artificial; identical to SEQ ID NO: 239880
  Synthetic oligonucleotide

SEQ ID NO: 637188 - DNA, 55 bp, Artificial; identical to SEQ ID NO: 203565
  Synthetic oligonucleotide

SEQ ID NO: 637189 - DNA, 55 bp, Artificial; identical to SEQ ID NO: 266256
  Synthetic oligonucleotide

SEQ ID NO: 637190 - DNA, 55 bp, Artificial; identical to SEQ ID NO: 161861
  Synthetic oligonucleotide

SEQ ID NO: 637191 - DNA, 55 bp, Artificial; identical to SEQ ID NO: 233376
  Synthetic oligonucleotide

SEQ ID NO: 637192 - DNA, 55 bp, Artificial; identical to SEQ ID NO: 168620
  Synthetic oligonucleotide

SEQ ID NO: 637193 - DNA, 55 bp, Artificial; identical to SEQ ID NO: 203564
  Synthetic oligonucleotide

SEQ ID NO: 637194 - DNA, 60 bp, Artificial; identical to SEQ ID NO: 177938
  Synthetic oligonucleotide

SEQ ID NO: 637195 - DNA, 51 bp, Artificial; identical to SEQ ID NO: 186394
  Synthetic oligonucleotide

SEQ ID NO: 637196 - DNA, 58 bp, Artificial; identical to SEQ ID NO: 179363
  Synthetic oligonucleotide

SEQ ID NO: 637197 - DNA, 55 bp, Artificial; identical to SEQ ID NO: 148121
  Synthetic oligonucleotide

SEQ ID NO: 637198 - DNA, 52 bp, Artificial; identical to SEQ ID NO: 157537
  Synthetic oligonucleotide

SEQ ID NO: 637199 - DNA, 52 bp, Artificial; identical to SEQ ID NO: 240921
  Synthetic oligonucleotide

SEQ ID NO: 637200 - DNA, 60 bp, Artificial; identical to SEQ ID NO: 177328
  Synthetic oligonucleotide

SEQ ID NO: 637201 - DNA, 55 bp, Artificial; identical to SEQ ID NO: 189969
  Synthetic oligonucleotide

SEQ ID NO: 637202 - DNA, 55 bp, Artificial; identical to SEQ ID NO: 160971
  Synthetic oligonucleotide

SEQ ID NO: 637203 - DNA, 55 bp, Artificial; identical to SEQ ID NO: 234135
  Synthetic oligonucleotide

SEQ ID NO: 637204 - DNA, 55 bp, Artificial; identical to SEQ ID NO: 207151
  Synthetic oligonucleotide

SEQ ID NO: 637205 - DNA, 55 bp, Artificial; identical to SEQ ID NO: 156267
  Synthetic oligonucleotide

SEQ ID NO: 637206 - DNA, 51 bp, Artificial; identical to SEQ ID NO: 195240
  Synthetic oligonucleotide

SEQ ID NO: 637207 - DNA, 55 bp, Artificial; identical to SEQ ID NO: 181208
  Synthetic oligonucleotide

SEQ ID NO: 637208 - DNA, 55 bp, Artificial; identical to SEQ ID NO: 181207
  Synthetic oligonucleotide

SEQ ID NO: 637209 - DNA, 52 bp, Artificial; identical to SEQ ID NO: 181206
  Synthetic oligonucleotide

SEQ ID NO: 637210 - DNA, 55 bp, Artificial; identical to SEQ ID NO: 148123
  Synthetic oligonucleotide

SEQ ID NO: 637211 - DNA, 55 bp, Artificial; identical to SEQ ID NO: 238024
  Synthetic oligonucleotide

SEQ ID NO: 637212 - DNA, 56 bp, Artificial; identical to SEQ ID NO: 151359
  Synthetic oligonucleotide

SEQ ID NO: 637213 - DNA, 50 bp, Artificial; identical to SEQ ID NO: 144642
  Synthetic oligonucleotide

SEQ ID NO: 637214 - DNA, 55 bp, Artificial; identical to SEQ ID NO: 239876
  Synthetic oligonucleotide

SEQ ID NO: 637215 - DNA, 55 bp, Artificial; identical to SEQ ID NO: 234144
  Synthetic oligonucleotide

SEQ ID NO: 637216 - DNA, 56 bp, Artificial; identical to SEQ ID NO: 207222
  Synthetic oligonucleotide

SEQ ID NO: 637217 - DNA, 54 bp, Artificial; identical to SEQ ID NO: 207042
  Synthetic oligonucleotide

SEQ ID NO: 637218 - DNA, 55 bp, Artificial; identical to SEQ ID NO: 164019
  Synthetic oligonucleotide

SEQ ID NO: 637219 - DNA, 55 bp, Artificial; identical to SEQ ID NO: 198179
  Synthetic oligonucleotide

SEQ ID NO: 637220 - DNA, 51 bp, Artificial; identical to SEQ ID NO: 205748
  Synthetic oligonucleotide

SEQ ID NO: 637221 - DNA, 54 bp, Artificial; identical to SEQ ID NO: 243993
  Synthetic oligonucleotide

SEQ ID NO: 637222 - DNA, 54 bp, Artificial; identical to SEQ ID NO: 164323
  Synthetic oligonucleotide

SEQ ID NO: 637223 - DNA, 60 bp, Artificial; identical to SEQ ID NO: 242209
  Synthetic oligonucleotide

SEQ ID NO: 637224 - DNA, 51 bp, Artificial; identical to SEQ ID NO: 209709
  Synthetic oligonucleotide

SEQ ID NO: 637225 - DNA, 55 bp, Artificial; identical to SEQ ID NO: 224633
  Synthetic oligonucleotide

SEQ ID NO: 637226 - DNA, 55 bp, Artificial; identical to SEQ ID NO: 239875
  Synthetic oligonucleotide

SEQ ID NO: 637227 - DNA, 52 bp, Artificial; identical to SEQ ID NO: 201380
  Synthetic oligonucleotide

SEQ ID NO: 637228 - DNA, 55 bp, Artificial; identical to SEQ ID NO: 256790
  Synthetic oligonucleotide

SEQ ID NO: 637229 - DNA, 55 bp, Artificial; identical to SEQ ID NO: 148089
  Synthetic oligonucleotide

SEQ ID NO: 637230 - DNA, 55 bp, Artificial; identical to SEQ ID NO: 169300
  Synthetic oligonucleotide

SEQ ID NO: 637231 - DNA, 55 bp, Artificial; identical to SEQ ID NO: 181201
  Synthetic oligonucleotide

SEQ ID NO: 637232 - DNA, 55 bp, Artificial; identical to SEQ ID NO: 181331
  Synthetic oligonucleotide

SEQ ID NO: 637233 - DNA, 51 bp, Artificial; identical to SEQ ID NO: 241087
  Synthetic oligonucleotide

SEQ ID NO: 637234 - DNA, 60 bp, Artificial; identical to SEQ ID NO: 210738
  Synthetic oligonucleotide

SEQ ID NO: 637235 - DNA, 60 bp, Artificial; identical to SEQ ID NO: 242212
  Synthetic oligonucleotide

SEQ ID NO: 637236 - DNA, 55 bp, Artificial; identical to SEQ ID NO: 156268
  Synthetic oligonucleotide

SEQ ID NO: 637237 - DNA, 55 bp, Artificial; identical to SEQ ID NO: 156269
  Synthetic oligonucleotide

SEQ ID NO: 637238 - DNA, 55 bp, Artificial; identical to SEQ ID NO: 220670
  Synthetic oligonucleotide

SEQ ID NO: 637239 - DNA, 55 bp, Artificial; identical to SEQ ID NO: 181329
  Synthetic oligonucleotide

SEQ ID NO: 637240 - DNA, 55 bp, Artificial; identical to SEQ ID NO: 188672
  Synthetic oligonucleotide

SEQ ID NO: 637241 - DNA, 55 bp, Artificial; identical to SEQ ID NO: 207154
  Synthetic oligonucleotide

SEQ ID NO: 637242 - DNA, 55 bp, Artificial; identical to SEQ ID NO: 143751
  Synthetic oligonucleotide

SEQ ID NO: 637243 - DNA, 55 bp, Artificial; identical to SEQ ID NO: 181328
  Synthetic oligonucleotide

SEQ ID NO: 637244 - DNA, 55 bp, Artificial; identical to SEQ ID NO: 244358
  Synthetic oligonucleotide

SEQ ID NO: 637245 - DNA, 55 bp, Artificial; identical to SEQ ID NO: 168624
  Synthetic oligonucleotide

SEQ ID NO: 637246 - DNA, 55 bp, Artificial; identical to SEQ ID NO: 248984
  Synthetic oligonucleotide

SEQ ID NO: 637247 - DNA, 58 bp, Artificial; identical to SEQ ID NO: 177217
  Synthetic oligonucleotide

SEQ ID NO: 637248 - DNA, 55 bp, Artificial; identical to SEQ ID NO: 189926
  Synthetic oligonucleotide

SEQ ID NO: 637249 - DNA, 55 bp, Artificial; identical to SEQ ID NO: 156270
  Synthetic oligonucleotide

SEQ ID NO: 637250 - DNA, 55 bp, Artificial; identical to SEQ ID NO: 202078
  Synthetic oligonucleotide

SEQ ID NO: 637251 - DNA, 55 bp, Artificial; identical to SEQ ID NO: 195203
  Synthetic oligonucleotide

SEQ ID NO: 637252 - DNA, 55 bp, Artificial; identical to SEQ ID NO: 198177
  Synthetic oligonucleotide

SEQ ID NO: 637253 - DNA, 54 bp, Artificial; identical to SEQ ID NO: 164770
  Synthetic oligonucleotide

SEQ ID NO: 637254 - DNA, 55 bp, Artificial; identical to SEQ ID NO: 187654
  Synthetic oligonucleotide

SEQ ID NO: 637255 - DNA, 55 bp, Artificial; identical to SEQ ID NO: 160150
  Synthetic oligonucleotide

SEQ ID NO: 637256 - DNA, 52 bp, Artificial; identical to SEQ ID NO: 246462
  Synthetic oligonucleotide

SEQ ID NO: 637257 - DNA, 58 bp, Artificial; identical to SEQ ID NO: 164334
  Synthetic oligonucleotide

SEQ ID NO: 637258 - DNA, 53 bp, Artificial; identical to SEQ ID NO: 242213
  Synthetic oligonucleotide

SEQ ID NO: 637259 - DNA, 55 bp, Artificial; identical to SEQ ID NO: 238023
  Synthetic oligonucleotide

SEQ ID NO: 637260 - DNA, 55 bp, Artificial; identical to SEQ ID NO: 209289
  Synthetic oligonucleotide

SEQ ID NO: 637261 - DNA, 57 bp, Artificial; identical to SEQ ID NO: 266095
  Synthetic oligonucleotide

SEQ ID NO: 637262 - DNA, 51 bp, Artificial; identical to SEQ ID NO: 165265
  Synthetic oligonucleotide

SEQ ID NO: 637263 - DNA, 52 bp, Artificial; identical to SEQ ID NO: 186037
  Synthetic oligonucleotide

SEQ ID NO: 637264 - DNA, 59 bp, Artificial; identical to SEQ ID NO: 179308
  Synthetic oligonucleotide

SEQ ID NO: 637265 - DNA, 52 bp, Artificial; identical to SEQ ID NO: 203978
  Synthetic oligonucleotide

SEQ ID NO: 637266 - DNA, 55 bp, Artificial; identical to SEQ ID NO: 248987
  Synthetic oligonucleotide

SEQ ID NO: 637267 - DNA, 55 bp, Artificial; identical to SEQ ID NO: 201776
  Synthetic oligonucleotide

SEQ ID NO: 637268 - DNA, 54 bp, Artificial; identical to SEQ ID NO: 194949
  Synthetic oligonucleotide

SEQ ID NO: 637269 - DNA, 53 bp, Artificial; identical to SEQ ID NO: 253037
  Synthetic oligonucleotide

SEQ ID NO: 637270 - DNA, 54 bp, Artificial; identical to SEQ ID NO: 194946
  Synthetic oligonucleotide

SEQ ID NO: 637271 - DNA, 55 bp, Artificial; identical to SEQ ID NO: 181319
  Synthetic oligonucleotide

SEQ ID NO: 637272 - DNA, 60 bp, Artificial; identical to SEQ ID NO: 253945
  Synthetic oligonucleotide

SEQ ID NO: 637273 - DNA, 55 bp, Artificial; identical to SEQ ID NO: 181318
  Synthetic oligonucleotide

SEQ ID NO: 637274 - DNA, 55 bp, Artificial; identical to SEQ ID NO: 156272
  Synthetic oligonucleotide

SEQ ID NO: 637275 - DNA, 59 bp, Artificial; identical to SEQ ID NO: 177150
  Synthetic oligonucleotide

SEQ ID NO: 637276 - DNA, 55 bp, Artificial; identical to SEQ ID NO: 220723
  Synthetic oligonucleotide

SEQ ID NO: 637277 - DNA, 55 bp, Artificial; identical to SEQ ID NO: 167301
  Synthetic oligonucleotide

SEQ ID NO: 637278 - DNA, 57 bp, Artificial; identical to SEQ ID NO: 157432
  Synthetic oligonucleotide

SEQ ID NO: 637279 - DNA, 60 bp, Artificial; identical to SEQ ID NO: 150770
  Synthetic oligonucleotide

SEQ ID NO: 637280 - DNA, 55 bp, Artificial; identical to SEQ ID NO: 156273
  Synthetic oligonucleotide

SEQ ID NO: 637281 - DNA, 54 bp, Artificial; identical to SEQ ID NO: 148091
  Synthetic oligonucleotide

SEQ ID NO: 637282 - DNA, 55 bp, Artificial; identical to SEQ ID NO: 198176
  Synthetic oligonucleotide

SEQ ID NO: 637283 - DNA, 51 bp, Artificial; identical to SEQ ID NO: 165264
  Synthetic oligonucleotide

SEQ ID NO: 637284 - DNA, 55 bp, Artificial; identical to SEQ ID NO: 247719
  Synthetic oligonucleotide

SEQ ID NO: 637285 - DNA, 55 bp, Artificial; identical to SEQ ID NO: 198175
  Synthetic oligonucleotide

SEQ ID NO: 637286 - DNA, 55 bp, Artificial; identical to SEQ ID NO: 201775
  Synthetic oligonucleotide

SEQ ID NO: 637287 - DNA, 55 bp, Artificial; identical to SEQ ID NO: 181314
  Synthetic oligonucleotide

SEQ ID NO: 637288 - DNA, 55 bp, Artificial; identical to SEQ ID NO: 203561
  Synthetic oligonucleotide

SEQ ID NO: 637289 - DNA, 55 bp, Artificial; identical to SEQ ID NO: 181313
  Synthetic oligonucleotide

SEQ ID NO: 637290 - DNA, 60 bp, Artificial; identical to SEQ ID NO: 253275
  Synthetic oligonucleotide

SEQ ID NO: 637291 - DNA, 60 bp, Artificial; identical to SEQ ID NO: 265631
  Synthetic oligonucleotide

SEQ ID NO: 637292 - DNA, 55 bp, Artificial; identical to SEQ ID NO: 181312
  Synthetic oligonucleotide

SEQ ID NO: 637293 - DNA, 52 bp, Artificial; identical to SEQ ID NO: 211638
  Synthetic oligonucleotide

SEQ ID NO: 637294 - DNA, 55 bp, Artificial; identical to SEQ ID NO: 164015
  Synthetic oligonucleotide

SEQ ID NO: 637295 - DNA, 55 bp, Artificial; identical to SEQ ID NO: 207116
  Synthetic oligonucleotide

SEQ ID NO: 637296 - DNA, 60 bp, Artificial; identical to SEQ ID NO: 177128
  Synthetic oligonucleotide

SEQ ID NO: 637297 - DNA, 55 bp, Artificial; identical to SEQ ID NO: 212768
  Synthetic oligonucleotide

SEQ ID NO: 637298 - DNA, 55 bp, Artificial; identical to SEQ ID NO: 169890
  Synthetic oligonucleotide

SEQ ID NO: 637299 - DNA, 55 bp, Artificial; identical to SEQ ID NO: 253038
  Synthetic oligonucleotide

SEQ ID NO: 637300 - DNA, 55 bp, Artificial; identical to SEQ ID NO: 266738
  Synthetic oligonucleotide

SEQ ID NO: 637301 - DNA, 55 bp, Artificial; identical to SEQ ID NO: 233375
  Synthetic oligonucleotide

SEQ ID NO: 637302 - DNA, 60 bp, Artificial; identical to SEQ ID NO: 153088
  Synthetic oligonucleotide

SEQ ID NO: 637303 - DNA, 55 bp, Artificial; identical to SEQ ID NO: 148093
  Synthetic oligonucleotide

SEQ ID NO: 637304 - DNA, 54 bp, Artificial; identical to SEQ ID NO: 168626
  Synthetic oligonucleotide

SEQ ID NO: 637305 - DNA, 55 bp, Artificial; identical to SEQ ID NO: 148095
  Synthetic oligonucleotide

SEQ ID NO: 637306 - DNA, 52 bp, Artificial; identical to SEQ ID NO: 255539
  Synthetic oligonucleotide

SEQ ID NO: 637307 - DNA, 55 bp, Artificial; identical to SEQ ID NO: 239909
  Synthetic oligonucleotide

SEQ ID NO: 637308 - DNA, 55 bp, Artificial; identical to SEQ ID NO: 237985
  Synthetic oligonucleotide

SEQ ID NO: 637309 - DNA, 55 bp, Artificial; identical to SEQ ID NO: 181309
  Synthetic oligonucleotide

SEQ ID NO: 637310 - DNA, 55 bp, Artificial; identical to SEQ ID NO: 181308
  Synthetic oligonucleotide

SEQ ID NO: 637311 - DNA, 60 bp, Artificial; identical to SEQ ID NO: 224275
  Synthetic oligonucleotide

SEQ ID NO: 637312 - DNA, 58 bp, Artificial; identical to SEQ ID NO: 159986
  Synthetic oligonucleotide

SEQ ID NO: 637313 - DNA, 53 bp, Artificial; identical to SEQ ID NO: 150640
  Synthetic oligonucleotide

SEQ ID NO: 637314 - DNA, 56 bp, Artificial; identical to SEQ ID NO: 171718
  Synthetic oligonucleotide

SEQ ID NO: 637315 - DNA, 50 bp, Artificial; identical to SEQ ID NO: 196741
  Synthetic oligonucleotide

SEQ ID NO: 637316 - DNA, 55 bp, Artificial; identical to SEQ ID NO: 156334
  Synthetic oligonucleotide

SEQ ID NO: 637317 - DNA, 55 bp, Artificial; identical to SEQ ID NO: 244182
  Synthetic oligonucleotide

SEQ ID NO: 637318 - DNA, 55 bp, Artificial; identical to SEQ ID NO: 148096
  Synthetic oligonucleotide

SEQ ID NO: 637319 - DNA, 55 bp, Artificial; identical to SEQ ID NO: 247714
  Synthetic oligonucleotide

SEQ ID NO: 637320 - DNA, 55 bp, Artificial; identical to SEQ ID NO: 247713
  Synthetic oligonucleotide

SEQ ID NO: 637321 - DNA, 53 bp, Artificial; identical to SEQ ID NO: 253039
  Synthetic oligonucleotide

SEQ ID NO: 637322 - DNA, 55 bp, Artificial; identical to SEQ ID NO: 224634
  Synthetic oligonucleotide

SEQ ID NO: 637323 - DNA, 55 bp, Artificial; identical to SEQ ID NO: 181353
  Synthetic oligonucleotide

SEQ ID NO: 637324 - DNA, 55 bp, Artificial; identical to SEQ ID NO: 256692
  Synthetic oligonucleotide

SEQ ID NO: 637325 - DNA, 59 bp, Artificial; identical to SEQ ID NO: 153066
  Synthetic oligonucleotide

SEQ ID NO: 637326 - DNA, 55 bp, Artificial; identical to SEQ ID NO: 212771
  Synthetic oligonucleotide

SEQ ID NO: 637327 - DNA, 55 bp, Artificial; identical to SEQ ID NO: 233373
  Synthetic oligonucleotide

SEQ ID NO: 637328 - DNA, 55 bp, Artificial; identical to SEQ ID NO: 181350
  Synthetic oligonucleotide

SEQ ID NO: 637329 - DNA, 57 bp, Artificial; identical to SEQ ID NO: 244209
  Synthetic oligonucleotide

SEQ ID NO: 637330 - DNA, 57 bp, Artificial; identical to SEQ ID NO: 147209
  Synthetic oligonucleotide

SEQ ID NO: 637331 - DNA, 55 bp, Artificial; identical to SEQ ID NO: 169298
  Synthetic oligonucleotide

SEQ ID NO: 637332 - DNA, 51 bp, Artificial; identical to SEQ ID NO: 200184
  Synthetic oligonucleotide

SEQ ID NO: 637333 - DNA, 55 bp, Artificial; identical to SEQ ID NO: 249619
  Synthetic oligonucleotide

SEQ ID NO: 637334 - DNA, 55 bp, Artificial; identical to SEQ ID NO: 211070
  Synthetic oligonucleotide

SEQ ID NO: 637335 - DNA, 55 bp, Artificial; identical to SEQ ID NO: 181347
  Synthetic oligonucleotide

SEQ ID NO: 637336 - DNA, 55 bp, Artificial; identical to SEQ ID NO: 156336
  Synthetic oligonucleotide

SEQ ID NO: 637337 - DNA, 55 bp, Artificial; identical to SEQ ID NO: 188791
  Synthetic oligonucleotide

SEQ ID NO: 637338 - DNA, 55 bp, Artificial; identical to SEQ ID NO: 181345
  Synthetic oligonucleotide

SEQ ID NO: 637339 - DNA, 53 bp, Artificial; identical to SEQ ID NO: 181343
  Synthetic oligonucleotide

SEQ ID NO: 637340 - DNA, 60 bp, Artificial; identical to SEQ ID NO: 224278
  Synthetic oligonucleotide

SEQ ID NO: 637341 - DNA, 51 bp, Artificial; identical to SEQ ID NO: 257507
  Synthetic oligonucleotide

SEQ ID NO: 637342 - DNA, 55 bp, Artificial; identical to SEQ ID NO: 217444
  Synthetic oligonucleotide

SEQ ID NO: 637343 - DNA, 58 bp, Artificial; identical to SEQ ID NO: 237757
  Synthetic oligonucleotide

SEQ ID NO: 637344 - DNA, 55 bp, Artificial; identical to SEQ ID NO: 244389
  Synthetic oligonucleotide

SEQ ID NO: 637345 - DNA, 55 bp, Artificial; identical to SEQ ID NO: 181341
  Synthetic oligonucleotide

SEQ ID NO: 637346 - DNA, 50 bp, Artificial; identical to SEQ ID NO: 162389
  Synthetic oligonucleotide

SEQ ID NO: 637347 - DNA, 55 bp, Artificial; identical to SEQ ID NO: 257749
  Synthetic oligonucleotide

SEQ ID NO: 637348 - DNA, 55 bp, Artificial; identical to SEQ ID NO: 154186
  Synthetic oligonucleotide

SEQ ID NO: 637349 - DNA, 55 bp, Artificial; identical to SEQ ID NO: 217445
  Synthetic oligonucleotide

SEQ ID NO: 637350 - DNA, 55 bp, Artificial; identical to SEQ ID NO: 160149
  Synthetic oligonucleotide

SEQ ID NO: 637351 - DNA, 55 bp, Artificial; identical to SEQ ID NO: 203104
  Synthetic oligonucleotide

SEQ ID NO: 637352 - DNA, 55 bp, Artificial; identical to SEQ ID NO: 143746
  Synthetic oligonucleotide

SEQ ID NO: 637353 - DNA, 59 bp, Artificial; identical to SEQ ID NO: 144313
  Synthetic oligonucleotide

SEQ ID NO: 637354 - DNA, 55 bp, Artificial; identical to SEQ ID NO: 234145
  Synthetic oligonucleotide

SEQ ID NO: 637355 - DNA, 55 bp, Artificial; identical to SEQ ID NO: 217446
  Synthetic oligonucleotide

SEQ ID NO: 637356 - DNA, 53 bp, Artificial; identical to SEQ ID NO: 202475
  Synthetic oligonucleotide

SEQ ID NO: 637357 - DNA, 53 bp, Artificial; identical to SEQ ID NO: 170048
  Synthetic oligonucleotide

SEQ ID NO: 637358 - DNA, 55 bp, Artificial; identical to SEQ ID NO: 164013
  Synthetic oligonucleotide

SEQ ID NO: 637359 - DNA, 55 bp, Artificial; identical to SEQ ID NO: 207120
  Synthetic oligonucleotide

SEQ ID NO: 637360 - DNA, 55 bp, Artificial; identical to SEQ ID NO: 207121
  Synthetic oligonucleotide

SEQ ID NO: 637361 - DNA, 56 bp, Artificial; identical to SEQ ID NO: 187401
  Synthetic oligonucleotide

SEQ ID NO: 637362 - DNA, 55 bp, Artificial; identical to SEQ ID NO: 256779
  Synthetic oligonucleotide

SEQ ID NO: 637363 - DNA, 55 bp, Artificial; identical to SEQ ID NO: 156342
  Synthetic oligonucleotide

SEQ ID NO: 637364 - DNA, 55 bp, Artificial; identical to SEQ ID NO: 244379
  Synthetic oligonucleotide

SEQ ID NO: 637365 - DNA, 55 bp, Artificial; identical to SEQ ID NO: 181340
  Synthetic oligonucleotide

SEQ ID NO: 637366 - DNA, 53 bp, Artificial; identical to SEQ ID NO: 203926
  Synthetic oligonucleotide

SEQ ID NO: 637367 - DNA, 54 bp, Artificial; identical to SEQ ID NO: 240613
  Synthetic oligonucleotide

SEQ ID NO: 637368 - DNA, 55 bp, Artificial; identical to SEQ ID NO: 201508
  Synthetic oligonucleotide

SEQ ID NO: 637369 - DNA, 55 bp, Artificial; identical to SEQ ID NO: 181337
  Synthetic oligonucleotide

SEQ ID NO: 637370 - DNA, 56 bp, Artificial; identical to SEQ ID NO: 159981
  Synthetic oligonucleotide

SEQ ID NO: 637371 - DNA, 55 bp, Artificial; identical to SEQ ID NO: 253040
  Synthetic oligonucleotide

SEQ ID NO: 637372 - DNA, 55 bp, Artificial; identical to SEQ ID NO: 203555
  Synthetic oligonucleotide

SEQ ID NO: 637373 - DNA, 59 bp, Artificial; identical to SEQ ID NO: 176882
  Synthetic oligonucleotide

SEQ ID NO: 637374 - DNA, 59 bp, Artificial; identical to SEQ ID NO: 208684
  Synthetic oligonucleotide

SEQ ID NO: 637375 - DNA, 55 bp, Artificial; identical to SEQ ID NO: 220726
  Synthetic oligonucleotide

SEQ ID NO: 637376 - DNA, 60 bp, Artificial; identical to SEQ ID NO: 176771
  Synthetic oligonucleotide

SEQ ID NO: 637377 - DNA, 55 bp, Artificial; identical to SEQ ID NO: 168627
  Synthetic oligonucleotide

SEQ ID NO: 637378 - DNA, 55 bp, Artificial; identical to SEQ ID NO: 249618
  Synthetic oligonucleotide

SEQ ID NO: 637379 - DNA, 55 bp, Artificial; identical to SEQ ID NO: 256718
  Synthetic oligonucleotide

SEQ ID NO: 637380 - DNA, 55 bp, Artificial; identical to SEQ ID NO: 244378
  Synthetic oligonucleotide

SEQ ID NO: 637381 - DNA, 55 bp, Artificial; identical to SEQ ID NO: 187646
  Synthetic oligonucleotide

SEQ ID NO: 637382 - DNA, 52 bp, Artificial; identical to SEQ ID NO: 193604
  Synthetic oligonucleotide

SEQ ID NO: 637383 - DNA, 59 bp, Artificial; identical to SEQ ID NO: 265911
  Synthetic oligonucleotide

SEQ ID NO: 637384 - DNA, 55 bp, Artificial; identical to SEQ ID NO: 249049
  Synthetic oligonucleotide

SEQ ID NO: 637385 - DNA, 55 bp, Artificial; identical to SEQ ID NO: 189202
  Synthetic oligonucleotide

SEQ ID NO: 637386 - DNA, 56 bp, Artificial; identical to SEQ ID NO: 201998
  Synthetic oligonucleotide

SEQ ID NO: 637387 - DNA, 55 bp, Artificial; identical to SEQ ID NO: 208194
  Synthetic oligonucleotide

SEQ ID NO: 637388 - DNA, 55 bp, Artificial; identical to SEQ ID NO: 143745
  Synthetic oligonucleotide

SEQ ID NO: 637389 - DNA, 60 bp, Artificial; identical to SEQ ID NO: 256496
  Synthetic oligonucleotide

SEQ ID NO: 637390 - DNA, 55 bp, Artificial; identical to SEQ ID NO: 220727
  Synthetic oligonucleotide

SEQ ID NO: 637391 - DNA, 55 bp, Artificial; identical to SEQ ID NO: 256743
  Synthetic oligonucleotide

SEQ ID NO: 637392 - DNA, 55 bp, Artificial; identical to SEQ ID NO: 249050
  Synthetic oligonucleotide

SEQ ID NO: 637393 - DNA, 52 bp, Artificial; identical to SEQ ID NO: 157548
  Synthetic oligonucleotide

SEQ ID NO: 637394 - DNA, 60 bp, Artificial; identical to SEQ ID NO: 224286
  Synthetic oligonucleotide

SEQ ID NO: 637395 - DNA, 60 bp, Artificial; identical to SEQ ID NO: 207610
  Synthetic oligonucleotide

SEQ ID NO: 637396 - DNA, 55 bp, Artificial; identical to SEQ ID NO: 237989
  Synthetic oligonucleotide

SEQ ID NO: 637397 - DNA, 55 bp, Artificial; identical to SEQ ID NO: 169908
  Synthetic oligonucleotide

SEQ ID NO: 637398 - DNA, 55 bp, Artificial; identical to SEQ ID NO: 244375
  Synthetic oligonucleotide

SEQ ID NO: 637399 - DNA, 55 bp, Artificial; identical to SEQ ID NO: 160147
  Synthetic oligonucleotide

SEQ ID NO: 637400 - DNA, 55 bp, Artificial; identical to SEQ ID NO: 256733
  Synthetic oligonucleotide

SEQ ID NO: 637401 - DNA, 55 bp, Artificial; identical to SEQ ID NO: 257045
  Synthetic oligonucleotide

SEQ ID NO: 637402 - DNA, 55 bp, Artificial; identical to SEQ ID NO: 202767
  Synthetic oligonucleotide

SEQ ID NO: 637403 - DNA, 55 bp, Artificial; identical to SEQ ID NO: 198173
  Synthetic oligonucleotide

SEQ ID NO: 637404 - DNA, 55 bp, Artificial; identical to SEQ ID NO: 164010
  Synthetic oligonucleotide

SEQ ID NO: 637405 - DNA, 55 bp, Artificial; identical to SEQ ID NO: 239905
  Synthetic oligonucleotide

SEQ ID NO: 637406 - DNA, 55 bp, Artificial; identical to SEQ ID NO: 215384
  Synthetic oligonucleotide

SEQ ID NO: 637407 - DNA, 55 bp, Artificial; identical to SEQ ID NO: 217450
  Synthetic oligonucleotide

SEQ ID NO: 637408 - DNA, 60 bp, Artificial; identical to SEQ ID NO: 242218
  Synthetic oligonucleotide

SEQ ID NO: 637409 - DNA, 55 bp, Artificial; identical to SEQ ID NO: 187645
  Synthetic oligonucleotide

SEQ ID NO: 637410 - DNA, 54 bp, Artificial; identical to SEQ ID NO: 247061
  Synthetic oligonucleotide

SEQ ID NO: 637411 - DNA, 60 bp, Artificial; identical to SEQ ID NO: 253453
  Synthetic oligonucleotide

SEQ ID NO: 637412 - DNA, 55 bp, Artificial; identical to SEQ ID NO: 153205
  Synthetic oligonucleotide

SEQ ID NO: 637413 - DNA, 59 bp, Artificial; identical to SEQ ID NO: 177616
  Synthetic oligonucleotide

SEQ ID NO: 637414 - DNA, 57 bp, Artificial; identical to SEQ ID NO: 242221
  Synthetic oligonucleotide

SEQ ID NO: 637415 - DNA, 55 bp, Artificial; identical to SEQ ID NO: 253041
  Synthetic oligonucleotide

SEQ ID NO: 637416 - DNA, 55 bp, Artificial; identical to SEQ ID NO: 161979
  Synthetic oligonucleotide

SEQ ID NO: 637417 - DNA, 55 bp, Artificial; identical to SEQ ID NO: 181333
  Synthetic oligonucleotide

SEQ ID NO: 637418 - DNA, 55 bp, Artificial; identical to SEQ ID NO: 198172
  Synthetic oligonucleotide

SEQ ID NO: 637419 - DNA, 55 bp, Artificial; identical to SEQ ID NO: 156349
  Synthetic oligonucleotide

SEQ ID NO: 637420 - DNA, 55 bp, Artificial; identical to SEQ ID NO: 198169
  Synthetic oligonucleotide

SEQ ID NO: 637421 - DNA, 55 bp, Artificial; identical to SEQ ID NO: 148102
  Synthetic oligonucleotide

SEQ ID NO: 637422 - DNA, 55 bp, Artificial; identical to SEQ ID NO: 142069
  Synthetic oligonucleotide

SEQ ID NO: 637423 - DNA, 54 bp, Artificial; identical to SEQ ID NO: 205622
  Synthetic oligonucleotide

SEQ ID NO: 637424 - DNA, 55 bp, Artificial; identical to SEQ ID NO: 244185
  Synthetic oligonucleotide

SEQ ID NO: 637425 - DNA, 54 bp, Artificial; identical to SEQ ID NO: 157201
  Synthetic oligonucleotide

SEQ ID NO: 637426 - DNA, 55 bp, Artificial; identical to SEQ ID NO: 224638
  Synthetic oligonucleotide

SEQ ID NO: 637427 - DNA, 51 bp, Artificial; identical to SEQ ID NO: 191237
  Synthetic oligonucleotide

SEQ ID NO: 637428 - DNA, 54 bp, Artificial; identical to SEQ ID NO: 208676
  Synthetic oligonucleotide

SEQ ID NO: 637429 - DNA, 55 bp, Artificial; identical to SEQ ID NO: 146248
  Synthetic oligonucleotide

SEQ ID NO: 637430 - DNA, 51 bp, Artificial; identical to SEQ ID NO: 186473
  Synthetic oligonucleotide

SEQ ID NO: 637431 - DNA, 55 bp, Artificial; identical to SEQ ID NO: 247060
  Synthetic oligonucleotide

SEQ ID NO: 637432 - DNA, 50 bp, Artificial; identical to SEQ ID NO: 246972
  Synthetic oligonucleotide

SEQ ID NO: 637433 - DNA, 55 bp, Artificial; identical to SEQ ID NO: 148104
  Synthetic oligonucleotide

SEQ ID NO: 637434 - DNA, 55 bp, Artificial; identical to SEQ ID NO: 181286
  Synthetic oligonucleotide

SEQ ID NO: 637435 - DNA, 55 bp, Artificial; identical to SEQ ID NO: 256730
  Synthetic oligonucleotide

SEQ ID NO: 637436 - DNA, 55 bp, Artificial; identical to SEQ ID NO: 256737
  Synthetic oligonucleotide

SEQ ID NO: 637437 - DNA, 55 bp, Artificial; identical to SEQ ID NO: 253043
  Synthetic oligonucleotide

SEQ ID NO: 637438 - DNA, 55 bp, Artificial; identical to SEQ ID NO: 257752
  Synthetic oligonucleotide

SEQ ID NO: 637439 - DNA, 55 bp, Artificial; identical to SEQ ID NO: 181284
  Synthetic oligonucleotide

SEQ ID NO: 637440 - DNA, 55 bp, Artificial; identical to SEQ ID NO: 234218
  Synthetic oligonucleotide

SEQ ID NO: 637441 - DNA, 55 bp, Artificial; identical to SEQ ID NO: 244371
  Synthetic oligonucleotide

SEQ ID NO: 637442 - DNA, 60 bp, Artificial; identical to SEQ ID NO: 248752
  Synthetic oligonucleotide

SEQ ID NO: 637443 - DNA, 59 bp, Artificial; identical to SEQ ID NO: 159923
  Synthetic oligonucleotide

SEQ ID NO: 637444 - DNA, 55 bp, Artificial; identical to SEQ ID NO: 256741
  Synthetic oligonucleotide

SEQ ID NO: 637445 - DNA, 55 bp, Artificial; identical to SEQ ID NO: 148107
  Synthetic oligonucleotide

SEQ ID NO: 637446 - DNA, 55 bp, Artificial; identical to SEQ ID NO: 181283
  Synthetic oligonucleotide

SEQ ID NO: 637447 - DNA, 55 bp, Artificial; identical to SEQ ID NO: 249501
  Synthetic oligonucleotide

SEQ ID NO: 637448 - DNA, 57 bp, Artificial; identical to SEQ ID NO: 209151
  Synthetic oligonucleotide

SEQ ID NO: 637449 - DNA, 50 bp, Artificial; identical to SEQ ID NO: 192195
  Synthetic oligonucleotide

SEQ ID NO: 637450 - DNA, 54 bp, Artificial; identical to SEQ ID NO: 258055
  Synthetic oligonucleotide

SEQ ID NO: 637451 - DNA, 55 bp, Artificial; identical to SEQ ID NO: 187644
  Synthetic oligonucleotide

SEQ ID NO: 637452 - DNA, 55 bp, Artificial; identical to SEQ ID NO: 147995
  Synthetic oligonucleotide

SEQ ID NO: 637453 - DNA, 60 bp, Artificial; identical to SEQ ID NO: 170797
  Synthetic oligonucleotide

SEQ ID NO: 637454 - DNA, 52 bp, Artificial; identical to SEQ ID NO: 197576
  Synthetic oligonucleotide

SEQ ID NO: 637455 - DNA, 55 bp, Artificial; identical to SEQ ID NO: 225182
  Synthetic oligonucleotide

SEQ ID NO: 637456 - DNA, 59 bp, Artificial; identical to SEQ ID NO: 159931
  Synthetic oligonucleotide

SEQ ID NO: 637457 - DNA, 55 bp, Artificial; identical to SEQ ID NO: 212773
  Synthetic oligonucleotide

SEQ ID NO: 637458 - DNA, 55 bp, Artificial; identical to SEQ ID NO: 168630
  Synthetic oligonucleotide

SEQ ID NO: 637459 - DNA, 55 bp, Artificial; identical to SEQ ID NO: 201087
  Synthetic oligonucleotide

SEQ ID NO: 637460 - DNA, 60 bp, Artificial; identical to SEQ ID NO: 189998
  Synthetic oligonucleotide

SEQ ID NO: 637461 - DNA, 55 bp, Artificial; identical to SEQ ID NO: 198168
  Synthetic oligonucleotide

SEQ ID NO: 637462 - DNA, 55 bp, Artificial; identical to SEQ ID NO: 221547
  Synthetic oligonucleotide

SEQ ID NO: 637463 - DNA, 60 bp, Artificial; identical to SEQ ID NO: 201149
  Synthetic oligonucleotide

SEQ ID NO: 637464 - DNA, 55 bp, Artificial; identical to SEQ ID NO: 244188
  Synthetic oligonucleotide

SEQ ID NO: 637465 - DNA, 55 bp, Artificial; identical to SEQ ID NO: 244376
  Synthetic oligonucleotide

SEQ ID NO: 637466 - DNA, 60 bp, Artificial; identical to SEQ ID NO: 194119
  Synthetic oligonucleotide

SEQ ID NO: 637467 - DNA, 55 bp, Artificial; identical to SEQ ID NO: 197273
  Synthetic oligonucleotide

SEQ ID NO: 637468 - DNA, 55 bp, Artificial; identical to SEQ ID NO: 266666
  Synthetic oligonucleotide

SEQ ID NO: 637469 - DNA, 55 bp, Artificial; identical to SEQ ID NO: 189978
  Synthetic oligonucleotide

SEQ ID NO: 637470 - DNA, 55 bp, Artificial; identical to SEQ ID NO: 208184
  Synthetic oligonucleotide

SEQ ID NO: 637471 - DNA, 55 bp, Artificial; identical to SEQ ID NO: 260208
  Synthetic oligonucleotide

SEQ ID NO: 637472 - DNA, 56 bp, Artificial; identical to SEQ ID NO: 256637
  Synthetic oligonucleotide

SEQ ID NO: 637473 - DNA, 60 bp, Artificial; identical to SEQ ID NO: 201138
  Synthetic oligonucleotide

SEQ ID NO: 637474 - DNA, 55 bp, Artificial; identical to SEQ ID NO: 198167
  Synthetic oligonucleotide

SEQ ID NO: 637475 - DNA, 54 bp, Artificial; identical to SEQ ID NO: 191172
  Synthetic oligonucleotide

SEQ ID NO: 637476 - DNA, 60 bp, Artificial; identical to SEQ ID NO: 265910
  Synthetic oligonucleotide

SEQ ID NO: 637477 - DNA, 54 bp, Artificial; identical to SEQ ID NO: 188014
  Synthetic oligonucleotide

SEQ ID NO: 637478 - DNA, 59 bp, Artificial; identical to SEQ ID NO: 207980
  Synthetic oligonucleotide

SEQ ID NO: 637479 - DNA, 55 bp, Artificial; identical to SEQ ID NO: 198166
  Synthetic oligonucleotide

SEQ ID NO: 637480 - DNA, 55 bp, Artificial; identical to SEQ ID NO: 189975
  Synthetic oligonucleotide

SEQ ID NO: 637481 - DNA, 55 bp, Artificial; identical to SEQ ID NO: 156353
  Synthetic oligonucleotide

SEQ ID NO: 637482 - DNA, 55 bp, Artificial; identical to SEQ ID NO: 252693
  Synthetic oligonucleotide

SEQ ID NO: 637483 - DNA, 57 bp, Artificial; identical to SEQ ID NO: 224294
  Synthetic oligonucleotide

SEQ ID NO: 637484 - DNA, 55 bp, Artificial; identical to SEQ ID NO: 181276
  Synthetic oligonucleotide

SEQ ID NO: 637485 - DNA, 55 bp, Artificial; identical to SEQ ID NO: 197274
  Synthetic oligonucleotide

SEQ ID NO: 637486 - DNA, 53 bp, Artificial; identical to SEQ ID NO: 194983
  Synthetic oligonucleotide

SEQ ID NO: 637487 - DNA, 55 bp, Artificial; identical to SEQ ID NO: 256717
  Synthetic oligonucleotide

SEQ ID NO: 637488 - DNA, 55 bp, Artificial; identical to SEQ ID NO: 198165
  Synthetic oligonucleotide

SEQ ID NO: 637489 - DNA, 55 bp, Artificial; identical to SEQ ID NO: 194595
  Synthetic oligonucleotide

SEQ ID NO: 637490 - DNA, 55 bp, Artificial; identical to SEQ ID NO: 256722
  Synthetic oligonucleotide

SEQ ID NO: 637491 - DNA, 52 bp, Artificial; identical to SEQ ID NO: 149614
  Synthetic oligonucleotide

SEQ ID NO: 637492 - DNA, 55 bp, Artificial; identical to SEQ ID NO: 194596
  Synthetic oligonucleotide

SEQ ID NO: 637493 - DNA, 58 bp, Artificial; identical to SEQ ID NO: 242234
  Synthetic oligonucleotide

SEQ ID NO: 637494 - DNA, 55 bp, Artificial; identical to SEQ ID NO: 237990
  Synthetic oligonucleotide

SEQ ID NO: 637495 - DNA, 55 bp, Artificial; identical to SEQ ID NO: 194597
  Synthetic oligonucleotide

SEQ ID NO: 637496 - DNA, 60 bp, Artificial; identical to SEQ ID NO: 237758
  Synthetic oligonucleotide

SEQ ID NO: 637497 - DNA, 55 bp, Artificial; identical to SEQ ID NO: 196247
  Synthetic oligonucleotide

SEQ ID NO: 637498 - DNA, 55 bp, Artificial; identical to SEQ ID NO: 256728
  Synthetic oligonucleotide

SEQ ID NO: 637499 - DNA, 55 bp, Artificial; identical to SEQ ID NO: 181274
  Synthetic oligonucleotide

SEQ ID NO: 637500 - DNA, 60 bp, Artificial; identical to SEQ ID NO: 247056
  Synthetic oligonucleotide

SEQ ID NO: 637501 - DNA, 54 bp, Artificial; identical to SEQ ID NO: 238595
  Synthetic oligonucleotide

SEQ ID NO: 637502 - DNA, 55 bp, Artificial; identical to SEQ ID NO: 256770
  Synthetic oligonucleotide

SEQ ID NO: 637503 - DNA, 55 bp, Artificial; identical to SEQ ID NO: 197276
  Synthetic oligonucleotide

SEQ ID NO: 637504 - DNA, 55 bp, Artificial; identical to SEQ ID NO: 156357
  Synthetic oligonucleotide

SEQ ID NO: 637505 - DNA, 53 bp, Artificial; identical to SEQ ID NO: 236476
  Synthetic oligonucleotide

SEQ ID NO: 637506 - DNA, 55 bp, Artificial; identical to SEQ ID NO: 181270
  Synthetic oligonucleotide

SEQ ID NO: 637507 - DNA, 55 bp, Artificial; identical to SEQ ID NO: 211074
  Synthetic oligonucleotide

SEQ ID NO: 637508 - DNA, 55 bp, Artificial; identical to SEQ ID NO: 249054
  Synthetic oligonucleotide

SEQ ID NO: 637509 - DNA, 55 bp, Artificial; identical to SEQ ID NO: 253046
  Synthetic oligonucleotide

SEQ ID NO: 637510 - DNA, 58 bp, Artificial; identical to SEQ ID NO: 224328
  Synthetic oligonucleotide

SEQ ID NO: 637511 - DNA, 57 bp, Artificial; identical to SEQ ID NO: 242178
  Synthetic oligonucleotide

SEQ ID NO: 637512 - DNA, 55 bp, Artificial; identical to SEQ ID NO: 201266
  Synthetic oligonucleotide

SEQ ID NO: 637513 - DNA, 55 bp, Artificial; identical to SEQ ID NO: 156360
  Synthetic oligonucleotide

SEQ ID NO: 637514 - DNA, 55 bp, Artificial; identical to SEQ ID NO: 256772
  Synthetic oligonucleotide

SEQ ID NO: 637515 - DNA, 55 bp, Artificial; identical to SEQ ID NO: 154142
  Synthetic oligonucleotide

SEQ ID NO: 637516 - DNA, 52 bp, Artificial; identical to SEQ ID NO: 216712
  Synthetic oligonucleotide

SEQ ID NO: 637517 - DNA, 55 bp, Artificial; identical to SEQ ID NO: 205568
  Synthetic oligonucleotide

SEQ ID NO: 637518 - DNA, 55 bp, Artificial; identical to SEQ ID NO: 256773
  Synthetic oligonucleotide

SEQ ID NO: 637519 - DNA, 60 bp, Artificial; identical to SEQ ID NO: 201126
  Synthetic oligonucleotide

SEQ ID NO: 637520 - DNA, 60 bp, Artificial; identical to SEQ ID NO: 252853
  Synthetic oligonucleotide

SEQ ID NO: 637521 - DNA, 52 bp, Artificial; identical to SEQ ID NO: 237051
  Synthetic oligonucleotide

SEQ ID NO: 637522 - DNA, 55 bp, Artificial; identical to SEQ ID NO: 249617
  Synthetic oligonucleotide

SEQ ID NO: 637523 - DNA, 55 bp, Artificial; identical to SEQ ID NO: 181267
  Synthetic oligonucleotide

SEQ ID NO: 637524 - DNA, 51 bp, Artificial; identical to SEQ ID NO: 157708
  Synthetic oligonucleotide

SEQ ID NO: 637525 - DNA, 55 bp, Artificial; identical to SEQ ID NO: 181265
  Synthetic oligonucleotide

SEQ ID NO: 637526 - DNA, 55 bp, Artificial; identical to SEQ ID NO: 256783
  Synthetic oligonucleotide

SEQ ID NO: 637527 - DNA, 55 bp, Artificial; identical to SEQ ID NO: 207128
  Synthetic oligonucleotide

SEQ ID NO: 637528 - DNA, 55 bp, Artificial; identical to SEQ ID NO: 156306
  Synthetic oligonucleotide

SEQ ID NO: 637529 - DNA, 51 bp, Artificial; identical to SEQ ID NO: 149892
  Synthetic oligonucleotide

SEQ ID NO: 637530 - DNA, 55 bp, Artificial; identical to SEQ ID NO: 147996
  Synthetic oligonucleotide

SEQ ID NO: 637531 - DNA, 55 bp, Artificial; identical to SEQ ID NO: 156308
  Synthetic oligonucleotide

SEQ ID NO: 637532 - DNA, 55 bp, Artificial; identical to SEQ ID NO: 144394
  Synthetic oligonucleotide

SEQ ID NO: 637533 - DNA, 55 bp, Artificial; identical to SEQ ID NO: 208187
  Synthetic oligonucleotide

SEQ ID NO: 637534 - DNA, 52 bp, Artificial; identical to SEQ ID NO: 186057
  Synthetic oligonucleotide

SEQ ID NO: 637535 - DNA, 53 bp, Artificial; identical to SEQ ID NO: 257053
  Synthetic oligonucleotide

SEQ ID NO: 637536 - DNA, 55 bp, Artificial; identical to SEQ ID NO: 189981
  Synthetic oligonucleotide

SEQ ID NO: 637537 - DNA, 55 bp, Artificial; identical to SEQ ID NO: 239895
  Synthetic oligonucleotide

SEQ ID NO: 637538 - DNA, 55 bp, Artificial; identical to SEQ ID NO: 193588
  Synthetic oligonucleotide

SEQ ID NO: 637539 - DNA, 55 bp, Artificial; identical to SEQ ID NO: 265691
  Synthetic oligonucleotide

SEQ ID NO: 637540 - DNA, 50 bp, Artificial; identical to SEQ ID NO: 246967
  Synthetic oligonucleotide

SEQ ID NO: 637541 - DNA, 53 bp, Artificial; identical to SEQ ID NO: 222703
  Synthetic oligonucleotide

SEQ ID NO: 637542 - DNA, 55 bp, Artificial; identical to SEQ ID NO: 207129
  Synthetic oligonucleotide

SEQ ID NO: 637543 - DNA, 55 bp, Artificial; identical to SEQ ID NO: 207130
  Synthetic oligonucleotide

SEQ ID NO: 637544 - DNA, 56 bp, Artificial; identical to SEQ ID NO: 150647
  Synthetic oligonucleotide

SEQ ID NO: 637545 - DNA, 52 bp, Artificial; identical to SEQ ID NO: 186052
  Synthetic oligonucleotide

SEQ ID NO: 637546 - DNA, 53 bp, Artificial; identical to SEQ ID NO: 170835
  Synthetic oligonucleotide

SEQ ID NO: 637547 - DNA, 55 bp, Artificial; identical to SEQ ID NO: 203246
  Synthetic oligonucleotide

SEQ ID NO: 637548 - DNA, 55 bp, Artificial; identical to SEQ ID NO: 142060
  Synthetic oligonucleotide

SEQ ID NO: 637549 - DNA, 55 bp, Artificial; identical to SEQ ID NO: 144393
  Synthetic oligonucleotide

SEQ ID NO: 637550 - DNA, 55 bp, Artificial; identical to SEQ ID NO: 220729
  Synthetic oligonucleotide

SEQ ID NO: 637551 - DNA, 53 bp, Artificial; identical to SEQ ID NO: 244231
  Synthetic oligonucleotide

SEQ ID NO: 637552 - DNA, 55 bp, Artificial; identical to SEQ ID NO: 217453
  Synthetic oligonucleotide

SEQ ID NO: 637553 - DNA, 55 bp, Artificial; identical to SEQ ID NO: 239894
  Synthetic oligonucleotide

SEQ ID NO: 637554 - DNA, 52 bp, Artificial; identical to SEQ ID NO: 186051
  Synthetic oligonucleotide

SEQ ID NO: 637555 - DNA, 55 bp, Artificial; identical to SEQ ID NO: 174745
  Synthetic oligonucleotide

SEQ ID NO: 637556 - DNA, 55 bp, Artificial; identical to SEQ ID NO: 142059
  Synthetic oligonucleotide

SEQ ID NO: 637557 - DNA, 55 bp, Artificial; identical to SEQ ID NO: 238083
  Synthetic oligonucleotide

SEQ ID NO: 637558 - DNA, 55 bp, Artificial; identical to SEQ ID NO: 194599
  Synthetic oligonucleotide

SEQ ID NO: 637559 - DNA, 55 bp, Artificial; identical to SEQ ID NO: 156313
  Synthetic oligonucleotide

SEQ ID NO: 637560 - DNA, 55 bp, Artificial; identical to SEQ ID NO: 181296
  Synthetic oligonucleotide

SEQ ID NO: 637561 - DNA, 55 bp, Artificial; identical to SEQ ID NO: 208167
  Synthetic oligonucleotide

SEQ ID NO: 637562 - DNA, 54 bp, Artificial; identical to SEQ ID NO: 218905
  Synthetic oligonucleotide

SEQ ID NO: 637563 - DNA, 55 bp, Artificial; identical to SEQ ID NO: 154143
  Synthetic oligonucleotide

SEQ ID NO: 637564 - DNA, 55 bp, Artificial; identical to SEQ ID NO: 169905
  Synthetic oligonucleotide

SEQ ID NO: 637565 - DNA, 55 bp, Artificial; identical to SEQ ID NO: 142057
  Synthetic oligonucleotide

SEQ ID NO: 637566 - DNA, 55 bp, Artificial; identical to SEQ ID NO: 193586
  Synthetic oligonucleotide

SEQ ID NO: 637567 - DNA, 55 bp, Artificial; identical to SEQ ID NO: 181294
  Synthetic oligonucleotide

SEQ ID NO: 637568 - DNA, 58 bp, Artificial; identical to SEQ ID NO: 247494
  Synthetic oligonucleotide

SEQ ID NO: 637569 - DNA, 55 bp, Artificial; identical to SEQ ID NO: 205571
  Synthetic oligonucleotide

SEQ ID NO: 637570 - DNA, 55 bp, Artificial; identical to SEQ ID NO: 265757
  Synthetic oligonucleotide

SEQ ID NO: 637571 - DNA, 51 bp, Artificial; identical to SEQ ID NO: 169391
  Synthetic oligonucleotide

SEQ ID NO: 637572 - DNA, 55 bp, Artificial; identical to SEQ ID NO: 187568
  Synthetic oligonucleotide

SEQ ID NO: 637573 - DNA, 55 bp, Artificial; identical to SEQ ID NO: 201267
  Synthetic oligonucleotide

SEQ ID NO: 637574 - DNA, 55 bp, Artificial; identical to SEQ ID NO: 153279
  Synthetic oligonucleotide

SEQ ID NO: 637575 - DNA, 55 bp, Artificial; identical to SEQ ID NO: 181291
  Synthetic oligonucleotide

SEQ ID NO: 637576 - DNA, 55 bp, Artificial; identical to SEQ ID NO: 181290
  Synthetic oligonucleotide

SEQ ID NO: 637577 - DNA, 51 bp, Artificial; identical to SEQ ID NO: 144714
  Synthetic oligonucleotide

SEQ ID NO: 637578 - DNA, 55 bp, Artificial; identical to SEQ ID NO: 160783
  Synthetic oligonucleotide

SEQ ID NO: 637579 - DNA, 55 bp, Artificial; identical to SEQ ID NO: 177494
  Synthetic oligonucleotide

SEQ ID NO: 637580 - DNA, 55 bp, Artificial; identical to SEQ ID NO: 160762
  Synthetic oligonucleotide

SEQ ID NO: 637581 - DNA, 55 bp, Artificial; identical to SEQ ID NO: 154145
  Synthetic oligonucleotide

SEQ ID NO: 637582 - DNA, 54 bp, Artificial; identical to SEQ ID NO: 211030
  Synthetic oligonucleotide

SEQ ID NO: 637583 - DNA, 55 bp, Artificial; identical to SEQ ID NO: 217454
  Synthetic oligonucleotide

SEQ ID NO: 637584 - DNA, 55 bp, Artificial; identical to SEQ ID NO: 257755
  Synthetic oligonucleotide

SEQ ID NO: 637585 - DNA, 60 bp, Artificial; identical to SEQ ID NO: 177472
  Synthetic oligonucleotide

SEQ ID NO: 637586 - DNA, 55 bp, Artificial; identical to SEQ ID NO: 181288
  Synthetic oligonucleotide

SEQ ID NO: 637587 - DNA, 55 bp, Artificial; identical to SEQ ID NO: 211031
  Synthetic oligonucleotide

SEQ ID NO: 637588 - DNA, 55 bp, Artificial; identical to SEQ ID NO: 244147
  Synthetic oligonucleotide

SEQ ID NO: 637589 - DNA, 51 bp, Artificial; identical to SEQ ID NO: 237223
  Synthetic oligonucleotide

SEQ ID NO: 637590 - DNA, 54 bp, Artificial; identical to SEQ ID NO: 246160
  Synthetic oligonucleotide

SEQ ID NO: 637591 - DNA, 55 bp, Artificial; identical to SEQ ID NO: 253802
  Synthetic oligonucleotide

SEQ ID NO: 637592 - DNA, 55 bp, Artificial; identical to SEQ ID NO: 142677
  Synthetic oligonucleotide

SEQ ID NO: 637593 - DNA, 54 bp, Artificial; identical to SEQ ID NO: 142666
  Synthetic oligonucleotide

SEQ ID NO: 637594 - DNA, 60 bp, Artificial; identical to SEQ ID NO: 190387
  Synthetic oligonucleotide

SEQ ID NO: 637595 - DNA, 55 bp, Artificial; identical to SEQ ID NO: 144741
  Synthetic oligonucleotide

SEQ ID NO: 637596 - DNA, 52 bp, Artificial; identical to SEQ ID NO: 240003
  Synthetic oligonucleotide

SEQ ID NO: 637597 - DNA, 53 bp, Artificial; identical to SEQ ID NO: 185652
  Synthetic oligonucleotide

SEQ ID NO: 637598 - DNA, 55 bp, Artificial; identical to SEQ ID NO: 257756
  Synthetic oligonucleotide

SEQ ID NO: 637599 - DNA, 54 bp, Artificial; identical to SEQ ID NO: 212917
  Synthetic oligonucleotide

SEQ ID NO: 637600 - DNA, 55 bp, Artificial; identical to SEQ ID NO: 221579
  Synthetic oligonucleotide

SEQ ID NO: 637601 - DNA, 55 bp, Artificial; identical to SEQ ID NO: 256763
  Synthetic oligonucleotide

SEQ ID NO: 637602 - DNA, 55 bp, Artificial; identical to SEQ ID NO: 256765
  Synthetic oligonucleotide

SEQ ID NO: 637603 - DNA, 59 bp, Artificial; identical to SEQ ID NO: 152922
  Synthetic oligonucleotide

SEQ ID NO: 637604 - DNA, 50 bp, Artificial; identical to SEQ ID NO: 154146
  Synthetic oligonucleotide

SEQ ID NO: 637605 - DNA, 50 bp, Artificial; identical to SEQ ID NO: 203046
  Synthetic oligonucleotide

SEQ ID NO: 637606 - DNA, 55 bp, Artificial; identical to SEQ ID NO: 256767
  Synthetic oligonucleotide

SEQ ID NO: 637607 - DNA, 56 bp, Artificial; identical to SEQ ID NO: 141995
  Synthetic oligonucleotide

SEQ ID NO: 637608 - DNA, 55 bp, Artificial; identical to SEQ ID NO: 194600
  Synthetic oligonucleotide

SEQ ID NO: 637609 - DNA, 55 bp, Artificial; identical to SEQ ID NO: 181062
  Synthetic oligonucleotide

SEQ ID NO: 637610 - DNA, 51 bp, Artificial; identical to SEQ ID NO: 169057
  Synthetic oligonucleotide

SEQ ID NO: 637611 - DNA, 55 bp, Artificial; identical to SEQ ID NO: 211032
  Synthetic oligonucleotide

SEQ ID NO: 637612 - DNA, 55 bp, Artificial; identical to SEQ ID NO: 181061
  Synthetic oligonucleotide

SEQ ID NO: 637613 - DNA, 59 bp, Artificial; identical to SEQ ID NO: 168844
  Synthetic oligonucleotide

SEQ ID NO: 637614 - DNA, 55 bp, Artificial; identical to SEQ ID NO: 189989
  Synthetic oligonucleotide

SEQ ID NO: 637615 - DNA, 55 bp, Artificial; identical to SEQ ID NO: 171769
  Synthetic oligonucleotide

SEQ ID NO: 637616 - DNA, 60 bp, Artificial; identical to SEQ ID NO: 207510
  Synthetic oligonucleotide

SEQ ID NO: 637617 - DNA, 51 bp, Artificial; identical to SEQ ID NO: 189651
  Synthetic oligonucleotide

SEQ ID NO: 637618 - DNA, 55 bp, Artificial; identical to SEQ ID NO: 203545
  Synthetic oligonucleotide

SEQ ID NO: 637619 - DNA, 55 bp, Artificial; identical to SEQ ID NO: 238116
  Synthetic oligonucleotide

SEQ ID NO: 637620 - DNA, 55 bp, Artificial; identical to SEQ ID NO: 266224
  Synthetic oligonucleotide

SEQ ID NO: 637621 - DNA, 55 bp, Artificial; identical to SEQ ID NO: 208230
  Synthetic oligonucleotide

SEQ ID NO: 637622 - DNA, 55 bp, Artificial; identical to SEQ ID NO: 253047
  Synthetic oligonucleotide

SEQ ID NO: 637623 - DNA, 55 bp, Artificial; identical to SEQ ID NO: 168639
  Synthetic oligonucleotide

SEQ ID NO: 637624 - DNA, 55 bp, Artificial; identical to SEQ ID NO: 203544
  Synthetic oligonucleotide

SEQ ID NO: 637625 - DNA, 55 bp, Artificial; identical to SEQ ID NO: 188671
  Synthetic oligonucleotide

SEQ ID NO: 637626 - DNA, 55 bp, Artificial; identical to SEQ ID NO: 155279
  Synthetic oligonucleotide

SEQ ID NO: 637627 - DNA, 55 bp, Artificial; identical to SEQ ID NO: 208236
  Synthetic oligonucleotide

SEQ ID NO: 637628 - DNA, 55 bp, Artificial; identical to SEQ ID NO: 205526
  Synthetic oligonucleotide

SEQ ID NO: 637629 - DNA, 55 bp, Artificial; identical to SEQ ID NO: 156318
  Synthetic oligonucleotide

SEQ ID NO: 637630 - DNA, 54 bp, Artificial; identical to SEQ ID NO: 144964
  Synthetic oligonucleotide

SEQ ID NO: 637631 - DNA, 55 bp, Artificial; identical to SEQ ID NO: 212738
  Synthetic oligonucleotide

SEQ ID NO: 637632 - DNA, 55 bp, Artificial; identical to SEQ ID NO: 142049
  Synthetic oligonucleotide

SEQ ID NO: 637633 - DNA, 55 bp, Artificial; identical to SEQ ID NO: 252696
  Synthetic oligonucleotide

SEQ ID NO: 637634 - DNA, 58 bp, Artificial; identical to SEQ ID NO: 177439
  Synthetic oligonucleotide

SEQ ID NO: 637635 - DNA, 55 bp, Artificial; identical to SEQ ID NO: 249057
  Synthetic oligonucleotide

SEQ ID NO: 637636 - DNA, 55 bp, Artificial; identical to SEQ ID NO: 181056
  Synthetic oligonucleotide

SEQ ID NO: 637637 - DNA, 55 bp, Artificial; identical to SEQ ID NO: 153285
  Synthetic oligonucleotide

SEQ ID NO: 637638 - DNA, 55 bp, Artificial; identical to SEQ ID NO: 253048
  Synthetic oligonucleotide

SEQ ID NO: 637639 - DNA, 55 bp, Artificial; identical to SEQ ID NO: 156319
  Synthetic oligonucleotide

SEQ ID NO: 637640 - DNA, 60 bp, Artificial; identical to SEQ ID NO: 248786
  Synthetic oligonucleotide

SEQ ID NO: 637641 - DNA, 55 bp, Artificial; identical to SEQ ID NO: 156322
  Synthetic oligonucleotide

SEQ ID NO: 637642 - DNA, 57 bp, Artificial; identical to SEQ ID NO: 179530
  Synthetic oligonucleotide

SEQ ID NO: 637643 - DNA, 53 bp, Artificial; identical to SEQ ID NO: 195030
  Synthetic oligonucleotide

SEQ ID NO: 637644 - DNA, 55 bp, Artificial; identical to SEQ ID NO: 244148
  Synthetic oligonucleotide

SEQ ID NO: 637645 - DNA, 55 bp, Artificial; identical to SEQ ID NO: 181052
  Synthetic oligonucleotide

SEQ ID NO: 637646 - DNA, 55 bp, Artificial; identical to SEQ ID NO: 197280
  Synthetic oligonucleotide

SEQ ID NO: 637647 - DNA, 51 bp, Artificial; identical to SEQ ID NO: 259539
  Synthetic oligonucleotide

SEQ ID NO: 637648 - DNA, 55 bp, Artificial; identical to SEQ ID NO: 181050
  Synthetic oligonucleotide

SEQ ID NO: 637649 - DNA, 53 bp, Artificial; identical to SEQ ID NO: 157370
  Synthetic oligonucleotide

SEQ ID NO: 637650 - DNA, 57 bp, Artificial; identical to SEQ ID NO: 164401
  Synthetic oligonucleotide

SEQ ID NO: 637651 - DNA, 55 bp, Artificial; identical to SEQ ID NO: 209282
  Synthetic oligonucleotide

SEQ ID NO: 637652 - DNA, 55 bp, Artificial; identical to SEQ ID NO: 181046
  Synthetic oligonucleotide

SEQ ID NO: 637653 - DNA, 55 bp, Artificial; identical to SEQ ID NO: 143744
  Synthetic oligonucleotide

SEQ ID NO: 637654 - DNA, 54 bp, Artificial; identical to SEQ ID NO: 221667
  Synthetic oligonucleotide

SEQ ID NO: 637655 - DNA, 60 bp, Artificial; identical to SEQ ID NO: 242182
  Synthetic oligonucleotide

SEQ ID NO: 637656 - DNA, 55 bp, Artificial; identical to SEQ ID NO: 257760
  Synthetic oligonucleotide

SEQ ID NO: 637657 - DNA, 52 bp, Artificial; identical to SEQ ID NO: 168976
  Synthetic oligonucleotide

SEQ ID NO: 637658 - DNA, 55 bp, Artificial; identical to SEQ ID NO: 181088
  Synthetic oligonucleotide

SEQ ID NO: 637659 - DNA, 55 bp, Artificial; identical to SEQ ID NO: 188780
  Synthetic oligonucleotide

SEQ ID NO: 637660 - DNA, 55 bp, Artificial; identical to SEQ ID NO: 168641
  Synthetic oligonucleotide

SEQ ID NO: 637661 - DNA, 60 bp, Artificial; identical to SEQ ID NO: 153798
  Synthetic oligonucleotide

SEQ ID NO: 637662 - DNA, 55 bp, Artificial; identical to SEQ ID NO: 156324
  Synthetic oligonucleotide

SEQ ID NO: 637663 - DNA, 55 bp, Artificial; identical to SEQ ID NO: 181086
  Synthetic oligonucleotide

SEQ ID NO: 637664 - DNA, 55 bp, Artificial; identical to SEQ ID NO: 217456
  Synthetic oligonucleotide

SEQ ID NO: 637665 - DNA, 55 bp, Artificial; identical to SEQ ID NO: 156326
  Synthetic oligonucleotide

SEQ ID NO: 637666 - DNA, 55 bp, Artificial; identical to SEQ ID NO: 156327
  Synthetic oligonucleotide

SEQ ID NO: 637667 - DNA, 51 bp, Artificial; identical to SEQ ID NO: 170236
  Synthetic oligonucleotide

SEQ ID NO: 637668 - DNA, 55 bp, Artificial; identical to SEQ ID NO: 208219
  Synthetic oligonucleotide

SEQ ID NO: 637669 - DNA, 58 bp, Artificial; identical to SEQ ID NO: 239312
  Synthetic oligonucleotide

SEQ ID NO: 637670 - DNA, 52 bp, Artificial; identical to SEQ ID NO: 213000
  Synthetic oligonucleotide

SEQ ID NO: 637671 - DNA, 55 bp, Artificial; identical to SEQ ID NO: 156329
  Synthetic oligonucleotide

SEQ ID NO: 637672 - DNA, 57 bp, Artificial; identical to SEQ ID NO: 190908
  Synthetic oligonucleotide

SEQ ID NO: 637673 - DNA, 55 bp, Artificial; identical to SEQ ID NO: 181084
  Synthetic oligonucleotide

SEQ ID NO: 637674 - DNA, 55 bp, Artificial; identical to SEQ ID NO: 256690
  Synthetic oligonucleotide

SEQ ID NO: 637675 - DNA, 55 bp, Artificial; identical to SEQ ID NO: 238113
  Synthetic oligonucleotide

SEQ ID NO: 637676 - DNA, 55 bp, Artificial; identical to SEQ ID NO: 249059
  Synthetic oligonucleotide

SEQ ID NO: 637677 - DNA, 54 bp, Artificial; identical to SEQ ID NO: 179920
  Synthetic oligonucleotide

SEQ ID NO: 637678 - DNA, 55 bp, Artificial; identical to SEQ ID NO: 203542
  Synthetic oligonucleotide

SEQ ID NO: 637679 - DNA, 55 bp, Artificial; identical to SEQ ID NO: 143741
  Synthetic oligonucleotide

SEQ ID NO: 637680 - DNA, 55 bp, Artificial; identical to SEQ ID NO: 208115
  Synthetic oligonucleotide

SEQ ID NO: 637681 - DNA, 55 bp, Artificial; identical to SEQ ID NO: 168642
  Synthetic oligonucleotide

SEQ ID NO: 637682 - DNA, 55 bp, Artificial; identical to SEQ ID NO: 164008
  Synthetic oligonucleotide

SEQ ID NO: 637683 - DNA, 55 bp, Artificial; identical to SEQ ID NO: 256700
  Synthetic oligonucleotide

SEQ ID NO: 637684 - DNA, 55 bp, Artificial; identical to SEQ ID NO: 181080
  Synthetic oligonucleotide

SEQ ID NO: 637685 - DNA, 55 bp, Artificial; identical to SEQ ID NO: 156330
  Synthetic oligonucleotide

SEQ ID NO: 637686 - DNA, 56 bp, Artificial; identical to SEQ ID NO: 179514
  Synthetic oligonucleotide

SEQ ID NO: 637687 - DNA, 59 bp, Artificial; identical to SEQ ID NO: 194548
  Synthetic oligonucleotide

SEQ ID NO: 637688 - DNA, 55 bp, Artificial; identical to SEQ ID NO: 253050
  Synthetic oligonucleotide

SEQ ID NO: 637689 - DNA, 55 bp, Artificial; identical to SEQ ID NO: 181078
  Synthetic oligonucleotide

SEQ ID NO: 637690 - DNA, 55 bp, Artificial; identical to SEQ ID NO: 221569
  Synthetic oligonucleotide

SEQ ID NO: 637691 - DNA, 55 bp, Artificial; identical to SEQ ID NO: 203541
  Synthetic oligonucleotide

SEQ ID NO: 637692 - DNA, 55 bp, Artificial; identical to SEQ ID NO: 164007
  Synthetic oligonucleotide

SEQ ID NO: 637693 - DNA, 55 bp, Artificial; identical to SEQ ID NO: 256684
  Synthetic oligonucleotide

SEQ ID NO: 637694 - DNA, 55 bp, Artificial; identical to SEQ ID NO: 198154
  Synthetic oligonucleotide

SEQ ID NO: 637695 - DNA, 55 bp, Artificial; identical to SEQ ID NO: 168643
  Synthetic oligonucleotide

SEQ ID NO: 637696 - DNA, 58 bp, Artificial; identical to SEQ ID NO: 168855
  Synthetic oligonucleotide

SEQ ID NO: 637697 - DNA, 55 bp, Artificial; identical to SEQ ID NO: 202763
  Synthetic oligonucleotide

SEQ ID NO: 637698 - DNA, 55 bp, Artificial; identical to SEQ ID NO: 164006
  Synthetic oligonucleotide

SEQ ID NO: 637699 - DNA, 54 bp, Artificial; identical to SEQ ID NO: 246114
  Synthetic oligonucleotide

SEQ ID NO: 637700 - DNA, 55 bp, Artificial; identical to SEQ ID NO: 144780
  Synthetic oligonucleotide

SEQ ID NO: 637701 - DNA, 52 bp, Artificial; identical to SEQ ID NO: 237761
  Synthetic oligonucleotide

SEQ ID NO: 637702 - DNA, 50 bp, Artificial; identical to SEQ ID NO: 246959
  Synthetic oligonucleotide

SEQ ID NO: 637703 - DNA, 55 bp, Artificial; identical to SEQ ID NO: 181073
  Synthetic oligonucleotide

SEQ ID NO: 637704 - DNA, 55 bp, Artificial; identical to SEQ ID NO: 261814
  Synthetic oligonucleotide

SEQ ID NO: 637705 - DNA, 55 bp, Artificial; identical to SEQ ID NO: 181072
  Synthetic oligonucleotide

SEQ ID NO: 637706 - DNA, 55 bp, Artificial; identical to SEQ ID NO: 203540
  Synthetic oligonucleotide

SEQ ID NO: 637707 - DNA, 55 bp, Artificial; identical to SEQ ID NO: 155278
  Synthetic oligonucleotide

SEQ ID NO: 637708 - DNA, 55 bp, Artificial; identical to SEQ ID NO: 233370
  Synthetic oligonucleotide

SEQ ID NO: 637709 - DNA, 55 bp, Artificial; identical to SEQ ID NO: 181070
  Synthetic oligonucleotide

SEQ ID NO: 637710 - DNA, 55 bp, Artificial; identical to SEQ ID NO: 148003
  Synthetic oligonucleotide

SEQ ID NO: 637711 - DNA, 55 bp, Artificial; identical to SEQ ID NO: 148005
  Synthetic oligonucleotide

SEQ ID NO: 637712 - DNA, 55 bp, Artificial; identical to SEQ ID NO: 156168
  Synthetic oligonucleotide

SEQ ID NO: 637713 - DNA, 55 bp, Artificial; identical to SEQ ID NO: 181069
  Synthetic oligonucleotide

SEQ ID NO: 637714 - DNA, 55 bp, Artificial; identical to SEQ ID NO: 156169
  Synthetic oligonucleotide

SEQ ID NO: 637715 - DNA, 54 bp, Artificial; identical to SEQ ID NO: 181068
  Synthetic oligonucleotide

SEQ ID NO: 637716 - DNA, 55 bp, Artificial; identical to SEQ ID NO: 188688
  Synthetic oligonucleotide

SEQ ID NO: 637717 - DNA, 55 bp, Artificial; identical to SEQ ID NO: 156171
  Synthetic oligonucleotide

SEQ ID NO: 637718 - DNA, 55 bp, Artificial; identical to SEQ ID NO: 181067
  Synthetic oligonucleotide

SEQ ID NO: 637719 - DNA, 55 bp, Artificial; identical to SEQ ID NO: 221565
  Synthetic oligonucleotide

SEQ ID NO: 637720 - DNA, 55 bp, Artificial; identical to SEQ ID NO: 171636
  Synthetic oligonucleotide

SEQ ID NO: 637721 - DNA, 55 bp, Artificial; identical to SEQ ID NO: 247718
  Synthetic oligonucleotide

SEQ ID NO: 637722 - DNA, 59 bp, Artificial; identical to SEQ ID NO: 194504
  Synthetic oligonucleotide

SEQ ID NO: 637723 - DNA, 50 bp, Artificial; identical to SEQ ID NO: 160665
  Synthetic oligonucleotide

SEQ ID NO: 637724 - DNA, 56 bp, Artificial; identical to SEQ ID NO: 144332
  Synthetic oligonucleotide

SEQ ID NO: 637725 - DNA, 50 bp, Artificial; identical to SEQ ID NO: 193907
  Synthetic oligonucleotide

SEQ ID NO: 637726 - DNA, 53 bp, Artificial; identical to SEQ ID NO: 266225
  Synthetic oligonucleotide

SEQ ID NO: 637727 - DNA, 54 bp, Artificial; identical to SEQ ID NO: 201104
  Synthetic oligonucleotide

SEQ ID NO: 637728 - DNA, 55 bp, Artificial; identical to SEQ ID NO: 181022
  Synthetic oligonucleotide

SEQ ID NO: 637729 - DNA, 55 bp, Artificial; identical to SEQ ID NO: 253051
  Synthetic oligonucleotide

SEQ ID NO: 637730 - DNA, 55 bp, Artificial; identical to SEQ ID NO: 211037
  Synthetic oligonucleotide

SEQ ID NO: 637731 - DNA, 60 bp, Artificial; identical to SEQ ID NO: 155943
  Synthetic oligonucleotide

SEQ ID NO: 637732 - DNA, 55 bp, Artificial; identical to SEQ ID NO: 156172
  Synthetic oligonucleotide

SEQ ID NO: 637733 - DNA, 52 bp, Artificial; identical to SEQ ID NO: 170118
  Synthetic oligonucleotide

SEQ ID NO: 637734 - DNA, 55 bp, Artificial; identical to SEQ ID NO: 203562
  Synthetic oligonucleotide

SEQ ID NO: 637735 - DNA, 55 bp, Artificial; identical to SEQ ID NO: 244359
  Synthetic oligonucleotide

SEQ ID NO: 637736 - DNA, 55 bp, Artificial; identical to SEQ ID NO: 156173
  Synthetic oligonucleotide

SEQ ID NO: 637737 - DNA, 55 bp, Artificial; identical to SEQ ID NO: 151517
  Synthetic oligonucleotide

SEQ ID NO: 637738 - DNA, 55 bp, Artificial; identical to SEQ ID NO: 156174
  Synthetic oligonucleotide

SEQ ID NO: 637739 - DNA, 54 bp, Artificial; identical to SEQ ID NO: 190632
  Synthetic oligonucleotide

SEQ ID NO: 637740 - DNA, 55 bp, Artificial; identical to SEQ ID NO: 201098
  Synthetic oligonucleotide

SEQ ID NO: 637741 - DNA, 55 bp, Artificial; identical to SEQ ID NO: 198151
  Synthetic oligonucleotide

SEQ ID NO: 637742 - DNA, 55 bp, Artificial; identical to SEQ ID NO: 161990
  Synthetic oligonucleotide

SEQ ID NO: 637743 - DNA, 55 bp, Artificial; identical to SEQ ID NO: 211038
  Synthetic oligonucleotide

SEQ ID NO: 637744 - DNA, 55 bp, Artificial; identical to SEQ ID NO: 171629
  Synthetic oligonucleotide

SEQ ID NO: 637745 - DNA, 55 bp, Artificial; identical to SEQ ID NO: 220732
  Synthetic oligonucleotide

SEQ ID NO: 637746 - DNA, 60 bp, Artificial; identical to SEQ ID NO: 161153
  Synthetic oligonucleotide

SEQ ID NO: 637747 - DNA, 55 bp, Artificial; identical to SEQ ID NO: 191293
  Synthetic oligonucleotide

SEQ ID NO: 637748 - DNA, 54 bp, Artificial; identical to SEQ ID NO: 172789
  Synthetic oligonucleotide

SEQ ID NO: 637749 - DNA, 55 bp, Artificial; identical to SEQ ID NO: 164060
  Synthetic oligonucleotide

SEQ ID NO: 637750 - DNA, 60 bp, Artificial; identical to SEQ ID NO: 183526
  Synthetic oligonucleotide

SEQ ID NO: 637751 - DNA, 55 bp, Artificial; identical to SEQ ID NO: 257803
  Synthetic oligonucleotide

SEQ ID NO: 637752 - DNA, 55 bp, Artificial; identical to SEQ ID NO: 217269
  Synthetic oligonucleotide

SEQ ID NO: 637753 - DNA, 55 bp, Artificial; identical to SEQ ID NO: 181019
  Synthetic oligonucleotide

SEQ ID NO: 637754 - DNA, 55 bp, Artificial; identical to SEQ ID NO: 266226
  Synthetic oligonucleotide

SEQ ID NO: 637755 - DNA, 55 bp, Artificial; identical to SEQ ID NO: 254269
  Synthetic oligonucleotide

SEQ ID NO: 637756 - DNA, 51 bp, Artificial; identical to SEQ ID NO: 237219
  Synthetic oligonucleotide

SEQ ID NO: 637757 - DNA, 55 bp, Artificial; identical to SEQ ID NO: 153286
  Synthetic oligonucleotide

SEQ ID NO: 637758 - DNA, 52 bp, Artificial; identical to SEQ ID NO: 160529
  Synthetic oligonucleotide

SEQ ID NO: 637759 - DNA, 55 bp, Artificial; identical to SEQ ID NO: 194604
  Synthetic oligonucleotide

SEQ ID NO: 637760 - DNA, 55 bp, Artificial; identical to SEQ ID NO: 151518
  Synthetic oligonucleotide

SEQ ID NO: 637761 - DNA, 55 bp, Artificial; identical to SEQ ID NO: 181018
  Synthetic oligonucleotide

SEQ ID NO: 637762 - DNA, 55 bp, Artificial; identical to SEQ ID NO: 211040
  Synthetic oligonucleotide

SEQ ID NO: 637763 - DNA, 55 bp, Artificial; identical to SEQ ID NO: 249060
  Synthetic oligonucleotide

SEQ ID NO: 637764 - DNA, 55 bp, Artificial; identical to SEQ ID NO: 254270
  Synthetic oligonucleotide

SEQ ID NO: 637765 - DNA, 58 bp, Artificial; identical to SEQ ID NO: 207477
  Synthetic oligonucleotide

SEQ ID NO: 637766 - DNA, 55 bp, Artificial; identical to SEQ ID NO: 198149
  Synthetic oligonucleotide

SEQ ID NO: 637767 - DNA, 60 bp, Artificial; identical to SEQ ID NO: 222840
  Synthetic oligonucleotide

SEQ ID NO: 637768 - DNA, 55 bp, Artificial; identical to SEQ ID NO: 244156
  Synthetic oligonucleotide

SEQ ID NO: 637769 - DNA, 55 bp, Artificial; identical to SEQ ID NO: 189369
  Synthetic oligonucleotide

SEQ ID NO: 637770 - DNA, 59 bp, Artificial; identical to SEQ ID NO: 233944
  Synthetic oligonucleotide

SEQ ID NO: 637771 - DNA, 59 bp, Artificial; identical to SEQ ID NO: 222673
  Synthetic oligonucleotide

SEQ ID NO: 637772 - DNA, 55 bp, Artificial; identical to SEQ ID NO: 168468
  Synthetic oligonucleotide

SEQ ID NO: 637773 - DNA, 50 bp, Artificial; identical to SEQ ID NO: 187142
  Synthetic oligonucleotide

SEQ ID NO: 637774 - DNA, 55 bp, Artificial; identical to SEQ ID NO: 151519
  Synthetic oligonucleotide

SEQ ID NO: 637775 - DNA, 55 bp, Artificial; identical to SEQ ID NO: 195202
  Synthetic oligonucleotide

SEQ ID NO: 637776 - DNA, 55 bp, Artificial; identical to SEQ ID NO: 208106
  Synthetic oligonucleotide

SEQ ID NO: 637777 - DNA, 55 bp, Artificial; identical to SEQ ID NO: 238106
  Synthetic oligonucleotide

SEQ ID NO: 637778 - DNA, 56 bp, Artificial; identical to SEQ ID NO: 144355
  Synthetic oligonucleotide

SEQ ID NO: 637779 - DNA, 55 bp, Artificial; identical to SEQ ID NO: 244365
  Synthetic oligonucleotide

SEQ ID NO: 637780 - DNA, 60 bp, Artificial; identical to SEQ ID NO: 207444
  Synthetic oligonucleotide

SEQ ID NO: 637781 - DNA, 55 bp, Artificial; identical to SEQ ID NO: 148008
  Synthetic oligonucleotide

SEQ ID NO: 637782 - DNA, 55 bp, Artificial; identical to SEQ ID NO: 181015
  Synthetic oligonucleotide

SEQ ID NO: 637783 - DNA, 55 bp, Artificial; identical to SEQ ID NO: 254272
  Synthetic oligonucleotide

SEQ ID NO: 637784 - DNA, 51 bp, Artificial; identical to SEQ ID NO: 248001
  Synthetic oligonucleotide

SEQ ID NO: 637785 - DNA, 51 bp, Artificial; identical to SEQ ID NO: 186440
  Synthetic oligonucleotide

SEQ ID NO: 637786 - DNA, 55 bp, Artificial; identical to SEQ ID NO: 156182
  Synthetic oligonucleotide

SEQ ID NO: 637787 - DNA, 55 bp, Artificial; identical to SEQ ID NO: 198209
  Synthetic oligonucleotide

SEQ ID NO: 637788 - DNA, 55 bp, Artificial; identical to SEQ ID NO: 164062
  Synthetic oligonucleotide

SEQ ID NO: 637789 - DNA, 55 bp, Artificial; identical to SEQ ID NO: 144778
  Synthetic oligonucleotide

SEQ ID NO: 637790 - DNA, 55 bp, Artificial; identical to SEQ ID NO: 211045
  Synthetic oligonucleotide

SEQ ID NO: 637791 - DNA, 53 bp, Artificial; identical to SEQ ID NO: 197284
  Synthetic oligonucleotide

SEQ ID NO: 637792 - DNA, 52 bp, Artificial; identical to SEQ ID NO: 221742
  Synthetic oligonucleotide

SEQ ID NO: 637793 - DNA, 52 bp, Artificial; identical to SEQ ID NO: 186156
  Synthetic oligonucleotide

SEQ ID NO: 637794 - DNA, 55 bp, Artificial; identical to SEQ ID NO: 156183
  Synthetic oligonucleotide

SEQ ID NO: 637795 - DNA, 55 bp, Artificial; identical to SEQ ID NO: 224648
  Synthetic oligonucleotide

SEQ ID NO: 637796 - DNA, 55 bp, Artificial; identical to SEQ ID NO: 174699
  Synthetic oligonucleotide

SEQ ID NO: 637797 - DNA, 54 bp, Artificial; identical to SEQ ID NO: 181008
  Synthetic oligonucleotide

SEQ ID NO: 637798 - DNA, 53 bp, Artificial; identical to SEQ ID NO: 148009
  Synthetic oligonucleotide

SEQ ID NO: 637799 - DNA, 55 bp, Artificial; identical to SEQ ID NO: 238099
  Synthetic oligonucleotide

SEQ ID NO: 637800 - DNA, 55 bp, Artificial; identical to SEQ ID NO: 181007
  Synthetic oligonucleotide

SEQ ID NO: 637801 - DNA, 55 bp, Artificial; identical to SEQ ID NO: 203571
  Synthetic oligonucleotide

SEQ ID NO: 637802 - DNA, 59 bp, Artificial; identical to SEQ ID NO: 203364
  Synthetic oligonucleotide

SEQ ID NO: 637803 - DNA, 54 bp, Artificial; identical to SEQ ID NO: 253008
  Synthetic oligonucleotide

SEQ ID NO: 637804 - DNA, 55 bp, Artificial; identical to SEQ ID NO: 167373
  Synthetic oligonucleotide

SEQ ID NO: 637805 - DNA, 52 bp, Artificial; identical to SEQ ID NO: 161326
  Synthetic oligonucleotide

SEQ ID NO: 637806 - DNA, 55 bp, Artificial; identical to SEQ ID NO: 164063
  Synthetic oligonucleotide

SEQ ID NO: 637807 - DNA, 55 bp, Artificial; identical to SEQ ID NO: 171627
  Synthetic oligonucleotide

SEQ ID NO: 637808 - DNA, 55 bp, Artificial; identical to SEQ ID NO: 183493
  Synthetic oligonucleotide

SEQ ID NO: 637809 - DNA, 51 bp, Artificial; identical to SEQ ID NO: 157727
  Synthetic oligonucleotide

SEQ ID NO: 637810 - DNA, 53 bp, Artificial; identical to SEQ ID NO: 185694
  Synthetic oligonucleotide

SEQ ID NO: 637811 - DNA, 55 bp, Artificial; identical to SEQ ID NO: 181002
  Synthetic oligonucleotide

SEQ ID NO: 637812 - DNA, 56 bp, Artificial; identical to SEQ ID NO: 248797
  Synthetic oligonucleotide

SEQ ID NO: 637813 - DNA, 60 bp, Artificial; identical to SEQ ID NO: 170823
  Synthetic oligonucleotide

SEQ ID NO: 637814 - DNA, 55 bp, Artificial; identical to SEQ ID NO: 181001
  Synthetic oligonucleotide

SEQ ID NO: 637815 - DNA, 55 bp, Artificial; identical to SEQ ID NO: 257804
  Synthetic oligonucleotide

SEQ ID NO: 637816 - DNA, 55 bp, Artificial; identical to SEQ ID NO: 217337
  Synthetic oligonucleotide

SEQ ID NO: 637817 - DNA, 55 bp, Artificial; identical to SEQ ID NO: 218272
  Synthetic oligonucleotide

SEQ ID NO: 637818 - DNA, 53 bp, Artificial; identical to SEQ ID NO: 155550
  Synthetic oligonucleotide

SEQ ID NO: 637819 - DNA, 55 bp, Artificial; identical to SEQ ID NO: 141922
  Synthetic oligonucleotide

SEQ ID NO: 637820 - DNA, 55 bp, Artificial; identical to SEQ ID NO: 167526
  Synthetic oligonucleotide

SEQ ID NO: 637821 - DNA, 55 bp, Artificial; identical to SEQ ID NO: 181044
  Synthetic oligonucleotide

SEQ ID NO: 637822 - DNA, 55 bp, Artificial; identical to SEQ ID NO: 244418
  Synthetic oligonucleotide

SEQ ID NO: 637823 - DNA, 52 bp, Artificial; identical to SEQ ID NO: 150658
  Synthetic oligonucleotide

SEQ ID NO: 637824 - DNA, 55 bp, Artificial; identical to SEQ ID NO: 156188
  Synthetic oligonucleotide

SEQ ID NO: 637825 - DNA, 55 bp, Artificial; identical to SEQ ID NO: 239992
  Synthetic oligonucleotide

SEQ ID NO: 637826 - DNA, 55 bp, Artificial; identical to SEQ ID NO: 191806
  Synthetic oligonucleotide

SEQ ID NO: 637827 - DNA, 55 bp, Artificial; identical to SEQ ID NO: 221524
  Synthetic oligonucleotide

SEQ ID NO: 637828 - DNA, 55 bp, Artificial; identical to SEQ ID NO: 195201
  Synthetic oligonucleotide

SEQ ID NO: 637829 - DNA, 51 bp, Artificial; identical to SEQ ID NO: 162359
  Synthetic oligonucleotide

SEQ ID NO: 637830 - DNA, 55 bp, Artificial; identical to SEQ ID NO: 205530
  Synthetic oligonucleotide

SEQ ID NO: 637831 - DNA, 54 bp, Artificial; identical to SEQ ID NO: 190004
  Synthetic oligonucleotide

SEQ ID NO: 637832 - DNA, 55 bp, Artificial; identical to SEQ ID NO: 244158
  Synthetic oligonucleotide

SEQ ID NO: 637833 - DNA, 53 bp, Artificial; identical to SEQ ID NO: 248830
  Synthetic oligonucleotide

SEQ ID NO: 637834 - DNA, 54 bp, Artificial; identical to SEQ ID NO: 209598
  Synthetic oligonucleotide

SEQ ID NO: 637835 - DNA, 53 bp, Artificial; identical to SEQ ID NO: 209652
  Synthetic oligonucleotide

SEQ ID NO: 637836 - DNA, 60 bp, Artificial; identical to SEQ ID NO: 174624
  Synthetic oligonucleotide

SEQ ID NO: 637837 - DNA, 55 bp, Artificial; identical to SEQ ID NO: 218271
  Synthetic oligonucleotide

SEQ ID NO: 637838 - DNA, 55 bp, Artificial; identical to SEQ ID NO: 208622
  Synthetic oligonucleotide

SEQ ID NO: 637839 - DNA, 55 bp, Artificial; identical to SEQ ID NO: 218270
  Synthetic oligonucleotide

SEQ ID NO: 637840 - DNA, 54 bp, Artificial; identical to SEQ ID NO: 203852
  Synthetic oligonucleotide

SEQ ID NO: 637841 - DNA, 55 bp, Artificial; identical to SEQ ID NO: 156190
  Synthetic oligonucleotide

SEQ ID NO: 637842 - DNA, 59 bp, Artificial; identical to SEQ ID NO: 152043
  Synthetic oligonucleotide

SEQ ID NO: 637843 - DNA, 55 bp, Artificial; identical to SEQ ID NO: 156191
  Synthetic oligonucleotide

SEQ ID NO: 637844 - DNA, 55 bp, Artificial; identical to SEQ ID NO: 208583
  Synthetic oligonucleotide

SEQ ID NO: 637845 - DNA, 51 bp, Artificial; identical to SEQ ID NO: 194606
  Synthetic oligonucleotide

SEQ ID NO: 637846 - DNA, 52 bp, Artificial; identical to SEQ ID NO: 255562
  Synthetic oligonucleotide

SEQ ID NO: 637847 - DNA, 55 bp, Artificial; identical to SEQ ID NO: 181032
  Synthetic oligonucleotide

SEQ ID NO: 637848 - DNA, 55 bp, Artificial; identical to SEQ ID NO: 191807
  Synthetic oligonucleotide

SEQ ID NO: 637849 - DNA, 50 bp, Artificial; identical to SEQ ID NO: 204140
  Synthetic oligonucleotide

SEQ ID NO: 637850 - DNA, 55 bp, Artificial; identical to SEQ ID NO: 156193
  Synthetic oligonucleotide

SEQ ID NO: 637851 - DNA, 55 bp, Artificial; identical to SEQ ID NO: 254276
  Synthetic oligonucleotide

SEQ ID NO: 637852 - DNA, 55 bp, Artificial; identical to SEQ ID NO: 181031
  Synthetic oligonucleotide

SEQ ID NO: 637853 - DNA, 55 bp, Artificial; identical to SEQ ID NO: 249064
  Synthetic oligonucleotide

SEQ ID NO: 637854 - DNA, 55 bp, Artificial; identical to SEQ ID NO: 156194
  Synthetic oligonucleotide

SEQ ID NO: 637855 - DNA, 55 bp, Artificial; identical to SEQ ID NO: 142524
  Synthetic oligonucleotide

SEQ ID NO: 637856 - DNA, 60 bp, Artificial; identical to SEQ ID NO: 253541
  Synthetic oligonucleotide

SEQ ID NO: 637857 - DNA, 54 bp, Artificial; identical to SEQ ID NO: 254277
  Synthetic oligonucleotide

SEQ ID NO: 637858 - DNA, 55 bp, Artificial; identical to SEQ ID NO: 181029
  Synthetic oligonucleotide

SEQ ID NO: 637859 - DNA, 54 bp, Artificial; identical to SEQ ID NO: 157241
  Synthetic oligonucleotide

SEQ ID NO: 637860 - DNA, 55 bp, Artificial; identical to SEQ ID NO: 239991
  Synthetic oligonucleotide

SEQ ID NO: 637861 - DNA, 55 bp, Artificial; identical to SEQ ID NO: 239990
  Synthetic oligonucleotide

SEQ ID NO: 637862 - DNA, 51 bp, Artificial; identical to SEQ ID NO: 181028
  Synthetic oligonucleotide

SEQ ID NO: 637863 - DNA, 55 bp, Artificial; identical to SEQ ID NO: 181026
  Synthetic oligonucleotide

SEQ ID NO: 637864 - DNA, 55 bp, Artificial; identical to SEQ ID NO: 211049
  Synthetic oligonucleotide

SEQ ID NO: 637865 - DNA, 60 bp, Artificial; identical to SEQ ID NO: 242193
  Synthetic oligonucleotide

SEQ ID NO: 637866 - DNA, 53 bp, Artificial; identical to SEQ ID NO: 174703
  Synthetic oligonucleotide

SEQ ID NO: 637867 - DNA, 54 bp, Artificial; identical to SEQ ID NO: 233394
  Synthetic oligonucleotide

SEQ ID NO: 637868 - DNA, 53 bp, Artificial; identical to SEQ ID NO: 216661
  Synthetic oligonucleotide

SEQ ID NO: 637869 - DNA, 59 bp, Artificial; identical to SEQ ID NO: 170822
  Synthetic oligonucleotide

SEQ ID NO: 637870 - DNA, 55 bp, Artificial; identical to SEQ ID NO: 211050
  Synthetic oligonucleotide

SEQ ID NO: 637871 - DNA, 55 bp, Artificial; identical to SEQ ID NO: 142523
  Synthetic oligonucleotide

SEQ ID NO: 637872 - DNA, 55 bp, Artificial; identical to SEQ ID NO: 181025
  Synthetic oligonucleotide

SEQ ID NO: 637873 - DNA, 55 bp, Artificial; identical to SEQ ID NO: 181024
  Synthetic oligonucleotide

SEQ ID NO: 637874 - DNA, 55 bp, Artificial; identical to SEQ ID NO: 181023
  Synthetic oligonucleotide

SEQ ID NO: 637875 - DNA, 53 bp, Artificial; identical to SEQ ID NO: 255425
  Synthetic oligonucleotide

SEQ ID NO: 637876 - DNA, 55 bp, Artificial; identical to SEQ ID NO: 181156
  Synthetic oligonucleotide

SEQ ID NO: 637877 - DNA, 59 bp, Artificial; identical to SEQ ID NO: 183438
  Synthetic oligonucleotide

SEQ ID NO: 637878 - DNA, 55 bp, Artificial; identical to SEQ ID NO: 181154
  Synthetic oligonucleotide

SEQ ID NO: 637879 - DNA, 55 bp, Artificial; identical to SEQ ID NO: 254281
  Synthetic oligonucleotide

SEQ ID NO: 637880 - DNA, 58 bp, Artificial; identical to SEQ ID NO: 192256
  Synthetic oligonucleotide

SEQ ID NO: 637881 - DNA, 60 bp, Artificial; identical to SEQ ID NO: 266054
  Synthetic oligonucleotide

SEQ ID NO: 637882 - DNA, 55 bp, Artificial; identical to SEQ ID NO: 168473
  Synthetic oligonucleotide

SEQ ID NO: 637883 - DNA, 56 bp, Artificial; identical to SEQ ID NO: 166194
  Synthetic oligonucleotide

SEQ ID NO: 637884 - DNA, 55 bp, Artificial; identical to SEQ ID NO: 181153
  Synthetic oligonucleotide

SEQ ID NO: 637885 - DNA, 55 bp, Artificial; identical to SEQ ID NO: 154163
  Synthetic oligonucleotide

SEQ ID NO: 637886 - DNA, 51 bp, Artificial; identical to SEQ ID NO: 143837
  Synthetic oligonucleotide

SEQ ID NO: 637887 - DNA, 55 bp, Artificial; identical to SEQ ID NO: 254284
  Synthetic oligonucleotide

SEQ ID NO: 637888 - DNA, 55 bp, Artificial; identical to SEQ ID NO: 221523
  Synthetic oligonucleotide

SEQ ID NO: 637889 - DNA, 55 bp, Artificial; identical to SEQ ID NO: 203526
  Synthetic oligonucleotide

SEQ ID NO: 637890 - DNA, 55 bp, Artificial; identical to SEQ ID NO: 244431
  Synthetic oligonucleotide

SEQ ID NO: 637891 - DNA, 55 bp, Artificial; identical to SEQ ID NO: 181152
  Synthetic oligonucleotide

SEQ ID NO: 637892 - DNA, 55 bp, Artificial; identical to SEQ ID NO: 244439
  Synthetic oligonucleotide

SEQ ID NO: 637893 - DNA, 55 bp, Artificial; identical to SEQ ID NO: 254285
  Synthetic oligonucleotide

SEQ ID NO: 637894 - DNA, 55 bp, Artificial; identical to SEQ ID NO: 254268
  Synthetic oligonucleotide

SEQ ID NO: 637895 - DNA, 55 bp, Artificial; identical to SEQ ID NO: 212741
  Synthetic oligonucleotide

SEQ ID NO: 637896 - DNA, 55 bp, Artificial; identical to SEQ ID NO: 164066
  Synthetic oligonucleotide

SEQ ID NO: 637897 - DNA, 55 bp, Artificial; identical to SEQ ID NO: 181148
  Synthetic oligonucleotide

SEQ ID NO: 637898 - DNA, 55 bp, Artificial; identical to SEQ ID NO: 211051
  Synthetic oligonucleotide

SEQ ID NO: 637899 - DNA, 55 bp, Artificial; identical to SEQ ID NO: 207349
  Synthetic oligonucleotide

SEQ ID NO: 637900 - DNA, 55 bp, Artificial; identical to SEQ ID NO: 189958
  Synthetic oligonucleotide

SEQ ID NO: 637901 - DNA, 53 bp, Artificial; identical to SEQ ID NO: 212986
  Synthetic oligonucleotide

SEQ ID NO: 637902 - DNA, 53 bp, Artificial; identical to SEQ ID NO: 211099
  Synthetic oligonucleotide

SEQ ID NO: 637903 - DNA, 55 bp, Artificial; identical to SEQ ID NO: 147979
  Synthetic oligonucleotide

SEQ ID NO: 637904 - DNA, 55 bp, Artificial; identical to SEQ ID NO: 202761
  Synthetic oligonucleotide

SEQ ID NO: 637905 - DNA, 60 bp, Artificial; identical to SEQ ID NO: 183382
  Synthetic oligonucleotide

SEQ ID NO: 637906 - DNA, 55 bp, Artificial; identical to SEQ ID NO: 168474
  Synthetic oligonucleotide

SEQ ID NO: 637907 - DNA, 55 bp, Artificial; identical to SEQ ID NO: 156145
  Synthetic oligonucleotide

SEQ ID NO: 637908 - DNA, 55 bp, Artificial; identical to SEQ ID NO: 169294
  Synthetic oligonucleotide

SEQ ID NO: 637909 - DNA, 55 bp, Artificial; identical to SEQ ID NO: 164067
  Synthetic oligonucleotide

SEQ ID NO: 637910 - DNA, 56 bp, Artificial; identical to SEQ ID NO: 208092
  Synthetic oligonucleotide

SEQ ID NO: 637911 - DNA, 55 bp, Artificial; identical to SEQ ID NO: 244398
  Synthetic oligonucleotide

SEQ ID NO: 637912 - DNA, 58 bp, Artificial; identical to SEQ ID NO: 266092
  Synthetic oligonucleotide

SEQ ID NO: 637913 - DNA, 51 bp, Artificial; identical to SEQ ID NO: 157721
  Synthetic oligonucleotide

SEQ ID NO: 637914 - DNA, 55 bp, Artificial; identical to SEQ ID NO: 244402
  Synthetic oligonucleotide

SEQ ID NO: 637915 - DNA, 55 bp, Artificial; identical to SEQ ID NO: 212742
  Synthetic oligonucleotide

SEQ ID NO: 637916 - DNA, 55 bp, Artificial; identical to SEQ ID NO: 144256
  Synthetic oligonucleotide

SEQ ID NO: 637917 - DNA, 60 bp, Artificial; identical to SEQ ID NO: 183371
  Synthetic oligonucleotide

SEQ ID NO: 637918 - DNA, 55 bp, Artificial; identical to SEQ ID NO: 151478
  Synthetic oligonucleotide

SEQ ID NO: 637919 - DNA, 55 bp, Artificial; identical to SEQ ID NO: 154165
  Synthetic oligonucleotide

SEQ ID NO: 637920 - DNA, 55 bp, Artificial; identical to SEQ ID NO: 244160
  Synthetic oligonucleotide

SEQ ID NO: 637921 - DNA, 55 bp, Artificial; identical to SEQ ID NO: 181141
  Synthetic oligonucleotide

SEQ ID NO: 637922 - DNA, 55 bp, Artificial; identical to SEQ ID NO: 249065
  Synthetic oligonucleotide

SEQ ID NO: 637923 - DNA, 53 bp, Artificial; identical to SEQ ID NO: 147983
  Synthetic oligonucleotide

SEQ ID NO: 637924 - DNA, 60 bp, Artificial; identical to SEQ ID NO: 187406
  Synthetic oligonucleotide

SEQ ID NO: 637925 - DNA, 53 bp, Artificial; identical to SEQ ID NO: 256293
  Synthetic oligonucleotide

SEQ ID NO: 637926 - DNA, 56 bp, Artificial; identical to SEQ ID NO: 244030
  Synthetic oligonucleotide

SEQ ID NO: 637927 - DNA, 55 bp, Artificial; identical to SEQ ID NO: 167524
  Synthetic oligonucleotide

SEQ ID NO: 637928 - DNA, 55 bp, Artificial; identical to SEQ ID NO: 181140
  Synthetic oligonucleotide

SEQ ID NO: 637929 - DNA, 55 bp, Artificial; identical to SEQ ID NO: 208615
  Synthetic oligonucleotide

SEQ ID NO: 637930 - DNA, 54 bp, Artificial; identical to SEQ ID NO: 255280
  Synthetic oligonucleotide

SEQ ID NO: 637931 - DNA, 55 bp, Artificial; identical to SEQ ID NO: 164069
  Synthetic oligonucleotide

SEQ ID NO: 637932 - DNA, 55 bp, Artificial; identical to SEQ ID NO: 263170
  Synthetic oligonucleotide

SEQ ID NO: 637933 - DNA, 55 bp, Artificial; identical to SEQ ID NO: 244404
  Synthetic oligonucleotide

SEQ ID NO: 637934 - DNA, 55 bp, Artificial; identical to SEQ ID NO: 254266
  Synthetic oligonucleotide

SEQ ID NO: 637935 - DNA, 55 bp, Artificial; identical to SEQ ID NO: 254265
  Synthetic oligonucleotide

SEQ ID NO: 637936 - DNA, 55 bp, Artificial; identical to SEQ ID NO: 171614
  Synthetic oligonucleotide

SEQ ID NO: 637937 - DNA, 52 bp, Artificial; identical to SEQ ID NO: 219482
  Synthetic oligonucleotide

SEQ ID NO: 637938 - DNA, 55 bp, Artificial; identical to SEQ ID NO: 164070
  Synthetic oligonucleotide

SEQ ID NO: 637939 - DNA, 55 bp, Artificial; identical to SEQ ID NO: 154049
  Synthetic oligonucleotide

SEQ ID NO: 637940 - DNA, 54 bp, Artificial; identical to SEQ ID NO: 181135
  Synthetic oligonucleotide

SEQ ID NO: 637941 - DNA, 58 bp, Artificial; identical to SEQ ID NO: 160916
  Synthetic oligonucleotide

SEQ ID NO: 637942 - DNA, 60 bp, Artificial; identical to SEQ ID NO: 222684
  Synthetic oligonucleotide

SEQ ID NO: 637943 - DNA, 55 bp, Artificial; identical to SEQ ID NO: 191292
  Synthetic oligonucleotide

SEQ ID NO: 637944 - DNA, 55 bp, Artificial; identical to SEQ ID NO: 146247
  Synthetic oligonucleotide

SEQ ID NO: 637945 - DNA, 54 bp, Artificial; identical to SEQ ID NO: 168872
  Synthetic oligonucleotide

SEQ ID NO: 637946 - DNA, 55 bp, Artificial; identical to SEQ ID NO: 207351
  Synthetic oligonucleotide

SEQ ID NO: 637947 - DNA, 52 bp, Artificial; identical to SEQ ID NO: 186186
  Synthetic oligonucleotide

SEQ ID NO: 637948 - DNA, 55 bp, Artificial; identical to SEQ ID NO: 194608
  Synthetic oligonucleotide

SEQ ID NO: 637949 - DNA, 53 bp, Artificial; identical to SEQ ID NO: 248637
  Synthetic oligonucleotide

SEQ ID NO: 637950 - DNA, 60 bp, Artificial; identical to SEQ ID NO: 164489
  Synthetic oligonucleotide

SEQ ID NO: 637951 - DNA, 55 bp, Artificial; identical to SEQ ID NO: 161996
  Synthetic oligonucleotide

SEQ ID NO: 637952 - DNA, 57 bp, Artificial; identical to SEQ ID NO: 247520
  Synthetic oligonucleotide

SEQ ID NO: 637953 - DNA, 55 bp, Artificial; identical to SEQ ID NO: 181176
  Synthetic oligonucleotide

SEQ ID NO: 637954 - DNA, 50 bp, Artificial; identical to SEQ ID NO: 213292
  Synthetic oligonucleotide

SEQ ID NO: 637955 - DNA, 52 bp, Artificial; identical to SEQ ID NO: 255547
  Synthetic oligonucleotide

SEQ ID NO: 637956 - DNA, 52 bp, Artificial; identical to SEQ ID NO: 199967
  Synthetic oligonucleotide

SEQ ID NO: 637957 - DNA, 55 bp, Artificial; identical to SEQ ID NO: 244414
  Synthetic oligonucleotide

SEQ ID NO: 637958 - DNA, 55 bp, Artificial; identical to SEQ ID NO: 143736
  Synthetic oligonucleotide

SEQ ID NO: 637959 - DNA, 50 bp, Artificial; identical to SEQ ID NO: 237453
  Synthetic oligonucleotide

SEQ ID NO: 637960 - DNA, 54 bp, Artificial; identical to SEQ ID NO: 157208
  Synthetic oligonucleotide

SEQ ID NO: 637961 - DNA, 55 bp, Artificial; identical to SEQ ID NO: 154050
  Synthetic oligonucleotide

SEQ ID NO: 637962 - DNA, 55 bp, Artificial; identical to SEQ ID NO: 146246
  Synthetic oligonucleotide

SEQ ID NO: 637963 - DNA, 50 bp, Artificial; identical to SEQ ID NO: 200230
  Synthetic oligonucleotide

SEQ ID NO: 637964 - DNA, 55 bp, Artificial; identical to SEQ ID NO: 161989
  Synthetic oligonucleotide

SEQ ID NO: 637965 - DNA, 51 bp, Artificial; identical to SEQ ID NO: 153700
  Synthetic oligonucleotide

SEQ ID NO: 637966 - DNA, 55 bp, Artificial; identical to SEQ ID NO: 181170
  Synthetic oligonucleotide

SEQ ID NO: 637967 - DNA, 59 bp, Artificial; identical to SEQ ID NO: 179359
  Synthetic oligonucleotide

SEQ ID NO: 637968 - DNA, 60 bp, Artificial; identical to SEQ ID NO: 252686
  Synthetic oligonucleotide

SEQ ID NO: 637969 - DNA, 55 bp, Artificial; identical to SEQ ID NO: 233393
  Synthetic oligonucleotide

SEQ ID NO: 637970 - DNA, 55 bp, Artificial; identical to SEQ ID NO: 194609
  Synthetic oligonucleotide

SEQ ID NO: 637971 - DNA, 60 bp, Artificial; identical to SEQ ID NO: 164501
  Synthetic oligonucleotide

SEQ ID NO: 637972 - DNA, 58 bp, Artificial; identical to SEQ ID NO: 188608
  Synthetic oligonucleotide

SEQ ID NO: 637973 - DNA, 53 bp, Artificial; identical to SEQ ID NO: 209619
  Synthetic oligonucleotide

SEQ ID NO: 637974 - DNA, 55 bp, Artificial; identical to SEQ ID NO: 224598
  Synthetic oligonucleotide

SEQ ID NO: 637975 - DNA, 51 bp, Artificial; identical to SEQ ID NO: 186789
  Synthetic oligonucleotide

SEQ ID NO: 637976 - DNA, 55 bp, Artificial; identical to SEQ ID NO: 254263
  Synthetic oligonucleotide

SEQ ID NO: 637977 - DNA, 55 bp, Artificial; identical to SEQ ID NO: 238047
  Synthetic oligonucleotide

SEQ ID NO: 637978 - DNA, 55 bp, Artificial; identical to SEQ ID NO: 239988
  Synthetic oligonucleotide

SEQ ID NO: 637979 - DNA, 55 bp, Artificial; identical to SEQ ID NO: 181169
  Synthetic oligonucleotide

SEQ ID NO: 637980 - DNA, 60 bp, Artificial; identical to SEQ ID NO: 266065
  Synthetic oligonucleotide

SEQ ID NO: 637981 - DNA, 55 bp, Artificial; identical to SEQ ID NO: 239987
  Synthetic oligonucleotide

SEQ ID NO: 637982 - DNA, 53 bp, Artificial; identical to SEQ ID NO: 255431
  Synthetic oligonucleotide

SEQ ID NO: 637983 - DNA, 60 bp, Artificial; identical to SEQ ID NO: 168911
  Synthetic oligonucleotide

SEQ ID NO: 637984 - DNA, 55 bp, Artificial; identical to SEQ ID NO: 201268
  Synthetic oligonucleotide

SEQ ID NO: 637985 - DNA, 55 bp, Artificial; identical to SEQ ID NO: 257807
  Synthetic oligonucleotide

SEQ ID NO: 637986 - DNA, 60 bp, Artificial; identical to SEQ ID NO: 190409
  Synthetic oligonucleotide

SEQ ID NO: 637987 - DNA, 60 bp, Artificial; identical to SEQ ID NO: 212348
  Synthetic oligonucleotide

SEQ ID NO: 637988 - DNA, 55 bp, Artificial; identical to SEQ ID NO: 181167
  Synthetic oligonucleotide

SEQ ID NO: 637989 - DNA, 53 bp, Artificial; identical to SEQ ID NO: 265831
  Synthetic oligonucleotide

SEQ ID NO: 637990 - DNA, 55 bp, Artificial; identical to SEQ ID NO: 254262
  Synthetic oligonucleotide

SEQ ID NO: 637991 - DNA, 55 bp, Artificial; identical to SEQ ID NO: 209280
  Synthetic oligonucleotide

SEQ ID NO: 637992 - DNA, 55 bp, Artificial; identical to SEQ ID NO: 164071
  Synthetic oligonucleotide

SEQ ID NO: 637993 - DNA, 57 bp, Artificial; identical to SEQ ID NO: 179854
  Synthetic oligonucleotide

SEQ ID NO: 637994 - DNA, 53 bp, Artificial; identical to SEQ ID NO: 249066
  Synthetic oligonucleotide

SEQ ID NO: 637995 - DNA, 51 bp, Artificial; identical to SEQ ID NO: 246663
  Synthetic oligonucleotide

SEQ ID NO: 637996 - DNA, 53 bp, Artificial; identical to SEQ ID NO: 174843
  Synthetic oligonucleotide

SEQ ID NO: 637997 - DNA, 55 bp, Artificial; identical to SEQ ID NO: 188809
  Synthetic oligonucleotide

SEQ ID NO: 637998 - DNA, 53 bp, Artificial; identical to SEQ ID NO: 183860
  Synthetic oligonucleotide

SEQ ID NO: 637999 - DNA, 55 bp, Artificial; identical to SEQ ID NO: 189504
  Synthetic oligonucleotide

SEQ ID NO: 638000 - DNA, 57 bp, Artificial; identical to SEQ ID NO: 201184
  Synthetic oligonucleotide

SEQ ID NO: 638001 - DNA, 55 bp, Artificial; identical to SEQ ID NO: 208619
  Synthetic oligonucleotide

SEQ ID NO: 638002 - DNA, 56 bp, Artificial; identical to SEQ ID NO: 168202
  Synthetic oligonucleotide

SEQ ID NO: 638003 - DNA, 55 bp, Artificial; identical to SEQ ID NO: 261813
  Synthetic oligonucleotide

SEQ ID NO: 638004 - DNA, 55 bp, Artificial; identical to SEQ ID NO: 217377
  Synthetic oligonucleotide

SEQ ID NO: 638005 - DNA, 51 bp, Artificial; identical to SEQ ID NO: 204031
  Synthetic oligonucleotide

SEQ ID NO: 638006 - DNA, 55 bp, Artificial; identical to SEQ ID NO: 238043
  Synthetic oligonucleotide

SEQ ID NO: 638007 - DNA, 60 bp, Artificial; identical to SEQ ID NO: 266254
  Synthetic oligonucleotide

SEQ ID NO: 638008 - DNA, 55 bp, Artificial; identical to SEQ ID NO: 181161
  Synthetic oligonucleotide

SEQ ID NO: 638009 - DNA, 55 bp, Artificial; identical to SEQ ID NO: 189882
  Synthetic oligonucleotide

SEQ ID NO: 638010 - DNA, 55 bp, Artificial; identical to SEQ ID NO: 181159
  Synthetic oligonucleotide

SEQ ID NO: 638011 - DNA, 55 bp, Artificial; identical to SEQ ID NO: 240020
  Synthetic oligonucleotide

SEQ ID NO: 638012 - DNA, 55 bp, Artificial; identical to SEQ ID NO: 203538
  Synthetic oligonucleotide

SEQ ID NO: 638013 - DNA, 55 bp, Artificial; identical to SEQ ID NO: 208587
  Synthetic oligonucleotide

SEQ ID NO: 638014 - DNA, 60 bp, Artificial; identical to SEQ ID NO: 183816
  Synthetic oligonucleotide

SEQ ID NO: 638015 - DNA, 58 bp, Artificial; identical to SEQ ID NO: 244265
  Synthetic oligonucleotide

SEQ ID NO: 638016 - DNA, 55 bp, Artificial; identical to SEQ ID NO: 147991
  Synthetic oligonucleotide

SEQ ID NO: 638017 - DNA, 55 bp, Artificial; identical to SEQ ID NO: 254260
  Synthetic oligonucleotide

SEQ ID NO: 638018 - DNA, 55 bp, Artificial; identical to SEQ ID NO: 209286
  Synthetic oligonucleotide

SEQ ID NO: 638019 - DNA, 55 bp, Artificial; identical to SEQ ID NO: 142103
  Synthetic oligonucleotide

SEQ ID NO: 638020 - DNA, 50 bp, Artificial; identical to SEQ ID NO: 160253
  Synthetic oligonucleotide

SEQ ID NO: 638021 - DNA, 55 bp, Artificial; identical to SEQ ID NO: 202112
  Synthetic oligonucleotide

SEQ ID NO: 638022 - DNA, 55 bp, Artificial; identical to SEQ ID NO: 238042
  Synthetic oligonucleotide

SEQ ID NO: 638023 - DNA, 55 bp, Artificial; identical to SEQ ID NO: 188668
  Synthetic oligonucleotide

SEQ ID NO: 638024 - DNA, 55 bp, Artificial; identical to SEQ ID NO: 181110
  Synthetic oligonucleotide

SEQ ID NO: 638025 - DNA, 60 bp, Artificial; identical to SEQ ID NO: 143739
  Synthetic oligonucleotide

SEQ ID NO: 638026 - DNA, 55 bp, Artificial; identical to SEQ ID NO: 207352
  Synthetic oligonucleotide

SEQ ID NO: 638027 - DNA, 55 bp, Artificial; identical to SEQ ID NO: 181108
  Synthetic oligonucleotide

SEQ ID NO: 638028 - DNA, 55 bp, Artificial; identical to SEQ ID NO: 168481
  Synthetic oligonucleotide

SEQ ID NO: 638029 - DNA, 55 bp, Artificial; identical to SEQ ID NO: 142102
  Synthetic oligonucleotide

SEQ ID NO: 638030 - DNA, 55 bp, Artificial; identical to SEQ ID NO: 217361
  Synthetic oligonucleotide

SEQ ID NO: 638031 - DNA, 60 bp, Artificial; identical to SEQ ID NO: 183783
  Synthetic oligonucleotide

SEQ ID NO: 638032 - DNA, 53 bp, Artificial; identical to SEQ ID NO: 185561
  Synthetic oligonucleotide

SEQ ID NO: 638033 - DNA, 55 bp, Artificial; identical to SEQ ID NO: 257809
  Synthetic oligonucleotide

SEQ ID NO: 638034 - DNA, 55 bp, Artificial; identical to SEQ ID NO: 266234
  Synthetic oligonucleotide

SEQ ID NO: 638035 - DNA, 55 bp, Artificial; identical to SEQ ID NO: 194611
  Synthetic oligonucleotide

SEQ ID NO: 638036 - DNA, 55 bp, Artificial; identical to SEQ ID NO: 169292
  Synthetic oligonucleotide

SEQ ID NO: 638037 - DNA, 55 bp, Artificial; identical to SEQ ID NO: 224601
  Synthetic oligonucleotide

SEQ ID NO: 638038 - DNA, 55 bp, Artificial; identical to SEQ ID NO: 254259
  Synthetic oligonucleotide

SEQ ID NO: 638039 - DNA, 55 bp, Artificial; identical to SEQ ID NO: 156155
  Synthetic oligonucleotide

SEQ ID NO: 638040 - DNA, 55 bp, Artificial; identical to SEQ ID NO: 254258
  Synthetic oligonucleotide

SEQ ID NO: 638041 - DNA, 59 bp, Artificial; identical to SEQ ID NO: 143750
  Synthetic oligonucleotide

SEQ ID NO: 638042 - DNA, 55 bp, Artificial; identical to SEQ ID NO: 181102
  Synthetic oligonucleotide

SEQ ID NO: 638043 - DNA, 51 bp, Artificial; identical to SEQ ID NO: 186753
  Synthetic oligonucleotide

SEQ ID NO: 638044 - DNA, 55 bp, Artificial; identical to SEQ ID NO: 181099
  Synthetic oligonucleotide

SEQ ID NO: 638045 - DNA, 55 bp, Artificial; identical to SEQ ID NO: 156157
  Synthetic oligonucleotide

SEQ ID NO: 638046 - DNA, 54 bp, Artificial; identical to SEQ ID NO: 233391
  Synthetic oligonucleotide

SEQ ID NO: 638047 - DNA, 56 bp, Artificial; identical to SEQ ID NO: 224412
  Synthetic oligonucleotide

SEQ ID NO: 638048 - DNA, 52 bp, Artificial; identical to SEQ ID NO: 225251
  Synthetic oligonucleotide

SEQ ID NO: 638049 - DNA, 57 bp, Artificial; identical to SEQ ID NO: 224204
  Synthetic oligonucleotide

SEQ ID NO: 638050 - DNA, 57 bp, Artificial; identical to SEQ ID NO: 256543
  Synthetic oligonucleotide

SEQ ID NO: 638051 - DNA, 55 bp, Artificial; identical to SEQ ID NO: 194612
  Synthetic oligonucleotide

SEQ ID NO: 638052 - DNA, 55 bp, Artificial; identical to SEQ ID NO: 203619
  Synthetic oligonucleotide

SEQ ID NO: 638053 - DNA, 55 bp, Artificial; identical to SEQ ID NO: 147994
  Synthetic oligonucleotide

SEQ ID NO: 638054 - DNA, 55 bp, Artificial; identical to SEQ ID NO: 188291
  Synthetic oligonucleotide

SEQ ID NO: 638055 - DNA, 55 bp, Artificial; identical to SEQ ID NO: 221515
  Synthetic oligonucleotide

SEQ ID NO: 638056 - DNA, 55 bp, Artificial; identical to SEQ ID NO: 238075
  Synthetic oligonucleotide

SEQ ID NO: 638057 - DNA, 51 bp, Artificial; identical to SEQ ID NO: 198198
  Synthetic oligonucleotide

SEQ ID NO: 638058 - DNA, 55 bp, Artificial; identical to SEQ ID NO: 181097
  Synthetic oligonucleotide

SEQ ID NO: 638059 - DNA, 55 bp, Artificial; identical to SEQ ID NO: 194613
  Synthetic oligonucleotide

SEQ ID NO: 638060 - DNA, 55 bp, Artificial; identical to SEQ ID NO: 244163
  Synthetic oligonucleotide

SEQ ID NO: 638061 - DNA, 57 bp, Artificial; identical to SEQ ID NO: 203390
  Synthetic oligonucleotide

SEQ ID NO: 638062 - DNA, 55 bp, Artificial; identical to SEQ ID NO: 171654
  Synthetic oligonucleotide

SEQ ID NO: 638063 - DNA, 55 bp, Artificial; identical to SEQ ID NO: 156159
  Synthetic oligonucleotide

SEQ ID NO: 638064 - DNA, 55 bp, Artificial; identical to SEQ ID NO: 207359
  Synthetic oligonucleotide

SEQ ID NO: 638065 - DNA, 52 bp, Artificial; identical to SEQ ID NO: 170044
  Synthetic oligonucleotide

SEQ ID NO: 638066 - DNA, 56 bp, Artificial; identical to SEQ ID NO: 244029
  Synthetic oligonucleotide

SEQ ID NO: 638067 - DNA, 54 bp, Artificial; identical to SEQ ID NO: 209141
  Synthetic oligonucleotide

SEQ ID NO: 638068 - DNA, 55 bp, Artificial; identical to SEQ ID NO: 211103
  Synthetic oligonucleotide

SEQ ID NO: 638069 - DNA, 55 bp, Artificial; identical to SEQ ID NO: 254255
  Synthetic oligonucleotide

SEQ ID NO: 638070 - DNA, 50 bp, Artificial; identical to SEQ ID NO: 222052
  Synthetic oligonucleotide

SEQ ID NO: 638071 - DNA, 55 bp, Artificial; identical to SEQ ID NO: 217292
  Synthetic oligonucleotide

SEQ ID NO: 638072 - DNA, 60 bp, Artificial; identical to SEQ ID NO: 183760
  Synthetic oligonucleotide

SEQ ID NO: 638073 - DNA, 55 bp, Artificial; identical to SEQ ID NO: 148033
  Synthetic oligonucleotide

SEQ ID NO: 638074 - DNA, 60 bp, Artificial; identical to SEQ ID NO: 194370
  Synthetic oligonucleotide

SEQ ID NO: 638075 - DNA, 55 bp, Artificial; identical to SEQ ID NO: 201038
  Synthetic oligonucleotide

SEQ ID NO: 638076 - DNA, 59 bp, Artificial; identical to SEQ ID NO: 247049
  Synthetic oligonucleotide

SEQ ID NO: 638077 - DNA, 51 bp, Artificial; identical to SEQ ID NO: 166168
  Synthetic oligonucleotide

SEQ ID NO: 638078 - DNA, 55 bp, Artificial; identical to SEQ ID NO: 181094
  Synthetic oligonucleotide

SEQ ID NO: 638079 - DNA, 55 bp, Artificial; identical to SEQ ID NO: 211104
  Synthetic oligonucleotide

SEQ ID NO: 638080 - DNA, 60 bp, Artificial; identical to SEQ ID NO: 183749
  Synthetic oligonucleotide

SEQ ID NO: 638081 - DNA, 55 bp, Artificial; identical to SEQ ID NO: 156160
  Synthetic oligonucleotide

SEQ ID NO: 638082 - DNA, 55 bp, Artificial; identical to SEQ ID NO: 181091
  Synthetic oligonucleotide

SEQ ID NO: 638083 - DNA, 59 bp, Artificial; identical to SEQ ID NO: 201500
  Synthetic oligonucleotide

SEQ ID NO: 638084 - DNA, 51 bp, Artificial; identical to SEQ ID NO: 222728
  Synthetic oligonucleotide

SEQ ID NO: 638085 - DNA, 55 bp, Artificial; identical to SEQ ID NO: 253014
  Synthetic oligonucleotide

SEQ ID NO: 638086 - DNA, 55 bp, Artificial; identical to SEQ ID NO: 203573
  Synthetic oligonucleotide

SEQ ID NO: 638087 - DNA, 54 bp, Artificial; identical to SEQ ID NO: 261962
  Synthetic oligonucleotide

SEQ ID NO: 638088 - DNA, 55 bp, Artificial; identical to SEQ ID NO: 194561
  Synthetic oligonucleotide

SEQ ID NO: 638089 - DNA, 54 bp, Artificial; identical to SEQ ID NO: 156161
  Synthetic oligonucleotide

SEQ ID NO: 638090 - DNA, 55 bp, Artificial; identical to SEQ ID NO: 156162
  Synthetic oligonucleotide

SEQ ID NO: 638091 - DNA, 55 bp, Artificial; identical to SEQ ID NO: 146245
  Synthetic oligonucleotide

SEQ ID NO: 638092 - DNA, 56 bp, Artificial; identical to SEQ ID NO: 247048
  Synthetic oligonucleotide

SEQ ID NO: 638093 - DNA, 54 bp, Artificial; identical to SEQ ID NO: 266269
  Synthetic oligonucleotide

SEQ ID NO: 638094 - DNA, 55 bp, Artificial; identical to SEQ ID NO: 151482
  Synthetic oligonucleotide

SEQ ID NO: 638095 - DNA, 55 bp, Artificial; identical to SEQ ID NO: 191291
  Synthetic oligonucleotide

SEQ ID NO: 638096 - DNA, 52 bp, Artificial; identical to SEQ ID NO: 143829
  Synthetic oligonucleotide

SEQ ID NO: 638097 - DNA, 55 bp, Artificial; identical to SEQ ID NO: 225179
  Synthetic oligonucleotide

SEQ ID NO: 638098 - DNA, 56 bp, Artificial; identical to SEQ ID NO: 242266
  Synthetic oligonucleotide

SEQ ID NO: 638099 - DNA, 56 bp, Artificial; identical to SEQ ID NO: 225169
  Synthetic oligonucleotide

SEQ ID NO: 638100 - DNA, 56 bp, Artificial; identical to SEQ ID NO: 265916
  Synthetic oligonucleotide

SEQ ID NO: 638101 - DNA, 55 bp, Artificial; identical to SEQ ID NO: 171644
  Synthetic oligonucleotide

SEQ ID NO: 638102 - DNA, 55 bp, Artificial; identical to SEQ ID NO: 181133
  Synthetic oligonucleotide

SEQ ID NO: 638103 - DNA, 51 bp, Artificial; identical to SEQ ID NO: 154661
  Synthetic oligonucleotide

SEQ ID NO: 638104 - DNA, 56 bp, Artificial; identical to SEQ ID NO: 156765
  Synthetic oligonucleotide

SEQ ID NO: 638105 - DNA, 55 bp, Artificial; identical to SEQ ID NO: 151483
  Synthetic oligonucleotide

SEQ ID NO: 638106 - DNA, 55 bp, Artificial; identical to SEQ ID NO: 224604
  Synthetic oligonucleotide

SEQ ID NO: 638107 - DNA, 60 bp, Artificial; identical to SEQ ID NO: 183683
  Synthetic oligonucleotide

SEQ ID NO: 638108 - DNA, 55 bp, Artificial; identical to SEQ ID NO: 168482
  Synthetic oligonucleotide

SEQ ID NO: 638109 - DNA, 59 bp, Artificial; identical to SEQ ID NO: 183637
  Synthetic oligonucleotide

SEQ ID NO: 638110 - DNA, 55 bp, Artificial; identical to SEQ ID NO: 160967
  Synthetic oligonucleotide

SEQ ID NO: 638111 - DNA, 55 bp, Artificial; identical to SEQ ID NO: 154178
  Synthetic oligonucleotide

SEQ ID NO: 638112 - DNA, 55 bp, Artificial; identical to SEQ ID NO: 254251
  Synthetic oligonucleotide

SEQ ID NO: 638113 - DNA, 51 bp, Artificial; identical to SEQ ID NO: 243377
  Synthetic oligonucleotide

SEQ ID NO: 638114 - DNA, 55 bp, Artificial; identical to SEQ ID NO: 266243
  Synthetic oligonucleotide

SEQ ID NO: 638115 - DNA, 55 bp, Artificial; identical to SEQ ID NO: 247656
  Synthetic oligonucleotide

SEQ ID NO: 638116 - DNA, 55 bp, Artificial; identical to SEQ ID NO: 142098
  Synthetic oligonucleotide

SEQ ID NO: 638117 - DNA, 54 bp, Artificial; identical to SEQ ID NO: 149188
  Synthetic oligonucleotide

SEQ ID NO: 638118 - DNA, 60 bp, Artificial; identical to SEQ ID NO: 237764
  Synthetic oligonucleotide

SEQ ID NO: 638119 - DNA, 52 bp, Artificial; identical to SEQ ID NO: 181130
  Synthetic oligonucleotide

SEQ ID NO: 638120 - DNA, 55 bp, Artificial; identical to SEQ ID NO: 181129
  Synthetic oligonucleotide

SEQ ID NO: 638121 - DNA, 55 bp, Artificial; identical to SEQ ID NO: 221513
  Synthetic oligonucleotide

SEQ ID NO: 638122 - DNA, 55 bp, Artificial; identical to SEQ ID NO: 181128
  Synthetic oligonucleotide

SEQ ID NO: 638123 - DNA, 55 bp, Artificial; identical to SEQ ID NO: 209296
  Synthetic oligonucleotide

SEQ ID NO: 638124 - DNA, 55 bp, Artificial; identical to SEQ ID NO: 171767
  Synthetic oligonucleotide

SEQ ID NO: 638125 - DNA, 55 bp, Artificial; identical to SEQ ID NO: 254304
  Synthetic oligonucleotide

SEQ ID NO: 638126 - DNA, 57 bp, Artificial; identical to SEQ ID NO: 267327
  Synthetic oligonucleotide

SEQ ID NO: 638127 - DNA, 60 bp, Artificial; identical to SEQ ID NO: 182994
  Synthetic oligonucleotide

SEQ ID NO: 638128 - DNA, 55 bp, Artificial; identical to SEQ ID NO: 234191
  Synthetic oligonucleotide

SEQ ID NO: 638129 - DNA, 55 bp, Artificial; identical to SEQ ID NO: 240014
  Synthetic oligonucleotide

SEQ ID NO: 638130 - DNA, 54 bp, Artificial; identical to SEQ ID NO: 211106
  Synthetic oligonucleotide

SEQ ID NO: 638131 - DNA, 55 bp, Artificial; identical to SEQ ID NO: 224606
  Synthetic oligonucleotide

SEQ ID NO: 638132 - DNA, 54 bp, Artificial; identical to SEQ ID NO: 181123
  Synthetic oligonucleotide

SEQ ID NO: 638133 - DNA, 53 bp, Artificial; identical to SEQ ID NO: 202273
  Synthetic oligonucleotide

SEQ ID NO: 638134 - DNA, 60 bp, Artificial; identical to SEQ ID NO: 194248
  Synthetic oligonucleotide

SEQ ID NO: 638135 - DNA, 59 bp, Artificial; identical to SEQ ID NO: 206385
  Synthetic oligonucleotide

SEQ ID NO: 638136 - DNA, 55 bp, Artificial; identical to SEQ ID NO: 181121
  Synthetic oligonucleotide

SEQ ID NO: 638137 - DNA, 55 bp, Artificial; identical to SEQ ID NO: 254305
  Synthetic oligonucleotide

SEQ ID NO: 638138 - DNA, 51 bp, Artificial; identical to SEQ ID NO: 145061
  Synthetic oligonucleotide

SEQ ID NO: 638139 - DNA, 55 bp, Artificial; identical to SEQ ID NO: 166837
  Synthetic oligonucleotide

SEQ ID NO: 638140 - DNA, 53 bp, Artificial; identical to SEQ ID NO: 189962
  Synthetic oligonucleotide

SEQ ID NO: 638141 - DNA, 55 bp, Artificial; identical to SEQ ID NO: 166838
  Synthetic oligonucleotide

SEQ ID NO: 638142 - DNA, 55 bp, Artificial; identical to SEQ ID NO: 247636
  Synthetic oligonucleotide

SEQ ID NO: 638143 - DNA, 55 bp, Artificial; identical to SEQ ID NO: 156164
  Synthetic oligonucleotide

SEQ ID NO: 638144 - DNA, 57 bp, Artificial; identical to SEQ ID NO: 217288
  Synthetic oligonucleotide

SEQ ID NO: 638145 - DNA, 55 bp, Artificial; identical to SEQ ID NO: 172917
  Synthetic oligonucleotide

SEQ ID NO: 638146 - DNA, 55 bp, Artificial; identical to SEQ ID NO: 202105
  Synthetic oligonucleotide

SEQ ID NO: 638147 - DNA, 55 bp, Artificial; identical to SEQ ID NO: 187553
  Synthetic oligonucleotide

SEQ ID NO: 638148 - DNA, 55 bp, Artificial; identical to SEQ ID NO: 219679
  Synthetic oligonucleotide

SEQ ID NO: 638149 - DNA, 55 bp, Artificial; identical to SEQ ID NO: 189967
  Synthetic oligonucleotide

SEQ ID NO: 638150 - DNA, 57 bp, Artificial; identical to SEQ ID NO: 209128
  Synthetic oligonucleotide

SEQ ID NO: 638151 - DNA, 55 bp, Artificial; identical to SEQ ID NO: 257811
  Synthetic oligonucleotide

SEQ ID NO: 638152 - DNA, 57 bp, Artificial; identical to SEQ ID NO: 239172
  Synthetic oligonucleotide

SEQ ID NO: 638153 - DNA, 57 bp, Artificial; identical to SEQ ID NO: 208077
  Synthetic oligonucleotide

SEQ ID NO: 638154 - DNA, 55 bp, Artificial; identical to SEQ ID NO: 181118
  Synthetic oligonucleotide

SEQ ID NO: 638155 - DNA, 53 bp, Artificial; identical to SEQ ID NO: 254307
  Synthetic oligonucleotide

SEQ ID NO: 638156 - DNA, 55 bp, Artificial; identical to SEQ ID NO: 156166
  Synthetic oligonucleotide

SEQ ID NO: 638157 - DNA, 51 bp, Artificial; identical to SEQ ID NO: 248083
  Synthetic oligonucleotide

SEQ ID NO: 638158 - DNA, 55 bp, Artificial; identical to SEQ ID NO: 181117
  Synthetic oligonucleotide

SEQ ID NO: 638159 - DNA, 55 bp, Artificial; identical to SEQ ID NO: 211107
  Synthetic oligonucleotide

SEQ ID NO: 638160 - DNA, 56 bp, Artificial; identical to SEQ ID NO: 192244
  Synthetic oligonucleotide

SEQ ID NO: 638161 - DNA, 55 bp, Artificial; identical to SEQ ID NO: 146244
  Synthetic oligonucleotide

SEQ ID NO: 638162 - DNA, 55 bp, Artificial; identical to SEQ ID NO: 148036
  Synthetic oligonucleotide

SEQ ID NO: 638163 - DNA, 60 bp, Artificial; identical to SEQ ID NO: 190953
  Synthetic oligonucleotide

SEQ ID NO: 638164 - DNA, 55 bp, Artificial; identical to SEQ ID NO: 198192
  Synthetic oligonucleotide

SEQ ID NO: 638165 - DNA, 55 bp, Artificial; identical to SEQ ID NO: 164075
  Synthetic oligonucleotide

SEQ ID NO: 638166 - DNA, 55 bp, Artificial; identical to SEQ ID NO: 166839
  Synthetic oligonucleotide

SEQ ID NO: 638167 - DNA, 55 bp, Artificial; identical to SEQ ID NO: 160071
  Synthetic oligonucleotide

SEQ ID NO: 638168 - DNA, 53 bp, Artificial; identical to SEQ ID NO: 155310
  Synthetic oligonucleotide

SEQ ID NO: 638169 - DNA, 55 bp, Artificial; identical to SEQ ID NO: 146243
  Synthetic oligonucleotide

SEQ ID NO: 638170 - DNA, 55 bp, Artificial; identical to SEQ ID NO: 160070
  Synthetic oligonucleotide

SEQ ID NO: 638171 - DNA, 55 bp, Artificial; identical to SEQ ID NO: 164076
  Synthetic oligonucleotide

SEQ ID NO: 638172 - DNA, 54 bp, Artificial; identical to SEQ ID NO: 188031
  Synthetic oligonucleotide

SEQ ID NO: 638173 - DNA, 56 bp, Artificial; identical to SEQ ID NO: 247044
  Synthetic oligonucleotide

SEQ ID NO: 638174 - DNA, 58 bp, Artificial; identical to SEQ ID NO: 256550
  Synthetic oligonucleotide

SEQ ID NO: 638175 - DNA, 59 bp, Artificial; identical to SEQ ID NO: 191684
  Synthetic oligonucleotide

SEQ ID NO: 638176 - DNA, 55 bp, Artificial; identical to SEQ ID NO: 142521
  Synthetic oligonucleotide

SEQ ID NO: 638177 - DNA, 50 bp, Artificial; identical to SEQ ID NO: 194054
  Synthetic oligonucleotide

SEQ ID NO: 638178 - DNA, 60 bp, Artificial; identical to SEQ ID NO: 202162
  Synthetic oligonucleotide

SEQ ID NO: 638179 - DNA, 58 bp, Artificial; identical to SEQ ID NO: 256448
  Synthetic oligonucleotide

SEQ ID NO: 638180 - DNA, 58 bp, Artificial; identical to SEQ ID NO: 182916
  Synthetic oligonucleotide

SEQ ID NO: 638181 - DNA, 50 bp, Artificial; identical to SEQ ID NO: 177073
  Synthetic oligonucleotide

SEQ ID NO: 638182 - DNA, 58 bp, Artificial; identical to SEQ ID NO: 147191
  Synthetic oligonucleotide

SEQ ID NO: 638183 - DNA, 54 bp, Artificial; identical to SEQ ID NO: 181114
  Synthetic oligonucleotide

SEQ ID NO: 638184 - DNA, 55 bp, Artificial; identical to SEQ ID NO: 202758
  Synthetic oligonucleotide

SEQ ID NO: 638185 - DNA, 56 bp, Artificial; identical to SEQ ID NO: 215549
  Synthetic oligonucleotide

SEQ ID NO: 638186 - DNA, 60 bp, Artificial; identical to SEQ ID NO: 142063
  Synthetic oligonucleotide

SEQ ID NO: 638187 - DNA, 55 bp, Artificial; identical to SEQ ID NO: 194562
  Synthetic oligonucleotide

SEQ ID NO: 638188 - DNA, 55 bp, Artificial; identical to SEQ ID NO: 169970
  Synthetic oligonucleotide

SEQ ID NO: 638189 - DNA, 55 bp, Artificial; identical to SEQ ID NO: 208633
  Synthetic oligonucleotide

SEQ ID NO: 638190 - DNA, 55 bp, Artificial; identical to SEQ ID NO: 187551
  Synthetic oligonucleotide

SEQ ID NO: 638191 - DNA, 55 bp, Artificial; identical to SEQ ID NO: 181113
  Synthetic oligonucleotide

SEQ ID NO: 638192 - DNA, 60 bp, Artificial; identical to SEQ ID NO: 257425
  Synthetic oligonucleotide

SEQ ID NO: 638193 - DNA, 55 bp, Artificial; identical to SEQ ID NO: 247702
  Synthetic oligonucleotide

SEQ ID NO: 638194 - DNA, 51 bp, Artificial; identical to SEQ ID NO: 153697
  Synthetic oligonucleotide

SEQ ID NO: 638195 - DNA, 54 bp, Artificial; identical to SEQ ID NO: 239306
  Synthetic oligonucleotide

SEQ ID NO: 638196 - DNA, 55 bp, Artificial; identical to SEQ ID NO: 164055
  Synthetic oligonucleotide

SEQ ID NO: 638197 - DNA, 58 bp, Artificial; identical to SEQ ID NO: 166116
  Synthetic oligonucleotide

SEQ ID NO: 638198 - DNA, 60 bp, Artificial; identical to SEQ ID NO: 247042
  Synthetic oligonucleotide

SEQ ID NO: 638199 - DNA, 55 bp, Artificial; identical to SEQ ID NO: 156167
  Synthetic oligonucleotide

SEQ ID NO: 638200 - DNA, 55 bp, Artificial; identical to SEQ ID NO: 207044
  Synthetic oligonucleotide

SEQ ID NO: 638201 - DNA, 58 bp, Artificial; identical to SEQ ID NO: 194061
  Synthetic oligonucleotide

SEQ ID NO: 638202 - DNA, 55 bp, Artificial; identical to SEQ ID NO: 189970
  Synthetic oligonucleotide

SEQ ID NO: 638203 - DNA, 57 bp, Artificial; identical to SEQ ID NO: 205196
  Synthetic oligonucleotide

SEQ ID NO: 638204 - DNA, 55 bp, Artificial; identical to SEQ ID NO: 247706
  Synthetic oligonucleotide

SEQ ID NO: 638205 - DNA, 55 bp, Artificial; identical to SEQ ID NO: 189971
  Synthetic oligonucleotide

SEQ ID NO: 638206 - DNA, 55 bp, Artificial; identical to SEQ ID NO: 254309
  Synthetic oligonucleotide

SEQ ID NO: 638207 - DNA, 55 bp, Artificial; identical to SEQ ID NO: 198191
  Synthetic oligonucleotide

SEQ ID NO: 638208 - DNA, 55 bp, Artificial; identical to SEQ ID NO: 151487
  Synthetic oligonucleotide

SEQ ID NO: 638209 - DNA, 55 bp, Artificial; identical to SEQ ID NO: 151490
  Synthetic oligonucleotide

SEQ ID NO: 638210 - DNA, 55 bp, Artificial; identical to SEQ ID NO: 218854
  Synthetic oligonucleotide

SEQ ID NO: 638211 - DNA, 55 bp, Artificial; identical to SEQ ID NO: 224607
  Synthetic oligonucleotide

SEQ ID NO: 638212 - DNA, 60 bp, Artificial; identical to SEQ ID NO: 182905
  Synthetic oligonucleotide

SEQ ID NO: 638213 - DNA, 52 bp, Artificial; identical to SEQ ID NO: 152075
  Synthetic oligonucleotide

SEQ ID NO: 638214 - DNA, 55 bp, Artificial; identical to SEQ ID NO: 169960
  Synthetic oligonucleotide

SEQ ID NO: 638215 - DNA, 55 bp, Artificial; identical to SEQ ID NO: 180196
  Synthetic oligonucleotide

SEQ ID NO: 638216 - DNA, 50 bp, Artificial; identical to SEQ ID NO: 149958
  Synthetic oligonucleotide

SEQ ID NO: 638217 - DNA, 57 bp, Artificial; identical to SEQ ID NO: 187395
  Synthetic oligonucleotide

SEQ ID NO: 638218 - DNA, 54 bp, Artificial; identical to SEQ ID NO: 202430
  Synthetic oligonucleotide

SEQ ID NO: 638219 - DNA, 55 bp, Artificial; identical to SEQ ID NO: 221512
  Synthetic oligonucleotide

SEQ ID NO: 638220 - DNA, 50 bp, Artificial; identical to SEQ ID NO: 177017
  Synthetic oligonucleotide

SEQ ID NO: 638221 - DNA, 54 bp, Artificial; identical to SEQ ID NO: 221508
  Synthetic oligonucleotide

SEQ ID NO: 638222 - DNA, 59 bp, Artificial; identical to SEQ ID NO: 198048
  Synthetic oligonucleotide

SEQ ID NO: 638223 - DNA, 56 bp, Artificial; identical to SEQ ID NO: 198037
  Synthetic oligonucleotide

SEQ ID NO: 638224 - DNA, 55 bp, Artificial; identical to SEQ ID NO: 198188
  Synthetic oligonucleotide

SEQ ID NO: 638225 - DNA, 57 bp, Artificial; identical to SEQ ID NO: 166988
  Synthetic oligonucleotide

SEQ ID NO: 638226 - DNA, 55 bp, Artificial; identical to SEQ ID NO: 247707
  Synthetic oligonucleotide

SEQ ID NO: 638227 - DNA, 55 bp, Artificial; identical to SEQ ID NO: 198187
  Synthetic oligonucleotide

SEQ ID NO: 638228 - DNA, 52 bp, Artificial; identical to SEQ ID NO: 174871
  Synthetic oligonucleotide

SEQ ID NO: 638229 - DNA, 55 bp, Artificial; identical to SEQ ID NO: 156222
  Synthetic oligonucleotide

SEQ ID NO: 638230 - DNA, 55 bp, Artificial; identical to SEQ ID NO: 148039
  Synthetic oligonucleotide

SEQ ID NO: 638231 - DNA, 59 bp, Artificial; identical to SEQ ID NO: 142728
  Synthetic oligonucleotide

SEQ ID NO: 638232 - DNA, 55 bp, Artificial; identical to SEQ ID NO: 166902
  Synthetic oligonucleotide

SEQ ID NO: 638233 - DNA, 50 bp, Artificial; identical to SEQ ID NO: 177047
  Synthetic oligonucleotide

SEQ ID NO: 638234 - DNA, 60 bp, Artificial; identical to SEQ ID NO: 182894
  Synthetic oligonucleotide

SEQ ID NO: 638235 - DNA, 56 bp, Artificial; identical to SEQ ID NO: 242284
  Synthetic oligonucleotide

SEQ ID NO: 638236 - DNA, 55 bp, Artificial; identical to SEQ ID NO: 208639
  Synthetic oligonucleotide

SEQ ID NO: 638237 - DNA, 55 bp, Artificial; identical to SEQ ID NO: 143780
  Synthetic oligonucleotide

SEQ ID NO: 638238 - DNA, 56 bp, Artificial; identical to SEQ ID NO: 191750
  Synthetic oligonucleotide

SEQ ID NO: 638239 - DNA, 55 bp, Artificial; identical to SEQ ID NO: 207363
  Synthetic oligonucleotide

SEQ ID NO: 638240 - DNA, 54 bp, Artificial; identical to SEQ ID NO: 194264
  Synthetic oligonucleotide

SEQ ID NO: 638241 - DNA, 55 bp, Artificial; identical to SEQ ID NO: 202103
  Synthetic oligonucleotide

SEQ ID NO: 638242 - DNA, 55 bp, Artificial; identical to SEQ ID NO: 191824
  Synthetic oligonucleotide

SEQ ID NO: 638243 - DNA, 57 bp, Artificial; identical to SEQ ID NO: 150626
  Synthetic oligonucleotide

SEQ ID NO: 638244 - DNA, 56 bp, Artificial; identical to SEQ ID NO: 239493
  Synthetic oligonucleotide

SEQ ID NO: 638245 - DNA, 60 bp, Artificial; identical to SEQ ID NO: 247041
  Synthetic oligonucleotide

SEQ ID NO: 638246 - DNA, 55 bp, Artificial; identical to SEQ ID NO: 198186
  Synthetic oligonucleotide

SEQ ID NO: 638247 - DNA, 60 bp, Artificial; identical to SEQ ID NO: 256468
  Synthetic oligonucleotide

SEQ ID NO: 638248 - DNA, 55 bp, Artificial; identical to SEQ ID NO: 259066
  Synthetic oligonucleotide

SEQ ID NO: 638249 - DNA, 55 bp, Artificial; identical to SEQ ID NO: 207326
  Synthetic oligonucleotide

SEQ ID NO: 638250 - DNA, 55 bp, Artificial; identical to SEQ ID NO: 160069
  Synthetic oligonucleotide

SEQ ID NO: 638251 - DNA, 55 bp, Artificial; identical to SEQ ID NO: 156223
  Synthetic oligonucleotide

SEQ ID NO: 638252 - DNA, 55 bp, Artificial; identical to SEQ ID NO: 247710
  Synthetic oligonucleotide

SEQ ID NO: 638253 - DNA, 55 bp, Artificial; identical to SEQ ID NO: 164051
  Synthetic oligonucleotide

SEQ ID NO: 638254 - DNA, 55 bp, Artificial; identical to SEQ ID NO: 239964
  Synthetic oligonucleotide

SEQ ID NO: 638255 - DNA, 55 bp, Artificial; identical to SEQ ID NO: 239963
  Synthetic oligonucleotide

SEQ ID NO: 638256 - DNA, 51 bp, Artificial; identical to SEQ ID NO: 193849
  Synthetic oligonucleotide

SEQ ID NO: 638257 - DNA, 53 bp, Artificial; identical to SEQ ID NO: 160086
  Synthetic oligonucleotide

SEQ ID NO: 638258 - DNA, 55 bp, Artificial; identical to SEQ ID NO: 191288
  Synthetic oligonucleotide

SEQ ID NO: 638259 - DNA, 51 bp, Artificial; identical to SEQ ID NO: 152491
  Synthetic oligonucleotide

SEQ ID NO: 638260 - DNA, 60 bp, Artificial; identical to SEQ ID NO: 208024
  Synthetic oligonucleotide

SEQ ID NO: 638261 - DNA, 60 bp, Artificial; identical to SEQ ID NO: 171095
  Synthetic oligonucleotide

SEQ ID NO: 638262 - DNA, 57 bp, Artificial; identical to SEQ ID NO: 150630
  Synthetic oligonucleotide

SEQ ID NO: 638263 - DNA, 60 bp, Artificial; identical to SEQ ID NO: 171084
  Synthetic oligonucleotide

SEQ ID NO: 638264 - DNA, 59 bp, Artificial; identical to SEQ ID NO: 198015
  Synthetic oligonucleotide

SEQ ID NO: 638265 - DNA, 59 bp, Artificial; identical to SEQ ID NO: 150631
  Synthetic oligonucleotide

SEQ ID NO: 638266 - DNA, 55 bp, Artificial; identical to SEQ ID NO: 257812
  Synthetic oligonucleotide

SEQ ID NO: 638267 - DNA, 55 bp, Artificial; identical to SEQ ID NO: 205537
  Synthetic oligonucleotide

SEQ ID NO: 638268 - DNA, 55 bp, Artificial; identical to SEQ ID NO: 198184
  Synthetic oligonucleotide

SEQ ID NO: 638269 - DNA, 55 bp, Artificial; identical to SEQ ID NO: 254313
  Synthetic oligonucleotide

SEQ ID NO: 638270 - DNA, 55 bp, Artificial; identical to SEQ ID NO: 148046
  Synthetic oligonucleotide

SEQ ID NO: 638271 - DNA, 51 bp, Artificial; identical to SEQ ID NO: 152111
  Synthetic oligonucleotide

SEQ ID NO: 638272 - DNA, 54 bp, Artificial; identical to SEQ ID NO: 169961
  Synthetic oligonucleotide

SEQ ID NO: 638273 - DNA, 51 bp, Artificial; identical to SEQ ID NO: 246580
  Synthetic oligonucleotide

SEQ ID NO: 638274 - DNA, 55 bp, Artificial; identical to SEQ ID NO: 152306
  Synthetic oligonucleotide

SEQ ID NO: 638275 - DNA, 60 bp, Artificial; identical to SEQ ID NO: 257424
  Synthetic oligonucleotide

SEQ ID NO: 638276 - DNA, 52 bp, Artificial; identical to SEQ ID NO: 186143
  Synthetic oligonucleotide

SEQ ID NO: 638277 - DNA, 49 bp, Artificial; identical to SEQ ID NO: 142608
  Synthetic oligonucleotide

SEQ ID NO: 638278 - DNA, 55 bp, Artificial; identical to SEQ ID NO: 198183
  Synthetic oligonucleotide

SEQ ID NO: 638279 - DNA, 58 bp, Artificial; identical to SEQ ID NO: 147199
  Synthetic oligonucleotide

SEQ ID NO: 638280 - DNA, 59 bp, Artificial; identical to SEQ ID NO: 242291
  Synthetic oligonucleotide

SEQ ID NO: 638281 - DNA, 58 bp, Artificial; identical to SEQ ID NO: 150634
  Synthetic oligonucleotide

SEQ ID NO: 638282 - DNA, 54 bp, Artificial; identical to SEQ ID NO: 233386
  Synthetic oligonucleotide

SEQ ID NO: 638283 - DNA, 52 bp, Artificial; identical to SEQ ID NO: 211590
  Synthetic oligonucleotide

SEQ ID NO: 638284 - DNA, 60 bp, Artificial; identical to SEQ ID NO: 237765
  Synthetic oligonucleotide

SEQ ID NO: 638285 - DNA, 60 bp, Artificial; identical to SEQ ID NO: 182827
  Synthetic oligonucleotide

SEQ ID NO: 638286 - DNA, 57 bp, Artificial; identical to SEQ ID NO: 233343
  Synthetic oligonucleotide

SEQ ID NO: 638287 - DNA, 55 bp, Artificial; identical to SEQ ID NO: 164049
  Synthetic oligonucleotide

SEQ ID NO: 638288 - DNA, 54 bp, Artificial; identical to SEQ ID NO: 240679
  Synthetic oligonucleotide

SEQ ID NO: 638289 - DNA, 55 bp, Artificial; identical to SEQ ID NO: 233385
  Synthetic oligonucleotide

SEQ ID NO: 638290 - DNA, 54 bp, Artificial; identical to SEQ ID NO: 233799
  Synthetic oligonucleotide

SEQ ID NO: 638291 - DNA, 60 bp, Artificial; identical to SEQ ID NO: 160075
  Synthetic oligonucleotide

SEQ ID NO: 638292 - DNA, 55 bp, Artificial; identical to SEQ ID NO: 211108
  Synthetic oligonucleotide

SEQ ID NO: 638293 - DNA, 58 bp, Artificial; identical to SEQ ID NO: 242295
  Synthetic oligonucleotide

SEQ ID NO: 638294 - DNA, 55 bp, Artificial; identical to SEQ ID NO: 180187
  Synthetic oligonucleotide

SEQ ID NO: 638295 - DNA, 55 bp, Artificial; identical to SEQ ID NO: 180186
  Synthetic oligonucleotide

SEQ ID NO: 638296 - DNA, 55 bp, Artificial; identical to SEQ ID NO: 153297
  Synthetic oligonucleotide

SEQ ID NO: 638297 - DNA, 55 bp, Artificial; identical to SEQ ID NO: 180185
  Synthetic oligonucleotide

SEQ ID NO: 638298 - DNA, 55 bp, Artificial; identical to SEQ ID NO: 151495
  Synthetic oligonucleotide

SEQ ID NO: 638299 - DNA, 55 bp, Artificial; identical to SEQ ID NO: 148047
  Synthetic oligonucleotide

SEQ ID NO: 638300 - DNA, 55 bp, Artificial; identical to SEQ ID NO: 202101
  Synthetic oligonucleotide

SEQ ID NO: 638301 - DNA, 54 bp, Artificial; identical to SEQ ID NO: 154553
  Synthetic oligonucleotide

SEQ ID NO: 638302 - DNA, 60 bp, Artificial; identical to SEQ ID NO: 206989
  Synthetic oligonucleotide

SEQ ID NO: 638303 - DNA, 55 bp, Artificial; identical to SEQ ID NO: 142094
  Synthetic oligonucleotide

SEQ ID NO: 638304 - DNA, 53 bp, Artificial; identical to SEQ ID NO: 190700
  Synthetic oligonucleotide

SEQ ID NO: 638305 - DNA, 59 bp, Artificial; identical to SEQ ID NO: 160042
  Synthetic oligonucleotide

SEQ ID NO: 638306 - DNA, 56 bp, Artificial; identical to SEQ ID NO: 171051
  Synthetic oligonucleotide

SEQ ID NO: 638307 - DNA, 59 bp, Artificial; identical to SEQ ID NO: 151433
  Synthetic oligonucleotide

SEQ ID NO: 638308 - DNA, 52 bp, Artificial; identical to SEQ ID NO: 187021
  Synthetic oligonucleotide

SEQ ID NO: 638309 - DNA, 55 bp, Artificial; identical to SEQ ID NO: 261957
  Synthetic oligonucleotide

SEQ ID NO: 638310 - DNA, 60 bp, Artificial; identical to SEQ ID NO: 160031
  Synthetic oligonucleotide

SEQ ID NO: 638311 - DNA, 54 bp, Artificial; identical to SEQ ID NO: 223508
  Synthetic oligonucleotide

SEQ ID NO: 638312 - DNA, 55 bp, Artificial; identical to SEQ ID NO: 151496
  Synthetic oligonucleotide

SEQ ID NO: 638313 - DNA, 60 bp, Artificial; identical to SEQ ID NO: 182805
  Synthetic oligonucleotide

SEQ ID NO: 638314 - DNA, 51 bp, Artificial; identical to SEQ ID NO: 237125
  Synthetic oligonucleotide

SEQ ID NO: 638315 - DNA, 53 bp, Artificial; identical to SEQ ID NO: 239959
  Synthetic oligonucleotide

SEQ ID NO: 638316 - DNA, 55 bp, Artificial; identical to SEQ ID NO: 156225
  Synthetic oligonucleotide

SEQ ID NO: 638317 - DNA, 60 bp, Artificial; identical to SEQ ID NO: 150636
  Synthetic oligonucleotide

SEQ ID NO: 638318 - DNA, 58 bp, Artificial; identical to SEQ ID NO: 257502
  Synthetic oligonucleotide

SEQ ID NO: 638319 - DNA, 55 bp, Artificial; identical to SEQ ID NO: 197296
  Synthetic oligonucleotide

SEQ ID NO: 638320 - DNA, 60 bp, Artificial; identical to SEQ ID NO: 257423
  Synthetic oligonucleotide

SEQ ID NO: 638321 - DNA, 55 bp, Artificial; identical to SEQ ID NO: 188289
  Synthetic oligonucleotide

SEQ ID NO: 638322 - DNA, 56 bp, Artificial; identical to SEQ ID NO: 141986
  Synthetic oligonucleotide

SEQ ID NO: 638323 - DNA, 59 bp, Artificial; identical to SEQ ID NO: 198004
  Synthetic oligonucleotide

SEQ ID NO: 638324 - DNA, 55 bp, Artificial; identical to SEQ ID NO: 224608
  Synthetic oligonucleotide

SEQ ID NO: 638325 - DNA, 55 bp, Artificial; identical to SEQ ID NO: 187545
  Synthetic oligonucleotide

SEQ ID NO: 638326 - DNA, 55 bp, Artificial; identical to SEQ ID NO: 238074
  Synthetic oligonucleotide

SEQ ID NO: 638327 - DNA, 56 bp, Artificial; identical to SEQ ID NO: 237766
  Synthetic oligonucleotide

SEQ ID NO: 638328 - DNA, 55 bp, Artificial; identical to SEQ ID NO: 217366
  Synthetic oligonucleotide

SEQ ID NO: 638329 - DNA, 52 bp, Artificial; identical to SEQ ID NO: 240968
  Synthetic oligonucleotide

SEQ ID NO: 638330 - DNA, 53 bp, Artificial; identical to SEQ ID NO: 190735
  Synthetic oligonucleotide

SEQ ID NO: 638331 - DNA, 55 bp, Artificial; identical to SEQ ID NO: 239956
  Synthetic oligonucleotide

SEQ ID NO: 638332 - DNA, 52 bp, Artificial; identical to SEQ ID NO: 141293
  Synthetic oligonucleotide

SEQ ID NO: 638333 - DNA, 55 bp, Artificial; identical to SEQ ID NO: 160066
  Synthetic oligonucleotide

SEQ ID NO: 638334 - DNA, 55 bp, Artificial; identical to SEQ ID NO: 211109
  Synthetic oligonucleotide

SEQ ID NO: 638335 - DNA, 54 bp, Artificial; identical to SEQ ID NO: 254316
  Synthetic oligonucleotide

SEQ ID NO: 638336 - DNA, 55 bp, Artificial; identical to SEQ ID NO: 156226
  Synthetic oligonucleotide

SEQ ID NO: 638337 - DNA, 59 bp, Artificial; identical to SEQ ID NO: 203243
  Synthetic oligonucleotide

SEQ ID NO: 638338 - DNA, 58 bp, Artificial; identical to SEQ ID NO: 150683
  Synthetic oligonucleotide

SEQ ID NO: 638339 - DNA, 60 bp, Artificial; identical to SEQ ID NO: 197993
  Synthetic oligonucleotide

SEQ ID NO: 638340 - DNA, 55 bp, Artificial; identical to SEQ ID NO: 180181
  Synthetic oligonucleotide

SEQ ID NO: 638341 - DNA, 55 bp, Artificial; identical to SEQ ID NO: 211110
  Synthetic oligonucleotide

SEQ ID NO: 638342 - DNA, 57 bp, Artificial; identical to SEQ ID NO: 159955
  Synthetic oligonucleotide

SEQ ID NO: 638343 - DNA, 55 bp, Artificial; identical to SEQ ID NO: 215350
  Synthetic oligonucleotide

SEQ ID NO: 638344 - DNA, 55 bp, Artificial; identical to SEQ ID NO: 217364
  Synthetic oligonucleotide

SEQ ID NO: 638345 - DNA, 55 bp, Artificial; identical to SEQ ID NO: 148049
  Synthetic oligonucleotide

SEQ ID NO: 638346 - DNA, 55 bp, Artificial; identical to SEQ ID NO: 212749
  Synthetic oligonucleotide

SEQ ID NO: 638347 - DNA, 55 bp, Artificial; identical to SEQ ID NO: 148050
  Synthetic oligonucleotide

SEQ ID NO: 638348 - DNA, 54 bp, Artificial; identical to SEQ ID NO: 247037
  Synthetic oligonucleotide

SEQ ID NO: 638349 - DNA, 55 bp, Artificial; identical to SEQ ID NO: 217352
  Synthetic oligonucleotide

SEQ ID NO: 638350 - DNA, 55 bp, Artificial; identical to SEQ ID NO: 259065
  Synthetic oligonucleotide

SEQ ID NO: 638351 - DNA, 55 bp, Artificial; identical to SEQ ID NO: 207329
  Synthetic oligonucleotide

SEQ ID NO: 638352 - DNA, 53 bp, Artificial; identical to SEQ ID NO: 180214
  Synthetic oligonucleotide

SEQ ID NO: 638353 - DNA, 53 bp, Artificial; identical to SEQ ID NO: 247849
  Synthetic oligonucleotide

SEQ ID NO: 638354 - DNA, 55 bp, Artificial; identical to SEQ ID NO: 180213
  Synthetic oligonucleotide

SEQ ID NO: 638355 - DNA, 55 bp, Artificial; identical to SEQ ID NO: 205538
  Synthetic oligonucleotide

SEQ ID NO: 638356 - DNA, 55 bp, Artificial; identical to SEQ ID NO: 244216
  Synthetic oligonucleotide

SEQ ID NO: 638357 - DNA, 55 bp, Artificial; identical to SEQ ID NO: 172915
  Synthetic oligonucleotide

SEQ ID NO: 638358 - DNA, 55 bp, Artificial; identical to SEQ ID NO: 180212
  Synthetic oligonucleotide

SEQ ID NO: 638359 - DNA, 55 bp, Artificial; identical to SEQ ID NO: 156227
  Synthetic oligonucleotide

SEQ ID NO: 638360 - DNA, 55 bp, Artificial; identical to SEQ ID NO: 247686
  Synthetic oligonucleotide

SEQ ID NO: 638361 - DNA, 55 bp, Artificial; identical to SEQ ID NO: 164044
  Synthetic oligonucleotide

SEQ ID NO: 638362 - DNA, 55 bp, Artificial; identical to SEQ ID NO: 144409
  Synthetic oligonucleotide

SEQ ID NO: 638363 - DNA, 50 bp, Artificial; identical to SEQ ID NO: 141379
  Synthetic oligonucleotide

SEQ ID NO: 638364 - DNA, 52 bp, Artificial; identical to SEQ ID NO: 206480
  Synthetic oligonucleotide

SEQ ID NO: 638365 - DNA, 55 bp, Artificial; identical to SEQ ID NO: 188288
  Synthetic oligonucleotide

SEQ ID NO: 638366 - DNA, 55 bp, Artificial; identical to SEQ ID NO: 217355
  Synthetic oligonucleotide

SEQ ID NO: 638367 - DNA, 55 bp, Artificial; identical to SEQ ID NO: 144773
  Synthetic oligonucleotide

SEQ ID NO: 638368 - DNA, 55 bp, Artificial; identical to SEQ ID NO: 161020
  Synthetic oligonucleotide

SEQ ID NO: 638369 - DNA, 55 bp, Artificial; identical to SEQ ID NO: 187541
  Synthetic oligonucleotide

SEQ ID NO: 638370 - DNA, 60 bp, Artificial; identical to SEQ ID NO: 150684
  Synthetic oligonucleotide

SEQ ID NO: 638371 - DNA, 55 bp, Artificial; identical to SEQ ID NO: 207331
  Synthetic oligonucleotide

SEQ ID NO: 638372 - DNA, 55 bp, Artificial; identical to SEQ ID NO: 189411
  Synthetic oligonucleotide

SEQ ID NO: 638373 - DNA, 55 bp, Artificial; identical to SEQ ID NO: 148013
  Synthetic oligonucleotide

SEQ ID NO: 638374 - DNA, 57 bp, Artificial; identical to SEQ ID NO: 242239
  Synthetic oligonucleotide

SEQ ID NO: 638375 - DNA, 55 bp, Artificial; identical to SEQ ID NO: 209257
  Synthetic oligonucleotide

SEQ ID NO: 638376 - DNA, 55 bp, Artificial; identical to SEQ ID NO: 253017
  Synthetic oligonucleotide

SEQ ID NO: 638377 - DNA, 55 bp, Artificial; identical to SEQ ID NO: 148014
  Synthetic oligonucleotide

SEQ ID NO: 638378 - DNA, 55 bp, Artificial; identical to SEQ ID NO: 189413
  Synthetic oligonucleotide

SEQ ID NO: 638379 - DNA, 55 bp, Artificial; identical to SEQ ID NO: 146240
  Synthetic oligonucleotide

SEQ ID NO: 638380 - DNA, 50 bp, Artificial; identical to SEQ ID NO: 237440
  Synthetic oligonucleotide

SEQ ID NO: 638381 - DNA, 55 bp, Artificial; identical to SEQ ID NO: 202099
  Synthetic oligonucleotide

SEQ ID NO: 638382 - DNA, 55 bp, Artificial; identical to SEQ ID NO: 194569
  Synthetic oligonucleotide

SEQ ID NO: 638383 - DNA, 55 bp, Artificial; identical to SEQ ID NO: 197923
  Synthetic oligonucleotide

SEQ ID NO: 638384 - DNA, 60 bp, Artificial; identical to SEQ ID NO: 266232
  Synthetic oligonucleotide

SEQ ID NO: 638385 - DNA, 55 bp, Artificial; identical to SEQ ID NO: 194571
  Synthetic oligonucleotide

SEQ ID NO: 638386 - DNA, 55 bp, Artificial; identical to SEQ ID NO: 188174
  Synthetic oligonucleotide

SEQ ID NO: 638387 - DNA, 55 bp, Artificial; identical to SEQ ID NO: 234196
  Synthetic oligonucleotide

SEQ ID NO: 638388 - DNA, 60 bp, Artificial; identical to SEQ ID NO: 142096
  Synthetic oligonucleotide

SEQ ID NO: 638389 - DNA, 55 bp, Artificial; identical to SEQ ID NO: 224610
  Synthetic oligonucleotide

SEQ ID NO: 638390 - DNA, 55 bp, Artificial; identical to SEQ ID NO: 208626
  Synthetic oligonucleotide

SEQ ID NO: 638391 - DNA, 54 bp, Artificial; identical to SEQ ID NO: 148017
  Synthetic oligonucleotide

SEQ ID NO: 638392 - DNA, 55 bp, Artificial; identical to SEQ ID NO: 156228
  Synthetic oligonucleotide

SEQ ID NO: 638393 - DNA, 55 bp, Artificial; identical to SEQ ID NO: 224611
  Synthetic oligonucleotide

SEQ ID NO: 638394 - DNA, 55 bp, Artificial; identical to SEQ ID NO: 160065
  Synthetic oligonucleotide

SEQ ID NO: 638395 - DNA, 60 bp, Artificial; identical to SEQ ID NO: 150685
  Synthetic oligonucleotide

SEQ ID NO: 638396 - DNA, 52 bp, Artificial; identical to SEQ ID NO: 254320
  Synthetic oligonucleotide

SEQ ID NO: 638397 - DNA, 55 bp, Artificial; identical to SEQ ID NO: 197917
  Synthetic oligonucleotide

SEQ ID NO: 638398 - DNA, 55 bp, Artificial; identical to SEQ ID NO: 197292
  Synthetic oligonucleotide

SEQ ID NO: 638399 - DNA, 55 bp, Artificial; identical to SEQ ID NO: 234697
  Synthetic oligonucleotide

SEQ ID NO: 638400 - DNA, 57 bp, Artificial; identical to SEQ ID NO: 166162
  Synthetic oligonucleotide

SEQ ID NO: 638401 - DNA, 60 bp, Artificial; identical to SEQ ID NO: 248863
  Synthetic oligonucleotide

SEQ ID NO: 638402 - DNA, 52 bp, Artificial; identical to SEQ ID NO: 202959
  Synthetic oligonucleotide

SEQ ID NO: 638403 - DNA, 55 bp, Artificial; identical to SEQ ID NO: 180207
  Synthetic oligonucleotide

SEQ ID NO: 638404 - DNA, 55 bp, Artificial; identical to SEQ ID NO: 148018
  Synthetic oligonucleotide

SEQ ID NO: 638405 - DNA, 52 bp, Artificial; identical to SEQ ID NO: 185912
  Synthetic oligonucleotide

SEQ ID NO: 638406 - DNA, 58 bp, Artificial; identical to SEQ ID NO: 156298
  Synthetic oligonucleotide

SEQ ID NO: 638407 - DNA, 51 bp, Artificial; identical to SEQ ID NO: 153232
  Synthetic oligonucleotide

SEQ ID NO: 638408 - DNA, 60 bp, Artificial; identical to SEQ ID NO: 225191
  Synthetic oligonucleotide

SEQ ID NO: 638409 - DNA, 55 bp, Artificial; identical to SEQ ID NO: 180206
  Synthetic oligonucleotide

SEQ ID NO: 638410 - DNA, 51 bp, Artificial; identical to SEQ ID NO: 167163
  Synthetic oligonucleotide

SEQ ID NO: 638411 - DNA, 55 bp, Artificial; identical to SEQ ID NO: 266239
  Synthetic oligonucleotide

SEQ ID NO: 638412 - DNA, 55 bp, Artificial; identical to SEQ ID NO: 190067
  Synthetic oligonucleotide

SEQ ID NO: 638413 - DNA, 54 bp, Artificial; identical to SEQ ID NO: 156231
  Synthetic oligonucleotide

SEQ ID NO: 638414 - DNA, 55 bp, Artificial; identical to SEQ ID NO: 212750
  Synthetic oligonucleotide

SEQ ID NO: 638415 - DNA, 55 bp, Artificial; identical to SEQ ID NO: 233378
  Synthetic oligonucleotide

SEQ ID NO: 638416 - DNA, 55 bp, Artificial; identical to SEQ ID NO: 172914
  Synthetic oligonucleotide

SEQ ID NO: 638417 - DNA, 55 bp, Artificial; identical to SEQ ID NO: 247688
  Synthetic oligonucleotide

SEQ ID NO: 638418 - DNA, 55 bp, Artificial; identical to SEQ ID NO: 245006
  Synthetic oligonucleotide

SEQ ID NO: 638419 - DNA, 53 bp, Artificial; identical to SEQ ID NO: 164891
  Synthetic oligonucleotide

SEQ ID NO: 638420 - DNA, 52 bp, Artificial; identical to SEQ ID NO: 153646
  Synthetic oligonucleotide

SEQ ID NO: 638421 - DNA, 53 bp, Artificial; identical to SEQ ID NO: 247035
  Synthetic oligonucleotide

SEQ ID NO: 638422 - DNA, 57 bp, Artificial; identical to SEQ ID NO: 233345
  Synthetic oligonucleotide

SEQ ID NO: 638423 - DNA, 53 bp, Artificial; identical to SEQ ID NO: 246386
  Synthetic oligonucleotide

SEQ ID NO: 638424 - DNA, 60 bp, Artificial; identical to SEQ ID NO: 142617
  Synthetic oligonucleotide

SEQ ID NO: 638425 - DNA, 52 bp, Artificial; identical to SEQ ID NO: 197582
  Synthetic oligonucleotide

SEQ ID NO: 638426 - DNA, 55 bp, Artificial; identical to SEQ ID NO: 164042
  Synthetic oligonucleotide

SEQ ID NO: 638427 - DNA, 55 bp, Artificial; identical to SEQ ID NO: 169290
  Synthetic oligonucleotide

SEQ ID NO: 638428 - DNA, 55 bp, Artificial; identical to SEQ ID NO: 171766
  Synthetic oligonucleotide

SEQ ID NO: 638429 - DNA, 55 bp, Artificial; identical to SEQ ID NO: 180203
  Synthetic oligonucleotide

SEQ ID NO: 638430 - DNA, 55 bp, Artificial; identical to SEQ ID NO: 190061
  Synthetic oligonucleotide

SEQ ID NO: 638431 - DNA, 55 bp, Artificial; identical to SEQ ID NO: 166907
  Synthetic oligonucleotide

SEQ ID NO: 638432 - DNA, 56 bp, Artificial; identical to SEQ ID NO: 266221
  Synthetic oligonucleotide

SEQ ID NO: 638433 - DNA, 60 bp, Artificial; identical to SEQ ID NO: 190420
  Synthetic oligonucleotide

SEQ ID NO: 638434 - DNA, 55 bp, Artificial; identical to SEQ ID NO: 221540
  Synthetic oligonucleotide

SEQ ID NO: 638435 - DNA, 60 bp, Artificial; identical to SEQ ID NO: 253197
  Synthetic oligonucleotide

SEQ ID NO: 638436 - DNA, 54 bp, Artificial; identical to SEQ ID NO: 216606
  Synthetic oligonucleotide

SEQ ID NO: 638437 - DNA, 50 bp, Artificial; identical to SEQ ID NO: 213266
  Synthetic oligonucleotide

SEQ ID NO: 638438 - DNA, 55 bp, Artificial; identical to SEQ ID NO: 156233
  Synthetic oligonucleotide

SEQ ID NO: 638439 - DNA, 56 bp, Artificial; identical to SEQ ID NO: 150687
  Synthetic oligonucleotide

SEQ ID NO: 638440 - DNA, 51 bp, Artificial; identical to SEQ ID NO: 154659
  Synthetic oligonucleotide

SEQ ID NO: 638441 - DNA, 55 bp, Artificial; identical to SEQ ID NO: 142091
  Synthetic oligonucleotide

SEQ ID NO: 638442 - DNA, 55 bp, Artificial; identical to SEQ ID NO: 143778
  Synthetic oligonucleotide

SEQ ID NO: 638443 - DNA, 55 bp, Artificial; identical to SEQ ID NO: 203240
  Synthetic oligonucleotide

SEQ ID NO: 638444 - DNA, 51 bp, Artificial; identical to SEQ ID NO: 174930
  Synthetic oligonucleotide

SEQ ID NO: 638445 - DNA, 55 bp, Artificial; identical to SEQ ID NO: 224612
  Synthetic oligonucleotide

SEQ ID NO: 638446 - DNA, 55 bp, Artificial; identical to SEQ ID NO: 156234
  Synthetic oligonucleotide

SEQ ID NO: 638447 - DNA, 50 bp, Artificial; identical to SEQ ID NO: 237439
  Synthetic oligonucleotide

SEQ ID NO: 638448 - DNA, 54 bp, Artificial; identical to SEQ ID NO: 161290
  Synthetic oligonucleotide

SEQ ID NO: 638449 - DNA, 53 bp, Artificial; identical to SEQ ID NO: 237011
  Synthetic oligonucleotide

SEQ ID NO: 638450 - DNA, 55 bp, Artificial; identical to SEQ ID NO: 142090
  Synthetic oligonucleotide

SEQ ID NO: 638451 - DNA, 55 bp, Artificial; identical to SEQ ID NO: 180200
  Synthetic oligonucleotide

SEQ ID NO: 638452 - DNA, 55 bp, Artificial; identical to SEQ ID NO: 201270
  Synthetic oligonucleotide

SEQ ID NO: 638453 - DNA, 55 bp, Artificial; identical to SEQ ID NO: 254302
  Synthetic oligonucleotide

SEQ ID NO: 638454 - DNA, 55 bp, Artificial; identical to SEQ ID NO: 224613
  Synthetic oligonucleotide

SEQ ID NO: 638455 - DNA, 59 bp, Artificial; identical to SEQ ID NO: 156354
  Synthetic oligonucleotide

SEQ ID NO: 638456 - DNA, 55 bp, Artificial; identical to SEQ ID NO: 156236
  Synthetic oligonucleotide

SEQ ID NO: 638457 - DNA, 53 bp, Artificial; identical to SEQ ID NO: 234487
  Synthetic oligonucleotide

SEQ ID NO: 638458 - DNA, 53 bp, Artificial; identical to SEQ ID NO: 246383
  Synthetic oligonucleotide

SEQ ID NO: 638459 - DNA, 55 bp, Artificial; identical to SEQ ID NO: 156237
  Synthetic oligonucleotide

SEQ ID NO: 638460 - DNA, 55 bp, Artificial; identical to SEQ ID NO: 265761
  Synthetic oligonucleotide

SEQ ID NO: 638461 - DNA, 55 bp, Artificial; identical to SEQ ID NO: 189372
  Synthetic oligonucleotide

SEQ ID NO: 638462 - DNA, 55 bp, Artificial; identical to SEQ ID NO: 205541
  Synthetic oligonucleotide

SEQ ID NO: 638463 - DNA, 55 bp, Artificial; identical to SEQ ID NO: 166908
  Synthetic oligonucleotide

SEQ ID NO: 638464 - DNA, 55 bp, Artificial; identical to SEQ ID NO: 202097
  Synthetic oligonucleotide

SEQ ID NO: 638465 - DNA, 55 bp, Artificial; identical to SEQ ID NO: 234786
  Synthetic oligonucleotide

SEQ ID NO: 638466 - DNA, 53 bp, Artificial; identical to SEQ ID NO: 141246
  Synthetic oligonucleotide

SEQ ID NO: 638467 - DNA, 55 bp, Artificial; identical to SEQ ID NO: 238069
  Synthetic oligonucleotide

SEQ ID NO: 638468 - DNA, 55 bp, Artificial; identical to SEQ ID NO: 238068
  Synthetic oligonucleotide

SEQ ID NO: 638469 - DNA, 50 bp, Artificial; identical to SEQ ID NO: 216906
  Synthetic oligonucleotide

SEQ ID NO: 638470 - DNA, 55 bp, Artificial; identical to SEQ ID NO: 254301
  Synthetic oligonucleotide

SEQ ID NO: 638471 - DNA, 53 bp, Artificial; identical to SEQ ID NO: 149381
  Synthetic oligonucleotide

SEQ ID NO: 638472 - DNA, 55 bp, Artificial; identical to SEQ ID NO: 212403
  Synthetic oligonucleotide

SEQ ID NO: 638473 - DNA, 55 bp, Artificial; identical to SEQ ID NO: 249069
  Synthetic oligonucleotide

SEQ ID NO: 638474 - DNA, 55 bp, Artificial; identical to SEQ ID NO: 153302
  Synthetic oligonucleotide

SEQ ID NO: 638475 - DNA, 55 bp, Artificial; identical to SEQ ID NO: 221539
  Synthetic oligonucleotide

SEQ ID NO: 638476 - DNA, 55 bp, Artificial; identical to SEQ ID NO: 156240
  Synthetic oligonucleotide

SEQ ID NO: 638477 - DNA, 55 bp, Artificial; identical to SEQ ID NO: 202095
  Synthetic oligonucleotide

SEQ ID NO: 638478 - DNA, 50 bp, Artificial; identical to SEQ ID NO: 223909
  Synthetic oligonucleotide

SEQ ID NO: 638479 - DNA, 55 bp, Artificial; identical to SEQ ID NO: 224615
  Synthetic oligonucleotide

SEQ ID NO: 638480 - DNA, 55 bp, Artificial; identical to SEQ ID NO: 253018
  Synthetic oligonucleotide

SEQ ID NO: 638481 - DNA, 55 bp, Artificial; identical to SEQ ID NO: 169973
  Synthetic oligonucleotide

SEQ ID NO: 638482 - DNA, 55 bp, Artificial; identical to SEQ ID NO: 220737
  Synthetic oligonucleotide

SEQ ID NO: 638483 - DNA, 55 bp, Artificial; identical to SEQ ID NO: 156242
  Synthetic oligonucleotide

SEQ ID NO: 638484 - DNA, 57 bp, Artificial; identical to SEQ ID NO: 209197
  Synthetic oligonucleotide

SEQ ID NO: 638485 - DNA, 60 bp, Artificial; identical to SEQ ID NO: 159868
  Synthetic oligonucleotide

SEQ ID NO: 638486 - DNA, 55 bp, Artificial; identical to SEQ ID NO: 188285
  Synthetic oligonucleotide

SEQ ID NO: 638487 - DNA, 55 bp, Artificial; identical to SEQ ID NO: 263171
  Synthetic oligonucleotide

SEQ ID NO: 638488 - DNA, 55 bp, Artificial; identical to SEQ ID NO: 207334
  Synthetic oligonucleotide

SEQ ID NO: 638489 - DNA, 54 bp, Artificial; identical to SEQ ID NO: 199575
  Synthetic oligonucleotide

SEQ ID NO: 638490 - DNA, 55 bp, Artificial; identical to SEQ ID NO: 209265
  Synthetic oligonucleotide

SEQ ID NO: 638491 - DNA, 53 bp, Artificial; identical to SEQ ID NO: 190737
  Synthetic oligonucleotide

SEQ ID NO: 638492 - DNA, 55 bp, Artificial; identical to SEQ ID NO: 160063
  Synthetic oligonucleotide

SEQ ID NO: 638493 - DNA, 51 bp, Artificial; identical to SEQ ID NO: 186831
  Synthetic oligonucleotide

SEQ ID NO: 638494 - DNA, 55 bp, Artificial; identical to SEQ ID NO: 217356
  Synthetic oligonucleotide

SEQ ID NO: 638495 - DNA, 55 bp, Artificial; identical to SEQ ID NO: 245001
  Synthetic oligonucleotide

SEQ ID NO: 638496 - DNA, 55 bp, Artificial; identical to SEQ ID NO: 238066
  Synthetic oligonucleotide

SEQ ID NO: 638497 - DNA, 55 bp, Artificial; identical to SEQ ID NO: 233527
  Synthetic oligonucleotide

SEQ ID NO: 638498 - DNA, 55 bp, Artificial; identical to SEQ ID NO: 164040
  Synthetic oligonucleotide

SEQ ID NO: 638499 - DNA, 54 bp, Artificial; identical to SEQ ID NO: 255285
  Synthetic oligonucleotide

SEQ ID NO: 638500 - DNA, 51 bp, Artificial; identical to SEQ ID NO: 241079
  Synthetic oligonucleotide

SEQ ID NO: 638501 - DNA, 55 bp, Artificial; identical to SEQ ID NO: 211112
  Synthetic oligonucleotide

SEQ ID NO: 638502 - DNA, 60 bp, Artificial; identical to SEQ ID NO: 256864
  Synthetic oligonucleotide

SEQ ID NO: 638503 - DNA, 55 bp, Artificial; identical to SEQ ID NO: 191284
  Synthetic oligonucleotide

SEQ ID NO: 638504 - DNA, 60 bp, Artificial; identical to SEQ ID NO: 210732
  Synthetic oligonucleotide

SEQ ID NO: 638505 - DNA, 60 bp, Artificial; identical to SEQ ID NO: 183282
  Synthetic oligonucleotide

SEQ ID NO: 638506 - DNA, 55 bp, Artificial; identical to SEQ ID NO: 168492
  Synthetic oligonucleotide

SEQ ID NO: 638507 - DNA, 60 bp, Artificial; identical to SEQ ID NO: 183271
  Synthetic oligonucleotide

SEQ ID NO: 638508 - DNA, 55 bp, Artificial; identical to SEQ ID NO: 156245
  Synthetic oligonucleotide

SEQ ID NO: 638509 - DNA, 55 bp, Artificial; identical to SEQ ID NO: 203488
  Synthetic oligonucleotide

SEQ ID NO: 638510 - DNA, 60 bp, Artificial; identical to SEQ ID NO: 217325
  Synthetic oligonucleotide

SEQ ID NO: 638511 - DNA, 55 bp, Artificial; identical to SEQ ID NO: 193577
  Synthetic oligonucleotide

SEQ ID NO: 638512 - DNA, 55 bp, Artificial; identical to SEQ ID NO: 169936
  Synthetic oligonucleotide

SEQ ID NO: 638513 - DNA, 55 bp, Artificial; identical to SEQ ID NO: 244997
  Synthetic oligonucleotide

SEQ ID NO: 638514 - DNA, 55 bp, Artificial; identical to SEQ ID NO: 142089
  Synthetic oligonucleotide

SEQ ID NO: 638515 - DNA, 60 bp, Artificial; identical to SEQ ID NO: 152376
  Synthetic oligonucleotide

SEQ ID NO: 638516 - DNA, 50 bp, Artificial; identical to SEQ ID NO: 158691
  Synthetic oligonucleotide

SEQ ID NO: 638517 - DNA, 55 bp, Artificial; identical to SEQ ID NO: 234797
  Synthetic oligonucleotide

SEQ ID NO: 638518 - DNA, 52 bp, Artificial; identical to SEQ ID NO: 199884
  Synthetic oligonucleotide

SEQ ID NO: 638519 - DNA, 57 bp, Artificial; identical to SEQ ID NO: 179579
  Synthetic oligonucleotide

SEQ ID NO: 638520 - DNA, 55 bp, Artificial; identical to SEQ ID NO: 239978
  Synthetic oligonucleotide

SEQ ID NO: 638521 - DNA, 55 bp, Artificial; identical to SEQ ID NO: 163966
  Synthetic oligonucleotide

SEQ ID NO: 638522 - DNA, 50 bp, Artificial; identical to SEQ ID NO: 170496
  Synthetic oligonucleotide

SEQ ID NO: 638523 - DNA, 55 bp, Artificial; identical to SEQ ID NO: 218853
  Synthetic oligonucleotide

SEQ ID NO: 638524 - DNA, 55 bp, Artificial; identical to SEQ ID NO: 197916
  Synthetic oligonucleotide

SEQ ID NO: 638525 - DNA, 60 bp, Artificial; identical to SEQ ID NO: 217336
  Synthetic oligonucleotide

SEQ ID NO: 638526 - DNA, 55 bp, Artificial; identical to SEQ ID NO: 207337
  Synthetic oligonucleotide

SEQ ID NO: 638527 - DNA, 55 bp, Artificial; identical to SEQ ID NO: 220721
  Synthetic oligonucleotide

SEQ ID NO: 638528 - DNA, 50 bp, Artificial; identical to SEQ ID NO: 252758
  Synthetic oligonucleotide

SEQ ID NO: 638529 - DNA, 60 bp, Artificial; identical to SEQ ID NO: 212414
  Synthetic oligonucleotide

SEQ ID NO: 638530 - DNA, 56 bp, Artificial; identical to SEQ ID NO: 244018
  Synthetic oligonucleotide

SEQ ID NO: 638531 - DNA, 60 bp, Artificial; identical to SEQ ID NO: 242248
  Synthetic oligonucleotide

SEQ ID NO: 638532 - DNA, 55 bp, Artificial; identical to SEQ ID NO: 188139
  Synthetic oligonucleotide

SEQ ID NO: 638533 - DNA, 55 bp, Artificial; identical to SEQ ID NO: 180154
  Synthetic oligonucleotide

SEQ ID NO: 638534 - DNA, 55 bp, Artificial; identical to SEQ ID NO: 163965
  Synthetic oligonucleotide

SEQ ID NO: 638535 - DNA, 55 bp, Artificial; identical to SEQ ID NO: 152308
  Synthetic oligonucleotide

SEQ ID NO: 638536 - DNA, 55 bp, Artificial; identical to SEQ ID NO: 244993
  Synthetic oligonucleotide

SEQ ID NO: 638537 - DNA, 55 bp, Artificial; identical to SEQ ID NO: 171018
  Synthetic oligonucleotide

SEQ ID NO: 638538 - DNA, 60 bp, Artificial; identical to SEQ ID NO: 194100
  Synthetic oligonucleotide

SEQ ID NO: 638539 - DNA, 55 bp, Artificial; identical to SEQ ID NO: 197924
  Synthetic oligonucleotide

SEQ ID NO: 638540 - DNA, 51 bp, Artificial; identical to SEQ ID NO: 187070
  Synthetic oligonucleotide

SEQ ID NO: 638541 - DNA, 57 bp, Artificial; identical to SEQ ID NO: 194992
  Synthetic oligonucleotide

SEQ ID NO: 638542 - DNA, 55 bp, Artificial; identical to SEQ ID NO: 208649
  Synthetic oligonucleotide

SEQ ID NO: 638543 - DNA, 51 bp, Artificial; identical to SEQ ID NO: 160934
  Synthetic oligonucleotide

SEQ ID NO: 638544 - DNA, 55 bp, Artificial; identical to SEQ ID NO: 180157
  Synthetic oligonucleotide

SEQ ID NO: 638545 - DNA, 55 bp, Artificial; identical to SEQ ID NO: 197911
  Synthetic oligonucleotide

SEQ ID NO: 638546 - DNA, 55 bp, Artificial; identical to SEQ ID NO: 163964
  Synthetic oligonucleotide

SEQ ID NO: 638547 - DNA, 56 bp, Artificial; identical to SEQ ID NO: 180086
  Synthetic oligonucleotide

SEQ ID NO: 638548 - DNA, 55 bp, Artificial; identical to SEQ ID NO: 180161
  Synthetic oligonucleotide

SEQ ID NO: 638549 - DNA, 55 bp, Artificial; identical to SEQ ID NO: 180179
  Synthetic oligonucleotide

SEQ ID NO: 638550 - DNA, 52 bp, Artificial; identical to SEQ ID NO: 203942
  Synthetic oligonucleotide

SEQ ID NO: 638551 - DNA, 55 bp, Artificial; identical to SEQ ID NO: 180178
  Synthetic oligonucleotide

SEQ ID NO: 638552 - DNA, 60 bp, Artificial; identical to SEQ ID NO: 183149
  Synthetic oligonucleotide

SEQ ID NO: 638553 - DNA, 55 bp, Artificial; identical to SEQ ID NO: 238062
  Synthetic oligonucleotide

SEQ ID NO: 638554 - DNA, 55 bp, Artificial; identical to SEQ ID NO: 207339
  Synthetic oligonucleotide

SEQ ID NO: 638555 - DNA, 55 bp, Artificial; identical to SEQ ID NO: 202104
  Synthetic oligonucleotide

SEQ ID NO: 638556 - DNA, 55 bp, Artificial; identical to SEQ ID NO: 148022
  Synthetic oligonucleotide

SEQ ID NO: 638557 - DNA, 55 bp, Artificial; identical to SEQ ID NO: 163963
  Synthetic oligonucleotide

SEQ ID NO: 638558 - DNA, 55 bp, Artificial; identical to SEQ ID NO: 249072
  Synthetic oligonucleotide

SEQ ID NO: 638559 - DNA, 55 bp, Artificial; identical to SEQ ID NO: 239977
  Synthetic oligonucleotide

SEQ ID NO: 638560 - DNA, 55 bp, Artificial; identical to SEQ ID NO: 180176
  Synthetic oligonucleotide

SEQ ID NO: 638561 - DNA, 55 bp, Artificial; identical to SEQ ID NO: 169926
  Synthetic oligonucleotide

SEQ ID NO: 638562 - DNA, 55 bp, Artificial; identical to SEQ ID NO: 148024
  Synthetic oligonucleotide

SEQ ID NO: 638563 - DNA, 55 bp, Artificial; identical to SEQ ID NO: 155002
  Synthetic oligonucleotide

SEQ ID NO: 638564 - DNA, 55 bp, Artificial; identical to SEQ ID NO: 244990
  Synthetic oligonucleotide

SEQ ID NO: 638565 - DNA, 54 bp, Artificial; identical to SEQ ID NO: 247818
  Synthetic oligonucleotide

SEQ ID NO: 638566 - DNA, 58 bp, Artificial; identical to SEQ ID NO: 206078
  Synthetic oligonucleotide

SEQ ID NO: 638567 - DNA, 55 bp, Artificial; identical to SEQ ID NO: 257817
  Synthetic oligonucleotide

SEQ ID NO: 638568 - DNA, 55 bp, Artificial; identical to SEQ ID NO: 197901
  Synthetic oligonucleotide

SEQ ID NO: 638569 - DNA, 58 bp, Artificial; identical to SEQ ID NO: 217347
  Synthetic oligonucleotide

SEQ ID NO: 638570 - DNA, 55 bp, Artificial; identical to SEQ ID NO: 211118
  Synthetic oligonucleotide

SEQ ID NO: 638571 - DNA, 55 bp, Artificial; identical to SEQ ID NO: 197960
  Synthetic oligonucleotide

SEQ ID NO: 638572 - DNA, 55 bp, Artificial; identical to SEQ ID NO: 148025
  Synthetic oligonucleotide

SEQ ID NO: 638573 - DNA, 55 bp, Artificial; identical to SEQ ID NO: 146238
  Synthetic oligonucleotide

SEQ ID NO: 638574 - DNA, 55 bp, Artificial; identical to SEQ ID NO: 254293
  Synthetic oligonucleotide

SEQ ID NO: 638575 - DNA, 52 bp, Artificial; identical to SEQ ID NO: 165119
  Synthetic oligonucleotide

SEQ ID NO: 638576 - DNA, 55 bp, Artificial; identical to SEQ ID NO: 153303
  Synthetic oligonucleotide

SEQ ID NO: 638577 - DNA, 55 bp, Artificial; identical to SEQ ID NO: 162087
  Synthetic oligonucleotide

SEQ ID NO: 638578 - DNA, 60 bp, Artificial; identical to SEQ ID NO: 212425
  Synthetic oligonucleotide

SEQ ID NO: 638579 - DNA, 56 bp, Artificial; identical to SEQ ID NO: 180058
  Synthetic oligonucleotide

SEQ ID NO: 638580 - DNA, 55 bp, Artificial; identical to SEQ ID NO: 163961
  Synthetic oligonucleotide

SEQ ID NO: 638581 - DNA, 55 bp, Artificial; identical to SEQ ID NO: 207340
  Synthetic oligonucleotide

SEQ ID NO: 638582 - DNA, 55 bp, Artificial; identical to SEQ ID NO: 244989
  Synthetic oligonucleotide

SEQ ID NO: 638583 - DNA, 55 bp, Artificial; identical to SEQ ID NO: 156195
  Synthetic oligonucleotide

SEQ ID NO: 638584 - DNA, 55 bp, Artificial; identical to SEQ ID NO: 239976
  Synthetic oligonucleotide

SEQ ID NO: 638585 - DNA, 55 bp, Artificial; identical to SEQ ID NO: 180170
  Synthetic oligonucleotide

SEQ ID NO: 638586 - DNA, 59 bp, Artificial; identical to SEQ ID NO: 144337
  Synthetic oligonucleotide

SEQ ID NO: 638587 - DNA, 55 bp, Artificial; identical to SEQ ID NO: 211119
  Synthetic oligonucleotide

SEQ ID NO: 638588 - DNA, 55 bp, Artificial; identical to SEQ ID NO: 238056
  Synthetic oligonucleotide

SEQ ID NO: 638589 - DNA, 55 bp, Artificial; identical to SEQ ID NO: 180168
  Synthetic oligonucleotide

SEQ ID NO: 638590 - DNA, 55 bp, Artificial; identical to SEQ ID NO: 238484
  Synthetic oligonucleotide

SEQ ID NO: 638591 - DNA, 60 bp, Artificial; identical to SEQ ID NO: 159876
  Synthetic oligonucleotide

SEQ ID NO: 638592 - DNA, 54 bp, Artificial; identical to SEQ ID NO: 143797
  Synthetic oligonucleotide

SEQ ID NO: 638593 - DNA, 55 bp, Artificial; identical to SEQ ID NO: 191820
  Synthetic oligonucleotide

SEQ ID NO: 638594 - DNA, 57 bp, Artificial; identical to SEQ ID NO: 147230
  Synthetic oligonucleotide

SEQ ID NO: 638595 - DNA, 55 bp, Artificial; identical to SEQ ID NO: 174706
  Synthetic oligonucleotide

SEQ ID NO: 638596 - DNA, 55 bp, Artificial; identical to SEQ ID NO: 197933
  Synthetic oligonucleotide

SEQ ID NO: 638597 - DNA, 60 bp, Artificial; identical to SEQ ID NO: 266209
  Synthetic oligonucleotide

SEQ ID NO: 638598 - DNA, 55 bp, Artificial; identical to SEQ ID NO: 254290
  Synthetic oligonucleotide

SEQ ID NO: 638599 - DNA, 55 bp, Artificial; identical to SEQ ID NO: 180166
  Synthetic oligonucleotide

SEQ ID NO: 638600 - DNA, 55 bp, Artificial; identical to SEQ ID NO: 154161
  Synthetic oligonucleotide

SEQ ID NO: 638601 - DNA, 55 bp, Artificial; identical to SEQ ID NO: 188283
  Synthetic oligonucleotide

SEQ ID NO: 638602 - DNA, 55 bp, Artificial; identical to SEQ ID NO: 162086
  Synthetic oligonucleotide

SEQ ID NO: 638603 - DNA, 55 bp, Artificial; identical to SEQ ID NO: 156196
  Synthetic oligonucleotide

SEQ ID NO: 638604 - DNA, 55 bp, Artificial; identical to SEQ ID NO: 180163
  Synthetic oligonucleotide

SEQ ID NO: 638605 - DNA, 60 bp, Artificial; identical to SEQ ID NO: 183082
  Synthetic oligonucleotide

SEQ ID NO: 638606 - DNA, 60 bp, Artificial; identical to SEQ ID NO: 254478
  Synthetic oligonucleotide

SEQ ID NO: 638607 - DNA, 55 bp, Artificial; identical to SEQ ID NO: 254288
  Synthetic oligonucleotide

SEQ ID NO: 638608 - DNA, 53 bp, Artificial; identical to SEQ ID NO: 149378
  Synthetic oligonucleotide

SEQ ID NO: 638609 - DNA, 60 bp, Artificial; identical to SEQ ID NO: 254189
  Synthetic oligonucleotide

SEQ ID NO: 638610 - DNA, 55 bp, Artificial; identical to SEQ ID NO: 249076
  Synthetic oligonucleotide

SEQ ID NO: 638611 - DNA, 54 bp, Artificial; identical to SEQ ID NO: 168864
  Synthetic oligonucleotide

SEQ ID NO: 638612 - DNA, 55 bp, Artificial; identical to SEQ ID NO: 160061
  Synthetic oligonucleotide

SEQ ID NO: 638613 - DNA, 55 bp, Artificial; identical to SEQ ID NO: 180265
  Synthetic oligonucleotide

SEQ ID NO: 638614 - DNA, 55 bp, Artificial; identical to SEQ ID NO: 234829
  Synthetic oligonucleotide

SEQ ID NO: 638615 - DNA, 60 bp, Artificial; identical to SEQ ID NO: 242250
  Synthetic oligonucleotide

SEQ ID NO: 638616 - DNA, 55 bp, Artificial; identical to SEQ ID NO: 211076
  Synthetic oligonucleotide

SEQ ID NO: 638617 - DNA, 58 bp, Artificial; identical to SEQ ID NO: 209159
  Synthetic oligonucleotide

SEQ ID NO: 638618 - DNA, 60 bp, Artificial; identical to SEQ ID NO: 255333
  Synthetic oligonucleotide

SEQ ID NO: 638619 - DNA, 55 bp, Artificial; identical to SEQ ID NO: 257046
  Synthetic oligonucleotide

SEQ ID NO: 638620 - DNA, 58 bp, Artificial; identical to SEQ ID NO: 239294
  Synthetic oligonucleotide

SEQ ID NO: 638621 - DNA, 54 bp, Artificial; identical to SEQ ID NO: 240668
  Synthetic oligonucleotide

SEQ ID NO: 638622 - DNA, 55 bp, Artificial; identical to SEQ ID NO: 244985
  Synthetic oligonucleotide

SEQ ID NO: 638623 - DNA, 55 bp, Artificial; identical to SEQ ID NO: 156200
  Synthetic oligonucleotide

SEQ ID NO: 638624 - DNA, 55 bp, Artificial; identical to SEQ ID NO: 211077
  Synthetic oligonucleotide

SEQ ID NO: 638625 - DNA, 55 bp, Artificial; identical to SEQ ID NO: 187593
  Synthetic oligonucleotide

SEQ ID NO: 638626 - DNA, 55 bp, Artificial; identical to SEQ ID NO: 197290
  Synthetic oligonucleotide

SEQ ID NO: 638627 - DNA, 55 bp, Artificial; identical to SEQ ID NO: 156201
  Synthetic oligonucleotide

SEQ ID NO: 638628 - DNA, 58 bp, Artificial; identical to SEQ ID NO: 171007
  Synthetic oligonucleotide

SEQ ID NO: 638629 - DNA, 55 bp, Artificial; identical to SEQ ID NO: 207342
  Synthetic oligonucleotide

SEQ ID NO: 638630 - DNA, 60 bp, Artificial; identical to SEQ ID NO: 187384
  Synthetic oligonucleotide

SEQ ID NO: 638631 - DNA, 55 bp, Artificial; identical to SEQ ID NO: 197932
  Synthetic oligonucleotide

SEQ ID NO: 638632 - DNA, 55 bp, Artificial; identical to SEQ ID NO: 197289
  Synthetic oligonucleotide

SEQ ID NO: 638633 - DNA, 55 bp, Artificial; identical to SEQ ID NO: 205544
  Synthetic oligonucleotide

SEQ ID NO: 638634 - DNA, 52 bp, Artificial; identical to SEQ ID NO: 246445
  Synthetic oligonucleotide

SEQ ID NO: 638635 - DNA, 60 bp, Artificial; identical to SEQ ID NO: 187373
  Synthetic oligonucleotide

SEQ ID NO: 638636 - DNA, 50 bp, Artificial; identical to SEQ ID NO: 259028
  Synthetic oligonucleotide

SEQ ID NO: 638637 - DNA, 51 bp, Artificial; identical to SEQ ID NO: 241157
  Synthetic oligonucleotide

SEQ ID NO: 638638 - DNA, 55 bp, Artificial; identical to SEQ ID NO: 205545
  Synthetic oligonucleotide

SEQ ID NO: 638639 - DNA, 55 bp, Artificial; identical to SEQ ID NO: 191283
  Synthetic oligonucleotide

SEQ ID NO: 638640 - DNA, 55 bp, Artificial; identical to SEQ ID NO: 254197
  Synthetic oligonucleotide

SEQ ID NO: 638641 - DNA, 54 bp, Artificial; identical to SEQ ID NO: 170016
  Synthetic oligonucleotide

SEQ ID NO: 638642 - DNA, 55 bp, Artificial; identical to SEQ ID NO: 254198
  Synthetic oligonucleotide

SEQ ID NO: 638643 - DNA, 55 bp, Artificial; identical to SEQ ID NO: 208656
  Synthetic oligonucleotide

SEQ ID NO: 638644 - DNA, 55 bp, Artificial; identical to SEQ ID NO: 154152
  Synthetic oligonucleotide

SEQ ID NO: 638645 - DNA, 55 bp, Artificial; identical to SEQ ID NO: 167521
  Synthetic oligonucleotide

SEQ ID NO: 638646 - DNA, 60 bp, Artificial; identical to SEQ ID NO: 183016
  Synthetic oligonucleotide

SEQ ID NO: 638647 - DNA, 52 bp, Artificial; identical to SEQ ID NO: 193600
  Synthetic oligonucleotide

SEQ ID NO: 638648 - DNA, 55 bp, Artificial; identical to SEQ ID NO: 254199
  Synthetic oligonucleotide

SEQ ID NO: 638649 - DNA, 55 bp, Artificial; identical to SEQ ID NO: 142087
  Synthetic oligonucleotide

SEQ ID NO: 638650 - DNA, 60 bp, Artificial; identical to SEQ ID NO: 184693
  Synthetic oligonucleotide

SEQ ID NO: 638651 - DNA, 57 bp, Artificial; identical to SEQ ID NO: 201180
  Synthetic oligonucleotide

SEQ ID NO: 638652 - DNA, 55 bp, Artificial; identical to SEQ ID NO: 180259
  Synthetic oligonucleotide

SEQ ID NO: 638653 - DNA, 55 bp, Artificial; identical to SEQ ID NO: 180258
  Synthetic oligonucleotide

SEQ ID NO: 638654 - DNA, 55 bp, Artificial; identical to SEQ ID NO: 152595
  Synthetic oligonucleotide

SEQ ID NO: 638655 - DNA, 55 bp, Artificial; identical to SEQ ID NO: 163955
  Synthetic oligonucleotide

SEQ ID NO: 638656 - DNA, 55 bp, Artificial; identical to SEQ ID NO: 161255
  Synthetic oligonucleotide

SEQ ID NO: 638657 - DNA, 55 bp, Artificial; identical to SEQ ID NO: 260207
  Synthetic oligonucleotide

SEQ ID NO: 638658 - DNA, 60 bp, Artificial; identical to SEQ ID NO: 224191
  Synthetic oligonucleotide

SEQ ID NO: 638659 - DNA, 55 bp, Artificial; identical to SEQ ID NO: 254202
  Synthetic oligonucleotide

SEQ ID NO: 638660 - DNA, 55 bp, Artificial; identical to SEQ ID NO: 144770
  Synthetic oligonucleotide

SEQ ID NO: 638661 - DNA, 55 bp, Artificial; identical to SEQ ID NO: 148030
  Synthetic oligonucleotide

SEQ ID NO: 638662 - DNA, 55 bp, Artificial; identical to SEQ ID NO: 180256
  Synthetic oligonucleotide

SEQ ID NO: 638663 - DNA, 60 bp, Artificial; identical to SEQ ID NO: 212892
  Synthetic oligonucleotide

SEQ ID NO: 638664 - DNA, 55 bp, Artificial; identical to SEQ ID NO: 244983
  Synthetic oligonucleotide

SEQ ID NO: 638665 - DNA, 52 bp, Artificial; identical to SEQ ID NO: 155581
  Synthetic oligonucleotide

SEQ ID NO: 638666 - DNA, 55 bp, Artificial; identical to SEQ ID NO: 197999
  Synthetic oligonucleotide

SEQ ID NO: 638667 - DNA, 52 bp, Artificial; identical to SEQ ID NO: 190887
  Synthetic oligonucleotide

SEQ ID NO: 638668 - DNA, 60 bp, Artificial; identical to SEQ ID NO: 184593
  Synthetic oligonucleotide

SEQ ID NO: 638669 - DNA, 58 bp, Artificial; identical to SEQ ID NO: 237916
  Synthetic oligonucleotide

SEQ ID NO: 638670 - DNA, 55 bp, Artificial; identical to SEQ ID NO: 154188
  Synthetic oligonucleotide

SEQ ID NO: 638671 - DNA, 55 bp, Artificial; identical to SEQ ID NO: 244982
  Synthetic oligonucleotide

SEQ ID NO: 638672 - DNA, 57 bp, Artificial; identical to SEQ ID NO: 197026
  Synthetic oligonucleotide

SEQ ID NO: 638673 - DNA, 59 bp, Artificial; identical to SEQ ID NO: 257422
  Synthetic oligonucleotide

SEQ ID NO: 638674 - DNA, 59 bp, Artificial; identical to SEQ ID NO: 247092
  Synthetic oligonucleotide

SEQ ID NO: 638675 - DNA, 55 bp, Artificial; identical to SEQ ID NO: 191282
  Synthetic oligonucleotide

SEQ ID NO: 638676 - DNA, 55 bp, Artificial; identical to SEQ ID NO: 203461
  Synthetic oligonucleotide

SEQ ID NO: 638677 - DNA, 55 bp, Artificial; identical to SEQ ID NO: 253023
  Synthetic oligonucleotide

SEQ ID NO: 638678 - DNA, 58 bp, Artificial; identical to SEQ ID NO: 217358
  Synthetic oligonucleotide

SEQ ID NO: 638679 - DNA, 55 bp, Artificial; identical to SEQ ID NO: 217374
  Synthetic oligonucleotide

SEQ ID NO: 638680 - DNA, 55 bp, Artificial; identical to SEQ ID NO: 180251
  Synthetic oligonucleotide

SEQ ID NO: 638681 - DNA, 55 bp, Artificial; identical to SEQ ID NO: 244980
  Synthetic oligonucleotide

SEQ ID NO: 638682 - DNA, 60 bp, Artificial; identical to SEQ ID NO: 184571
  Synthetic oligonucleotide

SEQ ID NO: 638683 - DNA, 52 bp, Artificial; identical to SEQ ID NO: 195045
  Synthetic oligonucleotide

SEQ ID NO: 638684 - DNA, 60 bp, Artificial; identical to SEQ ID NO: 248763
  Synthetic oligonucleotide

SEQ ID NO: 638685 - DNA, 59 bp, Artificial; identical to SEQ ID NO: 174547
  Synthetic oligonucleotide

SEQ ID NO: 638686 - DNA, 60 bp, Artificial; identical to SEQ ID NO: 244276
  Synthetic oligonucleotide

SEQ ID NO: 638687 - DNA, 60 bp, Artificial; identical to SEQ ID NO: 242257
  Synthetic oligonucleotide

SEQ ID NO: 638688 - DNA, 51 bp, Artificial; identical to SEQ ID NO: 188529
  Synthetic oligonucleotide

SEQ ID NO: 638689 - DNA, 60 bp, Artificial; identical to SEQ ID NO: 141710
  Synthetic oligonucleotide

SEQ ID NO: 638690 - DNA, 55 bp, Artificial; identical to SEQ ID NO: 190095
  Synthetic oligonucleotide

SEQ ID NO: 638691 - DNA, 55 bp, Artificial; identical to SEQ ID NO: 249078
  Synthetic oligonucleotide

SEQ ID NO: 638692 - DNA, 55 bp, Artificial; identical to SEQ ID NO: 167520
  Synthetic oligonucleotide

SEQ ID NO: 638693 - DNA, 57 bp, Artificial; identical to SEQ ID NO: 184526
  Synthetic oligonucleotide

SEQ ID NO: 638694 - DNA, 52 bp, Artificial; identical to SEQ ID NO: 170122
  Synthetic oligonucleotide

SEQ ID NO: 638695 - DNA, 55 bp, Artificial; identical to SEQ ID NO: 168436
  Synthetic oligonucleotide

SEQ ID NO: 638696 - DNA, 58 bp, Artificial; identical to SEQ ID NO: 208002
  Synthetic oligonucleotide

SEQ ID NO: 638697 - DNA, 55 bp, Artificial; identical to SEQ ID NO: 148031
  Synthetic oligonucleotide

SEQ ID NO: 638698 - DNA, 51 bp, Artificial; identical to SEQ ID NO: 197676
  Synthetic oligonucleotide

SEQ ID NO: 638699 - DNA, 60 bp, Artificial; identical to SEQ ID NO: 212903
  Synthetic oligonucleotide

SEQ ID NO: 638700 - DNA, 55 bp, Artificial; identical to SEQ ID NO: 180279
  Synthetic oligonucleotide

SEQ ID NO: 638701 - DNA, 52 bp, Artificial; identical to SEQ ID NO: 216695
  Synthetic oligonucleotide

SEQ ID NO: 638702 - DNA, 55 bp, Artificial; identical to SEQ ID NO: 244977
  Synthetic oligonucleotide

SEQ ID NO: 638703 - DNA, 55 bp, Artificial; identical to SEQ ID NO: 254204
  Synthetic oligonucleotide

SEQ ID NO: 638704 - DNA, 60 bp, Artificial; identical to SEQ ID NO: 217369
  Synthetic oligonucleotide

SEQ ID NO: 638705 - DNA, 55 bp, Artificial; identical to SEQ ID NO: 144768
  Synthetic oligonucleotide

SEQ ID NO: 638706 - DNA, 55 bp, Artificial; identical to SEQ ID NO: 169318
  Synthetic oligonucleotide

SEQ ID NO: 638707 - DNA, 55 bp, Artificial; identical to SEQ ID NO: 180276
  Synthetic oligonucleotide

SEQ ID NO: 638708 - DNA, 55 bp, Artificial; identical to SEQ ID NO: 207346
  Synthetic oligonucleotide

SEQ ID NO: 638709 - DNA, 55 bp, Artificial; identical to SEQ ID NO: 163954
  Synthetic oligonucleotide

SEQ ID NO: 638710 - DNA, 55 bp, Artificial; identical to SEQ ID NO: 191281
  Synthetic oligonucleotide

SEQ ID NO: 638711 - DNA, 55 bp, Artificial; identical to SEQ ID NO: 254205
  Synthetic oligonucleotide

SEQ ID NO: 638712 - DNA, 54 bp, Artificial; identical to SEQ ID NO: 247090
  Synthetic oligonucleotide

SEQ ID NO: 638713 - DNA, 50 bp, Artificial; identical to SEQ ID NO: 258332
  Synthetic oligonucleotide

SEQ ID NO: 638714 - DNA, 60 bp, Artificial; identical to SEQ ID NO: 184504
  Synthetic oligonucleotide

SEQ ID NO: 638715 - DNA, 59 bp, Artificial; identical to SEQ ID NO: 194925
  Synthetic oligonucleotide

SEQ ID NO: 638716 - DNA, 57 bp, Artificial; identical to SEQ ID NO: 179582
  Synthetic oligonucleotide

SEQ ID NO: 638717 - DNA, 55 bp, Artificial; identical to SEQ ID NO: 202110
  Synthetic oligonucleotide

SEQ ID NO: 638718 - DNA, 60 bp, Artificial; identical to SEQ ID NO: 224177
  Synthetic oligonucleotide

SEQ ID NO: 638719 - DNA, 55 bp, Artificial; identical to SEQ ID NO: 202755
  Synthetic oligonucleotide

SEQ ID NO: 638720 - DNA, 60 bp, Artificial; identical to SEQ ID NO: 170973
  Synthetic oligonucleotide

SEQ ID NO: 638721 - DNA, 55 bp, Artificial; identical to SEQ ID NO: 202116
  Synthetic oligonucleotide

SEQ ID NO: 638722 - DNA, 60 bp, Artificial; identical to SEQ ID NO: 202307
  Synthetic oligonucleotide

SEQ ID NO: 638723 - DNA, 55 bp, Artificial; identical to SEQ ID NO: 248604
  Synthetic oligonucleotide

SEQ ID NO: 638724 - DNA, 55 bp, Artificial; identical to SEQ ID NO: 211081
  Synthetic oligonucleotide

SEQ ID NO: 638725 - DNA, 50 bp, Artificial; identical to SEQ ID NO: 189831
  Synthetic oligonucleotide

SEQ ID NO: 638726 - DNA, 54 bp, Artificial; identical to SEQ ID NO: 144708
  Synthetic oligonucleotide

SEQ ID NO: 638727 - DNA, 57 bp, Artificial; identical to SEQ ID NO: 194892
  Synthetic oligonucleotide

SEQ ID NO: 638728 - DNA, 55 bp, Artificial; identical to SEQ ID NO: 161017
  Synthetic oligonucleotide

SEQ ID NO: 638729 - DNA, 51 bp, Artificial; identical to SEQ ID NO: 149863
  Synthetic oligonucleotide

SEQ ID NO: 638730 - DNA, 55 bp, Artificial; identical to SEQ ID NO: 148223
  Synthetic oligonucleotide

SEQ ID NO: 638731 - DNA, 60 bp, Artificial; identical to SEQ ID NO: 242258
  Synthetic oligonucleotide

SEQ ID NO: 638732 - DNA, 60 bp, Artificial; identical to SEQ ID NO: 247089
  Synthetic oligonucleotide

SEQ ID NO: 638733 - DNA, 55 bp, Artificial; identical to SEQ ID NO: 197987
  Synthetic oligonucleotide

SEQ ID NO: 638734 - DNA, 55 bp, Artificial; identical to SEQ ID NO: 263172
  Synthetic oligonucleotide

SEQ ID NO: 638735 - DNA, 52 bp, Artificial; identical to SEQ ID NO: 216699
  Synthetic oligonucleotide

SEQ ID NO: 638736 - DNA, 55 bp, Artificial; identical to SEQ ID NO: 245034
  Synthetic oligonucleotide

SEQ ID NO: 638737 - DNA, 52 bp, Artificial; identical to SEQ ID NO: 165124
  Synthetic oligonucleotide

SEQ ID NO: 638738 - DNA, 55 bp, Artificial; identical to SEQ ID NO: 188280
  Synthetic oligonucleotide

SEQ ID NO: 638739 - DNA, 55 bp, Artificial; identical to SEQ ID NO: 256819
  Synthetic oligonucleotide

SEQ ID NO: 638740 - DNA, 55 bp, Artificial; identical to SEQ ID NO: 244219
  Synthetic oligonucleotide

SEQ ID NO: 638741 - DNA, 52 bp, Artificial; identical to SEQ ID NO: 213002
  Synthetic oligonucleotide

SEQ ID NO: 638742 - DNA, 51 bp, Artificial; identical to SEQ ID NO: 186851
  Synthetic oligonucleotide

SEQ ID NO: 638743 - DNA, 55 bp, Artificial; identical to SEQ ID NO: 156204
  Synthetic oligonucleotide

SEQ ID NO: 638744 - DNA, 51 bp, Artificial; identical to SEQ ID NO: 157673
  Synthetic oligonucleotide

SEQ ID NO: 638745 - DNA, 55 bp, Artificial; identical to SEQ ID NO: 191278
  Synthetic oligonucleotide

SEQ ID NO: 638746 - DNA, 52 bp, Artificial; identical to SEQ ID NO: 165126
  Synthetic oligonucleotide

SEQ ID NO: 638747 - DNA, 55 bp, Artificial; identical to SEQ ID NO: 160060
  Synthetic oligonucleotide

SEQ ID NO: 638748 - DNA, 55 bp, Artificial; identical to SEQ ID NO: 233525
  Synthetic oligonucleotide

SEQ ID NO: 638749 - DNA, 50 bp, Artificial; identical to SEQ ID NO: 221996
  Synthetic oligonucleotide

SEQ ID NO: 638750 - DNA, 55 bp, Artificial; identical to SEQ ID NO: 160059
  Synthetic oligonucleotide

SEQ ID NO: 638751 - DNA, 54 bp, Artificial; identical to SEQ ID NO: 246130
  Synthetic oligonucleotide

SEQ ID NO: 638752 - DNA, 55 bp, Artificial; identical to SEQ ID NO: 245033
  Synthetic oligonucleotide

SEQ ID NO: 638753 - DNA, 53 bp, Artificial; identical to SEQ ID NO: 185573
  Synthetic oligonucleotide

SEQ ID NO: 638754 - DNA, 55 bp, Artificial; identical to SEQ ID NO: 245031
  Synthetic oligonucleotide

SEQ ID NO: 638755 - DNA, 52 bp, Artificial; identical to SEQ ID NO: 261975
  Synthetic oligonucleotide

SEQ ID NO: 638756 - DNA, 55 bp, Artificial; identical to SEQ ID NO: 190989
  Synthetic oligonucleotide

SEQ ID NO: 638757 - DNA, 55 bp, Artificial; identical to SEQ ID NO: 190090
  Synthetic oligonucleotide

SEQ ID NO: 638758 - DNA, 55 bp, Artificial; identical to SEQ ID NO: 254207
  Synthetic oligonucleotide

SEQ ID NO: 638759 - DNA, 55 bp, Artificial; identical to SEQ ID NO: 202262
  Synthetic oligonucleotide

SEQ ID NO: 638760 - DNA, 55 bp, Artificial; identical to SEQ ID NO: 154825
  Synthetic oligonucleotide

SEQ ID NO: 638761 - DNA, 52 bp, Artificial; identical to SEQ ID NO: 199900
  Synthetic oligonucleotide

SEQ ID NO: 638762 - DNA, 55 bp, Artificial; identical to SEQ ID NO: 253025
  Synthetic oligonucleotide

SEQ ID NO: 638763 - DNA, 55 bp, Artificial; identical to SEQ ID NO: 261946
  Synthetic oligonucleotide

SEQ ID NO: 638764 - DNA, 58 bp, Artificial; identical to SEQ ID NO: 150693
  Synthetic oligonucleotide

SEQ ID NO: 638765 - DNA, 59 bp, Artificial; identical to SEQ ID NO: 242260
  Synthetic oligonucleotide

SEQ ID NO: 638766 - DNA, 50 bp, Artificial; identical to SEQ ID NO: 160638
  Synthetic oligonucleotide

SEQ ID NO: 638767 - DNA, 58 bp, Artificial; identical to SEQ ID NO: 242261
  Synthetic oligonucleotide

SEQ ID NO: 638768 - DNA, 60 bp, Artificial; identical to SEQ ID NO: 184449
  Synthetic oligonucleotide

SEQ ID NO: 638769 - DNA, 55 bp, Artificial; identical to SEQ ID NO: 207389
  Synthetic oligonucleotide

SEQ ID NO: 638770 - DNA, 60 bp, Artificial; identical to SEQ ID NO: 202240
  Synthetic oligonucleotide

SEQ ID NO: 638771 - DNA, 55 bp, Artificial; identical to SEQ ID NO: 189375
  Synthetic oligonucleotide

SEQ ID NO: 638772 - DNA, 55 bp, Artificial; identical to SEQ ID NO: 202753
  Synthetic oligonucleotide

SEQ ID NO: 638773 - DNA, 55 bp, Artificial; identical to SEQ ID NO: 261855
  Synthetic oligonucleotide

SEQ ID NO: 638774 - DNA, 56 bp, Artificial; identical to SEQ ID NO: 196698
  Synthetic oligonucleotide

SEQ ID NO: 638775 - DNA, 55 bp, Artificial; identical to SEQ ID NO: 245029
  Synthetic oligonucleotide

SEQ ID NO: 638776 - DNA, 55 bp, Artificial; identical to SEQ ID NO: 163951
  Synthetic oligonucleotide

SEQ ID NO: 638777 - DNA, 55 bp, Artificial; identical to SEQ ID NO: 194575
  Synthetic oligonucleotide

SEQ ID NO: 638778 - DNA, 60 bp, Artificial; identical to SEQ ID NO: 197937
  Synthetic oligonucleotide

SEQ ID NO: 638779 - DNA, 55 bp, Artificial; identical to SEQ ID NO: 197985
  Synthetic oligonucleotide

SEQ ID NO: 638780 - DNA, 60 bp, Artificial; identical to SEQ ID NO: 242263
  Synthetic oligonucleotide

SEQ ID NO: 638781 - DNA, 55 bp, Artificial; identical to SEQ ID NO: 156205
  Synthetic oligonucleotide

SEQ ID NO: 638782 - DNA, 55 bp, Artificial; identical to SEQ ID NO: 180222
  Synthetic oligonucleotide

SEQ ID NO: 638783 - DNA, 60 bp, Artificial; identical to SEQ ID NO: 168989
  Synthetic oligonucleotide

SEQ ID NO: 638784 - DNA, 55 bp, Artificial; identical to SEQ ID NO: 205546
  Synthetic oligonucleotide

SEQ ID NO: 638785 - DNA, 60 bp, Artificial; identical to SEQ ID NO: 141711
  Synthetic oligonucleotide

SEQ ID NO: 638786 - DNA, 51 bp, Artificial; identical to SEQ ID NO: 154654
  Synthetic oligonucleotide

SEQ ID NO: 638787 - DNA, 55 bp, Artificial; identical to SEQ ID NO: 151546
  Synthetic oligonucleotide

SEQ ID NO: 638788 - DNA, 52 bp, Artificial; identical to SEQ ID NO: 240972
  Synthetic oligonucleotide

SEQ ID NO: 638789 - DNA, 53 bp, Artificial; identical to SEQ ID NO: 188098
  Synthetic oligonucleotide

SEQ ID NO: 638790 - DNA, 60 bp, Artificial; identical to SEQ ID NO: 194848
  Synthetic oligonucleotide

SEQ ID NO: 638791 - DNA, 55 bp, Artificial; identical to SEQ ID NO: 180223
  Synthetic oligonucleotide

SEQ ID NO: 638792 - DNA, 55 bp, Artificial; identical to SEQ ID NO: 180224
  Synthetic oligonucleotide

SEQ ID NO: 638793 - DNA, 52 bp, Artificial; identical to SEQ ID NO: 165130
  Synthetic oligonucleotide

SEQ ID NO: 638794 - DNA, 55 bp, Artificial; identical to SEQ ID NO: 163950
  Synthetic oligonucleotide

SEQ ID NO: 638795 - DNA, 54 bp, Artificial; identical to SEQ ID NO: 211498
  Synthetic oligonucleotide

SEQ ID NO: 638796 - DNA, 52 bp, Artificial; identical to SEQ ID NO: 193776
  Synthetic oligonucleotide

SEQ ID NO: 638797 - DNA, 55 bp, Artificial; identical to SEQ ID NO: 174708
  Synthetic oligonucleotide

SEQ ID NO: 638798 - DNA, 54 bp, Artificial; identical to SEQ ID NO: 202456
  Synthetic oligonucleotide

SEQ ID NO: 638799 - DNA, 57 bp, Artificial; identical to SEQ ID NO: 224208
  Synthetic oligonucleotide

SEQ ID NO: 638800 - DNA, 55 bp, Artificial; identical to SEQ ID NO: 245025
  Synthetic oligonucleotide

SEQ ID NO: 638801 - DNA, 57 bp, Artificial; identical to SEQ ID NO: 191721
  Synthetic oligonucleotide

SEQ ID NO: 638802 - DNA, 59 bp, Artificial; identical to SEQ ID NO: 143673
  Synthetic oligonucleotide

SEQ ID NO: 638803 - DNA, 55 bp, Artificial; identical to SEQ ID NO: 190082
  Synthetic oligonucleotide

SEQ ID NO: 638804 - DNA, 58 bp, Artificial; identical to SEQ ID NO: 151274
  Synthetic oligonucleotide

SEQ ID NO: 638805 - DNA, 54 bp, Artificial; identical to SEQ ID NO: 166910
  Synthetic oligonucleotide

SEQ ID NO: 638806 - DNA, 56 bp, Artificial; identical to SEQ ID NO: 171340
  Synthetic oligonucleotide

SEQ ID NO: 638807 - DNA, 56 bp, Artificial; identical to SEQ ID NO: 233363
  Synthetic oligonucleotide

SEQ ID NO: 638808 - DNA, 55 bp, Artificial; identical to SEQ ID NO: 221532
  Synthetic oligonucleotide

SEQ ID NO: 638809 - DNA, 55 bp, Artificial; identical to SEQ ID NO: 209276
  Synthetic oligonucleotide

SEQ ID NO: 638810 - DNA, 60 bp, Artificial; identical to SEQ ID NO: 141712
  Synthetic oligonucleotide

SEQ ID NO: 638811 - DNA, 53 bp, Artificial; identical to SEQ ID NO: 164870
  Synthetic oligonucleotide

SEQ ID NO: 638812 - DNA, 55 bp, Artificial; identical to SEQ ID NO: 245024
  Synthetic oligonucleotide

SEQ ID NO: 638813 - DNA, 55 bp, Artificial; identical to SEQ ID NO: 190080
  Synthetic oligonucleotide

SEQ ID NO: 638814 - DNA, 54 bp, Artificial; identical to SEQ ID NO: 168827
  Synthetic oligonucleotide

SEQ ID NO: 638815 - DNA, 53 bp, Artificial; identical to SEQ ID NO: 148231
  Synthetic oligonucleotide

SEQ ID NO: 638816 - DNA, 60 bp, Artificial; identical to SEQ ID NO: 242265
  Synthetic oligonucleotide

SEQ ID NO: 638817 - DNA, 50 bp, Artificial; identical to SEQ ID NO: 248235
  Synthetic oligonucleotide

SEQ ID NO: 638818 - DNA, 60 bp, Artificial; identical to SEQ ID NO: 206799
  Synthetic oligonucleotide

SEQ ID NO: 638819 - DNA, 55 bp, Artificial; identical to SEQ ID NO: 254209
  Synthetic oligonucleotide

SEQ ID NO: 638820 - DNA, 55 bp, Artificial; identical to SEQ ID NO: 202752
  Synthetic oligonucleotide

SEQ ID NO: 638821 - DNA, 55 bp, Artificial; identical to SEQ ID NO: 254210
  Synthetic oligonucleotide

SEQ ID NO: 638822 - DNA, 51 bp, Artificial; identical to SEQ ID NO: 165289
  Synthetic oligonucleotide

SEQ ID NO: 638823 - DNA, 53 bp, Artificial; identical to SEQ ID NO: 217328
  Synthetic oligonucleotide

SEQ ID NO: 638824 - DNA, 60 bp, Artificial; identical to SEQ ID NO: 247083
  Synthetic oligonucleotide

SEQ ID NO: 638825 - DNA, 54 bp, Artificial; identical to SEQ ID NO: 237769
  Synthetic oligonucleotide

SEQ ID NO: 638826 - DNA, 51 bp, Artificial; identical to SEQ ID NO: 241129
  Synthetic oligonucleotide

SEQ ID NO: 638827 - DNA, 55 bp, Artificial; identical to SEQ ID NO: 153242
  Synthetic oligonucleotide

SEQ ID NO: 638828 - DNA, 53 bp, Artificial; identical to SEQ ID NO: 157353
  Synthetic oligonucleotide

SEQ ID NO: 638829 - DNA, 55 bp, Artificial; identical to SEQ ID NO: 148233
  Synthetic oligonucleotide

SEQ ID NO: 638830 - DNA, 53 bp, Artificial; identical to SEQ ID NO: 174842
  Synthetic oligonucleotide

SEQ ID NO: 638831 - DNA, 53 bp, Artificial; identical to SEQ ID NO: 247846
  Synthetic oligonucleotide

SEQ ID NO: 638832 - DNA, 55 bp, Artificial; identical to SEQ ID NO: 245018
  Synthetic oligonucleotide

SEQ ID NO: 638833 - DNA, 55 bp, Artificial; identical to SEQ ID NO: 191819
  Synthetic oligonucleotide

SEQ ID NO: 638834 - DNA, 54 bp, Artificial; identical to SEQ ID NO: 225209
  Synthetic oligonucleotide

SEQ ID NO: 638835 - DNA, 58 bp, Artificial; identical to SEQ ID NO: 242090
  Synthetic oligonucleotide

SEQ ID NO: 638836 - DNA, 57 bp, Artificial; identical to SEQ ID NO: 171273
  Synthetic oligonucleotide

SEQ ID NO: 638837 - DNA, 55 bp, Artificial; identical to SEQ ID NO: 244225
  Synthetic oligonucleotide

SEQ ID NO: 638838 - DNA, 55 bp, Artificial; identical to SEQ ID NO: 233522
  Synthetic oligonucleotide

SEQ ID NO: 638839 - DNA, 55 bp, Artificial; identical to SEQ ID NO: 257821
  Synthetic oligonucleotide

SEQ ID NO: 638840 - DNA, 60 bp, Artificial; identical to SEQ ID NO: 144321
  Synthetic oligonucleotide

SEQ ID NO: 638841 - DNA, 55 bp, Artificial; identical to SEQ ID NO: 197979
  Synthetic oligonucleotide

SEQ ID NO: 638842 - DNA, 55 bp, Artificial; identical to SEQ ID NO: 224133
  Synthetic oligonucleotide

SEQ ID NO: 638843 - DNA, 57 bp, Artificial; identical to SEQ ID NO: 179855
  Synthetic oligonucleotide

SEQ ID NO: 638844 - DNA, 55 bp, Artificial; identical to SEQ ID NO: 203466
  Synthetic oligonucleotide

SEQ ID NO: 638845 - DNA, 52 bp, Artificial; identical to SEQ ID NO: 223687
  Synthetic oligonucleotide

SEQ ID NO: 638846 - DNA, 54 bp, Artificial; identical to SEQ ID NO: 203864
  Synthetic oligonucleotide

SEQ ID NO: 638847 - DNA, 55 bp, Artificial; identical to SEQ ID NO: 220718
  Synthetic oligonucleotide

SEQ ID NO: 638848 - DNA, 55 bp, Artificial; identical to SEQ ID NO: 166912
  Synthetic oligonucleotide

SEQ ID NO: 638849 - DNA, 50 bp, Artificial; identical to SEQ ID NO: 256269
  Synthetic oligonucleotide

SEQ ID NO: 638850 - DNA, 55 bp, Artificial; identical to SEQ ID NO: 238474
  Synthetic oligonucleotide

SEQ ID NO: 638851 - DNA, 55 bp, Artificial; identical to SEQ ID NO: 148234
  Synthetic oligonucleotide

SEQ ID NO: 638852 - DNA, 55 bp, Artificial; identical to SEQ ID NO: 217332
  Synthetic oligonucleotide

SEQ ID NO: 638853 - DNA, 51 bp, Artificial; identical to SEQ ID NO: 186835
  Synthetic oligonucleotide

SEQ ID NO: 638854 - DNA, 55 bp, Artificial; identical to SEQ ID NO: 148235
  Synthetic oligonucleotide

SEQ ID NO: 638855 - DNA, 52 bp, Artificial; identical to SEQ ID NO: 249440
  Synthetic oligonucleotide

SEQ ID NO: 638856 - DNA, 55 bp, Artificial; identical to SEQ ID NO: 156209
  Synthetic oligonucleotide

SEQ ID NO: 638857 - DNA, 56 bp, Artificial; identical to SEQ ID NO: 166807
  Synthetic oligonucleotide

SEQ ID NO: 638858 - DNA, 55 bp, Artificial; identical to SEQ ID NO: 163948
  Synthetic oligonucleotide

SEQ ID NO: 638859 - DNA, 55 bp, Artificial; identical to SEQ ID NO: 254213
  Synthetic oligonucleotide

SEQ ID NO: 638860 - DNA, 55 bp, Artificial; identical to SEQ ID NO: 244226
  Synthetic oligonucleotide

SEQ ID NO: 638861 - DNA, 57 bp, Artificial; identical to SEQ ID NO: 233950
  Synthetic oligonucleotide

SEQ ID NO: 638862 - DNA, 59 bp, Artificial; identical to SEQ ID NO: 184994
  Synthetic oligonucleotide

SEQ ID NO: 638863 - DNA, 53 bp, Artificial; identical to SEQ ID NO: 149444
  Synthetic oligonucleotide

SEQ ID NO: 638864 - DNA, 55 bp, Artificial; identical to SEQ ID NO: 166913
  Synthetic oligonucleotide

SEQ ID NO: 638865 - DNA, 52 bp, Artificial; identical to SEQ ID NO: 165132
  Synthetic oligonucleotide

SEQ ID NO: 638866 - DNA, 55 bp, Artificial; identical to SEQ ID NO: 217341
  Synthetic oligonucleotide

SEQ ID NO: 638867 - DNA, 55 bp, Artificial; identical to SEQ ID NO: 254214
  Synthetic oligonucleotide

SEQ ID NO: 638868 - DNA, 55 bp, Artificial; identical to SEQ ID NO: 160055
  Synthetic oligonucleotide

SEQ ID NO: 638869 - DNA, 55 bp, Artificial; identical to SEQ ID NO: 174710
  Synthetic oligonucleotide

SEQ ID NO: 638870 - DNA, 54 bp, Artificial; identical to SEQ ID NO: 164725
  Synthetic oligonucleotide

SEQ ID NO: 638871 - DNA, 54 bp, Artificial; identical to SEQ ID NO: 246128
  Synthetic oligonucleotide

SEQ ID NO: 638872 - DNA, 57 bp, Artificial; identical to SEQ ID NO: 159960
  Synthetic oligonucleotide

SEQ ID NO: 638873 - DNA, 55 bp, Artificial; identical to SEQ ID NO: 203467
  Synthetic oligonucleotide

SEQ ID NO: 638874 - DNA, 55 bp, Artificial; identical to SEQ ID NO: 202133
  Synthetic oligonucleotide

SEQ ID NO: 638875 - DNA, 55 bp, Artificial; identical to SEQ ID NO: 198017
  Synthetic oligonucleotide

SEQ ID NO: 638876 - DNA, 55 bp, Artificial; identical to SEQ ID NO: 148237
  Synthetic oligonucleotide

SEQ ID NO: 638877 - DNA, 55 bp, Artificial; identical to SEQ ID NO: 154791
  Synthetic oligonucleotide

SEQ ID NO: 638878 - DNA, 56 bp, Artificial; identical to SEQ ID NO: 166173
  Synthetic oligonucleotide

SEQ ID NO: 638879 - DNA, 58 bp, Artificial; identical to SEQ ID NO: 150695
  Synthetic oligonucleotide

SEQ ID NO: 638880 - DNA, 60 bp, Artificial; identical to SEQ ID NO: 257461
  Synthetic oligonucleotide

SEQ ID NO: 638881 - DNA, 51 bp, Artificial; identical to SEQ ID NO: 243345
  Synthetic oligonucleotide

SEQ ID NO: 638882 - DNA, 55 bp, Artificial; identical to SEQ ID NO: 160054
  Synthetic oligonucleotide

SEQ ID NO: 638883 - DNA, 60 bp, Artificial; identical to SEQ ID NO: 187362
  Synthetic oligonucleotide

SEQ ID NO: 638884 - DNA, 60 bp, Artificial; identical to SEQ ID NO: 142698
  Synthetic oligonucleotide

SEQ ID NO: 638885 - DNA, 54 bp, Artificial; identical to SEQ ID NO: 164716
  Synthetic oligonucleotide

SEQ ID NO: 638886 - DNA, 57 bp, Artificial; identical to SEQ ID NO: 239377
  Synthetic oligonucleotide

SEQ ID NO: 638887 - DNA, 52 bp, Artificial; identical to SEQ ID NO: 160522
  Synthetic oligonucleotide

SEQ ID NO: 638888 - DNA, 55 bp, Artificial; identical to SEQ ID NO: 180232
  Synthetic oligonucleotide

SEQ ID NO: 638889 - DNA, 55 bp, Artificial; identical to SEQ ID NO: 190077
  Synthetic oligonucleotide

SEQ ID NO: 638890 - DNA, 55 bp, Artificial; identical to SEQ ID NO: 148201
  Synthetic oligonucleotide

SEQ ID NO: 638891 - DNA, 55 bp, Artificial; identical to SEQ ID NO: 194576
  Synthetic oligonucleotide

SEQ ID NO: 638892 - DNA, 55 bp, Artificial; identical to SEQ ID NO: 217344
  Synthetic oligonucleotide

SEQ ID NO: 638893 - DNA, 55 bp, Artificial; identical to SEQ ID NO: 221529
  Synthetic oligonucleotide

SEQ ID NO: 638894 - DNA, 53 bp, Artificial; identical to SEQ ID NO: 199767
  Synthetic oligonucleotide

SEQ ID NO: 638895 - DNA, 56 bp, Artificial; identical to SEQ ID NO: 247082
  Synthetic oligonucleotide

SEQ ID NO: 638896 - DNA, 56 bp, Artificial; identical to SEQ ID NO: 233360
  Synthetic oligonucleotide

SEQ ID NO: 638897 - DNA, 60 bp, Artificial; identical to SEQ ID NO: 244298
  Synthetic oligonucleotide

SEQ ID NO: 638898 - DNA, 55 bp, Artificial; identical to SEQ ID NO: 203502
  Synthetic oligonucleotide

SEQ ID NO: 638899 - DNA, 55 bp, Artificial; identical to SEQ ID NO: 247081
  Synthetic oligonucleotide

SEQ ID NO: 638900 - DNA, 55 bp, Artificial; identical to SEQ ID NO: 174711
  Synthetic oligonucleotide

SEQ ID NO: 638901 - DNA, 55 bp, Artificial; identical to SEQ ID NO: 156211
  Synthetic oligonucleotide

SEQ ID NO: 638902 - DNA, 56 bp, Artificial; identical to SEQ ID NO: 144311
  Synthetic oligonucleotide

SEQ ID NO: 638903 - DNA, 54 bp, Artificial; identical to SEQ ID NO: 217380
  Synthetic oligonucleotide

SEQ ID NO: 638904 - DNA, 55 bp, Artificial; identical to SEQ ID NO: 179587
  Synthetic oligonucleotide

SEQ ID NO: 638905 - DNA, 57 bp, Artificial; identical to SEQ ID NO: 187355
  Synthetic oligonucleotide

SEQ ID NO: 638906 - DNA, 58 bp, Artificial; identical to SEQ ID NO: 248985
  Synthetic oligonucleotide

SEQ ID NO: 638907 - DNA, 54 bp, Artificial; identical to SEQ ID NO: 244309
  Synthetic oligonucleotide

SEQ ID NO: 638908 - DNA, 55 bp, Artificial; identical to SEQ ID NO: 154758
  Synthetic oligonucleotide

SEQ ID NO: 638909 - DNA, 60 bp, Artificial; identical to SEQ ID NO: 184960
  Synthetic oligonucleotide

SEQ ID NO: 638910 - DNA, 55 bp, Artificial; identical to SEQ ID NO: 148202
  Synthetic oligonucleotide

SEQ ID NO: 638911 - DNA, 55 bp, Artificial; identical to SEQ ID NO: 224635
  Synthetic oligonucleotide

SEQ ID NO: 638912 - DNA, 60 bp, Artificial; identical to SEQ ID NO: 256398
  Synthetic oligonucleotide

SEQ ID NO: 638913 - DNA, 55 bp, Artificial; identical to SEQ ID NO: 220717
  Synthetic oligonucleotide

SEQ ID NO: 638914 - DNA, 55 bp, Artificial; identical to SEQ ID NO: 217350
  Synthetic oligonucleotide

SEQ ID NO: 638915 - DNA, 55 bp, Artificial; identical to SEQ ID NO: 259032
  Synthetic oligonucleotide

SEQ ID NO: 638916 - DNA, 57 bp, Artificial; identical to SEQ ID NO: 150697
  Synthetic oligonucleotide

SEQ ID NO: 638917 - DNA, 55 bp, Artificial; identical to SEQ ID NO: 163947
  Synthetic oligonucleotide

SEQ ID NO: 638918 - DNA, 55 bp, Artificial; identical to SEQ ID NO: 169959
  Synthetic oligonucleotide

SEQ ID NO: 638919 - DNA, 56 bp, Artificial; identical to SEQ ID NO: 194318
  Synthetic oligonucleotide

SEQ ID NO: 638920 - DNA, 60 bp, Artificial; identical to SEQ ID NO: 237770
  Synthetic oligonucleotide

SEQ ID NO: 638921 - DNA, 54 bp, Artificial; identical to SEQ ID NO: 180244
  Synthetic oligonucleotide

SEQ ID NO: 638922 - DNA, 55 bp, Artificial; identical to SEQ ID NO: 168441
  Synthetic oligonucleotide

SEQ ID NO: 638923 - DNA, 53 bp, Artificial; identical to SEQ ID NO: 246391
  Synthetic oligonucleotide

SEQ ID NO: 638924 - DNA, 56 bp, Artificial; identical to SEQ ID NO: 212914
  Synthetic oligonucleotide

SEQ ID NO: 638925 - DNA, 55 bp, Artificial; identical to SEQ ID NO: 266668
  Synthetic oligonucleotide

SEQ ID NO: 638926 - DNA, 55 bp, Artificial; identical to SEQ ID NO: 215153
  Synthetic oligonucleotide

SEQ ID NO: 638927 - DNA, 54 bp, Artificial; identical to SEQ ID NO: 197926
  Synthetic oligonucleotide

SEQ ID NO: 638928 - DNA, 52 bp, Artificial; identical to SEQ ID NO: 154601
  Synthetic oligonucleotide

SEQ ID NO: 638929 - DNA, 51 bp, Artificial; identical to SEQ ID NO: 235137
  Synthetic oligonucleotide

SEQ ID NO: 638930 - DNA, 52 bp, Artificial; identical to SEQ ID NO: 203241
  Synthetic oligonucleotide

SEQ ID NO: 638931 - DNA, 50 bp, Artificial; identical to SEQ ID NO: 246907
  Synthetic oligonucleotide

SEQ ID NO: 638932 - DNA, 55 bp, Artificial; identical to SEQ ID NO: 180243
  Synthetic oligonucleotide

SEQ ID NO: 638933 - DNA, 60 bp, Artificial; identical to SEQ ID NO: 257460
  Synthetic oligonucleotide

SEQ ID NO: 638934 - DNA, 55 bp, Artificial; identical to SEQ ID NO: 163944
  Synthetic oligonucleotide

SEQ ID NO: 638935 - DNA, 52 bp, Artificial; identical to SEQ ID NO: 164996
  Synthetic oligonucleotide

SEQ ID NO: 638936 - DNA, 58 bp, Artificial; identical to SEQ ID NO: 224344
  Synthetic oligonucleotide

SEQ ID NO: 638937 - DNA, 51 bp, Artificial; identical to SEQ ID NO: 171700
  Synthetic oligonucleotide

SEQ ID NO: 638938 - DNA, 53 bp, Artificial; identical to SEQ ID NO: 164867
  Synthetic oligonucleotide

SEQ ID NO: 638939 - DNA, 53 bp, Artificial; identical to SEQ ID NO: 249020
  Synthetic oligonucleotide

SEQ ID NO: 638940 - DNA, 55 bp, Artificial; identical to SEQ ID NO: 249021
  Synthetic oligonucleotide

SEQ ID NO: 638941 - DNA, 54 bp, Artificial; identical to SEQ ID NO: 242096
  Synthetic oligonucleotide

SEQ ID NO: 638942 - DNA, 53 bp, Artificial; identical to SEQ ID NO: 153099
  Synthetic oligonucleotide

SEQ ID NO: 638943 - DNA, 53 bp, Artificial; identical to SEQ ID NO: 141715
  Synthetic oligonucleotide

SEQ ID NO: 638944 - DNA, 55 bp, Artificial; identical to SEQ ID NO: 239772
  Synthetic oligonucleotide

SEQ ID NO: 638945 - DNA, 55 bp, Artificial; identical to SEQ ID NO: 189380
  Synthetic oligonucleotide

SEQ ID NO: 638946 - DNA, 55 bp, Artificial; identical to SEQ ID NO: 187582
  Synthetic oligonucleotide

SEQ ID NO: 638947 - DNA, 55 bp, Artificial; identical to SEQ ID NO: 257783
  Synthetic oligonucleotide

SEQ ID NO: 638948 - DNA, 50 bp, Artificial; identical to SEQ ID NO: 180241
  Synthetic oligonucleotide

SEQ ID NO: 638949 - DNA, 60 bp, Artificial; identical to SEQ ID NO: 202196
  Synthetic oligonucleotide

SEQ ID NO: 638950 - DNA, 55 bp, Artificial; identical to SEQ ID NO: 163943
  Synthetic oligonucleotide

SEQ ID NO: 638951 - DNA, 58 bp, Artificial; identical to SEQ ID NO: 247078
  Synthetic oligonucleotide

SEQ ID NO: 638952 - DNA, 55 bp, Artificial; identical to SEQ ID NO: 249022
  Synthetic oligonucleotide

SEQ ID NO: 638953 - DNA, 55 bp, Artificial; identical to SEQ ID NO: 174714
  Synthetic oligonucleotide

SEQ ID NO: 638954 - DNA, 52 bp, Artificial; identical to SEQ ID NO: 164992
  Synthetic oligonucleotide

SEQ ID NO: 638955 - DNA, 52 bp, Artificial; identical to SEQ ID NO: 148204
  Synthetic oligonucleotide

SEQ ID NO: 638956 - DNA, 53 bp, Artificial; identical to SEQ ID NO: 253026
  Synthetic oligonucleotide

SEQ ID NO: 638957 - DNA, 53 bp, Artificial; identical to SEQ ID NO: 240831
  Synthetic oligonucleotide

SEQ ID NO: 638958 - DNA, 52 bp, Artificial; identical to SEQ ID NO: 237772
  Synthetic oligonucleotide

SEQ ID NO: 638959 - DNA, 53 bp, Artificial; identical to SEQ ID NO: 157355
  Synthetic oligonucleotide

SEQ ID NO: 638960 - DNA, 55 bp, Artificial; identical to SEQ ID NO: 194577
  Synthetic oligonucleotide

SEQ ID NO: 638961 - DNA, 59 bp, Artificial; identical to SEQ ID NO: 164878
  Synthetic oligonucleotide

SEQ ID NO: 638962 - DNA, 60 bp, Artificial; identical to SEQ ID NO: 197915
  Synthetic oligonucleotide

SEQ ID NO: 638963 - DNA, 52 bp, Artificial; identical to SEQ ID NO: 247076
  Synthetic oligonucleotide

SEQ ID NO: 638964 - DNA, 55 bp, Artificial; identical to SEQ ID NO: 224561
  Synthetic oligonucleotide

SEQ ID NO: 638965 - DNA, 59 bp, Artificial; identical to SEQ ID NO: 141716
  Synthetic oligonucleotide

SEQ ID NO: 638966 - DNA, 52 bp, Artificial; identical to SEQ ID NO: 243242
  Synthetic oligonucleotide

SEQ ID NO: 638967 - DNA, 52 bp, Artificial; identical to SEQ ID NO: 199864
  Synthetic oligonucleotide

SEQ ID NO: 638968 - DNA, 55 bp, Artificial; identical to SEQ ID NO: 249023
  Synthetic oligonucleotide

SEQ ID NO: 638969 - DNA, 55 bp, Artificial; identical to SEQ ID NO: 245007
  Synthetic oligonucleotide

SEQ ID NO: 638970 - DNA, 57 bp, Artificial; identical to SEQ ID NO: 141717
  Synthetic oligonucleotide

SEQ ID NO: 638971 - DNA, 57 bp, Artificial; identical to SEQ ID NO: 179841
  Synthetic oligonucleotide

SEQ ID NO: 638972 - DNA, 53 bp, Artificial; identical to SEQ ID NO: 211571
  Synthetic oligonucleotide

SEQ ID NO: 638973 - DNA, 55 bp, Artificial; identical to SEQ ID NO: 221528
  Synthetic oligonucleotide

SEQ ID NO: 638974 - DNA, 55 bp, Artificial; identical to SEQ ID NO: 156213
  Synthetic oligonucleotide

SEQ ID NO: 638975 - DNA, 55 bp, Artificial; identical to SEQ ID NO: 207393
  Synthetic oligonucleotide

SEQ ID NO: 638976 - DNA, 52 bp, Artificial; identical to SEQ ID NO: 218268
  Synthetic oligonucleotide

SEQ ID NO: 638977 - DNA, 50 bp, Artificial; identical to SEQ ID NO: 246905
  Synthetic oligonucleotide

SEQ ID NO: 638978 - DNA, 58 bp, Artificial; identical to SEQ ID NO: 243968
  Synthetic oligonucleotide

SEQ ID NO: 638979 - DNA, 54 bp, Artificial; identical to SEQ ID NO: 198010
  Synthetic oligonucleotide

SEQ ID NO: 638980 - DNA, 60 bp, Artificial; identical to SEQ ID NO: 202185
  Synthetic oligonucleotide

SEQ ID NO: 638981 - DNA, 50 bp, Artificial; identical to SEQ ID NO: 216913
  Synthetic oligonucleotide

SEQ ID NO: 638982 - DNA, 55 bp, Artificial; identical to SEQ ID NO: 180237
  Synthetic oligonucleotide

SEQ ID NO: 638983 - DNA, 55 bp, Artificial; identical to SEQ ID NO: 211085
  Synthetic oligonucleotide

SEQ ID NO: 638984 - DNA, 54 bp, Artificial; identical to SEQ ID NO: 253251
  Synthetic oligonucleotide

SEQ ID NO: 638985 - DNA, 58 bp, Artificial; identical to SEQ ID NO: 247457
  Synthetic oligonucleotide

SEQ ID NO: 638986 - DNA, 55 bp, Artificial; identical to SEQ ID NO: 244234
  Synthetic oligonucleotide

SEQ ID NO: 638987 - DNA, 55 bp, Artificial; identical to SEQ ID NO: 205548
  Synthetic oligonucleotide

SEQ ID NO: 638988 - DNA, 54 bp, Artificial; identical to SEQ ID NO: 185409
  Synthetic oligonucleotide

SEQ ID NO: 638989 - DNA, 51 bp, Artificial; identical to SEQ ID NO: 200166
  Synthetic oligonucleotide

SEQ ID NO: 638990 - DNA, 50 bp, Artificial; identical to SEQ ID NO: 193220
  Synthetic oligonucleotide

SEQ ID NO: 638991 - DNA, 50 bp, Artificial; identical to SEQ ID NO: 185953
  Synthetic oligonucleotide

SEQ ID NO: 638992 - DNA, 52 bp, Artificial; identical to SEQ ID NO: 240939
  Synthetic oligonucleotide

SEQ ID NO: 638993 - DNA, 55 bp, Artificial; identical to SEQ ID NO: 197378
  Synthetic oligonucleotide

SEQ ID NO: 638994 - DNA, 55 bp, Artificial; identical to SEQ ID NO: 189382
  Synthetic oligonucleotide

SEQ ID NO: 638995 - DNA, 51 bp, Artificial; identical to SEQ ID NO: 165287
  Synthetic oligonucleotide

SEQ ID NO: 638996 - DNA, 56 bp, Artificial; identical to SEQ ID NO: 184838
  Synthetic oligonucleotide

SEQ ID NO: 638997 - DNA, 60 bp, Artificial; identical to SEQ ID NO: 197904
  Synthetic oligonucleotide

SEQ ID NO: 638998 - DNA, 55 bp, Artificial; identical to SEQ ID NO: 180234
  Synthetic oligonucleotide

SEQ ID NO: 638999 - DNA, 55 bp, Artificial; identical to SEQ ID NO: 254192
  Synthetic oligonucleotide

SEQ ID NO: 639000 - DNA, 50 bp, Artificial; identical to SEQ ID NO: 221987
  Synthetic oligonucleotide

SEQ ID NO: 639001 - DNA, 55 bp, Artificial; identical to SEQ ID NO: 148209
  Synthetic oligonucleotide

SEQ ID NO: 639002 - DNA, 51 bp, Artificial; identical to SEQ ID NO: 141364
  Synthetic oligonucleotide

SEQ ID NO: 639003 - DNA, 54 bp, Artificial; identical to SEQ ID NO: 190022
  Synthetic oligonucleotide

SEQ ID NO: 639004 - DNA, 55 bp, Artificial; identical to SEQ ID NO: 198008
  Synthetic oligonucleotide

SEQ ID NO: 639005 - DNA, 50 bp, Artificial; identical to SEQ ID NO: 150058
  Synthetic oligonucleotide

SEQ ID NO: 639006 - DNA, 51 bp, Artificial; identical to SEQ ID NO: 170166
  Synthetic oligonucleotide

SEQ ID NO: 639007 - DNA, 55 bp, Artificial; identical to SEQ ID NO: 163940
  Synthetic oligonucleotide

SEQ ID NO: 639008 - DNA, 55 bp, Artificial; identical to SEQ ID NO: 244190
  Synthetic oligonucleotide

SEQ ID NO: 639009 - DNA, 53 bp, Artificial; identical to SEQ ID NO: 191817
  Synthetic oligonucleotide

SEQ ID NO: 639010 - DNA, 55 bp, Artificial; identical to SEQ ID NO: 224549
  Synthetic oligonucleotide

SEQ ID NO: 639011 - DNA, 55 bp, Artificial; identical to SEQ ID NO: 221526
  Synthetic oligonucleotide

SEQ ID NO: 639012 - DNA, 55 bp, Artificial; identical to SEQ ID NO: 211088
  Synthetic oligonucleotide

SEQ ID NO: 639013 - DNA, 60 bp, Artificial; identical to SEQ ID NO: 184827
  Synthetic oligonucleotide

SEQ ID NO: 639014 - DNA, 57 bp, Artificial; identical to SEQ ID NO: 155608
  Synthetic oligonucleotide

SEQ ID NO: 639015 - DNA, 55 bp, Artificial; identical to SEQ ID NO: 224540
  Synthetic oligonucleotide

SEQ ID NO: 639016 - DNA, 59 bp, Artificial; identical to SEQ ID NO: 202151
  Synthetic oligonucleotide

SEQ ID NO: 639017 - DNA, 58 bp, Artificial; identical to SEQ ID NO: 224780
  Synthetic oligonucleotide

SEQ ID NO: 639018 - DNA, 55 bp, Artificial; identical to SEQ ID NO: 191816
  Synthetic oligonucleotide

SEQ ID NO: 639019 - DNA, 55 bp, Artificial; identical to SEQ ID NO: 249612
  Synthetic oligonucleotide

SEQ ID NO: 639020 - DNA, 54 bp, Artificial; identical to SEQ ID NO: 217392
  Synthetic oligonucleotide

SEQ ID NO: 639021 - DNA, 55 bp, Artificial; identical to SEQ ID NO: 238471
  Synthetic oligonucleotide

SEQ ID NO: 639022 - DNA, 55 bp, Artificial; identical to SEQ ID NO: 151550
  Synthetic oligonucleotide

SEQ ID NO: 639023 - DNA, 55 bp, Artificial; identical to SEQ ID NO: 244940
  Synthetic oligonucleotide

SEQ ID NO: 639024 - DNA, 54 bp, Artificial; identical to SEQ ID NO: 218855
  Synthetic oligonucleotide

SEQ ID NO: 639025 - DNA, 53 bp, Artificial; identical to SEQ ID NO: 220772
  Synthetic oligonucleotide

SEQ ID NO: 639026 - DNA, 58 bp, Artificial; identical to SEQ ID NO: 184783
  Synthetic oligonucleotide

SEQ ID NO: 639027 - DNA, 55 bp, Artificial; identical to SEQ ID NO: 190021
  Synthetic oligonucleotide

SEQ ID NO: 639028 - DNA, 55 bp, Artificial; identical to SEQ ID NO: 180110
  Synthetic oligonucleotide

SEQ ID NO: 639029 - DNA, 55 bp, Artificial; identical to SEQ ID NO: 151553
  Synthetic oligonucleotide

SEQ ID NO: 639030 - DNA, 52 bp, Artificial; identical to SEQ ID NO: 161347
  Synthetic oligonucleotide

SEQ ID NO: 639031 - DNA, 56 bp, Artificial; identical to SEQ ID NO: 179798
  Synthetic oligonucleotide

SEQ ID NO: 639032 - DNA, 55 bp, Artificial; identical to SEQ ID NO: 253028
  Synthetic oligonucleotide

SEQ ID NO: 639033 - DNA, 55 bp, Artificial; identical to SEQ ID NO: 233521
  Synthetic oligonucleotide

SEQ ID NO: 639034 - DNA, 55 bp, Artificial; identical to SEQ ID NO: 244936
  Synthetic oligonucleotide

SEQ ID NO: 639035 - DNA, 55 bp, Artificial; identical to SEQ ID NO: 203522
  Synthetic oligonucleotide

SEQ ID NO: 639036 - DNA, 55 bp, Artificial; identical to SEQ ID NO: 218267
  Synthetic oligonucleotide

SEQ ID NO: 639037 - DNA, 55 bp, Artificial; identical to SEQ ID NO: 238469
  Synthetic oligonucleotide

SEQ ID NO: 639038 - DNA, 55 bp, Artificial; identical to SEQ ID NO: 156215
  Synthetic oligonucleotide

SEQ ID NO: 639039 - DNA, 55 bp, Artificial; identical to SEQ ID NO: 162083
  Synthetic oligonucleotide

SEQ ID NO: 639040 - DNA, 55 bp, Artificial; identical to SEQ ID NO: 244199
  Synthetic oligonucleotide

SEQ ID NO: 639041 - DNA, 55 bp, Artificial; identical to SEQ ID NO: 180144
  Synthetic oligonucleotide

SEQ ID NO: 639042 - DNA, 51 bp, Artificial; identical to SEQ ID NO: 203066
  Synthetic oligonucleotide

SEQ ID NO: 639043 - DNA, 54 bp, Artificial; identical to SEQ ID NO: 156216
  Synthetic oligonucleotide

SEQ ID NO: 639044 - DNA, 55 bp, Artificial; identical to SEQ ID NO: 208590
  Synthetic oligonucleotide

SEQ ID NO: 639045 - DNA, 55 bp, Artificial; identical to SEQ ID NO: 148211
  Synthetic oligonucleotide

SEQ ID NO: 639046 - DNA, 55 bp, Artificial; identical to SEQ ID NO: 180129
  Synthetic oligonucleotide

SEQ ID NO: 639047 - DNA, 55 bp, Artificial; identical to SEQ ID NO: 253076
  Synthetic oligonucleotide

SEQ ID NO: 639048 - DNA, 55 bp, Artificial; identical to SEQ ID NO: 233520
  Synthetic oligonucleotide

SEQ ID NO: 639049 - DNA, 52 bp, Artificial; identical to SEQ ID NO: 152464
  Synthetic oligonucleotide

SEQ ID NO: 639050 - DNA, 59 bp, Artificial; identical to SEQ ID NO: 171022
  Synthetic oligonucleotide

SEQ ID NO: 639051 - DNA, 52 bp, Artificial; identical to SEQ ID NO: 197955
  Synthetic oligonucleotide

SEQ ID NO: 639052 - DNA, 55 bp, Artificial; identical to SEQ ID NO: 164922
  Synthetic oligonucleotide

SEQ ID NO: 639053 - DNA, 60 bp, Artificial; identical to SEQ ID NO: 256487
  Synthetic oligonucleotide

SEQ ID NO: 639054 - DNA, 60 bp, Artificial; identical to SEQ ID NO: 187350
  Synthetic oligonucleotide

SEQ ID NO: 639055 - DNA, 58 bp, Artificial; identical to SEQ ID NO: 242106
  Synthetic oligonucleotide

SEQ ID NO: 639056 - DNA, 55 bp, Artificial; identical to SEQ ID NO: 233519
  Synthetic oligonucleotide

SEQ ID NO: 639057 - DNA, 55 bp, Artificial; identical to SEQ ID NO: 168443
  Synthetic oligonucleotide

SEQ ID NO: 639058 - DNA, 55 bp, Artificial; identical to SEQ ID NO: 197383
  Synthetic oligonucleotide

SEQ ID NO: 639059 - DNA, 51 bp, Artificial; identical to SEQ ID NO: 209726
  Synthetic oligonucleotide

SEQ ID NO: 639060 - DNA, 53 bp, Artificial; identical to SEQ ID NO: 166149
  Synthetic oligonucleotide

SEQ ID NO: 639061 - DNA, 55 bp, Artificial; identical to SEQ ID NO: 155025
  Synthetic oligonucleotide

SEQ ID NO: 639062 - DNA, 51 bp, Artificial; identical to SEQ ID NO: 197682
  Synthetic oligonucleotide

SEQ ID NO: 639063 - DNA, 52 bp, Artificial; identical to SEQ ID NO: 253310
  Synthetic oligonucleotide

SEQ ID NO: 639064 - DNA, 53 bp, Artificial; identical to SEQ ID NO: 218265
  Synthetic oligonucleotide

SEQ ID NO: 639065 - DNA, 55 bp, Artificial; identical to SEQ ID NO: 188808
  Synthetic oligonucleotide

SEQ ID NO: 639066 - DNA, 55 bp, Artificial; identical to SEQ ID NO: 201597
  Synthetic oligonucleotide

SEQ ID NO: 639067 - DNA, 56 bp, Artificial; identical to SEQ ID NO: 242564
  Synthetic oligonucleotide

SEQ ID NO: 639068 - DNA, 52 bp, Artificial; identical to SEQ ID NO: 188128
  Synthetic oligonucleotide

SEQ ID NO: 639069 - DNA, 55 bp, Artificial; identical to SEQ ID NO: 197954
  Synthetic oligonucleotide

SEQ ID NO: 639070 - DNA, 51 bp, Artificial; identical to SEQ ID NO: 237136
  Synthetic oligonucleotide

SEQ ID NO: 639071 - DNA, 55 bp, Artificial; identical to SEQ ID NO: 254188
  Synthetic oligonucleotide

SEQ ID NO: 639072 - DNA, 55 bp, Artificial; identical to SEQ ID NO: 148214
  Synthetic oligonucleotide

SEQ ID NO: 639073 - DNA, 55 bp, Artificial; identical to SEQ ID NO: 244201
  Synthetic oligonucleotide

SEQ ID NO: 639074 - DNA, 55 bp, Artificial; identical to SEQ ID NO: 197953
  Synthetic oligonucleotide

SEQ ID NO: 639075 - DNA, 52 bp, Artificial; identical to SEQ ID NO: 211599
  Synthetic oligonucleotide

SEQ ID NO: 639076 - DNA, 52 bp, Artificial; identical to SEQ ID NO: 223694
  Synthetic oligonucleotide

SEQ ID NO: 639077 - DNA, 51 bp, Artificial; identical to SEQ ID NO: 200155
  Synthetic oligonucleotide

SEQ ID NO: 639078 - DNA, 58 bp, Artificial; identical to SEQ ID NO: 197893
  Synthetic oligonucleotide

SEQ ID NO: 639079 - DNA, 55 bp, Artificial; identical to SEQ ID NO: 234105
  Synthetic oligonucleotide

SEQ ID NO: 639080 - DNA, 55 bp, Artificial; identical to SEQ ID NO: 180106
  Synthetic oligonucleotide

SEQ ID NO: 639081 - DNA, 53 bp, Artificial; identical to SEQ ID NO: 240800
  Synthetic oligonucleotide

SEQ ID NO: 639082 - DNA, 55 bp, Artificial; identical to SEQ ID NO: 239764
  Synthetic oligonucleotide

SEQ ID NO: 639083 - DNA, 55 bp, Artificial; identical to SEQ ID NO: 190985
  Synthetic oligonucleotide

SEQ ID NO: 639084 - DNA, 55 bp, Artificial; identical to SEQ ID NO: 244931
  Synthetic oligonucleotide

SEQ ID NO: 639085 - DNA, 52 bp, Artificial; identical to SEQ ID NO: 247067
  Synthetic oligonucleotide

SEQ ID NO: 639086 - DNA, 55 bp, Artificial; identical to SEQ ID NO: 194579
  Synthetic oligonucleotide

SEQ ID NO: 639087 - DNA, 51 bp, Artificial; identical to SEQ ID NO: 160582
  Synthetic oligonucleotide

SEQ ID NO: 639088 - DNA, 54 bp, Artificial; identical to SEQ ID NO: 167532
  Synthetic oligonucleotide

SEQ ID NO: 639089 - DNA, 55 bp, Artificial; identical to SEQ ID NO: 244202
  Synthetic oligonucleotide

SEQ ID NO: 639090 - DNA, 55 bp, Artificial; identical to SEQ ID NO: 163935
  Synthetic oligonucleotide

SEQ ID NO: 639091 - DNA, 55 bp, Artificial; identical to SEQ ID NO: 154086
  Synthetic oligonucleotide

SEQ ID NO: 639092 - DNA, 54 bp, Artificial; identical to SEQ ID NO: 190017
  Synthetic oligonucleotide

SEQ ID NO: 639093 - DNA, 55 bp, Artificial; identical to SEQ ID NO: 163933
  Synthetic oligonucleotide

SEQ ID NO: 639094 - DNA, 60 bp, Artificial; identical to SEQ ID NO: 242107
  Synthetic oligonucleotide

SEQ ID NO: 639095 - DNA, 54 bp, Artificial; identical to SEQ ID NO: 167058
  Synthetic oligonucleotide

SEQ ID NO: 639096 - DNA, 55 bp, Artificial; identical to SEQ ID NO: 174716
  Synthetic oligonucleotide

SEQ ID NO: 639097 - DNA, 55 bp, Artificial; identical to SEQ ID NO: 180121
  Synthetic oligonucleotide

SEQ ID NO: 639098 - DNA, 55 bp, Artificial; identical to SEQ ID NO: 244928
  Synthetic oligonucleotide

SEQ ID NO: 639099 - DNA, 57 bp, Artificial; identical to SEQ ID NO: 242111
  Synthetic oligonucleotide

SEQ ID NO: 639100 - DNA, 59 bp, Artificial; identical to SEQ ID NO: 153000
  Synthetic oligonucleotide

SEQ ID NO: 639101 - DNA, 51 bp, Artificial; identical to SEQ ID NO: 246758
  Synthetic oligonucleotide

SEQ ID NO: 639102 - DNA, 55 bp, Artificial; identical to SEQ ID NO: 148219
  Synthetic oligonucleotide

SEQ ID NO: 639103 - DNA, 55 bp, Artificial; identical to SEQ ID NO: 169957
  Synthetic oligonucleotide

SEQ ID NO: 639104 - DNA, 55 bp, Artificial; identical to SEQ ID NO: 142041
  Synthetic oligonucleotide

SEQ ID NO: 639105 - DNA, 55 bp, Artificial; identical to SEQ ID NO: 180118
  Synthetic oligonucleotide

SEQ ID NO: 639106 - DNA, 59 bp, Artificial; identical to SEQ ID NO: 152998
  Synthetic oligonucleotide

SEQ ID NO: 639107 - DNA, 55 bp, Artificial; identical to SEQ ID NO: 242575
  Synthetic oligonucleotide

SEQ ID NO: 639108 - DNA, 55 bp, Artificial; identical to SEQ ID NO: 254187
  Synthetic oligonucleotide

SEQ ID NO: 639109 - DNA, 55 bp, Artificial; identical to SEQ ID NO: 244927
  Synthetic oligonucleotide

SEQ ID NO: 639110 - DNA, 50 bp, Artificial; identical to SEQ ID NO: 210596
  Synthetic oligonucleotide

SEQ ID NO: 639111 - DNA, 55 bp, Artificial; identical to SEQ ID NO: 187578
  Synthetic oligonucleotide

SEQ ID NO: 639112 - DNA, 55 bp, Artificial; identical to SEQ ID NO: 207396
  Synthetic oligonucleotide

SEQ ID NO: 639113 - DNA, 55 bp, Artificial; identical to SEQ ID NO: 254186
  Synthetic oligonucleotide

SEQ ID NO: 639114 - DNA, 55 bp, Artificial; identical to SEQ ID NO: 244926
  Synthetic oligonucleotide

SEQ ID NO: 639115 - DNA, 55 bp, Artificial; identical to SEQ ID NO: 189386
  Synthetic oligonucleotide

SEQ ID NO: 639116 - DNA, 55 bp, Artificial; identical to SEQ ID NO: 180136
  Synthetic oligonucleotide

SEQ ID NO: 639117 - DNA, 55 bp, Artificial; identical to SEQ ID NO: 163932
  Synthetic oligonucleotide

SEQ ID NO: 639118 - DNA, 55 bp, Artificial; identical to SEQ ID NO: 163986
  Synthetic oligonucleotide

SEQ ID NO: 639119 - DNA, 55 bp, Artificial; identical to SEQ ID NO: 244204
  Synthetic oligonucleotide

SEQ ID NO: 639120 - DNA, 55 bp, Artificial; identical to SEQ ID NO: 244205
  Synthetic oligonucleotide

SEQ ID NO: 639121 - DNA, 55 bp, Artificial; identical to SEQ ID NO: 163988
  Synthetic oligonucleotide

SEQ ID NO: 639122 - DNA, 60 bp, Artificial; identical to SEQ ID NO: 205386
  Synthetic oligonucleotide

SEQ ID NO: 639123 - DNA, 51 bp, Artificial; identical to SEQ ID NO: 144299
  Synthetic oligonucleotide

SEQ ID NO: 639124 - DNA, 55 bp, Artificial; identical to SEQ ID NO: 253077
  Synthetic oligonucleotide

SEQ ID NO: 639125 - DNA, 55 bp, Artificial; identical to SEQ ID NO: 244207
  Synthetic oligonucleotide

SEQ ID NO: 639126 - DNA, 55 bp, Artificial; identical to SEQ ID NO: 190014
  Synthetic oligonucleotide

SEQ ID NO: 639127 - DNA, 52 bp, Artificial; identical to SEQ ID NO: 244210
  Synthetic oligonucleotide

SEQ ID NO: 639128 - DNA, 60 bp, Artificial; identical to SEQ ID NO: 247063
  Synthetic oligonucleotide

SEQ ID NO: 639129 - DNA, 60 bp, Artificial; identical to SEQ ID NO: 203245
  Synthetic oligonucleotide

SEQ ID NO: 639130 - DNA, 55 bp, Artificial; identical to SEQ ID NO: 180128
  Synthetic oligonucleotide

SEQ ID NO: 639131 - DNA, 55 bp, Artificial; identical to SEQ ID NO: 156217
  Synthetic oligonucleotide

SEQ ID NO: 639132 - DNA, 55 bp, Artificial; identical to SEQ ID NO: 244922
  Synthetic oligonucleotide

SEQ ID NO: 639133 - DNA, 55 bp, Artificial; identical to SEQ ID NO: 239798
  Synthetic oligonucleotide

SEQ ID NO: 639134 - DNA, 55 bp, Artificial; identical to SEQ ID NO: 189387
  Synthetic oligonucleotide

SEQ ID NO: 639135 - DNA, 55 bp, Artificial; identical to SEQ ID NO: 163989
  Synthetic oligonucleotide

SEQ ID NO: 639136 - DNA, 55 bp, Artificial; identical to SEQ ID NO: 197941
  Synthetic oligonucleotide

SEQ ID NO: 639137 - DNA, 54 bp, Artificial; identical to SEQ ID NO: 169234
  Synthetic oligonucleotide

SEQ ID NO: 639138 - DNA, 53 bp, Artificial; identical to SEQ ID NO: 212962
  Synthetic oligonucleotide

SEQ ID NO: 639139 - DNA, 60 bp, Artificial; identical to SEQ ID NO: 242586
  Synthetic oligonucleotide

SEQ ID NO: 639140 - DNA, 51 bp, Artificial; identical to SEQ ID NO: 149873
  Synthetic oligonucleotide

SEQ ID NO: 639141 - DNA, 55 bp, Artificial; identical to SEQ ID NO: 233518
  Synthetic oligonucleotide

SEQ ID NO: 639142 - DNA, 55 bp, Artificial; identical to SEQ ID NO: 244918
  Synthetic oligonucleotide

SEQ ID NO: 639143 - DNA, 55 bp, Artificial; identical to SEQ ID NO: 146235
  Synthetic oligonucleotide

SEQ ID NO: 639144 - DNA, 55 bp, Artificial; identical to SEQ ID NO: 151554
  Synthetic oligonucleotide

SEQ ID NO: 639145 - DNA, 55 bp, Artificial; identical to SEQ ID NO: 163992
  Synthetic oligonucleotide

SEQ ID NO: 639146 - DNA, 56 bp, Artificial; identical to SEQ ID NO: 197871
  Synthetic oligonucleotide

SEQ ID NO: 639147 - DNA, 51 bp, Artificial; identical to SEQ ID NO: 247534
  Synthetic oligonucleotide

SEQ ID NO: 639148 - DNA, 55 bp, Artificial; identical to SEQ ID NO: 221637
  Synthetic oligonucleotide

SEQ ID NO: 639149 - DNA, 55 bp, Artificial; identical to SEQ ID NO: 187576
  Synthetic oligonucleotide

SEQ ID NO: 639150 - DNA, 55 bp, Artificial; identical to SEQ ID NO: 244975
  Synthetic oligonucleotide

SEQ ID NO: 639151 - DNA, 54 bp, Artificial; identical to SEQ ID NO: 247721
  Synthetic oligonucleotide

SEQ ID NO: 639152 - DNA, 59 bp, Artificial; identical to SEQ ID NO: 255667
  Synthetic oligonucleotide

SEQ ID NO: 639153 - DNA, 55 bp, Artificial; identical to SEQ ID NO: 211095
  Synthetic oligonucleotide

SEQ ID NO: 639154 - DNA, 54 bp, Artificial; identical to SEQ ID NO: 244974
  Synthetic oligonucleotide

SEQ ID NO: 639155 - DNA, 55 bp, Artificial; identical to SEQ ID NO: 238467
  Synthetic oligonucleotide

SEQ ID NO: 639156 - DNA, 55 bp, Artificial; identical to SEQ ID NO: 174718
  Synthetic oligonucleotide

SEQ ID NO: 639157 - DNA, 53 bp, Artificial; identical to SEQ ID NO: 202749
  Synthetic oligonucleotide

SEQ ID NO: 639158 - DNA, 55 bp, Artificial; identical to SEQ ID NO: 155301
  Synthetic oligonucleotide

SEQ ID NO: 639159 - DNA, 55 bp, Artificial; identical to SEQ ID NO: 156220
  Synthetic oligonucleotide

SEQ ID NO: 639160 - DNA, 57 bp, Artificial; identical to SEQ ID NO: 171240
  Synthetic oligonucleotide

SEQ ID NO: 639161 - DNA, 59 bp, Artificial; identical to SEQ ID NO: 197860
  Synthetic oligonucleotide

SEQ ID NO: 639162 - DNA, 54 bp, Artificial; identical to SEQ ID NO: 233517
  Synthetic oligonucleotide

SEQ ID NO: 639163 - DNA, 55 bp, Artificial; identical to SEQ ID NO: 208588
  Synthetic oligonucleotide

SEQ ID NO: 639164 - DNA, 55 bp, Artificial; identical to SEQ ID NO: 190442
  Synthetic oligonucleotide

SEQ ID NO: 639165 - DNA, 55 bp, Artificial; identical to SEQ ID NO: 254184
  Synthetic oligonucleotide

SEQ ID NO: 639166 - DNA, 55 bp, Artificial; identical to SEQ ID NO: 188807
  Synthetic oligonucleotide

SEQ ID NO: 639167 - DNA, 53 bp, Artificial; identical to SEQ ID NO: 212925
  Synthetic oligonucleotide

SEQ ID NO: 639168 - DNA, 55 bp, Artificial; identical to SEQ ID NO: 169235
  Synthetic oligonucleotide

SEQ ID NO: 639169 - DNA, 55 bp, Artificial; identical to SEQ ID NO: 244971
  Synthetic oligonucleotide

SEQ ID NO: 639170 - DNA, 55 bp, Artificial; identical to SEQ ID NO: 254183
  Synthetic oligonucleotide

SEQ ID NO: 639171 - DNA, 55 bp, Artificial; identical to SEQ ID NO: 203551
  Synthetic oligonucleotide

SEQ ID NO: 639172 - DNA, 55 bp, Artificial; identical to SEQ ID NO: 222632
  Synthetic oligonucleotide

SEQ ID NO: 639173 - DNA, 55 bp, Artificial; identical to SEQ ID NO: 215158
  Synthetic oligonucleotide

SEQ ID NO: 639174 - DNA, 59 bp, Artificial; identical to SEQ ID NO: 152996
  Synthetic oligonucleotide

SEQ ID NO: 639175 - DNA, 55 bp, Artificial; identical to SEQ ID NO: 225176
  Synthetic oligonucleotide

SEQ ID NO: 639176 - DNA, 52 bp, Artificial; identical to SEQ ID NO: 145038
  Synthetic oligonucleotide

SEQ ID NO: 639177 - DNA, 58 bp, Artificial; identical to SEQ ID NO: 179542
  Synthetic oligonucleotide

SEQ ID NO: 639178 - DNA, 55 bp, Artificial; identical to SEQ ID NO: 266669
  Synthetic oligonucleotide

SEQ ID NO: 639179 - DNA, 57 bp, Artificial; identical to SEQ ID NO: 141722
  Synthetic oligonucleotide

SEQ ID NO: 639180 - DNA, 51 bp, Artificial; identical to SEQ ID NO: 174302
  Synthetic oligonucleotide

SEQ ID NO: 639181 - DNA, 55 bp, Artificial; identical to SEQ ID NO: 217331
  Synthetic oligonucleotide

SEQ ID NO: 639182 - DNA, 60 bp, Artificial; identical to SEQ ID NO: 184038
  Synthetic oligonucleotide

SEQ ID NO: 639183 - DNA, 55 bp, Artificial; identical to SEQ ID NO: 154463
  Synthetic oligonucleotide

SEQ ID NO: 639184 - DNA, 55 bp, Artificial; identical to SEQ ID NO: 197974
  Synthetic oligonucleotide

SEQ ID NO: 639185 - DNA, 53 bp, Artificial; identical to SEQ ID NO: 244072
  Synthetic oligonucleotide

SEQ ID NO: 639186 - DNA, 53 bp, Artificial; identical to SEQ ID NO: 253298
  Synthetic oligonucleotide

SEQ ID NO: 639187 - DNA, 53 bp, Artificial; identical to SEQ ID NO: 190007
  Synthetic oligonucleotide

SEQ ID NO: 639188 - DNA, 51 bp, Artificial; identical to SEQ ID NO: 179543
  Synthetic oligonucleotide

SEQ ID NO: 639189 - DNA, 55 bp, Artificial; identical to SEQ ID NO: 238465
  Synthetic oligonucleotide

SEQ ID NO: 639190 - DNA, 55 bp, Artificial; identical to SEQ ID NO: 208612
  Synthetic oligonucleotide

SEQ ID NO: 639191 - DNA, 55 bp, Artificial; identical to SEQ ID NO: 152270
  Synthetic oligonucleotide

SEQ ID NO: 639192 - DNA, 55 bp, Artificial; identical to SEQ ID NO: 244967
  Synthetic oligonucleotide

SEQ ID NO: 639193 - DNA, 53 bp, Artificial; identical to SEQ ID NO: 190643
  Synthetic oligonucleotide

SEQ ID NO: 639194 - DNA, 55 bp, Artificial; identical to SEQ ID NO: 205602
  Synthetic oligonucleotide

SEQ ID NO: 639195 - DNA, 54 bp, Artificial; identical to SEQ ID NO: 202953
  Synthetic oligonucleotide

SEQ ID NO: 639196 - DNA, 57 bp, Artificial; identical to SEQ ID NO: 150704
  Synthetic oligonucleotide

SEQ ID NO: 639197 - DNA, 55 bp, Artificial; identical to SEQ ID NO: 155300
  Synthetic oligonucleotide

SEQ ID NO: 639198 - DNA, 55 bp, Artificial; identical to SEQ ID NO: 174720
  Synthetic oligonucleotide

SEQ ID NO: 639199 - DNA, 55 bp, Artificial; identical to SEQ ID NO: 221636
  Synthetic oligonucleotide

SEQ ID NO: 639200 - DNA, 55 bp, Artificial; identical to SEQ ID NO: 266198
  Synthetic oligonucleotide

SEQ ID NO: 639201 - DNA, 54 bp, Artificial; identical to SEQ ID NO: 253079
  Synthetic oligonucleotide

SEQ ID NO: 639202 - DNA, 55 bp, Artificial; identical to SEQ ID NO: 211096
  Synthetic oligonucleotide

SEQ ID NO: 639203 - DNA, 55 bp, Artificial; identical to SEQ ID NO: 233516
  Synthetic oligonucleotide

SEQ ID NO: 639204 - DNA, 59 bp, Artificial; identical to SEQ ID NO: 197849
  Synthetic oligonucleotide

SEQ ID NO: 639205 - DNA, 55 bp, Artificial; identical to SEQ ID NO: 249033
  Synthetic oligonucleotide

SEQ ID NO: 639206 - DNA, 55 bp, Artificial; identical to SEQ ID NO: 202058
  Synthetic oligonucleotide

SEQ ID NO: 639207 - DNA, 57 bp, Artificial; identical to SEQ ID NO: 246995
  Synthetic oligonucleotide

SEQ ID NO: 639208 - DNA, 55 bp, Artificial; identical to SEQ ID NO: 154464
  Synthetic oligonucleotide

SEQ ID NO: 639209 - DNA, 55 bp, Artificial; identical to SEQ ID NO: 244964
  Synthetic oligonucleotide

SEQ ID NO: 639210 - DNA, 55 bp, Artificial; identical to SEQ ID NO: 254182
  Synthetic oligonucleotide

SEQ ID NO: 639211 - DNA, 51 bp, Artificial; identical to SEQ ID NO: 151323
  Synthetic oligonucleotide

SEQ ID NO: 639212 - DNA, 54 bp, Artificial; identical to SEQ ID NO: 191813
  Synthetic oligonucleotide

SEQ ID NO: 639213 - DNA, 55 bp, Artificial; identical to SEQ ID NO: 187574
  Synthetic oligonucleotide

SEQ ID NO: 639214 - DNA, 55 bp, Artificial; identical to SEQ ID NO: 246994
  Synthetic oligonucleotide

SEQ ID NO: 639215 - DNA, 55 bp, Artificial; identical to SEQ ID NO: 259033
  Synthetic oligonucleotide

SEQ ID NO: 639216 - DNA, 55 bp, Artificial; identical to SEQ ID NO: 144370
  Synthetic oligonucleotide

SEQ ID NO: 639217 - DNA, 54 bp, Artificial; identical to SEQ ID NO: 184027
  Synthetic oligonucleotide

SEQ ID NO: 639218 - DNA, 54 bp, Artificial; identical to SEQ ID NO: 246121
  Synthetic oligonucleotide

SEQ ID NO: 639219 - DNA, 51 bp, Artificial; identical to SEQ ID NO: 209742
  Synthetic oligonucleotide

SEQ ID NO: 639220 - DNA, 56 bp, Artificial; identical to SEQ ID NO: 201241
  Synthetic oligonucleotide

SEQ ID NO: 639221 - DNA, 55 bp, Artificial; identical to SEQ ID NO: 265849
  Synthetic oligonucleotide

SEQ ID NO: 639222 - DNA, 55 bp, Artificial; identical to SEQ ID NO: 253080
  Synthetic oligonucleotide

SEQ ID NO: 639223 - DNA, 55 bp, Artificial; identical to SEQ ID NO: 148259
  Synthetic oligonucleotide

SEQ ID NO: 639224 - DNA, 55 bp, Artificial; identical to SEQ ID NO: 197384
  Synthetic oligonucleotide

SEQ ID NO: 639225 - DNA, 52 bp, Artificial; identical to SEQ ID NO: 247960
  Synthetic oligonucleotide

SEQ ID NO: 639226 - DNA, 55 bp, Artificial; identical to SEQ ID NO: 180134
  Synthetic oligonucleotide

SEQ ID NO: 639227 - DNA, 55 bp, Artificial; identical to SEQ ID NO: 153247
  Synthetic oligonucleotide

SEQ ID NO: 639228 - DNA, 55 bp, Artificial; identical to SEQ ID NO: 180108
  Synthetic oligonucleotide

SEQ ID NO: 639229 - DNA, 55 bp, Artificial; identical to SEQ ID NO: 244961
  Synthetic oligonucleotide

SEQ ID NO: 639230 - DNA, 55 bp, Artificial; identical to SEQ ID NO: 212644
  Synthetic oligonucleotide

SEQ ID NO: 639231 - DNA, 56 bp, Artificial; identical to SEQ ID NO: 239590
  Synthetic oligonucleotide

SEQ ID NO: 639232 - DNA, 55 bp, Artificial; identical to SEQ ID NO: 202786
  Synthetic oligonucleotide

SEQ ID NO: 639233 - DNA, 55 bp, Artificial; identical to SEQ ID NO: 197972
  Synthetic oligonucleotide

SEQ ID NO: 639234 - DNA, 51 bp, Artificial; identical to SEQ ID NO: 172831
  Synthetic oligonucleotide

SEQ ID NO: 639235 - DNA, 53 bp, Artificial; identical to SEQ ID NO: 164823
  Synthetic oligonucleotide

SEQ ID NO: 639236 - DNA, 55 bp, Artificial; identical to SEQ ID NO: 221635
  Synthetic oligonucleotide

SEQ ID NO: 639237 - DNA, 55 bp, Artificial; identical to SEQ ID NO: 180526
  Synthetic oligonucleotide

SEQ ID NO: 639238 - DNA, 55 bp, Artificial; identical to SEQ ID NO: 161248
  Synthetic oligonucleotide

SEQ ID NO: 639239 - DNA, 55 bp, Artificial; identical to SEQ ID NO: 205605
  Synthetic oligonucleotide

SEQ ID NO: 639240 - DNA, 55 bp, Artificial; identical to SEQ ID NO: 208611
  Synthetic oligonucleotide

SEQ ID NO: 639241 - DNA, 55 bp, Artificial; identical to SEQ ID NO: 163998
  Synthetic oligonucleotide

SEQ ID NO: 639242 - DNA, 55 bp, Artificial; identical to SEQ ID NO: 180525
  Synthetic oligonucleotide

SEQ ID NO: 639243 - DNA, 53 bp, Artificial; identical to SEQ ID NO: 180524
  Synthetic oligonucleotide

SEQ ID NO: 639244 - DNA, 50 bp, Artificial; identical to SEQ ID NO: 258368
  Synthetic oligonucleotide

SEQ ID NO: 639245 - DNA, 60 bp, Artificial; identical to SEQ ID NO: 246993
  Synthetic oligonucleotide

SEQ ID NO: 639246 - DNA, 52 bp, Artificial; identical to SEQ ID NO: 185921
  Synthetic oligonucleotide

SEQ ID NO: 639247 - DNA, 55 bp, Artificial; identical to SEQ ID NO: 189025
  Synthetic oligonucleotide

SEQ ID NO: 639248 - DNA, 55 bp, Artificial; identical to SEQ ID NO: 160048
  Synthetic oligonucleotide

SEQ ID NO: 639249 - DNA, 56 bp, Artificial; identical to SEQ ID NO: 246991
  Synthetic oligonucleotide

SEQ ID NO: 639250 - DNA, 58 bp, Artificial; identical to SEQ ID NO: 203053
  Synthetic oligonucleotide

SEQ ID NO: 639251 - DNA, 54 bp, Artificial; identical to SEQ ID NO: 164000
  Synthetic oligonucleotide

SEQ ID NO: 639252 - DNA, 53 bp, Artificial; identical to SEQ ID NO: 153601
  Synthetic oligonucleotide

SEQ ID NO: 639253 - DNA, 55 bp, Artificial; identical to SEQ ID NO: 197969
  Synthetic oligonucleotide

SEQ ID NO: 639254 - DNA, 54 bp, Artificial; identical to SEQ ID NO: 253081
  Synthetic oligonucleotide

SEQ ID NO: 639255 - DNA, 59 bp, Artificial; identical to SEQ ID NO: 242597
  Synthetic oligonucleotide

SEQ ID NO: 639256 - DNA, 53 bp, Artificial; identical to SEQ ID NO: 144984
  Synthetic oligonucleotide

SEQ ID NO: 639257 - DNA, 55 bp, Artificial; identical to SEQ ID NO: 190984
  Synthetic oligonucleotide

SEQ ID NO: 639258 - DNA, 53 bp, Artificial; identical to SEQ ID NO: 205650
  Synthetic oligonucleotide

SEQ ID NO: 639259 - DNA, 55 bp, Artificial; identical to SEQ ID NO: 239794
  Synthetic oligonucleotide

SEQ ID NO: 639260 - DNA, 53 bp, Artificial; identical to SEQ ID NO: 211097
  Synthetic oligonucleotide

SEQ ID NO: 639261 - DNA, 55 bp, Artificial; identical to SEQ ID NO: 191811
  Synthetic oligonucleotide

SEQ ID NO: 639262 - DNA, 55 bp, Artificial; identical to SEQ ID NO: 207403
  Synthetic oligonucleotide

SEQ ID NO: 639263 - DNA, 55 bp, Artificial; identical to SEQ ID NO: 233515
  Synthetic oligonucleotide

SEQ ID NO: 639264 - DNA, 50 bp, Artificial; identical to SEQ ID NO: 160643
  Synthetic oligonucleotide

SEQ ID NO: 639265 - DNA, 55 bp, Artificial; identical to SEQ ID NO: 244955
  Synthetic oligonucleotide

SEQ ID NO: 639266 - DNA, 55 bp, Artificial; identical to SEQ ID NO: 142017
  Synthetic oligonucleotide

SEQ ID NO: 639267 - DNA, 57 bp, Artificial; identical to SEQ ID NO: 247943
  Synthetic oligonucleotide

SEQ ID NO: 639268 - DNA, 55 bp, Artificial; identical to SEQ ID NO: 162078
  Synthetic oligonucleotide

SEQ ID NO: 639269 - DNA, 55 bp, Artificial; identical to SEQ ID NO: 233514
  Synthetic oligonucleotide

SEQ ID NO: 639270 - DNA, 55 bp, Artificial; identical to SEQ ID NO: 164002
  Synthetic oligonucleotide

SEQ ID NO: 639271 - DNA, 55 bp, Artificial; identical to SEQ ID NO: 221634
  Synthetic oligonucleotide

SEQ ID NO: 639272 - DNA, 55 bp, Artificial; identical to SEQ ID NO: 235136
  Synthetic oligonucleotide

SEQ ID NO: 639273 - DNA, 55 bp, Artificial; identical to SEQ ID NO: 261812
  Synthetic oligonucleotide

SEQ ID NO: 639274 - DNA, 55 bp, Artificial; identical to SEQ ID NO: 224579
  Synthetic oligonucleotide

SEQ ID NO: 639275 - DNA, 53 bp, Artificial; identical to SEQ ID NO: 162077
  Synthetic oligonucleotide

SEQ ID NO: 639276 - DNA, 52 bp, Artificial; identical to SEQ ID NO: 188129
  Synthetic oligonucleotide

SEQ ID NO: 639277 - DNA, 55 bp, Artificial; identical to SEQ ID NO: 238507
  Synthetic oligonucleotide

SEQ ID NO: 639278 - DNA, 55 bp, Artificial; identical to SEQ ID NO: 217335
  Synthetic oligonucleotide

SEQ ID NO: 639279 - DNA, 55 bp, Artificial; identical to SEQ ID NO: 257787
  Synthetic oligonucleotide

SEQ ID NO: 639280 - DNA, 51 bp, Artificial; identical to SEQ ID NO: 197686
  Synthetic oligonucleotide

SEQ ID NO: 639281 - DNA, 56 bp, Artificial; identical to SEQ ID NO: 201927
  Synthetic oligonucleotide

SEQ ID NO: 639282 - DNA, 55 bp, Artificial; identical to SEQ ID NO: 249607
  Synthetic oligonucleotide

SEQ ID NO: 639283 - DNA, 55 bp, Artificial; identical to SEQ ID NO: 154465
  Synthetic oligonucleotide

SEQ ID NO: 639284 - DNA, 55 bp, Artificial; identical to SEQ ID NO: 239792
  Synthetic oligonucleotide

SEQ ID NO: 639285 - DNA, 56 bp, Artificial; identical to SEQ ID NO: 239589
  Synthetic oligonucleotide

SEQ ID NO: 639286 - DNA, 55 bp, Artificial; identical to SEQ ID NO: 244950
  Synthetic oligonucleotide

SEQ ID NO: 639287 - DNA, 51 bp, Artificial; identical to SEQ ID NO: 179476
  Synthetic oligonucleotide

SEQ ID NO: 639288 - DNA, 50 bp, Artificial; identical to SEQ ID NO: 209809
  Synthetic oligonucleotide

SEQ ID NO: 639289 - DNA, 57 bp, Artificial; identical to SEQ ID NO: 183938
  Synthetic oligonucleotide

SEQ ID NO: 639290 - DNA, 55 bp, Artificial; identical to SEQ ID NO: 203552
  Synthetic oligonucleotide

SEQ ID NO: 639291 - DNA, 55 bp, Artificial; identical to SEQ ID NO: 234111
  Synthetic oligonucleotide

SEQ ID NO: 639292 - DNA, 55 bp, Artificial; identical to SEQ ID NO: 190464
  Synthetic oligonucleotide

SEQ ID NO: 639293 - DNA, 55 bp, Artificial; identical to SEQ ID NO: 225175
  Synthetic oligonucleotide

SEQ ID NO: 639294 - DNA, 54 bp, Artificial; identical to SEQ ID NO: 149237
  Synthetic oligonucleotide

SEQ ID NO: 639295 - DNA, 55 bp, Artificial; identical to SEQ ID NO: 180521
  Synthetic oligonucleotide

SEQ ID NO: 639296 - DNA, 53 bp, Artificial; identical to SEQ ID NO: 202478
  Synthetic oligonucleotide

SEQ ID NO: 639297 - DNA, 55 bp, Artificial; identical to SEQ ID NO: 244949
  Synthetic oligonucleotide

SEQ ID NO: 639298 - DNA, 60 bp, Artificial; identical to SEQ ID NO: 144711
  Synthetic oligonucleotide

SEQ ID NO: 639299 - DNA, 50 bp, Artificial; identical to SEQ ID NO: 209810
  Synthetic oligonucleotide

SEQ ID NO: 639300 - DNA, 55 bp, Artificial; identical to SEQ ID NO: 225174
  Synthetic oligonucleotide

SEQ ID NO: 639301 - DNA, 55 bp, Artificial; identical to SEQ ID NO: 238500
  Synthetic oligonucleotide

SEQ ID NO: 639302 - DNA, 55 bp, Artificial; identical to SEQ ID NO: 168449
  Synthetic oligonucleotide

SEQ ID NO: 639303 - DNA, 60 bp, Artificial; identical to SEQ ID NO: 242114
  Synthetic oligonucleotide

SEQ ID NO: 639304 - DNA, 55 bp, Artificial; identical to SEQ ID NO: 156500
  Synthetic oligonucleotide

SEQ ID NO: 639305 - DNA, 60 bp, Artificial; identical to SEQ ID NO: 246989
  Synthetic oligonucleotide

SEQ ID NO: 639306 - DNA, 54 bp, Artificial; identical to SEQ ID NO: 199649
  Synthetic oligonucleotide

SEQ ID NO: 639307 - DNA, 56 bp, Artificial; identical to SEQ ID NO: 248632
  Synthetic oligonucleotide

SEQ ID NO: 639308 - DNA, 55 bp, Artificial; identical to SEQ ID NO: 190983
  Synthetic oligonucleotide

SEQ ID NO: 639309 - DNA, 56 bp, Artificial; identical to SEQ ID NO: 217297
  Synthetic oligonucleotide

SEQ ID NO: 639310 - DNA, 55 bp, Artificial; identical to SEQ ID NO: 156501
  Synthetic oligonucleotide

SEQ ID NO: 639311 - DNA, 55 bp, Artificial; identical to SEQ ID NO: 168450
  Synthetic oligonucleotide

SEQ ID NO: 639312 - DNA, 55 bp, Artificial; identical to SEQ ID NO: 233513
  Synthetic oligonucleotide

SEQ ID NO: 639313 - DNA, 55 bp, Artificial; identical to SEQ ID NO: 244099
  Synthetic oligonucleotide

SEQ ID NO: 639314 - DNA, 55 bp, Artificial; identical to SEQ ID NO: 239789
  Synthetic oligonucleotide

SEQ ID NO: 639315 - DNA, 55 bp, Artificial; identical to SEQ ID NO: 197389
  Synthetic oligonucleotide

SEQ ID NO: 639316 - DNA, 55 bp, Artificial; identical to SEQ ID NO: 253083
  Synthetic oligonucleotide

SEQ ID NO: 639317 - DNA, 55 bp, Artificial; identical to SEQ ID NO: 180517
  Synthetic oligonucleotide

SEQ ID NO: 639318 - DNA, 54 bp, Artificial; identical to SEQ ID NO: 209385
  Synthetic oligonucleotide

SEQ ID NO: 639319 - DNA, 59 bp, Artificial; identical to SEQ ID NO: 187319
  Synthetic oligonucleotide

SEQ ID NO: 639320 - DNA, 55 bp, Artificial; identical to SEQ ID NO: 172920
  Synthetic oligonucleotide

SEQ ID NO: 639321 - DNA, 55 bp, Artificial; identical to SEQ ID NO: 207405
  Synthetic oligonucleotide

SEQ ID NO: 639322 - DNA, 55 bp, Artificial; identical to SEQ ID NO: 163983
  Synthetic oligonucleotide

SEQ ID NO: 639323 - DNA, 55 bp, Artificial; identical to SEQ ID NO: 163982
  Synthetic oligonucleotide

SEQ ID NO: 639324 - DNA, 55 bp, Artificial; identical to SEQ ID NO: 205611
  Synthetic oligonucleotide

SEQ ID NO: 639325 - DNA, 55 bp, Artificial; identical to SEQ ID NO: 217345
  Synthetic oligonucleotide

SEQ ID NO: 639326 - DNA, 60 bp, Artificial; identical to SEQ ID NO: 183916
  Synthetic oligonucleotide

SEQ ID NO: 639327 - DNA, 58 bp, Artificial; identical to SEQ ID NO: 152991
  Synthetic oligonucleotide

SEQ ID NO: 639328 - DNA, 55 bp, Artificial; identical to SEQ ID NO: 203553
  Synthetic oligonucleotide

SEQ ID NO: 639329 - DNA, 55 bp, Artificial; identical to SEQ ID NO: 180513
  Synthetic oligonucleotide

SEQ ID NO: 639330 - DNA, 55 bp, Artificial; identical to SEQ ID NO: 148264
  Synthetic oligonucleotide

SEQ ID NO: 639331 - DNA, 55 bp, Artificial; identical to SEQ ID NO: 156503
  Synthetic oligonucleotide

SEQ ID NO: 639332 - DNA, 55 bp, Artificial; identical to SEQ ID NO: 201828
  Synthetic oligonucleotide

SEQ ID NO: 639333 - DNA, 55 bp, Artificial; identical to SEQ ID NO: 205610
  Synthetic oligonucleotide

SEQ ID NO: 639334 - DNA, 55 bp, Artificial; identical to SEQ ID NO: 239788
  Synthetic oligonucleotide

SEQ ID NO: 639335 - DNA, 55 bp, Artificial; identical to SEQ ID NO: 211083
  Synthetic oligonucleotide

SEQ ID NO: 639336 - DNA, 55 bp, Artificial; identical to SEQ ID NO: 221631
  Synthetic oligonucleotide

SEQ ID NO: 639337 - DNA, 55 bp, Artificial; identical to SEQ ID NO: 169950
  Synthetic oligonucleotide

SEQ ID NO: 639338 - DNA, 53 bp, Artificial; identical to SEQ ID NO: 216691
  Synthetic oligonucleotide

SEQ ID NO: 639339 - DNA, 57 bp, Artificial; identical to SEQ ID NO: 157753
  Synthetic oligonucleotide

SEQ ID NO: 639340 - DNA, 59 bp, Artificial; identical to SEQ ID NO: 205210
  Synthetic oligonucleotide

SEQ ID NO: 639341 - DNA, 53 bp, Artificial; identical to SEQ ID NO: 144766
  Synthetic oligonucleotide

SEQ ID NO: 639342 - DNA, 55 bp, Artificial; identical to SEQ ID NO: 163981
  Synthetic oligonucleotide

SEQ ID NO: 639343 - DNA, 55 bp, Artificial; identical to SEQ ID NO: 153249
  Synthetic oligonucleotide

SEQ ID NO: 639344 - DNA, 55 bp, Artificial; identical to SEQ ID NO: 180509
  Synthetic oligonucleotide

SEQ ID NO: 639345 - DNA, 55 bp, Artificial; identical to SEQ ID NO: 160047
  Synthetic oligonucleotide

SEQ ID NO: 639346 - DNA, 55 bp, Artificial; identical to SEQ ID NO: 221630
  Synthetic oligonucleotide

SEQ ID NO: 639347 - DNA, 55 bp, Artificial; identical to SEQ ID NO: 174721
  Synthetic oligonucleotide

SEQ ID NO: 639348 - DNA, 55 bp, Artificial; identical to SEQ ID NO: 257790
  Synthetic oligonucleotide

SEQ ID NO: 639349 - DNA, 55 bp, Artificial; identical to SEQ ID NO: 212645
  Synthetic oligonucleotide

SEQ ID NO: 639350 - DNA, 55 bp, Artificial; identical to SEQ ID NO: 163980
  Synthetic oligonucleotide

SEQ ID NO: 639351 - DNA, 55 bp, Artificial; identical to SEQ ID NO: 166918
  Synthetic oligonucleotide

SEQ ID NO: 639352 - DNA, 55 bp, Artificial; identical to SEQ ID NO: 180506
  Synthetic oligonucleotide

SEQ ID NO: 639353 - DNA, 52 bp, Artificial; identical to SEQ ID NO: 258171
  Synthetic oligonucleotide

SEQ ID NO: 639354 - DNA, 50 bp, Artificial; identical to SEQ ID NO: 160952
  Synthetic oligonucleotide

SEQ ID NO: 639355 - DNA, 55 bp, Artificial; identical to SEQ ID NO: 171217
  Synthetic oligonucleotide

SEQ ID NO: 639356 - DNA, 55 bp, Artificial; identical to SEQ ID NO: 245124
  Synthetic oligonucleotide

SEQ ID NO: 639357 - DNA, 59 bp, Artificial; identical to SEQ ID NO: 242619
  Synthetic oligonucleotide

SEQ ID NO: 639358 - DNA, 55 bp, Artificial; identical to SEQ ID NO: 174722
  Synthetic oligonucleotide

SEQ ID NO: 639359 - DNA, 55 bp, Artificial; identical to SEQ ID NO: 156504
  Synthetic oligonucleotide

SEQ ID NO: 639360 - DNA, 55 bp, Artificial; identical to SEQ ID NO: 156505
  Synthetic oligonucleotide

SEQ ID NO: 639361 - DNA, 55 bp, Artificial; identical to SEQ ID NO: 254180
  Synthetic oligonucleotide

SEQ ID NO: 639362 - DNA, 55 bp, Artificial; identical to SEQ ID NO: 188278
  Synthetic oligonucleotide

SEQ ID NO: 639363 - DNA, 55 bp, Artificial; identical to SEQ ID NO: 172921
  Synthetic oligonucleotide

SEQ ID NO: 639364 - DNA, 55 bp, Artificial; identical to SEQ ID NO: 184415
  Synthetic oligonucleotide

SEQ ID NO: 639365 - DNA, 55 bp, Artificial; identical to SEQ ID NO: 148268
  Synthetic oligonucleotide

SEQ ID NO: 639366 - DNA, 55 bp, Artificial; identical to SEQ ID NO: 236460
  Synthetic oligonucleotide

SEQ ID NO: 639367 - DNA, 55 bp, Artificial; identical to SEQ ID NO: 190042
  Synthetic oligonucleotide

SEQ ID NO: 639368 - DNA, 55 bp, Artificial; identical to SEQ ID NO: 180504
  Synthetic oligonucleotide

SEQ ID NO: 639369 - DNA, 55 bp, Artificial; identical to SEQ ID NO: 161247
  Synthetic oligonucleotide

SEQ ID NO: 639370 - DNA, 55 bp, Artificial; identical to SEQ ID NO: 154467
  Synthetic oligonucleotide

SEQ ID NO: 639371 - DNA, 55 bp, Artificial; identical to SEQ ID NO: 218258
  Synthetic oligonucleotide

SEQ ID NO: 639372 - DNA, 55 bp, Artificial; identical to SEQ ID NO: 163978
  Synthetic oligonucleotide

SEQ ID NO: 639373 - DNA, 53 bp, Artificial; identical to SEQ ID NO: 185462
  Synthetic oligonucleotide

SEQ ID NO: 639374 - DNA, 55 bp, Artificial; identical to SEQ ID NO: 169240
  Synthetic oligonucleotide

SEQ ID NO: 639375 - DNA, 54 bp, Artificial; identical to SEQ ID NO: 201272
  Synthetic oligonucleotide

SEQ ID NO: 639376 - DNA, 55 bp, Artificial; identical to SEQ ID NO: 238498
  Synthetic oligonucleotide

SEQ ID NO: 639377 - DNA, 51 bp, Artificial; identical to SEQ ID NO: 174923
  Synthetic oligonucleotide

SEQ ID NO: 639378 - DNA, 60 bp, Artificial; identical to SEQ ID NO: 237773
  Synthetic oligonucleotide

SEQ ID NO: 639379 - DNA, 55 bp, Artificial; identical to SEQ ID NO: 168452
  Synthetic oligonucleotide

SEQ ID NO: 639380 - DNA, 53 bp, Artificial; identical to SEQ ID NO: 152987
  Synthetic oligonucleotide

SEQ ID NO: 639381 - DNA, 55 bp, Artificial; identical to SEQ ID NO: 245121
  Synthetic oligonucleotide

SEQ ID NO: 639382 - DNA, 58 bp, Artificial; identical to SEQ ID NO: 171195
  Synthetic oligonucleotide

SEQ ID NO: 639383 - DNA, 55 bp, Artificial; identical to SEQ ID NO: 218257
  Synthetic oligonucleotide

SEQ ID NO: 639384 - DNA, 55 bp, Artificial; identical to SEQ ID NO: 245118
  Synthetic oligonucleotide

SEQ ID NO: 639385 - DNA, 55 bp, Artificial; identical to SEQ ID NO: 163977
  Synthetic oligonucleotide

SEQ ID NO: 639386 - DNA, 55 bp, Artificial; identical to SEQ ID NO: 180546
  Synthetic oligonucleotide

SEQ ID NO: 639387 - DNA, 52 bp, Artificial; identical to SEQ ID NO: 197961
  Synthetic oligonucleotide

SEQ ID NO: 639388 - DNA, 55 bp, Artificial; identical to SEQ ID NO: 190038
  Synthetic oligonucleotide

SEQ ID NO: 639389 - DNA, 55 bp, Artificial; identical to SEQ ID NO: 180545
  Synthetic oligonucleotide

SEQ ID NO: 639390 - DNA, 55 bp, Artificial; identical to SEQ ID NO: 233510
  Synthetic oligonucleotide

SEQ ID NO: 639391 - DNA, 55 bp, Artificial; identical to SEQ ID NO: 146232
  Synthetic oligonucleotide

SEQ ID NO: 639392 - DNA, 55 bp, Artificial; identical to SEQ ID NO: 254233
  Synthetic oligonucleotide

SEQ ID NO: 639393 - DNA, 50 bp, Artificial; identical to SEQ ID NO: 200275
  Synthetic oligonucleotide

SEQ ID NO: 639394 - DNA, 55 bp, Artificial; identical to SEQ ID NO: 201273
  Synthetic oligonucleotide

SEQ ID NO: 639395 - DNA, 55 bp, Artificial; identical to SEQ ID NO: 221629
  Synthetic oligonucleotide

SEQ ID NO: 639396 - DNA, 55 bp, Artificial; identical to SEQ ID NO: 239785
  Synthetic oligonucleotide

SEQ ID NO: 639397 - DNA, 54 bp, Artificial; identical to SEQ ID NO: 239435
  Synthetic oligonucleotide

SEQ ID NO: 639398 - DNA, 50 bp, Artificial; identical to SEQ ID NO: 246927
  Synthetic oligonucleotide

SEQ ID NO: 639399 - DNA, 55 bp, Artificial; identical to SEQ ID NO: 245117
  Synthetic oligonucleotide

SEQ ID NO: 639400 - DNA, 55 bp, Artificial; identical to SEQ ID NO: 155187
  Synthetic oligonucleotide

SEQ ID NO: 639401 - DNA, 59 bp, Artificial; identical to SEQ ID NO: 188644
  Synthetic oligonucleotide

SEQ ID NO: 639402 - DNA, 55 bp, Artificial; identical to SEQ ID NO: 254235
  Synthetic oligonucleotide

SEQ ID NO: 639403 - DNA, 56 bp, Artificial; identical to SEQ ID NO: 242630
  Synthetic oligonucleotide

SEQ ID NO: 639404 - DNA, 57 bp, Artificial; identical to SEQ ID NO: 224259
  Synthetic oligonucleotide

SEQ ID NO: 639405 - DNA, 56 bp, Artificial; identical to SEQ ID NO: 150667
  Synthetic oligonucleotide

SEQ ID NO: 639406 - DNA, 54 bp, Artificial; identical to SEQ ID NO: 144961
  Synthetic oligonucleotide

SEQ ID NO: 639407 - DNA, 57 bp, Artificial; identical to SEQ ID NO: 242061
  Synthetic oligonucleotide

SEQ ID NO: 639408 - DNA, 55 bp, Artificial; identical to SEQ ID NO: 207408
  Synthetic oligonucleotide

SEQ ID NO: 639409 - DNA, 55 bp, Artificial; identical to SEQ ID NO: 242641
  Synthetic oligonucleotide

SEQ ID NO: 639410 - DNA, 55 bp, Artificial; identical to SEQ ID NO: 152271
  Synthetic oligonucleotide

SEQ ID NO: 639411 - DNA, 55 bp, Artificial; identical to SEQ ID NO: 174290
  Synthetic oligonucleotide

SEQ ID NO: 639412 - DNA, 55 bp, Artificial; identical to SEQ ID NO: 172942
  Synthetic oligonucleotide

SEQ ID NO: 639413 - DNA, 55 bp, Artificial; identical to SEQ ID NO: 190037
  Synthetic oligonucleotide

SEQ ID NO: 639414 - DNA, 52 bp, Artificial; identical to SEQ ID NO: 239439
  Synthetic oligonucleotide

SEQ ID NO: 639415 - DNA, 52 bp, Artificial; identical to SEQ ID NO: 215210
  Synthetic oligonucleotide

SEQ ID NO: 639416 - DNA, 60 bp, Artificial; identical to SEQ ID NO: 217077
  Synthetic oligonucleotide

SEQ ID NO: 639417 - DNA, 55 bp, Artificial; identical to SEQ ID NO: 195200
  Synthetic oligonucleotide

SEQ ID NO: 639418 - DNA, 55 bp, Artificial; identical to SEQ ID NO: 253085
  Synthetic oligonucleotide

SEQ ID NO: 639419 - DNA, 55 bp, Artificial; identical to SEQ ID NO: 245116
  Synthetic oligonucleotide

SEQ ID NO: 639420 - DNA, 55 bp, Artificial; identical to SEQ ID NO: 187586
  Synthetic oligonucleotide

SEQ ID NO: 639421 - DNA, 51 bp, Artificial; identical to SEQ ID NO: 213044
  Synthetic oligonucleotide

SEQ ID NO: 639422 - DNA, 60 bp, Artificial; identical to SEQ ID NO: 242652
  Synthetic oligonucleotide

SEQ ID NO: 639423 - DNA, 55 bp, Artificial; identical to SEQ ID NO: 245115
  Synthetic oligonucleotide

SEQ ID NO: 639424 - DNA, 53 bp, Artificial; identical to SEQ ID NO: 257151
  Synthetic oligonucleotide

SEQ ID NO: 639425 - DNA, 55 bp, Artificial; identical to SEQ ID NO: 156506
  Synthetic oligonucleotide

SEQ ID NO: 639426 - DNA, 55 bp, Artificial; identical to SEQ ID NO: 249040
  Synthetic oligonucleotide

SEQ ID NO: 639427 - DNA, 55 bp, Artificial; identical to SEQ ID NO: 190981
  Synthetic oligonucleotide

SEQ ID NO: 639428 - DNA, 53 bp, Artificial; identical to SEQ ID NO: 209645
  Synthetic oligonucleotide

SEQ ID NO: 639429 - DNA, 55 bp, Artificial; identical to SEQ ID NO: 180539
  Synthetic oligonucleotide

SEQ ID NO: 639430 - DNA, 55 bp, Artificial; identical to SEQ ID NO: 190980
  Synthetic oligonucleotide

SEQ ID NO: 639431 - DNA, 55 bp, Artificial; identical to SEQ ID NO: 169946
  Synthetic oligonucleotide

SEQ ID NO: 639432 - DNA, 57 bp, Artificial; identical to SEQ ID NO: 147124
  Synthetic oligonucleotide

SEQ ID NO: 639433 - DNA, 60 bp, Artificial; identical to SEQ ID NO: 210728
  Synthetic oligonucleotide

SEQ ID NO: 639434 - DNA, 53 bp, Artificial; identical to SEQ ID NO: 257054
  Synthetic oligonucleotide

SEQ ID NO: 639435 - DNA, 55 bp, Artificial; identical to SEQ ID NO: 197958
  Synthetic oligonucleotide

SEQ ID NO: 639436 - DNA, 55 bp, Artificial; identical to SEQ ID NO: 169945
  Synthetic oligonucleotide

SEQ ID NO: 639437 - DNA, 55 bp, Artificial; identical to SEQ ID NO: 249605
  Synthetic oligonucleotide

SEQ ID NO: 639438 - DNA, 55 bp, Artificial; identical to SEQ ID NO: 197967
  Synthetic oligonucleotide

SEQ ID NO: 639439 - DNA, 55 bp, Artificial; identical to SEQ ID NO: 197398
  Synthetic oligonucleotide

SEQ ID NO: 639440 - DNA, 55 bp, Artificial; identical to SEQ ID NO: 151559
  Synthetic oligonucleotide

SEQ ID NO: 639441 - DNA, 58 bp, Artificial; identical to SEQ ID NO: 243973
  Synthetic oligonucleotide

SEQ ID NO: 639442 - DNA, 54 bp, Artificial; identical to SEQ ID NO: 202955
  Synthetic oligonucleotide

SEQ ID NO: 639443 - DNA, 60 bp, Artificial; identical to SEQ ID NO: 206827
  Synthetic oligonucleotide

SEQ ID NO: 639444 - DNA, 52 bp, Artificial; identical to SEQ ID NO: 240951
  Synthetic oligonucleotide

SEQ ID NO: 639445 - DNA, 59 bp, Artificial; identical to SEQ ID NO: 187328
  Synthetic oligonucleotide

SEQ ID NO: 639446 - DNA, 55 bp, Artificial; identical to SEQ ID NO: 211056
  Synthetic oligonucleotide

SEQ ID NO: 639447 - DNA, 55 bp, Artificial; identical to SEQ ID NO: 188277
  Synthetic oligonucleotide

SEQ ID NO: 639448 - DNA, 55 bp, Artificial; identical to SEQ ID NO: 180529
  Synthetic oligonucleotide

SEQ ID NO: 639449 - DNA, 55 bp, Artificial; identical to SEQ ID NO: 174779
  Synthetic oligonucleotide

SEQ ID NO: 639450 - DNA, 59 bp, Artificial; identical to SEQ ID NO: 150671
  Synthetic oligonucleotide

SEQ ID NO: 639451 - DNA, 55 bp, Artificial; identical to SEQ ID NO: 244093
  Synthetic oligonucleotide

SEQ ID NO: 639452 - DNA, 55 bp, Artificial; identical to SEQ ID NO: 148239
  Synthetic oligonucleotide

SEQ ID NO: 639453 - DNA, 55 bp, Artificial; identical to SEQ ID NO: 197977
  Synthetic oligonucleotide

SEQ ID NO: 639454 - DNA, 56 bp, Artificial; identical to SEQ ID NO: 150673
  Synthetic oligonucleotide

SEQ ID NO: 639455 - DNA, 51 bp, Artificial; identical to SEQ ID NO: 165281
  Synthetic oligonucleotide

SEQ ID NO: 639456 - DNA, 54 bp, Artificial; identical to SEQ ID NO: 187317
  Synthetic oligonucleotide

SEQ ID NO: 639457 - DNA, 55 bp, Artificial; identical to SEQ ID NO: 180528
  Synthetic oligonucleotide

SEQ ID NO: 639458 - DNA, 55 bp, Artificial; identical to SEQ ID NO: 156508
  Synthetic oligonucleotide

SEQ ID NO: 639459 - DNA, 55 bp, Artificial; identical to SEQ ID NO: 224734
  Synthetic oligonucleotide

SEQ ID NO: 639460 - DNA, 55 bp, Artificial; identical to SEQ ID NO: 191809
  Synthetic oligonucleotide

SEQ ID NO: 639461 - DNA, 55 bp, Artificial; identical to SEQ ID NO: 243865
  Synthetic oligonucleotide

SEQ ID NO: 639462 - DNA, 55 bp, Artificial; identical to SEQ ID NO: 237964
  Synthetic oligonucleotide

SEQ ID NO: 639463 - DNA, 57 bp, Artificial; identical to SEQ ID NO: 242065
  Synthetic oligonucleotide

SEQ ID NO: 639464 - DNA, 55 bp, Artificial; identical to SEQ ID NO: 234118
  Synthetic oligonucleotide

SEQ ID NO: 639465 - DNA, 57 bp, Artificial; identical to SEQ ID NO: 200733
  Synthetic oligonucleotide

SEQ ID NO: 639466 - DNA, 55 bp, Artificial; identical to SEQ ID NO: 203563
  Synthetic oligonucleotide

SEQ ID NO: 639467 - DNA, 53 bp, Artificial; identical to SEQ ID NO: 149430
  Synthetic oligonucleotide

SEQ ID NO: 639468 - DNA, 58 bp, Artificial; identical to SEQ ID NO: 150674
  Synthetic oligonucleotide

SEQ ID NO: 639469 - DNA, 60 bp, Artificial; identical to SEQ ID NO: 184360
  Synthetic oligonucleotide

SEQ ID NO: 639470 - DNA, 52 bp, Artificial; identical to SEQ ID NO: 160520
  Synthetic oligonucleotide

SEQ ID NO: 639471 - DNA, 55 bp, Artificial; identical to SEQ ID NO: 224733
  Synthetic oligonucleotide

SEQ ID NO: 639472 - DNA, 55 bp, Artificial; identical to SEQ ID NO: 154085
  Synthetic oligonucleotide

SEQ ID NO: 639473 - DNA, 56 bp, Artificial; identical to SEQ ID NO: 191735
  Synthetic oligonucleotide

SEQ ID NO: 639474 - DNA, 55 bp, Artificial; identical to SEQ ID NO: 174781
  Synthetic oligonucleotide

SEQ ID NO: 639475 - DNA, 51 bp, Artificial; identical to SEQ ID NO: 165277
  Synthetic oligonucleotide

SEQ ID NO: 639476 - DNA, 53 bp, Artificial; identical to SEQ ID NO: 168457
  Synthetic oligonucleotide

SEQ ID NO: 639477 - DNA, 53 bp, Artificial; identical to SEQ ID NO: 185454
  Synthetic oligonucleotide

SEQ ID NO: 639478 - DNA, 55 bp, Artificial; identical to SEQ ID NO: 217354
  Synthetic oligonucleotide

SEQ ID NO: 639479 - DNA, 55 bp, Artificial; identical to SEQ ID NO: 208605
  Synthetic oligonucleotide

SEQ ID NO: 639480 - DNA, 50 bp, Artificial; identical to SEQ ID NO: 158775
  Synthetic oligonucleotide

SEQ ID NO: 639481 - DNA, 55 bp, Artificial; identical to SEQ ID NO: 163972
  Synthetic oligonucleotide

SEQ ID NO: 639482 - DNA, 56 bp, Artificial; identical to SEQ ID NO: 150675
  Synthetic oligonucleotide

SEQ ID NO: 639483 - DNA, 55 bp, Artificial; identical to SEQ ID NO: 239742
  Synthetic oligonucleotide

SEQ ID NO: 639484 - DNA, 55 bp, Artificial; identical to SEQ ID NO: 239740
  Synthetic oligonucleotide

SEQ ID NO: 639485 - DNA, 60 bp, Artificial; identical to SEQ ID NO: 222773
  Synthetic oligonucleotide

SEQ ID NO: 639486 - DNA, 58 bp, Artificial; identical to SEQ ID NO: 200732
  Synthetic oligonucleotide

SEQ ID NO: 639487 - DNA, 55 bp, Artificial; identical to SEQ ID NO: 150676
  Synthetic oligonucleotide

SEQ ID NO: 639488 - DNA, 54 bp, Artificial; identical to SEQ ID NO: 142846
  Synthetic oligonucleotide

SEQ ID NO: 639489 - DNA, 55 bp, Artificial; identical to SEQ ID NO: 162073
  Synthetic oligonucleotide

SEQ ID NO: 639490 - DNA, 57 bp, Artificial; identical to SEQ ID NO: 147242
  Synthetic oligonucleotide

SEQ ID NO: 639491 - DNA, 55 bp, Artificial; identical to SEQ ID NO: 211205
  Synthetic oligonucleotide

SEQ ID NO: 639492 - DNA, 52 bp, Artificial; identical to SEQ ID NO: 239445
  Synthetic oligonucleotide

SEQ ID NO: 639493 - DNA, 52 bp, Artificial; identical to SEQ ID NO: 153257
  Synthetic oligonucleotide

SEQ ID NO: 639494 - DNA, 55 bp, Artificial; identical to SEQ ID NO: 202037
  Synthetic oligonucleotide

SEQ ID NO: 639495 - DNA, 50 bp, Artificial; identical to SEQ ID NO: 209815
  Synthetic oligonucleotide

SEQ ID NO: 639496 - DNA, 60 bp, Artificial; identical to SEQ ID NO: 184338
  Synthetic oligonucleotide

SEQ ID NO: 639497 - DNA, 55 bp, Artificial; identical to SEQ ID NO: 180476
  Synthetic oligonucleotide

SEQ ID NO: 639498 - DNA, 53 bp, Artificial; identical to SEQ ID NO: 220774
  Synthetic oligonucleotide

SEQ ID NO: 639499 - DNA, 60 bp, Artificial; identical to SEQ ID NO: 187306
  Synthetic oligonucleotide

SEQ ID NO: 639500 - DNA, 60 bp, Artificial; identical to SEQ ID NO: 209057
  Synthetic oligonucleotide

SEQ ID NO: 639501 - DNA, 55 bp, Artificial; identical to SEQ ID NO: 162072
  Synthetic oligonucleotide

SEQ ID NO: 639502 - DNA, 57 bp, Artificial; identical to SEQ ID NO: 202693
  Synthetic oligonucleotide

SEQ ID NO: 639503 - DNA, 54 bp, Artificial; identical to SEQ ID NO: 223917
  Synthetic oligonucleotide

SEQ ID NO: 639504 - DNA, 52 bp, Artificial; identical to SEQ ID NO: 173585
  Synthetic oligonucleotide

SEQ ID NO: 639505 - DNA, 51 bp, Artificial; identical to SEQ ID NO: 188549
  Synthetic oligonucleotide

SEQ ID NO: 639506 - DNA, 55 bp, Artificial; identical to SEQ ID NO: 215163
  Synthetic oligonucleotide

SEQ ID NO: 639507 - DNA, 55 bp, Artificial; identical to SEQ ID NO: 246965
  Synthetic oligonucleotide

SEQ ID NO: 639508 - DNA, 58 bp, Artificial; identical to SEQ ID NO: 248592
  Synthetic oligonucleotide

SEQ ID NO: 639509 - DNA, 55 bp, Artificial; identical to SEQ ID NO: 203512
  Synthetic oligonucleotide

SEQ ID NO: 639510 - DNA, 55 bp, Artificial; identical to SEQ ID NO: 224722
  Synthetic oligonucleotide

SEQ ID NO: 639511 - DNA, 60 bp, Artificial; identical to SEQ ID NO: 201922
  Synthetic oligonucleotide

SEQ ID NO: 639512 - DNA, 55 bp, Artificial; identical to SEQ ID NO: 144377
  Synthetic oligonucleotide

SEQ ID NO: 639513 - DNA, 51 bp, Artificial; identical to SEQ ID NO: 255637
  Synthetic oligonucleotide

SEQ ID NO: 639514 - DNA, 55 bp, Artificial; identical to SEQ ID NO: 180474
  Synthetic oligonucleotide

SEQ ID NO: 639515 - DNA, 55 bp, Artificial; identical to SEQ ID NO: 161858
  Synthetic oligonucleotide

SEQ ID NO: 639516 - DNA, 55 bp, Artificial; identical to SEQ ID NO: 225172
  Synthetic oligonucleotide

SEQ ID NO: 639517 - DNA, 55 bp, Artificial; identical to SEQ ID NO: 164181
  Synthetic oligonucleotide

SEQ ID NO: 639518 - DNA, 55 bp, Artificial; identical to SEQ ID NO: 257792
  Synthetic oligonucleotide

SEQ ID NO: 639519 - DNA, 55 bp, Artificial; identical to SEQ ID NO: 166921
  Synthetic oligonucleotide

SEQ ID NO: 639520 - DNA, 50 bp, Artificial; identical to SEQ ID NO: 186947
  Synthetic oligonucleotide

SEQ ID NO: 639521 - DNA, 55 bp, Artificial; identical to SEQ ID NO: 156514
  Synthetic oligonucleotide

SEQ ID NO: 639522 - DNA, 60 bp, Artificial; identical to SEQ ID NO: 208706
  Synthetic oligonucleotide

SEQ ID NO: 639523 - DNA, 55 bp, Artificial; identical to SEQ ID NO: 253804
  Synthetic oligonucleotide

SEQ ID NO: 639524 - DNA, 55 bp, Artificial; identical to SEQ ID NO: 180473
  Synthetic oligonucleotide

SEQ ID NO: 639525 - DNA, 60 bp, Artificial; identical to SEQ ID NO: 200731
  Synthetic oligonucleotide

SEQ ID NO: 639526 - DNA, 55 bp, Artificial; identical to SEQ ID NO: 164180
  Synthetic oligonucleotide

SEQ ID NO: 639527 - DNA, 54 bp, Artificial; identical to SEQ ID NO: 185387
  Synthetic oligonucleotide

SEQ ID NO: 639528 - DNA, 55 bp, Artificial; identical to SEQ ID NO: 221627
  Synthetic oligonucleotide

SEQ ID NO: 639529 - DNA, 55 bp, Artificial; identical to SEQ ID NO: 197946
  Synthetic oligonucleotide

SEQ ID NO: 639530 - DNA, 50 bp, Artificial; identical to SEQ ID NO: 158769
  Synthetic oligonucleotide

SEQ ID NO: 639531 - DNA, 54 bp, Artificial; identical to SEQ ID NO: 146369
  Synthetic oligonucleotide

SEQ ID NO: 639532 - DNA, 60 bp, Artificial; identical to SEQ ID NO: 203247
  Synthetic oligonucleotide

SEQ ID NO: 639533 - DNA, 59 bp, Artificial; identical to SEQ ID NO: 237775
  Synthetic oligonucleotide

SEQ ID NO: 639534 - DNA, 55 bp, Artificial; identical to SEQ ID NO: 191822
  Synthetic oligonucleotide

SEQ ID NO: 639535 - DNA, 55 bp, Artificial; identical to SEQ ID NO: 164178
  Synthetic oligonucleotide

SEQ ID NO: 639536 - DNA, 55 bp, Artificial; identical to SEQ ID NO: 156516
  Synthetic oligonucleotide

SEQ ID NO: 639537 - DNA, 53 bp, Artificial; identical to SEQ ID NO: 225230
  Synthetic oligonucleotide

SEQ ID NO: 639538 - DNA, 55 bp, Artificial; identical to SEQ ID NO: 180469
  Synthetic oligonucleotide

SEQ ID NO: 639539 - DNA, 59 bp, Artificial; identical to SEQ ID NO: 147078
  Synthetic oligonucleotide

SEQ ID NO: 639540 - DNA, 55 bp, Artificial; identical to SEQ ID NO: 197952
  Synthetic oligonucleotide

SEQ ID NO: 639541 - DNA, 55 bp, Artificial; identical to SEQ ID NO: 171765
  Synthetic oligonucleotide

SEQ ID NO: 639542 - DNA, 53 bp, Artificial; identical to SEQ ID NO: 149424
  Synthetic oligonucleotide

SEQ ID NO: 639543 - DNA, 55 bp, Artificial; identical to SEQ ID NO: 242068
  Synthetic oligonucleotide

SEQ ID NO: 639544 - DNA, 55 bp, Artificial; identical to SEQ ID NO: 212649
  Synthetic oligonucleotide

SEQ ID NO: 639545 - DNA, 55 bp, Artificial; identical to SEQ ID NO: 239737
  Synthetic oligonucleotide

SEQ ID NO: 639546 - DNA, 53 bp, Artificial; identical to SEQ ID NO: 149423
  Synthetic oligonucleotide

SEQ ID NO: 639547 - DNA, 55 bp, Artificial; identical to SEQ ID NO: 156519
  Synthetic oligonucleotide

SEQ ID NO: 639548 - DNA, 50 bp, Artificial; identical to SEQ ID NO: 176271
  Synthetic oligonucleotide

SEQ ID NO: 639549 - DNA, 55 bp, Artificial; identical to SEQ ID NO: 156521
  Synthetic oligonucleotide

SEQ ID NO: 639550 - DNA, 55 bp, Artificial; identical to SEQ ID NO: 205576
  Synthetic oligonucleotide

SEQ ID NO: 639551 - DNA, 55 bp, Artificial; identical to SEQ ID NO: 180464
  Synthetic oligonucleotide

SEQ ID NO: 639552 - DNA, 60 bp, Artificial; identical to SEQ ID NO: 210726
  Synthetic oligonucleotide

SEQ ID NO: 639553 - DNA, 52 bp, Artificial; identical to SEQ ID NO: 141309
  Synthetic oligonucleotide

SEQ ID NO: 639554 - DNA, 60 bp, Artificial; identical to SEQ ID NO: 184304
  Synthetic oligonucleotide

SEQ ID NO: 639555 - DNA, 55 bp, Artificial; identical to SEQ ID NO: 244073
  Synthetic oligonucleotide

SEQ ID NO: 639556 - DNA, 55 bp, Artificial; identical to SEQ ID NO: 239736
  Synthetic oligonucleotide

SEQ ID NO: 639557 - DNA, 56 bp, Artificial; identical to SEQ ID NO: 265915
  Synthetic oligonucleotide

SEQ ID NO: 639558 - DNA, 55 bp, Artificial; identical to SEQ ID NO: 148244
  Synthetic oligonucleotide

SEQ ID NO: 639559 - DNA, 59 bp, Artificial; identical to SEQ ID NO: 239163
  Synthetic oligonucleotide

SEQ ID NO: 639560 - DNA, 50 bp, Artificial; identical to SEQ ID NO: 209818
  Synthetic oligonucleotide

SEQ ID NO: 639561 - DNA, 55 bp, Artificial; identical to SEQ ID NO: 180503
  Synthetic oligonucleotide

SEQ ID NO: 639562 - DNA, 60 bp, Artificial; identical to SEQ ID NO: 187211
  Synthetic oligonucleotide

SEQ ID NO: 639563 - DNA, 54 bp, Artificial; identical to SEQ ID NO: 246232
  Synthetic oligonucleotide

SEQ ID NO: 639564 - DNA, 55 bp, Artificial; identical to SEQ ID NO: 156523
  Synthetic oligonucleotide

SEQ ID NO: 639565 - DNA, 58 bp, Artificial; identical to SEQ ID NO: 158975
  Synthetic oligonucleotide

SEQ ID NO: 639566 - DNA, 55 bp, Artificial; identical to SEQ ID NO: 160107
  Synthetic oligonucleotide

SEQ ID NO: 639567 - DNA, 54 bp, Artificial; identical to SEQ ID NO: 180501
  Synthetic oligonucleotide

SEQ ID NO: 639568 - DNA, 54 bp, Artificial; identical to SEQ ID NO: 180500
  Synthetic oligonucleotide

SEQ ID NO: 639569 - DNA, 52 bp, Artificial; identical to SEQ ID NO: 244080
  Synthetic oligonucleotide

SEQ ID NO: 639570 - DNA, 55 bp, Artificial; identical to SEQ ID NO: 211198
  Synthetic oligonucleotide

SEQ ID NO: 639571 - DNA, 55 bp, Artificial; identical to SEQ ID NO: 174353
  Synthetic oligonucleotide

SEQ ID NO: 639572 - DNA, 54 bp, Artificial; identical to SEQ ID NO: 150680
  Synthetic oligonucleotide

SEQ ID NO: 639573 - DNA, 55 bp, Artificial; identical to SEQ ID NO: 180499
  Synthetic oligonucleotide

SEQ ID NO: 639574 - DNA, 55 bp, Artificial; identical to SEQ ID NO: 154084
  Synthetic oligonucleotide

SEQ ID NO: 639575 - DNA, 51 bp, Artificial; identical to SEQ ID NO: 248030
  Synthetic oligonucleotide

SEQ ID NO: 639576 - DNA, 55 bp, Artificial; identical to SEQ ID NO: 151521
  Synthetic oligonucleotide

SEQ ID NO: 639577 - DNA, 60 bp, Artificial; identical to SEQ ID NO: 142697
  Synthetic oligonucleotide

SEQ ID NO: 639578 - DNA, 55 bp, Artificial; identical to SEQ ID NO: 161245
  Synthetic oligonucleotide

SEQ ID NO: 639579 - DNA, 55 bp, Artificial; identical to SEQ ID NO: 166923
  Synthetic oligonucleotide

SEQ ID NO: 639580 - DNA, 55 bp, Artificial; identical to SEQ ID NO: 245103
  Synthetic oligonucleotide

SEQ ID NO: 639581 - DNA, 55 bp, Artificial; identical to SEQ ID NO: 148245
  Synthetic oligonucleotide

SEQ ID NO: 639582 - DNA, 55 bp, Artificial; identical to SEQ ID NO: 254242
  Synthetic oligonucleotide

SEQ ID NO: 639583 - DNA, 50 bp, Artificial; identical to SEQ ID NO: 150031
  Synthetic oligonucleotide

SEQ ID NO: 639584 - DNA, 55 bp, Artificial; identical to SEQ ID NO: 148246
  Synthetic oligonucleotide

SEQ ID NO: 639585 - DNA, 55 bp, Artificial; identical to SEQ ID NO: 164176
  Synthetic oligonucleotide

SEQ ID NO: 639586 - DNA, 60 bp, Artificial; identical to SEQ ID NO: 150682
  Synthetic oligonucleotide

SEQ ID NO: 639587 - DNA, 55 bp, Artificial; identical to SEQ ID NO: 244122
  Synthetic oligonucleotide

SEQ ID NO: 639588 - DNA, 52 bp, Artificial; identical to SEQ ID NO: 153625
  Synthetic oligonucleotide

SEQ ID NO: 639589 - DNA, 58 bp, Artificial; identical to SEQ ID NO: 147016
  Synthetic oligonucleotide

SEQ ID NO: 639590 - DNA, 60 bp, Artificial; identical to SEQ ID NO: 242071
  Synthetic oligonucleotide

SEQ ID NO: 639591 - DNA, 50 bp, Artificial; identical to SEQ ID NO: 241174
  Synthetic oligonucleotide

SEQ ID NO: 639592 - DNA, 60 bp, Artificial; identical to SEQ ID NO: 144898
  Synthetic oligonucleotide

SEQ ID NO: 639593 - DNA, 55 bp, Artificial; identical to SEQ ID NO: 180495
  Synthetic oligonucleotide

SEQ ID NO: 639594 - DNA, 55 bp, Artificial; identical to SEQ ID NO: 180493
  Synthetic oligonucleotide

SEQ ID NO: 639595 - DNA, 53 bp, Artificial; identical to SEQ ID NO: 233818
  Synthetic oligonucleotide

SEQ ID NO: 639596 - DNA, 54 bp, Artificial; identical to SEQ ID NO: 191804
  Synthetic oligonucleotide

SEQ ID NO: 639597 - DNA, 55 bp, Artificial; identical to SEQ ID NO: 198005
  Synthetic oligonucleotide

SEQ ID NO: 639598 - DNA, 52 bp, Artificial; identical to SEQ ID NO: 197538
  Synthetic oligonucleotide

SEQ ID NO: 639599 - DNA, 55 bp, Artificial; identical to SEQ ID NO: 205579
  Synthetic oligonucleotide

SEQ ID NO: 639600 - DNA, 55 bp, Artificial; identical to SEQ ID NO: 198014
  Synthetic oligonucleotide

SEQ ID NO: 639601 - DNA, 57 bp, Artificial; identical to SEQ ID NO: 168187
  Synthetic oligonucleotide

SEQ ID NO: 639602 - DNA, 55 bp, Artificial; identical to SEQ ID NO: 266137
  Synthetic oligonucleotide

SEQ ID NO: 639603 - DNA, 52 bp, Artificial; identical to SEQ ID NO: 188484
  Synthetic oligonucleotide

SEQ ID NO: 639604 - DNA, 53 bp, Artificial; identical to SEQ ID NO: 142871
  Synthetic oligonucleotide

SEQ ID NO: 639605 - DNA, 50 bp, Artificial; identical to SEQ ID NO: 194034
  Synthetic oligonucleotide

SEQ ID NO: 639606 - DNA, 60 bp, Artificial; identical to SEQ ID NO: 224061
  Synthetic oligonucleotide

SEQ ID NO: 639607 - DNA, 52 bp, Artificial; identical to SEQ ID NO: 164175
  Synthetic oligonucleotide

SEQ ID NO: 639608 - DNA, 60 bp, Artificial; identical to SEQ ID NO: 184271
  Synthetic oligonucleotide

SEQ ID NO: 639609 - DNA, 55 bp, Artificial; identical to SEQ ID NO: 239732
  Synthetic oligonucleotide

SEQ ID NO: 639610 - DNA, 55 bp, Artificial; identical to SEQ ID NO: 161244
  Synthetic oligonucleotide

SEQ ID NO: 639611 - DNA, 55 bp, Artificial; identical to SEQ ID NO: 210867
  Synthetic oligonucleotide

SEQ ID NO: 639612 - DNA, 54 bp, Artificial; identical to SEQ ID NO: 144382
  Synthetic oligonucleotide

SEQ ID NO: 639613 - DNA, 55 bp, Artificial; identical to SEQ ID NO: 198018
  Synthetic oligonucleotide

SEQ ID NO: 639614 - DNA, 55 bp, Artificial; identical to SEQ ID NO: 160106
  Synthetic oligonucleotide

SEQ ID NO: 639615 - DNA, 59 bp, Artificial; identical to SEQ ID NO: 253098
  Synthetic oligonucleotide

SEQ ID NO: 639616 - DNA, 58 bp, Artificial; identical to SEQ ID NO: 202726
  Synthetic oligonucleotide

SEQ ID NO: 639617 - DNA, 55 bp, Artificial; identical to SEQ ID NO: 156473
  Synthetic oligonucleotide

SEQ ID NO: 639618 - DNA, 55 bp, Artificial; identical to SEQ ID NO: 180489
  Synthetic oligonucleotide

SEQ ID NO: 639619 - DNA, 55 bp, Artificial; identical to SEQ ID NO: 180488
  Synthetic oligonucleotide

SEQ ID NO: 639620 - DNA, 54 bp, Artificial; identical to SEQ ID NO: 185407
  Synthetic oligonucleotide

SEQ ID NO: 639621 - DNA, 60 bp, Artificial; identical to SEQ ID NO: 184260
  Synthetic oligonucleotide

SEQ ID NO: 639622 - DNA, 57 bp, Artificial; identical to SEQ ID NO: 203387
  Synthetic oligonucleotide

SEQ ID NO: 639623 - DNA, 54 bp, Artificial; identical to SEQ ID NO: 164715
  Synthetic oligonucleotide

SEQ ID NO: 639624 - DNA, 55 bp, Artificial; identical to SEQ ID NO: 194586
  Synthetic oligonucleotide

SEQ ID NO: 639625 - DNA, 55 bp, Artificial; identical to SEQ ID NO: 239730
  Synthetic oligonucleotide

SEQ ID NO: 639626 - DNA, 55 bp, Artificial; identical to SEQ ID NO: 208602
  Synthetic oligonucleotide

SEQ ID NO: 639627 - DNA, 60 bp, Artificial; identical to SEQ ID NO: 242077
  Synthetic oligonucleotide

SEQ ID NO: 639628 - DNA, 55 bp, Artificial; identical to SEQ ID NO: 194642
  Synthetic oligonucleotide

SEQ ID NO: 639629 - DNA, 58 bp, Artificial; identical to SEQ ID NO: 208025
  Synthetic oligonucleotide

SEQ ID NO: 639630 - DNA, 55 bp, Artificial; identical to SEQ ID NO: 224712
  Synthetic oligonucleotide

SEQ ID NO: 639631 - DNA, 60 bp, Artificial; identical to SEQ ID NO: 223417
  Synthetic oligonucleotide

SEQ ID NO: 639632 - DNA, 55 bp, Artificial; identical to SEQ ID NO: 144762
  Synthetic oligonucleotide

SEQ ID NO: 639633 - DNA, 55 bp, Artificial; identical to SEQ ID NO: 217330
  Synthetic oligonucleotide

SEQ ID NO: 639634 - DNA, 55 bp, Artificial; identical to SEQ ID NO: 205581
  Synthetic oligonucleotide

SEQ ID NO: 639635 - DNA, 55 bp, Artificial; identical to SEQ ID NO: 164173
  Synthetic oligonucleotide

SEQ ID NO: 639636 - DNA, 55 bp, Artificial; identical to SEQ ID NO: 254244
  Synthetic oligonucleotide

SEQ ID NO: 639637 - DNA, 55 bp, Artificial; identical to SEQ ID NO: 142026
  Synthetic oligonucleotide

SEQ ID NO: 639638 - DNA, 55 bp, Artificial; identical to SEQ ID NO: 180482
  Synthetic oligonucleotide

SEQ ID NO: 639639 - DNA, 55 bp, Artificial; identical to SEQ ID NO: 180619
  Synthetic oligonucleotide

SEQ ID NO: 639640 - DNA, 56 bp, Artificial; identical to SEQ ID NO: 239522
  Synthetic oligonucleotide

SEQ ID NO: 639641 - DNA, 58 bp, Artificial; identical to SEQ ID NO: 266187
  Synthetic oligonucleotide

SEQ ID NO: 639642 - DNA, 54 bp, Artificial; identical to SEQ ID NO: 202453
  Synthetic oligonucleotide

SEQ ID NO: 639643 - DNA, 55 bp, Artificial; identical to SEQ ID NO: 180618
  Synthetic oligonucleotide

SEQ ID NO: 639644 - DNA, 55 bp, Artificial; identical to SEQ ID NO: 254246
  Synthetic oligonucleotide

SEQ ID NO: 639645 - DNA, 55 bp, Artificial; identical to SEQ ID NO: 207369
  Synthetic oligonucleotide

SEQ ID NO: 639646 - DNA, 52 bp, Artificial; identical to SEQ ID NO: 188272
  Synthetic oligonucleotide

SEQ ID NO: 639647 - DNA, 55 bp, Artificial; identical to SEQ ID NO: 180615
  Synthetic oligonucleotide

SEQ ID NO: 639648 - DNA, 52 bp, Artificial; identical to SEQ ID NO: 157154
  Synthetic oligonucleotide

SEQ ID NO: 639649 - DNA, 53 bp, Artificial; identical to SEQ ID NO: 157362
  Synthetic oligonucleotide

SEQ ID NO: 639650 - DNA, 55 bp, Artificial; identical to SEQ ID NO: 169941
  Synthetic oligonucleotide

SEQ ID NO: 639651 - DNA, 55 bp, Artificial; identical to SEQ ID NO: 198021
  Synthetic oligonucleotide

SEQ ID NO: 639652 - DNA, 55 bp, Artificial; identical to SEQ ID NO: 249046
  Synthetic oligonucleotide

SEQ ID NO: 639653 - DNA, 55 bp, Artificial; identical to SEQ ID NO: 257048
  Synthetic oligonucleotide

SEQ ID NO: 639654 - DNA, 55 bp, Artificial; identical to SEQ ID NO: 254247
  Synthetic oligonucleotide

SEQ ID NO: 639655 - DNA, 55 bp, Artificial; identical to SEQ ID NO: 143764
  Synthetic oligonucleotide

SEQ ID NO: 639656 - DNA, 55 bp, Artificial; identical to SEQ ID NO: 153259
  Synthetic oligonucleotide

SEQ ID NO: 639657 - DNA, 60 bp, Artificial; identical to SEQ ID NO: 266176
  Synthetic oligonucleotide

SEQ ID NO: 639658 - DNA, 60 bp, Artificial; identical to SEQ ID NO: 184193
  Synthetic oligonucleotide

SEQ ID NO: 639659 - DNA, 58 bp, Artificial; identical to SEQ ID NO: 179457
  Synthetic oligonucleotide

SEQ ID NO: 639660 - DNA, 60 bp, Artificial; identical to SEQ ID NO: 203250
  Synthetic oligonucleotide

SEQ ID NO: 639661 - DNA, 55 bp, Artificial; identical to SEQ ID NO: 201274
  Synthetic oligonucleotide

SEQ ID NO: 639662 - DNA, 55 bp, Artificial; identical to SEQ ID NO: 249047
  Synthetic oligonucleotide

SEQ ID NO: 639663 - DNA, 60 bp, Artificial; identical to SEQ ID NO: 171162
  Synthetic oligonucleotide

SEQ ID NO: 639664 - DNA, 55 bp, Artificial; identical to SEQ ID NO: 202156
  Synthetic oligonucleotide

SEQ ID NO: 639665 - DNA, 55 bp, Artificial; identical to SEQ ID NO: 169940
  Synthetic oligonucleotide

SEQ ID NO: 639666 - DNA, 55 bp, Artificial; identical to SEQ ID NO: 245156
  Synthetic oligonucleotide

SEQ ID NO: 639667 - DNA, 55 bp, Artificial; identical to SEQ ID NO: 205583
  Synthetic oligonucleotide

SEQ ID NO: 639668 - DNA, 55 bp, Artificial; identical to SEQ ID NO: 265948
  Synthetic oligonucleotide

SEQ ID NO: 639669 - DNA, 55 bp, Artificial; identical to SEQ ID NO: 243887
  Synthetic oligonucleotide

SEQ ID NO: 639670 - DNA, 59 bp, Artificial; identical to SEQ ID NO: 242081
  Synthetic oligonucleotide

SEQ ID NO: 639671 - DNA, 51 bp, Artificial; identical to SEQ ID NO: 206578
  Synthetic oligonucleotide

SEQ ID NO: 639672 - DNA, 53 bp, Artificial; identical to SEQ ID NO: 242449
  Synthetic oligonucleotide

SEQ ID NO: 639673 - DNA, 55 bp, Artificial; identical to SEQ ID NO: 225171
  Synthetic oligonucleotide

SEQ ID NO: 639674 - DNA, 55 bp, Artificial; identical to SEQ ID NO: 142027
  Synthetic oligonucleotide

SEQ ID NO: 639675 - DNA, 55 bp, Artificial; identical to SEQ ID NO: 208575
  Synthetic oligonucleotide

SEQ ID NO: 639676 - DNA, 55 bp, Artificial; identical to SEQ ID NO: 257798
  Synthetic oligonucleotide

SEQ ID NO: 639677 - DNA, 55 bp, Artificial; identical to SEQ ID NO: 180613
  Synthetic oligonucleotide

SEQ ID NO: 639678 - DNA, 56 bp, Artificial; identical to SEQ ID NO: 224338
  Synthetic oligonucleotide

SEQ ID NO: 639679 - DNA, 53 bp, Artificial; identical to SEQ ID NO: 180612
  Synthetic oligonucleotide

SEQ ID NO: 639680 - DNA, 55 bp, Artificial; identical to SEQ ID NO: 208576
  Synthetic oligonucleotide

SEQ ID NO: 639681 - DNA, 54 bp, Artificial; identical to SEQ ID NO: 147083
  Synthetic oligonucleotide

SEQ ID NO: 639682 - DNA, 55 bp, Artificial; identical to SEQ ID NO: 248860
  Synthetic oligonucleotide

SEQ ID NO: 639683 - DNA, 55 bp, Artificial; identical to SEQ ID NO: 248861
  Synthetic oligonucleotide

SEQ ID NO: 639684 - DNA, 53 bp, Artificial; identical to SEQ ID NO: 223585
  Synthetic oligonucleotide

SEQ ID NO: 639685 - DNA, 60 bp, Artificial; identical to SEQ ID NO: 223584
  Synthetic oligonucleotide

SEQ ID NO: 639686 - DNA, 55 bp, Artificial; identical to SEQ ID NO: 180611
  Synthetic oligonucleotide

SEQ ID NO: 639687 - DNA, 55 bp, Artificial; identical to SEQ ID NO: 197980
  Synthetic oligonucleotide

SEQ ID NO: 639688 - DNA, 55 bp, Artificial; identical to SEQ ID NO: 254249
  Synthetic oligonucleotide

SEQ ID NO: 639689 - DNA, 55 bp, Artificial; identical to SEQ ID NO: 217620
  Synthetic oligonucleotide

SEQ ID NO: 639690 - DNA, 59 bp, Artificial; identical to SEQ ID NO: 209133
  Synthetic oligonucleotide

SEQ ID NO: 639691 - DNA, 55 bp, Artificial; identical to SEQ ID NO: 197989
  Synthetic oligonucleotide

SEQ ID NO: 639692 - DNA, 55 bp, Artificial; identical to SEQ ID NO: 180609
  Synthetic oligonucleotide

SEQ ID NO: 639693 - DNA, 52 bp, Artificial; identical to SEQ ID NO: 157569
  Synthetic oligonucleotide

SEQ ID NO: 639694 - DNA, 55 bp, Artificial; identical to SEQ ID NO: 169938
  Synthetic oligonucleotide

SEQ ID NO: 639695 - DNA, 53 bp, Artificial; identical to SEQ ID NO: 185669
  Synthetic oligonucleotide

SEQ ID NO: 639696 - DNA, 51 bp, Artificial; identical to SEQ ID NO: 186845
  Synthetic oligonucleotide

SEQ ID NO: 639697 - DNA, 60 bp, Artificial; identical to SEQ ID NO: 234142
  Synthetic oligonucleotide

SEQ ID NO: 639698 - DNA, 55 bp, Artificial; identical to SEQ ID NO: 207372
  Synthetic oligonucleotide

SEQ ID NO: 639699 - DNA, 60 bp, Artificial; identical to SEQ ID NO: 242082
  Synthetic oligonucleotide

SEQ ID NO: 639700 - DNA, 55 bp, Artificial; identical to SEQ ID NO: 254232
  Synthetic oligonucleotide

SEQ ID NO: 639701 - DNA, 55 bp, Artificial; identical to SEQ ID NO: 156478
  Synthetic oligonucleotide

SEQ ID NO: 639702 - DNA, 55 bp, Artificial; identical to SEQ ID NO: 144369
  Synthetic oligonucleotide

SEQ ID NO: 639703 - DNA, 55 bp, Artificial; identical to SEQ ID NO: 224752
  Synthetic oligonucleotide

SEQ ID NO: 639704 - DNA, 60 bp, Artificial; identical to SEQ ID NO: 223495
  Synthetic oligonucleotide

SEQ ID NO: 639705 - DNA, 52 bp, Artificial; identical to SEQ ID NO: 180601
  Synthetic oligonucleotide

SEQ ID NO: 639706 - DNA, 55 bp, Artificial; identical to SEQ ID NO: 180600
  Synthetic oligonucleotide

SEQ ID NO: 639707 - DNA, 55 bp, Artificial; identical to SEQ ID NO: 180641
  Synthetic oligonucleotide

SEQ ID NO: 639708 - DNA, 55 bp, Artificial; identical to SEQ ID NO: 205584
  Synthetic oligonucleotide

SEQ ID NO: 639709 - DNA, 55 bp, Artificial; identical to SEQ ID NO: 266670
  Synthetic oligonucleotide

SEQ ID NO: 639710 - DNA, 55 bp, Artificial; identical to SEQ ID NO: 245153
  Synthetic oligonucleotide

SEQ ID NO: 639711 - DNA, 54 bp, Artificial; identical to SEQ ID NO: 162269
  Synthetic oligonucleotide

SEQ ID NO: 639712 - DNA, 60 bp, Artificial; identical to SEQ ID NO: 242085
  Synthetic oligonucleotide

SEQ ID NO: 639713 - DNA, 55 bp, Artificial; identical to SEQ ID NO: 151524
  Synthetic oligonucleotide

SEQ ID NO: 639714 - DNA, 60 bp, Artificial; identical to SEQ ID NO: 265932
  Synthetic oligonucleotide

SEQ ID NO: 639715 - DNA, 55 bp, Artificial; identical to SEQ ID NO: 164165
  Synthetic oligonucleotide

SEQ ID NO: 639716 - DNA, 55 bp, Artificial; identical to SEQ ID NO: 265693
  Synthetic oligonucleotide

SEQ ID NO: 639717 - DNA, 55 bp, Artificial; identical to SEQ ID NO: 211006
  Synthetic oligonucleotide

SEQ ID NO: 639718 - DNA, 56 bp, Artificial; identical to SEQ ID NO: 210844
  Synthetic oligonucleotide

SEQ ID NO: 639719 - DNA, 55 bp, Artificial; identical to SEQ ID NO: 171489
  Synthetic oligonucleotide

SEQ ID NO: 639720 - DNA, 55 bp, Artificial; identical to SEQ ID NO: 253087
  Synthetic oligonucleotide

SEQ ID NO: 639721 - DNA, 55 bp, Artificial; identical to SEQ ID NO: 171487
  Synthetic oligonucleotide

SEQ ID NO: 639722 - DNA, 55 bp, Artificial; identical to SEQ ID NO: 254228
  Synthetic oligonucleotide

SEQ ID NO: 639723 - DNA, 55 bp, Artificial; identical to SEQ ID NO: 197996
  Synthetic oligonucleotide

SEQ ID NO: 639724 - DNA, 55 bp, Artificial; identical to SEQ ID NO: 190499
  Synthetic oligonucleotide

SEQ ID NO: 639725 - DNA, 54 bp, Artificial; identical to SEQ ID NO: 180637
  Synthetic oligonucleotide

SEQ ID NO: 639726 - DNA, 55 bp, Artificial; identical to SEQ ID NO: 245150
  Synthetic oligonucleotide

SEQ ID NO: 639727 - DNA, 55 bp, Artificial; identical to SEQ ID NO: 211098
  Synthetic oligonucleotide

SEQ ID NO: 639728 - DNA, 55 bp, Artificial; identical to SEQ ID NO: 156482
  Synthetic oligonucleotide

SEQ ID NO: 639729 - DNA, 55 bp, Artificial; identical to SEQ ID NO: 233506
  Synthetic oligonucleotide

SEQ ID NO: 639730 - DNA, 60 bp, Artificial; identical to SEQ ID NO: 242147
  Synthetic oligonucleotide

SEQ ID NO: 639731 - DNA, 55 bp, Artificial; identical to SEQ ID NO: 180636
  Synthetic oligonucleotide

SEQ ID NO: 639732 - DNA, 60 bp, Artificial; identical to SEQ ID NO: 242149
  Synthetic oligonucleotide

SEQ ID NO: 639733 - DNA, 52 bp, Artificial; identical to SEQ ID NO: 186294
  Synthetic oligonucleotide

SEQ ID NO: 639734 - DNA, 55 bp, Artificial; identical to SEQ ID NO: 245149
  Synthetic oligonucleotide

SEQ ID NO: 639735 - DNA, 55 bp, Artificial; identical to SEQ ID NO: 181238
  Synthetic oligonucleotide

SEQ ID NO: 639736 - DNA, 55 bp, Artificial; identical to SEQ ID NO: 205585
  Synthetic oligonucleotide

SEQ ID NO: 639737 - DNA, 55 bp, Artificial; identical to SEQ ID NO: 197356
  Synthetic oligonucleotide

SEQ ID NO: 639738 - DNA, 55 bp, Artificial; identical to SEQ ID NO: 211094
  Synthetic oligonucleotide

SEQ ID NO: 639739 - DNA, 60 bp, Artificial; identical to SEQ ID NO: 206815
  Synthetic oligonucleotide

SEQ ID NO: 639740 - DNA, 55 bp, Artificial; identical to SEQ ID NO: 239755
  Synthetic oligonucleotide

SEQ ID NO: 639741 - DNA, 55 bp, Artificial; identical to SEQ ID NO: 180632
  Synthetic oligonucleotide

SEQ ID NO: 639742 - DNA, 55 bp, Artificial; identical to SEQ ID NO: 160101
  Synthetic oligonucleotide

SEQ ID NO: 639743 - DNA, 55 bp, Artificial; identical to SEQ ID NO: 146189
  Synthetic oligonucleotide

SEQ ID NO: 639744 - DNA, 55 bp, Artificial; identical to SEQ ID NO: 239754
  Synthetic oligonucleotide

SEQ ID NO: 639745 - DNA, 52 bp, Artificial; identical to SEQ ID NO: 203252
  Synthetic oligonucleotide

SEQ ID NO: 639746 - DNA, 50 bp, Artificial; identical to SEQ ID NO: 187101
  Synthetic oligonucleotide

SEQ ID NO: 639747 - DNA, 55 bp, Artificial; identical to SEQ ID NO: 234832
  Synthetic oligonucleotide

SEQ ID NO: 639748 - DNA, 55 bp, Artificial; identical to SEQ ID NO: 164164
  Synthetic oligonucleotide

SEQ ID NO: 639749 - DNA, 50 bp, Artificial; identical to SEQ ID NO: 216432
  Synthetic oligonucleotide

SEQ ID NO: 639750 - DNA, 55 bp, Artificial; identical to SEQ ID NO: 166925
  Synthetic oligonucleotide

SEQ ID NO: 639751 - DNA, 60 bp, Artificial; identical to SEQ ID NO: 203253
  Synthetic oligonucleotide

SEQ ID NO: 639752 - DNA, 55 bp, Artificial; identical to SEQ ID NO: 197922
  Synthetic oligonucleotide

SEQ ID NO: 639753 - DNA, 55 bp, Artificial; identical to SEQ ID NO: 254227
  Synthetic oligonucleotide

SEQ ID NO: 639754 - DNA, 55 bp, Artificial; identical to SEQ ID NO: 197909
  Synthetic oligonucleotide

SEQ ID NO: 639755 - DNA, 55 bp, Artificial; identical to SEQ ID NO: 154472
  Synthetic oligonucleotide

SEQ ID NO: 639756 - DNA, 55 bp, Artificial; identical to SEQ ID NO: 189017
  Synthetic oligonucleotide

SEQ ID NO: 639757 - DNA, 60 bp, Artificial; identical to SEQ ID NO: 210724
  Synthetic oligonucleotide

SEQ ID NO: 639758 - DNA, 55 bp, Artificial; identical to SEQ ID NO: 180631
  Synthetic oligonucleotide

SEQ ID NO: 639759 - DNA, 55 bp, Artificial; identical to SEQ ID NO: 261857
  Synthetic oligonucleotide

SEQ ID NO: 639760 - DNA, 53 bp, Artificial; identical to SEQ ID NO: 206422
  Synthetic oligonucleotide

SEQ ID NO: 639761 - DNA, 55 bp, Artificial; identical to SEQ ID NO: 205587
  Synthetic oligonucleotide

SEQ ID NO: 639762 - DNA, 55 bp, Artificial; identical to SEQ ID NO: 174789
  Synthetic oligonucleotide

SEQ ID NO: 639763 - DNA, 57 bp, Artificial; identical to SEQ ID NO: 147202
  Synthetic oligonucleotide

SEQ ID NO: 639764 - DNA, 51 bp, Artificial; identical to SEQ ID NO: 237106
  Synthetic oligonucleotide

SEQ ID NO: 639765 - DNA, 55 bp, Artificial; identical to SEQ ID NO: 146188
  Synthetic oligonucleotide

SEQ ID NO: 639766 - DNA, 55 bp, Artificial; identical to SEQ ID NO: 244133
  Synthetic oligonucleotide

SEQ ID NO: 639767 - DNA, 60 bp, Artificial; identical to SEQ ID NO: 168567
  Synthetic oligonucleotide

SEQ ID NO: 639768 - DNA, 58 bp, Artificial; identical to SEQ ID NO: 179628
  Synthetic oligonucleotide

SEQ ID NO: 639769 - DNA, 60 bp, Artificial; identical to SEQ ID NO: 181182
  Synthetic oligonucleotide

SEQ ID NO: 639770 - DNA, 56 bp, Artificial; identical to SEQ ID NO: 207032
  Synthetic oligonucleotide

SEQ ID NO: 639771 - DNA, 55 bp, Artificial; identical to SEQ ID NO: 197927
  Synthetic oligonucleotide

SEQ ID NO: 639772 - DNA, 52 bp, Artificial; identical to SEQ ID NO: 186258
  Synthetic oligonucleotide

SEQ ID NO: 639773 - DNA, 55 bp, Artificial; identical to SEQ ID NO: 189016
  Synthetic oligonucleotide

SEQ ID NO: 639774 - DNA, 55 bp, Artificial; identical to SEQ ID NO: 148255
  Synthetic oligonucleotide

SEQ ID NO: 639775 - DNA, 55 bp, Artificial; identical to SEQ ID NO: 208578
  Synthetic oligonucleotide

SEQ ID NO: 639776 - DNA, 56 bp, Artificial; identical to SEQ ID NO: 191790
  Synthetic oligonucleotide

SEQ ID NO: 639777 - DNA, 55 bp, Artificial; identical to SEQ ID NO: 180625
  Synthetic oligonucleotide

SEQ ID NO: 639778 - DNA, 55 bp, Artificial; identical to SEQ ID NO: 207378
  Synthetic oligonucleotide

SEQ ID NO: 639779 - DNA, 53 bp, Artificial; identical to SEQ ID NO: 197912
  Synthetic oligonucleotide

SEQ ID NO: 639780 - DNA, 55 bp, Artificial; identical to SEQ ID NO: 212651
  Synthetic oligonucleotide

SEQ ID NO: 639781 - DNA, 55 bp, Artificial; identical to SEQ ID NO: 171480
  Synthetic oligonucleotide

SEQ ID NO: 639782 - DNA, 55 bp, Artificial; identical to SEQ ID NO: 249631
  Synthetic oligonucleotide

SEQ ID NO: 639783 - DNA, 56 bp, Artificial; identical to SEQ ID NO: 212969
  Synthetic oligonucleotide

SEQ ID NO: 639784 - DNA, 55 bp, Artificial; identical to SEQ ID NO: 238489
  Synthetic oligonucleotide

SEQ ID NO: 639785 - DNA, 60 bp, Artificial; identical to SEQ ID NO: 181171
  Synthetic oligonucleotide

SEQ ID NO: 639786 - DNA, 52 bp, Artificial; identical to SEQ ID NO: 161345
  Synthetic oligonucleotide

SEQ ID NO: 639787 - DNA, 55 bp, Artificial; identical to SEQ ID NO: 202783
  Synthetic oligonucleotide

SEQ ID NO: 639788 - DNA, 55 bp, Artificial; identical to SEQ ID NO: 168526
  Synthetic oligonucleotide

SEQ ID NO: 639789 - DNA, 60 bp, Artificial; identical to SEQ ID NO: 200729
  Synthetic oligonucleotide

SEQ ID NO: 639790 - DNA, 53 bp, Artificial; identical to SEQ ID NO: 197918
  Synthetic oligonucleotide

SEQ ID NO: 639791 - DNA, 53 bp, Artificial; identical to SEQ ID NO: 212989
  Synthetic oligonucleotide

SEQ ID NO: 639792 - DNA, 51 bp, Artificial; identical to SEQ ID NO: 204009
  Synthetic oligonucleotide

SEQ ID NO: 639793 - DNA, 60 bp, Artificial; identical to SEQ ID NO: 200728
  Synthetic oligonucleotide

SEQ ID NO: 639794 - DNA, 55 bp, Artificial; identical to SEQ ID NO: 197992
  Synthetic oligonucleotide

SEQ ID NO: 639795 - DNA, 55 bp, Artificial; identical to SEQ ID NO: 198019
  Synthetic oligonucleotide

SEQ ID NO: 639796 - DNA, 52 bp, Artificial; identical to SEQ ID NO: 167117
  Synthetic oligonucleotide

SEQ ID NO: 639797 - DNA, 55 bp, Artificial; identical to SEQ ID NO: 166927
  Synthetic oligonucleotide

SEQ ID NO: 639798 - DNA, 54 bp, Artificial; identical to SEQ ID NO: 185263
  Synthetic oligonucleotide

SEQ ID NO: 639799 - DNA, 55 bp, Artificial; identical to SEQ ID NO: 180623
  Synthetic oligonucleotide

SEQ ID NO: 639800 - DNA, 55 bp, Artificial; identical to SEQ ID NO: 174792
  Synthetic oligonucleotide

SEQ ID NO: 639801 - DNA, 55 bp, Artificial; identical to SEQ ID NO: 224744
  Synthetic oligonucleotide

SEQ ID NO: 639802 - DNA, 55 bp, Artificial; identical to SEQ ID NO: 180622
  Synthetic oligonucleotide

SEQ ID NO: 639803 - DNA, 55 bp, Artificial; identical to SEQ ID NO: 180621
  Synthetic oligonucleotide

SEQ ID NO: 639804 - DNA, 59 bp, Artificial; identical to SEQ ID NO: 181149
  Synthetic oligonucleotide

SEQ ID NO: 639805 - DNA, 55 bp, Artificial; identical to SEQ ID NO: 245141
  Synthetic oligonucleotide

SEQ ID NO: 639806 - DNA, 55 bp, Artificial; identical to SEQ ID NO: 208582
  Synthetic oligonucleotide

SEQ ID NO: 639807 - DNA, 55 bp, Artificial; identical to SEQ ID NO: 142033
  Synthetic oligonucleotide

SEQ ID NO: 639808 - DNA, 53 bp, Artificial; identical to SEQ ID NO: 206395
  Synthetic oligonucleotide

SEQ ID NO: 639809 - DNA, 55 bp, Artificial; identical to SEQ ID NO: 151526
  Synthetic oligonucleotide

SEQ ID NO: 639810 - DNA, 52 bp, Artificial; identical to SEQ ID NO: 246485
  Synthetic oligonucleotide

SEQ ID NO: 639811 - DNA, 55 bp, Artificial; identical to SEQ ID NO: 160099
  Synthetic oligonucleotide

SEQ ID NO: 639812 - DNA, 58 bp, Artificial; identical to SEQ ID NO: 257459
  Synthetic oligonucleotide

SEQ ID NO: 639813 - DNA, 55 bp, Artificial; identical to SEQ ID NO: 190495
  Synthetic oligonucleotide

SEQ ID NO: 639814 - DNA, 55 bp, Artificial; identical to SEQ ID NO: 224677
  Synthetic oligonucleotide

SEQ ID NO: 639815 - DNA, 59 bp, Artificial; identical to SEQ ID NO: 181127
  Synthetic oligonucleotide

SEQ ID NO: 639816 - DNA, 57 bp, Artificial; identical to SEQ ID NO: 174791
  Synthetic oligonucleotide

SEQ ID NO: 639817 - DNA, 55 bp, Artificial; identical to SEQ ID NO: 245140
  Synthetic oligonucleotide

SEQ ID NO: 639818 - DNA, 52 bp, Artificial; identical to SEQ ID NO: 168984
  Synthetic oligonucleotide

SEQ ID NO: 639819 - DNA, 59 bp, Artificial; identical to SEQ ID NO: 223895
  Synthetic oligonucleotide

SEQ ID NO: 639820 - DNA, 55 bp, Artificial; identical to SEQ ID NO: 248864
  Synthetic oligonucleotide

SEQ ID NO: 639821 - DNA, 55 bp, Artificial; identical to SEQ ID NO: 168529
  Synthetic oligonucleotide

SEQ ID NO: 639822 - DNA, 55 bp, Artificial; identical to SEQ ID NO: 154473
  Synthetic oligonucleotide

SEQ ID NO: 639823 - DNA, 55 bp, Artificial; identical to SEQ ID NO: 148144
  Synthetic oligonucleotide

SEQ ID NO: 639824 - DNA, 55 bp, Artificial; identical to SEQ ID NO: 180568
  Synthetic oligonucleotide

SEQ ID NO: 639825 - DNA, 55 bp, Artificial; identical to SEQ ID NO: 180567
  Synthetic oligonucleotide

SEQ ID NO: 639826 - DNA, 58 bp, Artificial; identical to SEQ ID NO: 200726
  Synthetic oligonucleotide

SEQ ID NO: 639827 - DNA, 55 bp, Artificial; identical to SEQ ID NO: 211101
  Synthetic oligonucleotide

SEQ ID NO: 639828 - DNA, 55 bp, Artificial; identical to SEQ ID NO: 234834
  Synthetic oligonucleotide

SEQ ID NO: 639829 - DNA, 54 bp, Artificial; identical to SEQ ID NO: 197355
  Synthetic oligonucleotide

SEQ ID NO: 639830 - DNA, 54 bp, Artificial; identical to SEQ ID NO: 153537
  Synthetic oligonucleotide

SEQ ID NO: 639831 - DNA, 55 bp, Artificial; identical to SEQ ID NO: 190493
  Synthetic oligonucleotide

SEQ ID NO: 639832 - DNA, 55 bp, Artificial; identical to SEQ ID NO: 161857
  Synthetic oligonucleotide

SEQ ID NO: 639833 - DNA, 55 bp, Artificial; identical to SEQ ID NO: 203606
  Synthetic oligonucleotide

SEQ ID NO: 639834 - DNA, 55 bp, Artificial; identical to SEQ ID NO: 155295
  Synthetic oligonucleotide

SEQ ID NO: 639835 - DNA, 53 bp, Artificial; identical to SEQ ID NO: 205644
  Synthetic oligonucleotide

SEQ ID NO: 639836 - DNA, 55 bp, Artificial; identical to SEQ ID NO: 167527
  Synthetic oligonucleotide

SEQ ID NO: 639837 - DNA, 55 bp, Artificial; identical to SEQ ID NO: 257802
  Synthetic oligonucleotide

SEQ ID NO: 639838 - DNA, 54 bp, Artificial; identical to SEQ ID NO: 160098
  Synthetic oligonucleotide

SEQ ID NO: 639839 - DNA, 55 bp, Artificial; identical to SEQ ID NO: 153269
  Synthetic oligonucleotide

SEQ ID NO: 639840 - DNA, 60 bp, Artificial; identical to SEQ ID NO: 212992
  Synthetic oligonucleotide

SEQ ID NO: 639841 - DNA, 55 bp, Artificial; identical to SEQ ID NO: 245138
  Synthetic oligonucleotide

SEQ ID NO: 639842 - DNA, 55 bp, Artificial; identical to SEQ ID NO: 164160
  Synthetic oligonucleotide

SEQ ID NO: 639843 - DNA, 52 bp, Artificial; identical to SEQ ID NO: 240965
  Synthetic oligonucleotide

SEQ ID NO: 639844 - DNA, 55 bp, Artificial; identical to SEQ ID NO: 180564
  Synthetic oligonucleotide

SEQ ID NO: 639845 - DNA, 60 bp, Artificial; identical to SEQ ID NO: 248442
  Synthetic oligonucleotide

SEQ ID NO: 639846 - DNA, 55 bp, Artificial; identical to SEQ ID NO: 156489
  Synthetic oligonucleotide

SEQ ID NO: 639847 - DNA, 52 bp, Artificial; identical to SEQ ID NO: 247980
  Synthetic oligonucleotide

SEQ ID NO: 639848 - DNA, 55 bp, Artificial; identical to SEQ ID NO: 208592
  Synthetic oligonucleotide

SEQ ID NO: 639849 - DNA, 55 bp, Artificial; identical to SEQ ID NO: 169245
  Synthetic oligonucleotide

SEQ ID NO: 639850 - DNA, 55 bp, Artificial; identical to SEQ ID NO: 248865
  Synthetic oligonucleotide

SEQ ID NO: 639851 - DNA, 55 bp, Artificial; identical to SEQ ID NO: 203608
  Synthetic oligonucleotide

SEQ ID NO: 639852 - DNA, 59 bp, Artificial; identical to SEQ ID NO: 141725
  Synthetic oligonucleotide

SEQ ID NO: 639853 - DNA, 55 bp, Artificial; identical to SEQ ID NO: 175658
  Synthetic oligonucleotide

SEQ ID NO: 639854 - DNA, 55 bp, Artificial; identical to SEQ ID NO: 201275
  Synthetic oligonucleotide

SEQ ID NO: 639855 - DNA, 53 bp, Artificial; identical to SEQ ID NO: 244135
  Synthetic oligonucleotide

SEQ ID NO: 639856 - DNA, 55 bp, Artificial; identical to SEQ ID NO: 201276
  Synthetic oligonucleotide

SEQ ID NO: 639857 - DNA, 60 bp, Artificial; identical to SEQ ID NO: 203258
  Synthetic oligonucleotide

SEQ ID NO: 639858 - DNA, 55 bp, Artificial; identical to SEQ ID NO: 254221
  Synthetic oligonucleotide

SEQ ID NO: 639859 - DNA, 55 bp, Artificial; identical to SEQ ID NO: 171474
  Synthetic oligonucleotide

SEQ ID NO: 639860 - DNA, 55 bp, Artificial; identical to SEQ ID NO: 239747
  Synthetic oligonucleotide

SEQ ID NO: 639861 - DNA, 51 bp, Artificial; identical to SEQ ID NO: 205752
  Synthetic oligonucleotide

SEQ ID NO: 639862 - DNA, 55 bp, Artificial; identical to SEQ ID NO: 161240
  Synthetic oligonucleotide

SEQ ID NO: 639863 - DNA, 55 bp, Artificial; identical to SEQ ID NO: 156494
  Synthetic oligonucleotide

SEQ ID NO: 639864 - DNA, 55 bp, Artificial; identical to SEQ ID NO: 203615
  Synthetic oligonucleotide

SEQ ID NO: 639865 - DNA, 55 bp, Artificial; identical to SEQ ID NO: 248868
  Synthetic oligonucleotide

SEQ ID NO: 639866 - DNA, 53 bp, Artificial; identical to SEQ ID NO: 148147
  Synthetic oligonucleotide

SEQ ID NO: 639867 - DNA, 55 bp, Artificial; identical to SEQ ID NO: 203616
  Synthetic oligonucleotide

SEQ ID NO: 639868 - DNA, 55 bp, Artificial; identical to SEQ ID NO: 253090
  Synthetic oligonucleotide

SEQ ID NO: 639869 - DNA, 55 bp, Artificial; identical to SEQ ID NO: 197354
  Synthetic oligonucleotide

SEQ ID NO: 639870 - DNA, 55 bp, Artificial; identical to SEQ ID NO: 239743
  Synthetic oligonucleotide

SEQ ID NO: 639871 - DNA, 52 bp, Artificial; identical to SEQ ID NO: 154477
  Synthetic oligonucleotide

SEQ ID NO: 639872 - DNA, 51 bp, Artificial; identical to SEQ ID NO: 225272
  Synthetic oligonucleotide

SEQ ID NO: 639873 - DNA, 60 bp, Artificial; identical to SEQ ID NO: 246876
  Synthetic oligonucleotide

SEQ ID NO: 639874 - DNA, 55 bp, Artificial; identical to SEQ ID NO: 154479
  Synthetic oligonucleotide

SEQ ID NO: 639875 - DNA, 55 bp, Artificial; identical to SEQ ID NO: 171471
  Synthetic oligonucleotide

SEQ ID NO: 639876 - DNA, 55 bp, Artificial; identical to SEQ ID NO: 248870
  Synthetic oligonucleotide

SEQ ID NO: 639877 - DNA, 55 bp, Artificial; identical to SEQ ID NO: 164159
  Synthetic oligonucleotide

SEQ ID NO: 639878 - DNA, 55 bp, Artificial; identical to SEQ ID NO: 224670
  Synthetic oligonucleotide

SEQ ID NO: 639879 - DNA, 55 bp, Artificial; identical to SEQ ID NO: 254220
  Synthetic oligonucleotide

SEQ ID NO: 639880 - DNA, 55 bp, Artificial; identical to SEQ ID NO: 180557
  Synthetic oligonucleotide

SEQ ID NO: 639881 - DNA, 55 bp, Artificial; identical to SEQ ID NO: 245134
  Synthetic oligonucleotide

SEQ ID NO: 639882 - DNA, 50 bp, Artificial; identical to SEQ ID NO: 218552
  Synthetic oligonucleotide

SEQ ID NO: 639883 - DNA, 60 bp, Artificial; identical to SEQ ID NO: 243898
  Synthetic oligonucleotide

SEQ ID NO: 639884 - DNA, 50 bp, Artificial; identical to SEQ ID NO: 189852
  Synthetic oligonucleotide

SEQ ID NO: 639885 - DNA, 55 bp, Artificial; identical to SEQ ID NO: 148150
  Synthetic oligonucleotide

SEQ ID NO: 639886 - DNA, 55 bp, Artificial; identical to SEQ ID NO: 244136
  Synthetic oligonucleotide

SEQ ID NO: 639887 - DNA, 57 bp, Artificial; identical to SEQ ID NO: 239384
  Synthetic oligonucleotide

SEQ ID NO: 639888 - DNA, 55 bp, Artificial; identical to SEQ ID NO: 201826
  Synthetic oligonucleotide

SEQ ID NO: 639889 - DNA, 54 bp, Artificial; identical to SEQ ID NO: 166928
  Synthetic oligonucleotide

SEQ ID NO: 639890 - DNA, 55 bp, Artificial; identical to SEQ ID NO: 174759
  Synthetic oligonucleotide

SEQ ID NO: 639891 - DNA, 55 bp, Artificial; identical to SEQ ID NO: 217623
  Synthetic oligonucleotide

SEQ ID NO: 639892 - DNA, 55 bp, Artificial; identical to SEQ ID NO: 201824
  Synthetic oligonucleotide

SEQ ID NO: 639893 - DNA, 55 bp, Artificial; identical to SEQ ID NO: 224663
  Synthetic oligonucleotide

SEQ ID NO: 639894 - DNA, 55 bp, Artificial; identical to SEQ ID NO: 190527
  Synthetic oligonucleotide

SEQ ID NO: 639895 - DNA, 55 bp, Artificial; identical to SEQ ID NO: 239854
  Synthetic oligonucleotide

SEQ ID NO: 639896 - DNA, 55 bp, Artificial; identical to SEQ ID NO: 180555
  Synthetic oligonucleotide

SEQ ID NO: 639897 - DNA, 55 bp, Artificial; identical to SEQ ID NO: 169247
  Synthetic oligonucleotide

SEQ ID NO: 639898 - DNA, 55 bp, Artificial; identical to SEQ ID NO: 180554
  Synthetic oligonucleotide

SEQ ID NO: 639899 - DNA, 55 bp, Artificial; identical to SEQ ID NO: 156495
  Synthetic oligonucleotide

SEQ ID NO: 639900 - DNA, 52 bp, Artificial; identical to SEQ ID NO: 157567
  Synthetic oligonucleotide

SEQ ID NO: 639901 - DNA, 55 bp, Artificial; identical to SEQ ID NO: 162111
  Synthetic oligonucleotide

SEQ ID NO: 639902 - DNA, 55 bp, Artificial; identical to SEQ ID NO: 238486
  Synthetic oligonucleotide

SEQ ID NO: 639903 - DNA, 60 bp, Artificial; identical to SEQ ID NO: 254522
  Synthetic oligonucleotide

SEQ ID NO: 639904 - DNA, 55 bp, Artificial; identical to SEQ ID NO: 245130
  Synthetic oligonucleotide

SEQ ID NO: 639905 - DNA, 55 bp, Artificial; identical to SEQ ID NO: 180553
  Synthetic oligonucleotide

SEQ ID NO: 639906 - DNA, 55 bp, Artificial; identical to SEQ ID NO: 207381
  Synthetic oligonucleotide

SEQ ID NO: 639907 - DNA, 55 bp, Artificial; identical to SEQ ID NO: 171470
  Synthetic oligonucleotide

SEQ ID NO: 639908 - DNA, 55 bp, Artificial; identical to SEQ ID NO: 180552
  Synthetic oligonucleotide

SEQ ID NO: 639909 - DNA, 54 bp, Artificial; identical to SEQ ID NO: 247781
  Synthetic oligonucleotide

SEQ ID NO: 639910 - DNA, 55 bp, Artificial; identical to SEQ ID NO: 180596
  Synthetic oligonucleotide

SEQ ID NO: 639911 - DNA, 55 bp, Artificial; identical to SEQ ID NO: 233503
  Synthetic oligonucleotide

SEQ ID NO: 639912 - DNA, 55 bp, Artificial; identical to SEQ ID NO: 142010
  Synthetic oligonucleotide

SEQ ID NO: 639913 - DNA, 55 bp, Artificial; identical to SEQ ID NO: 154483
  Synthetic oligonucleotide

SEQ ID NO: 639914 - DNA, 55 bp, Artificial; identical to SEQ ID NO: 156553
  Synthetic oligonucleotide

SEQ ID NO: 639915 - DNA, 54 bp, Artificial; identical to SEQ ID NO: 197403
  Synthetic oligonucleotide

SEQ ID NO: 639916 - DNA, 60 bp, Artificial; identical to SEQ ID NO: 181060
  Synthetic oligonucleotide

SEQ ID NO: 639917 - DNA, 55 bp, Artificial; identical to SEQ ID NO: 151528
  Synthetic oligonucleotide

SEQ ID NO: 639918 - DNA, 55 bp, Artificial; identical to SEQ ID NO: 220712
  Synthetic oligonucleotide

SEQ ID NO: 639919 - DNA, 55 bp, Artificial; identical to SEQ ID NO: 171468
  Synthetic oligonucleotide

SEQ ID NO: 639920 - DNA, 55 bp, Artificial; identical to SEQ ID NO: 205588
  Synthetic oligonucleotide

SEQ ID NO: 639921 - DNA, 54 bp, Artificial; identical to SEQ ID NO: 169985
  Synthetic oligonucleotide

SEQ ID NO: 639922 - DNA, 55 bp, Artificial; identical to SEQ ID NO: 208658
  Synthetic oligonucleotide

SEQ ID NO: 639923 - DNA, 55 bp, Artificial; identical to SEQ ID NO: 202780
  Synthetic oligonucleotide

SEQ ID NO: 639924 - DNA, 55 bp, Artificial; identical to SEQ ID NO: 156557
  Synthetic oligonucleotide

SEQ ID NO: 639925 - DNA, 55 bp, Artificial; identical to SEQ ID NO: 160095
  Synthetic oligonucleotide

SEQ ID NO: 639926 - DNA, 55 bp, Artificial; identical to SEQ ID NO: 217625
  Synthetic oligonucleotide

SEQ ID NO: 639927 - DNA, 52 bp, Artificial; identical to SEQ ID NO: 149568
  Synthetic oligonucleotide

SEQ ID NO: 639928 - DNA, 55 bp, Artificial; identical to SEQ ID NO: 156558
  Synthetic oligonucleotide

SEQ ID NO: 639929 - DNA, 55 bp, Artificial; identical to SEQ ID NO: 156560
  Synthetic oligonucleotide

SEQ ID NO: 639930 - DNA, 55 bp, Artificial; identical to SEQ ID NO: 161238
  Synthetic oligonucleotide

SEQ ID NO: 639931 - DNA, 55 bp, Artificial; identical to SEQ ID NO: 253805
  Synthetic oligonucleotide

SEQ ID NO: 639932 - DNA, 55 bp, Artificial; identical to SEQ ID NO: 218247
  Synthetic oligonucleotide

SEQ ID NO: 639933 - DNA, 55 bp, Artificial; identical to SEQ ID NO: 252700
  Synthetic oligonucleotide

SEQ ID NO: 639934 - DNA, 56 bp, Artificial; identical to SEQ ID NO: 193762
  Synthetic oligonucleotide

SEQ ID NO: 639935 - DNA, 58 bp, Artificial; identical to SEQ ID NO: 217262
  Synthetic oligonucleotide

SEQ ID NO: 639936 - DNA, 55 bp, Artificial; identical to SEQ ID NO: 180589
  Synthetic oligonucleotide

SEQ ID NO: 639937 - DNA, 55 bp, Artificial; identical to SEQ ID NO: 148153
  Synthetic oligonucleotide

SEQ ID NO: 639938 - DNA, 55 bp, Artificial; identical to SEQ ID NO: 238441
  Synthetic oligonucleotide

SEQ ID NO: 639939 - DNA, 55 bp, Artificial; identical to SEQ ID NO: 156562
  Synthetic oligonucleotide

SEQ ID NO: 639940 - DNA, 53 bp, Artificial; identical to SEQ ID NO: 240807
  Synthetic oligonucleotide

SEQ ID NO: 639941 - DNA, 55 bp, Artificial; identical to SEQ ID NO: 239852
  Synthetic oligonucleotide

SEQ ID NO: 639942 - DNA, 55 bp, Artificial; identical to SEQ ID NO: 245126
  Synthetic oligonucleotide

SEQ ID NO: 639943 - DNA, 55 bp, Artificial; identical to SEQ ID NO: 253093
  Synthetic oligonucleotide

SEQ ID NO: 639944 - DNA, 55 bp, Artificial; identical to SEQ ID NO: 195198
  Synthetic oligonucleotide

SEQ ID NO: 639945 - DNA, 55 bp, Artificial; identical to SEQ ID NO: 238440
  Synthetic oligonucleotide

SEQ ID NO: 639946 - DNA, 55 bp, Artificial; identical to SEQ ID NO: 166930
  Synthetic oligonucleotide

SEQ ID NO: 639947 - DNA, 55 bp, Artificial; identical to SEQ ID NO: 155305
  Synthetic oligonucleotide

SEQ ID NO: 639948 - DNA, 55 bp, Artificial; identical to SEQ ID NO: 148156
  Synthetic oligonucleotide

SEQ ID NO: 639949 - DNA, 55 bp, Artificial; identical to SEQ ID NO: 201932
  Synthetic oligonucleotide

SEQ ID NO: 639950 - DNA, 55 bp, Artificial; identical to SEQ ID NO: 245067
  Synthetic oligonucleotide

SEQ ID NO: 639951 - DNA, 55 bp, Artificial; identical to SEQ ID NO: 180585
  Synthetic oligonucleotide

SEQ ID NO: 639952 - DNA, 55 bp, Artificial; identical to SEQ ID NO: 197943
  Synthetic oligonucleotide

SEQ ID NO: 639953 - DNA, 55 bp, Artificial; identical to SEQ ID NO: 141726
  Synthetic oligonucleotide

SEQ ID NO: 639954 - DNA, 60 bp, Artificial; identical to SEQ ID NO: 206812
  Synthetic oligonucleotide

SEQ ID NO: 639955 - DNA, 55 bp, Artificial; identical to SEQ ID NO: 156563
  Synthetic oligonucleotide

SEQ ID NO: 639956 - DNA, 58 bp, Artificial; identical to SEQ ID NO: 243921
  Synthetic oligonucleotide

SEQ ID NO: 639957 - DNA, 52 bp, Artificial; identical to SEQ ID NO: 246479
  Synthetic oligonucleotide

SEQ ID NO: 639958 - DNA, 59 bp, Artificial; identical to SEQ ID NO: 237911
  Synthetic oligonucleotide

SEQ ID NO: 639959 - DNA, 58 bp, Artificial; identical to SEQ ID NO: 181583
  Synthetic oligonucleotide

SEQ ID NO: 639960 - DNA, 55 bp, Artificial; identical to SEQ ID NO: 220710
  Synthetic oligonucleotide

SEQ ID NO: 639961 - DNA, 55 bp, Artificial; identical to SEQ ID NO: 180582
  Synthetic oligonucleotide

SEQ ID NO: 639962 - DNA, 55 bp, Artificial; identical to SEQ ID NO: 180581
  Synthetic oligonucleotide

SEQ ID NO: 639963 - DNA, 60 bp, Artificial; identical to SEQ ID NO: 201923
  Synthetic oligonucleotide

SEQ ID NO: 639964 - DNA, 55 bp, Artificial; identical to SEQ ID NO: 151529
  Synthetic oligonucleotide

SEQ ID NO: 639965 - DNA, 51 bp, Artificial; identical to SEQ ID NO: 197687
  Synthetic oligonucleotide

SEQ ID NO: 639966 - DNA, 55 bp, Artificial; identical to SEQ ID NO: 169250
  Synthetic oligonucleotide

SEQ ID NO: 639967 - DNA, 55 bp, Artificial; identical to SEQ ID NO: 216383
  Synthetic oligonucleotide

SEQ ID NO: 639968 - DNA, 55 bp, Artificial; identical to SEQ ID NO: 257689
  Synthetic oligonucleotide

SEQ ID NO: 639969 - DNA, 55 bp, Artificial; identical to SEQ ID NO: 258997
  Synthetic oligonucleotide

SEQ ID NO: 639970 - DNA, 56 bp, Artificial; identical to SEQ ID NO: 171090
  Synthetic oligonucleotide

SEQ ID NO: 639971 - DNA, 55 bp, Artificial; identical to SEQ ID NO: 187542
  Synthetic oligonucleotide

SEQ ID NO: 639972 - DNA, 51 bp, Artificial; identical to SEQ ID NO: 225268
  Synthetic oligonucleotide

SEQ ID NO: 639973 - DNA, 55 bp, Artificial; identical to SEQ ID NO: 190974
  Synthetic oligonucleotide

SEQ ID NO: 639974 - DNA, 55 bp, Artificial; identical to SEQ ID NO: 234836
  Synthetic oligonucleotide

SEQ ID NO: 639975 - DNA, 55 bp, Artificial; identical to SEQ ID NO: 153094
  Synthetic oligonucleotide

SEQ ID NO: 639976 - DNA, 56 bp, Artificial; identical to SEQ ID NO: 181538
  Synthetic oligonucleotide

SEQ ID NO: 639977 - DNA, 55 bp, Artificial; identical to SEQ ID NO: 156564
  Synthetic oligonucleotide

SEQ ID NO: 639978 - DNA, 55 bp, Artificial; identical to SEQ ID NO: 261859
  Synthetic oligonucleotide

SEQ ID NO: 639979 - DNA, 60 bp, Artificial; identical to SEQ ID NO: 266132
  Synthetic oligonucleotide

SEQ ID NO: 639980 - DNA, 55 bp, Artificial; identical to SEQ ID NO: 248872
  Synthetic oligonucleotide

SEQ ID NO: 639981 - DNA, 54 bp, Artificial; identical to SEQ ID NO: 169345
  Synthetic oligonucleotide

SEQ ID NO: 639982 - DNA, 55 bp, Artificial; identical to SEQ ID NO: 164155
  Synthetic oligonucleotide

SEQ ID NO: 639983 - DNA, 52 bp, Artificial; identical to SEQ ID NO: 186374
  Synthetic oligonucleotide

SEQ ID NO: 639984 - DNA, 60 bp, Artificial; identical to SEQ ID NO: 225280
  Synthetic oligonucleotide

SEQ ID NO: 639985 - DNA, 60 bp, Artificial; identical to SEQ ID NO: 181527
  Synthetic oligonucleotide

SEQ ID NO: 639986 - DNA, 55 bp, Artificial; identical to SEQ ID NO: 197353
  Synthetic oligonucleotide

SEQ ID NO: 639987 - DNA, 55 bp, Artificial; identical to SEQ ID NO: 148162
  Synthetic oligonucleotide

SEQ ID NO: 639988 - DNA, 55 bp, Artificial; identical to SEQ ID NO: 254412
  Synthetic oligonucleotide

SEQ ID NO: 639989 - DNA, 58 bp, Artificial; identical to SEQ ID NO: 168589
  Synthetic oligonucleotide

SEQ ID NO: 639990 - DNA, 54 bp, Artificial; identical to SEQ ID NO: 141192
  Synthetic oligonucleotide

SEQ ID NO: 639991 - DNA, 55 bp, Artificial; identical to SEQ ID NO: 148126
  Synthetic oligonucleotide

SEQ ID NO: 639992 - DNA, 55 bp, Artificial; identical to SEQ ID NO: 180349
  Synthetic oligonucleotide

SEQ ID NO: 639993 - DNA, 55 bp, Artificial; identical to SEQ ID NO: 168535
  Synthetic oligonucleotide

SEQ ID NO: 639994 - DNA, 54 bp, Artificial; identical to SEQ ID NO: 202452
  Synthetic oligonucleotide

SEQ ID NO: 639995 - DNA, 59 bp, Artificial; identical to SEQ ID NO: 141728
  Synthetic oligonucleotide

SEQ ID NO: 639996 - DNA, 55 bp, Artificial; identical to SEQ ID NO: 148128
  Synthetic oligonucleotide

SEQ ID NO: 639997 - DNA, 53 bp, Artificial; identical to SEQ ID NO: 148129
  Synthetic oligonucleotide

SEQ ID NO: 639998 - DNA, 51 bp, Artificial; identical to SEQ ID NO: 189685
  Synthetic oligonucleotide

SEQ ID NO: 639999 - DNA, 55 bp, Artificial; identical to SEQ ID NO: 212657
  Synthetic oligonucleotide

SEQ ID NO: 640000 - DNA, 55 bp, Artificial; identical to SEQ ID NO: 152276
  Synthetic oligonucleotide

SEQ ID NO: 640001 - DNA, 55 bp, Artificial; identical to SEQ ID NO: 154486
  Synthetic oligonucleotide

SEQ ID NO: 640002 - DNA, 55 bp, Artificial; identical to SEQ ID NO: 180347
  Synthetic oligonucleotide

SEQ ID NO: 640003 - DNA, 55 bp, Artificial; identical to SEQ ID NO: 156568
  Synthetic oligonucleotide

SEQ ID NO: 640004 - DNA, 55 bp, Artificial; identical to SEQ ID NO: 238438
  Synthetic oligonucleotide

SEQ ID NO: 640005 - DNA, 51 bp, Artificial; identical to SEQ ID NO: 174921
  Synthetic oligonucleotide

SEQ ID NO: 640006 - DNA, 55 bp, Artificial; identical to SEQ ID NO: 205596
  Synthetic oligonucleotide

SEQ ID NO: 640007 - DNA, 58 bp, Artificial; identical to SEQ ID NO: 224625
  Synthetic oligonucleotide

SEQ ID NO: 640008 - DNA, 57 bp, Artificial; identical to SEQ ID NO: 141731
  Synthetic oligonucleotide

SEQ ID NO: 640009 - DNA, 55 bp, Artificial; identical to SEQ ID NO: 143760
  Synthetic oligonucleotide

SEQ ID NO: 640010 - DNA, 60 bp, Artificial; identical to SEQ ID NO: 200725
  Synthetic oligonucleotide

SEQ ID NO: 640011 - DNA, 55 bp, Artificial; identical to SEQ ID NO: 254415
  Synthetic oligonucleotide

SEQ ID NO: 640012 - DNA, 56 bp, Artificial; identical to SEQ ID NO: 224232
  Synthetic oligonucleotide

SEQ ID NO: 640013 - DNA, 55 bp, Artificial; identical to SEQ ID NO: 248876
  Synthetic oligonucleotide

SEQ ID NO: 640014 - DNA, 54 bp, Artificial; identical to SEQ ID NO: 203879
  Synthetic oligonucleotide

SEQ ID NO: 640015 - DNA, 55 bp, Artificial; identical to SEQ ID NO: 224708
  Synthetic oligonucleotide

SEQ ID NO: 640016 - DNA, 55 bp, Artificial; identical to SEQ ID NO: 239850
  Synthetic oligonucleotide

SEQ ID NO: 640017 - DNA, 53 bp, Artificial; identical to SEQ ID NO: 155184
  Synthetic oligonucleotide

SEQ ID NO: 640018 - DNA, 54 bp, Artificial; identical to SEQ ID NO: 215187
  Synthetic oligonucleotide

SEQ ID NO: 640019 - DNA, 55 bp, Artificial; identical to SEQ ID NO: 224707
  Synthetic oligonucleotide

SEQ ID NO: 640020 - DNA, 55 bp, Artificial; identical to SEQ ID NO: 239847
  Synthetic oligonucleotide

SEQ ID NO: 640021 - DNA, 55 bp, Artificial; identical to SEQ ID NO: 142547
  Synthetic oligonucleotide

SEQ ID NO: 640022 - DNA, 55 bp, Artificial; identical to SEQ ID NO: 164153
  Synthetic oligonucleotide

SEQ ID NO: 640023 - DNA, 55 bp, Artificial; identical to SEQ ID NO: 202779
  Synthetic oligonucleotide

SEQ ID NO: 640024 - DNA, 55 bp, Artificial; identical to SEQ ID NO: 154488
  Synthetic oligonucleotide

SEQ ID NO: 640025 - DNA, 55 bp, Artificial; identical to SEQ ID NO: 180343
  Synthetic oligonucleotide

SEQ ID NO: 640026 - DNA, 57 bp, Artificial; identical to SEQ ID NO: 159967
  Synthetic oligonucleotide

SEQ ID NO: 640027 - DNA, 55 bp, Artificial; identical to SEQ ID NO: 164152
  Synthetic oligonucleotide

SEQ ID NO: 640028 - DNA, 55 bp, Artificial; identical to SEQ ID NO: 253095
  Synthetic oligonucleotide

SEQ ID NO: 640029 - DNA, 55 bp, Artificial; identical to SEQ ID NO: 266111
  Synthetic oligonucleotide

SEQ ID NO: 640030 - DNA, 60 bp, Artificial; identical to SEQ ID NO: 171561
  Synthetic oligonucleotide

SEQ ID NO: 640031 - DNA, 55 bp, Artificial; identical to SEQ ID NO: 234838
  Synthetic oligonucleotide

SEQ ID NO: 640032 - DNA, 55 bp, Artificial; identical to SEQ ID NO: 245058
  Synthetic oligonucleotide

SEQ ID NO: 640033 - DNA, 51 bp, Artificial; identical to SEQ ID NO: 170185
  Synthetic oligonucleotide

SEQ ID NO: 640034 - DNA, 55 bp, Artificial; identical to SEQ ID NO: 212662
  Synthetic oligonucleotide

SEQ ID NO: 640035 - DNA, 55 bp, Artificial; identical to SEQ ID NO: 180342
  Synthetic oligonucleotide

SEQ ID NO: 640036 - DNA, 55 bp, Artificial; identical to SEQ ID NO: 188269
  Synthetic oligonucleotide

SEQ ID NO: 640037 - DNA, 55 bp, Artificial; identical to SEQ ID NO: 174763
  Synthetic oligonucleotide

SEQ ID NO: 640038 - DNA, 55 bp, Artificial; identical to SEQ ID NO: 211061
  Synthetic oligonucleotide

SEQ ID NO: 640039 - DNA, 55 bp, Artificial; identical to SEQ ID NO: 248877
  Synthetic oligonucleotide

SEQ ID NO: 640040 - DNA, 55 bp, Artificial; identical to SEQ ID NO: 194647
  Synthetic oligonucleotide

SEQ ID NO: 640041 - DNA, 55 bp, Artificial; identical to SEQ ID NO: 253708
  Synthetic oligonucleotide

SEQ ID NO: 640042 - DNA, 51 bp, Artificial; identical to SEQ ID NO: 161404
  Synthetic oligonucleotide

SEQ ID NO: 640043 - DNA, 55 bp, Artificial; identical to SEQ ID NO: 224700
  Synthetic oligonucleotide

SEQ ID NO: 640044 - DNA, 55 bp, Artificial; identical to SEQ ID NO: 211054
  Synthetic oligonucleotide

SEQ ID NO: 640045 - DNA, 55 bp, Artificial; identical to SEQ ID NO: 180338
  Synthetic oligonucleotide

SEQ ID NO: 640046 - DNA, 55 bp, Artificial; identical to SEQ ID NO: 171339
  Synthetic oligonucleotide

SEQ ID NO: 640047 - DNA, 55 bp, Artificial; identical to SEQ ID NO: 207383
  Synthetic oligonucleotide

SEQ ID NO: 640048 - DNA, 60 bp, Artificial; identical to SEQ ID NO: 181404
  Synthetic oligonucleotide

SEQ ID NO: 640049 - DNA, 55 bp, Artificial; identical to SEQ ID NO: 180337
  Synthetic oligonucleotide

SEQ ID NO: 640050 - DNA, 55 bp, Artificial; identical to SEQ ID NO: 190973
  Synthetic oligonucleotide

SEQ ID NO: 640051 - DNA, 55 bp, Artificial; identical to SEQ ID NO: 211186
  Synthetic oligonucleotide

SEQ ID NO: 640052 - DNA, 59 bp, Artificial; identical to SEQ ID NO: 168600
  Synthetic oligonucleotide

SEQ ID NO: 640053 - DNA, 55 bp, Artificial; identical to SEQ ID NO: 253096
  Synthetic oligonucleotide

SEQ ID NO: 640054 - DNA, 53 bp, Artificial; identical to SEQ ID NO: 141241
  Synthetic oligonucleotide

SEQ ID NO: 640055 - DNA, 55 bp, Artificial; identical to SEQ ID NO: 217626
  Synthetic oligonucleotide

SEQ ID NO: 640056 - DNA, 55 bp, Artificial; identical to SEQ ID NO: 187547
  Synthetic oligonucleotide

SEQ ID NO: 640057 - DNA, 53 bp, Artificial; identical to SEQ ID NO: 254417
  Synthetic oligonucleotide

SEQ ID NO: 640058 - DNA, 57 bp, Artificial; identical to SEQ ID NO: 181382
  Synthetic oligonucleotide

SEQ ID NO: 640059 - DNA, 55 bp, Artificial; identical to SEQ ID NO: 153096
  Synthetic oligonucleotide

SEQ ID NO: 640060 - DNA, 55 bp, Artificial; identical to SEQ ID NO: 255211
  Synthetic oligonucleotide

SEQ ID NO: 640061 - DNA, 55 bp, Artificial; identical to SEQ ID NO: 266112
  Synthetic oligonucleotide

SEQ ID NO: 640062 - DNA, 54 bp, Artificial; identical to SEQ ID NO: 266121
  Synthetic oligonucleotide

SEQ ID NO: 640063 - DNA, 55 bp, Artificial; identical to SEQ ID NO: 180333
  Synthetic oligonucleotide

SEQ ID NO: 640064 - DNA, 51 bp, Artificial; identical to SEQ ID NO: 161894
  Synthetic oligonucleotide

SEQ ID NO: 640065 - DNA, 55 bp, Artificial; identical to SEQ ID NO: 160094
  Synthetic oligonucleotide

SEQ ID NO: 640066 - DNA, 55 bp, Artificial; identical to SEQ ID NO: 164151
  Synthetic oligonucleotide

SEQ ID NO: 640067 - DNA, 55 bp, Artificial; identical to SEQ ID NO: 244106
  Synthetic oligonucleotide

SEQ ID NO: 640068 - DNA, 52 bp, Artificial; identical to SEQ ID NO: 180331
  Synthetic oligonucleotide

SEQ ID NO: 640069 - DNA, 55 bp, Artificial; identical to SEQ ID NO: 156572
  Synthetic oligonucleotide

SEQ ID NO: 640070 - DNA, 52 bp, Artificial; identical to SEQ ID NO: 180370
  Synthetic oligonucleotide

SEQ ID NO: 640071 - DNA, 55 bp, Artificial; identical to SEQ ID NO: 190516
  Synthetic oligonucleotide

SEQ ID NO: 640072 - DNA, 51 bp, Artificial; identical to SEQ ID NO: 259061
  Synthetic oligonucleotide

SEQ ID NO: 640073 - DNA, 52 bp, Artificial; identical to SEQ ID NO: 157558
  Synthetic oligonucleotide

SEQ ID NO: 640074 - DNA, 57 bp, Artificial; identical to SEQ ID NO: 206810
  Synthetic oligonucleotide

SEQ ID NO: 640075 - DNA, 54 bp, Artificial; identical to SEQ ID NO: 208648
  Synthetic oligonucleotide

SEQ ID NO: 640076 - DNA, 55 bp, Artificial; identical to SEQ ID NO: 198011
  Synthetic oligonucleotide

SEQ ID NO: 640077 - DNA, 52 bp, Artificial; identical to SEQ ID NO: 143757
  Synthetic oligonucleotide

SEQ ID NO: 640078 - DNA, 54 bp, Artificial; identical to SEQ ID NO: 245052
  Synthetic oligonucleotide

SEQ ID NO: 640079 - DNA, 53 bp, Artificial; identical to SEQ ID NO: 164149
  Synthetic oligonucleotide

SEQ ID NO: 640080 - DNA, 54 bp, Artificial; identical to SEQ ID NO: 167499
  Synthetic oligonucleotide

SEQ ID NO: 640081 - DNA, 55 bp, Artificial; identical to SEQ ID NO: 245051
  Synthetic oligonucleotide

SEQ ID NO: 640082 - DNA, 55 bp, Artificial; identical to SEQ ID NO: 154490
  Synthetic oligonucleotide

SEQ ID NO: 640083 - DNA, 55 bp, Artificial; identical to SEQ ID NO: 151531
  Synthetic oligonucleotide

SEQ ID NO: 640084 - DNA, 55 bp, Artificial; identical to SEQ ID NO: 180364
  Synthetic oligonucleotide

SEQ ID NO: 640085 - DNA, 54 bp, Artificial; identical to SEQ ID NO: 141686
  Synthetic oligonucleotide

SEQ ID NO: 640086 - DNA, 50 bp, Artificial; identical to SEQ ID NO: 161506
  Synthetic oligonucleotide

SEQ ID NO: 640087 - DNA, 60 bp, Artificial; identical to SEQ ID NO: 171228
  Synthetic oligonucleotide

SEQ ID NO: 640088 - DNA, 51 bp, Artificial; identical to SEQ ID NO: 248047
  Synthetic oligonucleotide

SEQ ID NO: 640089 - DNA, 55 bp, Artificial; identical to SEQ ID NO: 208646
  Synthetic oligonucleotide

SEQ ID NO: 640090 - DNA, 60 bp, Artificial; identical to SEQ ID NO: 181327
  Synthetic oligonucleotide

SEQ ID NO: 640091 - DNA, 58 bp, Artificial; identical to SEQ ID NO: 255289
  Synthetic oligonucleotide

SEQ ID NO: 640092 - DNA, 55 bp, Artificial; identical to SEQ ID NO: 155306
  Synthetic oligonucleotide

SEQ ID NO: 640093 - DNA, 55 bp, Artificial; identical to SEQ ID NO: 156573
  Synthetic oligonucleotide

SEQ ID NO: 640094 - DNA, 54 bp, Artificial; identical to SEQ ID NO: 197429
  Synthetic oligonucleotide

SEQ ID NO: 640095 - DNA, 60 bp, Artificial; identical to SEQ ID NO: 200724
  Synthetic oligonucleotide

SEQ ID NO: 640096 - DNA, 55 bp, Artificial; identical to SEQ ID NO: 143709
  Synthetic oligonucleotide

SEQ ID NO: 640097 - DNA, 55 bp, Artificial; identical to SEQ ID NO: 248880
  Synthetic oligonucleotide

SEQ ID NO: 640098 - DNA, 55 bp, Artificial; identical to SEQ ID NO: 180359
  Synthetic oligonucleotide

SEQ ID NO: 640099 - DNA, 55 bp, Artificial; identical to SEQ ID NO: 142220
  Synthetic oligonucleotide

SEQ ID NO: 640100 - DNA, 55 bp, Artificial; identical to SEQ ID NO: 156574
  Synthetic oligonucleotide

SEQ ID NO: 640101 - DNA, 55 bp, Artificial; identical to SEQ ID NO: 155307
  Synthetic oligonucleotide

SEQ ID NO: 640102 - DNA, 56 bp, Artificial; identical to SEQ ID NO: 200723
  Synthetic oligonucleotide

SEQ ID NO: 640103 - DNA, 55 bp, Artificial; identical to SEQ ID NO: 156575
  Synthetic oligonucleotide

SEQ ID NO: 640104 - DNA, 50 bp, Artificial; identical to SEQ ID NO: 160647
  Synthetic oligonucleotide

SEQ ID NO: 640105 - DNA, 55 bp, Artificial; identical to SEQ ID NO: 142221
  Synthetic oligonucleotide

SEQ ID NO: 640106 - DNA, 55 bp, Artificial; identical to SEQ ID NO: 167500
  Synthetic oligonucleotide

SEQ ID NO: 640107 - DNA, 55 bp, Artificial; identical to SEQ ID NO: 155274
  Synthetic oligonucleotide

SEQ ID NO: 640108 - DNA, 58 bp, Artificial; identical to SEQ ID NO: 200722
  Synthetic oligonucleotide

SEQ ID NO: 640109 - DNA, 55 bp, Artificial; identical to SEQ ID NO: 189503
  Synthetic oligonucleotide

SEQ ID NO: 640110 - DNA, 55 bp, Artificial; identical to SEQ ID NO: 217628
  Synthetic oligonucleotide

SEQ ID NO: 640111 - DNA, 55 bp, Artificial; identical to SEQ ID NO: 180355
  Synthetic oligonucleotide

SEQ ID NO: 640112 - DNA, 56 bp, Artificial; identical to SEQ ID NO: 239507
  Synthetic oligonucleotide

SEQ ID NO: 640113 - DNA, 55 bp, Artificial; identical to SEQ ID NO: 245049
  Synthetic oligonucleotide

SEQ ID NO: 640114 - DNA, 55 bp, Artificial; identical to SEQ ID NO: 180353
  Synthetic oligonucleotide

SEQ ID NO: 640115 - DNA, 55 bp, Artificial; identical to SEQ ID NO: 189502
  Synthetic oligonucleotide

SEQ ID NO: 640116 - DNA, 55 bp, Artificial; identical to SEQ ID NO: 151534
  Synthetic oligonucleotide

SEQ ID NO: 640117 - DNA, 51 bp, Artificial; identical to SEQ ID NO: 210339
  Synthetic oligonucleotide

SEQ ID NO: 640118 - DNA, 55 bp, Artificial; identical to SEQ ID NO: 254420
  Synthetic oligonucleotide

SEQ ID NO: 640119 - DNA, 55 bp, Artificial; identical to SEQ ID NO: 169230
  Synthetic oligonucleotide

SEQ ID NO: 640120 - DNA, 56 bp, Artificial; identical to SEQ ID NO: 247024
  Synthetic oligonucleotide

SEQ ID NO: 640121 - DNA, 52 bp, Artificial; identical to SEQ ID NO: 160516
  Synthetic oligonucleotide

SEQ ID NO: 640122 - DNA, 55 bp, Artificial; identical to SEQ ID NO: 257690
  Synthetic oligonucleotide

SEQ ID NO: 640123 - DNA, 55 bp, Artificial; identical to SEQ ID NO: 254423
  Synthetic oligonucleotide

SEQ ID NO: 640124 - DNA, 57 bp, Artificial; identical to SEQ ID NO: 200720
  Synthetic oligonucleotide

SEQ ID NO: 640125 - DNA, 51 bp, Artificial; identical to SEQ ID NO: 248045
  Synthetic oligonucleotide

SEQ ID NO: 640126 - DNA, 54 bp, Artificial; identical to SEQ ID NO: 216580
  Synthetic oligonucleotide

SEQ ID NO: 640127 - DNA, 55 bp, Artificial; identical to SEQ ID NO: 197921
  Synthetic oligonucleotide

SEQ ID NO: 640128 - DNA, 55 bp, Artificial; identical to SEQ ID NO: 180301
  Synthetic oligonucleotide

SEQ ID NO: 640129 - DNA, 55 bp, Artificial; identical to SEQ ID NO: 217079
  Synthetic oligonucleotide

SEQ ID NO: 640130 - DNA, 50 bp, Artificial; identical to SEQ ID NO: 176710
  Synthetic oligonucleotide

SEQ ID NO: 640131 - DNA, 54 bp, Artificial; identical to SEQ ID NO: 199597
  Synthetic oligonucleotide

SEQ ID NO: 640132 - DNA, 55 bp, Artificial; identical to SEQ ID NO: 217630
  Synthetic oligonucleotide

SEQ ID NO: 640133 - DNA, 54 bp, Artificial; identical to SEQ ID NO: 174767
  Synthetic oligonucleotide

SEQ ID NO: 640134 - DNA, 51 bp, Artificial; identical to SEQ ID NO: 167170
  Synthetic oligonucleotide

SEQ ID NO: 640135 - DNA, 57 bp, Artificial; identical to SEQ ID NO: 256607
  Synthetic oligonucleotide

SEQ ID NO: 640136 - DNA, 53 bp, Artificial; identical to SEQ ID NO: 185632
  Synthetic oligonucleotide

SEQ ID NO: 640137 - DNA, 56 bp, Artificial; identical to SEQ ID NO: 247023
  Synthetic oligonucleotide

SEQ ID NO: 640138 - DNA, 55 bp, Artificial; identical to SEQ ID NO: 245045
  Synthetic oligonucleotide

SEQ ID NO: 640139 - DNA, 53 bp, Artificial; identical to SEQ ID NO: 164148
  Synthetic oligonucleotide

SEQ ID NO: 640140 - DNA, 50 bp, Artificial; identical to SEQ ID NO: 154715
  Synthetic oligonucleotide

SEQ ID NO: 640141 - DNA, 58 bp, Artificial; identical to SEQ ID NO: 209176
  Synthetic oligonucleotide

SEQ ID NO: 640142 - DNA, 55 bp, Artificial; identical to SEQ ID NO: 164147
  Synthetic oligonucleotide

SEQ ID NO: 640143 - DNA, 55 bp, Artificial; identical to SEQ ID NO: 245044
  Synthetic oligonucleotide

SEQ ID NO: 640144 - DNA, 55 bp, Artificial; identical to SEQ ID NO: 154433
  Synthetic oligonucleotide

SEQ ID NO: 640145 - DNA, 54 bp, Artificial; identical to SEQ ID NO: 239843
  Synthetic oligonucleotide

SEQ ID NO: 640146 - DNA, 53 bp, Artificial; identical to SEQ ID NO: 199756
  Synthetic oligonucleotide

SEQ ID NO: 640147 - DNA, 55 bp, Artificial; identical to SEQ ID NO: 180300
  Synthetic oligonucleotide

SEQ ID NO: 640148 - DNA, 55 bp, Artificial; identical to SEQ ID NO: 207260
  Synthetic oligonucleotide

SEQ ID NO: 640149 - DNA, 55 bp, Artificial; identical to SEQ ID NO: 215169
  Synthetic oligonucleotide

SEQ ID NO: 640150 - DNA, 55 bp, Artificial; identical to SEQ ID NO: 171764
  Synthetic oligonucleotide

SEQ ID NO: 640151 - DNA, 55 bp, Artificial; identical to SEQ ID NO: 151536
  Synthetic oligonucleotide

SEQ ID NO: 640152 - DNA, 55 bp, Artificial; identical to SEQ ID NO: 198613
  Synthetic oligonucleotide

SEQ ID NO: 640153 - DNA, 55 bp, Artificial; identical to SEQ ID NO: 194650
  Synthetic oligonucleotide

SEQ ID NO: 640154 - DNA, 55 bp, Artificial; identical to SEQ ID NO: 253099
  Synthetic oligonucleotide

SEQ ID NO: 640155 - DNA, 55 bp, Artificial; identical to SEQ ID NO: 197351
  Synthetic oligonucleotide

SEQ ID NO: 640156 - DNA, 56 bp, Artificial; identical to SEQ ID NO: 187209
  Synthetic oligonucleotide

SEQ ID NO: 640157 - DNA, 60 bp, Artificial; identical to SEQ ID NO: 171117
  Synthetic oligonucleotide

SEQ ID NO: 640158 - DNA, 59 bp, Artificial; identical to SEQ ID NO: 209147
  Synthetic oligonucleotide

SEQ ID NO: 640159 - DNA, 55 bp, Artificial; identical to SEQ ID NO: 190514
  Synthetic oligonucleotide

SEQ ID NO: 640160 - DNA, 60 bp, Artificial; identical to SEQ ID NO: 187208
  Synthetic oligonucleotide

SEQ ID NO: 640161 - DNA, 60 bp, Artificial; identical to SEQ ID NO: 151023
  Synthetic oligonucleotide

SEQ ID NO: 640162 - DNA, 56 bp, Artificial; identical to SEQ ID NO: 247568
  Synthetic oligonucleotide

SEQ ID NO: 640163 - DNA, 55 bp, Artificial; identical to SEQ ID NO: 220705
  Synthetic oligonucleotide

SEQ ID NO: 640164 - DNA, 58 bp, Artificial; identical to SEQ ID NO: 210722
  Synthetic oligonucleotide

SEQ ID NO: 640165 - DNA, 55 bp, Artificial; identical to SEQ ID NO: 216384
  Synthetic oligonucleotide

SEQ ID NO: 640166 - DNA, 55 bp, Artificial; identical to SEQ ID NO: 245039
  Synthetic oligonucleotide

SEQ ID NO: 640167 - DNA, 55 bp, Artificial; identical to SEQ ID NO: 239841
  Synthetic oligonucleotide

SEQ ID NO: 640168 - DNA, 55 bp, Artificial; identical to SEQ ID NO: 198611
  Synthetic oligonucleotide

SEQ ID NO: 640169 - DNA, 60 bp, Artificial; identical to SEQ ID NO: 266110
  Synthetic oligonucleotide

SEQ ID NO: 640170 - DNA, 51 bp, Artificial; identical to SEQ ID NO: 262679
  Synthetic oligonucleotide

SEQ ID NO: 640171 - DNA, 55 bp, Artificial; identical to SEQ ID NO: 249627
  Synthetic oligonucleotide

SEQ ID NO: 640172 - DNA, 55 bp, Artificial; identical to SEQ ID NO: 143708
  Synthetic oligonucleotide

SEQ ID NO: 640173 - DNA, 55 bp, Artificial; identical to SEQ ID NO: 221639
  Synthetic oligonucleotide

SEQ ID NO: 640174 - DNA, 60 bp, Artificial; identical to SEQ ID NO: 242168
  Synthetic oligonucleotide

SEQ ID NO: 640175 - DNA, 54 bp, Artificial; identical to SEQ ID NO: 239210
  Synthetic oligonucleotide

SEQ ID NO: 640176 - DNA, 55 bp, Artificial; identical to SEQ ID NO: 207261
  Synthetic oligonucleotide

SEQ ID NO: 640177 - DNA, 56 bp, Artificial; identical to SEQ ID NO: 209056
  Synthetic oligonucleotide

SEQ ID NO: 640178 - DNA, 55 bp, Artificial; identical to SEQ ID NO: 142222
  Synthetic oligonucleotide

SEQ ID NO: 640179 - DNA, 53 bp, Artificial; identical to SEQ ID NO: 206412
  Synthetic oligonucleotide

SEQ ID NO: 640180 - DNA, 55 bp, Artificial; identical to SEQ ID NO: 245097
  Synthetic oligonucleotide

SEQ ID NO: 640181 - DNA, 55 bp, Artificial; identical to SEQ ID NO: 253100
  Synthetic oligonucleotide

SEQ ID NO: 640182 - DNA, 55 bp, Artificial; identical to SEQ ID NO: 203582
  Synthetic oligonucleotide

SEQ ID NO: 640183 - DNA, 55 bp, Artificial; identical to SEQ ID NO: 148134
  Synthetic oligonucleotide

SEQ ID NO: 640184 - DNA, 55 bp, Artificial; identical to SEQ ID NO: 142223
  Synthetic oligonucleotide

SEQ ID NO: 640185 - DNA, 55 bp, Artificial; identical to SEQ ID NO: 187557
  Synthetic oligonucleotide

SEQ ID NO: 640186 - DNA, 55 bp, Artificial; identical to SEQ ID NO: 203584
  Synthetic oligonucleotide

SEQ ID NO: 640187 - DNA, 55 bp, Artificial; identical to SEQ ID NO: 218293
  Synthetic oligonucleotide

SEQ ID NO: 640188 - DNA, 55 bp, Artificial; identical to SEQ ID NO: 169229
  Synthetic oligonucleotide

SEQ ID NO: 640189 - DNA, 55 bp, Artificial; identical to SEQ ID NO: 202102
  Synthetic oligonucleotide

SEQ ID NO: 640190 - DNA, 55 bp, Artificial; identical to SEQ ID NO: 211204
  Synthetic oligonucleotide

SEQ ID NO: 640191 - DNA, 55 bp, Artificial; identical to SEQ ID NO: 220612
  Synthetic oligonucleotide

SEQ ID NO: 640192 - DNA, 55 bp, Artificial; identical to SEQ ID NO: 248883
  Synthetic oligonucleotide

SEQ ID NO: 640193 - DNA, 59 bp, Artificial; identical to SEQ ID NO: 151305
  Synthetic oligonucleotide

SEQ ID NO: 640194 - DNA, 55 bp, Artificial; identical to SEQ ID NO: 238435
  Synthetic oligonucleotide

SEQ ID NO: 640195 - DNA, 60 bp, Artificial; identical to SEQ ID NO: 222818
  Synthetic oligonucleotide

SEQ ID NO: 640196 - DNA, 55 bp, Artificial; identical to SEQ ID NO: 217631
  Synthetic oligonucleotide

SEQ ID NO: 640197 - DNA, 55 bp, Artificial; identical to SEQ ID NO: 224689
  Synthetic oligonucleotide

SEQ ID NO: 640198 - DNA, 55 bp, Artificial; identical to SEQ ID NO: 217632
  Synthetic oligonucleotide

SEQ ID NO: 640199 - DNA, 55 bp, Artificial; identical to SEQ ID NO: 180295
  Synthetic oligonucleotide

SEQ ID NO: 640200 - DNA, 55 bp, Artificial; identical to SEQ ID NO: 144772
  Synthetic oligonucleotide

SEQ ID NO: 640201 - DNA, 55 bp, Artificial; identical to SEQ ID NO: 258919
  Synthetic oligonucleotide

SEQ ID NO: 640202 - DNA, 55 bp, Artificial; identical to SEQ ID NO: 233502
  Synthetic oligonucleotide

SEQ ID NO: 640203 - DNA, 55 bp, Artificial; identical to SEQ ID NO: 180294
  Synthetic oligonucleotide

SEQ ID NO: 640204 - DNA, 60 bp, Artificial; identical to SEQ ID NO: 243954
  Synthetic oligonucleotide

SEQ ID NO: 640205 - DNA, 52 bp, Artificial; identical to SEQ ID NO: 186355
  Synthetic oligonucleotide

SEQ ID NO: 640206 - DNA, 55 bp, Artificial; identical to SEQ ID NO: 217634
  Synthetic oligonucleotide

SEQ ID NO: 640207 - DNA, 55 bp, Artificial; identical to SEQ ID NO: 142224
  Synthetic oligonucleotide

SEQ ID NO: 640208 - DNA, 55 bp, Artificial; identical to SEQ ID NO: 253052
  Synthetic oligonucleotide

SEQ ID NO: 640209 - DNA, 55 bp, Artificial; identical to SEQ ID NO: 164202
  Synthetic oligonucleotide

SEQ ID NO: 640210 - DNA, 55 bp, Artificial; identical to SEQ ID NO: 198609
  Synthetic oligonucleotide

SEQ ID NO: 640211 - DNA, 55 bp, Artificial; identical to SEQ ID NO: 144775
  Synthetic oligonucleotide

SEQ ID NO: 640212 - DNA, 55 bp, Artificial; identical to SEQ ID NO: 169228
  Synthetic oligonucleotide

SEQ ID NO: 640213 - DNA, 55 bp, Artificial; identical to SEQ ID NO: 156529
  Synthetic oligonucleotide

SEQ ID NO: 640214 - DNA, 55 bp, Artificial; identical to SEQ ID NO: 153104
  Synthetic oligonucleotide

SEQ ID NO: 640215 - DNA, 55 bp, Artificial; identical to SEQ ID NO: 156530
  Synthetic oligonucleotide

SEQ ID NO: 640216 - DNA, 58 bp, Artificial; identical to SEQ ID NO: 242170
  Synthetic oligonucleotide

SEQ ID NO: 640217 - DNA, 55 bp, Artificial; identical to SEQ ID NO: 198607
  Synthetic oligonucleotide

SEQ ID NO: 640218 - DNA, 55 bp, Artificial; identical to SEQ ID NO: 148137
  Synthetic oligonucleotide

SEQ ID NO: 640219 - DNA, 55 bp, Artificial; identical to SEQ ID NO: 155276
  Synthetic oligonucleotide

SEQ ID NO: 640220 - DNA, 53 bp, Artificial; identical to SEQ ID NO: 157411
  Synthetic oligonucleotide

SEQ ID NO: 640221 - DNA, 60 bp, Artificial; identical to SEQ ID NO: 200718
  Synthetic oligonucleotide

SEQ ID NO: 640222 - DNA, 55 bp, Artificial; identical to SEQ ID NO: 254425
  Synthetic oligonucleotide

SEQ ID NO: 640223 - DNA, 55 bp, Artificial; identical to SEQ ID NO: 202775
  Synthetic oligonucleotide

SEQ ID NO: 640224 - DNA, 55 bp, Artificial; identical to SEQ ID NO: 164205
  Synthetic oligonucleotide

SEQ ID NO: 640225 - DNA, 55 bp, Artificial; identical to SEQ ID NO: 144413
  Synthetic oligonucleotide

SEQ ID NO: 640226 - DNA, 56 bp, Artificial; identical to SEQ ID NO: 153011
  Synthetic oligonucleotide

SEQ ID NO: 640227 - DNA, 55 bp, Artificial; identical to SEQ ID NO: 162107
  Synthetic oligonucleotide

SEQ ID NO: 640228 - DNA, 55 bp, Artificial; identical to SEQ ID NO: 245095
  Synthetic oligonucleotide

SEQ ID NO: 640229 - DNA, 55 bp, Artificial; identical to SEQ ID NO: 180287
  Synthetic oligonucleotide

SEQ ID NO: 640230 - DNA, 55 bp, Artificial; identical to SEQ ID NO: 148140
  Synthetic oligonucleotide

SEQ ID NO: 640231 - DNA, 55 bp, Artificial; identical to SEQ ID NO: 187565
  Synthetic oligonucleotide

SEQ ID NO: 640232 - DNA, 55 bp, Artificial; identical to SEQ ID NO: 164206
  Synthetic oligonucleotide

SEQ ID NO: 640233 - DNA, 55 bp, Artificial; identical to SEQ ID NO: 190971
  Synthetic oligonucleotide

SEQ ID NO: 640234 - DNA, 54 bp, Artificial; identical to SEQ ID NO: 266115
  Synthetic oligonucleotide

SEQ ID NO: 640235 - DNA, 55 bp, Artificial; identical to SEQ ID NO: 203596
  Synthetic oligonucleotide

SEQ ID NO: 640236 - DNA, 53 bp, Artificial; identical to SEQ ID NO: 180627
  Synthetic oligonucleotide

SEQ ID NO: 640237 - DNA, 55 bp, Artificial; identical to SEQ ID NO: 180284
  Synthetic oligonucleotide

SEQ ID NO: 640238 - DNA, 55 bp, Artificial; identical to SEQ ID NO: 207267
  Synthetic oligonucleotide

SEQ ID NO: 640239 - DNA, 55 bp, Artificial; identical to SEQ ID NO: 180329
  Synthetic oligonucleotide

SEQ ID NO: 640240 - DNA, 55 bp, Artificial; identical to SEQ ID NO: 248885
  Synthetic oligonucleotide

SEQ ID NO: 640241 - DNA, 55 bp, Artificial; identical to SEQ ID NO: 194651
  Synthetic oligonucleotide

SEQ ID NO: 640242 - DNA, 55 bp, Artificial; identical to SEQ ID NO: 180324
  Synthetic oligonucleotide

SEQ ID NO: 640243 - DNA, 54 bp, Artificial; identical to SEQ ID NO: 197840
  Synthetic oligonucleotide

SEQ ID NO: 640244 - DNA, 55 bp, Artificial; identical to SEQ ID NO: 217636
  Synthetic oligonucleotide

SEQ ID NO: 640245 - DNA, 55 bp, Artificial; identical to SEQ ID NO: 190970
  Synthetic oligonucleotide

SEQ ID NO: 640246 - DNA, 55 bp, Artificial; identical to SEQ ID NO: 239870
  Synthetic oligonucleotide

SEQ ID NO: 640247 - DNA, 52 bp, Artificial; identical to SEQ ID NO: 206470
  Synthetic oligonucleotide

SEQ ID NO: 640248 - DNA, 53 bp, Artificial; identical to SEQ ID NO: 157412
  Synthetic oligonucleotide

SEQ ID NO: 640249 - DNA, 55 bp, Artificial; identical to SEQ ID NO: 168541
  Synthetic oligonucleotide

SEQ ID NO: 640250 - DNA, 55 bp, Artificial; identical to SEQ ID NO: 224420
  Synthetic oligonucleotide

SEQ ID NO: 640251 - DNA, 55 bp, Artificial; identical to SEQ ID NO: 180322
  Synthetic oligonucleotide

SEQ ID NO: 640252 - DNA, 55 bp, Artificial; identical to SEQ ID NO: 156536
  Synthetic oligonucleotide

SEQ ID NO: 640253 - DNA, 55 bp, Artificial; identical to SEQ ID NO: 171510
  Synthetic oligonucleotide

SEQ ID NO: 640254 - DNA, 51 bp, Artificial; identical to SEQ ID NO: 149874
  Synthetic oligonucleotide

SEQ ID NO: 640255 - DNA, 54 bp, Artificial; identical to SEQ ID NO: 255169
  Synthetic oligonucleotide

SEQ ID NO: 640256 - DNA, 56 bp, Artificial; identical to SEQ ID NO: 239543
  Synthetic oligonucleotide

SEQ ID NO: 640257 - DNA, 56 bp, Artificial; identical to SEQ ID NO: 201485
  Synthetic oligonucleotide

SEQ ID NO: 640258 - DNA, 55 bp, Artificial; identical to SEQ ID NO: 253055
  Synthetic oligonucleotide

SEQ ID NO: 640259 - DNA, 53 bp, Artificial; identical to SEQ ID NO: 217637
  Synthetic oligonucleotide

SEQ ID NO: 640260 - DNA, 55 bp, Artificial; identical to SEQ ID NO: 156538
  Synthetic oligonucleotide

SEQ ID NO: 640261 - DNA, 60 bp, Artificial; identical to SEQ ID NO: 243965
  Synthetic oligonucleotide

SEQ ID NO: 640262 - DNA, 55 bp, Artificial; identical to SEQ ID NO: 194652
  Synthetic oligonucleotide

SEQ ID NO: 640263 - DNA, 54 bp, Artificial; identical to SEQ ID NO: 180321
  Synthetic oligonucleotide

SEQ ID NO: 640264 - DNA, 59 bp, Artificial; identical to SEQ ID NO: 200715
  Synthetic oligonucleotide

SEQ ID NO: 640265 - DNA, 54 bp, Artificial; identical to SEQ ID NO: 185333
  Synthetic oligonucleotide

SEQ ID NO: 640266 - DNA, 55 bp, Artificial; identical to SEQ ID NO: 201820
  Synthetic oligonucleotide

SEQ ID NO: 640267 - DNA, 55 bp, Artificial; identical to SEQ ID NO: 198604
  Synthetic oligonucleotide

SEQ ID NO: 640268 - DNA, 55 bp, Artificial; identical to SEQ ID NO: 190969
  Synthetic oligonucleotide

SEQ ID NO: 640269 - DNA, 55 bp, Artificial; identical to SEQ ID NO: 142225
  Synthetic oligonucleotide

SEQ ID NO: 640270 - DNA, 60 bp, Artificial; identical to SEQ ID NO: 180594
  Synthetic oligonucleotide

SEQ ID NO: 640271 - DNA, 55 bp, Artificial; identical to SEQ ID NO: 180318
  Synthetic oligonucleotide

SEQ ID NO: 640272 - DNA, 57 bp, Artificial; identical to SEQ ID NO: 225536
  Synthetic oligonucleotide

SEQ ID NO: 640273 - DNA, 55 bp, Artificial; identical to SEQ ID NO: 164208
  Synthetic oligonucleotide

SEQ ID NO: 640274 - DNA, 50 bp, Artificial; identical to SEQ ID NO: 234574
  Synthetic oligonucleotide

SEQ ID NO: 640275 - DNA, 53 bp, Artificial; identical to SEQ ID NO: 174841
  Synthetic oligonucleotide

SEQ ID NO: 640276 - DNA, 60 bp, Artificial; identical to SEQ ID NO: 151068
  Synthetic oligonucleotide

SEQ ID NO: 640277 - DNA, 51 bp, Artificial; identical to SEQ ID NO: 169068
  Synthetic oligonucleotide

SEQ ID NO: 640278 - DNA, 50 bp, Artificial; identical to SEQ ID NO: 153859
  Synthetic oligonucleotide

SEQ ID NO: 640279 - DNA, 55 bp, Artificial; identical to SEQ ID NO: 249625
  Synthetic oligonucleotide

SEQ ID NO: 640280 - DNA, 55 bp, Artificial; identical to SEQ ID NO: 155282
  Synthetic oligonucleotide

SEQ ID NO: 640281 - DNA, 59 bp, Artificial; identical to SEQ ID NO: 151079
  Synthetic oligonucleotide

SEQ ID NO: 640282 - DNA, 55 bp, Artificial; identical to SEQ ID NO: 180316
  Synthetic oligonucleotide

SEQ ID NO: 640283 - DNA, 60 bp, Artificial; identical to SEQ ID NO: 168645
  Synthetic oligonucleotide

SEQ ID NO: 640284 - DNA, 52 bp, Artificial; identical to SEQ ID NO: 160515
  Synthetic oligonucleotide

SEQ ID NO: 640285 - DNA, 55 bp, Artificial; identical to SEQ ID NO: 254407
  Synthetic oligonucleotide

SEQ ID NO: 640286 - DNA, 55 bp, Artificial; identical to SEQ ID NO: 191010
  Synthetic oligonucleotide

SEQ ID NO: 640287 - DNA, 55 bp, Artificial; identical to SEQ ID NO: 220613
  Synthetic oligonucleotide

SEQ ID NO: 640288 - DNA, 55 bp, Artificial; identical to SEQ ID NO: 156540
  Synthetic oligonucleotide

SEQ ID NO: 640289 - DNA, 57 bp, Artificial; identical to SEQ ID NO: 217082
  Synthetic oligonucleotide

SEQ ID NO: 640290 - DNA, 55 bp, Artificial; identical to SEQ ID NO: 202773
  Synthetic oligonucleotide

SEQ ID NO: 640291 - DNA, 55 bp, Artificial; identical to SEQ ID NO: 180314
  Synthetic oligonucleotide

SEQ ID NO: 640292 - DNA, 55 bp, Artificial; identical to SEQ ID NO: 207271
  Synthetic oligonucleotide

SEQ ID NO: 640293 - DNA, 55 bp, Artificial; identical to SEQ ID NO: 198602
  Synthetic oligonucleotide

SEQ ID NO: 640294 - DNA, 55 bp, Artificial; identical to SEQ ID NO: 233500
  Synthetic oligonucleotide

SEQ ID NO: 640295 - DNA, 55 bp, Artificial; identical to SEQ ID NO: 239866
  Synthetic oligonucleotide

SEQ ID NO: 640296 - DNA, 52 bp, Artificial; identical to SEQ ID NO: 190816
  Synthetic oligonucleotide

SEQ ID NO: 640297 - DNA, 52 bp, Artificial; identical to SEQ ID NO: 240850
  Synthetic oligonucleotide

SEQ ID NO: 640298 - DNA, 55 bp, Artificial; identical to SEQ ID NO: 180313
  Synthetic oligonucleotide

SEQ ID NO: 640299 - DNA, 57 bp, Artificial; identical to SEQ ID NO: 200714
  Synthetic oligonucleotide

SEQ ID NO: 640300 - DNA, 55 bp, Artificial; identical to SEQ ID NO: 180312
  Synthetic oligonucleotide

SEQ ID NO: 640301 - DNA, 55 bp, Artificial; identical to SEQ ID NO: 211200
  Synthetic oligonucleotide

SEQ ID NO: 640302 - DNA, 55 bp, Artificial; identical to SEQ ID NO: 239864
  Synthetic oligonucleotide

SEQ ID NO: 640303 - DNA, 52 bp, Artificial; identical to SEQ ID NO: 180311
  Synthetic oligonucleotide

SEQ ID NO: 640304 - DNA, 55 bp, Artificial; identical to SEQ ID NO: 148142
  Synthetic oligonucleotide

SEQ ID NO: 640305 - DNA, 56 bp, Artificial; identical to SEQ ID NO: 147340
  Synthetic oligonucleotide

SEQ ID NO: 640306 - DNA, 55 bp, Artificial; identical to SEQ ID NO: 148143
  Synthetic oligonucleotide

SEQ ID NO: 640307 - DNA, 60 bp, Artificial; identical to SEQ ID NO: 242177
  Synthetic oligonucleotide

SEQ ID NO: 640308 - DNA, 55 bp, Artificial; identical to SEQ ID NO: 209378
  Synthetic oligonucleotide

SEQ ID NO: 640309 - DNA, 60 bp, Artificial; identical to SEQ ID NO: 242117
  Synthetic oligonucleotide

SEQ ID NO: 640310 - DNA, 55 bp, Artificial; identical to SEQ ID NO: 164211
  Synthetic oligonucleotide

SEQ ID NO: 640311 - DNA, 53 bp, Artificial; identical to SEQ ID NO: 152278
  Synthetic oligonucleotide

SEQ ID NO: 640312 - DNA, 54 bp, Artificial; identical to SEQ ID NO: 191170
  Synthetic oligonucleotide

SEQ ID NO: 640313 - DNA, 55 bp, Artificial; identical to SEQ ID NO: 245092
  Synthetic oligonucleotide

SEQ ID NO: 640314 - DNA, 51 bp, Artificial; identical to SEQ ID NO: 223791
  Synthetic oligonucleotide

SEQ ID NO: 640315 - DNA, 55 bp, Artificial; identical to SEQ ID NO: 142226
  Synthetic oligonucleotide

SEQ ID NO: 640316 - DNA, 53 bp, Artificial; identical to SEQ ID NO: 197349
  Synthetic oligonucleotide

SEQ ID NO: 640317 - DNA, 60 bp, Artificial; identical to SEQ ID NO: 170784
  Synthetic oligonucleotide

SEQ ID NO: 640318 - DNA, 55 bp, Artificial; identical to SEQ ID NO: 238432
  Synthetic oligonucleotide

SEQ ID NO: 640319 - DNA, 52 bp, Artificial; identical to SEQ ID NO: 199609
  Synthetic oligonucleotide

SEQ ID NO: 640320 - DNA, 55 bp, Artificial; identical to SEQ ID NO: 187570
  Synthetic oligonucleotide

SEQ ID NO: 640321 - DNA, 55 bp, Artificial; identical to SEQ ID NO: 180309
  Synthetic oligonucleotide

SEQ ID NO: 640322 - DNA, 53 bp, Artificial; identical to SEQ ID NO: 201280
  Synthetic oligonucleotide

SEQ ID NO: 640323 - DNA, 52 bp, Artificial; identical to SEQ ID NO: 186333
  Synthetic oligonucleotide

SEQ ID NO: 640324 - DNA, 55 bp, Artificial; identical to SEQ ID NO: 169225
  Synthetic oligonucleotide

SEQ ID NO: 640325 - DNA, 55 bp, Artificial; identical to SEQ ID NO: 144744
  Synthetic oligonucleotide

SEQ ID NO: 640326 - DNA, 55 bp, Artificial; identical to SEQ ID NO: 245091
  Synthetic oligonucleotide

SEQ ID NO: 640327 - DNA, 53 bp, Artificial; identical to SEQ ID NO: 174613
  Synthetic oligonucleotide

SEQ ID NO: 640328 - DNA, 60 bp, Artificial; identical to SEQ ID NO: 206498
  Synthetic oligonucleotide

SEQ ID NO: 640329 - DNA, 54 bp, Artificial; identical to SEQ ID NO: 223561
  Synthetic oligonucleotide

SEQ ID NO: 640330 - DNA, 53 bp, Artificial; identical to SEQ ID NO: 240818
  Synthetic oligonucleotide

SEQ ID NO: 640331 - DNA, 49 bp, Artificial; identical to SEQ ID NO: 238431
  Synthetic oligonucleotide

SEQ ID NO: 640332 - DNA, 53 bp, Artificial; identical to SEQ ID NO: 211550
  Synthetic oligonucleotide

SEQ ID NO: 640333 - DNA, 55 bp, Artificial; identical to SEQ ID NO: 152528
  Synthetic oligonucleotide

SEQ ID NO: 640334 - DNA, 55 bp, Artificial; identical to SEQ ID NO: 148181
  Synthetic oligonucleotide

SEQ ID NO: 640335 - DNA, 56 bp, Artificial; identical to SEQ ID NO: 256630
  Synthetic oligonucleotide

SEQ ID NO: 640336 - DNA, 55 bp, Artificial; identical to SEQ ID NO: 164213
  Synthetic oligonucleotide

SEQ ID NO: 640337 - DNA, 55 bp, Artificial; identical to SEQ ID NO: 245090
  Synthetic oligonucleotide

SEQ ID NO: 640338 - DNA, 53 bp, Artificial; identical to SEQ ID NO: 201683
  Synthetic oligonucleotide

SEQ ID NO: 640339 - DNA, 55 bp, Artificial; identical to SEQ ID NO: 248887
  Synthetic oligonucleotide

SEQ ID NO: 640340 - DNA, 56 bp, Artificial; identical to SEQ ID NO: 145131
  Synthetic oligonucleotide

SEQ ID NO: 640341 - DNA, 53 bp, Artificial; identical to SEQ ID NO: 141688
  Synthetic oligonucleotide

SEQ ID NO: 640342 - DNA, 55 bp, Artificial; identical to SEQ ID NO: 148183
  Synthetic oligonucleotide

SEQ ID NO: 640343 - DNA, 55 bp, Artificial; identical to SEQ ID NO: 198597
  Synthetic oligonucleotide

SEQ ID NO: 640344 - DNA, 53 bp, Artificial; identical to SEQ ID NO: 194654
  Synthetic oligonucleotide

SEQ ID NO: 640345 - DNA, 51 bp, Artificial; identical to SEQ ID NO: 161395
  Synthetic oligonucleotide

SEQ ID NO: 640346 - DNA, 55 bp, Artificial; identical to SEQ ID NO: 221587
  Synthetic oligonucleotide

SEQ ID NO: 640347 - DNA, 58 bp, Artificial; identical to SEQ ID NO: 210720
  Synthetic oligonucleotide

SEQ ID NO: 640348 - DNA, 56 bp, Artificial; identical to SEQ ID NO: 258940
  Synthetic oligonucleotide

SEQ ID NO: 640349 - DNA, 55 bp, Artificial; identical to SEQ ID NO: 164214
  Synthetic oligonucleotide

SEQ ID NO: 640350 - DNA, 55 bp, Artificial; identical to SEQ ID NO: 190462
  Synthetic oligonucleotide

SEQ ID NO: 640351 - DNA, 55 bp, Artificial; identical to SEQ ID NO: 190460
  Synthetic oligonucleotide

SEQ ID NO: 640352 - DNA, 55 bp, Artificial; identical to SEQ ID NO: 155293
  Synthetic oligonucleotide

SEQ ID NO: 640353 - DNA, 55 bp, Artificial; identical to SEQ ID NO: 156544
  Synthetic oligonucleotide

SEQ ID NO: 640354 - DNA, 50 bp, Artificial; identical to SEQ ID NO: 189366
  Synthetic oligonucleotide

SEQ ID NO: 640355 - DNA, 55 bp, Artificial; identical to SEQ ID NO: 209054
  Synthetic oligonucleotide

SEQ ID NO: 640356 - DNA, 55 bp, Artificial; identical to SEQ ID NO: 208636
  Synthetic oligonucleotide

SEQ ID NO: 640357 - DNA, 55 bp, Artificial; identical to SEQ ID NO: 148185
  Synthetic oligonucleotide

SEQ ID NO: 640358 - DNA, 60 bp, Artificial; identical to SEQ ID NO: 141689
  Synthetic oligonucleotide

SEQ ID NO: 640359 - DNA, 53 bp, Artificial; identical to SEQ ID NO: 192090
  Synthetic oligonucleotide

SEQ ID NO: 640360 - DNA, 60 bp, Artificial; identical to SEQ ID NO: 217083
  Synthetic oligonucleotide

SEQ ID NO: 640361 - DNA, 55 bp, Artificial; identical to SEQ ID NO: 191009
  Synthetic oligonucleotide

SEQ ID NO: 640362 - DNA, 57 bp, Artificial; identical to SEQ ID NO: 242128
  Synthetic oligonucleotide

SEQ ID NO: 640363 - DNA, 55 bp, Artificial; identical to SEQ ID NO: 142228
  Synthetic oligonucleotide

SEQ ID NO: 640364 - DNA, 60 bp, Artificial; identical to SEQ ID NO: 237821
  Synthetic oligonucleotide

SEQ ID NO: 640365 - DNA, 60 bp, Artificial; identical to SEQ ID NO: 180583
  Synthetic oligonucleotide

SEQ ID NO: 640366 - DNA, 53 bp, Artificial; identical to SEQ ID NO: 185447
  Synthetic oligonucleotide

SEQ ID NO: 640367 - DNA, 56 bp, Artificial; identical to SEQ ID NO: 180572
  Synthetic oligonucleotide

SEQ ID NO: 640368 - DNA, 55 bp, Artificial; identical to SEQ ID NO: 164215
  Synthetic oligonucleotide

SEQ ID NO: 640369 - DNA, 57 bp, Artificial; identical to SEQ ID NO: 242129
  Synthetic oligonucleotide

SEQ ID NO: 640370 - DNA, 55 bp, Artificial; identical to SEQ ID NO: 211190
  Synthetic oligonucleotide

SEQ ID NO: 640371 - DNA, 53 bp, Artificial; identical to SEQ ID NO: 185525
  Synthetic oligonucleotide

SEQ ID NO: 640372 - DNA, 55 bp, Artificial; identical to SEQ ID NO: 161014
  Synthetic oligonucleotide

SEQ ID NO: 640373 - DNA, 55 bp, Artificial; identical to SEQ ID NO: 254404
  Synthetic oligonucleotide

SEQ ID NO: 640374 - DNA, 55 bp, Artificial; identical to SEQ ID NO: 266116
  Synthetic oligonucleotide

SEQ ID NO: 640375 - DNA, 55 bp, Artificial; identical to SEQ ID NO: 171504
  Synthetic oligonucleotide

SEQ ID NO: 640376 - DNA, 55 bp, Artificial; identical to SEQ ID NO: 208638
  Synthetic oligonucleotide

SEQ ID NO: 640377 - DNA, 55 bp, Artificial; identical to SEQ ID NO: 257692
  Synthetic oligonucleotide

SEQ ID NO: 640378 - DNA, 55 bp, Artificial; identical to SEQ ID NO: 156545
  Synthetic oligonucleotide

SEQ ID NO: 640379 - DNA, 55 bp, Artificial; identical to SEQ ID NO: 180435
  Synthetic oligonucleotide

SEQ ID NO: 640380 - DNA, 54 bp, Artificial; identical to SEQ ID NO: 142866
  Synthetic oligonucleotide

SEQ ID NO: 640381 - DNA, 53 bp, Artificial; identical to SEQ ID NO: 199790
  Synthetic oligonucleotide

SEQ ID NO: 640382 - DNA, 55 bp, Artificial; identical to SEQ ID NO: 162106
  Synthetic oligonucleotide

SEQ ID NO: 640383 - DNA, 51 bp, Artificial; identical to SEQ ID NO: 149872
  Synthetic oligonucleotide

SEQ ID NO: 640384 - DNA, 60 bp, Artificial; identical to SEQ ID NO: 200713
  Synthetic oligonucleotide

SEQ ID NO: 640385 - DNA, 55 bp, Artificial; identical to SEQ ID NO: 191852
  Synthetic oligonucleotide

SEQ ID NO: 640386 - DNA, 51 bp, Artificial; identical to SEQ ID NO: 187065
  Synthetic oligonucleotide

SEQ ID NO: 640387 - DNA, 57 bp, Artificial; identical to SEQ ID NO: 244008
  Synthetic oligonucleotide

SEQ ID NO: 640388 - DNA, 55 bp, Artificial; identical to SEQ ID NO: 238429
  Synthetic oligonucleotide

SEQ ID NO: 640389 - DNA, 52 bp, Artificial; identical to SEQ ID NO: 203599
  Synthetic oligonucleotide

SEQ ID NO: 640390 - DNA, 55 bp, Artificial; identical to SEQ ID NO: 193217
  Synthetic oligonucleotide

SEQ ID NO: 640391 - DNA, 55 bp, Artificial; identical to SEQ ID NO: 211144
  Synthetic oligonucleotide

SEQ ID NO: 640392 - DNA, 55 bp, Artificial; identical to SEQ ID NO: 239814
  Synthetic oligonucleotide

SEQ ID NO: 640393 - DNA, 54 bp, Artificial; identical to SEQ ID NO: 141211
  Synthetic oligonucleotide

SEQ ID NO: 640394 - DNA, 55 bp, Artificial; identical to SEQ ID NO: 253057
  Synthetic oligonucleotide

SEQ ID NO: 640395 - DNA, 55 bp, Artificial; identical to SEQ ID NO: 171503
  Synthetic oligonucleotide

SEQ ID NO: 640396 - DNA, 54 bp, Artificial; identical to SEQ ID NO: 180516
  Synthetic oligonucleotide

SEQ ID NO: 640397 - DNA, 55 bp, Artificial; identical to SEQ ID NO: 245086
  Synthetic oligonucleotide

SEQ ID NO: 640398 - DNA, 56 bp, Artificial; identical to SEQ ID NO: 180505
  Synthetic oligonucleotide

SEQ ID NO: 640399 - DNA, 53 bp, Artificial; identical to SEQ ID NO: 225168
  Synthetic oligonucleotide

SEQ ID NO: 640400 - DNA, 55 bp, Artificial; identical to SEQ ID NO: 247016
  Synthetic oligonucleotide

SEQ ID NO: 640401 - DNA, 55 bp, Artificial; identical to SEQ ID NO: 180433
  Synthetic oligonucleotide

SEQ ID NO: 640402 - DNA, 55 bp, Artificial; identical to SEQ ID NO: 221588
  Synthetic oligonucleotide

SEQ ID NO: 640403 - DNA, 55 bp, Artificial; identical to SEQ ID NO: 148191
  Synthetic oligonucleotide

SEQ ID NO: 640404 - DNA, 56 bp, Artificial; identical to SEQ ID NO: 244068
  Synthetic oligonucleotide

SEQ ID NO: 640405 - DNA, 55 bp, Artificial; identical to SEQ ID NO: 171502
  Synthetic oligonucleotide

SEQ ID NO: 640406 - DNA, 55 bp, Artificial; identical to SEQ ID NO: 161234
  Synthetic oligonucleotide

SEQ ID NO: 640407 - DNA, 55 bp, Artificial; identical to SEQ ID NO: 212629
  Synthetic oligonucleotide

SEQ ID NO: 640408 - DNA, 55 bp, Artificial; identical to SEQ ID NO: 174771
  Synthetic oligonucleotide

SEQ ID NO: 640409 - DNA, 53 bp, Artificial; identical to SEQ ID NO: 153598
  Synthetic oligonucleotide

SEQ ID NO: 640410 - DNA, 60 bp, Artificial; identical to SEQ ID NO: 224181
  Synthetic oligonucleotide

SEQ ID NO: 640411 - DNA, 55 bp, Artificial; identical to SEQ ID NO: 190459
  Synthetic oligonucleotide

SEQ ID NO: 640412 - DNA, 51 bp, Artificial; identical to SEQ ID NO: 198593
  Synthetic oligonucleotide

SEQ ID NO: 640413 - DNA, 55 bp, Artificial; identical to SEQ ID NO: 160087
  Synthetic oligonucleotide

SEQ ID NO: 640414 - DNA, 55 bp, Artificial; identical to SEQ ID NO: 148195
  Synthetic oligonucleotide

SEQ ID NO: 640415 - DNA, 55 bp, Artificial; identical to SEQ ID NO: 245084
  Synthetic oligonucleotide

SEQ ID NO: 640416 - DNA, 53 bp, Artificial; identical to SEQ ID NO: 148196
  Synthetic oligonucleotide

SEQ ID NO: 640417 - DNA, 52 bp, Artificial; identical to SEQ ID NO: 221727
  Synthetic oligonucleotide

SEQ ID NO: 640418 - DNA, 55 bp, Artificial; identical to SEQ ID NO: 148198
  Synthetic oligonucleotide

SEQ ID NO: 640419 - DNA, 55 bp, Artificial; identical to SEQ ID NO: 235134
  Synthetic oligonucleotide

SEQ ID NO: 640420 - DNA, 55 bp, Artificial; identical to SEQ ID NO: 245083
  Synthetic oligonucleotide

SEQ ID NO: 640421 - DNA, 53 bp, Artificial; identical to SEQ ID NO: 212977
  Synthetic oligonucleotide

SEQ ID NO: 640422 - DNA, 55 bp, Artificial; identical to SEQ ID NO: 201817
  Synthetic oligonucleotide

SEQ ID NO: 640423 - DNA, 53 bp, Artificial; identical to SEQ ID NO: 146426
  Synthetic oligonucleotide

SEQ ID NO: 640424 - DNA, 55 bp, Artificial; identical to SEQ ID NO: 189501
  Synthetic oligonucleotide

SEQ ID NO: 640425 - DNA, 55 bp, Artificial; identical to SEQ ID NO: 238427
  Synthetic oligonucleotide

SEQ ID NO: 640426 - DNA, 55 bp, Artificial; identical to SEQ ID NO: 151549
  Synthetic oligonucleotide

SEQ ID NO: 640427 - DNA, 55 bp, Artificial; identical to SEQ ID NO: 164217
  Synthetic oligonucleotide

SEQ ID NO: 640428 - DNA, 55 bp, Artificial; identical to SEQ ID NO: 148199
  Synthetic oligonucleotide

SEQ ID NO: 640429 - DNA, 54 bp, Artificial; identical to SEQ ID NO: 162271
  Synthetic oligonucleotide

SEQ ID NO: 640430 - DNA, 54 bp, Artificial; identical to SEQ ID NO: 199617
  Synthetic oligonucleotide

SEQ ID NO: 640431 - DNA, 55 bp, Artificial; identical to SEQ ID NO: 156549
  Synthetic oligonucleotide

SEQ ID NO: 640432 - DNA, 55 bp, Artificial; identical to SEQ ID NO: 156550
  Synthetic oligonucleotide

SEQ ID NO: 640433 - DNA, 55 bp, Artificial; identical to SEQ ID NO: 148163
  Synthetic oligonucleotide

SEQ ID NO: 640434 - DNA, 55 bp, Artificial; identical to SEQ ID NO: 187640
  Synthetic oligonucleotide

SEQ ID NO: 640435 - DNA, 55 bp, Artificial; identical to SEQ ID NO: 254403
  Synthetic oligonucleotide

SEQ ID NO: 640436 - DNA, 54 bp, Artificial; identical to SEQ ID NO: 242134
  Synthetic oligonucleotide

SEQ ID NO: 640437 - DNA, 55 bp, Artificial; identical to SEQ ID NO: 234840
  Synthetic oligonucleotide

SEQ ID NO: 640438 - DNA, 55 bp, Artificial; identical to SEQ ID NO: 151494
  Synthetic oligonucleotide

SEQ ID NO: 640439 - DNA, 55 bp, Artificial; identical to SEQ ID NO: 171499
  Synthetic oligonucleotide

SEQ ID NO: 640440 - DNA, 60 bp, Artificial; identical to SEQ ID NO: 204217
  Synthetic oligonucleotide

SEQ ID NO: 640441 - DNA, 55 bp, Artificial; identical to SEQ ID NO: 249252
  Synthetic oligonucleotide

SEQ ID NO: 640442 - DNA, 54 bp, Artificial; identical to SEQ ID NO: 171498
  Synthetic oligonucleotide

SEQ ID NO: 640443 - DNA, 55 bp, Artificial; identical to SEQ ID NO: 244117
  Synthetic oligonucleotide

SEQ ID NO: 640444 - DNA, 53 bp, Artificial; identical to SEQ ID NO: 236475
  Synthetic oligonucleotide

SEQ ID NO: 640445 - DNA, 55 bp, Artificial; identical to SEQ ID NO: 203434
  Synthetic oligonucleotide

SEQ ID NO: 640446 - DNA, 58 bp, Artificial; identical to SEQ ID NO: 242136
  Synthetic oligonucleotide

SEQ ID NO: 640447 - DNA, 51 bp, Artificial; identical to SEQ ID NO: 248654
  Synthetic oligonucleotide

SEQ ID NO: 640448 - DNA, 56 bp, Artificial; identical to SEQ ID NO: 142509
  Synthetic oligonucleotide

SEQ ID NO: 640449 - DNA, 55 bp, Artificial; identical to SEQ ID NO: 235132
  Synthetic oligonucleotide

SEQ ID NO: 640450 - DNA, 55 bp, Artificial; identical to SEQ ID NO: 257694
  Synthetic oligonucleotide

SEQ ID NO: 640451 - DNA, 54 bp, Artificial; identical to SEQ ID NO: 144749
  Synthetic oligonucleotide

SEQ ID NO: 640452 - DNA, 53 bp, Artificial; identical to SEQ ID NO: 223564
  Synthetic oligonucleotide

SEQ ID NO: 640453 - DNA, 55 bp, Artificial; identical to SEQ ID NO: 161013
  Synthetic oligonucleotide

SEQ ID NO: 640454 - DNA, 55 bp, Artificial; identical to SEQ ID NO: 156551
  Synthetic oligonucleotide

SEQ ID NO: 640455 - DNA, 58 bp, Artificial; identical to SEQ ID NO: 201145
  Synthetic oligonucleotide

SEQ ID NO: 640456 - DNA, 51 bp, Artificial; identical to SEQ ID NO: 248049
  Synthetic oligonucleotide

SEQ ID NO: 640457 - DNA, 54 bp, Artificial; identical to SEQ ID NO: 209377
  Synthetic oligonucleotide

SEQ ID NO: 640458 - DNA, 53 bp, Artificial; identical to SEQ ID NO: 257695
  Synthetic oligonucleotide

SEQ ID NO: 640459 - DNA, 55 bp, Artificial; identical to SEQ ID NO: 201283
  Synthetic oligonucleotide

SEQ ID NO: 640460 - DNA, 55 bp, Artificial; identical to SEQ ID NO: 198591
  Synthetic oligonucleotide

SEQ ID NO: 640461 - DNA, 58 bp, Artificial; identical to SEQ ID NO: 242138
  Synthetic oligonucleotide

SEQ ID NO: 640462 - DNA, 55 bp, Artificial; identical to SEQ ID NO: 253058
  Synthetic oligonucleotide

SEQ ID NO: 640463 - DNA, 55 bp, Artificial; identical to SEQ ID NO: 225542
  Synthetic oligonucleotide

SEQ ID NO: 640464 - DNA, 55 bp, Artificial; identical to SEQ ID NO: 151491
  Synthetic oligonucleotide

SEQ ID NO: 640465 - DNA, 55 bp, Artificial; identical to SEQ ID NO: 164218
  Synthetic oligonucleotide

SEQ ID NO: 640466 - DNA, 55 bp, Artificial; identical to SEQ ID NO: 217640
  Synthetic oligonucleotide

SEQ ID NO: 640467 - DNA, 50 bp, Artificial; identical to SEQ ID NO: 176541
  Synthetic oligonucleotide

SEQ ID NO: 640468 - DNA, 53 bp, Artificial; identical to SEQ ID NO: 147471
  Synthetic oligonucleotide

SEQ ID NO: 640469 - DNA, 55 bp, Artificial; identical to SEQ ID NO: 148168
  Synthetic oligonucleotide

SEQ ID NO: 640470 - DNA, 55 bp, Artificial; identical to SEQ ID NO: 142231
  Synthetic oligonucleotide

SEQ ID NO: 640471 - DNA, 50 bp, Artificial; identical to SEQ ID NO: 150391
  Synthetic oligonucleotide

SEQ ID NO: 640472 - DNA, 55 bp, Artificial; identical to SEQ ID NO: 209376
  Synthetic oligonucleotide

SEQ ID NO: 640473 - DNA, 55 bp, Artificial; identical to SEQ ID NO: 164199
  Synthetic oligonucleotide

SEQ ID NO: 640474 - DNA, 55 bp, Artificial; identical to SEQ ID NO: 239809
  Synthetic oligonucleotide

SEQ ID NO: 640475 - DNA, 55 bp, Artificial; identical to SEQ ID NO: 151486
  Synthetic oligonucleotide

SEQ ID NO: 640476 - DNA, 58 bp, Artificial; identical to SEQ ID NO: 212507
  Synthetic oligonucleotide

SEQ ID NO: 640477 - DNA, 55 bp, Artificial; identical to SEQ ID NO: 197345
  Synthetic oligonucleotide

SEQ ID NO: 640478 - DNA, 51 bp, Artificial; identical to SEQ ID NO: 162353
  Synthetic oligonucleotide

SEQ ID NO: 640479 - DNA, 55 bp, Artificial; identical to SEQ ID NO: 164198
  Synthetic oligonucleotide

SEQ ID NO: 640480 - DNA, 55 bp, Artificial; identical to SEQ ID NO: 147493
  Synthetic oligonucleotide

SEQ ID NO: 640481 - DNA, 55 bp, Artificial; identical to SEQ ID NO: 242139
  Synthetic oligonucleotide

SEQ ID NO: 640482 - DNA, 55 bp, Artificial; identical to SEQ ID NO: 234841
  Synthetic oligonucleotide

SEQ ID NO: 640483 - DNA, 55 bp, Artificial; identical to SEQ ID NO: 198590
  Synthetic oligonucleotide

SEQ ID NO: 640484 - DNA, 55 bp, Artificial; identical to SEQ ID NO: 180422
  Synthetic oligonucleotide

SEQ ID NO: 640485 - DNA, 55 bp, Artificial; identical to SEQ ID NO: 220614
  Synthetic oligonucleotide

SEQ ID NO: 640486 - DNA, 50 bp, Artificial; identical to SEQ ID NO: 241260
  Synthetic oligonucleotide

SEQ ID NO: 640487 - DNA, 55 bp, Artificial; identical to SEQ ID NO: 180421
  Synthetic oligonucleotide

SEQ ID NO: 640488 - DNA, 55 bp, Artificial; identical to SEQ ID NO: 151484
  Synthetic oligonucleotide

SEQ ID NO: 640489 - DNA, 55 bp, Artificial; identical to SEQ ID NO: 218288
  Synthetic oligonucleotide

SEQ ID NO: 640490 - DNA, 55 bp, Artificial; identical to SEQ ID NO: 238425
  Synthetic oligonucleotide

SEQ ID NO: 640491 - DNA, 55 bp, Artificial; identical to SEQ ID NO: 239807
  Synthetic oligonucleotide

SEQ ID NO: 640492 - DNA, 55 bp, Artificial; identical to SEQ ID NO: 151476
  Synthetic oligonucleotide

SEQ ID NO: 640493 - DNA, 59 bp, Artificial; identical to SEQ ID NO: 168161
  Synthetic oligonucleotide

SEQ ID NO: 640494 - DNA, 52 bp, Artificial; identical to SEQ ID NO: 250006
  Synthetic oligonucleotide

SEQ ID NO: 640495 - DNA, 55 bp, Artificial; identical to SEQ ID NO: 248892
  Synthetic oligonucleotide

SEQ ID NO: 640496 - DNA, 55 bp, Artificial; identical to SEQ ID NO: 142234
  Synthetic oligonucleotide

SEQ ID NO: 640497 - DNA, 58 bp, Artificial; identical to SEQ ID NO: 181038
  Synthetic oligonucleotide

SEQ ID NO: 640498 - DNA, 55 bp, Artificial; identical to SEQ ID NO: 180420
  Synthetic oligonucleotide

SEQ ID NO: 640499 - DNA, 55 bp, Artificial; identical to SEQ ID NO: 171496
  Synthetic oligonucleotide

SEQ ID NO: 640500 - DNA, 57 bp, Artificial; identical to SEQ ID NO: 159973
  Synthetic oligonucleotide

SEQ ID NO: 640501 - DNA, 55 bp, Artificial; identical to SEQ ID NO: 202113
  Synthetic oligonucleotide

SEQ ID NO: 640502 - DNA, 55 bp, Artificial; identical to SEQ ID NO: 253060
  Synthetic oligonucleotide

SEQ ID NO: 640503 - DNA, 55 bp, Artificial; identical to SEQ ID NO: 164195
  Synthetic oligonucleotide

SEQ ID NO: 640504 - DNA, 55 bp, Artificial; identical to SEQ ID NO: 164194
  Synthetic oligonucleotide

SEQ ID NO: 640505 - DNA, 55 bp, Artificial; identical to SEQ ID NO: 144759
  Synthetic oligonucleotide

SEQ ID NO: 640506 - DNA, 55 bp, Artificial; identical to SEQ ID NO: 257123
  Synthetic oligonucleotide

SEQ ID NO: 640507 - DNA, 55 bp, Artificial; identical to SEQ ID NO: 254402
  Synthetic oligonucleotide

SEQ ID NO: 640508 - DNA, 54 bp, Artificial; identical to SEQ ID NO: 148169
  Synthetic oligonucleotide

SEQ ID NO: 640509 - DNA, 60 bp, Artificial; identical to SEQ ID NO: 233679
  Synthetic oligonucleotide

SEQ ID NO: 640510 - DNA, 55 bp, Artificial; identical to SEQ ID NO: 142845
  Synthetic oligonucleotide

SEQ ID NO: 640511 - DNA, 56 bp, Artificial; identical to SEQ ID NO: 187409
  Synthetic oligonucleotide

SEQ ID NO: 640512 - DNA, 54 bp, Artificial; identical to SEQ ID NO: 155355
  Synthetic oligonucleotide

SEQ ID NO: 640513 - DNA, 55 bp, Artificial; identical to SEQ ID NO: 265946
  Synthetic oligonucleotide

SEQ ID NO: 640514 - DNA, 53 bp, Artificial; identical to SEQ ID NO: 153605
  Synthetic oligonucleotide

SEQ ID NO: 640515 - DNA, 55 bp, Artificial; identical to SEQ ID NO: 205454
  Synthetic oligonucleotide

SEQ ID NO: 640516 - DNA, 55 bp, Artificial; identical to SEQ ID NO: 171492
  Synthetic oligonucleotide

SEQ ID NO: 640517 - DNA, 54 bp, Artificial; identical to SEQ ID NO: 147100
  Synthetic oligonucleotide

SEQ ID NO: 640518 - DNA, 51 bp, Artificial; identical to SEQ ID NO: 249680
  Synthetic oligonucleotide

SEQ ID NO: 640519 - DNA, 55 bp, Artificial; identical to SEQ ID NO: 154439
  Synthetic oligonucleotide

SEQ ID NO: 640520 - DNA, 53 bp, Artificial; identical to SEQ ID NO: 220615
  Synthetic oligonucleotide

SEQ ID NO: 640521 - DNA, 55 bp, Artificial; identical to SEQ ID NO: 187648
  Synthetic oligonucleotide

SEQ ID NO: 640522 - DNA, 55 bp, Artificial; identical to SEQ ID NO: 218287
  Synthetic oligonucleotide

SEQ ID NO: 640523 - DNA, 55 bp, Artificial; identical to SEQ ID NO: 198588
  Synthetic oligonucleotide

SEQ ID NO: 640524 - DNA, 55 bp, Artificial; identical to SEQ ID NO: 153075
  Synthetic oligonucleotide

SEQ ID NO: 640525 - DNA, 55 bp, Artificial; identical to SEQ ID NO: 144692
  Synthetic oligonucleotide

SEQ ID NO: 640526 - DNA, 55 bp, Artificial; identical to SEQ ID NO: 151512
  Synthetic oligonucleotide

SEQ ID NO: 640527 - DNA, 58 bp, Artificial; identical to SEQ ID NO: 191682
  Synthetic oligonucleotide

SEQ ID NO: 640528 - DNA, 55 bp, Artificial; identical to SEQ ID NO: 234842
  Synthetic oligonucleotide

SEQ ID NO: 640529 - DNA, 53 bp, Artificial; identical to SEQ ID NO: 201366
  Synthetic oligonucleotide

SEQ ID NO: 640530 - DNA, 55 bp, Artificial; identical to SEQ ID NO: 239803
  Synthetic oligonucleotide

SEQ ID NO: 640531 - DNA, 55 bp, Artificial; identical to SEQ ID NO: 180458
  Synthetic oligonucleotide

SEQ ID NO: 640532 - DNA, 55 bp, Artificial; identical to SEQ ID NO: 180457
  Synthetic oligonucleotide

SEQ ID NO: 640533 - DNA, 57 bp, Artificial; identical to SEQ ID NO: 242145
  Synthetic oligonucleotide

SEQ ID NO: 640534 - DNA, 57 bp, Artificial; identical to SEQ ID NO: 180960
  Synthetic oligonucleotide

SEQ ID NO: 640535 - DNA, 55 bp, Artificial; identical to SEQ ID NO: 156396
  Synthetic oligonucleotide

SEQ ID NO: 640536 - DNA, 52 bp, Artificial; identical to SEQ ID NO: 240879
  Synthetic oligonucleotide

SEQ ID NO: 640537 - DNA, 55 bp, Artificial; identical to SEQ ID NO: 238423
  Synthetic oligonucleotide

SEQ ID NO: 640538 - DNA, 58 bp, Artificial; identical to SEQ ID NO: 141691
  Synthetic oligonucleotide

SEQ ID NO: 640539 - DNA, 55 bp, Artificial; identical to SEQ ID NO: 238463
  Synthetic oligonucleotide

SEQ ID NO: 640540 - DNA, 55 bp, Artificial; identical to SEQ ID NO: 217642
  Synthetic oligonucleotide

SEQ ID NO: 640541 - DNA, 56 bp, Artificial; identical to SEQ ID NO: 194323
  Synthetic oligonucleotide

SEQ ID NO: 640542 - DNA, 55 bp, Artificial; identical to SEQ ID NO: 164193
  Synthetic oligonucleotide

SEQ ID NO: 640543 - DNA, 55 bp, Artificial; identical to SEQ ID NO: 234846
  Synthetic oligonucleotide

SEQ ID NO: 640544 - DNA, 55 bp, Artificial; identical to SEQ ID NO: 254401
  Synthetic oligonucleotide

SEQ ID NO: 640545 - DNA, 55 bp, Artificial; identical to SEQ ID NO: 207275
  Synthetic oligonucleotide

SEQ ID NO: 640546 - DNA, 55 bp, Artificial; identical to SEQ ID NO: 245073
  Synthetic oligonucleotide

SEQ ID NO: 640547 - DNA, 55 bp, Artificial; identical to SEQ ID NO: 197344
  Synthetic oligonucleotide

SEQ ID NO: 640548 - DNA, 55 bp, Artificial; identical to SEQ ID NO: 180454
  Synthetic oligonucleotide

SEQ ID NO: 640549 - DNA, 55 bp, Artificial; identical to SEQ ID NO: 166880
  Synthetic oligonucleotide

SEQ ID NO: 640550 - DNA, 59 bp, Artificial; identical to SEQ ID NO: 192223
  Synthetic oligonucleotide

SEQ ID NO: 640551 - DNA, 55 bp, Artificial; identical to SEQ ID NO: 142235
  Synthetic oligonucleotide

SEQ ID NO: 640552 - DNA, 55 bp, Artificial; identical to SEQ ID NO: 198587
  Synthetic oligonucleotide

SEQ ID NO: 640553 - DNA, 57 bp, Artificial; identical to SEQ ID NO: 180927
  Synthetic oligonucleotide

SEQ ID NO: 640554 - DNA, 55 bp, Artificial; identical to SEQ ID NO: 148174
  Synthetic oligonucleotide

SEQ ID NO: 640555 - DNA, 55 bp, Artificial; identical to SEQ ID NO: 189054
  Synthetic oligonucleotide

SEQ ID NO: 640556 - DNA, 55 bp, Artificial; identical to SEQ ID NO: 224488
  Synthetic oligonucleotide

SEQ ID NO: 640557 - DNA, 50 bp, Artificial; identical to SEQ ID NO: 242146
  Synthetic oligonucleotide

SEQ ID NO: 640558 - DNA, 55 bp, Artificial; identical to SEQ ID NO: 168550
  Synthetic oligonucleotide

SEQ ID NO: 640559 - DNA, 60 bp, Artificial; identical to SEQ ID NO: 187205
  Synthetic oligonucleotide

SEQ ID NO: 640560 - DNA, 55 bp, Artificial; identical to SEQ ID NO: 215568
  Synthetic oligonucleotide

SEQ ID NO: 640561 - DNA, 50 bp, Artificial; identical to SEQ ID NO: 200325
  Synthetic oligonucleotide

SEQ ID NO: 640562 - DNA, 55 bp, Artificial; identical to SEQ ID NO: 156399
  Synthetic oligonucleotide

SEQ ID NO: 640563 - DNA, 55 bp, Artificial; identical to SEQ ID NO: 146611
  Synthetic oligonucleotide

SEQ ID NO: 640564 - DNA, 55 bp, Artificial; identical to SEQ ID NO: 238460
  Synthetic oligonucleotide

SEQ ID NO: 640565 - DNA, 55 bp, Artificial; identical to SEQ ID NO: 253061
  Synthetic oligonucleotide

SEQ ID NO: 640566 - DNA, 60 bp, Artificial; identical to SEQ ID NO: 208418
  Synthetic oligonucleotide

SEQ ID NO: 640567 - DNA, 55 bp, Artificial; identical to SEQ ID NO: 180452
  Synthetic oligonucleotide

SEQ ID NO: 640568 - DNA, 55 bp, Artificial; identical to SEQ ID NO: 168551
  Synthetic oligonucleotide

SEQ ID NO: 640569 - DNA, 55 bp, Artificial; identical to SEQ ID NO: 156400
  Synthetic oligonucleotide

SEQ ID NO: 640570 - DNA, 53 bp, Artificial; identical to SEQ ID NO: 185484
  Synthetic oligonucleotide

SEQ ID NO: 640571 - DNA, 55 bp, Artificial; identical to SEQ ID NO: 164192
  Synthetic oligonucleotide

SEQ ID NO: 640572 - DNA, 55 bp, Artificial; identical to SEQ ID NO: 164191
  Synthetic oligonucleotide

SEQ ID NO: 640573 - DNA, 53 bp, Artificial; identical to SEQ ID NO: 265629
  Synthetic oligonucleotide

SEQ ID NO: 640574 - DNA, 56 bp, Artificial; identical to SEQ ID NO: 152946
  Synthetic oligonucleotide

SEQ ID NO: 640575 - DNA, 54 bp, Artificial; identical to SEQ ID NO: 174337
  Synthetic oligonucleotide

SEQ ID NO: 640576 - DNA, 55 bp, Artificial; identical to SEQ ID NO: 194657
  Synthetic oligonucleotide

SEQ ID NO: 640577 - DNA, 55 bp, Artificial; identical to SEQ ID NO: 144803
  Synthetic oligonucleotide

SEQ ID NO: 640578 - DNA, 51 bp, Artificial; identical to SEQ ID NO: 162352
  Synthetic oligonucleotide

SEQ ID NO: 640579 - DNA, 55 bp, Artificial; identical to SEQ ID NO: 156401
  Synthetic oligonucleotide

SEQ ID NO: 640580 - DNA, 55 bp, Artificial; identical to SEQ ID NO: 254398
  Synthetic oligonucleotide

SEQ ID NO: 640581 - DNA, 55 bp, Artificial; identical to SEQ ID NO: 190488
  Synthetic oligonucleotide

SEQ ID NO: 640582 - DNA, 53 bp, Artificial; identical to SEQ ID NO: 151624
  Synthetic oligonucleotide

SEQ ID NO: 640583 - DNA, 55 bp, Artificial; identical to SEQ ID NO: 244107
  Synthetic oligonucleotide

SEQ ID NO: 640584 - DNA, 55 bp, Artificial; identical to SEQ ID NO: 238456
  Synthetic oligonucleotide

SEQ ID NO: 640585 - DNA, 55 bp, Artificial; identical to SEQ ID NO: 174773
  Synthetic oligonucleotide

SEQ ID NO: 640586 - DNA, 55 bp, Artificial; identical to SEQ ID NO: 257698
  Synthetic oligonucleotide

SEQ ID NO: 640587 - DNA, 55 bp, Artificial; identical to SEQ ID NO: 153076
  Synthetic oligonucleotide

SEQ ID NO: 640588 - DNA, 55 bp, Artificial; identical to SEQ ID NO: 248833
  Synthetic oligonucleotide

SEQ ID NO: 640589 - DNA, 55 bp, Artificial; identical to SEQ ID NO: 180445
  Synthetic oligonucleotide

SEQ ID NO: 640590 - DNA, 55 bp, Artificial; identical to SEQ ID NO: 180444
  Synthetic oligonucleotide

SEQ ID NO: 640591 - DNA, 55 bp, Artificial; identical to SEQ ID NO: 161172
  Synthetic oligonucleotide

SEQ ID NO: 640592 - DNA, 55 bp, Artificial; identical to SEQ ID NO: 155357
  Synthetic oligonucleotide

SEQ ID NO: 640593 - DNA, 55 bp, Artificial; identical to SEQ ID NO: 207279
  Synthetic oligonucleotide

SEQ ID NO: 640594 - DNA, 58 bp, Artificial; identical to SEQ ID NO: 141692
  Synthetic oligonucleotide

SEQ ID NO: 640595 - DNA, 55 bp, Artificial; identical to SEQ ID NO: 153079
  Synthetic oligonucleotide

SEQ ID NO: 640596 - DNA, 55 bp, Artificial; identical to SEQ ID NO: 164189
  Synthetic oligonucleotide

SEQ ID NO: 640597 - DNA, 55 bp, Artificial; identical to SEQ ID NO: 162104
  Synthetic oligonucleotide

SEQ ID NO: 640598 - DNA, 55 bp, Artificial; identical to SEQ ID NO: 166882
  Synthetic oligonucleotide

SEQ ID NO: 640599 - DNA, 55 bp, Artificial; identical to SEQ ID NO: 205455
  Synthetic oligonucleotide

SEQ ID NO: 640600 - DNA, 55 bp, Artificial; identical to SEQ ID NO: 207280
  Synthetic oligonucleotide

SEQ ID NO: 640601 - DNA, 58 bp, Artificial; identical to SEQ ID NO: 247014
  Synthetic oligonucleotide

SEQ ID NO: 640602 - DNA, 55 bp, Artificial; identical to SEQ ID NO: 208468
  Synthetic oligonucleotide

SEQ ID NO: 640603 - DNA, 55 bp, Artificial; identical to SEQ ID NO: 254395
  Synthetic oligonucleotide

SEQ ID NO: 640604 - DNA, 54 bp, Artificial; identical to SEQ ID NO: 254394
  Synthetic oligonucleotide

SEQ ID NO: 640605 - DNA, 55 bp, Artificial; identical to SEQ ID NO: 148176
  Synthetic oligonucleotide

SEQ ID NO: 640606 - DNA, 55 bp, Artificial; identical to SEQ ID NO: 211162
  Synthetic oligonucleotide

SEQ ID NO: 640607 - DNA, 55 bp, Artificial; identical to SEQ ID NO: 254393
  Synthetic oligonucleotide

SEQ ID NO: 640608 - DNA, 50 bp, Artificial; identical to SEQ ID NO: 258361
  Synthetic oligonucleotide

SEQ ID NO: 640609 - DNA, 60 bp, Artificial; identical to SEQ ID NO: 223739
  Synthetic oligonucleotide

SEQ ID NO: 640610 - DNA, 55 bp, Artificial; identical to SEQ ID NO: 221592
  Synthetic oligonucleotide

SEQ ID NO: 640611 - DNA, 52 bp, Artificial; identical to SEQ ID NO: 154610
  Synthetic oligonucleotide

SEQ ID NO: 640612 - DNA, 60 bp, Artificial; identical to SEQ ID NO: 152940
  Synthetic oligonucleotide

SEQ ID NO: 640613 - DNA, 55 bp, Artificial; identical to SEQ ID NO: 171438
  Synthetic oligonucleotide

SEQ ID NO: 640614 - DNA, 55 bp, Artificial; identical to SEQ ID NO: 152938
  Synthetic oligonucleotide

SEQ ID NO: 640615 - DNA, 60 bp, Artificial; identical to SEQ ID NO: 253408
  Synthetic oligonucleotide

SEQ ID NO: 640616 - DNA, 55 bp, Artificial; identical to SEQ ID NO: 254392
  Synthetic oligonucleotide

SEQ ID NO: 640617 - DNA, 55 bp, Artificial; identical to SEQ ID NO: 171436
  Synthetic oligonucleotide

SEQ ID NO: 640618 - DNA, 51 bp, Artificial; identical to SEQ ID NO: 141693
  Synthetic oligonucleotide

SEQ ID NO: 640619 - DNA, 55 bp, Artificial; identical to SEQ ID NO: 156405
  Synthetic oligonucleotide

SEQ ID NO: 640620 - DNA, 55 bp, Artificial; identical to SEQ ID NO: 153080
  Synthetic oligonucleotide

SEQ ID NO: 640621 - DNA, 55 bp, Artificial; identical to SEQ ID NO: 198641
  Synthetic oligonucleotide

SEQ ID NO: 640622 - DNA, 53 bp, Artificial; identical to SEQ ID NO: 247842
  Synthetic oligonucleotide

SEQ ID NO: 640623 - DNA, 55 bp, Artificial; identical to SEQ ID NO: 190485
  Synthetic oligonucleotide

SEQ ID NO: 640624 - DNA, 55 bp, Artificial; identical to SEQ ID NO: 224531
  Synthetic oligonucleotide

SEQ ID NO: 640625 - DNA, 55 bp, Artificial; identical to SEQ ID NO: 254447
  Synthetic oligonucleotide

SEQ ID NO: 640626 - DNA, 55 bp, Artificial; identical to SEQ ID NO: 218280
  Synthetic oligonucleotide

SEQ ID NO: 640627 - DNA, 52 bp, Artificial; identical to SEQ ID NO: 211161
  Synthetic oligonucleotide

SEQ ID NO: 640628 - DNA, 55 bp, Artificial; identical to SEQ ID NO: 198640
  Synthetic oligonucleotide

SEQ ID NO: 640629 - DNA, 55 bp, Artificial; identical to SEQ ID NO: 211153
  Synthetic oligonucleotide

SEQ ID NO: 640630 - DNA, 55 bp, Artificial; identical to SEQ ID NO: 221593
  Synthetic oligonucleotide

SEQ ID NO: 640631 - DNA, 52 bp, Artificial; identical to SEQ ID NO: 157553
  Synthetic oligonucleotide

SEQ ID NO: 640632 - DNA, 59 bp, Artificial; identical to SEQ ID NO: 144697
  Synthetic oligonucleotide

SEQ ID NO: 640633 - DNA, 55 bp, Artificial; identical to SEQ ID NO: 244104
  Synthetic oligonucleotide

SEQ ID NO: 640634 - DNA, 54 bp, Artificial; identical to SEQ ID NO: 152280
  Synthetic oligonucleotide

SEQ ID NO: 640635 - DNA, 53 bp, Artificial; identical to SEQ ID NO: 155533
  Synthetic oligonucleotide

SEQ ID NO: 640636 - DNA, 55 bp, Artificial; identical to SEQ ID NO: 198638
  Synthetic oligonucleotide

SEQ ID NO: 640637 - DNA, 53 bp, Artificial; identical to SEQ ID NO: 238455
  Synthetic oligonucleotide

SEQ ID NO: 640638 - DNA, 52 bp, Artificial; identical to SEQ ID NO: 247911
  Synthetic oligonucleotide

SEQ ID NO: 640639 - DNA, 55 bp, Artificial; identical to SEQ ID NO: 244103
  Synthetic oligonucleotide

SEQ ID NO: 640640 - DNA, 55 bp, Artificial; identical to SEQ ID NO: 252701
  Synthetic oligonucleotide

SEQ ID NO: 640641 - DNA, 55 bp, Artificial; identical to SEQ ID NO: 160083
  Synthetic oligonucleotide

SEQ ID NO: 640642 - DNA, 55 bp, Artificial; identical to SEQ ID NO: 174774
  Synthetic oligonucleotide

SEQ ID NO: 640643 - DNA, 60 bp, Artificial; identical to SEQ ID NO: 180849
  Synthetic oligonucleotide

SEQ ID NO: 640644 - DNA, 55 bp, Artificial; identical to SEQ ID NO: 180388
  Synthetic oligonucleotide

SEQ ID NO: 640645 - DNA, 55 bp, Artificial; identical to SEQ ID NO: 224518
  Synthetic oligonucleotide

SEQ ID NO: 640646 - DNA, 53 bp, Artificial; identical to SEQ ID NO: 148178
  Synthetic oligonucleotide

SEQ ID NO: 640647 - DNA, 55 bp, Artificial; identical to SEQ ID NO: 191007
  Synthetic oligonucleotide

SEQ ID NO: 640648 - DNA, 55 bp, Artificial; identical to SEQ ID NO: 180387
  Synthetic oligonucleotide

SEQ ID NO: 640649 - DNA, 54 bp, Artificial; identical to SEQ ID NO: 180827
  Synthetic oligonucleotide

SEQ ID NO: 640650 - DNA, 55 bp, Artificial; identical to SEQ ID NO: 207239
  Synthetic oligonucleotide

SEQ ID NO: 640651 - DNA, 52 bp, Artificial; identical to SEQ ID NO: 161337
  Synthetic oligonucleotide

SEQ ID NO: 640652 - DNA, 55 bp, Artificial; identical to SEQ ID NO: 180385
  Synthetic oligonucleotide

SEQ ID NO: 640653 - DNA, 55 bp, Artificial; identical to SEQ ID NO: 180384
  Synthetic oligonucleotide

SEQ ID NO: 640654 - DNA, 55 bp, Artificial; identical to SEQ ID NO: 262779
  Synthetic oligonucleotide

SEQ ID NO: 640655 - DNA, 49 bp, Artificial; identical to SEQ ID NO: 209053
  Synthetic oligonucleotide

SEQ ID NO: 640656 - DNA, 55 bp, Artificial; identical to SEQ ID NO: 160082
  Synthetic oligonucleotide

SEQ ID NO: 640657 - DNA, 55 bp, Artificial; identical to SEQ ID NO: 148179
  Synthetic oligonucleotide

SEQ ID NO: 640658 - DNA, 55 bp, Artificial; identical to SEQ ID NO: 244761
  Synthetic oligonucleotide

SEQ ID NO: 640659 - DNA, 56 bp, Artificial; identical to SEQ ID NO: 179374
  Synthetic oligonucleotide

SEQ ID NO: 640660 - DNA, 55 bp, Artificial; identical to SEQ ID NO: 254450
  Synthetic oligonucleotide

SEQ ID NO: 640661 - DNA, 55 bp, Artificial; identical to SEQ ID NO: 168554
  Synthetic oligonucleotide

SEQ ID NO: 640662 - DNA, 55 bp, Artificial; identical to SEQ ID NO: 197881
  Synthetic oligonucleotide

SEQ ID NO: 640663 - DNA, 55 bp, Artificial; identical to SEQ ID NO: 174775
  Synthetic oligonucleotide

SEQ ID NO: 640664 - DNA, 52 bp, Artificial; identical to SEQ ID NO: 145016
  Synthetic oligonucleotide

SEQ ID NO: 640665 - DNA, 55 bp, Artificial; identical to SEQ ID NO: 238453
  Synthetic oligonucleotide

SEQ ID NO: 640666 - DNA, 55 bp, Artificial; identical to SEQ ID NO: 180382
  Synthetic oligonucleotide

SEQ ID NO: 640667 - DNA, 55 bp, Artificial; identical to SEQ ID NO: 190483
  Synthetic oligonucleotide

SEQ ID NO: 640668 - DNA, 56 bp, Artificial; identical to SEQ ID NO: 164645
  Synthetic oligonucleotide

SEQ ID NO: 640669 - DNA, 52 bp, Artificial; identical to SEQ ID NO: 186226
  Synthetic oligonucleotide

SEQ ID NO: 640670 - DNA, 55 bp, Artificial; identical to SEQ ID NO: 253063
  Synthetic oligonucleotide

SEQ ID NO: 640671 - DNA, 54 bp, Artificial; identical to SEQ ID NO: 247744
  Synthetic oligonucleotide

SEQ ID NO: 640672 - DNA, 55 bp, Artificial; identical to SEQ ID NO: 154443
  Synthetic oligonucleotide

SEQ ID NO: 640673 - DNA, 54 bp, Artificial; identical to SEQ ID NO: 174285
  Synthetic oligonucleotide

SEQ ID NO: 640674 - DNA, 58 bp, Artificial; identical to SEQ ID NO: 209052
  Synthetic oligonucleotide

SEQ ID NO: 640675 - DNA, 54 bp, Artificial; identical to SEQ ID NO: 250004
  Synthetic oligonucleotide

SEQ ID NO: 640676 - DNA, 55 bp, Artificial; identical to SEQ ID NO: 244760
  Synthetic oligonucleotide

SEQ ID NO: 640677 - DNA, 55 bp, Artificial; identical to SEQ ID NO: 155322
  Synthetic oligonucleotide

SEQ ID NO: 640678 - DNA, 55 bp, Artificial; identical to SEQ ID NO: 248835
  Synthetic oligonucleotide

SEQ ID NO: 640679 - DNA, 55 bp, Artificial; identical to SEQ ID NO: 180378
  Synthetic oligonucleotide

SEQ ID NO: 640680 - DNA, 55 bp, Artificial; identical to SEQ ID NO: 257699
  Synthetic oligonucleotide

SEQ ID NO: 640681 - DNA, 55 bp, Artificial; identical to SEQ ID NO: 254452
  Synthetic oligonucleotide

SEQ ID NO: 640682 - DNA, 55 bp, Artificial; identical to SEQ ID NO: 224517
  Synthetic oligonucleotide

SEQ ID NO: 640683 - DNA, 59 bp, Artificial; identical to SEQ ID NO: 180794
  Synthetic oligonucleotide

SEQ ID NO: 640684 - DNA, 55 bp, Artificial; identical to SEQ ID NO: 180376
  Synthetic oligonucleotide

SEQ ID NO: 640685 - DNA, 58 bp, Artificial; identical to SEQ ID NO: 180772
  Synthetic oligonucleotide

SEQ ID NO: 640686 - DNA, 53 bp, Artificial; identical to SEQ ID NO: 191188
  Synthetic oligonucleotide

SEQ ID NO: 640687 - DNA, 55 bp, Artificial; identical to SEQ ID NO: 212635
  Synthetic oligonucleotide

SEQ ID NO: 640688 - DNA, 53 bp, Artificial; identical to SEQ ID NO: 212982
  Synthetic oligonucleotide

SEQ ID NO: 640689 - DNA, 55 bp, Artificial; identical to SEQ ID NO: 194660
  Synthetic oligonucleotide

SEQ ID NO: 640690 - DNA, 55 bp, Artificial; identical to SEQ ID NO: 180374
  Synthetic oligonucleotide

SEQ ID NO: 640691 - DNA, 55 bp, Artificial; identical to SEQ ID NO: 209371
  Synthetic oligonucleotide

SEQ ID NO: 640692 - DNA, 55 bp, Artificial; identical to SEQ ID NO: 254454
  Synthetic oligonucleotide

SEQ ID NO: 640693 - DNA, 55 bp, Artificial; identical to SEQ ID NO: 224758
  Synthetic oligonucleotide

SEQ ID NO: 640694 - DNA, 55 bp, Artificial; identical to SEQ ID NO: 198633
  Synthetic oligonucleotide

SEQ ID NO: 640695 - DNA, 52 bp, Artificial; identical to SEQ ID NO: 199567
  Synthetic oligonucleotide

SEQ ID NO: 640696 - DNA, 60 bp, Artificial; identical to SEQ ID NO: 247755
  Synthetic oligonucleotide

SEQ ID NO: 640697 - DNA, 55 bp, Artificial; identical to SEQ ID NO: 205457
  Synthetic oligonucleotide

SEQ ID NO: 640698 - DNA, 60 bp, Artificial; identical to SEQ ID NO: 237825
  Synthetic oligonucleotide

SEQ ID NO: 640699 - DNA, 53 bp, Artificial; identical to SEQ ID NO: 180412
  Synthetic oligonucleotide

SEQ ID NO: 640700 - DNA, 55 bp, Artificial; identical to SEQ ID NO: 168495
  Synthetic oligonucleotide

SEQ ID NO: 640701 - DNA, 57 bp, Artificial; identical to SEQ ID NO: 141694
  Synthetic oligonucleotide

SEQ ID NO: 640702 - DNA, 56 bp, Artificial; identical to SEQ ID NO: 244061
  Synthetic oligonucleotide

SEQ ID NO: 640703 - DNA, 53 bp, Artificial; identical to SEQ ID NO: 216678
  Synthetic oligonucleotide

SEQ ID NO: 640704 - DNA, 51 bp, Artificial; identical to SEQ ID NO: 248024
  Synthetic oligonucleotide

SEQ ID NO: 640705 - DNA, 55 bp, Artificial; identical to SEQ ID NO: 180410
  Synthetic oligonucleotide

SEQ ID NO: 640706 - DNA, 55 bp, Artificial; identical to SEQ ID NO: 203430
  Synthetic oligonucleotide

SEQ ID NO: 640707 - DNA, 57 bp, Artificial; identical to SEQ ID NO: 182426
  Synthetic oligonucleotide

SEQ ID NO: 640708 - DNA, 54 bp, Artificial; identical to SEQ ID NO: 192007
  Synthetic oligonucleotide

SEQ ID NO: 640709 - DNA, 55 bp, Artificial; identical to SEQ ID NO: 155326
  Synthetic oligonucleotide

SEQ ID NO: 640710 - DNA, 55 bp, Artificial; identical to SEQ ID NO: 180409
  Synthetic oligonucleotide

SEQ ID NO: 640711 - DNA, 55 bp, Artificial; identical to SEQ ID NO: 180407
  Synthetic oligonucleotide

SEQ ID NO: 640712 - DNA, 55 bp, Artificial; identical to SEQ ID NO: 164186
  Synthetic oligonucleotide

SEQ ID NO: 640713 - DNA, 55 bp, Artificial; identical to SEQ ID NO: 151612
  Synthetic oligonucleotide

SEQ ID NO: 640714 - DNA, 55 bp, Artificial; identical to SEQ ID NO: 248837
  Synthetic oligonucleotide

SEQ ID NO: 640715 - DNA, 56 bp, Artificial; identical to SEQ ID NO: 201707
  Synthetic oligonucleotide

SEQ ID NO: 640716 - DNA, 55 bp, Artificial; identical to SEQ ID NO: 156413
  Synthetic oligonucleotide

SEQ ID NO: 640717 - DNA, 52 bp, Artificial; identical to SEQ ID NO: 167111
  Synthetic oligonucleotide

SEQ ID NO: 640718 - DNA, 51 bp, Artificial; identical to SEQ ID NO: 147774
  Synthetic oligonucleotide

SEQ ID NO: 640719 - DNA, 55 bp, Artificial; identical to SEQ ID NO: 205459
  Synthetic oligonucleotide

SEQ ID NO: 640720 - DNA, 55 bp, Artificial; identical to SEQ ID NO: 236464
  Synthetic oligonucleotide

SEQ ID NO: 640721 - DNA, 55 bp, Artificial; identical to SEQ ID NO: 234089
  Synthetic oligonucleotide

SEQ ID NO: 640722 - DNA, 55 bp, Artificial; identical to SEQ ID NO: 266119
  Synthetic oligonucleotide

SEQ ID NO: 640723 - DNA, 55 bp, Artificial; identical to SEQ ID NO: 180403
  Synthetic oligonucleotide

SEQ ID NO: 640724 - DNA, 51 bp, Artificial; identical to SEQ ID NO: 249681
  Synthetic oligonucleotide

SEQ ID NO: 640725 - DNA, 53 bp, Artificial; identical to SEQ ID NO: 258092
  Synthetic oligonucleotide

SEQ ID NO: 640726 - DNA, 55 bp, Artificial; identical to SEQ ID NO: 143704
  Synthetic oligonucleotide

SEQ ID NO: 640727 - DNA, 54 bp, Artificial; identical to SEQ ID NO: 157152
  Synthetic oligonucleotide

SEQ ID NO: 640728 - DNA, 53 bp, Artificial; identical to SEQ ID NO: 190726
  Synthetic oligonucleotide

SEQ ID NO: 640729 - DNA, 55 bp, Artificial; identical to SEQ ID NO: 147775
  Synthetic oligonucleotide

SEQ ID NO: 640730 - DNA, 57 bp, Artificial; identical to SEQ ID NO: 170873
  Synthetic oligonucleotide

SEQ ID NO: 640731 - DNA, 52 bp, Artificial; identical to SEQ ID NO: 161336
  Synthetic oligonucleotide

SEQ ID NO: 640732 - DNA, 55 bp, Artificial; identical to SEQ ID NO: 248838
  Synthetic oligonucleotide

SEQ ID NO: 640733 - DNA, 54 bp, Artificial; identical to SEQ ID NO: 191837
  Synthetic oligonucleotide

SEQ ID NO: 640734 - DNA, 55 bp, Artificial; identical to SEQ ID NO: 198632
  Synthetic oligonucleotide

SEQ ID NO: 640735 - DNA, 48 bp, Artificial; identical to SEQ ID NO: 196971
  Synthetic oligonucleotide

SEQ ID NO: 640736 - DNA, 51 bp, Artificial; identical to SEQ ID NO: 211647
  Synthetic oligonucleotide

SEQ ID NO: 640737 - DNA, 55 bp, Artificial; identical to SEQ ID NO: 253065
  Synthetic oligonucleotide

SEQ ID NO: 640738 - DNA, 50 bp, Artificial; identical to SEQ ID NO: 192181
  Synthetic oligonucleotide

SEQ ID NO: 640739 - DNA, 54 bp, Artificial; identical to SEQ ID NO: 167538
  Synthetic oligonucleotide

SEQ ID NO: 640740 - DNA, 55 bp, Artificial; identical to SEQ ID NO: 233555
  Synthetic oligonucleotide

SEQ ID NO: 640741 - DNA, 55 bp, Artificial; identical to SEQ ID NO: 257700
  Synthetic oligonucleotide

SEQ ID NO: 640742 - DNA, 52 bp, Artificial; identical to SEQ ID NO: 170097
  Synthetic oligonucleotide

SEQ ID NO: 640743 - DNA, 55 bp, Artificial; identical to SEQ ID NO: 161170
  Synthetic oligonucleotide

SEQ ID NO: 640744 - DNA, 59 bp, Artificial; identical to SEQ ID NO: 144336
  Synthetic oligonucleotide

SEQ ID NO: 640745 - DNA, 55 bp, Artificial; identical to SEQ ID NO: 239800
  Synthetic oligonucleotide

SEQ ID NO: 640746 - DNA, 52 bp, Artificial; identical to SEQ ID NO: 262778
  Synthetic oligonucleotide

SEQ ID NO: 640747 - DNA, 55 bp, Artificial; identical to SEQ ID NO: 201530
  Synthetic oligonucleotide

SEQ ID NO: 640748 - DNA, 54 bp, Artificial; identical to SEQ ID NO: 185310
  Synthetic oligonucleotide

SEQ ID NO: 640749 - DNA, 54 bp, Artificial; identical to SEQ ID NO: 156414
  Synthetic oligonucleotide

SEQ ID NO: 640750 - DNA, 57 bp, Artificial; identical to SEQ ID NO: 141695
  Synthetic oligonucleotide

SEQ ID NO: 640751 - DNA, 55 bp, Artificial; identical to SEQ ID NO: 164184
  Synthetic oligonucleotide

SEQ ID NO: 640752 - DNA, 55 bp, Artificial; identical to SEQ ID NO: 238452
  Synthetic oligonucleotide

SEQ ID NO: 640753 - DNA, 55 bp, Artificial; identical to SEQ ID NO: 180401
  Synthetic oligonucleotide

SEQ ID NO: 640754 - DNA, 55 bp, Artificial; identical to SEQ ID NO: 161169
  Synthetic oligonucleotide

SEQ ID NO: 640755 - DNA, 55 bp, Artificial; identical to SEQ ID NO: 205461
  Synthetic oligonucleotide

SEQ ID NO: 640756 - DNA, 52 bp, Artificial; identical to SEQ ID NO: 165032
  Synthetic oligonucleotide

SEQ ID NO: 640757 - DNA, 55 bp, Artificial; identical to SEQ ID NO: 180400
  Synthetic oligonucleotide

SEQ ID NO: 640758 - DNA, 55 bp, Artificial; identical to SEQ ID NO: 180398
  Synthetic oligonucleotide

SEQ ID NO: 640759 - DNA, 54 bp, Artificial; identical to SEQ ID NO: 147779
  Synthetic oligonucleotide

SEQ ID NO: 640760 - DNA, 55 bp, Artificial; identical to SEQ ID NO: 212637
  Synthetic oligonucleotide

SEQ ID NO: 640761 - DNA, 55 bp, Artificial; identical to SEQ ID NO: 198631
  Synthetic oligonucleotide

SEQ ID NO: 640762 - DNA, 57 bp, Artificial; identical to SEQ ID NO: 247777
  Synthetic oligonucleotide

SEQ ID NO: 640763 - DNA, 55 bp, Artificial; identical to SEQ ID NO: 221594
  Synthetic oligonucleotide

SEQ ID NO: 640764 - DNA, 53 bp, Artificial; identical to SEQ ID NO: 185313
  Synthetic oligonucleotide

SEQ ID NO: 640765 - DNA, 55 bp, Artificial; identical to SEQ ID NO: 174772
  Synthetic oligonucleotide

SEQ ID NO: 640766 - DNA, 55 bp, Artificial; identical to SEQ ID NO: 161168
  Synthetic oligonucleotide

SEQ ID NO: 640767 - DNA, 55 bp, Artificial; identical to SEQ ID NO: 161856
  Synthetic oligonucleotide

SEQ ID NO: 640768 - DNA, 60 bp, Artificial; identical to SEQ ID NO: 182371
  Synthetic oligonucleotide

SEQ ID NO: 640769 - DNA, 51 bp, Artificial; identical to SEQ ID NO: 192154
  Synthetic oligonucleotide

SEQ ID NO: 640770 - DNA, 55 bp, Artificial; identical to SEQ ID NO: 180397
  Synthetic oligonucleotide

SEQ ID NO: 640771 - DNA, 50 bp, Artificial; identical to SEQ ID NO: 177067
  Synthetic oligonucleotide

SEQ ID NO: 640772 - DNA, 52 bp, Artificial; identical to SEQ ID NO: 170100
  Synthetic oligonucleotide

SEQ ID NO: 640773 - DNA, 54 bp, Artificial; identical to SEQ ID NO: 164797
  Synthetic oligonucleotide

SEQ ID NO: 640774 - DNA, 55 bp, Artificial; identical to SEQ ID NO: 147261
  Synthetic oligonucleotide

SEQ ID NO: 640775 - DNA, 55 bp, Artificial; identical to SEQ ID NO: 180396
  Synthetic oligonucleotide

SEQ ID NO: 640776 - DNA, 52 bp, Artificial; identical to SEQ ID NO: 240890
  Synthetic oligonucleotide

SEQ ID NO: 640777 - DNA, 55 bp, Artificial; identical to SEQ ID NO: 179342
  Synthetic oligonucleotide

SEQ ID NO: 640778 - DNA, 52 bp, Artificial; identical to SEQ ID NO: 258189
  Synthetic oligonucleotide

SEQ ID NO: 640779 - DNA, 52 bp, Artificial; identical to SEQ ID NO: 165013
  Synthetic oligonucleotide

SEQ ID NO: 640780 - DNA, 54 bp, Artificial; identical to SEQ ID NO: 185319
  Synthetic oligonucleotide

SEQ ID NO: 640781 - DNA, 57 bp, Artificial; identical to SEQ ID NO: 147560
  Synthetic oligonucleotide

SEQ ID NO: 640782 - DNA, 55 bp, Artificial; identical to SEQ ID NO: 198630
  Synthetic oligonucleotide

SEQ ID NO: 640783 - DNA, 52 bp, Artificial; identical to SEQ ID NO: 239048
  Synthetic oligonucleotide

SEQ ID NO: 640784 - DNA, 55 bp, Artificial; identical to SEQ ID NO: 160080
  Synthetic oligonucleotide

SEQ ID NO: 640785 - DNA, 55 bp, Artificial; identical to SEQ ID NO: 155329
  Synthetic oligonucleotide

SEQ ID NO: 640786 - DNA, 55 bp, Artificial; identical to SEQ ID NO: 194664
  Synthetic oligonucleotide

SEQ ID NO: 640787 - DNA, 55 bp, Artificial; identical to SEQ ID NO: 153084
  Synthetic oligonucleotide

SEQ ID NO: 640788 - DNA, 55 bp, Artificial; identical to SEQ ID NO: 187659
  Synthetic oligonucleotide

SEQ ID NO: 640789 - DNA, 55 bp, Artificial; identical to SEQ ID NO: 224460
  Synthetic oligonucleotide

SEQ ID NO: 640790 - DNA, 56 bp, Artificial; identical to SEQ ID NO: 243976
  Synthetic oligonucleotide

SEQ ID NO: 640791 - DNA, 53 bp, Artificial; identical to SEQ ID NO: 157415
  Synthetic oligonucleotide

SEQ ID NO: 640792 - DNA, 55 bp, Artificial; identical to SEQ ID NO: 260205
  Synthetic oligonucleotide

SEQ ID NO: 640793 - DNA, 60 bp, Artificial; identical to SEQ ID NO: 182349
  Synthetic oligonucleotide

SEQ ID NO: 640794 - DNA, 55 bp, Artificial; identical to SEQ ID NO: 187662
  Synthetic oligonucleotide

SEQ ID NO: 640795 - DNA, 54 bp, Artificial; identical to SEQ ID NO: 157150
  Synthetic oligonucleotide

SEQ ID NO: 640796 - DNA, 51 bp, Artificial; identical to SEQ ID NO: 210336
  Synthetic oligonucleotide

SEQ ID NO: 640797 - DNA, 54 bp, Artificial; identical to SEQ ID NO: 157142
  Synthetic oligonucleotide

SEQ ID NO: 640798 - DNA, 51 bp, Artificial; identical to SEQ ID NO: 157734
  Synthetic oligonucleotide

SEQ ID NO: 640799 - DNA, 55 bp, Artificial; identical to SEQ ID NO: 156363
  Synthetic oligonucleotide

SEQ ID NO: 640800 - DNA, 55 bp, Artificial; identical to SEQ ID NO: 249999
  Synthetic oligonucleotide

SEQ ID NO: 640801 - DNA, 58 bp, Artificial; identical to SEQ ID NO: 182315
  Synthetic oligonucleotide

SEQ ID NO: 640802 - DNA, 50 bp, Artificial; identical to SEQ ID NO: 188598
  Synthetic oligonucleotide

SEQ ID NO: 640803 - DNA, 55 bp, Artificial; identical to SEQ ID NO: 171432
  Synthetic oligonucleotide

SEQ ID NO: 640804 - DNA, 55 bp, Artificial; identical to SEQ ID NO: 182282
  Synthetic oligonucleotide

SEQ ID NO: 640805 - DNA, 55 bp, Artificial; identical to SEQ ID NO: 207241
  Synthetic oligonucleotide

SEQ ID NO: 640806 - DNA, 50 bp, Artificial; identical to SEQ ID NO: 159033
  Synthetic oligonucleotide

SEQ ID NO: 640807 - DNA, 53 bp, Artificial; identical to SEQ ID NO: 192067
  Synthetic oligonucleotide

SEQ ID NO: 640808 - DNA, 55 bp, Artificial; identical to SEQ ID NO: 197339
  Synthetic oligonucleotide

SEQ ID NO: 640809 - DNA, 55 bp, Artificial; identical to SEQ ID NO: 244074
  Synthetic oligonucleotide

SEQ ID NO: 640810 - DNA, 50 bp, Artificial; identical to SEQ ID NO: 200336
  Synthetic oligonucleotide

SEQ ID NO: 640811 - DNA, 51 bp, Artificial; identical to SEQ ID NO: 247946
  Synthetic oligonucleotide

SEQ ID NO: 640812 - DNA, 55 bp, Artificial; identical to SEQ ID NO: 239799
  Synthetic oligonucleotide

SEQ ID NO: 640813 - DNA, 53 bp, Artificial; identical to SEQ ID NO: 203888
  Synthetic oligonucleotide

SEQ ID NO: 640814 - DNA, 55 bp, Artificial; identical to SEQ ID NO: 224452
  Synthetic oligonucleotide

SEQ ID NO: 640815 - DNA, 53 bp, Artificial; identical to SEQ ID NO: 154574
  Synthetic oligonucleotide

SEQ ID NO: 640816 - DNA, 52 bp, Artificial; identical to SEQ ID NO: 246459
  Synthetic oligonucleotide

SEQ ID NO: 640817 - DNA, 55 bp, Artificial; identical to SEQ ID NO: 202769
  Synthetic oligonucleotide

SEQ ID NO: 640818 - DNA, 52 bp, Artificial; identical to SEQ ID NO: 168986
  Synthetic oligonucleotide

SEQ ID NO: 640819 - DNA, 55 bp, Artificial; identical to SEQ ID NO: 187663
  Synthetic oligonucleotide

SEQ ID NO: 640820 - DNA, 55 bp, Artificial; identical to SEQ ID NO: 182319
  Synthetic oligonucleotide

SEQ ID NO: 640821 - DNA, 55 bp, Artificial; identical to SEQ ID NO: 220617
  Synthetic oligonucleotide

SEQ ID NO: 640822 - DNA, 54 bp, Artificial; identical to SEQ ID NO: 182318
  Synthetic oligonucleotide

SEQ ID NO: 640823 - DNA, 57 bp, Artificial; identical to SEQ ID NO: 179826
  Synthetic oligonucleotide

SEQ ID NO: 640824 - DNA, 55 bp, Artificial; identical to SEQ ID NO: 198628
  Synthetic oligonucleotide

SEQ ID NO: 640825 - DNA, 53 bp, Artificial; identical to SEQ ID NO: 190719
  Synthetic oligonucleotide

SEQ ID NO: 640826 - DNA, 50 bp, Artificial; identical to SEQ ID NO: 248303
  Synthetic oligonucleotide

SEQ ID NO: 640827 - DNA, 55 bp, Artificial; identical to SEQ ID NO: 194666
  Synthetic oligonucleotide

SEQ ID NO: 640828 - DNA, 57 bp, Artificial; identical to SEQ ID NO: 257457
  Synthetic oligonucleotide

SEQ ID NO: 640829 - DNA, 52 bp, Artificial; identical to SEQ ID NO: 186264
  Synthetic oligonucleotide

SEQ ID NO: 640830 - DNA, 53 bp, Artificial; identical to SEQ ID NO: 185850
  Synthetic oligonucleotide

SEQ ID NO: 640831 - DNA, 55 bp, Artificial; identical to SEQ ID NO: 265827
  Synthetic oligonucleotide

SEQ ID NO: 640832 - DNA, 52 bp, Artificial; identical to SEQ ID NO: 186266
  Synthetic oligonucleotide

SEQ ID NO: 640833 - DNA, 53 bp, Artificial; identical to SEQ ID NO: 247852
  Synthetic oligonucleotide

SEQ ID NO: 640834 - DNA, 55 bp, Artificial; identical to SEQ ID NO: 244753
  Synthetic oligonucleotide

SEQ ID NO: 640835 - DNA, 55 bp, Artificial; identical to SEQ ID NO: 187666
  Synthetic oligonucleotide

SEQ ID NO: 640836 - DNA, 55 bp, Artificial; identical to SEQ ID NO: 182317
  Synthetic oligonucleotide

SEQ ID NO: 640837 - DNA, 55 bp, Artificial; identical to SEQ ID NO: 194667
  Synthetic oligonucleotide

SEQ ID NO: 640838 - DNA, 50 bp, Artificial; identical to SEQ ID NO: 160368
  Synthetic oligonucleotide

SEQ ID NO: 640839 - DNA, 50 bp, Artificial; identical to SEQ ID NO: 206682
  Synthetic oligonucleotide

SEQ ID NO: 640840 - DNA, 52 bp, Artificial; identical to SEQ ID NO: 211621
  Synthetic oligonucleotide

SEQ ID NO: 640841 - DNA, 55 bp, Artificial; identical to SEQ ID NO: 254459
  Synthetic oligonucleotide

SEQ ID NO: 640842 - DNA, 52 bp, Artificial; identical to SEQ ID NO: 193760
  Synthetic oligonucleotide

SEQ ID NO: 640843 - DNA, 55 bp, Artificial; identical to SEQ ID NO: 238447
  Synthetic oligonucleotide

SEQ ID NO: 640844 - DNA, 55 bp, Artificial; identical to SEQ ID NO: 182314
  Synthetic oligonucleotide

SEQ ID NO: 640845 - DNA, 55 bp, Artificial; identical to SEQ ID NO: 244751
  Synthetic oligonucleotide

SEQ ID NO: 640846 - DNA, 55 bp, Artificial; identical to SEQ ID NO: 182313
  Synthetic oligonucleotide

SEQ ID NO: 640847 - DNA, 55 bp, Artificial; identical to SEQ ID NO: 254460
  Synthetic oligonucleotide

SEQ ID NO: 640848 - DNA, 49 bp, Artificial; identical to SEQ ID NO: 182311
  Synthetic oligonucleotide

SEQ ID NO: 640849 - DNA, 52 bp, Artificial; identical to SEQ ID NO: 216710
  Synthetic oligonucleotide

SEQ ID NO: 640850 - DNA, 53 bp, Artificial; identical to SEQ ID NO: 144401
  Synthetic oligonucleotide

SEQ ID NO: 640851 - DNA, 51 bp, Artificial; identical to SEQ ID NO: 160598
  Synthetic oligonucleotide

SEQ ID NO: 640852 - DNA, 58 bp, Artificial; identical to SEQ ID NO: 164711
  Synthetic oligonucleotide

SEQ ID NO: 640853 - DNA, 55 bp, Artificial; identical to SEQ ID NO: 142198
  Synthetic oligonucleotide

SEQ ID NO: 640854 - DNA, 54 bp, Artificial; identical to SEQ ID NO: 247825
  Synthetic oligonucleotide

SEQ ID NO: 640855 - DNA, 55 bp, Artificial; identical to SEQ ID NO: 182309
  Synthetic oligonucleotide

SEQ ID NO: 640856 - DNA, 54 bp, Artificial; identical to SEQ ID NO: 205629
  Synthetic oligonucleotide

SEQ ID NO: 640857 - DNA, 53 bp, Artificial; identical to SEQ ID NO: 223581
  Synthetic oligonucleotide

SEQ ID NO: 640858 - DNA, 56 bp, Artificial; identical to SEQ ID NO: 147289
  Synthetic oligonucleotide

SEQ ID NO: 640859 - DNA, 54 bp, Artificial; identical to SEQ ID NO: 144978
  Synthetic oligonucleotide

SEQ ID NO: 640860 - DNA, 51 bp, Artificial; identical to SEQ ID NO: 223799
  Synthetic oligonucleotide

SEQ ID NO: 640861 - DNA, 53 bp, Artificial; identical to SEQ ID NO: 237002
  Synthetic oligonucleotide

SEQ ID NO: 640862 - DNA, 55 bp, Artificial; identical to SEQ ID NO: 154448
  Synthetic oligonucleotide

SEQ ID NO: 640863 - DNA, 53 bp, Artificial; identical to SEQ ID NO: 207075
  Synthetic oligonucleotide

SEQ ID NO: 640864 - DNA, 51 bp, Artificial; identical to SEQ ID NO: 161357
  Synthetic oligonucleotide

SEQ ID NO: 640865 - DNA, 55 bp, Artificial; identical to SEQ ID NO: 182306
  Synthetic oligonucleotide

SEQ ID NO: 640866 - DNA, 55 bp, Artificial; identical to SEQ ID NO: 194668
  Synthetic oligonucleotide

SEQ ID NO: 640867 - DNA, 54 bp, Artificial; identical to SEQ ID NO: 240680
  Synthetic oligonucleotide

SEQ ID NO: 640868 - DNA, 52 bp, Artificial; identical to SEQ ID NO: 208791
  Synthetic oligonucleotide

SEQ ID NO: 640869 - DNA, 54 bp, Artificial; identical to SEQ ID NO: 189088
  Synthetic oligonucleotide

SEQ ID NO: 640870 - DNA, 55 bp, Artificial; identical to SEQ ID NO: 164108
  Synthetic oligonucleotide

SEQ ID NO: 640871 - DNA, 55 bp, Artificial; identical to SEQ ID NO: 174762
  Synthetic oligonucleotide

SEQ ID NO: 640872 - DNA, 57 bp, Artificial; identical to SEQ ID NO: 243987
  Synthetic oligonucleotide

SEQ ID NO: 640873 - DNA, 55 bp, Artificial; identical to SEQ ID NO: 142844
  Synthetic oligonucleotide

SEQ ID NO: 640874 - DNA, 53 bp, Artificial; identical to SEQ ID NO: 217084
  Synthetic oligonucleotide

SEQ ID NO: 640875 - DNA, 60 bp, Artificial; identical to SEQ ID NO: 255345
  Synthetic oligonucleotide

SEQ ID NO: 640876 - DNA, 59 bp, Artificial; identical to SEQ ID NO: 209132
  Synthetic oligonucleotide

SEQ ID NO: 640877 - DNA, 55 bp, Artificial; identical to SEQ ID NO: 187204
  Synthetic oligonucleotide

SEQ ID NO: 640878 - DNA, 51 bp, Artificial; identical to SEQ ID NO: 159885
  Synthetic oligonucleotide

SEQ ID NO: 640879 - DNA, 57 bp, Artificial; identical to SEQ ID NO: 182204
  Synthetic oligonucleotide

SEQ ID NO: 640880 - DNA, 55 bp, Artificial; identical to SEQ ID NO: 141698
  Synthetic oligonucleotide

SEQ ID NO: 640881 - DNA, 55 bp, Artificial; identical to SEQ ID NO: 212508
  Synthetic oligonucleotide

SEQ ID NO: 640882 - DNA, 56 bp, Artificial; identical to SEQ ID NO: 170851
  Synthetic oligonucleotide

SEQ ID NO: 640883 - DNA, 53 bp, Artificial; identical to SEQ ID NO: 147571
  Synthetic oligonucleotide

SEQ ID NO: 640884 - DNA, 54 bp, Artificial; identical to SEQ ID NO: 213069
  Synthetic oligonucleotide

SEQ ID NO: 640885 - DNA, 56 bp, Artificial; identical to SEQ ID NO: 213080
  Synthetic oligonucleotide

SEQ ID NO: 640886 - DNA, 52 bp, Artificial; identical to SEQ ID NO: 147593
  Synthetic oligonucleotide

SEQ ID NO: 640887 - DNA, 58 bp, Artificial; identical to SEQ ID NO: 144640
  Synthetic oligonucleotide

SEQ ID NO: 640888 - DNA, 50 bp, Artificial; identical to SEQ ID NO: 209049
  Synthetic oligonucleotide

SEQ ID NO: 640889 - DNA, 55 bp, Artificial; identical to SEQ ID NO: 257665
  Synthetic oligonucleotide

SEQ ID NO: 640890 - DNA, 55 bp, Artificial; identical to SEQ ID NO: 248840
  Synthetic oligonucleotide

SEQ ID NO: 640891 - DNA, 52 bp, Artificial; identical to SEQ ID NO: 186275
  Synthetic oligonucleotide

SEQ ID NO: 640892 - DNA, 54 bp, Artificial; identical to SEQ ID NO: 172900
  Synthetic oligonucleotide

SEQ ID NO: 640893 - DNA, 57 bp, Artificial; identical to SEQ ID NO: 159958
  Synthetic oligonucleotide

SEQ ID NO: 640894 - DNA, 55 bp, Artificial; identical to SEQ ID NO: 174757
  Synthetic oligonucleotide

SEQ ID NO: 640895 - DNA, 60 bp, Artificial; identical to SEQ ID NO: 159653
  Synthetic oligonucleotide

SEQ ID NO: 640896 - DNA, 53 bp, Artificial; identical to SEQ ID NO: 205646
  Synthetic oligonucleotide

SEQ ID NO: 640897 - DNA, 50 bp, Artificial; identical to SEQ ID NO: 207243
  Synthetic oligonucleotide

SEQ ID NO: 640898 - DNA, 55 bp, Artificial; identical to SEQ ID NO: 244749
  Synthetic oligonucleotide

SEQ ID NO: 640899 - DNA, 50 bp, Artificial; identical to SEQ ID NO: 241205
  Synthetic oligonucleotide

SEQ ID NO: 640900 - DNA, 53 bp, Artificial; identical to SEQ ID NO: 192077
  Synthetic oligonucleotide

SEQ ID NO: 640901 - DNA, 55 bp, Artificial; identical to SEQ ID NO: 238446
  Synthetic oligonucleotide

SEQ ID NO: 640902 - DNA, 55 bp, Artificial; identical to SEQ ID NO: 155183
  Synthetic oligonucleotide

SEQ ID NO: 640903 - DNA, 60 bp, Artificial; identical to SEQ ID NO: 255334
  Synthetic oligonucleotide

SEQ ID NO: 640904 - DNA, 52 bp, Artificial; identical to SEQ ID NO: 170105
  Synthetic oligonucleotide

SEQ ID NO: 640905 - DNA, 54 bp, Artificial; identical to SEQ ID NO: 156368
  Synthetic oligonucleotide

SEQ ID NO: 640906 - DNA, 50 bp, Artificial; identical to SEQ ID NO: 160651
  Synthetic oligonucleotide

SEQ ID NO: 640907 - DNA, 53 bp, Artificial; identical to SEQ ID NO: 218283
  Synthetic oligonucleotide

SEQ ID NO: 640908 - DNA, 53 bp, Artificial; identical to SEQ ID NO: 225221
  Synthetic oligonucleotide

SEQ ID NO: 640909 - DNA, 55 bp, Artificial; identical to SEQ ID NO: 171430
  Synthetic oligonucleotide

SEQ ID NO: 640910 - DNA, 55 bp, Artificial; identical to SEQ ID NO: 194616
  Synthetic oligonucleotide

SEQ ID NO: 640911 - DNA, 54 bp, Artificial; identical to SEQ ID NO: 208458
  Synthetic oligonucleotide

SEQ ID NO: 640912 - DNA, 55 bp, Artificial; identical to SEQ ID NO: 253067
  Synthetic oligonucleotide

SEQ ID NO: 640913 - DNA, 51 bp, Artificial; identical to SEQ ID NO: 144583
  Synthetic oligonucleotide

SEQ ID NO: 640914 - DNA, 54 bp, Artificial; identical to SEQ ID NO: 149142
  Synthetic oligonucleotide

SEQ ID NO: 640915 - DNA, 54 bp, Artificial; identical to SEQ ID NO: 170024
  Synthetic oligonucleotide

SEQ ID NO: 640916 - DNA, 55 bp, Artificial; identical to SEQ ID NO: 172901
  Synthetic oligonucleotide

SEQ ID NO: 640917 - DNA, 55 bp, Artificial; identical to SEQ ID NO: 212640
  Synthetic oligonucleotide

SEQ ID NO: 640918 - DNA, 55 bp, Artificial; identical to SEQ ID NO: 182299
  Synthetic oligonucleotide

SEQ ID NO: 640919 - DNA, 55 bp, Artificial; identical to SEQ ID NO: 182298
  Synthetic oligonucleotide

SEQ ID NO: 640920 - DNA, 53 bp, Artificial; identical to SEQ ID NO: 170038
  Synthetic oligonucleotide

SEQ ID NO: 640921 - DNA, 60 bp, Artificial; identical to SEQ ID NO: 257455
  Synthetic oligonucleotide

SEQ ID NO: 640922 - DNA, 55 bp, Artificial; identical to SEQ ID NO: 224457
  Synthetic oligonucleotide

SEQ ID NO: 640923 - DNA, 55 bp, Artificial; identical to SEQ ID NO: 254461
  Synthetic oligonucleotide

SEQ ID NO: 640924 - DNA, 53 bp, Artificial; identical to SEQ ID NO: 216421
  Synthetic oligonucleotide

SEQ ID NO: 640925 - DNA, 55 bp, Artificial; identical to SEQ ID NO: 182297
  Synthetic oligonucleotide

SEQ ID NO: 640926 - DNA, 50 bp, Artificial; identical to SEQ ID NO: 194077
  Synthetic oligonucleotide

SEQ ID NO: 640927 - DNA, 55 bp, Artificial; identical to SEQ ID NO: 208456
  Synthetic oligonucleotide

SEQ ID NO: 640928 - DNA, 55 bp, Artificial; identical to SEQ ID NO: 187610
  Synthetic oligonucleotide

SEQ ID NO: 640929 - DNA, 51 bp, Artificial; identical to SEQ ID NO: 248036
  Synthetic oligonucleotide

SEQ ID NO: 640930 - DNA, 50 bp, Artificial; identical to SEQ ID NO: 150400
  Synthetic oligonucleotide

SEQ ID NO: 640931 - DNA, 55 bp, Artificial; identical to SEQ ID NO: 265945
  Synthetic oligonucleotide

SEQ ID NO: 640932 - DNA, 55 bp, Artificial; identical to SEQ ID NO: 194618
  Synthetic oligonucleotide

SEQ ID NO: 640933 - DNA, 58 bp, Artificial; identical to SEQ ID NO: 247799
  Synthetic oligonucleotide

SEQ ID NO: 640934 - DNA, 55 bp, Artificial; identical to SEQ ID NO: 208493
  Synthetic oligonucleotide

SEQ ID NO: 640935 - DNA, 53 bp, Artificial; identical to SEQ ID NO: 194973
  Synthetic oligonucleotide

SEQ ID NO: 640936 - DNA, 60 bp, Artificial; identical to SEQ ID NO: 257454
  Synthetic oligonucleotide

SEQ ID NO: 640937 - DNA, 55 bp, Artificial; identical to SEQ ID NO: 171429
  Synthetic oligonucleotide

SEQ ID NO: 640938 - DNA, 55 bp, Artificial; identical to SEQ ID NO: 239830
  Synthetic oligonucleotide

SEQ ID NO: 640939 - DNA, 55 bp, Artificial; identical to SEQ ID NO: 182343
  Synthetic oligonucleotide

SEQ ID NO: 640940 - DNA, 56 bp, Artificial; identical to SEQ ID NO: 212659
  Synthetic oligonucleotide

SEQ ID NO: 640941 - DNA, 54 bp, Artificial; identical to SEQ ID NO: 209368
  Synthetic oligonucleotide

SEQ ID NO: 640942 - DNA, 60 bp, Artificial; identical to SEQ ID NO: 182683
  Synthetic oligonucleotide

SEQ ID NO: 640943 - DNA, 55 bp, Artificial; identical to SEQ ID NO: 153153
  Synthetic oligonucleotide

SEQ ID NO: 640944 - DNA, 53 bp, Artificial; identical to SEQ ID NO: 164105
  Synthetic oligonucleotide

SEQ ID NO: 640945 - DNA, 54 bp, Artificial; identical to SEQ ID NO: 222636
  Synthetic oligonucleotide

SEQ ID NO: 640946 - DNA, 55 bp, Artificial; identical to SEQ ID NO: 182342
  Synthetic oligonucleotide

SEQ ID NO: 640947 - DNA, 52 bp, Artificial; identical to SEQ ID NO: 147615
  Synthetic oligonucleotide

SEQ ID NO: 640948 - DNA, 54 bp, Artificial; identical to SEQ ID NO: 255311
  Synthetic oligonucleotide

SEQ ID NO: 640949 - DNA, 55 bp, Artificial; identical to SEQ ID NO: 243998
  Synthetic oligonucleotide

SEQ ID NO: 640950 - DNA, 53 bp, Artificial; identical to SEQ ID NO: 152446
  Synthetic oligonucleotide

SEQ ID NO: 640951 - DNA, 55 bp, Artificial; identical to SEQ ID NO: 171427
  Synthetic oligonucleotide

SEQ ID NO: 640952 - DNA, 54 bp, Artificial; identical to SEQ ID NO: 200754
  Synthetic oligonucleotide

SEQ ID NO: 640953 - DNA, 52 bp, Artificial; identical to SEQ ID NO: 223652
  Synthetic oligonucleotide

SEQ ID NO: 640954 - DNA, 51 bp, Artificial; identical to SEQ ID NO: 149907
  Synthetic oligonucleotide

SEQ ID NO: 640955 - DNA, 54 bp, Artificial; identical to SEQ ID NO: 218286
  Synthetic oligonucleotide

SEQ ID NO: 640956 - DNA, 55 bp, Artificial; identical to SEQ ID NO: 254464
  Synthetic oligonucleotide

SEQ ID NO: 640957 - DNA, 55 bp, Artificial; identical to SEQ ID NO: 254446
  Synthetic oligonucleotide

SEQ ID NO: 640958 - DNA, 52 bp, Artificial; identical to SEQ ID NO: 186279
  Synthetic oligonucleotide

SEQ ID NO: 640959 - DNA, 50 bp, Artificial; identical to SEQ ID NO: 203419
  Synthetic oligonucleotide

SEQ ID NO: 640960 - DNA, 55 bp, Artificial; identical to SEQ ID NO: 202154
  Synthetic oligonucleotide

SEQ ID NO: 640961 - DNA, 55 bp, Artificial; identical to SEQ ID NO: 164103
  Synthetic oligonucleotide

SEQ ID NO: 640962 - DNA, 54 bp, Artificial; identical to SEQ ID NO: 141179
  Synthetic oligonucleotide

SEQ ID NO: 640963 - DNA, 52 bp, Artificial; identical to SEQ ID NO: 162338
  Synthetic oligonucleotide

SEQ ID NO: 640964 - DNA, 55 bp, Artificial; identical to SEQ ID NO: 146608
  Synthetic oligonucleotide

SEQ ID NO: 640965 - DNA, 53 bp, Artificial; identical to SEQ ID NO: 142842
  Synthetic oligonucleotide

SEQ ID NO: 640966 - DNA, 58 bp, Artificial; identical to SEQ ID NO: 247011
  Synthetic oligonucleotide

SEQ ID NO: 640967 - DNA, 51 bp, Artificial; identical to SEQ ID NO: 167553
  Synthetic oligonucleotide

SEQ ID NO: 640968 - DNA, 52 bp, Artificial; identical to SEQ ID NO: 170035
  Synthetic oligonucleotide

SEQ ID NO: 640969 - DNA, 54 bp, Artificial; identical to SEQ ID NO: 254442
  Synthetic oligonucleotide

SEQ ID NO: 640970 - DNA, 60 bp, Artificial; identical to SEQ ID NO: 182672
  Synthetic oligonucleotide

SEQ ID NO: 640971 - DNA, 55 bp, Artificial; identical to SEQ ID NO: 239827
  Synthetic oligonucleotide

SEQ ID NO: 640972 - DNA, 53 bp, Artificial; identical to SEQ ID NO: 202470
  Synthetic oligonucleotide

SEQ ID NO: 640973 - DNA, 55 bp, Artificial; identical to SEQ ID NO: 182336
  Synthetic oligonucleotide

SEQ ID NO: 640974 - DNA, 58 bp, Artificial; identical to SEQ ID NO: 255256
  Synthetic oligonucleotide

SEQ ID NO: 640975 - DNA, 52 bp, Artificial; identical to SEQ ID NO: 258135
  Synthetic oligonucleotide

SEQ ID NO: 640976 - DNA, 55 bp, Artificial; identical to SEQ ID NO: 239825
  Synthetic oligonucleotide

SEQ ID NO: 640977 - DNA, 55 bp, Artificial; identical to SEQ ID NO: 239824
  Synthetic oligonucleotide

SEQ ID NO: 640978 - DNA, 53 bp, Artificial; identical to SEQ ID NO: 202725
  Synthetic oligonucleotide

SEQ ID NO: 640979 - DNA, 49 bp, Artificial; identical to SEQ ID NO: 185900
  Synthetic oligonucleotide

SEQ ID NO: 640980 - DNA, 55 bp, Artificial; identical to SEQ ID NO: 144791
  Synthetic oligonucleotide

SEQ ID NO: 640981 - DNA, 54 bp, Artificial; identical to SEQ ID NO: 162099
  Synthetic oligonucleotide

SEQ ID NO: 640982 - DNA, 51 bp, Artificial; identical to SEQ ID NO: 186663
  Synthetic oligonucleotide

SEQ ID NO: 640983 - DNA, 55 bp, Artificial; identical to SEQ ID NO: 215569
  Synthetic oligonucleotide

SEQ ID NO: 640984 - DNA, 55 bp, Artificial; identical to SEQ ID NO: 257452
  Synthetic oligonucleotide

SEQ ID NO: 640985 - DNA, 55 bp, Artificial; identical to SEQ ID NO: 238445
  Synthetic oligonucleotide

SEQ ID NO: 640986 - DNA, 55 bp, Artificial; identical to SEQ ID NO: 202164
  Synthetic oligonucleotide

SEQ ID NO: 640987 - DNA, 55 bp, Artificial; identical to SEQ ID NO: 147787
  Synthetic oligonucleotide

SEQ ID NO: 640988 - DNA, 57 bp, Artificial; identical to SEQ ID NO: 164745
  Synthetic oligonucleotide

SEQ ID NO: 640989 - DNA, 53 bp, Artificial; identical to SEQ ID NO: 164100
  Synthetic oligonucleotide

SEQ ID NO: 640990 - DNA, 55 bp, Artificial; identical to SEQ ID NO: 188313
  Synthetic oligonucleotide

SEQ ID NO: 640991 - DNA, 49 bp, Artificial; identical to SEQ ID NO: 201531
  Synthetic oligonucleotide

SEQ ID NO: 640992 - DNA, 55 bp, Artificial; identical to SEQ ID NO: 182334
  Synthetic oligonucleotide

SEQ ID NO: 640993 - DNA, 52 bp, Artificial; identical to SEQ ID NO: 185875
  Synthetic oligonucleotide

SEQ ID NO: 640994 - DNA, 53 bp, Artificial; identical to SEQ ID NO: 199786
  Synthetic oligonucleotide

SEQ ID NO: 640995 - DNA, 55 bp, Artificial; identical to SEQ ID NO: 175659
  Synthetic oligonucleotide

SEQ ID NO: 640996 - DNA, 55 bp, Artificial; identical to SEQ ID NO: 156372
  Synthetic oligonucleotide

SEQ ID NO: 640997 - DNA, 55 bp, Artificial; identical to SEQ ID NO: 160079
  Synthetic oligonucleotide

SEQ ID NO: 640998 - DNA, 55 bp, Artificial; identical to SEQ ID NO: 207247
  Synthetic oligonucleotide

SEQ ID NO: 640999 - DNA, 55 bp, Artificial; identical to SEQ ID NO: 182333
  Synthetic oligonucleotide

SEQ ID NO: 641000 - DNA, 55 bp, Artificial; identical to SEQ ID NO: 244744
  Synthetic oligonucleotide

SEQ ID NO: 641001 - DNA, 54 bp, Artificial; identical to SEQ ID NO: 141182
  Synthetic oligonucleotide

SEQ ID NO: 641002 - DNA, 54 bp, Artificial; identical to SEQ ID NO: 153154
  Synthetic oligonucleotide

SEQ ID NO: 641003 - DNA, 55 bp, Artificial; identical to SEQ ID NO: 218864
  Synthetic oligonucleotide

SEQ ID NO: 641004 - DNA, 58 bp, Artificial; identical to SEQ ID NO: 147143
  Synthetic oligonucleotide

SEQ ID NO: 641005 - DNA, 54 bp, Artificial; identical to SEQ ID NO: 203850
  Synthetic oligonucleotide

SEQ ID NO: 641006 - DNA, 55 bp, Artificial; identical to SEQ ID NO: 205465
  Synthetic oligonucleotide

SEQ ID NO: 641007 - DNA, 54 bp, Artificial; identical to SEQ ID NO: 240653
  Synthetic oligonucleotide

SEQ ID NO: 641008 - DNA, 55 bp, Artificial; identical to SEQ ID NO: 248843
  Synthetic oligonucleotide

SEQ ID NO: 641009 - DNA, 55 bp, Artificial; identical to SEQ ID NO: 260202
  Synthetic oligonucleotide

SEQ ID NO: 641010 - DNA, 54 bp, Artificial; identical to SEQ ID NO: 161855
  Synthetic oligonucleotide

SEQ ID NO: 641011 - DNA, 52 bp, Artificial; identical to SEQ ID NO: 143703
  Synthetic oligonucleotide

SEQ ID NO: 641012 - DNA, 60 bp, Artificial; identical to SEQ ID NO: 247009
  Synthetic oligonucleotide

SEQ ID NO: 641013 - DNA, 55 bp, Artificial; identical to SEQ ID NO: 147788
  Synthetic oligonucleotide

SEQ ID NO: 641014 - DNA, 55 bp, Artificial; identical to SEQ ID NO: 156373
  Synthetic oligonucleotide

SEQ ID NO: 641015 - DNA, 55 bp, Artificial; identical to SEQ ID NO: 257672
  Synthetic oligonucleotide

SEQ ID NO: 641016 - DNA, 56 bp, Artificial; identical to SEQ ID NO: 201858
  Synthetic oligonucleotide

SEQ ID NO: 641017 - DNA, 55 bp, Artificial; identical to SEQ ID NO: 244740
  Synthetic oligonucleotide

SEQ ID NO: 641018 - DNA, 55 bp, Artificial; identical to SEQ ID NO: 173651
  Synthetic oligonucleotide

SEQ ID NO: 641019 - DNA, 56 bp, Artificial; identical to SEQ ID NO: 166802
  Synthetic oligonucleotide

SEQ ID NO: 641020 - DNA, 56 bp, Artificial; identical to SEQ ID NO: 239182
  Synthetic oligonucleotide

SEQ ID NO: 641021 - DNA, 55 bp, Artificial; identical to SEQ ID NO: 156374
  Synthetic oligonucleotide

SEQ ID NO: 641022 - DNA, 55 bp, Artificial; identical to SEQ ID NO: 254437
  Synthetic oligonucleotide

SEQ ID NO: 641023 - DNA, 55 bp, Artificial; identical to SEQ ID NO: 203484
  Synthetic oligonucleotide

SEQ ID NO: 641024 - DNA, 58 bp, Artificial; identical to SEQ ID NO: 179510
  Synthetic oligonucleotide

SEQ ID NO: 641025 - DNA, 55 bp, Artificial; identical to SEQ ID NO: 234355
  Synthetic oligonucleotide

SEQ ID NO: 641026 - DNA, 53 bp, Artificial; identical to SEQ ID NO: 167304
  Synthetic oligonucleotide

SEQ ID NO: 641027 - DNA, 54 bp, Artificial; identical to SEQ ID NO: 238565
  Synthetic oligonucleotide

SEQ ID NO: 641028 - DNA, 55 bp, Artificial; identical to SEQ ID NO: 210896
  Synthetic oligonucleotide

SEQ ID NO: 641029 - DNA, 55 bp, Artificial; identical to SEQ ID NO: 224448
  Synthetic oligonucleotide

SEQ ID NO: 641030 - DNA, 55 bp, Artificial; identical to SEQ ID NO: 156377
  Synthetic oligonucleotide

SEQ ID NO: 641031 - DNA, 55 bp, Artificial; identical to SEQ ID NO: 171425
  Synthetic oligonucleotide

SEQ ID NO: 641032 - DNA, 54 bp, Artificial; identical to SEQ ID NO: 182330
  Synthetic oligonucleotide

SEQ ID NO: 641033 - DNA, 55 bp, Artificial; identical to SEQ ID NO: 244737
  Synthetic oligonucleotide

SEQ ID NO: 641034 - DNA, 55 bp, Artificial; identical to SEQ ID NO: 221618
  Synthetic oligonucleotide

SEQ ID NO: 641035 - DNA, 55 bp, Artificial; identical to SEQ ID NO: 224419
  Synthetic oligonucleotide

SEQ ID NO: 641036 - DNA, 55 bp, Artificial; identical to SEQ ID NO: 147789
  Synthetic oligonucleotide

SEQ ID NO: 641037 - DNA, 60 bp, Artificial; identical to SEQ ID NO: 182594
  Synthetic oligonucleotide

SEQ ID NO: 641038 - DNA, 55 bp, Artificial; identical to SEQ ID NO: 182328
  Synthetic oligonucleotide

SEQ ID NO: 641039 - DNA, 55 bp, Artificial; identical to SEQ ID NO: 146606
  Synthetic oligonucleotide

SEQ ID NO: 641040 - DNA, 52 bp, Artificial; identical to SEQ ID NO: 202999
  Synthetic oligonucleotide

SEQ ID NO: 641041 - DNA, 58 bp, Artificial; identical to SEQ ID NO: 224196
  Synthetic oligonucleotide

SEQ ID NO: 641042 - DNA, 55 bp, Artificial; identical to SEQ ID NO: 244794
  Synthetic oligonucleotide

SEQ ID NO: 641043 - DNA, 55 bp, Artificial; identical to SEQ ID NO: 168506
  Synthetic oligonucleotide

SEQ ID NO: 641044 - DNA, 60 bp, Artificial; identical to SEQ ID NO: 212703
  Synthetic oligonucleotide

SEQ ID NO: 641045 - DNA, 55 bp, Artificial; identical to SEQ ID NO: 223382
  Synthetic oligonucleotide

SEQ ID NO: 641046 - DNA, 50 bp, Artificial; identical to SEQ ID NO: 196849
  Synthetic oligonucleotide

SEQ ID NO: 641047 - DNA, 54 bp, Artificial; identical to SEQ ID NO: 207043
  Synthetic oligonucleotide

SEQ ID NO: 641048 - DNA, 55 bp, Artificial; identical to SEQ ID NO: 210888
  Synthetic oligonucleotide

SEQ ID NO: 641049 - DNA, 55 bp, Artificial; identical to SEQ ID NO: 244791
  Synthetic oligonucleotide

SEQ ID NO: 641050 - DNA, 55 bp, Artificial; identical to SEQ ID NO: 209367
  Synthetic oligonucleotide

SEQ ID NO: 641051 - DNA, 55 bp, Artificial; identical to SEQ ID NO: 254435
  Synthetic oligonucleotide

SEQ ID NO: 641052 - DNA, 55 bp, Artificial; identical to SEQ ID NO: 145163
  Synthetic oligonucleotide

SEQ ID NO: 641053 - DNA, 59 bp, Artificial; identical to SEQ ID NO: 239193
  Synthetic oligonucleotide

SEQ ID NO: 641054 - DNA, 55 bp, Artificial; identical to SEQ ID NO: 182325
  Synthetic oligonucleotide

SEQ ID NO: 641055 - DNA, 55 bp, Artificial; identical to SEQ ID NO: 156380
  Synthetic oligonucleotide

SEQ ID NO: 641056 - DNA, 53 bp, Artificial; identical to SEQ ID NO: 248844
  Synthetic oligonucleotide

SEQ ID NO: 641057 - DNA, 55 bp, Artificial; identical to SEQ ID NO: 182323
  Synthetic oligonucleotide

SEQ ID NO: 641058 - DNA, 50 bp, Artificial; identical to SEQ ID NO: 256046
  Synthetic oligonucleotide

SEQ ID NO: 641059 - DNA, 53 bp, Artificial; identical to SEQ ID NO: 239822
  Synthetic oligonucleotide

SEQ ID NO: 641060 - DNA, 57 bp, Artificial; identical to SEQ ID NO: 257451
  Synthetic oligonucleotide

SEQ ID NO: 641061 - DNA, 55 bp, Artificial; identical to SEQ ID NO: 201127
  Synthetic oligonucleotide

SEQ ID NO: 641062 - DNA, 55 bp, Artificial; identical to SEQ ID NO: 197374
  Synthetic oligonucleotide

SEQ ID NO: 641063 - DNA, 55 bp, Artificial; identical to SEQ ID NO: 266739
  Synthetic oligonucleotide

SEQ ID NO: 641064 - DNA, 55 bp, Artificial; identical to SEQ ID NO: 145167
  Synthetic oligonucleotide

SEQ ID NO: 641065 - DNA, 57 bp, Artificial; identical to SEQ ID NO: 257450
  Synthetic oligonucleotide

SEQ ID NO: 641066 - DNA, 54 bp, Artificial; identical to SEQ ID NO: 141700
  Synthetic oligonucleotide

SEQ ID NO: 641067 - DNA, 52 bp, Artificial; identical to SEQ ID NO: 147649
  Synthetic oligonucleotide

SEQ ID NO: 641068 - DNA, 55 bp, Artificial; identical to SEQ ID NO: 156381
  Synthetic oligonucleotide

SEQ ID NO: 641069 - DNA, 55 bp, Artificial; identical to SEQ ID NO: 190577
  Synthetic oligonucleotide

SEQ ID NO: 641070 - DNA, 50 bp, Artificial; identical to SEQ ID NO: 194332
  Synthetic oligonucleotide

SEQ ID NO: 641071 - DNA, 55 bp, Artificial; identical to SEQ ID NO: 254432
  Synthetic oligonucleotide

SEQ ID NO: 641072 - DNA, 59 bp, Artificial; identical to SEQ ID NO: 162409
  Synthetic oligonucleotide

SEQ ID NO: 641073 - DNA, 55 bp, Artificial; identical to SEQ ID NO: 234357
  Synthetic oligonucleotide

SEQ ID NO: 641074 - DNA, 55 bp, Artificial; identical to SEQ ID NO: 182322
  Synthetic oligonucleotide

SEQ ID NO: 641075 - DNA, 55 bp, Artificial; identical to SEQ ID NO: 182273
  Synthetic oligonucleotide

SEQ ID NO: 641076 - DNA, 52 bp, Artificial; identical to SEQ ID NO: 255590
  Synthetic oligonucleotide

SEQ ID NO: 641077 - DNA, 55 bp, Artificial; identical to SEQ ID NO: 191005
  Synthetic oligonucleotide

SEQ ID NO: 641078 - DNA, 54 bp, Artificial; identical to SEQ ID NO: 240654
  Synthetic oligonucleotide

SEQ ID NO: 641079 - DNA, 55 bp, Artificial; identical to SEQ ID NO: 244788
  Synthetic oligonucleotide

SEQ ID NO: 641080 - DNA, 53 bp, Artificial; identical to SEQ ID NO: 244786
  Synthetic oligonucleotide

SEQ ID NO: 641081 - DNA, 55 bp, Artificial; identical to SEQ ID NO: 239821
  Synthetic oligonucleotide

SEQ ID NO: 641082 - DNA, 55 bp, Artificial; identical to SEQ ID NO: 212688
  Synthetic oligonucleotide

SEQ ID NO: 641083 - DNA, 55 bp, Artificial; identical to SEQ ID NO: 242573
  Synthetic oligonucleotide

SEQ ID NO: 641084 - DNA, 51 bp, Artificial; identical to SEQ ID NO: 145011
  Synthetic oligonucleotide

SEQ ID NO: 641085 - DNA, 54 bp, Artificial; identical to SEQ ID NO: 238546
  Synthetic oligonucleotide

SEQ ID NO: 641086 - DNA, 55 bp, Artificial; identical to SEQ ID NO: 198552
  Synthetic oligonucleotide

SEQ ID NO: 641087 - DNA, 54 bp, Artificial; identical to SEQ ID NO: 174284
  Synthetic oligonucleotide

SEQ ID NO: 641088 - DNA, 55 bp, Artificial; identical to SEQ ID NO: 217085
  Synthetic oligonucleotide

SEQ ID NO: 641089 - DNA, 55 bp, Artificial; identical to SEQ ID NO: 207249
  Synthetic oligonucleotide

SEQ ID NO: 641090 - DNA, 54 bp, Artificial; identical to SEQ ID NO: 223496
  Synthetic oligonucleotide

SEQ ID NO: 641091 - DNA, 55 bp, Artificial; identical to SEQ ID NO: 190572
  Synthetic oligonucleotide

SEQ ID NO: 641092 - DNA, 51 bp, Artificial; identical to SEQ ID NO: 223811
  Synthetic oligonucleotide

SEQ ID NO: 641093 - DNA, 58 bp, Artificial; identical to SEQ ID NO: 247810
  Synthetic oligonucleotide

SEQ ID NO: 641094 - DNA, 50 bp, Artificial; identical to SEQ ID NO: 256038
  Synthetic oligonucleotide

SEQ ID NO: 641095 - DNA, 55 bp, Artificial; identical to SEQ ID NO: 168507
  Synthetic oligonucleotide

SEQ ID NO: 641096 - DNA, 55 bp, Artificial; identical to SEQ ID NO: 164097
  Synthetic oligonucleotide

SEQ ID NO: 641097 - DNA, 54 bp, Artificial; identical to SEQ ID NO: 223501
  Synthetic oligonucleotide

SEQ ID NO: 641098 - DNA, 54 bp, Artificial; identical to SEQ ID NO: 247008
  Synthetic oligonucleotide

SEQ ID NO: 641099 - DNA, 55 bp, Artificial; identical to SEQ ID NO: 191004
  Synthetic oligonucleotide

SEQ ID NO: 641100 - DNA, 52 bp, Artificial; identical to SEQ ID NO: 161339
  Synthetic oligonucleotide

SEQ ID NO: 641101 - DNA, 51 bp, Artificial; identical to SEQ ID NO: 190487
  Synthetic oligonucleotide

SEQ ID NO: 641102 - DNA, 55 bp, Artificial; identical to SEQ ID NO: 254431
  Synthetic oligonucleotide

SEQ ID NO: 641103 - DNA, 50 bp, Artificial; identical to SEQ ID NO: 198550
  Synthetic oligonucleotide

SEQ ID NO: 641104 - DNA, 54 bp, Artificial; identical to SEQ ID NO: 246190
  Synthetic oligonucleotide

SEQ ID NO: 641105 - DNA, 49 bp, Artificial; identical to SEQ ID NO: 147757
  Synthetic oligonucleotide

SEQ ID NO: 641106 - DNA, 54 bp, Artificial; identical to SEQ ID NO: 190570
  Synthetic oligonucleotide

SEQ ID NO: 641107 - DNA, 55 bp, Artificial; identical to SEQ ID NO: 203490
  Synthetic oligonucleotide

SEQ ID NO: 641108 - DNA, 51 bp, Artificial; identical to SEQ ID NO: 255720
  Synthetic oligonucleotide

SEQ ID NO: 641109 - DNA, 55 bp, Artificial; identical to SEQ ID NO: 254430
  Synthetic oligonucleotide

SEQ ID NO: 641110 - DNA, 55 bp, Artificial; identical to SEQ ID NO: 182269
  Synthetic oligonucleotide

SEQ ID NO: 641111 - DNA, 55 bp, Artificial; identical to SEQ ID NO: 164096
  Synthetic oligonucleotide

SEQ ID NO: 641112 - DNA, 55 bp, Artificial; identical to SEQ ID NO: 151330
  Synthetic oligonucleotide

SEQ ID NO: 641113 - DNA, 52 bp, Artificial; identical to SEQ ID NO: 254428
  Synthetic oligonucleotide

SEQ ID NO: 641114 - DNA, 53 bp, Artificial; identical to SEQ ID NO: 156383
  Synthetic oligonucleotide

SEQ ID NO: 641115 - DNA, 54 bp, Artificial; identical to SEQ ID NO: 143701
  Synthetic oligonucleotide

SEQ ID NO: 641116 - DNA, 52 bp, Artificial; identical to SEQ ID NO: 198549
  Synthetic oligonucleotide

SEQ ID NO: 641117 - DNA, 55 bp, Artificial; identical to SEQ ID NO: 202722
  Synthetic oligonucleotide

SEQ ID NO: 641118 - DNA, 53 bp, Artificial; identical to SEQ ID NO: 237829
  Synthetic oligonucleotide

SEQ ID NO: 641119 - DNA, 55 bp, Artificial; identical to SEQ ID NO: 188310
  Synthetic oligonucleotide

SEQ ID NO: 641120 - DNA, 57 bp, Artificial; identical to SEQ ID NO: 239226
  Synthetic oligonucleotide

SEQ ID NO: 641121 - DNA, 57 bp, Artificial; identical to SEQ ID NO: 201856
  Synthetic oligonucleotide

SEQ ID NO: 641122 - DNA, 52 bp, Artificial; identical to SEQ ID NO: 159859
  Synthetic oligonucleotide

SEQ ID NO: 641123 - DNA, 54 bp, Artificial; identical to SEQ ID NO: 179502
  Synthetic oligonucleotide

SEQ ID NO: 641124 - DNA, 54 bp, Artificial; identical to SEQ ID NO: 182515
  Synthetic oligonucleotide

SEQ ID NO: 641125 - DNA, 60 bp, Artificial; identical to SEQ ID NO: 266087
  Synthetic oligonucleotide

SEQ ID NO: 641126 - DNA, 52 bp, Artificial; identical to SEQ ID NO: 182264
  Synthetic oligonucleotide

SEQ ID NO: 641127 - DNA, 60 bp, Artificial; identical to SEQ ID NO: 182493
  Synthetic oligonucleotide

SEQ ID NO: 641128 - DNA, 55 bp, Artificial; identical to SEQ ID NO: 162098
  Synthetic oligonucleotide

SEQ ID NO: 641129 - DNA, 52 bp, Artificial; identical to SEQ ID NO: 199844
  Synthetic oligonucleotide

SEQ ID NO: 641130 - DNA, 55 bp, Artificial; identical to SEQ ID NO: 156385
  Synthetic oligonucleotide

SEQ ID NO: 641131 - DNA, 51 bp, Artificial; identical to SEQ ID NO: 209764
  Synthetic oligonucleotide

SEQ ID NO: 641132 - DNA, 54 bp, Artificial; identical to SEQ ID NO: 266076
  Synthetic oligonucleotide

SEQ ID NO: 641133 - DNA, 55 bp, Artificial; identical to SEQ ID NO: 238509
  Synthetic oligonucleotide

SEQ ID NO: 641134 - DNA, 55 bp, Artificial; identical to SEQ ID NO: 253068
  Synthetic oligonucleotide

SEQ ID NO: 641135 - DNA, 50 bp, Artificial; identical to SEQ ID NO: 254339
  Synthetic oligonucleotide

SEQ ID NO: 641136 - DNA, 54 bp, Artificial; identical to SEQ ID NO: 253069
  Synthetic oligonucleotide

SEQ ID NO: 641137 - DNA, 55 bp, Artificial; identical to SEQ ID NO: 225165
  Synthetic oligonucleotide

SEQ ID NO: 641138 - DNA, 53 bp, Artificial; identical to SEQ ID NO: 258906
  Synthetic oligonucleotide

SEQ ID NO: 641139 - DNA, 55 bp, Artificial; identical to SEQ ID NO: 257676
  Synthetic oligonucleotide

SEQ ID NO: 641140 - DNA, 54 bp, Artificial; identical to SEQ ID NO: 244783
  Synthetic oligonucleotide

SEQ ID NO: 641141 - DNA, 54 bp, Artificial; identical to SEQ ID NO: 144960
  Synthetic oligonucleotide

SEQ ID NO: 641142 - DNA, 60 bp, Artificial; identical to SEQ ID NO: 174758
  Synthetic oligonucleotide

SEQ ID NO: 641143 - DNA, 55 bp, Artificial; identical to SEQ ID NO: 239818
  Synthetic oligonucleotide

SEQ ID NO: 641144 - DNA, 58 bp, Artificial; identical to SEQ ID NO: 179508
  Synthetic oligonucleotide

SEQ ID NO: 641145 - DNA, 55 bp, Artificial; identical to SEQ ID NO: 197373
  Synthetic oligonucleotide

SEQ ID NO: 641146 - DNA, 57 bp, Artificial; identical to SEQ ID NO: 212714
  Synthetic oligonucleotide

SEQ ID NO: 641147 - DNA, 55 bp, Artificial; identical to SEQ ID NO: 212689
  Synthetic oligonucleotide

SEQ ID NO: 641148 - DNA, 55 bp, Artificial; identical to SEQ ID NO: 223374
  Synthetic oligonucleotide

SEQ ID NO: 641149 - DNA, 55 bp, Artificial; identical to SEQ ID NO: 198546
  Synthetic oligonucleotide

SEQ ID NO: 641150 - DNA, 55 bp, Artificial; identical to SEQ ID NO: 164094
  Synthetic oligonucleotide

SEQ ID NO: 641151 - DNA, 52 bp, Artificial; identical to SEQ ID NO: 257677
  Synthetic oligonucleotide

SEQ ID NO: 641152 - DNA, 55 bp, Artificial; identical to SEQ ID NO: 233553
  Synthetic oligonucleotide

SEQ ID NO: 641153 - DNA, 55 bp, Artificial; identical to SEQ ID NO: 253071
  Synthetic oligonucleotide

SEQ ID NO: 641154 - DNA, 55 bp, Artificial; identical to SEQ ID NO: 257678
  Synthetic oligonucleotide

SEQ ID NO: 641155 - DNA, 53 bp, Artificial; identical to SEQ ID NO: 194968
  Synthetic oligonucleotide

SEQ ID NO: 641156 - DNA, 55 bp, Artificial; identical to SEQ ID NO: 142200
  Synthetic oligonucleotide

SEQ ID NO: 641157 - DNA, 56 bp, Artificial; identical to SEQ ID NO: 209222
  Synthetic oligonucleotide

SEQ ID NO: 641158 - DNA, 55 bp, Artificial; identical to SEQ ID NO: 190594
  Synthetic oligonucleotide

SEQ ID NO: 641159 - DNA, 53 bp, Artificial; identical to SEQ ID NO: 205647
  Synthetic oligonucleotide

SEQ ID NO: 641160 - DNA, 55 bp, Artificial; identical to SEQ ID NO: 182261
  Synthetic oligonucleotide

SEQ ID NO: 641161 - DNA, 55 bp, Artificial; identical to SEQ ID NO: 164093
  Synthetic oligonucleotide

SEQ ID NO: 641162 - DNA, 55 bp, Artificial; identical to SEQ ID NO: 162097
  Synthetic oligonucleotide

SEQ ID NO: 641163 - DNA, 57 bp, Artificial; identical to SEQ ID NO: 205686
  Synthetic oligonucleotide

SEQ ID NO: 641164 - DNA, 54 bp, Artificial; identical to SEQ ID NO: 155521
  Synthetic oligonucleotide

SEQ ID NO: 641165 - DNA, 56 bp, Artificial; identical to SEQ ID NO: 239472
  Synthetic oligonucleotide

SEQ ID NO: 641166 - DNA, 55 bp, Artificial; identical to SEQ ID NO: 218289
  Synthetic oligonucleotide

SEQ ID NO: 641167 - DNA, 58 bp, Artificial; identical to SEQ ID NO: 200750
  Synthetic oligonucleotide

SEQ ID NO: 641168 - DNA, 50 bp, Artificial; identical to SEQ ID NO: 191254
  Synthetic oligonucleotide

SEQ ID NO: 641169 - DNA, 55 bp, Artificial; identical to SEQ ID NO: 187625
  Synthetic oligonucleotide

SEQ ID NO: 641170 - DNA, 54 bp, Artificial; identical to SEQ ID NO: 246186
  Synthetic oligonucleotide

SEQ ID NO: 641171 - DNA, 57 bp, Artificial; identical to SEQ ID NO: 170818
  Synthetic oligonucleotide

SEQ ID NO: 641172 - DNA, 60 bp, Artificial; identical to SEQ ID NO: 182482
  Synthetic oligonucleotide

SEQ ID NO: 641173 - DNA, 55 bp, Artificial; identical to SEQ ID NO: 147761
  Synthetic oligonucleotide

SEQ ID NO: 641174 - DNA, 55 bp, Artificial; identical to SEQ ID NO: 210885
  Synthetic oligonucleotide

SEQ ID NO: 641175 - DNA, 56 bp, Artificial; identical to SEQ ID NO: 197843
  Synthetic oligonucleotide

SEQ ID NO: 641176 - DNA, 55 bp, Artificial; identical to SEQ ID NO: 202125
  Synthetic oligonucleotide

SEQ ID NO: 641177 - DNA, 54 bp, Artificial; identical to SEQ ID NO: 152613
  Synthetic oligonucleotide

SEQ ID NO: 641178 - DNA, 50 bp, Artificial; identical to SEQ ID NO: 194067
  Synthetic oligonucleotide

SEQ ID NO: 641179 - DNA, 55 bp, Artificial; identical to SEQ ID NO: 210928
  Synthetic oligonucleotide

SEQ ID NO: 641180 - DNA, 58 bp, Artificial; identical to SEQ ID NO: 247006
  Synthetic oligonucleotide

SEQ ID NO: 641181 - DNA, 55 bp, Artificial; identical to SEQ ID NO: 161011
  Synthetic oligonucleotide

SEQ ID NO: 641182 - DNA, 55 bp, Artificial; identical to SEQ ID NO: 221615
  Synthetic oligonucleotide

SEQ ID NO: 641183 - DNA, 52 bp, Artificial; identical to SEQ ID NO: 242578
  Synthetic oligonucleotide

SEQ ID NO: 641184 - DNA, 55 bp, Artificial; identical to SEQ ID NO: 197372
  Synthetic oligonucleotide

SEQ ID NO: 641185 - DNA, 55 bp, Artificial; identical to SEQ ID NO: 207253
  Synthetic oligonucleotide

SEQ ID NO: 641186 - DNA, 55 bp, Artificial; identical to SEQ ID NO: 242579
  Synthetic oligonucleotide

SEQ ID NO: 641187 - DNA, 55 bp, Artificial; identical to SEQ ID NO: 187631
  Synthetic oligonucleotide

SEQ ID NO: 641188 - DNA, 53 bp, Artificial; identical to SEQ ID NO: 151581
  Synthetic oligonucleotide

SEQ ID NO: 641189 - DNA, 55 bp, Artificial; identical to SEQ ID NO: 182257
  Synthetic oligonucleotide

SEQ ID NO: 641190 - DNA, 50 bp, Artificial; identical to SEQ ID NO: 167197
  Synthetic oligonucleotide

SEQ ID NO: 641191 - DNA, 55 bp, Artificial; identical to SEQ ID NO: 197369
  Synthetic oligonucleotide

SEQ ID NO: 641192 - DNA, 55 bp, Artificial; identical to SEQ ID NO: 155182
  Synthetic oligonucleotide

SEQ ID NO: 641193 - DNA, 55 bp, Artificial; identical to SEQ ID NO: 242580
  Synthetic oligonucleotide

SEQ ID NO: 641194 - DNA, 55 bp, Artificial; identical to SEQ ID NO: 218291
  Synthetic oligonucleotide

SEQ ID NO: 641195 - DNA, 58 bp, Artificial; identical to SEQ ID NO: 266426
  Synthetic oligonucleotide

SEQ ID NO: 641196 - DNA, 51 bp, Artificial; identical to SEQ ID NO: 257449
  Synthetic oligonucleotide

SEQ ID NO: 641197 - DNA, 55 bp, Artificial; identical to SEQ ID NO: 182255
  Synthetic oligonucleotide

SEQ ID NO: 641198 - DNA, 55 bp, Artificial; identical to SEQ ID NO: 156388
  Synthetic oligonucleotide

SEQ ID NO: 641199 - DNA, 55 bp, Artificial; identical to SEQ ID NO: 182253
  Synthetic oligonucleotide

SEQ ID NO: 641200 - DNA, 51 bp, Artificial; identical to SEQ ID NO: 248080
  Synthetic oligonucleotide

SEQ ID NO: 641201 - DNA, 55 bp, Artificial; identical to SEQ ID NO: 182296
  Synthetic oligonucleotide

SEQ ID NO: 641202 - DNA, 53 bp, Artificial; identical to SEQ ID NO: 185734
  Synthetic oligonucleotide

SEQ ID NO: 641203 - DNA, 52 bp, Artificial; identical to SEQ ID NO: 143816
  Synthetic oligonucleotide

SEQ ID NO: 641204 - DNA, 59 bp, Artificial; identical to SEQ ID NO: 212725
  Synthetic oligonucleotide

SEQ ID NO: 641205 - DNA, 55 bp, Artificial; identical to SEQ ID NO: 187634
  Synthetic oligonucleotide

SEQ ID NO: 641206 - DNA, 55 bp, Artificial; identical to SEQ ID NO: 212690
  Synthetic oligonucleotide

SEQ ID NO: 641207 - DNA, 55 bp, Artificial; identical to SEQ ID NO: 182295
  Synthetic oligonucleotide

SEQ ID NO: 641208 - DNA, 60 bp, Artificial; identical to SEQ ID NO: 208385
  Synthetic oligonucleotide

SEQ ID NO: 641209 - DNA, 53 bp, Artificial; identical to SEQ ID NO: 247847
  Synthetic oligonucleotide

SEQ ID NO: 641210 - DNA, 55 bp, Artificial; identical to SEQ ID NO: 248851
  Synthetic oligonucleotide

SEQ ID NO: 641211 - DNA, 56 bp, Artificial; identical to SEQ ID NO: 207065
  Synthetic oligonucleotide

SEQ ID NO: 641212 - DNA, 54 bp, Artificial; identical to SEQ ID NO: 253267
  Synthetic oligonucleotide

SEQ ID NO: 641213 - DNA, 55 bp, Artificial; identical to SEQ ID NO: 197368
  Synthetic oligonucleotide

SEQ ID NO: 641214 - DNA, 58 bp, Artificial; identical to SEQ ID NO: 152929
  Synthetic oligonucleotide

SEQ ID NO: 641215 - DNA, 53 bp, Artificial; identical to SEQ ID NO: 190591
  Synthetic oligonucleotide

SEQ ID NO: 641216 - DNA, 56 bp, Artificial; identical to SEQ ID NO: 209221
  Synthetic oligonucleotide

SEQ ID NO: 641217 - DNA, 53 bp, Artificial; identical to SEQ ID NO: 164085
  Synthetic oligonucleotide

SEQ ID NO: 641218 - DNA, 55 bp, Artificial; identical to SEQ ID NO: 171422
  Synthetic oligonucleotide

SEQ ID NO: 641219 - DNA, 57 bp, Artificial; identical to SEQ ID NO: 188160
  Synthetic oligonucleotide

SEQ ID NO: 641220 - DNA, 54 bp, Artificial; identical to SEQ ID NO: 197367
  Synthetic oligonucleotide

SEQ ID NO: 641221 - DNA, 55 bp, Artificial; identical to SEQ ID NO: 152284
  Synthetic oligonucleotide

SEQ ID NO: 641222 - DNA, 53 bp, Artificial; identical to SEQ ID NO: 239270
  Synthetic oligonucleotide

SEQ ID NO: 641223 - DNA, 55 bp, Artificial; identical to SEQ ID NO: 218214
  Synthetic oligonucleotide

SEQ ID NO: 641224 - DNA, 55 bp, Artificial; identical to SEQ ID NO: 151575
  Synthetic oligonucleotide

SEQ ID NO: 641225 - DNA, 55 bp, Artificial; identical to SEQ ID NO: 164084
  Synthetic oligonucleotide

SEQ ID NO: 641226 - DNA, 55 bp, Artificial; identical to SEQ ID NO: 208486
  Synthetic oligonucleotide

SEQ ID NO: 641227 - DNA, 55 bp, Artificial; identical to SEQ ID NO: 209365
  Synthetic oligonucleotide

SEQ ID NO: 641228 - DNA, 55 bp, Artificial; identical to SEQ ID NO: 174747
  Synthetic oligonucleotide

SEQ ID NO: 641229 - DNA, 55 bp, Artificial; identical to SEQ ID NO: 162095
  Synthetic oligonucleotide

SEQ ID NO: 641230 - DNA, 55 bp, Artificial; identical to SEQ ID NO: 191002
  Synthetic oligonucleotide

SEQ ID NO: 641231 - DNA, 51 bp, Artificial; identical to SEQ ID NO: 147765
  Synthetic oligonucleotide

SEQ ID NO: 641232 - DNA, 52 bp, Artificial; identical to SEQ ID NO: 168992
  Synthetic oligonucleotide

SEQ ID NO: 641233 - DNA, 55 bp, Artificial; identical to SEQ ID NO: 161165
  Synthetic oligonucleotide

SEQ ID NO: 641234 - DNA, 51 bp, Artificial; identical to SEQ ID NO: 160589
  Synthetic oligonucleotide

SEQ ID NO: 641235 - DNA, 60 bp, Artificial; identical to SEQ ID NO: 166977
  Synthetic oligonucleotide

SEQ ID NO: 641236 - DNA, 55 bp, Artificial; identical to SEQ ID NO: 142201
  Synthetic oligonucleotide

SEQ ID NO: 641237 - DNA, 55 bp, Artificial; identical to SEQ ID NO: 218213
  Synthetic oligonucleotide

SEQ ID NO: 641238 - DNA, 54 bp, Artificial; identical to SEQ ID NO: 221660
  Synthetic oligonucleotide

SEQ ID NO: 641239 - DNA, 55 bp, Artificial; identical to SEQ ID NO: 182294
  Synthetic oligonucleotide

SEQ ID NO: 641240 - DNA, 51 bp, Artificial; identical to SEQ ID NO: 204016
  Synthetic oligonucleotide

SEQ ID NO: 641241 - DNA, 55 bp, Artificial; identical to SEQ ID NO: 164082
  Synthetic oligonucleotide

SEQ ID NO: 641242 - DNA, 56 bp, Artificial; identical to SEQ ID NO: 224169
  Synthetic oligonucleotide

SEQ ID NO: 641243 - DNA, 55 bp, Artificial; identical to SEQ ID NO: 242582
  Synthetic oligonucleotide

SEQ ID NO: 641244 - DNA, 55 bp, Artificial; identical to SEQ ID NO: 198543
  Synthetic oligonucleotide

SEQ ID NO: 641245 - DNA, 55 bp, Artificial; identical to SEQ ID NO: 208483
  Synthetic oligonucleotide

SEQ ID NO: 641246 - DNA, 51 bp, Artificial; identical to SEQ ID NO: 170111
  Synthetic oligonucleotide

SEQ ID NO: 641247 - DNA, 55 bp, Artificial; identical to SEQ ID NO: 253074
  Synthetic oligonucleotide

SEQ ID NO: 641248 - DNA, 51 bp, Artificial; identical to SEQ ID NO: 146509
  Synthetic oligonucleotide

SEQ ID NO: 641249 - DNA, 55 bp, Artificial; identical to SEQ ID NO: 239950
  Synthetic oligonucleotide

SEQ ID NO: 641250 - DNA, 50 bp, Artificial; identical to SEQ ID NO: 176177
  Synthetic oligonucleotide

SEQ ID NO: 641251 - DNA, 60 bp, Artificial; identical to SEQ ID NO: 201906
  Synthetic oligonucleotide

SEQ ID NO: 641252 - DNA, 53 bp, Artificial; identical to SEQ ID NO: 211578
  Synthetic oligonucleotide

SEQ ID NO: 641253 - DNA, 60 bp, Artificial; identical to SEQ ID NO: 247855
  Synthetic oligonucleotide

SEQ ID NO: 641254 - DNA, 56 bp, Artificial; identical to SEQ ID NO: 200748
  Synthetic oligonucleotide

SEQ ID NO: 641255 - DNA, 55 bp, Artificial; identical to SEQ ID NO: 220621
  Synthetic oligonucleotide

SEQ ID NO: 641256 - DNA, 52 bp, Artificial; identical to SEQ ID NO: 248601
  Synthetic oligonucleotide

SEQ ID NO: 641257 - DNA, 60 bp, Artificial; identical to SEQ ID NO: 225313
  Synthetic oligonucleotide

SEQ ID NO: 641258 - DNA, 55 bp, Artificial; identical to SEQ ID NO: 167503
  Synthetic oligonucleotide

SEQ ID NO: 641259 - DNA, 50 bp, Artificial; identical to SEQ ID NO: 189868
  Synthetic oligonucleotide

SEQ ID NO: 641260 - DNA, 60 bp, Artificial; identical to SEQ ID NO: 200747
  Synthetic oligonucleotide

SEQ ID NO: 641261 - DNA, 55 bp, Artificial; identical to SEQ ID NO: 201532
  Synthetic oligonucleotide

SEQ ID NO: 641262 - DNA, 55 bp, Artificial; identical to SEQ ID NO: 217597
  Synthetic oligonucleotide

SEQ ID NO: 641263 - DNA, 55 bp, Artificial; identical to SEQ ID NO: 222639
  Synthetic oligonucleotide

SEQ ID NO: 641264 - DNA, 53 bp, Artificial; identical to SEQ ID NO: 236990
  Synthetic oligonucleotide

SEQ ID NO: 641265 - DNA, 53 bp, Artificial; identical to SEQ ID NO: 198542
  Synthetic oligonucleotide

SEQ ID NO: 641266 - DNA, 55 bp, Artificial; identical to SEQ ID NO: 239989
  Synthetic oligonucleotide

SEQ ID NO: 641267 - DNA, 60 bp, Artificial; identical to SEQ ID NO: 208374
  Synthetic oligonucleotide

SEQ ID NO: 641268 - DNA, 56 bp, Artificial; identical to SEQ ID NO: 187201
  Synthetic oligonucleotide

SEQ ID NO: 641269 - DNA, 55 bp, Artificial; identical to SEQ ID NO: 244774
  Synthetic oligonucleotide

SEQ ID NO: 641270 - DNA, 53 bp, Artificial; identical to SEQ ID NO: 212985
  Synthetic oligonucleotide

SEQ ID NO: 641271 - DNA, 55 bp, Artificial; identical to SEQ ID NO: 207254
  Synthetic oligonucleotide

SEQ ID NO: 641272 - DNA, 53 bp, Artificial; identical to SEQ ID NO: 240823
  Synthetic oligonucleotide

SEQ ID NO: 641273 - DNA, 55 bp, Artificial; identical to SEQ ID NO: 217087
  Synthetic oligonucleotide

SEQ ID NO: 641274 - DNA, 54 bp, Artificial; identical to SEQ ID NO: 159742
  Synthetic oligonucleotide

SEQ ID NO: 641275 - DNA, 56 bp, Artificial; identical to SEQ ID NO: 239304
  Synthetic oligonucleotide

SEQ ID NO: 641276 - DNA, 55 bp, Artificial; identical to SEQ ID NO: 249505
  Synthetic oligonucleotide

SEQ ID NO: 641277 - DNA, 55 bp, Artificial; identical to SEQ ID NO: 172911
  Synthetic oligonucleotide

SEQ ID NO: 641278 - DNA, 55 bp, Artificial; identical to SEQ ID NO: 182290
  Synthetic oligonucleotide

SEQ ID NO: 641279 - DNA, 50 bp, Artificial; identical to SEQ ID NO: 239315
  Synthetic oligonucleotide

SEQ ID NO: 641280 - DNA, 60 bp, Artificial; identical to SEQ ID NO: 200746
  Synthetic oligonucleotide

SEQ ID NO: 641281 - DNA, 60 bp, Artificial; identical to SEQ ID NO: 164789
  Synthetic oligonucleotide

SEQ ID NO: 641282 - DNA, 55 bp, Artificial; identical to SEQ ID NO: 210913
  Synthetic oligonucleotide

SEQ ID NO: 641283 - DNA, 55 bp, Artificial; identical to SEQ ID NO: 182288
  Synthetic oligonucleotide

SEQ ID NO: 641284 - DNA, 52 bp, Artificial; identical to SEQ ID NO: 190821
  Synthetic oligonucleotide

SEQ ID NO: 641285 - DNA, 53 bp, Artificial; identical to SEQ ID NO: 153609
  Synthetic oligonucleotide

SEQ ID NO: 641286 - DNA, 55 bp, Artificial; identical to SEQ ID NO: 239901
  Synthetic oligonucleotide

SEQ ID NO: 641287 - DNA, 55 bp, Artificial; identical to SEQ ID NO: 238511
  Synthetic oligonucleotide

SEQ ID NO: 641288 - DNA, 55 bp, Artificial; identical to SEQ ID NO: 147768
  Synthetic oligonucleotide

SEQ ID NO: 641289 - DNA, 58 bp, Artificial; identical to SEQ ID NO: 224289
  Synthetic oligonucleotide

SEQ ID NO: 641290 - DNA, 50 bp, Artificial; identical to SEQ ID NO: 190590
  Synthetic oligonucleotide

SEQ ID NO: 641291 - DNA, 60 bp, Artificial; identical to SEQ ID NO: 247004
  Synthetic oligonucleotide

SEQ ID NO: 641292 - DNA, 60 bp, Artificial; identical to SEQ ID NO: 224291
  Synthetic oligonucleotide

SEQ ID NO: 641293 - DNA, 55 bp, Artificial; identical to SEQ ID NO: 207256
  Synthetic oligonucleotide

SEQ ID NO: 641294 - DNA, 55 bp, Artificial; identical to SEQ ID NO: 153161
  Synthetic oligonucleotide

SEQ ID NO: 641295 - DNA, 55 bp, Artificial; identical to SEQ ID NO: 164129
  Synthetic oligonucleotide

SEQ ID NO: 641296 - DNA, 50 bp, Artificial; identical to SEQ ID NO: 206672
  Synthetic oligonucleotide

SEQ ID NO: 641297 - DNA, 50 bp, Artificial; identical to SEQ ID NO: 146523
  Synthetic oligonucleotide

SEQ ID NO: 641298 - DNA, 55 bp, Artificial; identical to SEQ ID NO: 147769
  Synthetic oligonucleotide

SEQ ID NO: 641299 - DNA, 56 bp, Artificial; identical to SEQ ID NO: 147055
  Synthetic oligonucleotide

SEQ ID NO: 641300 - DNA, 56 bp, Artificial; identical to SEQ ID NO: 247589
  Synthetic oligonucleotide

SEQ ID NO: 641301 - DNA, 60 bp, Artificial; identical to SEQ ID NO: 181738
  Synthetic oligonucleotide

SEQ ID NO: 641302 - DNA, 55 bp, Artificial; identical to SEQ ID NO: 197364
  Synthetic oligonucleotide

SEQ ID NO: 641303 - DNA, 55 bp, Artificial; identical to SEQ ID NO: 182285
  Synthetic oligonucleotide

SEQ ID NO: 641304 - DNA, 55 bp, Artificial; identical to SEQ ID NO: 244766
  Synthetic oligonucleotide

SEQ ID NO: 641305 - DNA, 54 bp, Artificial; identical to SEQ ID NO: 185230
  Synthetic oligonucleotide

SEQ ID NO: 641306 - DNA, 55 bp, Artificial; identical to SEQ ID NO: 182284
  Synthetic oligonucleotide

SEQ ID NO: 641307 - DNA, 55 bp, Artificial; identical to SEQ ID NO: 244705
  Synthetic oligonucleotide

SEQ ID NO: 641308 - DNA, 55 bp, Artificial; identical to SEQ ID NO: 198540
  Synthetic oligonucleotide

SEQ ID NO: 641309 - DNA, 50 bp, Artificial; identical to SEQ ID NO: 160645
  Synthetic oligonucleotide

SEQ ID NO: 641310 - DNA, 55 bp, Artificial; identical to SEQ ID NO: 182283
  Synthetic oligonucleotide

SEQ ID NO: 641311 - DNA, 55 bp, Artificial; identical to SEQ ID NO: 198539
  Synthetic oligonucleotide

SEQ ID NO: 641312 - DNA, 55 bp, Artificial; identical to SEQ ID NO: 207257
  Synthetic oligonucleotide

SEQ ID NO: 641313 - DNA, 53 bp, Artificial; identical to SEQ ID NO: 244704
  Synthetic oligonucleotide

SEQ ID NO: 641314 - DNA, 55 bp, Artificial; identical to SEQ ID NO: 169221
  Synthetic oligonucleotide

SEQ ID NO: 641315 - DNA, 53 bp, Artificial; identical to SEQ ID NO: 188075
  Synthetic oligonucleotide

SEQ ID NO: 641316 - DNA, 55 bp, Artificial; identical to SEQ ID NO: 218865
  Synthetic oligonucleotide

SEQ ID NO: 641317 - DNA, 55 bp, Artificial; identical to SEQ ID NO: 254344
  Synthetic oligonucleotide

SEQ ID NO: 641318 - DNA, 55 bp, Artificial; identical to SEQ ID NO: 202031
  Synthetic oligonucleotide

SEQ ID NO: 641319 - DNA, 55 bp, Artificial; identical to SEQ ID NO: 263176
  Synthetic oligonucleotide

SEQ ID NO: 641320 - DNA, 55 bp, Artificial; identical to SEQ ID NO: 153167
  Synthetic oligonucleotide

SEQ ID NO: 641321 - DNA, 55 bp, Artificial; identical to SEQ ID NO: 266125
  Synthetic oligonucleotide

SEQ ID NO: 641322 - DNA, 55 bp, Artificial; identical to SEQ ID NO: 154456
  Synthetic oligonucleotide

SEQ ID NO: 641323 - DNA, 55 bp, Artificial; identical to SEQ ID NO: 190541
  Synthetic oligonucleotide

SEQ ID NO: 641324 - DNA, 55 bp, Artificial; identical to SEQ ID NO: 254346
  Synthetic oligonucleotide

SEQ ID NO: 641325 - DNA, 54 bp, Artificial; identical to SEQ ID NO: 185232
  Synthetic oligonucleotide

SEQ ID NO: 641326 - DNA, 55 bp, Artificial; identical to SEQ ID NO: 244701
  Synthetic oligonucleotide

SEQ ID NO: 641327 - DNA, 55 bp, Artificial; identical to SEQ ID NO: 156389
  Synthetic oligonucleotide

SEQ ID NO: 641328 - DNA, 55 bp, Artificial; identical to SEQ ID NO: 182280
  Synthetic oligonucleotide

SEQ ID NO: 641329 - DNA, 51 bp, Artificial; identical to SEQ ID NO: 164133
  Synthetic oligonucleotide

SEQ ID NO: 641330 - DNA, 55 bp, Artificial; identical to SEQ ID NO: 190540
  Synthetic oligonucleotide

SEQ ID NO: 641331 - DNA, 53 bp, Artificial; identical to SEQ ID NO: 224229
  Synthetic oligonucleotide

SEQ ID NO: 641332 - DNA, 55 bp, Artificial; identical to SEQ ID NO: 252938
  Synthetic oligonucleotide

SEQ ID NO: 641333 - DNA, 55 bp, Artificial; identical to SEQ ID NO: 244698
  Synthetic oligonucleotide

SEQ ID NO: 641334 - DNA, 60 bp, Artificial; identical to SEQ ID NO: 147260
  Synthetic oligonucleotide

SEQ ID NO: 641335 - DNA, 55 bp, Artificial; identical to SEQ ID NO: 156444
  Synthetic oligonucleotide

SEQ ID NO: 641336 - DNA, 55 bp, Artificial; identical to SEQ ID NO: 182277
  Synthetic oligonucleotide

SEQ ID NO: 641337 - DNA, 51 bp, Artificial; identical to SEQ ID NO: 244696
  Synthetic oligonucleotide

SEQ ID NO: 641338 - DNA, 55 bp, Artificial; identical to SEQ ID NO: 197363
  Synthetic oligonucleotide

SEQ ID NO: 641339 - DNA, 55 bp, Artificial; identical to SEQ ID NO: 209363
  Synthetic oligonucleotide

SEQ ID NO: 641340 - DNA, 58 bp, Artificial; identical to SEQ ID NO: 187200
  Synthetic oligonucleotide

SEQ ID NO: 641341 - DNA, 55 bp, Artificial; identical to SEQ ID NO: 210908
  Synthetic oligonucleotide

SEQ ID NO: 641342 - DNA, 54 bp, Artificial; identical to SEQ ID NO: 198536
  Synthetic oligonucleotide

SEQ ID NO: 641343 - DNA, 55 bp, Artificial; identical to SEQ ID NO: 161854
  Synthetic oligonucleotide

SEQ ID NO: 641344 - DNA, 55 bp, Artificial; identical to SEQ ID NO: 242587
  Synthetic oligonucleotide

SEQ ID NO: 641345 - DNA, 55 bp, Artificial; identical to SEQ ID NO: 156446
  Synthetic oligonucleotide

SEQ ID NO: 641346 - DNA, 55 bp, Artificial; identical to SEQ ID NO: 164135
  Synthetic oligonucleotide

SEQ ID NO: 641347 - DNA, 53 bp, Artificial; identical to SEQ ID NO: 144520
  Synthetic oligonucleotide

SEQ ID NO: 641348 - DNA, 53 bp, Artificial; identical to SEQ ID NO: 185703
  Synthetic oligonucleotide

SEQ ID NO: 641349 - DNA, 55 bp, Artificial; identical to SEQ ID NO: 242588
  Synthetic oligonucleotide

SEQ ID NO: 641350 - DNA, 55 bp, Artificial; identical to SEQ ID NO: 182409
  Synthetic oligonucleotide

SEQ ID NO: 641351 - DNA, 51 bp, Artificial; identical to SEQ ID NO: 146515
  Synthetic oligonucleotide

SEQ ID NO: 641352 - DNA, 55 bp, Artificial; identical to SEQ ID NO: 207259
  Synthetic oligonucleotide

SEQ ID NO: 641353 - DNA, 55 bp, Artificial; identical to SEQ ID NO: 156447
  Synthetic oligonucleotide

SEQ ID NO: 641354 - DNA, 53 bp, Artificial; identical to SEQ ID NO: 146398
  Synthetic oligonucleotide

SEQ ID NO: 641355 - DNA, 55 bp, Artificial; identical to SEQ ID NO: 207305
  Synthetic oligonucleotide

SEQ ID NO: 641356 - DNA, 56 bp, Artificial; identical to SEQ ID NO: 181649
  Synthetic oligonucleotide

SEQ ID NO: 641357 - DNA, 54 bp, Artificial; identical to SEQ ID NO: 151983
  Synthetic oligonucleotide

SEQ ID NO: 641358 - DNA, 55 bp, Artificial; identical to SEQ ID NO: 147772
  Synthetic oligonucleotide

SEQ ID NO: 641359 - DNA, 59 bp, Artificial; identical to SEQ ID NO: 205205
  Synthetic oligonucleotide

SEQ ID NO: 641360 - DNA, 55 bp, Artificial; identical to SEQ ID NO: 171883
  Synthetic oligonucleotide

SEQ ID NO: 641361 - DNA, 55 bp, Artificial; identical to SEQ ID NO: 239619
  Synthetic oligonucleotide

SEQ ID NO: 641362 - DNA, 55 bp, Artificial; identical to SEQ ID NO: 223398
  Synthetic oligonucleotide

SEQ ID NO: 641363 - DNA, 56 bp, Artificial; identical to SEQ ID NO: 179521
  Synthetic oligonucleotide

SEQ ID NO: 641364 - DNA, 60 bp, Artificial; identical to SEQ ID NO: 155197
  Synthetic oligonucleotide

SEQ ID NO: 641365 - DNA, 55 bp, Artificial; identical to SEQ ID NO: 194627
  Synthetic oligonucleotide

SEQ ID NO: 641366 - DNA, 55 bp, Artificial; identical to SEQ ID NO: 225164
  Synthetic oligonucleotide

SEQ ID NO: 641367 - DNA, 55 bp, Artificial; identical to SEQ ID NO: 252939
  Synthetic oligonucleotide

SEQ ID NO: 641368 - DNA, 55 bp, Artificial; identical to SEQ ID NO: 168513
  Synthetic oligonucleotide

SEQ ID NO: 641369 - DNA, 54 bp, Artificial; identical to SEQ ID NO: 266740
  Synthetic oligonucleotide

SEQ ID NO: 641370 - DNA, 55 bp, Artificial; identical to SEQ ID NO: 248853
  Synthetic oligonucleotide

SEQ ID NO: 641371 - DNA, 55 bp, Artificial; identical to SEQ ID NO: 154457
  Synthetic oligonucleotide

SEQ ID NO: 641372 - DNA, 55 bp, Artificial; identical to SEQ ID NO: 189500
  Synthetic oligonucleotide

SEQ ID NO: 641373 - DNA, 55 bp, Artificial; identical to SEQ ID NO: 187458
  Synthetic oligonucleotide

SEQ ID NO: 641374 - DNA, 53 bp, Artificial; identical to SEQ ID NO: 203505
  Synthetic oligonucleotide

SEQ ID NO: 641375 - DNA, 59 bp, Artificial; identical to SEQ ID NO: 174713
  Synthetic oligonucleotide

SEQ ID NO: 641376 - DNA, 55 bp, Artificial; identical to SEQ ID NO: 208481
  Synthetic oligonucleotide

SEQ ID NO: 641377 - DNA, 55 bp, Artificial; identical to SEQ ID NO: 191000
  Synthetic oligonucleotide

SEQ ID NO: 641378 - DNA, 51 bp, Artificial; identical to SEQ ID NO: 147773
  Synthetic oligonucleotide

SEQ ID NO: 641379 - DNA, 53 bp, Artificial; identical to SEQ ID NO: 157425
  Synthetic oligonucleotide

SEQ ID NO: 641380 - DNA, 55 bp, Artificial; identical to SEQ ID NO: 182407
  Synthetic oligonucleotide

SEQ ID NO: 641381 - DNA, 58 bp, Artificial; identical to SEQ ID NO: 179512
  Synthetic oligonucleotide

SEQ ID NO: 641382 - DNA, 55 bp, Artificial; identical to SEQ ID NO: 198534
  Synthetic oligonucleotide

SEQ ID NO: 641383 - DNA, 55 bp, Artificial; identical to SEQ ID NO: 174788
  Synthetic oligonucleotide

SEQ ID NO: 641384 - DNA, 53 bp, Artificial; identical to SEQ ID NO: 197506
  Synthetic oligonucleotide

SEQ ID NO: 641385 - DNA, 55 bp, Artificial; identical to SEQ ID NO: 187462
  Synthetic oligonucleotide

SEQ ID NO: 641386 - DNA, 51 bp, Artificial; identical to SEQ ID NO: 208833
  Synthetic oligonucleotide

SEQ ID NO: 641387 - DNA, 55 bp, Artificial; identical to SEQ ID NO: 202057
  Synthetic oligonucleotide

SEQ ID NO: 641388 - DNA, 55 bp, Artificial; identical to SEQ ID NO: 234363
  Synthetic oligonucleotide

SEQ ID NO: 641389 - DNA, 55 bp, Artificial; identical to SEQ ID NO: 244686
  Synthetic oligonucleotide

SEQ ID NO: 641390 - DNA, 55 bp, Artificial; identical to SEQ ID NO: 212694
  Synthetic oligonucleotide

SEQ ID NO: 641391 - DNA, 55 bp, Artificial; identical to SEQ ID NO: 164137
  Synthetic oligonucleotide

SEQ ID NO: 641392 - DNA, 60 bp, Artificial; identical to SEQ ID NO: 222806
  Synthetic oligonucleotide

SEQ ID NO: 641393 - DNA, 52 bp, Artificial; identical to SEQ ID NO: 157484
  Synthetic oligonucleotide

SEQ ID NO: 641394 - DNA, 55 bp, Artificial; identical to SEQ ID NO: 168515
  Synthetic oligonucleotide

SEQ ID NO: 641395 - DNA, 58 bp, Artificial; identical to SEQ ID NO: 179413
  Synthetic oligonucleotide

SEQ ID NO: 641396 - DNA, 55 bp, Artificial; identical to SEQ ID NO: 182400
  Synthetic oligonucleotide

SEQ ID NO: 641397 - DNA, 55 bp, Artificial; identical to SEQ ID NO: 182398
  Synthetic oligonucleotide

SEQ ID NO: 641398 - DNA, 55 bp, Artificial; identical to SEQ ID NO: 156449
  Synthetic oligonucleotide

SEQ ID NO: 641399 - DNA, 55 bp, Artificial; identical to SEQ ID NO: 238516
  Synthetic oligonucleotide

SEQ ID NO: 641400 - DNA, 55 bp, Artificial; identical to SEQ ID NO: 242591
  Synthetic oligonucleotide

SEQ ID NO: 641401 - DNA, 50 bp, Artificial; identical to SEQ ID NO: 168070
  Synthetic oligonucleotide

SEQ ID NO: 641402 - DNA, 55 bp, Artificial; identical to SEQ ID NO: 142205
  Synthetic oligonucleotide

SEQ ID NO: 641403 - DNA, 53 bp, Artificial; identical to SEQ ID NO: 265834
  Synthetic oligonucleotide

SEQ ID NO: 641404 - DNA, 58 bp, Artificial; identical to SEQ ID NO: 170796
  Synthetic oligonucleotide

SEQ ID NO: 641405 - DNA, 51 bp, Artificial; identical to SEQ ID NO: 149905
  Synthetic oligonucleotide

SEQ ID NO: 641406 - DNA, 55 bp, Artificial; identical to SEQ ID NO: 238517
  Synthetic oligonucleotide

SEQ ID NO: 641407 - DNA, 58 bp, Artificial; identical to SEQ ID NO: 182127
  Synthetic oligonucleotide

SEQ ID NO: 641408 - DNA, 50 bp, Artificial; identical to SEQ ID NO: 237674
  Synthetic oligonucleotide

SEQ ID NO: 641409 - DNA, 55 bp, Artificial; identical to SEQ ID NO: 197361
  Synthetic oligonucleotide

SEQ ID NO: 641410 - DNA, 55 bp, Artificial; identical to SEQ ID NO: 244333
  Synthetic oligonucleotide

SEQ ID NO: 641411 - DNA, 55 bp, Artificial; identical to SEQ ID NO: 244334
  Synthetic oligonucleotide

SEQ ID NO: 641412 - DNA, 56 bp, Artificial; identical to SEQ ID NO: 225335
  Synthetic oligonucleotide

SEQ ID NO: 641413 - DNA, 55 bp, Artificial; identical to SEQ ID NO: 189040
  Synthetic oligonucleotide

SEQ ID NO: 641414 - DNA, 55 bp, Artificial; identical to SEQ ID NO: 244684
  Synthetic oligonucleotide

SEQ ID NO: 641415 - DNA, 59 bp, Artificial; identical to SEQ ID NO: 141704
  Synthetic oligonucleotide

SEQ ID NO: 641416 - DNA, 56 bp, Artificial; identical to SEQ ID NO: 200745
  Synthetic oligonucleotide

SEQ ID NO: 641417 - DNA, 55 bp, Artificial; identical to SEQ ID NO: 193216
  Synthetic oligonucleotide

SEQ ID NO: 641418 - DNA, 59 bp, Artificial; identical to SEQ ID NO: 239167
  Synthetic oligonucleotide

SEQ ID NO: 641419 - DNA, 51 bp, Artificial; identical to SEQ ID NO: 182389
  Synthetic oligonucleotide

SEQ ID NO: 641420 - DNA, 55 bp, Artificial; identical to SEQ ID NO: 223392
  Synthetic oligonucleotide

SEQ ID NO: 641421 - DNA, 60 bp, Artificial; identical to SEQ ID NO: 203101
  Synthetic oligonucleotide

SEQ ID NO: 641422 - DNA, 55 bp, Artificial; identical to SEQ ID NO: 155181
  Synthetic oligonucleotide

SEQ ID NO: 641423 - DNA, 53 bp, Artificial; identical to SEQ ID NO: 244021
  Synthetic oligonucleotide

SEQ ID NO: 641424 - DNA, 52 bp, Artificial; identical to SEQ ID NO: 198529
  Synthetic oligonucleotide

SEQ ID NO: 641425 - DNA, 55 bp, Artificial; identical to SEQ ID NO: 198528
  Synthetic oligonucleotide

SEQ ID NO: 641426 - DNA, 55 bp, Artificial; identical to SEQ ID NO: 203509
  Synthetic oligonucleotide

SEQ ID NO: 641427 - DNA, 54 bp, Artificial; identical to SEQ ID NO: 149146
  Synthetic oligonucleotide

SEQ ID NO: 641428 - DNA, 56 bp, Artificial; identical to SEQ ID NO: 171093
  Synthetic oligonucleotide

SEQ ID NO: 641429 - DNA, 51 bp, Artificial; identical to SEQ ID NO: 186719
  Synthetic oligonucleotide

SEQ ID NO: 641430 - DNA, 55 bp, Artificial; identical to SEQ ID NO: 162093
  Synthetic oligonucleotide

SEQ ID NO: 641431 - DNA, 55 bp, Artificial; identical to SEQ ID NO: 182431
  Synthetic oligonucleotide

SEQ ID NO: 641432 - DNA, 55 bp, Artificial; identical to SEQ ID NO: 244683
  Synthetic oligonucleotide

SEQ ID NO: 641433 - DNA, 60 bp, Artificial; identical to SEQ ID NO: 200744
  Synthetic oligonucleotide

SEQ ID NO: 641434 - DNA, 54 bp, Artificial; identical to SEQ ID NO: 202055
  Synthetic oligonucleotide

SEQ ID NO: 641435 - DNA, 57 bp, Artificial; identical to SEQ ID NO: 170762
  Synthetic oligonucleotide

SEQ ID NO: 641436 - DNA, 55 bp, Artificial; identical to SEQ ID NO: 190998
  Synthetic oligonucleotide

SEQ ID NO: 641437 - DNA, 55 bp, Artificial; identical to SEQ ID NO: 202048
  Synthetic oligonucleotide

SEQ ID NO: 641438 - DNA, 55 bp, Artificial; identical to SEQ ID NO: 207308
  Synthetic oligonucleotide

SEQ ID NO: 641439 - DNA, 55 bp, Artificial; identical to SEQ ID NO: 198525
  Synthetic oligonucleotide

SEQ ID NO: 641440 - DNA, 52 bp, Artificial; identical to SEQ ID NO: 248625
  Synthetic oligonucleotide

SEQ ID NO: 641441 - DNA, 55 bp, Artificial; identical to SEQ ID NO: 254349
  Synthetic oligonucleotide

SEQ ID NO: 641442 - DNA, 50 bp, Artificial; identical to SEQ ID NO: 246936
  Synthetic oligonucleotide

SEQ ID NO: 641443 - DNA, 51 bp, Artificial; identical to SEQ ID NO: 237168
  Synthetic oligonucleotide

SEQ ID NO: 641444 - DNA, 55 bp, Artificial; identical to SEQ ID NO: 210882
  Synthetic oligonucleotide

SEQ ID NO: 641445 - DNA, 60 bp, Artificial; identical to SEQ ID NO: 141705
  Synthetic oligonucleotide

SEQ ID NO: 641446 - DNA, 58 bp, Artificial; identical to SEQ ID NO: 179520
  Synthetic oligonucleotide

SEQ ID NO: 641447 - DNA, 55 bp, Artificial; identical to SEQ ID NO: 254350
  Synthetic oligonucleotide

SEQ ID NO: 641448 - DNA, 55 bp, Artificial; identical to SEQ ID NO: 252941
  Synthetic oligonucleotide

SEQ ID NO: 641449 - DNA, 55 bp, Artificial; identical to SEQ ID NO: 161163
  Synthetic oligonucleotide

SEQ ID NO: 641450 - DNA, 55 bp, Artificial; identical to SEQ ID NO: 220623
  Synthetic oligonucleotide

SEQ ID NO: 641451 - DNA, 55 bp, Artificial; identical to SEQ ID NO: 207309
  Synthetic oligonucleotide

SEQ ID NO: 641452 - DNA, 56 bp, Artificial; identical to SEQ ID NO: 256655
  Synthetic oligonucleotide

SEQ ID NO: 641453 - DNA, 55 bp, Artificial; identical to SEQ ID NO: 247454
  Synthetic oligonucleotide

SEQ ID NO: 641454 - DNA, 55 bp, Artificial; identical to SEQ ID NO: 174619
  Synthetic oligonucleotide

SEQ ID NO: 641455 - DNA, 58 bp, Artificial; identical to SEQ ID NO: 179522
  Synthetic oligonucleotide

SEQ ID NO: 641456 - DNA, 60 bp, Artificial; identical to SEQ ID NO: 141708
  Synthetic oligonucleotide

SEQ ID NO: 641457 - DNA, 52 bp, Artificial; identical to SEQ ID NO: 246412
  Synthetic oligonucleotide

SEQ ID NO: 641458 - DNA, 55 bp, Artificial; identical to SEQ ID NO: 239707
  Synthetic oligonucleotide

SEQ ID NO: 641459 - DNA, 55 bp, Artificial; identical to SEQ ID NO: 190535
  Synthetic oligonucleotide

SEQ ID NO: 641460 - DNA, 52 bp, Artificial; identical to SEQ ID NO: 149697
  Synthetic oligonucleotide

SEQ ID NO: 641461 - DNA, 56 bp, Artificial; identical to SEQ ID NO: 239458
  Synthetic oligonucleotide

SEQ ID NO: 641462 - DNA, 55 bp, Artificial; identical to SEQ ID NO: 208479
  Synthetic oligonucleotide

SEQ ID NO: 641463 - DNA, 55 bp, Artificial; identical to SEQ ID NO: 218208
  Synthetic oligonucleotide

SEQ ID NO: 641464 - DNA, 55 bp, Artificial; identical to SEQ ID NO: 233546
  Synthetic oligonucleotide

SEQ ID NO: 641465 - DNA, 55 bp, Artificial; identical to SEQ ID NO: 244336
  Synthetic oligonucleotide

SEQ ID NO: 641466 - DNA, 55 bp, Artificial; identical to SEQ ID NO: 242561
  Synthetic oligonucleotide

SEQ ID NO: 641467 - DNA, 55 bp, Artificial; identical to SEQ ID NO: 190534
  Synthetic oligonucleotide

SEQ ID NO: 641468 - DNA, 54 bp, Artificial; identical to SEQ ID NO: 238826
  Synthetic oligonucleotide

SEQ ID NO: 641469 - DNA, 55 bp, Artificial; identical to SEQ ID NO: 252943
  Synthetic oligonucleotide

SEQ ID NO: 641470 - DNA, 55 bp, Artificial; identical to SEQ ID NO: 233964
  Synthetic oligonucleotide

SEQ ID NO: 641471 - DNA, 55 bp, Artificial; identical to SEQ ID NO: 198524
  Synthetic oligonucleotide

SEQ ID NO: 641472 - DNA, 60 bp, Artificial; identical to SEQ ID NO: 238849
  Synthetic oligonucleotide

SEQ ID NO: 641473 - DNA, 55 bp, Artificial; identical to SEQ ID NO: 147810
  Synthetic oligonucleotide

SEQ ID NO: 641474 - DNA, 55 bp, Artificial; identical to SEQ ID NO: 261928
  Synthetic oligonucleotide

SEQ ID NO: 641475 - DNA, 50 bp, Artificial; identical to SEQ ID NO: 185219
  Synthetic oligonucleotide

SEQ ID NO: 641476 - DNA, 54 bp, Artificial; identical to SEQ ID NO: 182424
  Synthetic oligonucleotide

SEQ ID NO: 641477 - DNA, 56 bp, Artificial; identical to SEQ ID NO: 141709
  Synthetic oligonucleotide

SEQ ID NO: 641478 - DNA, 55 bp, Artificial; identical to SEQ ID NO: 244680
  Synthetic oligonucleotide

SEQ ID NO: 641479 - DNA, 55 bp, Artificial; identical to SEQ ID NO: 182423
  Synthetic oligonucleotide

SEQ ID NO: 641480 - DNA, 55 bp, Artificial; identical to SEQ ID NO: 212695
  Synthetic oligonucleotide

SEQ ID NO: 641481 - DNA, 55 bp, Artificial; identical to SEQ ID NO: 223391
  Synthetic oligonucleotide

SEQ ID NO: 641482 - DNA, 55 bp, Artificial; identical to SEQ ID NO: 143694
  Synthetic oligonucleotide

SEQ ID NO: 641483 - DNA, 55 bp, Artificial; identical to SEQ ID NO: 196250
  Synthetic oligonucleotide

SEQ ID NO: 641484 - DNA, 50 bp, Artificial; identical to SEQ ID NO: 209777
  Synthetic oligonucleotide

SEQ ID NO: 641485 - DNA, 55 bp, Artificial; identical to SEQ ID NO: 194628
  Synthetic oligonucleotide

SEQ ID NO: 641486 - DNA, 53 bp, Artificial; identical to SEQ ID NO: 167504
  Synthetic oligonucleotide

SEQ ID NO: 641487 - DNA, 55 bp, Artificial; identical to SEQ ID NO: 182420
  Synthetic oligonucleotide

SEQ ID NO: 641488 - DNA, 60 bp, Artificial; identical to SEQ ID NO: 254544
  Synthetic oligonucleotide

SEQ ID NO: 641489 - DNA, 55 bp, Artificial; identical to SEQ ID NO: 164139
  Synthetic oligonucleotide

SEQ ID NO: 641490 - DNA, 54 bp, Artificial; identical to SEQ ID NO: 185222
  Synthetic oligonucleotide

SEQ ID NO: 641491 - DNA, 52 bp, Artificial; identical to SEQ ID NO: 171416
  Synthetic oligonucleotide

SEQ ID NO: 641492 - DNA, 55 bp, Artificial; identical to SEQ ID NO: 239643
  Synthetic oligonucleotide

SEQ ID NO: 641493 - DNA, 56 bp, Artificial; identical to SEQ ID NO: 203362
  Synthetic oligonucleotide

SEQ ID NO: 641494 - DNA, 55 bp, Artificial; identical to SEQ ID NO: 198523
  Synthetic oligonucleotide

SEQ ID NO: 641495 - DNA, 51 bp, Artificial; identical to SEQ ID NO: 165155
  Synthetic oligonucleotide

SEQ ID NO: 641496 - DNA, 54 bp, Artificial; identical to SEQ ID NO: 246214
  Synthetic oligonucleotide

SEQ ID NO: 641497 - DNA, 55 bp, Artificial; identical to SEQ ID NO: 196251
  Synthetic oligonucleotide

SEQ ID NO: 641498 - DNA, 55 bp, Artificial; identical to SEQ ID NO: 244735
  Synthetic oligonucleotide

SEQ ID NO: 641499 - DNA, 52 bp, Artificial; identical to SEQ ID NO: 246419
  Synthetic oligonucleotide

SEQ ID NO: 641500 - DNA, 53 bp, Artificial; identical to SEQ ID NO: 247850
  Synthetic oligonucleotide

SEQ ID NO: 641501 - DNA, 50 bp, Artificial; identical to SEQ ID NO: 172873
  Synthetic oligonucleotide

SEQ ID NO: 641502 - DNA, 55 bp, Artificial; identical to SEQ ID NO: 182419
  Synthetic oligonucleotide

SEQ ID NO: 641503 - DNA, 51 bp, Artificial; identical to SEQ ID NO: 186681
  Synthetic oligonucleotide

SEQ ID NO: 641504 - DNA, 59 bp, Artificial; identical to SEQ ID NO: 224305
  Synthetic oligonucleotide

SEQ ID NO: 641505 - DNA, 55 bp, Artificial; identical to SEQ ID NO: 266163
  Synthetic oligonucleotide

SEQ ID NO: 641506 - DNA, 55 bp, Artificial; identical to SEQ ID NO: 254338
  Synthetic oligonucleotide

SEQ ID NO: 641507 - DNA, 55 bp, Artificial; identical to SEQ ID NO: 182418
  Synthetic oligonucleotide

SEQ ID NO: 641508 - DNA, 53 bp, Artificial; identical to SEQ ID NO: 185801
  Synthetic oligonucleotide

SEQ ID NO: 641509 - DNA, 55 bp, Artificial; identical to SEQ ID NO: 203450
  Synthetic oligonucleotide

SEQ ID NO: 641510 - DNA, 51 bp, Artificial; identical to SEQ ID NO: 186684
  Synthetic oligonucleotide

SEQ ID NO: 641511 - DNA, 54 bp, Artificial; identical to SEQ ID NO: 262810
  Synthetic oligonucleotide

SEQ ID NO: 641512 - DNA, 55 bp, Artificial; identical to SEQ ID NO: 254336
  Synthetic oligonucleotide

SEQ ID NO: 641513 - DNA, 55 bp, Artificial; identical to SEQ ID NO: 188983
  Synthetic oligonucleotide

SEQ ID NO: 641514 - DNA, 55 bp, Artificial; identical to SEQ ID NO: 164141
  Synthetic oligonucleotide

SEQ ID NO: 641515 - DNA, 55 bp, Artificial; identical to SEQ ID NO: 182417
  Synthetic oligonucleotide

SEQ ID NO: 641516 - DNA, 58 bp, Artificial; identical to SEQ ID NO: 201121
  Synthetic oligonucleotide

SEQ ID NO: 641517 - DNA, 55 bp, Artificial; identical to SEQ ID NO: 233544
  Synthetic oligonucleotide

SEQ ID NO: 641518 - DNA, 56 bp, Artificial; identical to SEQ ID NO: 207644
  Synthetic oligonucleotide

SEQ ID NO: 641519 - DNA, 55 bp, Artificial; identical to SEQ ID NO: 182416
  Synthetic oligonucleotide

SEQ ID NO: 641520 - DNA, 57 bp, Artificial; identical to SEQ ID NO: 155726
  Synthetic oligonucleotide

SEQ ID NO: 641521 - DNA, 55 bp, Artificial; identical to SEQ ID NO: 182414
  Synthetic oligonucleotide

SEQ ID NO: 641522 - DNA, 55 bp, Artificial; identical to SEQ ID NO: 197360
  Synthetic oligonucleotide

SEQ ID NO: 641523 - DNA, 50 bp, Artificial; identical to SEQ ID NO: 170750
  Synthetic oligonucleotide

SEQ ID NO: 641524 - DNA, 60 bp, Artificial; identical to SEQ ID NO: 247899
  Synthetic oligonucleotide

SEQ ID NO: 641525 - DNA, 53 bp, Artificial; identical to SEQ ID NO: 164868
  Synthetic oligonucleotide

SEQ ID NO: 641526 - DNA, 55 bp, Artificial; identical to SEQ ID NO: 198522
  Synthetic oligonucleotide

SEQ ID NO: 641527 - DNA, 55 bp, Artificial; identical to SEQ ID NO: 164142
  Synthetic oligonucleotide

SEQ ID NO: 641528 - DNA, 55 bp, Artificial; identical to SEQ ID NO: 156458
  Synthetic oligonucleotide

SEQ ID NO: 641529 - DNA, 55 bp, Artificial; identical to SEQ ID NO: 160046
  Synthetic oligonucleotide

SEQ ID NO: 641530 - DNA, 56 bp, Artificial; identical to SEQ ID NO: 238915
  Synthetic oligonucleotide

SEQ ID NO: 641531 - DNA, 53 bp, Artificial; identical to SEQ ID NO: 185816
  Synthetic oligonucleotide

SEQ ID NO: 641532 - DNA, 55 bp, Artificial; identical to SEQ ID NO: 220624
  Synthetic oligonucleotide

SEQ ID NO: 641533 - DNA, 55 bp, Artificial; identical to SEQ ID NO: 224170
  Synthetic oligonucleotide

SEQ ID NO: 641534 - DNA, 56 bp, Artificial; identical to SEQ ID NO: 212747
  Synthetic oligonucleotide

SEQ ID NO: 641535 - DNA, 57 bp, Artificial; identical to SEQ ID NO: 247410
  Synthetic oligonucleotide

SEQ ID NO: 641536 - DNA, 55 bp, Artificial; identical to SEQ ID NO: 248859
  Synthetic oligonucleotide

SEQ ID NO: 641537 - DNA, 54 bp, Artificial; identical to SEQ ID NO: 185274
  Synthetic oligonucleotide

SEQ ID NO: 641538 - DNA, 55 bp, Artificial; identical to SEQ ID NO: 198584
  Synthetic oligonucleotide

SEQ ID NO: 641539 - DNA, 55 bp, Artificial; identical to SEQ ID NO: 156459
  Synthetic oligonucleotide

SEQ ID NO: 641540 - DNA, 59 bp, Artificial; identical to SEQ ID NO: 266082
  Synthetic oligonucleotide

SEQ ID NO: 641541 - DNA, 54 bp, Artificial; identical to SEQ ID NO: 199674
  Synthetic oligonucleotide

SEQ ID NO: 641542 - DNA, 60 bp, Artificial; identical to SEQ ID NO: 182005
  Synthetic oligonucleotide

SEQ ID NO: 641543 - DNA, 55 bp, Artificial; identical to SEQ ID NO: 261927
  Synthetic oligonucleotide

SEQ ID NO: 641544 - DNA, 60 bp, Artificial; identical to SEQ ID NO: 254911
  Synthetic oligonucleotide

SEQ ID NO: 641545 - DNA, 58 bp, Artificial; identical to SEQ ID NO: 201150
  Synthetic oligonucleotide

SEQ ID NO: 641546 - DNA, 54 bp, Artificial; identical to SEQ ID NO: 160377
  Synthetic oligonucleotide

SEQ ID NO: 641547 - DNA, 51 bp, Artificial; identical to SEQ ID NO: 186701
  Synthetic oligonucleotide

SEQ ID NO: 641548 - DNA, 55 bp, Artificial; identical to SEQ ID NO: 209362
  Synthetic oligonucleotide

SEQ ID NO: 641549 - DNA, 55 bp, Artificial; identical to SEQ ID NO: 254332
  Synthetic oligonucleotide

SEQ ID NO: 641550 - DNA, 55 bp, Artificial; identical to SEQ ID NO: 203455
  Synthetic oligonucleotide

SEQ ID NO: 641551 - DNA, 55 bp, Artificial; identical to SEQ ID NO: 156460
  Synthetic oligonucleotide

SEQ ID NO: 641552 - DNA, 53 bp, Artificial; identical to SEQ ID NO: 182364
  Synthetic oligonucleotide

SEQ ID NO: 641553 - DNA, 55 bp, Artificial; identical to SEQ ID NO: 220626
  Synthetic oligonucleotide

SEQ ID NO: 641554 - DNA, 58 bp, Artificial; identical to SEQ ID NO: 181982
  Synthetic oligonucleotide

SEQ ID NO: 641555 - DNA, 55 bp, Artificial; identical to SEQ ID NO: 217602
  Synthetic oligonucleotide

SEQ ID NO: 641556 - DNA, 55 bp, Artificial; identical to SEQ ID NO: 164144
  Synthetic oligonucleotide

SEQ ID NO: 641557 - DNA, 54 bp, Artificial; identical to SEQ ID NO: 254331
  Synthetic oligonucleotide

SEQ ID NO: 641558 - DNA, 59 bp, Artificial; identical to SEQ ID NO: 239232
  Synthetic oligonucleotide

SEQ ID NO: 641559 - DNA, 55 bp, Artificial; identical to SEQ ID NO: 147816
  Synthetic oligonucleotide

SEQ ID NO: 641560 - DNA, 55 bp, Artificial; identical to SEQ ID NO: 261926
  Synthetic oligonucleotide

SEQ ID NO: 641561 - DNA, 55 bp, Artificial; identical to SEQ ID NO: 160050
  Synthetic oligonucleotide

SEQ ID NO: 641562 - DNA, 51 bp, Artificial; identical to SEQ ID NO: 192132
  Synthetic oligonucleotide

SEQ ID NO: 641563 - DNA, 55 bp, Artificial; identical to SEQ ID NO: 209414
  Synthetic oligonucleotide

SEQ ID NO: 641564 - DNA, 60 bp, Artificial; identical to SEQ ID NO: 257448
  Synthetic oligonucleotide

SEQ ID NO: 641565 - DNA, 54 bp, Artificial; identical to SEQ ID NO: 255296
  Synthetic oligonucleotide

SEQ ID NO: 641566 - DNA, 55 bp, Artificial; identical to SEQ ID NO: 164146
  Synthetic oligonucleotide

SEQ ID NO: 641567 - DNA, 52 bp, Artificial; identical to SEQ ID NO: 149698
  Synthetic oligonucleotide

SEQ ID NO: 641568 - DNA, 55 bp, Artificial; identical to SEQ ID NO: 217604
  Synthetic oligonucleotide

SEQ ID NO: 641569 - DNA, 60 bp, Artificial; identical to SEQ ID NO: 181960
  Synthetic oligonucleotide

SEQ ID NO: 641570 - DNA, 55 bp, Artificial; identical to SEQ ID NO: 257725
  Synthetic oligonucleotide

SEQ ID NO: 641571 - DNA, 50 bp, Artificial; identical to SEQ ID NO: 150509
  Synthetic oligonucleotide

SEQ ID NO: 641572 - DNA, 52 bp, Artificial; identical to SEQ ID NO: 205469
  Synthetic oligonucleotide

SEQ ID NO: 641573 - DNA, 57 bp, Artificial; identical to SEQ ID NO: 147305
  Synthetic oligonucleotide

SEQ ID NO: 641574 - DNA, 55 bp, Artificial; identical to SEQ ID NO: 156461
  Synthetic oligonucleotide

SEQ ID NO: 641575 - DNA, 55 bp, Artificial; identical to SEQ ID NO: 154518
  Synthetic oligonucleotide

SEQ ID NO: 641576 - DNA, 55 bp, Artificial; identical to SEQ ID NO: 187421
  Synthetic oligonucleotide

SEQ ID NO: 641577 - DNA, 55 bp, Artificial; identical to SEQ ID NO: 182357
  Synthetic oligonucleotide

SEQ ID NO: 641578 - DNA, 55 bp, Artificial; identical to SEQ ID NO: 182356
  Synthetic oligonucleotide

SEQ ID NO: 641579 - DNA, 57 bp, Artificial; identical to SEQ ID NO: 247388
  Synthetic oligonucleotide

SEQ ID NO: 641580 - DNA, 55 bp, Artificial; identical to SEQ ID NO: 171004
  Synthetic oligonucleotide

SEQ ID NO: 641581 - DNA, 55 bp, Artificial; identical to SEQ ID NO: 266672
  Synthetic oligonucleotide

SEQ ID NO: 641582 - DNA, 55 bp, Artificial; identical to SEQ ID NO: 202720
  Synthetic oligonucleotide

SEQ ID NO: 641583 - DNA, 55 bp, Artificial; identical to SEQ ID NO: 197358
  Synthetic oligonucleotide

SEQ ID NO: 641584 - DNA, 55 bp, Artificial; identical to SEQ ID NO: 234369
  Synthetic oligonucleotide

SEQ ID NO: 641585 - DNA, 53 bp, Artificial; identical to SEQ ID NO: 263184
  Synthetic oligonucleotide

SEQ ID NO: 641586 - DNA, 55 bp, Artificial; identical to SEQ ID NO: 147821
  Synthetic oligonucleotide

SEQ ID NO: 641587 - DNA, 59 bp, Artificial; identical to SEQ ID NO: 147070
  Synthetic oligonucleotide

SEQ ID NO: 641588 - DNA, 55 bp, Artificial; identical to SEQ ID NO: 147822
  Synthetic oligonucleotide

SEQ ID NO: 641589 - DNA, 55 bp, Artificial; identical to SEQ ID NO: 194631
  Synthetic oligonucleotide

SEQ ID NO: 641590 - DNA, 55 bp, Artificial; identical to SEQ ID NO: 198583
  Synthetic oligonucleotide

SEQ ID NO: 641591 - DNA, 51 bp, Artificial; identical to SEQ ID NO: 248070
  Synthetic oligonucleotide

SEQ ID NO: 641592 - DNA, 60 bp, Artificial; identical to SEQ ID NO: 170121
  Synthetic oligonucleotide

SEQ ID NO: 641593 - DNA, 55 bp, Artificial; identical to SEQ ID NO: 210875
  Synthetic oligonucleotide

SEQ ID NO: 641594 - DNA, 55 bp, Artificial; identical to SEQ ID NO: 208474
  Synthetic oligonucleotide

SEQ ID NO: 641595 - DNA, 59 bp, Artificial; identical to SEQ ID NO: 247376
  Synthetic oligonucleotide

SEQ ID NO: 641596 - DNA, 55 bp, Artificial; identical to SEQ ID NO: 244345
  Synthetic oligonucleotide

SEQ ID NO: 641597 - DNA, 52 bp, Artificial; identical to SEQ ID NO: 211607
  Synthetic oligonucleotide

SEQ ID NO: 641598 - DNA, 60 bp, Artificial; identical to SEQ ID NO: 200741
  Synthetic oligonucleotide

SEQ ID NO: 641599 - DNA, 55 bp, Artificial; identical to SEQ ID NO: 215570
  Synthetic oligonucleotide

SEQ ID NO: 641600 - DNA, 55 bp, Artificial; identical to SEQ ID NO: 182355
  Synthetic oligonucleotide

SEQ ID NO: 641601 - DNA, 54 bp, Artificial; identical to SEQ ID NO: 258066
  Synthetic oligonucleotide

SEQ ID NO: 641602 - DNA, 55 bp, Artificial; identical to SEQ ID NO: 254329
  Synthetic oligonucleotide

SEQ ID NO: 641603 - DNA, 55 bp, Artificial; identical to SEQ ID NO: 208434
  Synthetic oligonucleotide

SEQ ID NO: 641604 - DNA, 56 bp, Artificial; identical to SEQ ID NO: 191752
  Synthetic oligonucleotide

SEQ ID NO: 641605 - DNA, 55 bp, Artificial; identical to SEQ ID NO: 160056
  Synthetic oligonucleotide

SEQ ID NO: 641606 - DNA, 55 bp, Artificial; identical to SEQ ID NO: 169218
  Synthetic oligonucleotide

SEQ ID NO: 641607 - DNA, 51 bp, Artificial; identical to SEQ ID NO: 223790
  Synthetic oligonucleotide

SEQ ID NO: 641608 - DNA, 55 bp, Artificial; identical to SEQ ID NO: 215573
  Synthetic oligonucleotide

SEQ ID NO: 641609 - DNA, 51 bp, Artificial; identical to SEQ ID NO: 193120
  Synthetic oligonucleotide

SEQ ID NO: 641610 - DNA, 56 bp, Artificial; identical to SEQ ID NO: 166922
  Synthetic oligonucleotide

SEQ ID NO: 641611 - DNA, 55 bp, Artificial; identical to SEQ ID NO: 141758
  Synthetic oligonucleotide

SEQ ID NO: 641612 - DNA, 55 bp, Artificial; identical to SEQ ID NO: 142208
  Synthetic oligonucleotide

SEQ ID NO: 641613 - DNA, 53 bp, Artificial; identical to SEQ ID NO: 144518
  Synthetic oligonucleotide

SEQ ID NO: 641614 - DNA, 56 bp, Artificial; identical to SEQ ID NO: 200739
  Synthetic oligonucleotide

SEQ ID NO: 641615 - DNA, 55 bp, Artificial; identical to SEQ ID NO: 196252
  Synthetic oligonucleotide

SEQ ID NO: 641616 - DNA, 57 bp, Artificial; identical to SEQ ID NO: 217088
  Synthetic oligonucleotide

SEQ ID NO: 641617 - DNA, 57 bp, Artificial; identical to SEQ ID NO: 239397
  Synthetic oligonucleotide

SEQ ID NO: 641618 - DNA, 55 bp, Artificial; identical to SEQ ID NO: 244725
  Synthetic oligonucleotide

SEQ ID NO: 641619 - DNA, 58 bp, Artificial; identical to SEQ ID NO: 256555
  Synthetic oligonucleotide

SEQ ID NO: 641620 - DNA, 55 bp, Artificial; identical to SEQ ID NO: 166030
  Synthetic oligonucleotide

SEQ ID NO: 641621 - DNA, 55 bp, Artificial; identical to SEQ ID NO: 221604
  Synthetic oligonucleotide

SEQ ID NO: 641622 - DNA, 59 bp, Artificial; identical to SEQ ID NO: 206731
  Synthetic oligonucleotide

SEQ ID NO: 641623 - DNA, 55 bp, Artificial; identical to SEQ ID NO: 217606
  Synthetic oligonucleotide

SEQ ID NO: 641624 - DNA, 56 bp, Artificial; identical to SEQ ID NO: 200737
  Synthetic oligonucleotide

SEQ ID NO: 641625 - DNA, 60 bp, Artificial; identical to SEQ ID NO: 206720
  Synthetic oligonucleotide

SEQ ID NO: 641626 - DNA, 55 bp, Artificial; identical to SEQ ID NO: 142209
  Synthetic oligonucleotide

SEQ ID NO: 641627 - DNA, 55 bp, Artificial; identical to SEQ ID NO: 190996
  Synthetic oligonucleotide

SEQ ID NO: 641628 - DNA, 57 bp, Artificial; identical to SEQ ID NO: 179779
  Synthetic oligonucleotide

SEQ ID NO: 641629 - DNA, 55 bp, Artificial; identical to SEQ ID NO: 164126
  Synthetic oligonucleotide

SEQ ID NO: 641630 - DNA, 55 bp, Artificial; identical to SEQ ID NO: 188306
  Synthetic oligonucleotide

SEQ ID NO: 641631 - DNA, 60 bp, Artificial; identical to SEQ ID NO: 254833
  Synthetic oligonucleotide

SEQ ID NO: 641632 - DNA, 51 bp, Artificial; identical to SEQ ID NO: 149899
  Synthetic oligonucleotide

SEQ ID NO: 641633 - DNA, 55 bp, Artificial; identical to SEQ ID NO: 198582
  Synthetic oligonucleotide

SEQ ID NO: 641634 - DNA, 53 bp, Artificial; identical to SEQ ID NO: 203894
  Synthetic oligonucleotide

SEQ ID NO: 641635 - DNA, 54 bp, Artificial; identical to SEQ ID NO: 234370
  Synthetic oligonucleotide

SEQ ID NO: 641636 - DNA, 55 bp, Artificial; identical to SEQ ID NO: 182351
  Synthetic oligonucleotide

SEQ ID NO: 641637 - DNA, 55 bp, Artificial; identical to SEQ ID NO: 147791
  Synthetic oligonucleotide

SEQ ID NO: 641638 - DNA, 53 bp, Artificial; identical to SEQ ID NO: 247840
  Synthetic oligonucleotide

SEQ ID NO: 641639 - DNA, 55 bp, Artificial; identical to SEQ ID NO: 222641
  Synthetic oligonucleotide

SEQ ID NO: 641640 - DNA, 60 bp, Artificial; identical to SEQ ID NO: 141759
  Synthetic oligonucleotide

SEQ ID NO: 641641 - DNA, 50 bp, Artificial; identical to SEQ ID NO: 176432
  Synthetic oligonucleotide

SEQ ID NO: 641642 - DNA, 60 bp, Artificial; identical to SEQ ID NO: 209046
  Synthetic oligonucleotide

SEQ ID NO: 641643 - DNA, 55 bp, Artificial; identical to SEQ ID NO: 164125
  Synthetic oligonucleotide

SEQ ID NO: 641644 - DNA, 55 bp, Artificial; identical to SEQ ID NO: 182348
  Synthetic oligonucleotide

SEQ ID NO: 641645 - DNA, 56 bp, Artificial; identical to SEQ ID NO: 239532
  Synthetic oligonucleotide

SEQ ID NO: 641646 - DNA, 58 bp, Artificial; identical to SEQ ID NO: 267328
  Synthetic oligonucleotide

SEQ ID NO: 641647 - DNA, 55 bp, Artificial; identical to SEQ ID NO: 266167
  Synthetic oligonucleotide

SEQ ID NO: 641648 - DNA, 54 bp, Artificial; identical to SEQ ID NO: 247332
  Synthetic oligonucleotide

SEQ ID NO: 641649 - DNA, 55 bp, Artificial; identical to SEQ ID NO: 254324
  Synthetic oligonucleotide

SEQ ID NO: 641650 - DNA, 55 bp, Artificial; identical to SEQ ID NO: 171464
  Synthetic oligonucleotide

SEQ ID NO: 641651 - DNA, 53 bp, Artificial; identical to SEQ ID NO: 160470
  Synthetic oligonucleotide

SEQ ID NO: 641652 - DNA, 55 bp, Artificial; identical to SEQ ID NO: 205470
  Synthetic oligonucleotide

SEQ ID NO: 641653 - DNA, 58 bp, Artificial; identical to SEQ ID NO: 159387
  Synthetic oligonucleotide

SEQ ID NO: 641654 - DNA, 55 bp, Artificial; identical to SEQ ID NO: 154520
  Synthetic oligonucleotide

SEQ ID NO: 641655 - DNA, 55 bp, Artificial; identical to SEQ ID NO: 175661
  Synthetic oligonucleotide

SEQ ID NO: 641656 - DNA, 55 bp, Artificial; identical to SEQ ID NO: 248927
  Synthetic oligonucleotide

SEQ ID NO: 641657 - DNA, 52 bp, Artificial; identical to SEQ ID NO: 165007
  Synthetic oligonucleotide

SEQ ID NO: 641658 - DNA, 53 bp, Artificial; identical to SEQ ID NO: 191759
  Synthetic oligonucleotide

SEQ ID NO: 641659 - DNA, 52 bp, Artificial; identical to SEQ ID NO: 205711
  Synthetic oligonucleotide

SEQ ID NO: 641660 - DNA, 55 bp, Artificial; identical to SEQ ID NO: 182347
  Synthetic oligonucleotide

SEQ ID NO: 641661 - DNA, 55 bp, Artificial; identical to SEQ ID NO: 164124
  Synthetic oligonucleotide

SEQ ID NO: 641662 - DNA, 55 bp, Artificial; identical to SEQ ID NO: 208431
  Synthetic oligonucleotide

SEQ ID NO: 641663 - DNA, 55 bp, Artificial; identical to SEQ ID NO: 147360
  Synthetic oligonucleotide

SEQ ID NO: 641664 - DNA, 55 bp, Artificial; identical to SEQ ID NO: 239859
  Synthetic oligonucleotide

SEQ ID NO: 641665 - DNA, 52 bp, Artificial; identical to SEQ ID NO: 146454
  Synthetic oligonucleotide

SEQ ID NO: 641666 - DNA, 55 bp, Artificial; identical to SEQ ID NO: 198580
  Synthetic oligonucleotide

SEQ ID NO: 641667 - DNA, 55 bp, Artificial; identical to SEQ ID NO: 198579
  Synthetic oligonucleotide

SEQ ID NO: 641668 - DNA, 57 bp, Artificial; identical to SEQ ID NO: 170099
  Synthetic oligonucleotide

SEQ ID NO: 641669 - DNA, 59 bp, Artificial; identical to SEQ ID NO: 247321
  Synthetic oligonucleotide

SEQ ID NO: 641670 - DNA, 55 bp, Artificial; identical to SEQ ID NO: 147794
  Synthetic oligonucleotide

SEQ ID NO: 641671 - DNA, 50 bp, Artificial; identical to SEQ ID NO: 156466
  Synthetic oligonucleotide

SEQ ID NO: 641672 - DNA, 50 bp, Artificial; identical to SEQ ID NO: 233903
  Synthetic oligonucleotide

SEQ ID NO: 641673 - DNA, 55 bp, Artificial; identical to SEQ ID NO: 244718
  Synthetic oligonucleotide

SEQ ID NO: 641674 - DNA, 55 bp, Artificial; identical to SEQ ID NO: 202717
  Synthetic oligonucleotide

SEQ ID NO: 641675 - DNA, 55 bp, Artificial; identical to SEQ ID NO: 153118
  Synthetic oligonucleotide

SEQ ID NO: 641676 - DNA, 55 bp, Artificial; identical to SEQ ID NO: 254323
  Synthetic oligonucleotide

SEQ ID NO: 641677 - DNA, 60 bp, Artificial; identical to SEQ ID NO: 239626
  Synthetic oligonucleotide

SEQ ID NO: 641678 - DNA, 54 bp, Artificial; identical to SEQ ID NO: 202448
  Synthetic oligonucleotide

SEQ ID NO: 641679 - DNA, 53 bp, Artificial; identical to SEQ ID NO: 210860
  Synthetic oligonucleotide

SEQ ID NO: 641680 - DNA, 56 bp, Artificial; identical to SEQ ID NO: 162404
  Synthetic oligonucleotide

SEQ ID NO: 641681 - DNA, 57 bp, Artificial; identical to SEQ ID NO: 200736
  Synthetic oligonucleotide

SEQ ID NO: 641682 - DNA, 55 bp, Artificial; identical to SEQ ID NO: 182386
  Synthetic oligonucleotide

SEQ ID NO: 641683 - DNA, 55 bp, Artificial; identical to SEQ ID NO: 182385
  Synthetic oligonucleotide

SEQ ID NO: 641684 - DNA, 56 bp, Artificial; identical to SEQ ID NO: 197348
  Synthetic oligonucleotide

SEQ ID NO: 641685 - DNA, 55 bp, Artificial; identical to SEQ ID NO: 182384
  Synthetic oligonucleotide

SEQ ID NO: 641686 - DNA, 55 bp, Artificial; identical to SEQ ID NO: 244716
  Synthetic oligonucleotide

SEQ ID NO: 641687 - DNA, 57 bp, Artificial; identical to SEQ ID NO: 247540
  Synthetic oligonucleotide

SEQ ID NO: 641688 - DNA, 53 bp, Artificial; identical to SEQ ID NO: 190562
  Synthetic oligonucleotide

SEQ ID NO: 641689 - DNA, 53 bp, Artificial; identical to SEQ ID NO: 209045
  Synthetic oligonucleotide

SEQ ID NO: 641690 - DNA, 55 bp, Artificial; identical to SEQ ID NO: 182381
  Synthetic oligonucleotide

SEQ ID NO: 641691 - DNA, 55 bp, Artificial; identical to SEQ ID NO: 202716
  Synthetic oligonucleotide

SEQ ID NO: 641692 - DNA, 55 bp, Artificial; identical to SEQ ID NO: 254373
  Synthetic oligonucleotide

SEQ ID NO: 641693 - DNA, 51 bp, Artificial; identical to SEQ ID NO: 161366
  Synthetic oligonucleotide

SEQ ID NO: 641694 - DNA, 55 bp, Artificial; identical to SEQ ID NO: 164121
  Synthetic oligonucleotide

SEQ ID NO: 641695 - DNA, 58 bp, Artificial; identical to SEQ ID NO: 239197
  Synthetic oligonucleotide

SEQ ID NO: 641696 - DNA, 50 bp, Artificial; identical to SEQ ID NO: 216873
  Synthetic oligonucleotide

SEQ ID NO: 641697 - DNA, 55 bp, Artificial; identical to SEQ ID NO: 154521
  Synthetic oligonucleotide

SEQ ID NO: 641698 - DNA, 55 bp, Artificial; identical to SEQ ID NO: 265944
  Synthetic oligonucleotide

SEQ ID NO: 641699 - DNA, 55 bp, Artificial; identical to SEQ ID NO: 172777
  Synthetic oligonucleotide

SEQ ID NO: 641700 - DNA, 56 bp, Artificial; identical to SEQ ID NO: 247299
  Synthetic oligonucleotide

SEQ ID NO: 641701 - DNA, 53 bp, Artificial; identical to SEQ ID NO: 209412
  Synthetic oligonucleotide

SEQ ID NO: 641702 - DNA, 55 bp, Artificial; identical to SEQ ID NO: 254375
  Synthetic oligonucleotide

SEQ ID NO: 641703 - DNA, 53 bp, Artificial; identical to SEQ ID NO: 209641
  Synthetic oligonucleotide

SEQ ID NO: 641704 - DNA, 60 bp, Artificial; identical to SEQ ID NO: 181883
  Synthetic oligonucleotide

SEQ ID NO: 641705 - DNA, 55 bp, Artificial; identical to SEQ ID NO: 254376
  Synthetic oligonucleotide

SEQ ID NO: 641706 - DNA, 55 bp, Artificial; identical to SEQ ID NO: 160067
  Synthetic oligonucleotide

SEQ ID NO: 641707 - DNA, 50 bp, Artificial; identical to SEQ ID NO: 246938
  Synthetic oligonucleotide

SEQ ID NO: 641708 - DNA, 55 bp, Artificial; identical to SEQ ID NO: 188305
  Synthetic oligonucleotide

SEQ ID NO: 641709 - DNA, 55 bp, Artificial; identical to SEQ ID NO: 164119
  Synthetic oligonucleotide

SEQ ID NO: 641710 - DNA, 53 bp, Artificial; identical to SEQ ID NO: 217089
  Synthetic oligonucleotide

SEQ ID NO: 641711 - DNA, 55 bp, Artificial; identical to SEQ ID NO: 218866
  Synthetic oligonucleotide

SEQ ID NO: 641712 - DNA, 52 bp, Artificial; identical to SEQ ID NO: 223656
  Synthetic oligonucleotide

SEQ ID NO: 641713 - DNA, 55 bp, Artificial; identical to SEQ ID NO: 182380
  Synthetic oligonucleotide

SEQ ID NO: 641714 - DNA, 55 bp, Artificial; identical to SEQ ID NO: 155261
  Synthetic oligonucleotide

SEQ ID NO: 641715 - DNA, 55 bp, Artificial; identical to SEQ ID NO: 182379
  Synthetic oligonucleotide

SEQ ID NO: 641716 - DNA, 53 bp, Artificial; identical to SEQ ID NO: 188304
  Synthetic oligonucleotide

SEQ ID NO: 641717 - DNA, 55 bp, Artificial; identical to SEQ ID NO: 168519
  Synthetic oligonucleotide

SEQ ID NO: 641718 - DNA, 54 bp, Artificial; identical to SEQ ID NO: 255209
  Synthetic oligonucleotide

SEQ ID NO: 641719 - DNA, 55 bp, Artificial; identical to SEQ ID NO: 153119
  Synthetic oligonucleotide

SEQ ID NO: 641720 - DNA, 53 bp, Artificial; identical to SEQ ID NO: 243201
  Synthetic oligonucleotide

SEQ ID NO: 641721 - DNA, 55 bp, Artificial; identical to SEQ ID NO: 187432
  Synthetic oligonucleotide

SEQ ID NO: 641722 - DNA, 56 bp, Artificial; identical to SEQ ID NO: 178880
  Synthetic oligonucleotide

SEQ ID NO: 641723 - DNA, 49 bp, Artificial; identical to SEQ ID NO: 223575
  Synthetic oligonucleotide

SEQ ID NO: 641724 - DNA, 55 bp, Artificial; identical to SEQ ID NO: 190555
  Synthetic oligonucleotide

SEQ ID NO: 641725 - DNA, 52 bp, Artificial; identical to SEQ ID NO: 239648
  Synthetic oligonucleotide

SEQ ID NO: 641726 - DNA, 52 bp, Artificial; identical to SEQ ID NO: 247277
  Synthetic oligonucleotide

SEQ ID NO: 641727 - DNA, 54 bp, Artificial; identical to SEQ ID NO: 202053
  Synthetic oligonucleotide

SEQ ID NO: 641728 - DNA, 55 bp, Artificial; identical to SEQ ID NO: 208426
  Synthetic oligonucleotide

SEQ ID NO: 641729 - DNA, 58 bp, Artificial; identical to SEQ ID NO: 144673
  Synthetic oligonucleotide

SEQ ID NO: 641730 - DNA, 55 bp, Artificial; identical to SEQ ID NO: 146203
  Synthetic oligonucleotide

SEQ ID NO: 641731 - DNA, 59 bp, Artificial; identical to SEQ ID NO: 166021
  Synthetic oligonucleotide

SEQ ID NO: 641732 - DNA, 52 bp, Artificial; identical to SEQ ID NO: 161348
  Synthetic oligonucleotide

SEQ ID NO: 641733 - DNA, 53 bp, Artificial; identical to SEQ ID NO: 255977
  Synthetic oligonucleotide

SEQ ID NO: 641734 - DNA, 55 bp, Artificial; identical to SEQ ID NO: 156470
  Synthetic oligonucleotide

SEQ ID NO: 641735 - DNA, 55 bp, Artificial; identical to SEQ ID NO: 260035
  Synthetic oligonucleotide

SEQ ID NO: 641736 - DNA, 55 bp, Artificial; identical to SEQ ID NO: 190995
  Synthetic oligonucleotide

SEQ ID NO: 641737 - DNA, 53 bp, Artificial; identical to SEQ ID NO: 253289
  Synthetic oligonucleotide

SEQ ID NO: 641738 - DNA, 55 bp, Artificial; identical to SEQ ID NO: 164116
  Synthetic oligonucleotide

SEQ ID NO: 641739 - DNA, 55 bp, Artificial; identical to SEQ ID NO: 147795
  Synthetic oligonucleotide

SEQ ID NO: 641740 - DNA, 52 bp, Artificial; identical to SEQ ID NO: 243222
  Synthetic oligonucleotide

SEQ ID NO: 641741 - DNA, 55 bp, Artificial; identical to SEQ ID NO: 154523
  Synthetic oligonucleotide

SEQ ID NO: 641742 - DNA, 55 bp, Artificial; identical to SEQ ID NO: 142214
  Synthetic oligonucleotide

SEQ ID NO: 641743 - DNA, 60 bp, Artificial; identical to SEQ ID NO: 200735
  Synthetic oligonucleotide

SEQ ID NO: 641744 - DNA, 53 bp, Artificial; identical to SEQ ID NO: 157388
  Synthetic oligonucleotide

SEQ ID NO: 641745 - DNA, 55 bp, Artificial; identical to SEQ ID NO: 208425
  Synthetic oligonucleotide

SEQ ID NO: 641746 - DNA, 55 bp, Artificial; identical to SEQ ID NO: 155265
  Synthetic oligonucleotide

SEQ ID NO: 641747 - DNA, 55 bp, Artificial; identical to SEQ ID NO: 156416
  Synthetic oligonucleotide

SEQ ID NO: 641748 - DNA, 59 bp, Artificial; identical to SEQ ID NO: 159409
  Synthetic oligonucleotide

SEQ ID NO: 641749 - DNA, 54 bp, Artificial; identical to SEQ ID NO: 188303
  Synthetic oligonucleotide

SEQ ID NO: 641750 - DNA, 55 bp, Artificial; identical to SEQ ID NO: 254380
  Synthetic oligonucleotide

SEQ ID NO: 641751 - DNA, 56 bp, Artificial; identical to SEQ ID NO: 239573
  Synthetic oligonucleotide

SEQ ID NO: 641752 - DNA, 55 bp, Artificial; identical to SEQ ID NO: 147796
  Synthetic oligonucleotide

SEQ ID NO: 641753 - DNA, 55 bp, Artificial; identical to SEQ ID NO: 198573
  Synthetic oligonucleotide

SEQ ID NO: 641754 - DNA, 51 bp, Artificial; identical to SEQ ID NO: 187048
  Synthetic oligonucleotide

SEQ ID NO: 641755 - DNA, 55 bp, Artificial; identical to SEQ ID NO: 151363
  Synthetic oligonucleotide

SEQ ID NO: 641756 - DNA, 53 bp, Artificial; identical to SEQ ID NO: 195223
  Synthetic oligonucleotide

SEQ ID NO: 641757 - DNA, 55 bp, Artificial; identical to SEQ ID NO: 244711
  Synthetic oligonucleotide

SEQ ID NO: 641758 - DNA, 55 bp, Artificial; identical to SEQ ID NO: 244065
  Synthetic oligonucleotide

SEQ ID NO: 641759 - DNA, 53 bp, Artificial; identical to SEQ ID NO: 149477
  Synthetic oligonucleotide

SEQ ID NO: 641760 - DNA, 55 bp, Artificial; identical to SEQ ID NO: 174281
  Synthetic oligonucleotide

SEQ ID NO: 641761 - DNA, 55 bp, Artificial; identical to SEQ ID NO: 239780
  Synthetic oligonucleotide

SEQ ID NO: 641762 - DNA, 55 bp, Artificial; identical to SEQ ID NO: 239285
  Synthetic oligonucleotide

SEQ ID NO: 641763 - DNA, 55 bp, Artificial; identical to SEQ ID NO: 190994
  Synthetic oligonucleotide

SEQ ID NO: 641764 - DNA, 54 bp, Artificial; identical to SEQ ID NO: 174794
  Synthetic oligonucleotide

SEQ ID NO: 641765 - DNA, 51 bp, Artificial; identical to SEQ ID NO: 153637
  Synthetic oligonucleotide

SEQ ID NO: 641766 - DNA, 52 bp, Artificial; identical to SEQ ID NO: 164982
  Synthetic oligonucleotide

SEQ ID NO: 641767 - DNA, 59 bp, Artificial; identical to SEQ ID NO: 147036
  Synthetic oligonucleotide

SEQ ID NO: 641768 - DNA, 50 bp, Artificial; identical to SEQ ID NO: 171047
  Synthetic oligonucleotide

SEQ ID NO: 641769 - DNA, 53 bp, Artificial; identical to SEQ ID NO: 188460
  Synthetic oligonucleotide

SEQ ID NO: 641770 - DNA, 55 bp, Artificial; identical to SEQ ID NO: 221603
  Synthetic oligonucleotide

SEQ ID NO: 641771 - DNA, 55 bp, Artificial; identical to SEQ ID NO: 254383
  Synthetic oligonucleotide

SEQ ID NO: 641772 - DNA, 55 bp, Artificial; identical to SEQ ID NO: 198572
  Synthetic oligonucleotide

SEQ ID NO: 641773 - DNA, 51 bp, Artificial; identical to SEQ ID NO: 146508
  Synthetic oligonucleotide

SEQ ID NO: 641774 - DNA, 52 bp, Artificial; identical to SEQ ID NO: 149689
  Synthetic oligonucleotide

SEQ ID NO: 641775 - DNA, 54 bp, Artificial; identical to SEQ ID NO: 209568
  Synthetic oligonucleotide

SEQ ID NO: 641776 - DNA, 52 bp, Artificial; identical to SEQ ID NO: 223649
  Synthetic oligonucleotide

SEQ ID NO: 641777 - DNA, 55 bp, Artificial; identical to SEQ ID NO: 151381
  Synthetic oligonucleotide

SEQ ID NO: 641778 - DNA, 52 bp, Artificial; identical to SEQ ID NO: 178876
  Synthetic oligonucleotide

SEQ ID NO: 641779 - DNA, 55 bp, Artificial; identical to SEQ ID NO: 244707
  Synthetic oligonucleotide

SEQ ID NO: 641780 - DNA, 55 bp, Artificial; identical to SEQ ID NO: 156418
  Synthetic oligonucleotide

SEQ ID NO: 641781 - DNA, 55 bp, Artificial; identical to SEQ ID NO: 182369
  Synthetic oligonucleotide

SEQ ID NO: 641782 - DNA, 50 bp, Artificial; identical to SEQ ID NO: 210576
  Synthetic oligonucleotide

SEQ ID NO: 641783 - DNA, 55 bp, Artificial; identical to SEQ ID NO: 151385
  Synthetic oligonucleotide

SEQ ID NO: 641784 - DNA, 51 bp, Artificial; identical to SEQ ID NO: 157803
  Synthetic oligonucleotide

SEQ ID NO: 641785 - DNA, 55 bp, Artificial; identical to SEQ ID NO: 182367
  Synthetic oligonucleotide

SEQ ID NO: 641786 - DNA, 54 bp, Artificial; identical to SEQ ID NO: 209567
  Synthetic oligonucleotide

SEQ ID NO: 641787 - DNA, 55 bp, Artificial; identical to SEQ ID NO: 182365
  Synthetic oligonucleotide

SEQ ID NO: 641788 - DNA, 55 bp, Artificial; identical to SEQ ID NO: 182139
  Synthetic oligonucleotide

SEQ ID NO: 641789 - DNA, 55 bp, Artificial; identical to SEQ ID NO: 248933
  Synthetic oligonucleotide

SEQ ID NO: 641790 - DNA, 57 bp, Artificial; identical to SEQ ID NO: 239727
  Synthetic oligonucleotide

SEQ ID NO: 641791 - DNA, 55 bp, Artificial; identical to SEQ ID NO: 198571
  Synthetic oligonucleotide

SEQ ID NO: 641792 - DNA, 55 bp, Artificial; identical to SEQ ID NO: 182137
  Synthetic oligonucleotide

SEQ ID NO: 641793 - DNA, 55 bp, Artificial; identical to SEQ ID NO: 154526
  Synthetic oligonucleotide

SEQ ID NO: 641794 - DNA, 56 bp, Artificial; identical to SEQ ID NO: 209232
  Synthetic oligonucleotide

SEQ ID NO: 641795 - DNA, 55 bp, Artificial; identical to SEQ ID NO: 151442
  Synthetic oligonucleotide

SEQ ID NO: 641796 - DNA, 55 bp, Artificial; identical to SEQ ID NO: 244706
  Synthetic oligonucleotide

SEQ ID NO: 641797 - DNA, 55 bp, Artificial; identical to SEQ ID NO: 168521
  Synthetic oligonucleotide

SEQ ID NO: 641798 - DNA, 52 bp, Artificial; identical to SEQ ID NO: 172808
  Synthetic oligonucleotide

SEQ ID NO: 641799 - DNA, 55 bp, Artificial; identical to SEQ ID NO: 225162
  Synthetic oligonucleotide

SEQ ID NO: 641800 - DNA, 55 bp, Artificial; identical to SEQ ID NO: 164113
  Synthetic oligonucleotide

SEQ ID NO: 641801 - DNA, 54 bp, Artificial; identical to SEQ ID NO: 199634
  Synthetic oligonucleotide

SEQ ID NO: 641802 - DNA, 54 bp, Artificial; identical to SEQ ID NO: 190641
  Synthetic oligonucleotide

SEQ ID NO: 641803 - DNA, 56 bp, Artificial; identical to SEQ ID NO: 178873
  Synthetic oligonucleotide

SEQ ID NO: 641804 - DNA, 60 bp, Artificial; identical to SEQ ID NO: 224370
  Synthetic oligonucleotide

SEQ ID NO: 641805 - DNA, 55 bp, Artificial; identical to SEQ ID NO: 171884
  Synthetic oligonucleotide

SEQ ID NO: 641806 - DNA, 53 bp, Artificial; identical to SEQ ID NO: 188080
  Synthetic oligonucleotide

SEQ ID NO: 641807 - DNA, 55 bp, Artificial; identical to SEQ ID NO: 207282
  Synthetic oligonucleotide

SEQ ID NO: 641808 - DNA, 55 bp, Artificial; identical to SEQ ID NO: 252947
  Synthetic oligonucleotide

SEQ ID NO: 641809 - DNA, 55 bp, Artificial; identical to SEQ ID NO: 254385
  Synthetic oligonucleotide

SEQ ID NO: 641810 - DNA, 55 bp, Artificial; identical to SEQ ID NO: 211000
  Synthetic oligonucleotide

SEQ ID NO: 641811 - DNA, 52 bp, Artificial; identical to SEQ ID NO: 188502
  Synthetic oligonucleotide

SEQ ID NO: 641812 - DNA, 56 bp, Artificial; identical to SEQ ID NO: 248886
  Synthetic oligonucleotide

SEQ ID NO: 641813 - DNA, 53 bp, Artificial; identical to SEQ ID NO: 166053
  Synthetic oligonucleotide

SEQ ID NO: 641814 - DNA, 55 bp, Artificial; identical to SEQ ID NO: 153124
  Synthetic oligonucleotide

SEQ ID NO: 641815 - DNA, 60 bp, Artificial; identical to SEQ ID NO: 178869
  Synthetic oligonucleotide

SEQ ID NO: 641816 - DNA, 54 bp, Artificial; identical to SEQ ID NO: 224995
  Synthetic oligonucleotide

SEQ ID NO: 641817 - DNA, 55 bp, Artificial; identical to SEQ ID NO: 147798
  Synthetic oligonucleotide

SEQ ID NO: 641818 - DNA, 54 bp, Artificial; identical to SEQ ID NO: 147371
  Synthetic oligonucleotide

SEQ ID NO: 641819 - DNA, 55 bp, Artificial; identical to SEQ ID NO: 254386
  Synthetic oligonucleotide

SEQ ID NO: 641820 - DNA, 55 bp, Artificial; identical to SEQ ID NO: 156423
  Synthetic oligonucleotide

SEQ ID NO: 641821 - DNA, 60 bp, Artificial; identical to SEQ ID NO: 178868
  Synthetic oligonucleotide

SEQ ID NO: 641822 - DNA, 56 bp, Artificial; identical to SEQ ID NO: 178867
  Synthetic oligonucleotide

SEQ ID NO: 641823 - DNA, 55 bp, Artificial; identical to SEQ ID NO: 236468
  Synthetic oligonucleotide

SEQ ID NO: 641824 - DNA, 55 bp, Artificial; identical to SEQ ID NO: 166707
  Synthetic oligonucleotide

SEQ ID NO: 641825 - DNA, 56 bp, Artificial; identical to SEQ ID NO: 244027
  Synthetic oligonucleotide

SEQ ID NO: 641826 - DNA, 57 bp, Artificial; identical to SEQ ID NO: 144672
  Synthetic oligonucleotide

SEQ ID NO: 641827 - DNA, 53 bp, Artificial; identical to SEQ ID NO: 199757
  Synthetic oligonucleotide

SEQ ID NO: 641828 - DNA, 57 bp, Artificial; identical to SEQ ID NO: 187198
  Synthetic oligonucleotide

SEQ ID NO: 641829 - DNA, 52 bp, Artificial; identical to SEQ ID NO: 186376
  Synthetic oligonucleotide

SEQ ID NO: 641830 - DNA, 52 bp, Artificial; identical to SEQ ID NO: 240884
  Synthetic oligonucleotide

SEQ ID NO: 641831 - DNA, 55 bp, Artificial; identical to SEQ ID NO: 198567
  Synthetic oligonucleotide

SEQ ID NO: 641832 - DNA, 55 bp, Artificial; identical to SEQ ID NO: 207286
  Synthetic oligonucleotide

SEQ ID NO: 641833 - DNA, 55 bp, Artificial; identical to SEQ ID NO: 147800
  Synthetic oligonucleotide

SEQ ID NO: 641834 - DNA, 55 bp, Artificial; identical to SEQ ID NO: 198566
  Synthetic oligonucleotide

SEQ ID NO: 641835 - DNA, 54 bp, Artificial; identical to SEQ ID NO: 201891
  Synthetic oligonucleotide

SEQ ID NO: 641836 - DNA, 55 bp, Artificial; identical to SEQ ID NO: 143692
  Synthetic oligonucleotide

SEQ ID NO: 641837 - DNA, 58 bp, Artificial; identical to SEQ ID NO: 200734
  Synthetic oligonucleotide

SEQ ID NO: 641838 - DNA, 56 bp, Artificial; identical to SEQ ID NO: 239549
  Synthetic oligonucleotide

SEQ ID NO: 641839 - DNA, 55 bp, Artificial; identical to SEQ ID NO: 187434
  Synthetic oligonucleotide

SEQ ID NO: 641840 - DNA, 55 bp, Artificial; identical to SEQ ID NO: 182132
  Synthetic oligonucleotide

SEQ ID NO: 641841 - DNA, 55 bp, Artificial; identical to SEQ ID NO: 182131
  Synthetic oligonucleotide

SEQ ID NO: 641842 - DNA, 56 bp, Artificial; identical to SEQ ID NO: 175359
  Synthetic oligonucleotide

SEQ ID NO: 641843 - DNA, 55 bp, Artificial; identical to SEQ ID NO: 172779
  Synthetic oligonucleotide

SEQ ID NO: 641844 - DNA, 50 bp, Artificial; identical to SEQ ID NO: 182130
  Synthetic oligonucleotide

SEQ ID NO: 641845 - DNA, 55 bp, Artificial; identical to SEQ ID NO: 182129
  Synthetic oligonucleotide

SEQ ID NO: 641846 - DNA, 55 bp, Artificial; identical to SEQ ID NO: 254388
  Synthetic oligonucleotide

SEQ ID NO: 641847 - DNA, 54 bp, Artificial; identical to SEQ ID NO: 182128
  Synthetic oligonucleotide

SEQ ID NO: 641848 - DNA, 51 bp, Artificial; identical to SEQ ID NO: 205553
  Synthetic oligonucleotide

SEQ ID NO: 641849 - DNA, 59 bp, Artificial; identical to SEQ ID NO: 170994
  Synthetic oligonucleotide

SEQ ID NO: 641850 - DNA, 55 bp, Artificial; identical to SEQ ID NO: 209409
  Synthetic oligonucleotide

SEQ ID NO: 641851 - DNA, 53 bp, Artificial; identical to SEQ ID NO: 164963
  Synthetic oligonucleotide

SEQ ID NO: 641852 - DNA, 52 bp, Artificial; identical to SEQ ID NO: 143813
  Synthetic oligonucleotide

SEQ ID NO: 641853 - DNA, 54 bp, Artificial; identical to SEQ ID NO: 244883
  Synthetic oligonucleotide

SEQ ID NO: 641854 - DNA, 55 bp, Artificial; identical to SEQ ID NO: 218206
  Synthetic oligonucleotide

SEQ ID NO: 641855 - DNA, 60 bp, Artificial; identical to SEQ ID NO: 141764
  Synthetic oligonucleotide

SEQ ID NO: 641856 - DNA, 55 bp, Artificial; identical to SEQ ID NO: 254390
  Synthetic oligonucleotide

SEQ ID NO: 641857 - DNA, 55 bp, Artificial; identical to SEQ ID NO: 254391
  Synthetic oligonucleotide

SEQ ID NO: 641858 - DNA, 55 bp, Artificial; identical to SEQ ID NO: 201813
  Synthetic oligonucleotide

SEQ ID NO: 641859 - DNA, 53 bp, Artificial; identical to SEQ ID NO: 171458
  Synthetic oligonucleotide

SEQ ID NO: 641860 - DNA, 54 bp, Artificial; identical to SEQ ID NO: 246204
  Synthetic oligonucleotide

SEQ ID NO: 641861 - DNA, 55 bp, Artificial; identical to SEQ ID NO: 261923
  Synthetic oligonucleotide

SEQ ID NO: 641862 - DNA, 54 bp, Artificial; identical to SEQ ID NO: 147801
  Synthetic oligonucleotide

SEQ ID NO: 641863 - DNA, 56 bp, Artificial; identical to SEQ ID NO: 200689
  Synthetic oligonucleotide

SEQ ID NO: 641864 - DNA, 55 bp, Artificial; identical to SEQ ID NO: 244882
  Synthetic oligonucleotide

SEQ ID NO: 641865 - DNA, 51 bp, Artificial; identical to SEQ ID NO: 152120
  Synthetic oligonucleotide

SEQ ID NO: 641866 - DNA, 55 bp, Artificial; identical to SEQ ID NO: 244881
  Synthetic oligonucleotide

SEQ ID NO: 641867 - DNA, 53 bp, Artificial; identical to SEQ ID NO: 182125
  Synthetic oligonucleotide

SEQ ID NO: 641868 - DNA, 55 bp, Artificial; identical to SEQ ID NO: 194635
  Synthetic oligonucleotide

SEQ ID NO: 641869 - DNA, 50 bp, Artificial; identical to SEQ ID NO: 219521
  Synthetic oligonucleotide

SEQ ID NO: 641870 - DNA, 51 bp, Artificial; identical to SEQ ID NO: 168722
  Synthetic oligonucleotide

SEQ ID NO: 641871 - DNA, 55 bp, Artificial; identical to SEQ ID NO: 146200
  Synthetic oligonucleotide

SEQ ID NO: 641872 - DNA, 52 bp, Artificial; identical to SEQ ID NO: 160473
  Synthetic oligonucleotide

SEQ ID NO: 641873 - DNA, 55 bp, Artificial; identical to SEQ ID NO: 218205
  Synthetic oligonucleotide

SEQ ID NO: 641874 - DNA, 55 bp, Artificial; identical to SEQ ID NO: 178912
  Synthetic oligonucleotide

SEQ ID NO: 641875 - DNA, 54 bp, Artificial; identical to SEQ ID NO: 194250
  Synthetic oligonucleotide

SEQ ID NO: 641876 - DNA, 53 bp, Artificial; identical to SEQ ID NO: 240587
  Synthetic oligonucleotide

SEQ ID NO: 641877 - DNA, 55 bp, Artificial; identical to SEQ ID NO: 182122
  Synthetic oligonucleotide

SEQ ID NO: 641878 - DNA, 55 bp, Artificial; identical to SEQ ID NO: 146199
  Synthetic oligonucleotide

SEQ ID NO: 641879 - DNA, 60 bp, Artificial; identical to SEQ ID NO: 178911
  Synthetic oligonucleotide

SEQ ID NO: 641880 - DNA, 55 bp, Artificial; identical to SEQ ID NO: 182121
  Synthetic oligonucleotide

SEQ ID NO: 641881 - DNA, 55 bp, Artificial; identical to SEQ ID NO: 171457
  Synthetic oligonucleotide

SEQ ID NO: 641882 - DNA, 59 bp, Artificial; identical to SEQ ID NO: 178910
  Synthetic oligonucleotide

SEQ ID NO: 641883 - DNA, 53 bp, Artificial; identical to SEQ ID NO: 240791
  Synthetic oligonucleotide

SEQ ID NO: 641884 - DNA, 60 bp, Artificial; identical to SEQ ID NO: 209044
  Synthetic oligonucleotide

SEQ ID NO: 641885 - DNA, 51 bp, Artificial; identical to SEQ ID NO: 200086
  Synthetic oligonucleotide

SEQ ID NO: 641886 - DNA, 53 bp, Artificial; identical to SEQ ID NO: 164961
  Synthetic oligonucleotide

SEQ ID NO: 641887 - DNA, 54 bp, Artificial; identical to SEQ ID NO: 147449
  Synthetic oligonucleotide

SEQ ID NO: 641888 - DNA, 59 bp, Artificial; identical to SEQ ID NO: 239804
  Synthetic oligonucleotide

SEQ ID NO: 641889 - DNA, 54 bp, Artificial; identical to SEQ ID NO: 246203
  Synthetic oligonucleotide

SEQ ID NO: 641890 - DNA, 50 bp, Artificial; identical to SEQ ID NO: 210573
  Synthetic oligonucleotide

SEQ ID NO: 641891 - DNA, 55 bp, Artificial; identical to SEQ ID NO: 221602
  Synthetic oligonucleotide

SEQ ID NO: 641892 - DNA, 51 bp, Artificial; identical to SEQ ID NO: 266304
  Synthetic oligonucleotide

SEQ ID NO: 641893 - DNA, 55 bp, Artificial; identical to SEQ ID NO: 244352
  Synthetic oligonucleotide

SEQ ID NO: 641894 - DNA, 55 bp, Artificial; identical to SEQ ID NO: 217608
  Synthetic oligonucleotide

SEQ ID NO: 641895 - DNA, 52 bp, Artificial; identical to SEQ ID NO: 247936
  Synthetic oligonucleotide

SEQ ID NO: 641896 - DNA, 56 bp, Artificial; identical to SEQ ID NO: 239838
  Synthetic oligonucleotide

SEQ ID NO: 641897 - DNA, 53 bp, Artificial; identical to SEQ ID NO: 182118
  Synthetic oligonucleotide

SEQ ID NO: 641898 - DNA, 53 bp, Artificial; identical to SEQ ID NO: 255911
  Synthetic oligonucleotide

SEQ ID NO: 641899 - DNA, 60 bp, Artificial; identical to SEQ ID NO: 190920
  Synthetic oligonucleotide

SEQ ID NO: 641900 - DNA, 56 bp, Artificial; identical to SEQ ID NO: 247378
  Synthetic oligonucleotide

SEQ ID NO: 641901 - DNA, 55 bp, Artificial; identical to SEQ ID NO: 237832
  Synthetic oligonucleotide

SEQ ID NO: 641902 - DNA, 54 bp, Artificial; identical to SEQ ID NO: 240580
  Synthetic oligonucleotide

SEQ ID NO: 641903 - DNA, 55 bp, Artificial; identical to SEQ ID NO: 210997
  Synthetic oligonucleotide

SEQ ID NO: 641904 - DNA, 55 bp, Artificial; identical to SEQ ID NO: 191783
  Synthetic oligonucleotide

SEQ ID NO: 641905 - DNA, 54 bp, Artificial; identical to SEQ ID NO: 240578
  Synthetic oligonucleotide

SEQ ID NO: 641906 - DNA, 54 bp, Artificial; identical to SEQ ID NO: 167042
  Synthetic oligonucleotide

SEQ ID NO: 641907 - DNA, 56 bp, Artificial; identical to SEQ ID NO: 200688
  Synthetic oligonucleotide

SEQ ID NO: 641908 - DNA, 55 bp, Artificial; identical to SEQ ID NO: 147806
  Synthetic oligonucleotide

SEQ ID NO: 641909 - DNA, 55 bp, Artificial; identical to SEQ ID NO: 202713
  Synthetic oligonucleotide

SEQ ID NO: 641910 - DNA, 55 bp, Artificial; identical to SEQ ID NO: 191768
  Synthetic oligonucleotide

SEQ ID NO: 641911 - DNA, 55 bp, Artificial; identical to SEQ ID NO: 182161
  Synthetic oligonucleotide

SEQ ID NO: 641912 - DNA, 53 bp, Artificial; identical to SEQ ID NO: 217285
  Synthetic oligonucleotide

SEQ ID NO: 641913 - DNA, 53 bp, Artificial; identical to SEQ ID NO: 162302
  Synthetic oligonucleotide

SEQ ID NO: 641914 - DNA, 55 bp, Artificial; identical to SEQ ID NO: 257447
  Synthetic oligonucleotide

SEQ ID NO: 641915 - DNA, 60 bp, Artificial; identical to SEQ ID NO: 244109
  Synthetic oligonucleotide

SEQ ID NO: 641916 - DNA, 55 bp, Artificial; identical to SEQ ID NO: 239970
  Synthetic oligonucleotide

SEQ ID NO: 641917 - DNA, 53 bp, Artificial; identical to SEQ ID NO: 164974
  Synthetic oligonucleotide

SEQ ID NO: 641918 - DNA, 59 bp, Artificial; identical to SEQ ID NO: 239849
  Synthetic oligonucleotide

SEQ ID NO: 641919 - DNA, 55 bp, Artificial; identical to SEQ ID NO: 147807
  Synthetic oligonucleotide

SEQ ID NO: 641920 - DNA, 53 bp, Artificial; identical to SEQ ID NO: 185754
  Synthetic oligonucleotide

SEQ ID NO: 641921 - DNA, 55 bp, Artificial; identical to SEQ ID NO: 147808
  Synthetic oligonucleotide

SEQ ID NO: 641922 - DNA, 53 bp, Artificial; identical to SEQ ID NO: 207733
  Synthetic oligonucleotide

SEQ ID NO: 641923 - DNA, 55 bp, Artificial; identical to SEQ ID NO: 198562
  Synthetic oligonucleotide

SEQ ID NO: 641924 - DNA, 51 bp, Artificial; identical to SEQ ID NO: 233881
  Synthetic oligonucleotide

SEQ ID NO: 641925 - DNA, 60 bp, Artificial; identical to SEQ ID NO: 192248
  Synthetic oligonucleotide

SEQ ID NO: 641926 - DNA, 54 bp, Artificial; identical to SEQ ID NO: 155269
  Synthetic oligonucleotide

SEQ ID NO: 641927 - DNA, 57 bp, Artificial; identical to SEQ ID NO: 203262
  Synthetic oligonucleotide

SEQ ID NO: 641928 - DNA, 55 bp, Artificial; identical to SEQ ID NO: 198561
  Synthetic oligonucleotide

SEQ ID NO: 641929 - DNA, 58 bp, Artificial; identical to SEQ ID NO: 190498
  Synthetic oligonucleotide

SEQ ID NO: 641930 - DNA, 54 bp, Artificial; identical to SEQ ID NO: 141175
  Synthetic oligonucleotide

SEQ ID NO: 641931 - DNA, 55 bp, Artificial; identical to SEQ ID NO: 182158
  Synthetic oligonucleotide

SEQ ID NO: 641932 - DNA, 50 bp, Artificial; identical to SEQ ID NO: 196771
  Synthetic oligonucleotide

SEQ ID NO: 641933 - DNA, 55 bp, Artificial; identical to SEQ ID NO: 187507
  Synthetic oligonucleotide

SEQ ID NO: 641934 - DNA, 54 bp, Artificial; identical to SEQ ID NO: 222691
  Synthetic oligonucleotide

SEQ ID NO: 641935 - DNA, 52 bp, Artificial; identical to SEQ ID NO: 165037
  Synthetic oligonucleotide

SEQ ID NO: 641936 - DNA, 55 bp, Artificial; identical to SEQ ID NO: 207291
  Synthetic oligonucleotide

SEQ ID NO: 641937 - DNA, 55 bp, Artificial; identical to SEQ ID NO: 151438
  Synthetic oligonucleotide

SEQ ID NO: 641938 - DNA, 51 bp, Artificial; identical to SEQ ID NO: 243343
  Synthetic oligonucleotide

SEQ ID NO: 641939 - DNA, 55 bp, Artificial; identical to SEQ ID NO: 182156
  Synthetic oligonucleotide

SEQ ID NO: 641940 - DNA, 60 bp, Artificial; identical to SEQ ID NO: 201900
  Synthetic oligonucleotide

SEQ ID NO: 641941 - DNA, 58 bp, Artificial; identical to SEQ ID NO: 223828
  Synthetic oligonucleotide

SEQ ID NO: 641942 - DNA, 57 bp, Artificial; identical to SEQ ID NO: 179744
  Synthetic oligonucleotide

SEQ ID NO: 641943 - DNA, 55 bp, Artificial; identical to SEQ ID NO: 202092
  Synthetic oligonucleotide

SEQ ID NO: 641944 - DNA, 53 bp, Artificial; identical to SEQ ID NO: 164909
  Synthetic oligonucleotide

SEQ ID NO: 641945 - DNA, 51 bp, Artificial; identical to SEQ ID NO: 247243
  Synthetic oligonucleotide

SEQ ID NO: 641946 - DNA, 50 bp, Artificial; identical to SEQ ID NO: 204119
  Synthetic oligonucleotide

SEQ ID NO: 641947 - DNA, 55 bp, Artificial; identical to SEQ ID NO: 171454
  Synthetic oligonucleotide

SEQ ID NO: 641948 - DNA, 52 bp, Artificial; identical to SEQ ID NO: 246403
  Synthetic oligonucleotide

SEQ ID NO: 641949 - DNA, 53 bp, Artificial; identical to SEQ ID NO: 149296
  Synthetic oligonucleotide

SEQ ID NO: 641950 - DNA, 59 bp, Artificial; identical to SEQ ID NO: 239871
  Synthetic oligonucleotide

SEQ ID NO: 641951 - DNA, 59 bp, Artificial; identical to SEQ ID NO: 203263
  Synthetic oligonucleotide

SEQ ID NO: 641952 - DNA, 53 bp, Artificial; identical to SEQ ID NO: 198558
  Synthetic oligonucleotide

SEQ ID NO: 641953 - DNA, 52 bp, Artificial; identical to SEQ ID NO: 247380
  Synthetic oligonucleotide

SEQ ID NO: 641954 - DNA, 50 bp, Artificial; identical to SEQ ID NO: 218575
  Synthetic oligonucleotide

SEQ ID NO: 641955 - DNA, 55 bp, Artificial; identical to SEQ ID NO: 244878
  Synthetic oligonucleotide

SEQ ID NO: 641956 - DNA, 54 bp, Artificial; identical to SEQ ID NO: 242567
  Synthetic oligonucleotide

SEQ ID NO: 641957 - DNA, 55 bp, Artificial; identical to SEQ ID NO: 155745
  Synthetic oligonucleotide

SEQ ID NO: 641958 - DNA, 53 bp, Artificial; identical to SEQ ID NO: 216673
  Synthetic oligonucleotide

SEQ ID NO: 641959 - DNA, 56 bp, Artificial; identical to SEQ ID NO: 201242
  Synthetic oligonucleotide

SEQ ID NO: 641960 - DNA, 54 bp, Artificial; identical to SEQ ID NO: 149121
  Synthetic oligonucleotide

SEQ ID NO: 641961 - DNA, 55 bp, Artificial; identical to SEQ ID NO: 200686
  Synthetic oligonucleotide

SEQ ID NO: 641962 - DNA, 55 bp, Artificial; identical to SEQ ID NO: 257732
  Synthetic oligonucleotide

SEQ ID NO: 641963 - DNA, 55 bp, Artificial; identical to SEQ ID NO: 156427
  Synthetic oligonucleotide

SEQ ID NO: 641964 - DNA, 53 bp, Artificial; identical to SEQ ID NO: 208722
  Synthetic oligonucleotide

SEQ ID NO: 641965 - DNA, 55 bp, Artificial; identical to SEQ ID NO: 156428
  Synthetic oligonucleotide

SEQ ID NO: 641966 - DNA, 56 bp, Artificial; identical to SEQ ID NO: 179878
  Synthetic oligonucleotide

SEQ ID NO: 641967 - DNA, 55 bp, Artificial; identical to SEQ ID NO: 151470
  Synthetic oligonucleotide

SEQ ID NO: 641968 - DNA, 55 bp, Artificial; identical to SEQ ID NO: 182151
  Synthetic oligonucleotide

SEQ ID NO: 641969 - DNA, 55 bp, Artificial; identical to SEQ ID NO: 205471
  Synthetic oligonucleotide

SEQ ID NO: 641970 - DNA, 60 bp, Artificial; identical to SEQ ID NO: 237834
  Synthetic oligonucleotide

SEQ ID NO: 641971 - DNA, 55 bp, Artificial; identical to SEQ ID NO: 224989
  Synthetic oligonucleotide

SEQ ID NO: 641972 - DNA, 55 bp, Artificial; identical to SEQ ID NO: 239965
  Synthetic oligonucleotide

SEQ ID NO: 641973 - DNA, 55 bp, Artificial; identical to SEQ ID NO: 182150
  Synthetic oligonucleotide

SEQ ID NO: 641974 - DNA, 50 bp, Artificial; identical to SEQ ID NO: 153857
  Synthetic oligonucleotide

SEQ ID NO: 641975 - DNA, 55 bp, Artificial; identical to SEQ ID NO: 147698
  Synthetic oligonucleotide

SEQ ID NO: 641976 - DNA, 55 bp, Artificial; identical to SEQ ID NO: 174622
  Synthetic oligonucleotide

SEQ ID NO: 641977 - DNA, 51 bp, Artificial; identical to SEQ ID NO: 192146
  Synthetic oligonucleotide

SEQ ID NO: 641978 - DNA, 56 bp, Artificial; identical to SEQ ID NO: 239497
  Synthetic oligonucleotide

SEQ ID NO: 641979 - DNA, 55 bp, Artificial; identical to SEQ ID NO: 162043
  Synthetic oligonucleotide

SEQ ID NO: 641980 - DNA, 55 bp, Artificial; identical to SEQ ID NO: 182148
  Synthetic oligonucleotide

SEQ ID NO: 641981 - DNA, 60 bp, Artificial; identical to SEQ ID NO: 141765
  Synthetic oligonucleotide

SEQ ID NO: 641982 - DNA, 55 bp, Artificial; identical to SEQ ID NO: 194636
  Synthetic oligonucleotide

SEQ ID NO: 641983 - DNA, 51 bp, Artificial; identical to SEQ ID NO: 156429
  Synthetic oligonucleotide

SEQ ID NO: 641984 - DNA, 55 bp, Artificial; identical to SEQ ID NO: 148193
  Synthetic oligonucleotide

SEQ ID NO: 641985 - DNA, 54 bp, Artificial; identical to SEQ ID NO: 249996
  Synthetic oligonucleotide

SEQ ID NO: 641986 - DNA, 55 bp, Artificial; identical to SEQ ID NO: 156430
  Synthetic oligonucleotide

SEQ ID NO: 641987 - DNA, 56 bp, Artificial; identical to SEQ ID NO: 178906
  Synthetic oligonucleotide

SEQ ID NO: 641988 - DNA, 55 bp, Artificial; identical to SEQ ID NO: 147699
  Synthetic oligonucleotide

SEQ ID NO: 641989 - DNA, 60 bp, Artificial; identical to SEQ ID NO: 200684
  Synthetic oligonucleotide

SEQ ID NO: 641990 - DNA, 51 bp, Artificial; identical to SEQ ID NO: 258216
  Synthetic oligonucleotide

SEQ ID NO: 641991 - DNA, 51 bp, Artificial; identical to SEQ ID NO: 241150
  Synthetic oligonucleotide

SEQ ID NO: 641992 - DNA, 60 bp, Artificial; identical to SEQ ID NO: 148526
  Synthetic oligonucleotide

SEQ ID NO: 641993 - DNA, 55 bp, Artificial; identical to SEQ ID NO: 205418
  Synthetic oligonucleotide

SEQ ID NO: 641994 - DNA, 55 bp, Artificial; identical to SEQ ID NO: 160141
  Synthetic oligonucleotide

SEQ ID NO: 641995 - DNA, 54 bp, Artificial; identical to SEQ ID NO: 202421
  Synthetic oligonucleotide

SEQ ID NO: 641996 - DNA, 55 bp, Artificial; identical to SEQ ID NO: 234330
  Synthetic oligonucleotide

SEQ ID NO: 641997 - DNA, 55 bp, Artificial; identical to SEQ ID NO: 240008
  Synthetic oligonucleotide

SEQ ID NO: 641998 - DNA, 55 bp, Artificial; identical to SEQ ID NO: 234332
  Synthetic oligonucleotide

SEQ ID NO: 641999 - DNA, 59 bp, Artificial; identical to SEQ ID NO: 255866
  Synthetic oligonucleotide

SEQ ID NO: 642000 - DNA, 60 bp, Artificial; identical to SEQ ID NO: 200683
  Synthetic oligonucleotide

SEQ ID NO: 642001 - DNA, 51 bp, Artificial; identical to SEQ ID NO: 236491
  Synthetic oligonucleotide

SEQ ID NO: 642002 - DNA, 58 bp, Artificial; identical to SEQ ID NO: 142695
  Synthetic oligonucleotide

SEQ ID NO: 642003 - DNA, 55 bp, Artificial; identical to SEQ ID NO: 182144
  Synthetic oligonucleotide

SEQ ID NO: 642004 - DNA, 60 bp, Artificial; identical to SEQ ID NO: 244443
  Synthetic oligonucleotide

SEQ ID NO: 642005 - DNA, 55 bp, Artificial; identical to SEQ ID NO: 202100
  Synthetic oligonucleotide

SEQ ID NO: 642006 - DNA, 54 bp, Artificial; identical to SEQ ID NO: 198741
  Synthetic oligonucleotide

SEQ ID NO: 642007 - DNA, 54 bp, Artificial; identical to SEQ ID NO: 240568
  Synthetic oligonucleotide

SEQ ID NO: 642008 - DNA, 55 bp, Artificial; identical to SEQ ID NO: 190556
  Synthetic oligonucleotide

SEQ ID NO: 642009 - DNA, 54 bp, Artificial; identical to SEQ ID NO: 168834
  Synthetic oligonucleotide

SEQ ID NO: 642010 - DNA, 53 bp, Artificial; identical to SEQ ID NO: 160911
  Synthetic oligonucleotide

SEQ ID NO: 642011 - DNA, 52 bp, Artificial; identical to SEQ ID NO: 182143
  Synthetic oligonucleotide

SEQ ID NO: 642012 - DNA, 54 bp, Artificial; identical to SEQ ID NO: 182142
  Synthetic oligonucleotide

SEQ ID NO: 642013 - DNA, 55 bp, Artificial; identical to SEQ ID NO: 261922
  Synthetic oligonucleotide

SEQ ID NO: 642014 - DNA, 55 bp, Artificial; identical to SEQ ID NO: 244871
  Synthetic oligonucleotide

SEQ ID NO: 642015 - DNA, 55 bp, Artificial; identical to SEQ ID NO: 166893
  Synthetic oligonucleotide

SEQ ID NO: 642016 - DNA, 52 bp, Artificial; identical to SEQ ID NO: 221731
  Synthetic oligonucleotide

SEQ ID NO: 642017 - DNA, 52 bp, Artificial; identical to SEQ ID NO: 186324
  Synthetic oligonucleotide

SEQ ID NO: 642018 - DNA, 56 bp, Artificial; identical to SEQ ID NO: 167275
  Synthetic oligonucleotide

SEQ ID NO: 642019 - DNA, 55 bp, Artificial; identical to SEQ ID NO: 146198
  Synthetic oligonucleotide

SEQ ID NO: 642020 - DNA, 58 bp, Artificial; identical to SEQ ID NO: 166102
  Synthetic oligonucleotide

SEQ ID NO: 642021 - DNA, 56 bp, Artificial; identical to SEQ ID NO: 197855
  Synthetic oligonucleotide

SEQ ID NO: 642022 - DNA, 55 bp, Artificial; identical to SEQ ID NO: 166697
  Synthetic oligonucleotide

SEQ ID NO: 642023 - DNA, 55 bp, Artificial; identical to SEQ ID NO: 143691
  Synthetic oligonucleotide

SEQ ID NO: 642024 - DNA, 55 bp, Artificial; identical to SEQ ID NO: 234333
  Synthetic oligonucleotide

SEQ ID NO: 642025 - DNA, 51 bp, Artificial; identical to SEQ ID NO: 149894
  Synthetic oligonucleotide

SEQ ID NO: 642026 - DNA, 60 bp, Artificial; identical to SEQ ID NO: 219685
  Synthetic oligonucleotide

SEQ ID NO: 642027 - DNA, 55 bp, Artificial; identical to SEQ ID NO: 224988
  Synthetic oligonucleotide

SEQ ID NO: 642028 - DNA, 56 bp, Artificial; identical to SEQ ID NO: 266428
  Synthetic oligonucleotide

SEQ ID NO: 642029 - DNA, 60 bp, Artificial; identical to SEQ ID NO: 237835
  Synthetic oligonucleotide

SEQ ID NO: 642030 - DNA, 60 bp, Artificial; identical to SEQ ID NO: 206620
  Synthetic oligonucleotide

SEQ ID NO: 642031 - DNA, 54 bp, Artificial; identical to SEQ ID NO: 151413
  Synthetic oligonucleotide

SEQ ID NO: 642032 - DNA, 55 bp, Artificial; identical to SEQ ID NO: 174625
  Synthetic oligonucleotide

SEQ ID NO: 642033 - DNA, 55 bp, Artificial; identical to SEQ ID NO: 174626
  Synthetic oligonucleotide

SEQ ID NO: 642034 - DNA, 55 bp, Artificial; identical to SEQ ID NO: 209408
  Synthetic oligonucleotide

SEQ ID NO: 642035 - DNA, 60 bp, Artificial; identical to SEQ ID NO: 197537
  Synthetic oligonucleotide

SEQ ID NO: 642036 - DNA, 55 bp, Artificial; identical to SEQ ID NO: 198740
  Synthetic oligonucleotide

SEQ ID NO: 642037 - DNA, 50 bp, Artificial; identical to SEQ ID NO: 150533
  Synthetic oligonucleotide

SEQ ID NO: 642038 - DNA, 55 bp, Artificial; identical to SEQ ID NO: 178901
  Synthetic oligonucleotide

SEQ ID NO: 642039 - DNA, 54 bp, Artificial; identical to SEQ ID NO: 153128
  Synthetic oligonucleotide

SEQ ID NO: 642040 - DNA, 51 bp, Artificial; identical to SEQ ID NO: 209146
  Synthetic oligonucleotide

SEQ ID NO: 642041 - DNA, 55 bp, Artificial; identical to SEQ ID NO: 254369
  Synthetic oligonucleotide

SEQ ID NO: 642042 - DNA, 60 bp, Artificial; identical to SEQ ID NO: 203264
  Synthetic oligonucleotide

SEQ ID NO: 642043 - DNA, 55 bp, Artificial; identical to SEQ ID NO: 156431
  Synthetic oligonucleotide

SEQ ID NO: 642044 - DNA, 55 bp, Artificial; identical to SEQ ID NO: 207295
  Synthetic oligonucleotide

SEQ ID NO: 642045 - DNA, 56 bp, Artificial; identical to SEQ ID NO: 192254
  Synthetic oligonucleotide

SEQ ID NO: 642046 - DNA, 55 bp, Artificial; identical to SEQ ID NO: 207297
  Synthetic oligonucleotide

SEQ ID NO: 642047 - DNA, 55 bp, Artificial; identical to SEQ ID NO: 233539
  Synthetic oligonucleotide

SEQ ID NO: 642048 - DNA, 54 bp, Artificial; identical to SEQ ID NO: 149151
  Synthetic oligonucleotide

SEQ ID NO: 642049 - DNA, 51 bp, Artificial; identical to SEQ ID NO: 241149
  Synthetic oligonucleotide

SEQ ID NO: 642050 - DNA, 52 bp, Artificial; identical to SEQ ID NO: 190867
  Synthetic oligonucleotide

SEQ ID NO: 642051 - DNA, 59 bp, Artificial; identical to SEQ ID NO: 243920
  Synthetic oligonucleotide

SEQ ID NO: 642052 - DNA, 60 bp, Artificial; identical to SEQ ID NO: 148970
  Synthetic oligonucleotide

SEQ ID NO: 642053 - DNA, 59 bp, Artificial; identical to SEQ ID NO: 266429
  Synthetic oligonucleotide

SEQ ID NO: 642054 - DNA, 55 bp, Artificial; identical to SEQ ID NO: 239474
  Synthetic oligonucleotide

SEQ ID NO: 642055 - DNA, 53 bp, Artificial; identical to SEQ ID NO: 217611
  Synthetic oligonucleotide

SEQ ID NO: 642056 - DNA, 55 bp, Artificial; identical to SEQ ID NO: 254366
  Synthetic oligonucleotide

SEQ ID NO: 642057 - DNA, 57 bp, Artificial; identical to SEQ ID NO: 179780
  Synthetic oligonucleotide

SEQ ID NO: 642058 - DNA, 55 bp, Artificial; identical to SEQ ID NO: 225033
  Synthetic oligonucleotide

SEQ ID NO: 642059 - DNA, 55 bp, Artificial; identical to SEQ ID NO: 254364
  Synthetic oligonucleotide

SEQ ID NO: 642060 - DNA, 56 bp, Artificial; identical to SEQ ID NO: 179918
  Synthetic oligonucleotide

SEQ ID NO: 642061 - DNA, 55 bp, Artificial; identical to SEQ ID NO: 174627
  Synthetic oligonucleotide

SEQ ID NO: 642062 - DNA, 59 bp, Artificial; identical to SEQ ID NO: 239393
  Synthetic oligonucleotide

SEQ ID NO: 642063 - DNA, 58 bp, Artificial; identical to SEQ ID NO: 239355
  Synthetic oligonucleotide

SEQ ID NO: 642064 - DNA, 53 bp, Artificial; identical to SEQ ID NO: 218867
  Synthetic oligonucleotide

SEQ ID NO: 642065 - DNA, 51 bp, Artificial; identical to SEQ ID NO: 241145
  Synthetic oligonucleotide

SEQ ID NO: 642066 - DNA, 55 bp, Artificial; identical to SEQ ID NO: 252948
  Synthetic oligonucleotide

SEQ ID NO: 642067 - DNA, 57 bp, Artificial; identical to SEQ ID NO: 147268
  Synthetic oligonucleotide

SEQ ID NO: 642068 - DNA, 50 bp, Artificial; identical to SEQ ID NO: 189810
  Synthetic oligonucleotide

SEQ ID NO: 642069 - DNA, 57 bp, Artificial; identical to SEQ ID NO: 179775
  Synthetic oligonucleotide

SEQ ID NO: 642070 - DNA, 51 bp, Artificial; identical to SEQ ID NO: 266303
  Synthetic oligonucleotide

SEQ ID NO: 642071 - DNA, 55 bp, Artificial; identical to SEQ ID NO: 182091
  Synthetic oligonucleotide

SEQ ID NO: 642072 - DNA, 55 bp, Artificial; identical to SEQ ID NO: 252949
  Synthetic oligonucleotide

SEQ ID NO: 642073 - DNA, 54 bp, Artificial; identical to SEQ ID NO: 199516
  Synthetic oligonucleotide

SEQ ID NO: 642074 - DNA, 59 bp, Artificial; identical to SEQ ID NO: 149193
  Synthetic oligonucleotide

SEQ ID NO: 642075 - DNA, 53 bp, Artificial; identical to SEQ ID NO: 190557
  Synthetic oligonucleotide

SEQ ID NO: 642076 - DNA, 55 bp, Artificial; identical to SEQ ID NO: 171453
  Synthetic oligonucleotide

SEQ ID NO: 642077 - DNA, 55 bp, Artificial; identical to SEQ ID NO: 142739
  Synthetic oligonucleotide

SEQ ID NO: 642078 - DNA, 51 bp, Artificial; identical to SEQ ID NO: 217090
  Synthetic oligonucleotide

SEQ ID NO: 642079 - DNA, 54 bp, Artificial; identical to SEQ ID NO: 242623
  Synthetic oligonucleotide

SEQ ID NO: 642080 - DNA, 55 bp, Artificial; identical to SEQ ID NO: 242625
  Synthetic oligonucleotide

SEQ ID NO: 642081 - DNA, 55 bp, Artificial; identical to SEQ ID NO: 188142
  Synthetic oligonucleotide

SEQ ID NO: 642082 - DNA, 55 bp, Artificial; identical to SEQ ID NO: 142216
  Synthetic oligonucleotide

SEQ ID NO: 642083 - DNA, 52 bp, Artificial; identical to SEQ ID NO: 223662
  Synthetic oligonucleotide

SEQ ID NO: 642084 - DNA, 55 bp, Artificial; identical to SEQ ID NO: 182089
  Synthetic oligonucleotide

SEQ ID NO: 642085 - DNA, 55 bp, Artificial; identical to SEQ ID NO: 207298
  Synthetic oligonucleotide

SEQ ID NO: 642086 - DNA, 58 bp, Artificial; identical to SEQ ID NO: 244132
  Synthetic oligonucleotide

SEQ ID NO: 642087 - DNA, 55 bp, Artificial; identical to SEQ ID NO: 257733
  Synthetic oligonucleotide

SEQ ID NO: 642088 - DNA, 55 bp, Artificial; identical to SEQ ID NO: 172781
  Synthetic oligonucleotide

SEQ ID NO: 642089 - DNA, 54 bp, Artificial; identical to SEQ ID NO: 153560
  Synthetic oligonucleotide

SEQ ID NO: 642090 - DNA, 57 bp, Artificial; identical to SEQ ID NO: 208073
  Synthetic oligonucleotide

SEQ ID NO: 642091 - DNA, 54 bp, Artificial; identical to SEQ ID NO: 244041
  Synthetic oligonucleotide

SEQ ID NO: 642092 - DNA, 55 bp, Artificial; identical to SEQ ID NO: 254362
  Synthetic oligonucleotide

SEQ ID NO: 642093 - DNA, 55 bp, Artificial; identical to SEQ ID NO: 182087
  Synthetic oligonucleotide

SEQ ID NO: 642094 - DNA, 54 bp, Artificial; identical to SEQ ID NO: 212924
  Synthetic oligonucleotide

SEQ ID NO: 642095 - DNA, 55 bp, Artificial; identical to SEQ ID NO: 156435
  Synthetic oligonucleotide

SEQ ID NO: 642096 - DNA, 56 bp, Artificial; identical to SEQ ID NO: 239480
  Synthetic oligonucleotide

SEQ ID NO: 642097 - DNA, 50 bp, Artificial; identical to SEQ ID NO: 212308
  Synthetic oligonucleotide

SEQ ID NO: 642098 - DNA, 52 bp, Artificial; identical to SEQ ID NO: 192264
  Synthetic oligonucleotide

SEQ ID NO: 642099 - DNA, 55 bp, Artificial; identical to SEQ ID NO: 244866
  Synthetic oligonucleotide

SEQ ID NO: 642100 - DNA, 55 bp, Artificial; identical to SEQ ID NO: 254361
  Synthetic oligonucleotide

SEQ ID NO: 642101 - DNA, 51 bp, Artificial; identical to SEQ ID NO: 165171
  Synthetic oligonucleotide

SEQ ID NO: 642102 - DNA, 55 bp, Artificial; identical to SEQ ID NO: 244864
  Synthetic oligonucleotide

SEQ ID NO: 642103 - DNA, 58 bp, Artificial; identical to SEQ ID NO: 248908
  Synthetic oligonucleotide

SEQ ID NO: 642104 - DNA, 55 bp, Artificial; identical to SEQ ID NO: 147708
  Synthetic oligonucleotide

SEQ ID NO: 642105 - DNA, 54 bp, Artificial; identical to SEQ ID NO: 212926
  Synthetic oligonucleotide

SEQ ID NO: 642106 - DNA, 55 bp, Artificial; identical to SEQ ID NO: 144469
  Synthetic oligonucleotide

SEQ ID NO: 642107 - DNA, 55 bp, Artificial; identical to SEQ ID NO: 261619
  Synthetic oligonucleotide

SEQ ID NO: 642108 - DNA, 58 bp, Artificial; identical to SEQ ID NO: 179491
  Synthetic oligonucleotide

SEQ ID NO: 642109 - DNA, 55 bp, Artificial; identical to SEQ ID NO: 217615
  Synthetic oligonucleotide

SEQ ID NO: 642110 - DNA, 55 bp, Artificial; identical to SEQ ID NO: 200681
  Synthetic oligonucleotide

SEQ ID NO: 642111 - DNA, 59 bp, Artificial; identical to SEQ ID NO: 243631
  Synthetic oligonucleotide

SEQ ID NO: 642112 - DNA, 55 bp, Artificial; identical to SEQ ID NO: 146194
  Synthetic oligonucleotide

SEQ ID NO: 642113 - DNA, 55 bp, Artificial; identical to SEQ ID NO: 156437
  Synthetic oligonucleotide

SEQ ID NO: 642114 - DNA, 55 bp, Artificial; identical to SEQ ID NO: 207302
  Synthetic oligonucleotide

SEQ ID NO: 642115 - DNA, 55 bp, Artificial; identical to SEQ ID NO: 144468
  Synthetic oligonucleotide

SEQ ID NO: 642116 - DNA, 56 bp, Artificial; identical to SEQ ID NO: 179935
  Synthetic oligonucleotide

SEQ ID NO: 642117 - DNA, 54 bp, Artificial; identical to SEQ ID NO: 254360
  Synthetic oligonucleotide

SEQ ID NO: 642118 - DNA, 60 bp, Artificial; identical to SEQ ID NO: 200680
  Synthetic oligonucleotide

SEQ ID NO: 642119 - DNA, 54 bp, Artificial; identical to SEQ ID NO: 188018
  Synthetic oligonucleotide

SEQ ID NO: 642120 - DNA, 53 bp, Artificial; identical to SEQ ID NO: 199783
  Synthetic oligonucleotide

SEQ ID NO: 642121 - DNA, 59 bp, Artificial; identical to SEQ ID NO: 178891
  Synthetic oligonucleotide

SEQ ID NO: 642122 - DNA, 60 bp, Artificial; identical to SEQ ID NO: 178889
  Synthetic oligonucleotide

SEQ ID NO: 642123 - DNA, 52 bp, Artificial; identical to SEQ ID NO: 160474
  Synthetic oligonucleotide

SEQ ID NO: 642124 - DNA, 52 bp, Artificial; identical to SEQ ID NO: 240868
  Synthetic oligonucleotide

SEQ ID NO: 642125 - DNA, 52 bp, Artificial; identical to SEQ ID NO: 188494
  Synthetic oligonucleotide

SEQ ID NO: 642126 - DNA, 50 bp, Artificial; identical to SEQ ID NO: 142839
  Synthetic oligonucleotide

SEQ ID NO: 642127 - DNA, 53 bp, Artificial; identical to SEQ ID NO: 156441
  Synthetic oligonucleotide

SEQ ID NO: 642128 - DNA, 55 bp, Artificial; identical to SEQ ID NO: 188300
  Synthetic oligonucleotide

SEQ ID NO: 642129 - DNA, 55 bp, Artificial; identical to SEQ ID NO: 149637
  Synthetic oligonucleotide

SEQ ID NO: 642130 - DNA, 52 bp, Artificial; identical to SEQ ID NO: 202528
  Synthetic oligonucleotide

SEQ ID NO: 642131 - DNA, 55 bp, Artificial; identical to SEQ ID NO: 208421
  Synthetic oligonucleotide

SEQ ID NO: 642132 - DNA, 51 bp, Artificial; identical to SEQ ID NO: 187085
  Synthetic oligonucleotide

SEQ ID NO: 642133 - DNA, 59 bp, Artificial; identical to SEQ ID NO: 178830
  Synthetic oligonucleotide

SEQ ID NO: 642134 - DNA, 55 bp, Artificial; identical to SEQ ID NO: 205419
  Synthetic oligonucleotide

SEQ ID NO: 642135 - DNA, 54 bp, Artificial; identical to SEQ ID NO: 246197
  Synthetic oligonucleotide

SEQ ID NO: 642136 - DNA, 57 bp, Artificial; identical to SEQ ID NO: 233347
  Synthetic oligonucleotide

SEQ ID NO: 642137 - DNA, 55 bp, Artificial; identical to SEQ ID NO: 190559
  Synthetic oligonucleotide

SEQ ID NO: 642138 - DNA, 51 bp, Artificial; identical to SEQ ID NO: 246783
  Synthetic oligonucleotide

SEQ ID NO: 642139 - DNA, 56 bp, Artificial; identical to SEQ ID NO: 166207
  Synthetic oligonucleotide

SEQ ID NO: 642140 - DNA, 55 bp, Artificial; identical to SEQ ID NO: 259064
  Synthetic oligonucleotide

SEQ ID NO: 642141 - DNA, 55 bp, Artificial; identical to SEQ ID NO: 239900
  Synthetic oligonucleotide

SEQ ID NO: 642142 - DNA, 55 bp, Artificial; identical to SEQ ID NO: 168524
  Synthetic oligonucleotide

SEQ ID NO: 642143 - DNA, 54 bp, Artificial; identical to SEQ ID NO: 182076
  Synthetic oligonucleotide

SEQ ID NO: 642144 - DNA, 55 bp, Artificial; identical to SEQ ID NO: 154532
  Synthetic oligonucleotide

SEQ ID NO: 642145 - DNA, 55 bp, Artificial; identical to SEQ ID NO: 233538
  Synthetic oligonucleotide

SEQ ID NO: 642146 - DNA, 55 bp, Artificial; identical to SEQ ID NO: 166690
  Synthetic oligonucleotide

SEQ ID NO: 642147 - DNA, 55 bp, Artificial; identical to SEQ ID NO: 207303
  Synthetic oligonucleotide

SEQ ID NO: 642148 - DNA, 52 bp, Artificial; identical to SEQ ID NO: 233840
  Synthetic oligonucleotide

SEQ ID NO: 642149 - DNA, 59 bp, Artificial; identical to SEQ ID NO: 239470
  Synthetic oligonucleotide

SEQ ID NO: 642150 - DNA, 54 bp, Artificial; identical to SEQ ID NO: 149748
  Synthetic oligonucleotide

SEQ ID NO: 642151 - DNA, 52 bp, Artificial; identical to SEQ ID NO: 188492
  Synthetic oligonucleotide

SEQ ID NO: 642152 - DNA, 59 bp, Artificial; identical to SEQ ID NO: 178825
  Synthetic oligonucleotide

SEQ ID NO: 642153 - DNA, 55 bp, Artificial; identical to SEQ ID NO: 257735
  Synthetic oligonucleotide

SEQ ID NO: 642154 - DNA, 59 bp, Artificial; identical to SEQ ID NO: 201084
  Synthetic oligonucleotide

SEQ ID NO: 642155 - DNA, 60 bp, Artificial; identical to SEQ ID NO: 217091
  Synthetic oligonucleotide

SEQ ID NO: 642156 - DNA, 55 bp, Artificial; identical to SEQ ID NO: 191763
  Synthetic oligonucleotide

SEQ ID NO: 642157 - DNA, 58 bp, Artificial; identical to SEQ ID NO: 239504
  Synthetic oligonucleotide

SEQ ID NO: 642158 - DNA, 55 bp, Artificial; identical to SEQ ID NO: 191958
  Synthetic oligonucleotide

SEQ ID NO: 642159 - DNA, 55 bp, Artificial; identical to SEQ ID NO: 253980
  Synthetic oligonucleotide

SEQ ID NO: 642160 - DNA, 53 bp, Artificial; identical to SEQ ID NO: 207687
  Synthetic oligonucleotide

SEQ ID NO: 642161 - DNA, 55 bp, Artificial; identical to SEQ ID NO: 152291
  Synthetic oligonucleotide

SEQ ID NO: 642162 - DNA, 52 bp, Artificial; identical to SEQ ID NO: 149859
  Synthetic oligonucleotide

SEQ ID NO: 642163 - DNA, 55 bp, Artificial; identical to SEQ ID NO: 244861
  Synthetic oligonucleotide

SEQ ID NO: 642164 - DNA, 53 bp, Artificial; identical to SEQ ID NO: 266277
  Synthetic oligonucleotide

SEQ ID NO: 642165 - DNA, 55 bp, Artificial; identical to SEQ ID NO: 244860
  Synthetic oligonucleotide

SEQ ID NO: 642166 - DNA, 55 bp, Artificial; identical to SEQ ID NO: 244859
  Synthetic oligonucleotide

SEQ ID NO: 642167 - DNA, 55 bp, Artificial; identical to SEQ ID NO: 166685
  Synthetic oligonucleotide

SEQ ID NO: 642168 - DNA, 59 bp, Artificial; identical to SEQ ID NO: 187318
  Synthetic oligonucleotide

SEQ ID NO: 642169 - DNA, 55 bp, Artificial; identical to SEQ ID NO: 200679
  Synthetic oligonucleotide

SEQ ID NO: 642170 - DNA, 55 bp, Artificial; identical to SEQ ID NO: 172787
  Synthetic oligonucleotide

SEQ ID NO: 642171 - DNA, 55 bp, Artificial; identical to SEQ ID NO: 239570
  Synthetic oligonucleotide

SEQ ID NO: 642172 - DNA, 55 bp, Artificial; identical to SEQ ID NO: 166684
  Synthetic oligonucleotide

SEQ ID NO: 642173 - DNA, 57 bp, Artificial; identical to SEQ ID NO: 256589
  Synthetic oligonucleotide

SEQ ID NO: 642174 - DNA, 60 bp, Artificial; identical to SEQ ID NO: 178821
  Synthetic oligonucleotide

SEQ ID NO: 642175 - DNA, 55 bp, Artificial; identical to SEQ ID NO: 187197
  Synthetic oligonucleotide

SEQ ID NO: 642176 - DNA, 54 bp, Artificial; identical to SEQ ID NO: 185441
  Synthetic oligonucleotide

SEQ ID NO: 642177 - DNA, 59 bp, Artificial; identical to SEQ ID NO: 166046
  Synthetic oligonucleotide

SEQ ID NO: 642178 - DNA, 55 bp, Artificial; identical to SEQ ID NO: 188977
  Synthetic oligonucleotide

SEQ ID NO: 642179 - DNA, 56 bp, Artificial; identical to SEQ ID NO: 222869
  Synthetic oligonucleotide

SEQ ID NO: 642180 - DNA, 60 bp, Artificial; identical to SEQ ID NO: 150081
  Synthetic oligonucleotide

SEQ ID NO: 642181 - DNA, 55 bp, Artificial; identical to SEQ ID NO: 252950
  Synthetic oligonucleotide

SEQ ID NO: 642182 - DNA, 60 bp, Artificial; identical to SEQ ID NO: 141766
  Synthetic oligonucleotide

SEQ ID NO: 642183 - DNA, 54 bp, Artificial; identical to SEQ ID NO: 191167
  Synthetic oligonucleotide

SEQ ID NO: 642184 - DNA, 58 bp, Artificial; identical to SEQ ID NO: 200678
  Synthetic oligonucleotide

SEQ ID NO: 642185 - DNA, 55 bp, Artificial; identical to SEQ ID NO: 196149
  Synthetic oligonucleotide

SEQ ID NO: 642186 - DNA, 55 bp, Artificial; identical to SEQ ID NO: 143690
  Synthetic oligonucleotide

SEQ ID NO: 642187 - DNA, 55 bp, Artificial; identical to SEQ ID NO: 198735
  Synthetic oligonucleotide

SEQ ID NO: 642188 - DNA, 59 bp, Artificial; identical to SEQ ID NO: 239178
  Synthetic oligonucleotide

SEQ ID NO: 642189 - DNA, 60 bp, Artificial; identical to SEQ ID NO: 206509
  Synthetic oligonucleotide

SEQ ID NO: 642190 - DNA, 55 bp, Artificial; identical to SEQ ID NO: 169216
  Synthetic oligonucleotide

SEQ ID NO: 642191 - DNA, 51 bp, Artificial; identical to SEQ ID NO: 248076
  Synthetic oligonucleotide

SEQ ID NO: 642192 - DNA, 57 bp, Artificial; identical to SEQ ID NO: 168191
  Synthetic oligonucleotide

SEQ ID NO: 642193 - DNA, 55 bp, Artificial; identical to SEQ ID NO: 208420
  Synthetic oligonucleotide

SEQ ID NO: 642194 - DNA, 54 bp, Artificial; identical to SEQ ID NO: 147681
  Synthetic oligonucleotide

SEQ ID NO: 642195 - DNA, 55 bp, Artificial; identical to SEQ ID NO: 168525
  Synthetic oligonucleotide

SEQ ID NO: 642196 - DNA, 57 bp, Artificial; identical to SEQ ID NO: 146970
  Synthetic oligonucleotide

SEQ ID NO: 642197 - DNA, 52 bp, Artificial; identical to SEQ ID NO: 225237
  Synthetic oligonucleotide

SEQ ID NO: 642198 - DNA, 55 bp, Artificial; identical to SEQ ID NO: 182117
  Synthetic oligonucleotide

SEQ ID NO: 642199 - DNA, 55 bp, Artificial; identical to SEQ ID NO: 154082
  Synthetic oligonucleotide

SEQ ID NO: 642200 - DNA, 56 bp, Artificial; identical to SEQ ID NO: 206553
  Synthetic oligonucleotide

SEQ ID NO: 642201 - DNA, 60 bp, Artificial; identical to SEQ ID NO: 239592
  Synthetic oligonucleotide

SEQ ID NO: 642202 - DNA, 60 bp, Artificial; identical to SEQ ID NO: 239615
  Synthetic oligonucleotide

SEQ ID NO: 642203 - DNA, 55 bp, Artificial; identical to SEQ ID NO: 207301
  Synthetic oligonucleotide

SEQ ID NO: 642204 - DNA, 59 bp, Artificial; identical to SEQ ID NO: 224311
  Synthetic oligonucleotide

SEQ ID NO: 642205 - DNA, 55 bp, Artificial; identical to SEQ ID NO: 162040
  Synthetic oligonucleotide

SEQ ID NO: 642206 - DNA, 55 bp, Artificial; identical to SEQ ID NO: 142261
  Synthetic oligonucleotide

SEQ ID NO: 642207 - DNA, 56 bp, Artificial; identical to SEQ ID NO: 171092
  Synthetic oligonucleotide

SEQ ID NO: 642208 - DNA, 55 bp, Artificial; identical to SEQ ID NO: 162039
  Synthetic oligonucleotide

SEQ ID NO: 642209 - DNA, 55 bp, Artificial; identical to SEQ ID NO: 217672
  Synthetic oligonucleotide

SEQ ID NO: 642210 - DNA, 55 bp, Artificial; identical to SEQ ID NO: 172947
  Synthetic oligonucleotide

SEQ ID NO: 642211 - DNA, 54 bp, Artificial; identical to SEQ ID NO: 202427
  Synthetic oligonucleotide

SEQ ID NO: 642212 - DNA, 55 bp, Artificial; identical to SEQ ID NO: 218204
  Synthetic oligonucleotide

SEQ ID NO: 642213 - DNA, 54 bp, Artificial; identical to SEQ ID NO: 253246
  Synthetic oligonucleotide

SEQ ID NO: 642214 - DNA, 50 bp, Artificial; identical to SEQ ID NO: 150522
  Synthetic oligonucleotide

SEQ ID NO: 642215 - DNA, 60 bp, Artificial; identical to SEQ ID NO: 190997
  Synthetic oligonucleotide

SEQ ID NO: 642216 - DNA, 55 bp, Artificial; identical to SEQ ID NO: 188976
  Synthetic oligonucleotide

SEQ ID NO: 642217 - DNA, 54 bp, Artificial; identical to SEQ ID NO: 258943
  Synthetic oligonucleotide

SEQ ID NO: 642218 - DNA, 55 bp, Artificial; identical to SEQ ID NO: 145195
  Synthetic oligonucleotide

SEQ ID NO: 642219 - DNA, 55 bp, Artificial; identical to SEQ ID NO: 244856
  Synthetic oligonucleotide

SEQ ID NO: 642220 - DNA, 55 bp, Artificial; identical to SEQ ID NO: 208419
  Synthetic oligonucleotide

SEQ ID NO: 642221 - DNA, 60 bp, Artificial; identical to SEQ ID NO: 178819
  Synthetic oligonucleotide

SEQ ID NO: 642222 - DNA, 55 bp, Artificial; identical to SEQ ID NO: 182114
  Synthetic oligonucleotide

SEQ ID NO: 642223 - DNA, 56 bp, Artificial; identical to SEQ ID NO: 179888
  Synthetic oligonucleotide

SEQ ID NO: 642224 - DNA, 55 bp, Artificial; identical to SEQ ID NO: 182113
  Synthetic oligonucleotide

SEQ ID NO: 642225 - DNA, 57 bp, Artificial; identical to SEQ ID NO: 240837
  Synthetic oligonucleotide

SEQ ID NO: 642226 - DNA, 51 bp, Artificial; identical to SEQ ID NO: 215234
  Synthetic oligonucleotide

SEQ ID NO: 642227 - DNA, 55 bp, Artificial; identical to SEQ ID NO: 182112
  Synthetic oligonucleotide

SEQ ID NO: 642228 - DNA, 52 bp, Artificial; identical to SEQ ID NO: 157511
  Synthetic oligonucleotide

SEQ ID NO: 642229 - DNA, 60 bp, Artificial; identical to SEQ ID NO: 200677
  Synthetic oligonucleotide

SEQ ID NO: 642230 - DNA, 55 bp, Artificial; identical to SEQ ID NO: 152290
  Synthetic oligonucleotide

SEQ ID NO: 642231 - DNA, 55 bp, Artificial; identical to SEQ ID NO: 147685
  Synthetic oligonucleotide

SEQ ID NO: 642232 - DNA, 54 bp, Artificial; identical to SEQ ID NO: 249645
  Synthetic oligonucleotide

SEQ ID NO: 642233 - DNA, 54 bp, Artificial; identical to SEQ ID NO: 246095
  Synthetic oligonucleotide

SEQ ID NO: 642234 - DNA, 55 bp, Artificial; identical to SEQ ID NO: 219643
  Synthetic oligonucleotide

SEQ ID NO: 642235 - DNA, 55 bp, Artificial; identical to SEQ ID NO: 153129
  Synthetic oligonucleotide

SEQ ID NO: 642236 - DNA, 55 bp, Artificial; identical to SEQ ID NO: 166885
  Synthetic oligonucleotide

SEQ ID NO: 642237 - DNA, 55 bp, Artificial; identical to SEQ ID NO: 174633
  Synthetic oligonucleotide

SEQ ID NO: 642238 - DNA, 60 bp, Artificial; identical to SEQ ID NO: 208340
  Synthetic oligonucleotide

SEQ ID NO: 642239 - DNA, 55 bp, Artificial; identical to SEQ ID NO: 239605
  Synthetic oligonucleotide

SEQ ID NO: 642240 - DNA, 54 bp, Artificial; identical to SEQ ID NO: 144250
  Synthetic oligonucleotide

SEQ ID NO: 642241 - DNA, 55 bp, Artificial; identical to SEQ ID NO: 182108
  Synthetic oligonucleotide

SEQ ID NO: 642242 - DNA, 52 bp, Artificial; identical to SEQ ID NO: 152086
  Synthetic oligonucleotide

SEQ ID NO: 642243 - DNA, 55 bp, Artificial; identical to SEQ ID NO: 187525
  Synthetic oligonucleotide

SEQ ID NO: 642244 - DNA, 51 bp, Artificial; identical to SEQ ID NO: 152126
  Synthetic oligonucleotide

SEQ ID NO: 642245 - DNA, 55 bp, Artificial; identical to SEQ ID NO: 242636
  Synthetic oligonucleotide

SEQ ID NO: 642246 - DNA, 52 bp, Artificial; identical to SEQ ID NO: 258157
  Synthetic oligonucleotide

SEQ ID NO: 642247 - DNA, 55 bp, Artificial; identical to SEQ ID NO: 207294
  Synthetic oligonucleotide

SEQ ID NO: 642248 - DNA, 55 bp, Artificial; identical to SEQ ID NO: 190549
  Synthetic oligonucleotide

SEQ ID NO: 642249 - DNA, 55 bp, Artificial; identical to SEQ ID NO: 239617
  Synthetic oligonucleotide

SEQ ID NO: 642250 - DNA, 55 bp, Artificial; identical to SEQ ID NO: 244914
  Synthetic oligonucleotide

SEQ ID NO: 642251 - DNA, 53 bp, Artificial; identical to SEQ ID NO: 216668
  Synthetic oligonucleotide

SEQ ID NO: 642252 - DNA, 55 bp, Artificial; identical to SEQ ID NO: 244911
  Synthetic oligonucleotide

SEQ ID NO: 642253 - DNA, 55 bp, Artificial; identical to SEQ ID NO: 143689
  Synthetic oligonucleotide

SEQ ID NO: 642254 - DNA, 55 bp, Artificial; identical to SEQ ID NO: 253983
  Synthetic oligonucleotide

SEQ ID NO: 642255 - DNA, 50 bp, Artificial; identical to SEQ ID NO: 186939
  Synthetic oligonucleotide

SEQ ID NO: 642256 - DNA, 55 bp, Artificial; identical to SEQ ID NO: 187538
  Synthetic oligonucleotide

SEQ ID NO: 642257 - DNA, 55 bp, Artificial; identical to SEQ ID NO: 201250
  Synthetic oligonucleotide

SEQ ID NO: 642258 - DNA, 52 bp, Artificial; identical to SEQ ID NO: 263524
  Synthetic oligonucleotide

SEQ ID NO: 642259 - DNA, 55 bp, Artificial; identical to SEQ ID NO: 190595
  Synthetic oligonucleotide

SEQ ID NO: 642260 - DNA, 55 bp, Artificial; identical to SEQ ID NO: 244908
  Synthetic oligonucleotide

SEQ ID NO: 642261 - DNA, 55 bp, Artificial; identical to SEQ ID NO: 198732
  Synthetic oligonucleotide

SEQ ID NO: 642262 - DNA, 60 bp, Artificial; identical to SEQ ID NO: 170076
  Synthetic oligonucleotide

SEQ ID NO: 642263 - DNA, 57 bp, Artificial; identical to SEQ ID NO: 257483
  Synthetic oligonucleotide

SEQ ID NO: 642264 - DNA, 51 bp, Artificial; identical to SEQ ID NO: 153662
  Synthetic oligonucleotide

SEQ ID NO: 642265 - DNA, 60 bp, Artificial; identical to SEQ ID NO: 166156
  Synthetic oligonucleotide

SEQ ID NO: 642266 - DNA, 55 bp, Artificial; identical to SEQ ID NO: 191963
  Synthetic oligonucleotide

SEQ ID NO: 642267 - DNA, 53 bp, Artificial; identical to SEQ ID NO: 188087
  Synthetic oligonucleotide

SEQ ID NO: 642268 - DNA, 55 bp, Artificial; identical to SEQ ID NO: 253984
  Synthetic oligonucleotide

SEQ ID NO: 642269 - DNA, 55 bp, Artificial; identical to SEQ ID NO: 248942
  Synthetic oligonucleotide

SEQ ID NO: 642270 - DNA, 55 bp, Artificial; identical to SEQ ID NO: 198731
  Synthetic oligonucleotide

SEQ ID NO: 642271 - DNA, 55 bp, Artificial; identical to SEQ ID NO: 147688
  Synthetic oligonucleotide

SEQ ID NO: 642272 - DNA, 55 bp, Artificial; identical to SEQ ID NO: 244906
  Synthetic oligonucleotide

SEQ ID NO: 642273 - DNA, 55 bp, Artificial; identical to SEQ ID NO: 244905
  Synthetic oligonucleotide

SEQ ID NO: 642274 - DNA, 56 bp, Artificial; identical to SEQ ID NO: 161967
  Synthetic oligonucleotide

SEQ ID NO: 642275 - DNA, 54 bp, Artificial; identical to SEQ ID NO: 211497
  Synthetic oligonucleotide

SEQ ID NO: 642276 - DNA, 50 bp, Artificial; identical to SEQ ID NO: 189801
  Synthetic oligonucleotide

SEQ ID NO: 642277 - DNA, 58 bp, Artificial; identical to SEQ ID NO: 252964
  Synthetic oligonucleotide

SEQ ID NO: 642278 - DNA, 55 bp, Artificial; identical to SEQ ID NO: 188297
  Synthetic oligonucleotide

SEQ ID NO: 642279 - DNA, 53 bp, Artificial; identical to SEQ ID NO: 188088
  Synthetic oligonucleotide

SEQ ID NO: 642280 - DNA, 54 bp, Artificial; identical to SEQ ID NO: 171449
  Synthetic oligonucleotide

SEQ ID NO: 642281 - DNA, 60 bp, Artificial; identical to SEQ ID NO: 200676
  Synthetic oligonucleotide

SEQ ID NO: 642282 - DNA, 53 bp, Artificial; identical to SEQ ID NO: 255332
  Synthetic oligonucleotide

SEQ ID NO: 642283 - DNA, 55 bp, Artificial; identical to SEQ ID NO: 253985
  Synthetic oligonucleotide

SEQ ID NO: 642284 - DNA, 60 bp, Artificial; identical to SEQ ID NO: 178809
  Synthetic oligonucleotide

SEQ ID NO: 642285 - DNA, 53 bp, Artificial; identical to SEQ ID NO: 166680
  Synthetic oligonucleotide

SEQ ID NO: 642286 - DNA, 59 bp, Artificial; identical to SEQ ID NO: 194112
  Synthetic oligonucleotide

SEQ ID NO: 642287 - DNA, 55 bp, Artificial; identical to SEQ ID NO: 155247
  Synthetic oligonucleotide

SEQ ID NO: 642288 - DNA, 53 bp, Artificial; identical to SEQ ID NO: 151423
  Synthetic oligonucleotide

SEQ ID NO: 642289 - DNA, 59 bp, Artificial; identical to SEQ ID NO: 210771
  Synthetic oligonucleotide

SEQ ID NO: 642290 - DNA, 53 bp, Artificial; identical to SEQ ID NO: 148081
  Synthetic oligonucleotide

SEQ ID NO: 642291 - DNA, 50 bp, Artificial; identical to SEQ ID NO: 159066
  Synthetic oligonucleotide

SEQ ID NO: 642292 - DNA, 55 bp, Artificial; identical to SEQ ID NO: 174637
  Synthetic oligonucleotide

SEQ ID NO: 642293 - DNA, 55 bp, Artificial; identical to SEQ ID NO: 188974
  Synthetic oligonucleotide

SEQ ID NO: 642294 - DNA, 51 bp, Artificial; identical to SEQ ID NO: 152142
  Synthetic oligonucleotide

SEQ ID NO: 642295 - DNA, 55 bp, Artificial; identical to SEQ ID NO: 252951
  Synthetic oligonucleotide

SEQ ID NO: 642296 - DNA, 59 bp, Artificial; identical to SEQ ID NO: 150303
  Synthetic oligonucleotide

SEQ ID NO: 642297 - DNA, 54 bp, Artificial; identical to SEQ ID NO: 238567
  Synthetic oligonucleotide

SEQ ID NO: 642298 - DNA, 51 bp, Artificial; identical to SEQ ID NO: 186574
  Synthetic oligonucleotide

SEQ ID NO: 642299 - DNA, 55 bp, Artificial; identical to SEQ ID NO: 155844
  Synthetic oligonucleotide

SEQ ID NO: 642300 - DNA, 55 bp, Artificial; identical to SEQ ID NO: 253986
  Synthetic oligonucleotide

SEQ ID NO: 642301 - DNA, 60 bp, Artificial; identical to SEQ ID NO: 201926
  Synthetic oligonucleotide

SEQ ID NO: 642302 - DNA, 60 bp, Artificial; identical to SEQ ID NO: 206653
  Synthetic oligonucleotide

SEQ ID NO: 642303 - DNA, 50 bp, Artificial; identical to SEQ ID NO: 165794
  Synthetic oligonucleotide

SEQ ID NO: 642304 - DNA, 55 bp, Artificial; identical to SEQ ID NO: 244901
  Synthetic oligonucleotide

SEQ ID NO: 642305 - DNA, 55 bp, Artificial; identical to SEQ ID NO: 169214
  Synthetic oligonucleotide

SEQ ID NO: 642306 - DNA, 50 bp, Artificial; identical to SEQ ID NO: 209077
  Synthetic oligonucleotide

SEQ ID NO: 642307 - DNA, 55 bp, Artificial; identical to SEQ ID NO: 215141
  Synthetic oligonucleotide

SEQ ID NO: 642308 - DNA, 55 bp, Artificial; identical to SEQ ID NO: 190576
  Synthetic oligonucleotide

SEQ ID NO: 642309 - DNA, 55 bp, Artificial; identical to SEQ ID NO: 242593
  Synthetic oligonucleotide

SEQ ID NO: 642310 - DNA, 56 bp, Artificial; identical to SEQ ID NO: 239473
  Synthetic oligonucleotide

SEQ ID NO: 642311 - DNA, 50 bp, Artificial; identical to SEQ ID NO: 193996
  Synthetic oligonucleotide

SEQ ID NO: 642312 - DNA, 60 bp, Artificial; identical to SEQ ID NO: 152199
  Synthetic oligonucleotide

SEQ ID NO: 642313 - DNA, 53 bp, Artificial; identical to SEQ ID NO: 144994
  Synthetic oligonucleotide

SEQ ID NO: 642314 - DNA, 55 bp, Artificial; identical to SEQ ID NO: 247356
  Synthetic oligonucleotide

SEQ ID NO: 642315 - DNA, 50 bp, Artificial; identical to SEQ ID NO: 200224
  Synthetic oligonucleotide

SEQ ID NO: 642316 - DNA, 55 bp, Artificial; identical to SEQ ID NO: 238539
  Synthetic oligonucleotide

SEQ ID NO: 642317 - DNA, 55 bp, Artificial; identical to SEQ ID NO: 169270
  Synthetic oligonucleotide

SEQ ID NO: 642318 - DNA, 52 bp, Artificial; identical to SEQ ID NO: 188491
  Synthetic oligonucleotide

SEQ ID NO: 642319 - DNA, 52 bp, Artificial; identical to SEQ ID NO: 240970
  Synthetic oligonucleotide

SEQ ID NO: 642320 - DNA, 57 bp, Artificial; identical to SEQ ID NO: 193237
  Synthetic oligonucleotide

SEQ ID NO: 642321 - DNA, 54 bp, Artificial; identical to SEQ ID NO: 241798
  Synthetic oligonucleotide

SEQ ID NO: 642322 - DNA, 52 bp, Artificial; identical to SEQ ID NO: 149631
  Synthetic oligonucleotide

SEQ ID NO: 642323 - DNA, 55 bp, Artificial; identical to SEQ ID NO: 202709
  Synthetic oligonucleotide

SEQ ID NO: 642324 - DNA, 57 bp, Artificial; identical to SEQ ID NO: 179865
  Synthetic oligonucleotide

SEQ ID NO: 642325 - DNA, 56 bp, Artificial; identical to SEQ ID NO: 166167
  Synthetic oligonucleotide

SEQ ID NO: 642326 - DNA, 50 bp, Artificial; identical to SEQ ID NO: 256074
  Synthetic oligonucleotide

SEQ ID NO: 642327 - DNA, 54 bp, Artificial; identical to SEQ ID NO: 191169
  Synthetic oligonucleotide

SEQ ID NO: 642328 - DNA, 54 bp, Artificial; identical to SEQ ID NO: 151864
  Synthetic oligonucleotide

SEQ ID NO: 642329 - DNA, 58 bp, Artificial; identical to SEQ ID NO: 255556
  Synthetic oligonucleotide

SEQ ID NO: 642330 - DNA, 55 bp, Artificial; identical to SEQ ID NO: 198728
  Synthetic oligonucleotide

SEQ ID NO: 642331 - DNA, 55 bp, Artificial; identical to SEQ ID NO: 182100
  Synthetic oligonucleotide

SEQ ID NO: 642332 - DNA, 51 bp, Artificial; identical to SEQ ID NO: 209710
  Synthetic oligonucleotide

SEQ ID NO: 642333 - DNA, 50 bp, Artificial; identical to SEQ ID NO: 155638
  Synthetic oligonucleotide

SEQ ID NO: 642334 - DNA, 54 bp, Artificial; identical to SEQ ID NO: 174640
  Synthetic oligonucleotide

SEQ ID NO: 642335 - DNA, 58 bp, Artificial; identical to SEQ ID NO: 201161
  Synthetic oligonucleotide

SEQ ID NO: 642336 - DNA, 60 bp, Artificial; identical to SEQ ID NO: 243635
  Synthetic oligonucleotide

SEQ ID NO: 642337 - DNA, 55 bp, Artificial; identical to SEQ ID NO: 198727
  Synthetic oligonucleotide

SEQ ID NO: 642338 - DNA, 55 bp, Artificial; identical to SEQ ID NO: 208071
  Synthetic oligonucleotide

SEQ ID NO: 642339 - DNA, 52 bp, Artificial; identical to SEQ ID NO: 247908
  Synthetic oligonucleotide

SEQ ID NO: 642340 - DNA, 55 bp, Artificial; identical to SEQ ID NO: 168517
  Synthetic oligonucleotide

SEQ ID NO: 642341 - DNA, 55 bp, Artificial; identical to SEQ ID NO: 166165
  Synthetic oligonucleotide

SEQ ID NO: 642342 - DNA, 57 bp, Artificial; identical to SEQ ID NO: 166164
  Synthetic oligonucleotide

SEQ ID NO: 642343 - DNA, 55 bp, Artificial; identical to SEQ ID NO: 197166
  Synthetic oligonucleotide

SEQ ID NO: 642344 - DNA, 54 bp, Artificial; identical to SEQ ID NO: 240597
  Synthetic oligonucleotide

SEQ ID NO: 642345 - DNA, 53 bp, Artificial; identical to SEQ ID NO: 246399
  Synthetic oligonucleotide

SEQ ID NO: 642346 - DNA, 54 bp, Artificial; identical to SEQ ID NO: 154535
  Synthetic oligonucleotide

SEQ ID NO: 642347 - DNA, 54 bp, Artificial; identical to SEQ ID NO: 155230
  Synthetic oligonucleotide

SEQ ID NO: 642348 - DNA, 55 bp, Artificial; identical to SEQ ID NO: 151857
  Synthetic oligonucleotide

SEQ ID NO: 642349 - DNA, 56 bp, Artificial; identical to SEQ ID NO: 166200
  Synthetic oligonucleotide

SEQ ID NO: 642350 - DNA, 55 bp, Artificial; identical to SEQ ID NO: 161008
  Synthetic oligonucleotide

SEQ ID NO: 642351 - DNA, 55 bp, Artificial; identical to SEQ ID NO: 202122
  Synthetic oligonucleotide

SEQ ID NO: 642352 - DNA, 54 bp, Artificial; identical to SEQ ID NO: 166224
  Synthetic oligonucleotide

SEQ ID NO: 642353 - DNA, 55 bp, Artificial; identical to SEQ ID NO: 198724
  Synthetic oligonucleotide

SEQ ID NO: 642354 - DNA, 54 bp, Artificial; identical to SEQ ID NO: 157222
  Synthetic oligonucleotide

SEQ ID NO: 642355 - DNA, 55 bp, Artificial; identical to SEQ ID NO: 166674
  Synthetic oligonucleotide

SEQ ID NO: 642356 - DNA, 60 bp, Artificial; identical to SEQ ID NO: 255533
  Synthetic oligonucleotide

SEQ ID NO: 642357 - DNA, 55 bp, Artificial; identical to SEQ ID NO: 147689
  Synthetic oligonucleotide

SEQ ID NO: 642358 - DNA, 59 bp, Artificial; identical to SEQ ID NO: 243926
  Synthetic oligonucleotide

SEQ ID NO: 642359 - DNA, 55 bp, Artificial; identical to SEQ ID NO: 220594
  Synthetic oligonucleotide

SEQ ID NO: 642360 - DNA, 55 bp, Artificial; identical to SEQ ID NO: 244897
  Synthetic oligonucleotide

SEQ ID NO: 642361 - DNA, 60 bp, Artificial; identical to SEQ ID NO: 178854
  Synthetic oligonucleotide

SEQ ID NO: 642362 - DNA, 56 bp, Artificial; identical to SEQ ID NO: 239452
  Synthetic oligonucleotide

SEQ ID NO: 642363 - DNA, 60 bp, Artificial; identical to SEQ ID NO: 178852
  Synthetic oligonucleotide

SEQ ID NO: 642364 - DNA, 55 bp, Artificial; identical to SEQ ID NO: 239721
  Synthetic oligonucleotide

SEQ ID NO: 642365 - DNA, 54 bp, Artificial; identical to SEQ ID NO: 239567
  Synthetic oligonucleotide

SEQ ID NO: 642366 - DNA, 58 bp, Artificial; identical to SEQ ID NO: 241887
  Synthetic oligonucleotide

SEQ ID NO: 642367 - DNA, 54 bp, Artificial; identical to SEQ ID NO: 243129
  Synthetic oligonucleotide

SEQ ID NO: 642368 - DNA, 54 bp, Artificial; identical to SEQ ID NO: 243128
  Synthetic oligonucleotide

SEQ ID NO: 642369 - DNA, 60 bp, Artificial; identical to SEQ ID NO: 141767
  Synthetic oligonucleotide

SEQ ID NO: 642370 - DNA, 55 bp, Artificial; identical to SEQ ID NO: 205421
  Synthetic oligonucleotide

SEQ ID NO: 642371 - DNA, 57 bp, Artificial; identical to SEQ ID NO: 256621
  Synthetic oligonucleotide

SEQ ID NO: 642372 - DNA, 55 bp, Artificial; identical to SEQ ID NO: 191964
  Synthetic oligonucleotide

SEQ ID NO: 642373 - DNA, 55 bp, Artificial; identical to SEQ ID NO: 202746
  Synthetic oligonucleotide

SEQ ID NO: 642374 - DNA, 53 bp, Artificial; identical to SEQ ID NO: 146415
  Synthetic oligonucleotide

SEQ ID NO: 642375 - DNA, 55 bp, Artificial; identical to SEQ ID NO: 182097
  Synthetic oligonucleotide

SEQ ID NO: 642376 - DNA, 60 bp, Artificial; identical to SEQ ID NO: 203265
  Synthetic oligonucleotide

SEQ ID NO: 642377 - DNA, 51 bp, Artificial; identical to SEQ ID NO: 191232
  Synthetic oligonucleotide

SEQ ID NO: 642378 - DNA, 55 bp, Artificial; identical to SEQ ID NO: 207285
  Synthetic oligonucleotide

SEQ ID NO: 642379 - DNA, 60 bp, Artificial; identical to SEQ ID NO: 210770
  Synthetic oligonucleotide

SEQ ID NO: 642380 - DNA, 60 bp, Artificial; identical to SEQ ID NO: 161175
  Synthetic oligonucleotide

SEQ ID NO: 642381 - DNA, 60 bp, Artificial; identical to SEQ ID NO: 243636
  Synthetic oligonucleotide

SEQ ID NO: 642382 - DNA, 53 bp, Artificial; identical to SEQ ID NO: 174838
  Synthetic oligonucleotide

SEQ ID NO: 642383 - DNA, 60 bp, Artificial; identical to SEQ ID NO: 194113
  Synthetic oligonucleotide

SEQ ID NO: 642384 - DNA, 54 bp, Artificial; identical to SEQ ID NO: 169333
  Synthetic oligonucleotide

SEQ ID NO: 642385 - DNA, 54 bp, Artificial; identical to SEQ ID NO: 199542
  Synthetic oligonucleotide

SEQ ID NO: 642386 - DNA, 51 bp, Artificial; identical to SEQ ID NO: 157774
  Synthetic oligonucleotide

SEQ ID NO: 642387 - DNA, 55 bp, Artificial; identical to SEQ ID NO: 202160
  Synthetic oligonucleotide

SEQ ID NO: 642388 - DNA, 55 bp, Artificial; identical to SEQ ID NO: 249995
  Synthetic oligonucleotide

SEQ ID NO: 642389 - DNA, 55 bp, Artificial; identical to SEQ ID NO: 205422
  Synthetic oligonucleotide

SEQ ID NO: 642390 - DNA, 51 bp, Artificial; identical to SEQ ID NO: 243299
  Synthetic oligonucleotide

SEQ ID NO: 642391 - DNA, 55 bp, Artificial; identical to SEQ ID NO: 155846
  Synthetic oligonucleotide

SEQ ID NO: 642392 - DNA, 55 bp, Artificial; identical to SEQ ID NO: 142263
  Synthetic oligonucleotide

SEQ ID NO: 642393 - DNA, 59 bp, Artificial; identical to SEQ ID NO: 159799
  Synthetic oligonucleotide

SEQ ID NO: 642394 - DNA, 55 bp, Artificial; identical to SEQ ID NO: 208454
  Synthetic oligonucleotide

SEQ ID NO: 642395 - DNA, 54 bp, Artificial; identical to SEQ ID NO: 185026
  Synthetic oligonucleotide

SEQ ID NO: 642396 - DNA, 51 bp, Artificial; identical to SEQ ID NO: 149889
  Synthetic oligonucleotide

SEQ ID NO: 642397 - DNA, 60 bp, Artificial; identical to SEQ ID NO: 151488
  Synthetic oligonucleotide

SEQ ID NO: 642398 - DNA, 60 bp, Artificial; identical to SEQ ID NO: 209075
  Synthetic oligonucleotide

SEQ ID NO: 642399 - DNA, 54 bp, Artificial; identical to SEQ ID NO: 154540
  Synthetic oligonucleotide

SEQ ID NO: 642400 - DNA, 53 bp, Artificial; identical to SEQ ID NO: 147690
  Synthetic oligonucleotide

SEQ ID NO: 642401 - DNA, 53 bp, Artificial; identical to SEQ ID NO: 164931
  Synthetic oligonucleotide

SEQ ID NO: 642402 - DNA, 60 bp, Artificial; identical to SEQ ID NO: 243637
  Synthetic oligonucleotide

SEQ ID NO: 642403 - DNA, 58 bp, Artificial; identical to SEQ ID NO: 243638
  Synthetic oligonucleotide

SEQ ID NO: 642404 - DNA, 59 bp, Artificial; identical to SEQ ID NO: 166234
  Synthetic oligonucleotide

SEQ ID NO: 642405 - DNA, 54 bp, Artificial; identical to SEQ ID NO: 149130
  Synthetic oligonucleotide

SEQ ID NO: 642406 - DNA, 54 bp, Artificial; identical to SEQ ID NO: 185032
  Synthetic oligonucleotide

SEQ ID NO: 642407 - DNA, 53 bp, Artificial; identical to SEQ ID NO: 154576
  Synthetic oligonucleotide

SEQ ID NO: 642408 - DNA, 55 bp, Artificial; identical to SEQ ID NO: 166672
  Synthetic oligonucleotide

SEQ ID NO: 642409 - DNA, 55 bp, Artificial; identical to SEQ ID NO: 182096
  Synthetic oligonucleotide

SEQ ID NO: 642410 - DNA, 55 bp, Artificial; identical to SEQ ID NO: 253990
  Synthetic oligonucleotide

SEQ ID NO: 642411 - DNA, 55 bp, Artificial; identical to SEQ ID NO: 155847
  Synthetic oligonucleotide

SEQ ID NO: 642412 - DNA, 55 bp, Artificial; identical to SEQ ID NO: 145194
  Synthetic oligonucleotide

SEQ ID NO: 642413 - DNA, 53 bp, Artificial; identical to SEQ ID NO: 154577
  Synthetic oligonucleotide

SEQ ID NO: 642414 - DNA, 53 bp, Artificial; identical to SEQ ID NO: 209074
  Synthetic oligonucleotide

SEQ ID NO: 642415 - DNA, 60 bp, Artificial; identical to SEQ ID NO: 178850
  Synthetic oligonucleotide

SEQ ID NO: 642416 - DNA, 60 bp, Artificial; identical to SEQ ID NO: 178847
  Synthetic oligonucleotide

SEQ ID NO: 642417 - DNA, 55 bp, Artificial; identical to SEQ ID NO: 147187
  Synthetic oligonucleotide

SEQ ID NO: 642418 - DNA, 55 bp, Artificial; identical to SEQ ID NO: 239702
  Synthetic oligonucleotide

SEQ ID NO: 642419 - DNA, 55 bp, Artificial; identical to SEQ ID NO: 239625
  Synthetic oligonucleotide

SEQ ID NO: 642420 - DNA, 56 bp, Artificial; identical to SEQ ID NO: 179932
  Synthetic oligonucleotide

SEQ ID NO: 642421 - DNA, 55 bp, Artificial; identical to SEQ ID NO: 253992
  Synthetic oligonucleotide

SEQ ID NO: 642422 - DNA, 54 bp, Artificial; identical to SEQ ID NO: 252956
  Synthetic oligonucleotide

SEQ ID NO: 642423 - DNA, 55 bp, Artificial; identical to SEQ ID NO: 169272
  Synthetic oligonucleotide

SEQ ID NO: 642424 - DNA, 53 bp, Artificial; identical to SEQ ID NO: 185879
  Synthetic oligonucleotide

SEQ ID NO: 642425 - DNA, 58 bp, Artificial; identical to SEQ ID NO: 237907
  Synthetic oligonucleotide

SEQ ID NO: 642426 - DNA, 60 bp, Artificial; identical to SEQ ID NO: 150956
  Synthetic oligonucleotide

SEQ ID NO: 642427 - DNA, 55 bp, Artificial; identical to SEQ ID NO: 147694
  Synthetic oligonucleotide

SEQ ID NO: 642428 - DNA, 55 bp, Artificial; identical to SEQ ID NO: 155848
  Synthetic oligonucleotide

SEQ ID NO: 642429 - DNA, 55 bp, Artificial; identical to SEQ ID NO: 239624
  Synthetic oligonucleotide

SEQ ID NO: 642430 - DNA, 55 bp, Artificial; identical to SEQ ID NO: 151853
  Synthetic oligonucleotide

SEQ ID NO: 642431 - DNA, 58 bp, Artificial; identical to SEQ ID NO: 253009
  Synthetic oligonucleotide

SEQ ID NO: 642432 - DNA, 55 bp, Artificial; identical to SEQ ID NO: 155248
  Synthetic oligonucleotide

SEQ ID NO: 642433 - DNA, 53 bp, Artificial; identical to SEQ ID NO: 197512
  Synthetic oligonucleotide

SEQ ID NO: 642434 - DNA, 55 bp, Artificial; identical to SEQ ID NO: 202094
  Synthetic oligonucleotide

SEQ ID NO: 642435 - DNA, 55 bp, Artificial; identical to SEQ ID NO: 244894
  Synthetic oligonucleotide

SEQ ID NO: 642436 - DNA, 55 bp, Artificial; identical to SEQ ID NO: 239671
  Synthetic oligonucleotide

SEQ ID NO: 642437 - DNA, 55 bp, Artificial; identical to SEQ ID NO: 218202
  Synthetic oligonucleotide

SEQ ID NO: 642438 - DNA, 55 bp, Artificial; identical to SEQ ID NO: 151852
  Synthetic oligonucleotide

SEQ ID NO: 642439 - DNA, 55 bp, Artificial; identical to SEQ ID NO: 166726
  Synthetic oligonucleotide

SEQ ID NO: 642440 - DNA, 60 bp, Artificial; identical to SEQ ID NO: 178845
  Synthetic oligonucleotide

SEQ ID NO: 642441 - DNA, 54 bp, Artificial; identical to SEQ ID NO: 210953
  Synthetic oligonucleotide

SEQ ID NO: 642442 - DNA, 55 bp, Artificial; identical to SEQ ID NO: 217676
  Synthetic oligonucleotide

SEQ ID NO: 642443 - DNA, 55 bp, Artificial; identical to SEQ ID NO: 166883
  Synthetic oligonucleotide

SEQ ID NO: 642444 - DNA, 55 bp, Artificial; identical to SEQ ID NO: 182224
  Synthetic oligonucleotide

SEQ ID NO: 642445 - DNA, 60 bp, Artificial; identical to SEQ ID NO: 178843
  Synthetic oligonucleotide

SEQ ID NO: 642446 - DNA, 57 bp, Artificial; identical to SEQ ID NO: 239281
  Synthetic oligonucleotide

SEQ ID NO: 642447 - DNA, 55 bp, Artificial; identical to SEQ ID NO: 171448
  Synthetic oligonucleotide

SEQ ID NO: 642448 - DNA, 55 bp, Artificial; identical to SEQ ID NO: 197168
  Synthetic oligonucleotide

SEQ ID NO: 642449 - DNA, 55 bp, Artificial; identical to SEQ ID NO: 182223
  Synthetic oligonucleotide

SEQ ID NO: 642450 - DNA, 59 bp, Artificial; identical to SEQ ID NO: 255489
  Synthetic oligonucleotide

SEQ ID NO: 642451 - DNA, 59 bp, Artificial; identical to SEQ ID NO: 194114
  Synthetic oligonucleotide

SEQ ID NO: 642452 - DNA, 60 bp, Artificial; identical to SEQ ID NO: 151067
  Synthetic oligonucleotide

SEQ ID NO: 642453 - DNA, 55 bp, Artificial; identical to SEQ ID NO: 197169
  Synthetic oligonucleotide

SEQ ID NO: 642454 - DNA, 55 bp, Artificial; identical to SEQ ID NO: 238540
  Synthetic oligonucleotide

SEQ ID NO: 642455 - DNA, 59 bp, Artificial; identical to SEQ ID NO: 237839
  Synthetic oligonucleotide

SEQ ID NO: 642456 - DNA, 57 bp, Artificial; identical to SEQ ID NO: 178839
  Synthetic oligonucleotide

SEQ ID NO: 642457 - DNA, 55 bp, Artificial; identical to SEQ ID NO: 182222
  Synthetic oligonucleotide

SEQ ID NO: 642458 - DNA, 55 bp, Artificial; identical to SEQ ID NO: 225110
  Synthetic oligonucleotide

SEQ ID NO: 642459 - DNA, 53 bp, Artificial; identical to SEQ ID NO: 160161
  Synthetic oligonucleotide

SEQ ID NO: 642460 - DNA, 55 bp, Artificial; identical to SEQ ID NO: 160163
  Synthetic oligonucleotide

SEQ ID NO: 642461 - DNA, 56 bp, Artificial; identical to SEQ ID NO: 147193
  Synthetic oligonucleotide

SEQ ID NO: 642462 - DNA, 55 bp, Artificial; identical to SEQ ID NO: 198722
  Synthetic oligonucleotide

SEQ ID NO: 642463 - DNA, 55 bp, Artificial; identical to SEQ ID NO: 253993
  Synthetic oligonucleotide

SEQ ID NO: 642464 - DNA, 56 bp, Artificial; identical to SEQ ID NO: 179812
  Synthetic oligonucleotide

SEQ ID NO: 642465 - DNA, 51 bp, Artificial; identical to SEQ ID NO: 253356
  Synthetic oligonucleotide

SEQ ID NO: 642466 - DNA, 55 bp, Artificial; identical to SEQ ID NO: 257736
  Synthetic oligonucleotide

SEQ ID NO: 642467 - DNA, 55 bp, Artificial; identical to SEQ ID NO: 187487
  Synthetic oligonucleotide

SEQ ID NO: 642468 - DNA, 59 bp, Artificial; identical to SEQ ID NO: 178837
  Synthetic oligonucleotide

SEQ ID NO: 642469 - DNA, 51 bp, Artificial; identical to SEQ ID NO: 170182
  Synthetic oligonucleotide

SEQ ID NO: 642470 - DNA, 55 bp, Artificial; identical to SEQ ID NO: 190991
  Synthetic oligonucleotide

SEQ ID NO: 642471 - DNA, 55 bp, Artificial; identical to SEQ ID NO: 220596
  Synthetic oligonucleotide

SEQ ID NO: 642472 - DNA, 50 bp, Artificial; identical to SEQ ID NO: 169460
  Synthetic oligonucleotide

SEQ ID NO: 642473 - DNA, 55 bp, Artificial; identical to SEQ ID NO: 225109
  Synthetic oligonucleotide

SEQ ID NO: 642474 - DNA, 55 bp, Artificial; identical to SEQ ID NO: 242603
  Synthetic oligonucleotide

SEQ ID NO: 642475 - DNA, 55 bp, Artificial; identical to SEQ ID NO: 242560
  Synthetic oligonucleotide

SEQ ID NO: 642476 - DNA, 52 bp, Artificial; identical to SEQ ID NO: 219490
  Synthetic oligonucleotide

SEQ ID NO: 642477 - DNA, 55 bp, Artificial; identical to SEQ ID NO: 182218
  Synthetic oligonucleotide

SEQ ID NO: 642478 - DNA, 55 bp, Artificial; identical to SEQ ID NO: 244891
  Synthetic oligonucleotide

SEQ ID NO: 642479 - DNA, 55 bp, Artificial; identical to SEQ ID NO: 166728
  Synthetic oligonucleotide

SEQ ID NO: 642480 - DNA, 60 bp, Artificial; identical to SEQ ID NO: 266003
  Synthetic oligonucleotide

SEQ ID NO: 642481 - DNA, 53 bp, Artificial; identical to SEQ ID NO: 258095
  Synthetic oligonucleotide

SEQ ID NO: 642482 - DNA, 55 bp, Artificial; identical to SEQ ID NO: 147697
  Synthetic oligonucleotide

SEQ ID NO: 642483 - DNA, 52 bp, Artificial; identical to SEQ ID NO: 199931
  Synthetic oligonucleotide

SEQ ID NO: 642484 - DNA, 60 bp, Artificial; identical to SEQ ID NO: 200675
  Synthetic oligonucleotide

SEQ ID NO: 642485 - DNA, 55 bp, Artificial; identical to SEQ ID NO: 188295
  Synthetic oligonucleotide

SEQ ID NO: 642486 - DNA, 58 bp, Artificial; identical to SEQ ID NO: 244366
  Synthetic oligonucleotide

SEQ ID NO: 642487 - DNA, 60 bp, Artificial; identical to SEQ ID NO: 178834
  Synthetic oligonucleotide

SEQ ID NO: 642488 - DNA, 57 bp, Artificial; identical to SEQ ID NO: 200674
  Synthetic oligonucleotide

SEQ ID NO: 642489 - DNA, 55 bp, Artificial; identical to SEQ ID NO: 238327
  Synthetic oligonucleotide

SEQ ID NO: 642490 - DNA, 55 bp, Artificial; identical to SEQ ID NO: 188294
  Synthetic oligonucleotide

SEQ ID NO: 642491 - DNA, 60 bp, Artificial; identical to SEQ ID NO: 196937
  Synthetic oligonucleotide

SEQ ID NO: 642492 - DNA, 55 bp, Artificial; identical to SEQ ID NO: 182212
  Synthetic oligonucleotide

SEQ ID NO: 642493 - DNA, 55 bp, Artificial; identical to SEQ ID NO: 198716
  Synthetic oligonucleotide

SEQ ID NO: 642494 - DNA, 55 bp, Artificial; identical to SEQ ID NO: 152275
  Synthetic oligonucleotide

SEQ ID NO: 642495 - DNA, 55 bp, Artificial; identical to SEQ ID NO: 182210
  Synthetic oligonucleotide

SEQ ID NO: 642496 - DNA, 51 bp, Artificial; identical to SEQ ID NO: 149887
  Synthetic oligonucleotide

SEQ ID NO: 642497 - DNA, 54 bp, Artificial; identical to SEQ ID NO: 149140
  Synthetic oligonucleotide

SEQ ID NO: 642498 - DNA, 55 bp, Artificial; identical to SEQ ID NO: 171447
  Synthetic oligonucleotide

SEQ ID NO: 642499 - DNA, 60 bp, Artificial; identical to SEQ ID NO: 147637
  Synthetic oligonucleotide

SEQ ID NO: 642500 - DNA, 55 bp, Artificial; identical to SEQ ID NO: 174279
  Synthetic oligonucleotide

SEQ ID NO: 642501 - DNA, 56 bp, Artificial; identical to SEQ ID NO: 179937
  Synthetic oligonucleotide

SEQ ID NO: 642502 - DNA, 55 bp, Artificial; identical to SEQ ID NO: 188293
  Synthetic oligonucleotide

SEQ ID NO: 642503 - DNA, 54 bp, Artificial; identical to SEQ ID NO: 162038
  Synthetic oligonucleotide

SEQ ID NO: 642504 - DNA, 56 bp, Artificial; identical to SEQ ID NO: 239726
  Synthetic oligonucleotide

SEQ ID NO: 642505 - DNA, 53 bp, Artificial; identical to SEQ ID NO: 185753
  Synthetic oligonucleotide

SEQ ID NO: 642506 - DNA, 55 bp, Artificial; identical to SEQ ID NO: 206686
  Synthetic oligonucleotide

SEQ ID NO: 642507 - DNA, 60 bp, Artificial; identical to SEQ ID NO: 159365
  Synthetic oligonucleotide

SEQ ID NO: 642508 - DNA, 57 bp, Artificial; identical to SEQ ID NO: 243639
  Synthetic oligonucleotide

SEQ ID NO: 642509 - DNA, 55 bp, Artificial; identical to SEQ ID NO: 168504
  Synthetic oligonucleotide

SEQ ID NO: 642510 - DNA, 55 bp, Artificial; identical to SEQ ID NO: 187491
  Synthetic oligonucleotide

SEQ ID NO: 642511 - DNA, 54 bp, Artificial; identical to SEQ ID NO: 238568
  Synthetic oligonucleotide

SEQ ID NO: 642512 - DNA, 55 bp, Artificial; identical to SEQ ID NO: 147739
  Synthetic oligonucleotide

SEQ ID NO: 642513 - DNA, 54 bp, Artificial; identical to SEQ ID NO: 178987
  Synthetic oligonucleotide

SEQ ID NO: 642514 - DNA, 53 bp, Artificial; identical to SEQ ID NO: 185695
  Synthetic oligonucleotide

SEQ ID NO: 642515 - DNA, 51 bp, Artificial; identical to SEQ ID NO: 247991
  Synthetic oligonucleotide

SEQ ID NO: 642516 - DNA, 55 bp, Artificial; identical to SEQ ID NO: 155250
  Synthetic oligonucleotide

SEQ ID NO: 642517 - DNA, 51 bp, Artificial; identical to SEQ ID NO: 186523
  Synthetic oligonucleotide

SEQ ID NO: 642518 - DNA, 53 bp, Artificial; identical to SEQ ID NO: 212996
  Synthetic oligonucleotide

SEQ ID NO: 642519 - DNA, 55 bp, Artificial; identical to SEQ ID NO: 187492
  Synthetic oligonucleotide

SEQ ID NO: 642520 - DNA, 55 bp, Artificial; identical to SEQ ID NO: 253996
  Synthetic oligonucleotide

SEQ ID NO: 642521 - DNA, 55 bp, Artificial; identical to SEQ ID NO: 238325
  Synthetic oligonucleotide

SEQ ID NO: 642522 - DNA, 55 bp, Artificial; identical to SEQ ID NO: 147741
  Synthetic oligonucleotide

SEQ ID NO: 642523 - DNA, 55 bp, Artificial; identical to SEQ ID NO: 234338
  Synthetic oligonucleotide

SEQ ID NO: 642524 - DNA, 53 bp, Artificial; identical to SEQ ID NO: 185708
  Synthetic oligonucleotide

SEQ ID NO: 642525 - DNA, 54 bp, Artificial; identical to SEQ ID NO: 199519
  Synthetic oligonucleotide

SEQ ID NO: 642526 - DNA, 52 bp, Artificial; identical to SEQ ID NO: 164987
  Synthetic oligonucleotide

SEQ ID NO: 642527 - DNA, 52 bp, Artificial; identical to SEQ ID NO: 246555
  Synthetic oligonucleotide

SEQ ID NO: 642528 - DNA, 59 bp, Artificial; identical to SEQ ID NO: 243640
  Synthetic oligonucleotide

SEQ ID NO: 642529 - DNA, 52 bp, Artificial; identical to SEQ ID NO: 213001
  Synthetic oligonucleotide

SEQ ID NO: 642530 - DNA, 58 bp, Artificial; identical to SEQ ID NO: 147172
  Synthetic oligonucleotide

SEQ ID NO: 642531 - DNA, 55 bp, Artificial; identical to SEQ ID NO: 242609
  Synthetic oligonucleotide

SEQ ID NO: 642532 - DNA, 55 bp, Artificial; identical to SEQ ID NO: 198712
  Synthetic oligonucleotide

SEQ ID NO: 642533 - DNA, 55 bp, Artificial; identical to SEQ ID NO: 244886
  Synthetic oligonucleotide

SEQ ID NO: 642534 - DNA, 55 bp, Artificial; identical to SEQ ID NO: 166730
  Synthetic oligonucleotide

SEQ ID NO: 642535 - DNA, 55 bp, Artificial; identical to SEQ ID NO: 190335
  Synthetic oligonucleotide

SEQ ID NO: 642536 - DNA, 55 bp, Artificial; identical to SEQ ID NO: 171446
  Synthetic oligonucleotide

SEQ ID NO: 642537 - DNA, 54 bp, Artificial; identical to SEQ ID NO: 212930
  Synthetic oligonucleotide

SEQ ID NO: 642538 - DNA, 57 bp, Artificial; identical to SEQ ID NO: 178984
  Synthetic oligonucleotide

SEQ ID NO: 642539 - DNA, 55 bp, Artificial; identical to SEQ ID NO: 166731
  Synthetic oligonucleotide

SEQ ID NO: 642540 - DNA, 60 bp, Artificial; identical to SEQ ID NO: 200670
  Synthetic oligonucleotide

SEQ ID NO: 642541 - DNA, 55 bp, Artificial; identical to SEQ ID NO: 182244
  Synthetic oligonucleotide

SEQ ID NO: 642542 - DNA, 55 bp, Artificial; identical to SEQ ID NO: 198711
  Synthetic oligonucleotide

SEQ ID NO: 642543 - DNA, 55 bp, Artificial; identical to SEQ ID NO: 161007
  Synthetic oligonucleotide

SEQ ID NO: 642544 - DNA, 55 bp, Artificial; identical to SEQ ID NO: 168502
  Synthetic oligonucleotide

SEQ ID NO: 642545 - DNA, 51 bp, Artificial; identical to SEQ ID NO: 170180
  Synthetic oligonucleotide

SEQ ID NO: 642546 - DNA, 55 bp, Artificial; identical to SEQ ID NO: 182240
  Synthetic oligonucleotide

SEQ ID NO: 642547 - DNA, 55 bp, Artificial; identical to SEQ ID NO: 244885
  Synthetic oligonucleotide

SEQ ID NO: 642548 - DNA, 55 bp, Artificial; identical to SEQ ID NO: 187501
  Synthetic oligonucleotide

SEQ ID NO: 642549 - DNA, 59 bp, Artificial; identical to SEQ ID NO: 141768
  Synthetic oligonucleotide

SEQ ID NO: 642550 - DNA, 55 bp, Artificial; identical to SEQ ID NO: 142266
  Synthetic oligonucleotide

SEQ ID NO: 642551 - DNA, 55 bp, Artificial; identical to SEQ ID NO: 154496
  Synthetic oligonucleotide

SEQ ID NO: 642552 - DNA, 52 bp, Artificial; identical to SEQ ID NO: 243257
  Synthetic oligonucleotide

SEQ ID NO: 642553 - DNA, 54 bp, Artificial; identical to SEQ ID NO: 166734
  Synthetic oligonucleotide

SEQ ID NO: 642554 - DNA, 51 bp, Artificial; identical to SEQ ID NO: 197668
  Synthetic oligonucleotide

SEQ ID NO: 642555 - DNA, 55 bp, Artificial; identical to SEQ ID NO: 208450
  Synthetic oligonucleotide

SEQ ID NO: 642556 - DNA, 55 bp, Artificial; identical to SEQ ID NO: 153138
  Synthetic oligonucleotide

SEQ ID NO: 642557 - DNA, 55 bp, Artificial; identical to SEQ ID NO: 154080
  Synthetic oligonucleotide

SEQ ID NO: 642558 - DNA, 55 bp, Artificial; identical to SEQ ID NO: 242610
  Synthetic oligonucleotide

SEQ ID NO: 642559 - DNA, 60 bp, Artificial; identical to SEQ ID NO: 193895
  Synthetic oligonucleotide

SEQ ID NO: 642560 - DNA, 55 bp, Artificial; identical to SEQ ID NO: 198710
  Synthetic oligonucleotide

SEQ ID NO: 642561 - DNA, 54 bp, Artificial; identical to SEQ ID NO: 185037
  Synthetic oligonucleotide

SEQ ID NO: 642562 - DNA, 55 bp, Artificial; identical to SEQ ID NO: 155860
  Synthetic oligonucleotide

SEQ ID NO: 642563 - DNA, 55 bp, Artificial; identical to SEQ ID NO: 212668
  Synthetic oligonucleotide

SEQ ID NO: 642564 - DNA, 55 bp, Artificial; identical to SEQ ID NO: 147742
  Synthetic oligonucleotide

SEQ ID NO: 642565 - DNA, 52 bp, Artificial; identical to SEQ ID NO: 255461
  Synthetic oligonucleotide

SEQ ID NO: 642566 - DNA, 51 bp, Artificial; identical to SEQ ID NO: 209720
  Synthetic oligonucleotide

SEQ ID NO: 642567 - DNA, 55 bp, Artificial; identical to SEQ ID NO: 151845
  Synthetic oligonucleotide

SEQ ID NO: 642568 - DNA, 55 bp, Artificial; identical to SEQ ID NO: 263539
  Synthetic oligonucleotide

SEQ ID NO: 642569 - DNA, 55 bp, Artificial; identical to SEQ ID NO: 172950
  Synthetic oligonucleotide

SEQ ID NO: 642570 - DNA, 51 bp, Artificial; identical to SEQ ID NO: 186519
  Synthetic oligonucleotide

SEQ ID NO: 642571 - DNA, 55 bp, Artificial; identical to SEQ ID NO: 154497
  Synthetic oligonucleotide

SEQ ID NO: 642572 - DNA, 59 bp, Artificial; identical to SEQ ID NO: 201074
  Synthetic oligonucleotide

SEQ ID NO: 642573 - DNA, 55 bp, Artificial; identical to SEQ ID NO: 197173
  Synthetic oligonucleotide

SEQ ID NO: 642574 - DNA, 56 bp, Artificial; identical to SEQ ID NO: 224980
  Synthetic oligonucleotide

SEQ ID NO: 642575 - DNA, 55 bp, Artificial; identical to SEQ ID NO: 152602
  Synthetic oligonucleotide

SEQ ID NO: 642576 - DNA, 59 bp, Artificial; identical to SEQ ID NO: 208329
  Synthetic oligonucleotide

SEQ ID NO: 642577 - DNA, 57 bp, Artificial; identical to SEQ ID NO: 224356
  Synthetic oligonucleotide

SEQ ID NO: 642578 - DNA, 55 bp, Artificial; identical to SEQ ID NO: 223481
  Synthetic oligonucleotide

SEQ ID NO: 642579 - DNA, 53 bp, Artificial; identical to SEQ ID NO: 149372
  Synthetic oligonucleotide

SEQ ID NO: 642580 - DNA, 53 bp, Artificial; identical to SEQ ID NO: 266280
  Synthetic oligonucleotide

SEQ ID NO: 642581 - DNA, 55 bp, Artificial; identical to SEQ ID NO: 155459
  Synthetic oligonucleotide

SEQ ID NO: 642582 - DNA, 55 bp, Artificial; identical to SEQ ID NO: 253997
  Synthetic oligonucleotide

SEQ ID NO: 642583 - DNA, 56 bp, Artificial; identical to SEQ ID NO: 243951
  Synthetic oligonucleotide

SEQ ID NO: 642584 - DNA, 58 bp, Artificial; identical to SEQ ID NO: 168678
  Synthetic oligonucleotide

SEQ ID NO: 642585 - DNA, 55 bp, Artificial; identical to SEQ ID NO: 155862
  Synthetic oligonucleotide

SEQ ID NO: 642586 - DNA, 55 bp, Artificial; identical to SEQ ID NO: 201252
  Synthetic oligonucleotide

SEQ ID NO: 642587 - DNA, 55 bp, Artificial; identical to SEQ ID NO: 234339
  Synthetic oligonucleotide

SEQ ID NO: 642588 - DNA, 52 bp, Artificial; identical to SEQ ID NO: 243236
  Synthetic oligonucleotide

SEQ ID NO: 642589 - DNA, 55 bp, Artificial; identical to SEQ ID NO: 142838
  Synthetic oligonucleotide

SEQ ID NO: 642590 - DNA, 55 bp, Artificial; identical to SEQ ID NO: 188292
  Synthetic oligonucleotide

SEQ ID NO: 642591 - DNA, 55 bp, Artificial; identical to SEQ ID NO: 154500
  Synthetic oligonucleotide

SEQ ID NO: 642592 - DNA, 57 bp, Artificial; identical to SEQ ID NO: 178969
  Synthetic oligonucleotide

SEQ ID NO: 642593 - DNA, 55 bp, Artificial; identical to SEQ ID NO: 142268
  Synthetic oligonucleotide

SEQ ID NO: 642594 - DNA, 55 bp, Artificial; identical to SEQ ID NO: 161159
  Synthetic oligonucleotide

SEQ ID NO: 642595 - DNA, 59 bp, Artificial; identical to SEQ ID NO: 156809
  Synthetic oligonucleotide

SEQ ID NO: 642596 - DNA, 50 bp, Artificial; identical to SEQ ID NO: 150465
  Synthetic oligonucleotide

SEQ ID NO: 642597 - DNA, 55 bp, Artificial; identical to SEQ ID NO: 202903
  Synthetic oligonucleotide

SEQ ID NO: 642598 - DNA, 55 bp, Artificial; identical to SEQ ID NO: 178967
  Synthetic oligonucleotide

SEQ ID NO: 642599 - DNA, 55 bp, Artificial; identical to SEQ ID NO: 182181
  Synthetic oligonucleotide

SEQ ID NO: 642600 - DNA, 53 bp, Artificial; identical to SEQ ID NO: 185817
  Synthetic oligonucleotide

SEQ ID NO: 642601 - DNA, 55 bp, Artificial; identical to SEQ ID NO: 252959
  Synthetic oligonucleotide

SEQ ID NO: 642602 - DNA, 55 bp, Artificial; identical to SEQ ID NO: 166881
  Synthetic oligonucleotide

SEQ ID NO: 642603 - DNA, 55 bp, Artificial; identical to SEQ ID NO: 244819
  Synthetic oligonucleotide

SEQ ID NO: 642604 - DNA, 54 bp, Artificial; identical to SEQ ID NO: 147266
  Synthetic oligonucleotide

SEQ ID NO: 642605 - DNA, 55 bp, Artificial; identical to SEQ ID NO: 198773
  Synthetic oligonucleotide

SEQ ID NO: 642606 - DNA, 60 bp, Artificial; identical to SEQ ID NO: 150846
  Synthetic oligonucleotide

SEQ ID NO: 642607 - DNA, 53 bp, Artificial; identical to SEQ ID NO: 206391
  Synthetic oligonucleotide

SEQ ID NO: 642608 - DNA, 55 bp, Artificial; identical to SEQ ID NO: 207321
  Synthetic oligonucleotide

SEQ ID NO: 642609 - DNA, 58 bp, Artificial; identical to SEQ ID NO: 239330
  Synthetic oligonucleotide

SEQ ID NO: 642610 - DNA, 55 bp, Artificial; identical to SEQ ID NO: 221406
  Synthetic oligonucleotide

SEQ ID NO: 642611 - DNA, 54 bp, Artificial; identical to SEQ ID NO: 210949
  Synthetic oligonucleotide

SEQ ID NO: 642612 - DNA, 60 bp, Artificial; identical to SEQ ID NO: 200669
  Synthetic oligonucleotide

SEQ ID NO: 642613 - DNA, 55 bp, Artificial; identical to SEQ ID NO: 153149
  Synthetic oligonucleotide

SEQ ID NO: 642614 - DNA, 55 bp, Artificial; identical to SEQ ID NO: 244818
  Synthetic oligonucleotide

SEQ ID NO: 642615 - DNA, 55 bp, Artificial; identical to SEQ ID NO: 174643
  Synthetic oligonucleotide

SEQ ID NO: 642616 - DNA, 55 bp, Artificial; identical to SEQ ID NO: 208444
  Synthetic oligonucleotide

SEQ ID NO: 642617 - DNA, 55 bp, Artificial; identical to SEQ ID NO: 193572
  Synthetic oligonucleotide

SEQ ID NO: 642618 - DNA, 55 bp, Artificial; identical to SEQ ID NO: 168497
  Synthetic oligonucleotide

SEQ ID NO: 642619 - DNA, 55 bp, Artificial; identical to SEQ ID NO: 253976
  Synthetic oligonucleotide

SEQ ID NO: 642620 - DNA, 55 bp, Artificial; identical to SEQ ID NO: 182177
  Synthetic oligonucleotide

SEQ ID NO: 642621 - DNA, 55 bp, Artificial; identical to SEQ ID NO: 155864
  Synthetic oligonucleotide

SEQ ID NO: 642622 - DNA, 54 bp, Artificial; identical to SEQ ID NO: 171784
  Synthetic oligonucleotide

SEQ ID NO: 642623 - DNA, 55 bp, Artificial; identical to SEQ ID NO: 244816
  Synthetic oligonucleotide

SEQ ID NO: 642624 - DNA, 55 bp, Artificial; identical to SEQ ID NO: 171441
  Synthetic oligonucleotide

SEQ ID NO: 642625 - DNA, 54 bp, Artificial; identical to SEQ ID NO: 242615
  Synthetic oligonucleotide

SEQ ID NO: 642626 - DNA, 53 bp, Artificial; identical to SEQ ID NO: 236992
  Synthetic oligonucleotide

SEQ ID NO: 642627 - DNA, 60 bp, Artificial; identical to SEQ ID NO: 166267
  Synthetic oligonucleotide

SEQ ID NO: 642628 - DNA, 55 bp, Artificial; identical to SEQ ID NO: 258936
  Synthetic oligonucleotide

SEQ ID NO: 642629 - DNA, 56 bp, Artificial; identical to SEQ ID NO: 178964
  Synthetic oligonucleotide

SEQ ID NO: 642630 - DNA, 52 bp, Artificial; identical to SEQ ID NO: 186230
  Synthetic oligonucleotide

SEQ ID NO: 642631 - DNA, 53 bp, Artificial; identical to SEQ ID NO: 164942
  Synthetic oligonucleotide

SEQ ID NO: 642632 - DNA, 52 bp, Artificial; identical to SEQ ID NO: 164975
  Synthetic oligonucleotide

SEQ ID NO: 642633 - DNA, 54 bp, Artificial; identical to SEQ ID NO: 240392
  Synthetic oligonucleotide

SEQ ID NO: 642634 - DNA, 59 bp, Artificial; identical to SEQ ID NO: 179017
  Synthetic oligonucleotide

SEQ ID NO: 642635 - DNA, 55 bp, Artificial; identical to SEQ ID NO: 209402
  Synthetic oligonucleotide

SEQ ID NO: 642636 - DNA, 55 bp, Artificial; identical to SEQ ID NO: 203272
  Synthetic oligonucleotide

SEQ ID NO: 642637 - DNA, 55 bp, Artificial; identical to SEQ ID NO: 244815
  Synthetic oligonucleotide

SEQ ID NO: 642638 - DNA, 55 bp, Artificial; identical to SEQ ID NO: 166736
  Synthetic oligonucleotide

SEQ ID NO: 642639 - DNA, 56 bp, Artificial; identical to SEQ ID NO: 150923
  Synthetic oligonucleotide

SEQ ID NO: 642640 - DNA, 55 bp, Artificial; identical to SEQ ID NO: 182174
  Synthetic oligonucleotide

SEQ ID NO: 642641 - DNA, 53 bp, Artificial; identical to SEQ ID NO: 205654
  Synthetic oligonucleotide

SEQ ID NO: 642642 - DNA, 55 bp, Artificial; identical to SEQ ID NO: 203799
  Synthetic oligonucleotide

SEQ ID NO: 642643 - DNA, 60 bp, Artificial; identical to SEQ ID NO: 170021
  Synthetic oligonucleotide

SEQ ID NO: 642644 - DNA, 55 bp, Artificial; identical to SEQ ID NO: 209072
  Synthetic oligonucleotide

SEQ ID NO: 642645 - DNA, 55 bp, Artificial; identical to SEQ ID NO: 166737
  Synthetic oligonucleotide

SEQ ID NO: 642646 - DNA, 55 bp, Artificial; identical to SEQ ID NO: 198771
  Synthetic oligonucleotide

SEQ ID NO: 642647 - DNA, 60 bp, Artificial; identical to SEQ ID NO: 237798
  Synthetic oligonucleotide

SEQ ID NO: 642648 - DNA, 55 bp, Artificial; identical to SEQ ID NO: 208443
  Synthetic oligonucleotide

SEQ ID NO: 642649 - DNA, 55 bp, Artificial; identical to SEQ ID NO: 171587
  Synthetic oligonucleotide

SEQ ID NO: 642650 - DNA, 55 bp, Artificial; identical to SEQ ID NO: 190947
  Synthetic oligonucleotide

SEQ ID NO: 642651 - DNA, 52 bp, Artificial; identical to SEQ ID NO: 174365
  Synthetic oligonucleotide

SEQ ID NO: 642652 - DNA, 53 bp, Artificial; identical to SEQ ID NO: 240797
  Synthetic oligonucleotide

SEQ ID NO: 642653 - DNA, 55 bp, Artificial; identical to SEQ ID NO: 244814
  Synthetic oligonucleotide

SEQ ID NO: 642654 - DNA, 59 bp, Artificial; identical to SEQ ID NO: 266078
  Synthetic oligonucleotide

SEQ ID NO: 642655 - DNA, 55 bp, Artificial; identical to SEQ ID NO: 182172
  Synthetic oligonucleotide

SEQ ID NO: 642656 - DNA, 55 bp, Artificial; identical to SEQ ID NO: 236472
  Synthetic oligonucleotide

SEQ ID NO: 642657 - DNA, 60 bp, Artificial; identical to SEQ ID NO: 168656
  Synthetic oligonucleotide

SEQ ID NO: 642658 - DNA, 55 bp, Artificial; identical to SEQ ID NO: 194480
  Synthetic oligonucleotide

SEQ ID NO: 642659 - DNA, 54 bp, Artificial; identical to SEQ ID NO: 243641
  Synthetic oligonucleotide

SEQ ID NO: 642660 - DNA, 55 bp, Artificial; identical to SEQ ID NO: 182170
  Synthetic oligonucleotide

SEQ ID NO: 642661 - DNA, 55 bp, Artificial; identical to SEQ ID NO: 197190
  Synthetic oligonucleotide

SEQ ID NO: 642662 - DNA, 50 bp, Artificial; identical to SEQ ID NO: 187096
  Synthetic oligonucleotide

SEQ ID NO: 642663 - DNA, 53 bp, Artificial; identical to SEQ ID NO: 208721
  Synthetic oligonucleotide

SEQ ID NO: 642664 - DNA, 55 bp, Artificial; identical to SEQ ID NO: 208442
  Synthetic oligonucleotide

SEQ ID NO: 642665 - DNA, 57 bp, Artificial; identical to SEQ ID NO: 151611
  Synthetic oligonucleotide

SEQ ID NO: 642666 - DNA, 51 bp, Artificial; identical to SEQ ID NO: 247995
  Synthetic oligonucleotide

SEQ ID NO: 642667 - DNA, 59 bp, Artificial; identical to SEQ ID NO: 162003
  Synthetic oligonucleotide

SEQ ID NO: 642668 - DNA, 54 bp, Artificial; identical to SEQ ID NO: 233532
  Synthetic oligonucleotide

SEQ ID NO: 642669 - DNA, 55 bp, Artificial; identical to SEQ ID NO: 151952
  Synthetic oligonucleotide

SEQ ID NO: 642670 - DNA, 53 bp, Artificial; identical to SEQ ID NO: 234450
  Synthetic oligonucleotide

SEQ ID NO: 642671 - DNA, 51 bp, Artificial; identical to SEQ ID NO: 215229
  Synthetic oligonucleotide

SEQ ID NO: 642672 - DNA, 51 bp, Artificial; identical to SEQ ID NO: 198768
  Synthetic oligonucleotide

SEQ ID NO: 642673 - DNA, 53 bp, Artificial; identical to SEQ ID NO: 194482
  Synthetic oligonucleotide

SEQ ID NO: 642674 - DNA, 55 bp, Artificial; identical to SEQ ID NO: 212671
  Synthetic oligonucleotide

SEQ ID NO: 642675 - DNA, 52 bp, Artificial; identical to SEQ ID NO: 213006
  Synthetic oligonucleotide

SEQ ID NO: 642676 - DNA, 55 bp, Artificial; identical to SEQ ID NO: 249506
  Synthetic oligonucleotide

SEQ ID NO: 642677 - DNA, 55 bp, Artificial; identical to SEQ ID NO: 188969
  Synthetic oligonucleotide

SEQ ID NO: 642678 - DNA, 56 bp, Artificial; identical to SEQ ID NO: 193226
  Synthetic oligonucleotide

SEQ ID NO: 642679 - DNA, 55 bp, Artificial; identical to SEQ ID NO: 179013
  Synthetic oligonucleotide

SEQ ID NO: 642680 - DNA, 55 bp, Artificial; identical to SEQ ID NO: 155817
  Synthetic oligonucleotide

SEQ ID NO: 642681 - DNA, 55 bp, Artificial; identical to SEQ ID NO: 160111
  Synthetic oligonucleotide

SEQ ID NO: 642682 - DNA, 55 bp, Artificial; identical to SEQ ID NO: 217678
  Synthetic oligonucleotide

SEQ ID NO: 642683 - DNA, 54 bp, Artificial; identical to SEQ ID NO: 212792
  Synthetic oligonucleotide

SEQ ID NO: 642684 - DNA, 55 bp, Artificial; identical to SEQ ID NO: 225107
  Synthetic oligonucleotide

SEQ ID NO: 642685 - DNA, 55 bp, Artificial; identical to SEQ ID NO: 155818
  Synthetic oligonucleotide

SEQ ID NO: 642686 - DNA, 60 bp, Artificial; identical to SEQ ID NO: 266004
  Synthetic oligonucleotide

SEQ ID NO: 642687 - DNA, 59 bp, Artificial; identical to SEQ ID NO: 203275
  Synthetic oligonucleotide

SEQ ID NO: 642688 - DNA, 52 bp, Artificial; identical to SEQ ID NO: 160928
  Synthetic oligonucleotide

SEQ ID NO: 642689 - DNA, 56 bp, Artificial; identical to SEQ ID NO: 156943
  Synthetic oligonucleotide

SEQ ID NO: 642690 - DNA, 55 bp, Artificial; identical to SEQ ID NO: 174278
  Synthetic oligonucleotide

SEQ ID NO: 642691 - DNA, 55 bp, Artificial; identical to SEQ ID NO: 205423
  Synthetic oligonucleotide

SEQ ID NO: 642692 - DNA, 55 bp, Artificial; identical to SEQ ID NO: 238323
  Synthetic oligonucleotide

SEQ ID NO: 642693 - DNA, 55 bp, Artificial; identical to SEQ ID NO: 151948
  Synthetic oligonucleotide

SEQ ID NO: 642694 - DNA, 55 bp, Artificial; identical to SEQ ID NO: 171586
  Synthetic oligonucleotide

SEQ ID NO: 642695 - DNA, 55 bp, Artificial; identical to SEQ ID NO: 171583
  Synthetic oligonucleotide

SEQ ID NO: 642696 - DNA, 53 bp, Artificial; identical to SEQ ID NO: 202488
  Synthetic oligonucleotide

SEQ ID NO: 642697 - DNA, 55 bp, Artificial; identical to SEQ ID NO: 190334
  Synthetic oligonucleotide

SEQ ID NO: 642698 - DNA, 55 bp, Artificial; identical to SEQ ID NO: 244811
  Synthetic oligonucleotide

SEQ ID NO: 642699 - DNA, 55 bp, Artificial; identical to SEQ ID NO: 220597
  Synthetic oligonucleotide

SEQ ID NO: 642700 - DNA, 55 bp, Artificial; identical to SEQ ID NO: 154504
  Synthetic oligonucleotide

SEQ ID NO: 642701 - DNA, 51 bp, Artificial; identical to SEQ ID NO: 167613
  Synthetic oligonucleotide

SEQ ID NO: 642702 - DNA, 55 bp, Artificial; identical to SEQ ID NO: 182167
  Synthetic oligonucleotide

SEQ ID NO: 642703 - DNA, 55 bp, Artificial; identical to SEQ ID NO: 190333
  Synthetic oligonucleotide

SEQ ID NO: 642704 - DNA, 55 bp, Artificial; identical to SEQ ID NO: 182165
  Synthetic oligonucleotide

SEQ ID NO: 642705 - DNA, 56 bp, Artificial; identical to SEQ ID NO: 151342
  Synthetic oligonucleotide

SEQ ID NO: 642706 - DNA, 55 bp, Artificial; identical to SEQ ID NO: 182164
  Synthetic oligonucleotide

SEQ ID NO: 642707 - DNA, 52 bp, Artificial; identical to SEQ ID NO: 244808
  Synthetic oligonucleotide

SEQ ID NO: 642708 - DNA, 55 bp, Artificial; identical to SEQ ID NO: 253972
  Synthetic oligonucleotide

SEQ ID NO: 642709 - DNA, 55 bp, Artificial; identical to SEQ ID NO: 153126
  Synthetic oligonucleotide

SEQ ID NO: 642710 - DNA, 60 bp, Artificial; identical to SEQ ID NO: 242253
  Synthetic oligonucleotide

SEQ ID NO: 642711 - DNA, 58 bp, Artificial; identical to SEQ ID NO: 179010
  Synthetic oligonucleotide

SEQ ID NO: 642712 - DNA, 51 bp, Artificial; identical to SEQ ID NO: 222727
  Synthetic oligonucleotide

SEQ ID NO: 642713 - DNA, 56 bp, Artificial; identical to SEQ ID NO: 141983
  Synthetic oligonucleotide

SEQ ID NO: 642714 - DNA, 54 bp, Artificial; identical to SEQ ID NO: 248946
  Synthetic oligonucleotide

SEQ ID NO: 642715 - DNA, 54 bp, Artificial; identical to SEQ ID NO: 170014
  Synthetic oligonucleotide

SEQ ID NO: 642716 - DNA, 55 bp, Artificial; identical to SEQ ID NO: 217680
  Synthetic oligonucleotide

SEQ ID NO: 642717 - DNA, 55 bp, Artificial; identical to SEQ ID NO: 244807
  Synthetic oligonucleotide

SEQ ID NO: 642718 - DNA, 55 bp, Artificial; identical to SEQ ID NO: 151972
  Synthetic oligonucleotide

SEQ ID NO: 642719 - DNA, 51 bp, Artificial; identical to SEQ ID NO: 237179
  Synthetic oligonucleotide

SEQ ID NO: 642720 - DNA, 58 bp, Artificial; identical to SEQ ID NO: 247665
  Synthetic oligonucleotide

SEQ ID NO: 642721 - DNA, 57 bp, Artificial; identical to SEQ ID NO: 190797
  Synthetic oligonucleotide

SEQ ID NO: 642722 - DNA, 58 bp, Artificial; identical to SEQ ID NO: 166091
  Synthetic oligonucleotide

SEQ ID NO: 642723 - DNA, 58 bp, Artificial; identical to SEQ ID NO: 243955
  Synthetic oligonucleotide

SEQ ID NO: 642724 - DNA, 57 bp, Artificial; identical to SEQ ID NO: 247654
  Synthetic oligonucleotide

SEQ ID NO: 642725 - DNA, 55 bp, Artificial; identical to SEQ ID NO: 187498
  Synthetic oligonucleotide

SEQ ID NO: 642726 - DNA, 55 bp, Artificial; identical to SEQ ID NO: 171580
  Synthetic oligonucleotide

SEQ ID NO: 642727 - DNA, 55 bp, Artificial; identical to SEQ ID NO: 239706
  Synthetic oligonucleotide

SEQ ID NO: 642728 - DNA, 55 bp, Artificial; identical to SEQ ID NO: 166879
  Synthetic oligonucleotide

SEQ ID NO: 642729 - DNA, 55 bp, Artificial; identical to SEQ ID NO: 142271
  Synthetic oligonucleotide

SEQ ID NO: 642730 - DNA, 55 bp, Artificial; identical to SEQ ID NO: 161158
  Synthetic oligonucleotide

SEQ ID NO: 642731 - DNA, 55 bp, Artificial; identical to SEQ ID NO: 244802
  Synthetic oligonucleotide

SEQ ID NO: 642732 - DNA, 55 bp, Artificial; identical to SEQ ID NO: 215145
  Synthetic oligonucleotide

SEQ ID NO: 642733 - DNA, 55 bp, Artificial; identical to SEQ ID NO: 145189
  Synthetic oligonucleotide

SEQ ID NO: 642734 - DNA, 55 bp, Artificial; identical to SEQ ID NO: 221404
  Synthetic oligonucleotide

SEQ ID NO: 642735 - DNA, 59 bp, Artificial; identical to SEQ ID NO: 242286
  Synthetic oligonucleotide

SEQ ID NO: 642736 - DNA, 52 bp, Artificial; identical to SEQ ID NO: 208437
  Synthetic oligonucleotide

SEQ ID NO: 642737 - DNA, 55 bp, Artificial; identical to SEQ ID NO: 223480
  Synthetic oligonucleotide

SEQ ID NO: 642738 - DNA, 52 bp, Artificial; identical to SEQ ID NO: 266105
  Synthetic oligonucleotide

SEQ ID NO: 642739 - DNA, 55 bp, Artificial; identical to SEQ ID NO: 182203
  Synthetic oligonucleotide

SEQ ID NO: 642740 - DNA, 55 bp, Artificial; identical to SEQ ID NO: 182202
  Synthetic oligonucleotide

SEQ ID NO: 642741 - DNA, 55 bp, Artificial; identical to SEQ ID NO: 155822
  Synthetic oligonucleotide

SEQ ID NO: 642742 - DNA, 51 bp, Artificial; identical to SEQ ID NO: 182201
  Synthetic oligonucleotide

SEQ ID NO: 642743 - DNA, 54 bp, Artificial; identical to SEQ ID NO: 169274
  Synthetic oligonucleotide

SEQ ID NO: 642744 - DNA, 55 bp, Artificial; identical to SEQ ID NO: 182200
  Synthetic oligonucleotide

SEQ ID NO: 642745 - DNA, 55 bp, Artificial; identical to SEQ ID NO: 155180
  Synthetic oligonucleotide

SEQ ID NO: 642746 - DNA, 54 bp, Artificial; identical to SEQ ID NO: 162035
  Synthetic oligonucleotide

SEQ ID NO: 642747 - DNA, 55 bp, Artificial; identical to SEQ ID NO: 147753
  Synthetic oligonucleotide

SEQ ID NO: 642748 - DNA, 57 bp, Artificial; identical to SEQ ID NO: 141934
  Synthetic oligonucleotide

SEQ ID NO: 642749 - DNA, 55 bp, Artificial; identical to SEQ ID NO: 147754
  Synthetic oligonucleotide

SEQ ID NO: 642750 - DNA, 55 bp, Artificial; identical to SEQ ID NO: 171578
  Synthetic oligonucleotide

SEQ ID NO: 642751 - DNA, 54 bp, Artificial; identical to SEQ ID NO: 253970
  Synthetic oligonucleotide

SEQ ID NO: 642752 - DNA, 55 bp, Artificial; identical to SEQ ID NO: 198765
  Synthetic oligonucleotide

SEQ ID NO: 642753 - DNA, 55 bp, Artificial; identical to SEQ ID NO: 221402
  Synthetic oligonucleotide

SEQ ID NO: 642754 - DNA, 57 bp, Artificial; identical to SEQ ID NO: 203359
  Synthetic oligonucleotide

SEQ ID NO: 642755 - DNA, 60 bp, Artificial; identical to SEQ ID NO: 168622
  Synthetic oligonucleotide

SEQ ID NO: 642756 - DNA, 55 bp, Artificial; identical to SEQ ID NO: 142274
  Synthetic oligonucleotide

SEQ ID NO: 642757 - DNA, 55 bp, Artificial; identical to SEQ ID NO: 193212
  Synthetic oligonucleotide

SEQ ID NO: 642758 - DNA, 55 bp, Artificial; identical to SEQ ID NO: 197185
  Synthetic oligonucleotide

SEQ ID NO: 642759 - DNA, 56 bp, Artificial; identical to SEQ ID NO: 141769
  Synthetic oligonucleotide

SEQ ID NO: 642760 - DNA, 55 bp, Artificial; identical to SEQ ID NO: 155823
  Synthetic oligonucleotide

SEQ ID NO: 642761 - DNA, 55 bp, Artificial; identical to SEQ ID NO: 155824
  Synthetic oligonucleotide

SEQ ID NO: 642762 - DNA, 55 bp, Artificial; identical to SEQ ID NO: 155825
  Synthetic oligonucleotide

SEQ ID NO: 642763 - DNA, 55 bp, Artificial; identical to SEQ ID NO: 238321
  Synthetic oligonucleotide

SEQ ID NO: 642764 - DNA, 55 bp, Artificial; identical to SEQ ID NO: 210942
  Synthetic oligonucleotide

SEQ ID NO: 642765 - DNA, 60 bp, Artificial; identical to SEQ ID NO: 150979
  Synthetic oligonucleotide

SEQ ID NO: 642766 - DNA, 55 bp, Artificial; identical to SEQ ID NO: 153253
  Synthetic oligonucleotide

SEQ ID NO: 642767 - DNA, 55 bp, Artificial; identical to SEQ ID NO: 200668
  Synthetic oligonucleotide

SEQ ID NO: 642768 - DNA, 55 bp, Artificial; identical to SEQ ID NO: 248948
  Synthetic oligonucleotide

SEQ ID NO: 642769 - DNA, 55 bp, Artificial; identical to SEQ ID NO: 154506
  Synthetic oligonucleotide

SEQ ID NO: 642770 - DNA, 55 bp, Artificial; identical to SEQ ID NO: 210941
  Synthetic oligonucleotide

SEQ ID NO: 642771 - DNA, 55 bp, Artificial; identical to SEQ ID NO: 203751
  Synthetic oligonucleotide

SEQ ID NO: 642772 - DNA, 55 bp, Artificial; identical to SEQ ID NO: 248949
  Synthetic oligonucleotide

SEQ ID NO: 642773 - DNA, 55 bp, Artificial; identical to SEQ ID NO: 182198
  Synthetic oligonucleotide

SEQ ID NO: 642774 - DNA, 55 bp, Artificial; identical to SEQ ID NO: 171576
  Synthetic oligonucleotide

SEQ ID NO: 642775 - DNA, 55 bp, Artificial; identical to SEQ ID NO: 182197
  Synthetic oligonucleotide

SEQ ID NO: 642776 - DNA, 51 bp, Artificial; identical to SEQ ID NO: 204029
  Synthetic oligonucleotide

SEQ ID NO: 642777 - DNA, 51 bp, Artificial; identical to SEQ ID NO: 169084
  Synthetic oligonucleotide

SEQ ID NO: 642778 - DNA, 55 bp, Artificial; identical to SEQ ID NO: 212672
  Synthetic oligonucleotide

SEQ ID NO: 642779 - DNA, 55 bp, Artificial; identical to SEQ ID NO: 207317
  Synthetic oligonucleotide

SEQ ID NO: 642780 - DNA, 55 bp, Artificial; identical to SEQ ID NO: 168538
  Synthetic oligonucleotide

SEQ ID NO: 642781 - DNA, 55 bp, Artificial; identical to SEQ ID NO: 253969
  Synthetic oligonucleotide

SEQ ID NO: 642782 - DNA, 55 bp, Artificial; identical to SEQ ID NO: 244852
  Synthetic oligonucleotide

SEQ ID NO: 642783 - DNA, 55 bp, Artificial; identical to SEQ ID NO: 203761
  Synthetic oligonucleotide

SEQ ID NO: 642784 - DNA, 55 bp, Artificial; identical to SEQ ID NO: 225106
  Synthetic oligonucleotide

SEQ ID NO: 642785 - DNA, 55 bp, Artificial; identical to SEQ ID NO: 147718
  Synthetic oligonucleotide

SEQ ID NO: 642786 - DNA, 56 bp, Artificial; identical to SEQ ID NO: 256666
  Synthetic oligonucleotide

SEQ ID NO: 642787 - DNA, 55 bp, Artificial; identical to SEQ ID NO: 154507
  Synthetic oligonucleotide

SEQ ID NO: 642788 - DNA, 55 bp, Artificial; identical to SEQ ID NO: 154508
  Synthetic oligonucleotide

SEQ ID NO: 642789 - DNA, 55 bp, Artificial; identical to SEQ ID NO: 142539
  Synthetic oligonucleotide

SEQ ID NO: 642790 - DNA, 55 bp, Artificial; identical to SEQ ID NO: 221401
  Synthetic oligonucleotide

SEQ ID NO: 642791 - DNA, 55 bp, Artificial; identical to SEQ ID NO: 257740
  Synthetic oligonucleotide

SEQ ID NO: 642792 - DNA, 50 bp, Artificial; identical to SEQ ID NO: 158892
  Synthetic oligonucleotide

SEQ ID NO: 642793 - DNA, 55 bp, Artificial; identical to SEQ ID NO: 212673
  Synthetic oligonucleotide

SEQ ID NO: 642794 - DNA, 55 bp, Artificial; identical to SEQ ID NO: 155827
  Synthetic oligonucleotide

SEQ ID NO: 642795 - DNA, 55 bp, Artificial; identical to SEQ ID NO: 198764
  Synthetic oligonucleotide

SEQ ID NO: 642796 - DNA, 55 bp, Artificial; identical to SEQ ID NO: 155474
  Synthetic oligonucleotide

SEQ ID NO: 642797 - DNA, 54 bp, Artificial; identical to SEQ ID NO: 157250
  Synthetic oligonucleotide

SEQ ID NO: 642798 - DNA, 54 bp, Artificial; identical to SEQ ID NO: 169342
  Synthetic oligonucleotide

SEQ ID NO: 642799 - DNA, 54 bp, Artificial; identical to SEQ ID NO: 159875
  Synthetic oligonucleotide

SEQ ID NO: 642800 - DNA, 55 bp, Artificial; identical to SEQ ID NO: 223467
  Synthetic oligonucleotide

SEQ ID NO: 642801 - DNA, 55 bp, Artificial; identical to SEQ ID NO: 174593
  Synthetic oligonucleotide

SEQ ID NO: 642802 - DNA, 57 bp, Artificial; identical to SEQ ID NO: 179756
  Synthetic oligonucleotide

SEQ ID NO: 642803 - DNA, 60 bp, Artificial; identical to SEQ ID NO: 179002
  Synthetic oligonucleotide

SEQ ID NO: 642804 - DNA, 50 bp, Artificial; identical to SEQ ID NO: 176444
  Synthetic oligonucleotide

SEQ ID NO: 642805 - DNA, 55 bp, Artificial; identical to SEQ ID NO: 174594
  Synthetic oligonucleotide

SEQ ID NO: 642806 - DNA, 53 bp, Artificial; identical to SEQ ID NO: 185772
  Synthetic oligonucleotide

SEQ ID NO: 642807 - DNA, 52 bp, Artificial; identical to SEQ ID NO: 262671
  Synthetic oligonucleotide

SEQ ID NO: 642808 - DNA, 55 bp, Artificial; identical to SEQ ID NO: 155828
  Synthetic oligonucleotide

SEQ ID NO: 642809 - DNA, 60 bp, Artificial; identical to SEQ ID NO: 179001
  Synthetic oligonucleotide

SEQ ID NO: 642810 - DNA, 60 bp, Artificial; identical to SEQ ID NO: 178998
  Synthetic oligonucleotide

SEQ ID NO: 642811 - DNA, 55 bp, Artificial; identical to SEQ ID NO: 147719
  Synthetic oligonucleotide

SEQ ID NO: 642812 - DNA, 55 bp, Artificial; identical to SEQ ID NO: 253966
  Synthetic oligonucleotide

SEQ ID NO: 642813 - DNA, 55 bp, Artificial; identical to SEQ ID NO: 182187
  Synthetic oligonucleotide

SEQ ID NO: 642814 - DNA, 55 bp, Artificial; identical to SEQ ID NO: 182186
  Synthetic oligonucleotide

SEQ ID NO: 642815 - DNA, 55 bp, Artificial; identical to SEQ ID NO: 155830
  Synthetic oligonucleotide

SEQ ID NO: 642816 - DNA, 55 bp, Artificial; identical to SEQ ID NO: 215146
  Synthetic oligonucleotide

SEQ ID NO: 642817 - DNA, 55 bp, Artificial; identical to SEQ ID NO: 174595
  Synthetic oligonucleotide

SEQ ID NO: 642818 - DNA, 55 bp, Artificial; identical to SEQ ID NO: 248950
  Synthetic oligonucleotide

SEQ ID NO: 642819 - DNA, 60 bp, Artificial; identical to SEQ ID NO: 141770
  Synthetic oligonucleotide

SEQ ID NO: 642820 - DNA, 55 bp, Artificial; identical to SEQ ID NO: 244845
  Synthetic oligonucleotide

SEQ ID NO: 642821 - DNA, 58 bp, Artificial; identical to SEQ ID NO: 166090
  Synthetic oligonucleotide

SEQ ID NO: 642822 - DNA, 55 bp, Artificial; identical to SEQ ID NO: 147720
  Synthetic oligonucleotide

SEQ ID NO: 642823 - DNA, 58 bp, Artificial; identical to SEQ ID NO: 203371
  Synthetic oligonucleotide

SEQ ID NO: 642824 - DNA, 52 bp, Artificial; identical to SEQ ID NO: 186998
  Synthetic oligonucleotide

SEQ ID NO: 642825 - DNA, 55 bp, Artificial; identical to SEQ ID NO: 151967
  Synthetic oligonucleotide

SEQ ID NO: 642826 - DNA, 52 bp, Artificial; identical to SEQ ID NO: 213008
  Synthetic oligonucleotide

SEQ ID NO: 642827 - DNA, 55 bp, Artificial; identical to SEQ ID NO: 244844
  Synthetic oligonucleotide

SEQ ID NO: 642828 - DNA, 60 bp, Artificial; identical to SEQ ID NO: 141771
  Synthetic oligonucleotide

SEQ ID NO: 642829 - DNA, 53 bp, Artificial; identical to SEQ ID NO: 203890
  Synthetic oligonucleotide

SEQ ID NO: 642830 - DNA, 55 bp, Artificial; identical to SEQ ID NO: 198762
  Synthetic oligonucleotide

SEQ ID NO: 642831 - DNA, 55 bp, Artificial; identical to SEQ ID NO: 147722
  Synthetic oligonucleotide

SEQ ID NO: 642832 - DNA, 55 bp, Artificial; identical to SEQ ID NO: 210939
  Synthetic oligonucleotide

SEQ ID NO: 642833 - DNA, 55 bp, Artificial; identical to SEQ ID NO: 188963
  Synthetic oligonucleotide

SEQ ID NO: 642834 - DNA, 55 bp, Artificial; identical to SEQ ID NO: 171569
  Synthetic oligonucleotide

SEQ ID NO: 642835 - DNA, 60 bp, Artificial; identical to SEQ ID NO: 219476
  Synthetic oligonucleotide

SEQ ID NO: 642836 - DNA, 58 bp, Artificial; identical to SEQ ID NO: 141906
  Synthetic oligonucleotide

SEQ ID NO: 642837 - DNA, 50 bp, Artificial; identical to SEQ ID NO: 187103
  Synthetic oligonucleotide

SEQ ID NO: 642838 - DNA, 52 bp, Artificial; identical to SEQ ID NO: 178935
  Synthetic oligonucleotide

SEQ ID NO: 642839 - DNA, 55 bp, Artificial; identical to SEQ ID NO: 152603
  Synthetic oligonucleotide

SEQ ID NO: 642840 - DNA, 55 bp, Artificial; identical to SEQ ID NO: 202080
  Synthetic oligonucleotide

SEQ ID NO: 642841 - DNA, 57 bp, Artificial; identical to SEQ ID NO: 179787
  Synthetic oligonucleotide

SEQ ID NO: 642842 - DNA, 52 bp, Artificial; identical to SEQ ID NO: 149658
  Synthetic oligonucleotide

SEQ ID NO: 642843 - DNA, 54 bp, Artificial; identical to SEQ ID NO: 174820
  Synthetic oligonucleotide

SEQ ID NO: 642844 - DNA, 55 bp, Artificial; identical to SEQ ID NO: 238320
  Synthetic oligonucleotide

SEQ ID NO: 642845 - DNA, 55 bp, Artificial; identical to SEQ ID NO: 248951
  Synthetic oligonucleotide

SEQ ID NO: 642846 - DNA, 57 bp, Artificial; identical to SEQ ID NO: 212847
  Synthetic oligonucleotide

SEQ ID NO: 642847 - DNA, 50 bp, Artificial; identical to SEQ ID NO: 176415
  Synthetic oligonucleotide

SEQ ID NO: 642848 - DNA, 52 bp, Artificial; identical to SEQ ID NO: 149657
  Synthetic oligonucleotide

SEQ ID NO: 642849 - DNA, 55 bp, Artificial; identical to SEQ ID NO: 202740
  Synthetic oligonucleotide

SEQ ID NO: 642850 - DNA, 55 bp, Artificial; identical to SEQ ID NO: 182673
  Synthetic oligonucleotide

SEQ ID NO: 642851 - DNA, 54 bp, Artificial; identical to SEQ ID NO: 248997
  Synthetic oligonucleotide

SEQ ID NO: 642852 - DNA, 55 bp, Artificial; identical to SEQ ID NO: 249019
  Synthetic oligonucleotide

SEQ ID NO: 642853 - DNA, 55 bp, Artificial; identical to SEQ ID NO: 209401
  Synthetic oligonucleotide

SEQ ID NO: 642854 - DNA, 55 bp, Artificial; identical to SEQ ID NO: 161157
  Synthetic oligonucleotide

SEQ ID NO: 642855 - DNA, 55 bp, Artificial; identical to SEQ ID NO: 142276
  Synthetic oligonucleotide

SEQ ID NO: 642856 - DNA, 50 bp, Artificial; identical to SEQ ID NO: 253627
  Synthetic oligonucleotide

SEQ ID NO: 642857 - DNA, 55 bp, Artificial; identical to SEQ ID NO: 244842
  Synthetic oligonucleotide

SEQ ID NO: 642858 - DNA, 55 bp, Artificial; identical to SEQ ID NO: 221399
  Synthetic oligonucleotide

SEQ ID NO: 642859 - DNA, 57 bp, Artificial; identical to SEQ ID NO: 237799
  Synthetic oligonucleotide

SEQ ID NO: 642860 - DNA, 55 bp, Artificial; identical to SEQ ID NO: 188962
  Synthetic oligonucleotide

SEQ ID NO: 642861 - DNA, 55 bp, Artificial; identical to SEQ ID NO: 171567
  Synthetic oligonucleotide

SEQ ID NO: 642862 - DNA, 60 bp, Artificial; identical to SEQ ID NO: 191734
  Synthetic oligonucleotide

SEQ ID NO: 642863 - DNA, 55 bp, Artificial; identical to SEQ ID NO: 253965
  Synthetic oligonucleotide

SEQ ID NO: 642864 - DNA, 60 bp, Artificial; identical to SEQ ID NO: 151322
  Synthetic oligonucleotide

SEQ ID NO: 642865 - DNA, 60 bp, Artificial; identical to SEQ ID NO: 212869
  Synthetic oligonucleotide

SEQ ID NO: 642866 - DNA, 60 bp, Artificial; identical to SEQ ID NO: 249041
  Synthetic oligonucleotide

SEQ ID NO: 642867 - DNA, 55 bp, Artificial; identical to SEQ ID NO: 182670
  Synthetic oligonucleotide

SEQ ID NO: 642868 - DNA, 55 bp, Artificial; identical to SEQ ID NO: 205424
  Synthetic oligonucleotide

SEQ ID NO: 642869 - DNA, 50 bp, Artificial; identical to SEQ ID NO: 165797
  Synthetic oligonucleotide

SEQ ID NO: 642870 - DNA, 54 bp, Artificial; identical to SEQ ID NO: 216417
  Synthetic oligonucleotide

SEQ ID NO: 642871 - DNA, 56 bp, Artificial; identical to SEQ ID NO: 207688
  Synthetic oligonucleotide

SEQ ID NO: 642872 - DNA, 57 bp, Artificial; identical to SEQ ID NO: 222891
  Synthetic oligonucleotide

SEQ ID NO: 642873 - DNA, 55 bp, Artificial; identical to SEQ ID NO: 223433
  Synthetic oligonucleotide

SEQ ID NO: 642874 - DNA, 50 bp, Artificial; identical to SEQ ID NO: 261894
  Synthetic oligonucleotide

SEQ ID NO: 642875 - DNA, 55 bp, Artificial; identical to SEQ ID NO: 190325
  Synthetic oligonucleotide

SEQ ID NO: 642876 - DNA, 57 bp, Artificial; identical to SEQ ID NO: 255655
  Synthetic oligonucleotide

SEQ ID NO: 642877 - DNA, 55 bp, Artificial; identical to SEQ ID NO: 153295
  Synthetic oligonucleotide

SEQ ID NO: 642878 - DNA, 55 bp, Artificial; identical to SEQ ID NO: 244841
  Synthetic oligonucleotide

SEQ ID NO: 642879 - DNA, 53 bp, Artificial; identical to SEQ ID NO: 151965
  Synthetic oligonucleotide

SEQ ID NO: 642880 - DNA, 55 bp, Artificial; identical to SEQ ID NO: 182666
  Synthetic oligonucleotide

SEQ ID NO: 642881 - DNA, 55 bp, Artificial; identical to SEQ ID NO: 248956
  Synthetic oligonucleotide

SEQ ID NO: 642882 - DNA, 55 bp, Artificial; identical to SEQ ID NO: 161156
  Synthetic oligonucleotide

SEQ ID NO: 642883 - DNA, 55 bp, Artificial; identical to SEQ ID NO: 253963
  Synthetic oligonucleotide

SEQ ID NO: 642884 - DNA, 54 bp, Artificial; identical to SEQ ID NO: 161003
  Synthetic oligonucleotide

SEQ ID NO: 642885 - DNA, 55 bp, Artificial; identical to SEQ ID NO: 187481
  Synthetic oligonucleotide

SEQ ID NO: 642886 - DNA, 55 bp, Artificial; identical to SEQ ID NO: 223432
  Synthetic oligonucleotide

SEQ ID NO: 642887 - DNA, 55 bp, Artificial; identical to SEQ ID NO: 220600
  Synthetic oligonucleotide

SEQ ID NO: 642888 - DNA, 55 bp, Artificial; identical to SEQ ID NO: 187474
  Synthetic oligonucleotide

SEQ ID NO: 642889 - DNA, 52 bp, Artificial; identical to SEQ ID NO: 206472
  Synthetic oligonucleotide

SEQ ID NO: 642890 - DNA, 55 bp, Artificial; identical to SEQ ID NO: 147723
  Synthetic oligonucleotide

SEQ ID NO: 642891 - DNA, 55 bp, Artificial; identical to SEQ ID NO: 182665
  Synthetic oligonucleotide

SEQ ID NO: 642892 - DNA, 55 bp, Artificial; identical to SEQ ID NO: 248893
  Synthetic oligonucleotide

SEQ ID NO: 642893 - DNA, 51 bp, Artificial; identical to SEQ ID NO: 213054
  Synthetic oligonucleotide

SEQ ID NO: 642894 - DNA, 55 bp, Artificial; identical to SEQ ID NO: 198760
  Synthetic oligonucleotide

SEQ ID NO: 642895 - DNA, 55 bp, Artificial; identical to SEQ ID NO: 166740
  Synthetic oligonucleotide

SEQ ID NO: 642896 - DNA, 51 bp, Artificial; identical to SEQ ID NO: 165222
  Synthetic oligonucleotide

SEQ ID NO: 642897 - DNA, 55 bp, Artificial; identical to SEQ ID NO: 190323
  Synthetic oligonucleotide

SEQ ID NO: 642898 - DNA, 56 bp, Artificial; identical to SEQ ID NO: 203407
  Synthetic oligonucleotide

SEQ ID NO: 642899 - DNA, 55 bp, Artificial; identical to SEQ ID NO: 222912
  Synthetic oligonucleotide

SEQ ID NO: 642900 - DNA, 55 bp, Artificial; identical to SEQ ID NO: 190321
  Synthetic oligonucleotide

SEQ ID NO: 642901 - DNA, 55 bp, Artificial; identical to SEQ ID NO: 266148
  Synthetic oligonucleotide

SEQ ID NO: 642902 - DNA, 51 bp, Artificial; identical to SEQ ID NO: 246718
  Synthetic oligonucleotide

SEQ ID NO: 642903 - DNA, 50 bp, Artificial; identical to SEQ ID NO: 206699
  Synthetic oligonucleotide

SEQ ID NO: 642904 - DNA, 55 bp, Artificial; identical to SEQ ID NO: 167505
  Synthetic oligonucleotide

SEQ ID NO: 642905 - DNA, 55 bp, Artificial; identical to SEQ ID NO: 198758
  Synthetic oligonucleotide

SEQ ID NO: 642906 - DNA, 53 bp, Artificial; identical to SEQ ID NO: 209653
  Synthetic oligonucleotide

SEQ ID NO: 642907 - DNA, 55 bp, Artificial; identical to SEQ ID NO: 254017
  Synthetic oligonucleotide

SEQ ID NO: 642908 - DNA, 55 bp, Artificial; identical to SEQ ID NO: 194484
  Synthetic oligonucleotide

SEQ ID NO: 642909 - DNA, 55 bp, Artificial; identical to SEQ ID NO: 252916
  Synthetic oligonucleotide

SEQ ID NO: 642910 - DNA, 55 bp, Artificial; identical to SEQ ID NO: 147724
  Synthetic oligonucleotide

SEQ ID NO: 642911 - DNA, 57 bp, Artificial; identical to SEQ ID NO: 200709
  Synthetic oligonucleotide

SEQ ID NO: 642912 - DNA, 55 bp, Artificial; identical to SEQ ID NO: 155442
  Synthetic oligonucleotide

SEQ ID NO: 642913 - DNA, 55 bp, Artificial; identical to SEQ ID NO: 182662
  Synthetic oligonucleotide

SEQ ID NO: 642914 - DNA, 55 bp, Artificial; identical to SEQ ID NO: 182659
  Synthetic oligonucleotide

SEQ ID NO: 642915 - DNA, 53 bp, Artificial; identical to SEQ ID NO: 185813
  Synthetic oligonucleotide

SEQ ID NO: 642916 - DNA, 54 bp, Artificial; identical to SEQ ID NO: 207710
  Synthetic oligonucleotide

SEQ ID NO: 642917 - DNA, 56 bp, Artificial; identical to SEQ ID NO: 147297
  Synthetic oligonucleotide

SEQ ID NO: 642918 - DNA, 55 bp, Artificial; identical to SEQ ID NO: 198755
  Synthetic oligonucleotide

SEQ ID NO: 642919 - DNA, 55 bp, Artificial; identical to SEQ ID NO: 223429
  Synthetic oligonucleotide

SEQ ID NO: 642920 - DNA, 55 bp, Artificial; identical to SEQ ID NO: 215147
  Synthetic oligonucleotide

SEQ ID NO: 642921 - DNA, 53 bp, Artificial; identical to SEQ ID NO: 185811
  Synthetic oligonucleotide

SEQ ID NO: 642922 - DNA, 59 bp, Artificial; identical to SEQ ID NO: 201963
  Synthetic oligonucleotide

SEQ ID NO: 642923 - DNA, 54 bp, Artificial; identical to SEQ ID NO: 203845
  Synthetic oligonucleotide

SEQ ID NO: 642924 - DNA, 55 bp, Artificial; identical to SEQ ID NO: 209400
  Synthetic oligonucleotide

SEQ ID NO: 642925 - DNA, 53 bp, Artificial; identical to SEQ ID NO: 199754
  Synthetic oligonucleotide

SEQ ID NO: 642926 - DNA, 55 bp, Artificial; identical to SEQ ID NO: 182658
  Synthetic oligonucleotide

SEQ ID NO: 642927 - DNA, 55 bp, Artificial; identical to SEQ ID NO: 238318
  Synthetic oligonucleotide

SEQ ID NO: 642928 - DNA, 57 bp, Artificial; identical to SEQ ID NO: 266005
  Synthetic oligonucleotide

SEQ ID NO: 642929 - DNA, 55 bp, Artificial; identical to SEQ ID NO: 154511
  Synthetic oligonucleotide

SEQ ID NO: 642930 - DNA, 54 bp, Artificial; identical to SEQ ID NO: 185136
  Synthetic oligonucleotide

SEQ ID NO: 642931 - DNA, 58 bp, Artificial; identical to SEQ ID NO: 175146
  Synthetic oligonucleotide

SEQ ID NO: 642932 - DNA, 56 bp, Artificial; identical to SEQ ID NO: 209071
  Synthetic oligonucleotide

SEQ ID NO: 642933 - DNA, 55 bp, Artificial; identical to SEQ ID NO: 147725
  Synthetic oligonucleotide

SEQ ID NO: 642934 - DNA, 48 bp, Artificial; identical to SEQ ID NO: 155896
  Synthetic oligonucleotide

SEQ ID NO: 642935 - DNA, 55 bp, Artificial; identical to SEQ ID NO: 244839
  Synthetic oligonucleotide

SEQ ID NO: 642936 - DNA, 55 bp, Artificial; identical to SEQ ID NO: 145177
  Synthetic oligonucleotide

SEQ ID NO: 642937 - DNA, 55 bp, Artificial; identical to SEQ ID NO: 147727
  Synthetic oligonucleotide

SEQ ID NO: 642938 - DNA, 49 bp, Artificial; identical to SEQ ID NO: 243642
  Synthetic oligonucleotide

SEQ ID NO: 642939 - DNA, 51 bp, Artificial; identical to SEQ ID NO: 188544
  Synthetic oligonucleotide

SEQ ID NO: 642940 - DNA, 57 bp, Artificial; identical to SEQ ID NO: 266006
  Synthetic oligonucleotide

SEQ ID NO: 642941 - DNA, 53 bp, Artificial; identical to SEQ ID NO: 157294
  Synthetic oligonucleotide

SEQ ID NO: 642942 - DNA, 56 bp, Artificial; identical to SEQ ID NO: 161965
  Synthetic oligonucleotide

SEQ ID NO: 642943 - DNA, 55 bp, Artificial; identical to SEQ ID NO: 218199
  Synthetic oligonucleotide

SEQ ID NO: 642944 - DNA, 51 bp, Artificial; identical to SEQ ID NO: 193834
  Synthetic oligonucleotide

SEQ ID NO: 642945 - DNA, 50 bp, Artificial; identical to SEQ ID NO: 246853
  Synthetic oligonucleotide

SEQ ID NO: 642946 - DNA, 55 bp, Artificial; identical to SEQ ID NO: 161002
  Synthetic oligonucleotide

SEQ ID NO: 642947 - DNA, 55 bp, Artificial; identical to SEQ ID NO: 152272
  Synthetic oligonucleotide

SEQ ID NO: 642948 - DNA, 55 bp, Artificial; identical to SEQ ID NO: 169276
  Synthetic oligonucleotide

SEQ ID NO: 642949 - DNA, 50 bp, Artificial; identical to SEQ ID NO: 208918
  Synthetic oligonucleotide

SEQ ID NO: 642950 - DNA, 55 bp, Artificial; identical to SEQ ID NO: 146210
  Synthetic oligonucleotide

SEQ ID NO: 642951 - DNA, 58 bp, Artificial; identical to SEQ ID NO: 166086
  Synthetic oligonucleotide

SEQ ID NO: 642952 - DNA, 55 bp, Artificial; identical to SEQ ID NO: 201968
  Synthetic oligonucleotide

SEQ ID NO: 642953 - DNA, 54 bp, Artificial; identical to SEQ ID NO: 223551
  Synthetic oligonucleotide

SEQ ID NO: 642954 - DNA, 57 bp, Artificial; identical to SEQ ID NO: 210767
  Synthetic oligonucleotide

SEQ ID NO: 642955 - DNA, 56 bp, Artificial; identical to SEQ ID NO: 147284
  Synthetic oligonucleotide

SEQ ID NO: 642956 - DNA, 60 bp, Artificial; identical to SEQ ID NO: 233878
  Synthetic oligonucleotide

SEQ ID NO: 642957 - DNA, 55 bp, Artificial; identical to SEQ ID NO: 209399
  Synthetic oligonucleotide

SEQ ID NO: 642958 - DNA, 55 bp, Artificial; identical to SEQ ID NO: 202739
  Synthetic oligonucleotide

SEQ ID NO: 642959 - DNA, 53 bp, Artificial; identical to SEQ ID NO: 185806
  Synthetic oligonucleotide

SEQ ID NO: 642960 - DNA, 55 bp, Artificial; identical to SEQ ID NO: 244837
  Synthetic oligonucleotide

SEQ ID NO: 642961 - DNA, 55 bp, Artificial; identical to SEQ ID NO: 155444
  Synthetic oligonucleotide

SEQ ID NO: 642962 - DNA, 60 bp, Artificial; identical to SEQ ID NO: 150601
  Synthetic oligonucleotide

SEQ ID NO: 642963 - DNA, 56 bp, Artificial; identical to SEQ ID NO: 166798
  Synthetic oligonucleotide

SEQ ID NO: 642964 - DNA, 52 bp, Artificial; identical to SEQ ID NO: 202522
  Synthetic oligonucleotide

SEQ ID NO: 642965 - DNA, 54 bp, Artificial; identical to SEQ ID NO: 141772
  Synthetic oligonucleotide

SEQ ID NO: 642966 - DNA, 60 bp, Artificial; identical to SEQ ID NO: 202677
  Synthetic oligonucleotide

SEQ ID NO: 642967 - DNA, 51 bp, Artificial; identical to SEQ ID NO: 209730
  Synthetic oligonucleotide

SEQ ID NO: 642968 - DNA, 53 bp, Artificial; identical to SEQ ID NO: 144921
  Synthetic oligonucleotide

SEQ ID NO: 642969 - DNA, 60 bp, Artificial; identical to SEQ ID NO: 150624
  Synthetic oligonucleotide

SEQ ID NO: 642970 - DNA, 55 bp, Artificial; identical to SEQ ID NO: 166926
  Synthetic oligonucleotide

SEQ ID NO: 642971 - DNA, 60 bp, Artificial; identical to SEQ ID NO: 255567
  Synthetic oligonucleotide

SEQ ID NO: 642972 - DNA, 53 bp, Artificial; identical to SEQ ID NO: 255327
  Synthetic oligonucleotide

SEQ ID NO: 642973 - DNA, 55 bp, Artificial; identical to SEQ ID NO: 182655
  Synthetic oligonucleotide

SEQ ID NO: 642974 - DNA, 54 bp, Artificial; identical to SEQ ID NO: 142281
  Synthetic oligonucleotide

SEQ ID NO: 642975 - DNA, 60 bp, Artificial; identical to SEQ ID NO: 237800
  Synthetic oligonucleotide

SEQ ID NO: 642976 - DNA, 59 bp, Artificial; identical to SEQ ID NO: 257185
  Synthetic oligonucleotide

SEQ ID NO: 642977 - DNA, 53 bp, Artificial; identical to SEQ ID NO: 208741
  Synthetic oligonucleotide

SEQ ID NO: 642978 - DNA, 60 bp, Artificial; identical to SEQ ID NO: 200708
  Synthetic oligonucleotide

SEQ ID NO: 642979 - DNA, 55 bp, Artificial; identical to SEQ ID NO: 239610
  Synthetic oligonucleotide

SEQ ID NO: 642980 - DNA, 55 bp, Artificial; identical to SEQ ID NO: 238316
  Synthetic oligonucleotide

SEQ ID NO: 642981 - DNA, 57 bp, Artificial; identical to SEQ ID NO: 147233
  Synthetic oligonucleotide

SEQ ID NO: 642982 - DNA, 51 bp, Artificial; identical to SEQ ID NO: 157704
  Synthetic oligonucleotide

SEQ ID NO: 642983 - DNA, 57 bp, Artificial; identical to SEQ ID NO: 256633
  Synthetic oligonucleotide

SEQ ID NO: 642984 - DNA, 55 bp, Artificial; identical to SEQ ID NO: 155897
  Synthetic oligonucleotide

SEQ ID NO: 642985 - DNA, 55 bp, Artificial; identical to SEQ ID NO: 254020
  Synthetic oligonucleotide

SEQ ID NO: 642986 - DNA, 55 bp, Artificial; identical to SEQ ID NO: 174597
  Synthetic oligonucleotide

SEQ ID NO: 642987 - DNA, 55 bp, Artificial; identical to SEQ ID NO: 212679
  Synthetic oligonucleotide

SEQ ID NO: 642988 - DNA, 55 bp, Artificial; identical to SEQ ID NO: 197181
  Synthetic oligonucleotide

SEQ ID NO: 642989 - DNA, 55 bp, Artificial; identical to SEQ ID NO: 212675
  Synthetic oligonucleotide

SEQ ID NO: 642990 - DNA, 55 bp, Artificial; identical to SEQ ID NO: 141773
  Synthetic oligonucleotide

SEQ ID NO: 642991 - DNA, 55 bp, Artificial; identical to SEQ ID NO: 207250
  Synthetic oligonucleotide

SEQ ID NO: 642992 - DNA, 55 bp, Artificial; identical to SEQ ID NO: 190319
  Synthetic oligonucleotide

SEQ ID NO: 642993 - DNA, 50 bp, Artificial; identical to SEQ ID NO: 261893
  Synthetic oligonucleotide

SEQ ID NO: 642994 - DNA, 55 bp, Artificial; identical to SEQ ID NO: 203812
  Synthetic oligonucleotide

SEQ ID NO: 642995 - DNA, 60 bp, Artificial; identical to SEQ ID NO: 266007
  Synthetic oligonucleotide

SEQ ID NO: 642996 - DNA, 60 bp, Artificial; identical to SEQ ID NO: 210766
  Synthetic oligonucleotide

SEQ ID NO: 642997 - DNA, 57 bp, Artificial; identical to SEQ ID NO: 247556
  Synthetic oligonucleotide

SEQ ID NO: 642998 - DNA, 60 bp, Artificial; identical to SEQ ID NO: 150646
  Synthetic oligonucleotide

SEQ ID NO: 642999 - DNA, 52 bp, Artificial; identical to SEQ ID NO: 170150
  Synthetic oligonucleotide

SEQ ID NO: 643000 - DNA, 50 bp, Artificial; identical to SEQ ID NO: 241733
  Synthetic oligonucleotide

SEQ ID NO: 643001 - DNA, 51 bp, Artificial; identical to SEQ ID NO: 211656
  Synthetic oligonucleotide

SEQ ID NO: 643002 - DNA, 55 bp, Artificial; identical to SEQ ID NO: 147731
  Synthetic oligonucleotide

SEQ ID NO: 643003 - DNA, 59 bp, Artificial; identical to SEQ ID NO: 151234
  Synthetic oligonucleotide

SEQ ID NO: 643004 - DNA, 55 bp, Artificial; identical to SEQ ID NO: 197178
  Synthetic oligonucleotide

SEQ ID NO: 643005 - DNA, 55 bp, Artificial; identical to SEQ ID NO: 198754
  Synthetic oligonucleotide

SEQ ID NO: 643006 - DNA, 55 bp, Artificial; identical to SEQ ID NO: 244834
  Synthetic oligonucleotide

SEQ ID NO: 643007 - DNA, 55 bp, Artificial; identical to SEQ ID NO: 182699
  Synthetic oligonucleotide

SEQ ID NO: 643008 - DNA, 60 bp, Artificial; identical to SEQ ID NO: 163833
  Synthetic oligonucleotide

SEQ ID NO: 643009 - DNA, 53 bp, Artificial; identical to SEQ ID NO: 143804
  Synthetic oligonucleotide

SEQ ID NO: 643010 - DNA, 55 bp, Artificial; identical to SEQ ID NO: 182698
  Synthetic oligonucleotide

SEQ ID NO: 643011 - DNA, 56 bp, Artificial; identical to SEQ ID NO: 141775
  Synthetic oligonucleotide

SEQ ID NO: 643012 - DNA, 53 bp, Artificial; identical to SEQ ID NO: 185799
  Synthetic oligonucleotide

SEQ ID NO: 643013 - DNA, 55 bp, Artificial; identical to SEQ ID NO: 221395
  Synthetic oligonucleotide

SEQ ID NO: 643014 - DNA, 60 bp, Artificial; identical to SEQ ID NO: 153399
  Synthetic oligonucleotide

SEQ ID NO: 643015 - DNA, 60 bp, Artificial; identical to SEQ ID NO: 190509
  Synthetic oligonucleotide

SEQ ID NO: 643016 - DNA, 52 bp, Artificial; identical to SEQ ID NO: 199961
  Synthetic oligonucleotide

SEQ ID NO: 643017 - DNA, 54 bp, Artificial; identical to SEQ ID NO: 199540
  Synthetic oligonucleotide

SEQ ID NO: 643018 - DNA, 55 bp, Artificial; identical to SEQ ID NO: 182696
  Synthetic oligonucleotide

SEQ ID NO: 643019 - DNA, 50 bp, Artificial; identical to SEQ ID NO: 256114
  Synthetic oligonucleotide

SEQ ID NO: 643020 - DNA, 55 bp, Artificial; identical to SEQ ID NO: 238314
  Synthetic oligonucleotide

SEQ ID NO: 643021 - DNA, 60 bp, Artificial; identical to SEQ ID NO: 141776
  Synthetic oligonucleotide

SEQ ID NO: 643022 - DNA, 55 bp, Artificial; identical to SEQ ID NO: 150657
  Synthetic oligonucleotide

SEQ ID NO: 643023 - DNA, 59 bp, Artificial; identical to SEQ ID NO: 237801
  Synthetic oligonucleotide

SEQ ID NO: 643024 - DNA, 55 bp, Artificial; identical to SEQ ID NO: 203816
  Synthetic oligonucleotide

SEQ ID NO: 643025 - DNA, 53 bp, Artificial; identical to SEQ ID NO: 153594
  Synthetic oligonucleotide

SEQ ID NO: 643026 - DNA, 55 bp, Artificial; identical to SEQ ID NO: 171608
  Synthetic oligonucleotide

SEQ ID NO: 643027 - DNA, 52 bp, Artificial; identical to SEQ ID NO: 199539
  Synthetic oligonucleotide

SEQ ID NO: 643028 - DNA, 55 bp, Artificial; identical to SEQ ID NO: 261618
  Synthetic oligonucleotide

SEQ ID NO: 643029 - DNA, 55 bp, Artificial; identical to SEQ ID NO: 257705
  Synthetic oligonucleotide

SEQ ID NO: 643030 - DNA, 55 bp, Artificial; identical to SEQ ID NO: 182693
  Synthetic oligonucleotide

SEQ ID NO: 643031 - DNA, 55 bp, Artificial; identical to SEQ ID NO: 173650
  Synthetic oligonucleotide

SEQ ID NO: 643032 - DNA, 55 bp, Artificial; identical to SEQ ID NO: 182692
  Synthetic oligonucleotide

SEQ ID NO: 643033 - DNA, 55 bp, Artificial; identical to SEQ ID NO: 209398
  Synthetic oligonucleotide

SEQ ID NO: 643034 - DNA, 58 bp, Artificial; identical to SEQ ID NO: 178915
  Synthetic oligonucleotide

SEQ ID NO: 643035 - DNA, 55 bp, Artificial; identical to SEQ ID NO: 182689
  Synthetic oligonucleotide

SEQ ID NO: 643036 - DNA, 54 bp, Artificial; identical to SEQ ID NO: 222692
  Synthetic oligonucleotide

SEQ ID NO: 643037 - DNA, 55 bp, Artificial; identical to SEQ ID NO: 182688
  Synthetic oligonucleotide

SEQ ID NO: 643038 - DNA, 54 bp, Artificial; identical to SEQ ID NO: 164729
  Synthetic oligonucleotide

SEQ ID NO: 643039 - DNA, 52 bp, Artificial; identical to SEQ ID NO: 202520
  Synthetic oligonucleotide

SEQ ID NO: 643040 - DNA, 60 bp, Artificial; identical to SEQ ID NO: 159242
  Synthetic oligonucleotide

SEQ ID NO: 643041 - DNA, 51 bp, Artificial; identical to SEQ ID NO: 186727
  Synthetic oligonucleotide

SEQ ID NO: 643042 - DNA, 55 bp, Artificial; identical to SEQ ID NO: 220603
  Synthetic oligonucleotide

SEQ ID NO: 643043 - DNA, 53 bp, Artificial; identical to SEQ ID NO: 170053
  Synthetic oligonucleotide

SEQ ID NO: 643044 - DNA, 55 bp, Artificial; identical to SEQ ID NO: 244827
  Synthetic oligonucleotide

SEQ ID NO: 643045 - DNA, 55 bp, Artificial; identical to SEQ ID NO: 198753
  Synthetic oligonucleotide

SEQ ID NO: 643046 - DNA, 55 bp, Artificial; identical to SEQ ID NO: 155445
  Synthetic oligonucleotide

SEQ ID NO: 643047 - DNA, 53 bp, Artificial; identical to SEQ ID NO: 147313
  Synthetic oligonucleotide

SEQ ID NO: 643048 - DNA, 55 bp, Artificial; identical to SEQ ID NO: 182687
  Synthetic oligonucleotide

SEQ ID NO: 643049 - DNA, 55 bp, Artificial; identical to SEQ ID NO: 257126
  Synthetic oligonucleotide

SEQ ID NO: 643050 - DNA, 58 bp, Artificial; identical to SEQ ID NO: 212477
  Synthetic oligonucleotide

SEQ ID NO: 643051 - DNA, 54 bp, Artificial; identical to SEQ ID NO: 161300
  Synthetic oligonucleotide

SEQ ID NO: 643052 - DNA, 55 bp, Artificial; identical to SEQ ID NO: 171607
  Synthetic oligonucleotide

SEQ ID NO: 643053 - DNA, 55 bp, Artificial; identical to SEQ ID NO: 174599
  Synthetic oligonucleotide

SEQ ID NO: 643054 - DNA, 55 bp, Artificial; identical to SEQ ID NO: 160123
  Synthetic oligonucleotide

SEQ ID NO: 643055 - DNA, 60 bp, Artificial; identical to SEQ ID NO: 266008
  Synthetic oligonucleotide

SEQ ID NO: 643056 - DNA, 51 bp, Artificial; identical to SEQ ID NO: 248022
  Synthetic oligonucleotide

SEQ ID NO: 643057 - DNA, 55 bp, Artificial; identical to SEQ ID NO: 257707
  Synthetic oligonucleotide

SEQ ID NO: 643058 - DNA, 58 bp, Artificial; identical to SEQ ID NO: 242408
  Synthetic oligonucleotide

SEQ ID NO: 643059 - DNA, 55 bp, Artificial; identical to SEQ ID NO: 198752
  Synthetic oligonucleotide

SEQ ID NO: 643060 - DNA, 54 bp, Artificial; identical to SEQ ID NO: 147733
  Synthetic oligonucleotide

SEQ ID NO: 643061 - DNA, 55 bp, Artificial; identical to SEQ ID NO: 223420
  Synthetic oligonucleotide

SEQ ID NO: 643062 - DNA, 55 bp, Artificial; identical to SEQ ID NO: 144465
  Synthetic oligonucleotide

SEQ ID NO: 643063 - DNA, 55 bp, Artificial; identical to SEQ ID NO: 190943
  Synthetic oligonucleotide

SEQ ID NO: 643064 - DNA, 57 bp, Artificial; identical to SEQ ID NO: 238627
  Synthetic oligonucleotide

SEQ ID NO: 643065 - DNA, 53 bp, Artificial; identical to SEQ ID NO: 152614
  Synthetic oligonucleotide

SEQ ID NO: 643066 - DNA, 54 bp, Artificial; identical to SEQ ID NO: 199499
  Synthetic oligonucleotide

SEQ ID NO: 643067 - DNA, 50 bp, Artificial; identical to SEQ ID NO: 188591
  Synthetic oligonucleotide

SEQ ID NO: 643068 - DNA, 52 bp, Artificial; identical to SEQ ID NO: 170153
  Synthetic oligonucleotide

SEQ ID NO: 643069 - DNA, 60 bp, Artificial; identical to SEQ ID NO: 238649
  Synthetic oligonucleotide

SEQ ID NO: 643070 - DNA, 56 bp, Artificial; identical to SEQ ID NO: 224224
  Synthetic oligonucleotide

SEQ ID NO: 643071 - DNA, 57 bp, Artificial; identical to SEQ ID NO: 178913
  Synthetic oligonucleotide

SEQ ID NO: 643072 - DNA, 55 bp, Artificial; identical to SEQ ID NO: 239910
  Synthetic oligonucleotide

SEQ ID NO: 643073 - DNA, 54 bp, Artificial; identical to SEQ ID NO: 170013
  Synthetic oligonucleotide

SEQ ID NO: 643074 - DNA, 57 bp, Artificial; identical to SEQ ID NO: 208274
  Synthetic oligonucleotide

SEQ ID NO: 643075 - DNA, 55 bp, Artificial; identical to SEQ ID NO: 198751
  Synthetic oligonucleotide

SEQ ID NO: 643076 - DNA, 55 bp, Artificial; identical to SEQ ID NO: 182682
  Synthetic oligonucleotide

SEQ ID NO: 643077 - DNA, 55 bp, Artificial; identical to SEQ ID NO: 182681
  Synthetic oligonucleotide

SEQ ID NO: 643078 - DNA, 60 bp, Artificial; identical to SEQ ID NO: 247543
  Synthetic oligonucleotide

SEQ ID NO: 643079 - DNA, 60 bp, Artificial; identical to SEQ ID NO: 153354
  Synthetic oligonucleotide

SEQ ID NO: 643080 - DNA, 55 bp, Artificial; identical to SEQ ID NO: 219642
  Synthetic oligonucleotide

SEQ ID NO: 643081 - DNA, 55 bp, Artificial; identical to SEQ ID NO: 151917
  Synthetic oligonucleotide

SEQ ID NO: 643082 - DNA, 51 bp, Artificial; identical to SEQ ID NO: 213050
  Synthetic oligonucleotide

SEQ ID NO: 643083 - DNA, 55 bp, Artificial; identical to SEQ ID NO: 248900
  Synthetic oligonucleotide

SEQ ID NO: 643084 - DNA, 59 bp, Artificial; identical to SEQ ID NO: 238671
  Synthetic oligonucleotide

SEQ ID NO: 643085 - DNA, 53 bp, Artificial; identical to SEQ ID NO: 185200
  Synthetic oligonucleotide

SEQ ID NO: 643086 - DNA, 55 bp, Artificial; identical to SEQ ID NO: 152303
  Synthetic oligonucleotide

SEQ ID NO: 643087 - DNA, 53 bp, Artificial; identical to SEQ ID NO: 209614
  Synthetic oligonucleotide

SEQ ID NO: 643088 - DNA, 55 bp, Artificial; identical to SEQ ID NO: 173649
  Synthetic oligonucleotide

SEQ ID NO: 643089 - DNA, 55 bp, Artificial; identical to SEQ ID NO: 244266
  Synthetic oligonucleotide

SEQ ID NO: 643090 - DNA, 55 bp, Artificial; identical to SEQ ID NO: 190941
  Synthetic oligonucleotide

SEQ ID NO: 643091 - DNA, 56 bp, Artificial; identical to SEQ ID NO: 208091
  Synthetic oligonucleotide

SEQ ID NO: 643092 - DNA, 59 bp, Artificial; identical to SEQ ID NO: 190520
  Synthetic oligonucleotide

SEQ ID NO: 643093 - DNA, 55 bp, Artificial; identical to SEQ ID NO: 189007
  Synthetic oligonucleotide

SEQ ID NO: 643094 - DNA, 55 bp, Artificial; identical to SEQ ID NO: 217683
  Synthetic oligonucleotide

SEQ ID NO: 643095 - DNA, 55 bp, Artificial; identical to SEQ ID NO: 168458
  Synthetic oligonucleotide

SEQ ID NO: 643096 - DNA, 55 bp, Artificial; identical to SEQ ID NO: 221430
  Synthetic oligonucleotide

SEQ ID NO: 643097 - DNA, 55 bp, Artificial; identical to SEQ ID NO: 217684
  Synthetic oligonucleotide

SEQ ID NO: 643098 - DNA, 56 bp, Artificial; identical to SEQ ID NO: 142694
  Synthetic oligonucleotide

SEQ ID NO: 643099 - DNA, 60 bp, Artificial; identical to SEQ ID NO: 233867
  Synthetic oligonucleotide

SEQ ID NO: 643100 - DNA, 54 bp, Artificial; identical to SEQ ID NO: 223544
  Synthetic oligonucleotide

SEQ ID NO: 643101 - DNA, 55 bp, Artificial; identical to SEQ ID NO: 154515
  Synthetic oligonucleotide

SEQ ID NO: 643102 - DNA, 55 bp, Artificial; identical to SEQ ID NO: 151916
  Synthetic oligonucleotide

SEQ ID NO: 643103 - DNA, 55 bp, Artificial; identical to SEQ ID NO: 197177
  Synthetic oligonucleotide

SEQ ID NO: 643104 - DNA, 55 bp, Artificial; identical to SEQ ID NO: 190940
  Synthetic oligonucleotide

SEQ ID NO: 643105 - DNA, 55 bp, Artificial; identical to SEQ ID NO: 155904
  Synthetic oligonucleotide

SEQ ID NO: 643106 - DNA, 50 bp, Artificial; identical to SEQ ID NO: 233908
  Synthetic oligonucleotide

SEQ ID NO: 643107 - DNA, 54 bp, Artificial; identical to SEQ ID NO: 149119
  Synthetic oligonucleotide

SEQ ID NO: 643108 - DNA, 55 bp, Artificial; identical to SEQ ID NO: 205425
  Synthetic oligonucleotide

SEQ ID NO: 643109 - DNA, 55 bp, Artificial; identical to SEQ ID NO: 182633
  Synthetic oligonucleotide

SEQ ID NO: 643110 - DNA, 55 bp, Artificial; identical to SEQ ID NO: 155905
  Synthetic oligonucleotide

SEQ ID NO: 643111 - DNA, 55 bp, Artificial; identical to SEQ ID NO: 142241
  Synthetic oligonucleotide

SEQ ID NO: 643112 - DNA, 51 bp, Artificial; identical to SEQ ID NO: 195239
  Synthetic oligonucleotide

SEQ ID NO: 643113 - DNA, 55 bp, Artificial; identical to SEQ ID NO: 155906
  Synthetic oligonucleotide

SEQ ID NO: 643114 - DNA, 55 bp, Artificial; identical to SEQ ID NO: 182632
  Synthetic oligonucleotide

SEQ ID NO: 643115 - DNA, 55 bp, Artificial; identical to SEQ ID NO: 238715
  Synthetic oligonucleotide

SEQ ID NO: 643116 - DNA, 55 bp, Artificial; identical to SEQ ID NO: 195195
  Synthetic oligonucleotide

SEQ ID NO: 643117 - DNA, 60 bp, Artificial; identical to SEQ ID NO: 224209
  Synthetic oligonucleotide

SEQ ID NO: 643118 - DNA, 55 bp, Artificial; identical to SEQ ID NO: 182630
  Synthetic oligonucleotide

SEQ ID NO: 643119 - DNA, 50 bp, Artificial; identical to SEQ ID NO: 188589
  Synthetic oligonucleotide

SEQ ID NO: 643120 - DNA, 55 bp, Artificial; identical to SEQ ID NO: 244848
  Synthetic oligonucleotide

SEQ ID NO: 643121 - DNA, 52 bp, Artificial; identical to SEQ ID NO: 152427
  Synthetic oligonucleotide

SEQ ID NO: 643122 - DNA, 53 bp, Artificial; identical to SEQ ID NO: 185710
  Synthetic oligonucleotide

SEQ ID NO: 643123 - DNA, 51 bp, Artificial; identical to SEQ ID NO: 187090
  Synthetic oligonucleotide

SEQ ID NO: 643124 - DNA, 55 bp, Artificial; identical to SEQ ID NO: 155907
  Synthetic oligonucleotide

SEQ ID NO: 643125 - DNA, 53 bp, Artificial; identical to SEQ ID NO: 178956
  Synthetic oligonucleotide

SEQ ID NO: 643126 - DNA, 52 bp, Artificial; identical to SEQ ID NO: 225257
  Synthetic oligonucleotide

SEQ ID NO: 643127 - DNA, 55 bp, Artificial; identical to SEQ ID NO: 225104
  Synthetic oligonucleotide

SEQ ID NO: 643128 - DNA, 55 bp, Artificial; identical to SEQ ID NO: 155908
  Synthetic oligonucleotide

SEQ ID NO: 643129 - DNA, 55 bp, Artificial; identical to SEQ ID NO: 205427
  Synthetic oligonucleotide

SEQ ID NO: 643130 - DNA, 55 bp, Artificial; identical to SEQ ID NO: 155909
  Synthetic oligonucleotide

SEQ ID NO: 643131 - DNA, 60 bp, Artificial; identical to SEQ ID NO: 168556
  Synthetic oligonucleotide

SEQ ID NO: 643132 - DNA, 54 bp, Artificial; identical to SEQ ID NO: 212480
  Synthetic oligonucleotide

SEQ ID NO: 643133 - DNA, 51 bp, Artificial; identical to SEQ ID NO: 200164
  Synthetic oligonucleotide

SEQ ID NO: 643134 - DNA, 60 bp, Artificial; identical to SEQ ID NO: 237803
  Synthetic oligonucleotide

SEQ ID NO: 643135 - DNA, 52 bp, Artificial; identical to SEQ ID NO: 246496
  Synthetic oligonucleotide

SEQ ID NO: 643136 - DNA, 55 bp, Artificial; identical to SEQ ID NO: 187437
  Synthetic oligonucleotide

SEQ ID NO: 643137 - DNA, 55 bp, Artificial; identical to SEQ ID NO: 240022
  Synthetic oligonucleotide

SEQ ID NO: 643138 - DNA, 55 bp, Artificial; identical to SEQ ID NO: 249994
  Synthetic oligonucleotide

SEQ ID NO: 643139 - DNA, 55 bp, Artificial; identical to SEQ ID NO: 193569
  Synthetic oligonucleotide

SEQ ID NO: 643140 - DNA, 55 bp, Artificial; identical to SEQ ID NO: 244853
  Synthetic oligonucleotide

SEQ ID NO: 643141 - DNA, 56 bp, Artificial; identical to SEQ ID NO: 147324
  Synthetic oligonucleotide

SEQ ID NO: 643142 - DNA, 53 bp, Artificial; identical to SEQ ID NO: 207737
  Synthetic oligonucleotide

SEQ ID NO: 643143 - DNA, 55 bp, Artificial; identical to SEQ ID NO: 161152
  Synthetic oligonucleotide

SEQ ID NO: 643144 - DNA, 54 bp, Artificial; identical to SEQ ID NO: 219674
  Synthetic oligonucleotide

SEQ ID NO: 643145 - DNA, 60 bp, Artificial; identical to SEQ ID NO: 257445
  Synthetic oligonucleotide

SEQ ID NO: 643146 - DNA, 55 bp, Artificial; identical to SEQ ID NO: 244268
  Synthetic oligonucleotide

SEQ ID NO: 643147 - DNA, 54 bp, Artificial; identical to SEQ ID NO: 200706
  Synthetic oligonucleotide

SEQ ID NO: 643148 - DNA, 55 bp, Artificial; identical to SEQ ID NO: 147928
  Synthetic oligonucleotide

SEQ ID NO: 643149 - DNA, 55 bp, Artificial; identical to SEQ ID NO: 153263
  Synthetic oligonucleotide

SEQ ID NO: 643150 - DNA, 59 bp, Artificial; identical to SEQ ID NO: 150735
  Synthetic oligonucleotide

SEQ ID NO: 643151 - DNA, 55 bp, Artificial; identical to SEQ ID NO: 146605
  Synthetic oligonucleotide

SEQ ID NO: 643152 - DNA, 60 bp, Artificial; identical to SEQ ID NO: 212482
  Synthetic oligonucleotide

SEQ ID NO: 643153 - DNA, 55 bp, Artificial; identical to SEQ ID NO: 166720
  Synthetic oligonucleotide

SEQ ID NO: 643154 - DNA, 60 bp, Artificial; identical to SEQ ID NO: 217063
  Synthetic oligonucleotide

SEQ ID NO: 643155 - DNA, 55 bp, Artificial; identical to SEQ ID NO: 188240
  Synthetic oligonucleotide

SEQ ID NO: 643156 - DNA, 55 bp, Artificial; identical to SEQ ID NO: 244805
  Synthetic oligonucleotide

SEQ ID NO: 643157 - DNA, 60 bp, Artificial; identical to SEQ ID NO: 249063
  Synthetic oligonucleotide

SEQ ID NO: 643158 - DNA, 57 bp, Artificial; identical to SEQ ID NO: 212521
  Synthetic oligonucleotide

SEQ ID NO: 643159 - DNA, 60 bp, Artificial; identical to SEQ ID NO: 178953
  Synthetic oligonucleotide

SEQ ID NO: 643160 - DNA, 55 bp, Artificial; identical to SEQ ID NO: 198749
  Synthetic oligonucleotide

SEQ ID NO: 643161 - DNA, 55 bp, Artificial; identical to SEQ ID NO: 147929
  Synthetic oligonucleotide

SEQ ID NO: 643162 - DNA, 55 bp, Artificial; identical to SEQ ID NO: 223461
  Synthetic oligonucleotide

SEQ ID NO: 643163 - DNA, 59 bp, Artificial; identical to SEQ ID NO: 179485
  Synthetic oligonucleotide

SEQ ID NO: 643164 - DNA, 51 bp, Artificial; identical to SEQ ID NO: 145081
  Synthetic oligonucleotide

SEQ ID NO: 643165 - DNA, 51 bp, Artificial; identical to SEQ ID NO: 161898
  Synthetic oligonucleotide

SEQ ID NO: 643166 - DNA, 59 bp, Artificial; identical to SEQ ID NO: 170165
  Synthetic oligonucleotide

SEQ ID NO: 643167 - DNA, 55 bp, Artificial; identical to SEQ ID NO: 166344
  Synthetic oligonucleotide

SEQ ID NO: 643168 - DNA, 58 bp, Artificial; identical to SEQ ID NO: 147166
  Synthetic oligonucleotide

SEQ ID NO: 643169 - DNA, 54 bp, Artificial; identical to SEQ ID NO: 203884
  Synthetic oligonucleotide

SEQ ID NO: 643170 - DNA, 55 bp, Artificial; identical to SEQ ID NO: 256453
  Synthetic oligonucleotide

SEQ ID NO: 643171 - DNA, 57 bp, Artificial; identical to SEQ ID NO: 242031
  Synthetic oligonucleotide

SEQ ID NO: 643172 - DNA, 55 bp, Artificial; identical to SEQ ID NO: 248902
  Synthetic oligonucleotide

SEQ ID NO: 643173 - DNA, 55 bp, Artificial; identical to SEQ ID NO: 182624
  Synthetic oligonucleotide

SEQ ID NO: 643174 - DNA, 60 bp, Artificial; identical to SEQ ID NO: 222596
  Synthetic oligonucleotide

SEQ ID NO: 643175 - DNA, 55 bp, Artificial; identical to SEQ ID NO: 166719
  Synthetic oligonucleotide

SEQ ID NO: 643176 - DNA, 55 bp, Artificial; identical to SEQ ID NO: 190317
  Synthetic oligonucleotide

SEQ ID NO: 643177 - DNA, 54 bp, Artificial; identical to SEQ ID NO: 185175
  Synthetic oligonucleotide

SEQ ID NO: 643178 - DNA, 55 bp, Artificial; identical to SEQ ID NO: 151912
  Synthetic oligonucleotide

SEQ ID NO: 643179 - DNA, 51 bp, Artificial; identical to SEQ ID NO: 209069
  Synthetic oligonucleotide

SEQ ID NO: 643180 - DNA, 52 bp, Artificial; identical to SEQ ID NO: 186295
  Synthetic oligonucleotide

SEQ ID NO: 643181 - DNA, 50 bp, Artificial; identical to SEQ ID NO: 233907
  Synthetic oligonucleotide

SEQ ID NO: 643182 - DNA, 60 bp, Artificial; identical to SEQ ID NO: 243646
  Synthetic oligonucleotide

SEQ ID NO: 643183 - DNA, 55 bp, Artificial; identical to SEQ ID NO: 207242
  Synthetic oligonucleotide

SEQ ID NO: 643184 - DNA, 55 bp, Artificial; identical to SEQ ID NO: 207240
  Synthetic oligonucleotide

SEQ ID NO: 643185 - DNA, 55 bp, Artificial; identical to SEQ ID NO: 193984
  Synthetic oligonucleotide

SEQ ID NO: 643186 - DNA, 55 bp, Artificial; identical to SEQ ID NO: 244806
  Synthetic oligonucleotide

SEQ ID NO: 643187 - DNA, 55 bp, Artificial; identical to SEQ ID NO: 265637
  Synthetic oligonucleotide

SEQ ID NO: 643188 - DNA, 54 bp, Artificial; identical to SEQ ID NO: 167056
  Synthetic oligonucleotide

SEQ ID NO: 643189 - DNA, 55 bp, Artificial; identical to SEQ ID NO: 166718
  Synthetic oligonucleotide

SEQ ID NO: 643190 - DNA, 57 bp, Artificial; identical to SEQ ID NO: 248605
  Synthetic oligonucleotide

SEQ ID NO: 643191 - DNA, 59 bp, Artificial; identical to SEQ ID NO: 156853
  Synthetic oligonucleotide

SEQ ID NO: 643192 - DNA, 58 bp, Artificial; identical to SEQ ID NO: 257499
  Synthetic oligonucleotide

SEQ ID NO: 643193 - DNA, 55 bp, Artificial; identical to SEQ ID NO: 171603
  Synthetic oligonucleotide

SEQ ID NO: 643194 - DNA, 53 bp, Artificial; identical to SEQ ID NO: 149347
  Synthetic oligonucleotide

SEQ ID NO: 643195 - DNA, 58 bp, Artificial; identical to SEQ ID NO: 179620
  Synthetic oligonucleotide

SEQ ID NO: 643196 - DNA, 52 bp, Artificial; identical to SEQ ID NO: 261885
  Synthetic oligonucleotide

SEQ ID NO: 643197 - DNA, 55 bp, Artificial; identical to SEQ ID NO: 223457
  Synthetic oligonucleotide

SEQ ID NO: 643198 - DNA, 53 bp, Artificial; identical to SEQ ID NO: 255335
  Synthetic oligonucleotide

SEQ ID NO: 643199 - DNA, 51 bp, Artificial; identical to SEQ ID NO: 188548
  Synthetic oligonucleotide

SEQ ID NO: 643200 - DNA, 59 bp, Artificial; identical to SEQ ID NO: 148837
  Synthetic oligonucleotide

SEQ ID NO: 643201 - DNA, 55 bp, Artificial; identical to SEQ ID NO: 182618
  Synthetic oligonucleotide

SEQ ID NO: 643202 - DNA, 59 bp, Artificial; identical to SEQ ID NO: 179454
  Synthetic oligonucleotide

SEQ ID NO: 643203 - DNA, 51 bp, Artificial; identical to SEQ ID NO: 149813
  Synthetic oligonucleotide

SEQ ID NO: 643204 - DNA, 55 bp, Artificial; identical to SEQ ID NO: 155446
  Synthetic oligonucleotide

SEQ ID NO: 643205 - DNA, 55 bp, Artificial; identical to SEQ ID NO: 147930
  Synthetic oligonucleotide

SEQ ID NO: 643206 - DNA, 54 bp, Artificial; identical to SEQ ID NO: 243647
  Synthetic oligonucleotide

SEQ ID NO: 643207 - DNA, 54 bp, Artificial; identical to SEQ ID NO: 191165
  Synthetic oligonucleotide

SEQ ID NO: 643208 - DNA, 55 bp, Artificial; identical to SEQ ID NO: 166716
  Synthetic oligonucleotide

SEQ ID NO: 643209 - DNA, 60 bp, Artificial; identical to SEQ ID NO: 192189
  Synthetic oligonucleotide

SEQ ID NO: 643210 - DNA, 55 bp, Artificial; identical to SEQ ID NO: 155913
  Synthetic oligonucleotide

SEQ ID NO: 643211 - DNA, 51 bp, Artificial; identical to SEQ ID NO: 169085
  Synthetic oligonucleotide

SEQ ID NO: 643212 - DNA, 51 bp, Artificial; identical to SEQ ID NO: 165227
  Synthetic oligonucleotide

SEQ ID NO: 643213 - DNA, 55 bp, Artificial; identical to SEQ ID NO: 153108
  Synthetic oligonucleotide

SEQ ID NO: 643214 - DNA, 60 bp, Artificial; identical to SEQ ID NO: 178945
  Synthetic oligonucleotide

SEQ ID NO: 643215 - DNA, 51 bp, Artificial; identical to SEQ ID NO: 243360
  Synthetic oligonucleotide

SEQ ID NO: 643216 - DNA, 55 bp, Artificial; identical to SEQ ID NO: 244271
  Synthetic oligonucleotide

SEQ ID NO: 643217 - DNA, 55 bp, Artificial; identical to SEQ ID NO: 217685
  Synthetic oligonucleotide

SEQ ID NO: 643218 - DNA, 59 bp, Artificial; identical to SEQ ID NO: 171695
  Synthetic oligonucleotide

SEQ ID NO: 643219 - DNA, 58 bp, Artificial; identical to SEQ ID NO: 201133
  Synthetic oligonucleotide

SEQ ID NO: 643220 - DNA, 55 bp, Artificial; identical to SEQ ID NO: 155914
  Synthetic oligonucleotide

SEQ ID NO: 643221 - DNA, 51 bp, Artificial; identical to SEQ ID NO: 161393
  Synthetic oligonucleotide

SEQ ID NO: 643222 - DNA, 55 bp, Artificial; identical to SEQ ID NO: 257711
  Synthetic oligonucleotide

SEQ ID NO: 643223 - DNA, 54 bp, Artificial; identical to SEQ ID NO: 222693
  Synthetic oligonucleotide

SEQ ID NO: 643224 - DNA, 55 bp, Artificial; identical to SEQ ID NO: 191946
  Synthetic oligonucleotide

SEQ ID NO: 643225 - DNA, 54 bp, Artificial; identical to SEQ ID NO: 185065
  Synthetic oligonucleotide

SEQ ID NO: 643226 - DNA, 55 bp, Artificial; identical to SEQ ID NO: 194489
  Synthetic oligonucleotide

SEQ ID NO: 643227 - DNA, 55 bp, Artificial; identical to SEQ ID NO: 209397
  Synthetic oligonucleotide

SEQ ID NO: 643228 - DNA, 55 bp, Artificial; identical to SEQ ID NO: 193210
  Synthetic oligonucleotide

SEQ ID NO: 643229 - DNA, 55 bp, Artificial; identical to SEQ ID NO: 257712
  Synthetic oligonucleotide

SEQ ID NO: 643230 - DNA, 55 bp, Artificial; identical to SEQ ID NO: 188239
  Synthetic oligonucleotide

SEQ ID NO: 643231 - DNA, 55 bp, Artificial; identical to SEQ ID NO: 238312
  Synthetic oligonucleotide

SEQ ID NO: 643232 - DNA, 55 bp, Artificial; identical to SEQ ID NO: 223448
  Synthetic oligonucleotide

SEQ ID NO: 643233 - DNA, 55 bp, Artificial; identical to SEQ ID NO: 197125
  Synthetic oligonucleotide

SEQ ID NO: 643234 - DNA, 54 bp, Artificial; identical to SEQ ID NO: 149117
  Synthetic oligonucleotide

SEQ ID NO: 643235 - DNA, 59 bp, Artificial; identical to SEQ ID NO: 202881
  Synthetic oligonucleotide

SEQ ID NO: 643236 - DNA, 55 bp, Artificial; identical to SEQ ID NO: 147932
  Synthetic oligonucleotide

SEQ ID NO: 643237 - DNA, 50 bp, Artificial; identical to SEQ ID NO: 241727
  Synthetic oligonucleotide

SEQ ID NO: 643238 - DNA, 55 bp, Artificial; identical to SEQ ID NO: 168451
  Synthetic oligonucleotide

SEQ ID NO: 643239 - DNA, 54 bp, Artificial; identical to SEQ ID NO: 208671
  Synthetic oligonucleotide

SEQ ID NO: 643240 - DNA, 60 bp, Artificial; identical to SEQ ID NO: 242053
  Synthetic oligonucleotide

SEQ ID NO: 643241 - DNA, 50 bp, Artificial; identical to SEQ ID NO: 210673
  Synthetic oligonucleotide

SEQ ID NO: 643242 - DNA, 52 bp, Artificial; identical to SEQ ID NO: 240955
  Synthetic oligonucleotide

SEQ ID NO: 643243 - DNA, 55 bp, Artificial; identical to SEQ ID NO: 174601
  Synthetic oligonucleotide

SEQ ID NO: 643244 - DNA, 53 bp, Artificial; identical to SEQ ID NO: 149350
  Synthetic oligonucleotide

SEQ ID NO: 643245 - DNA, 55 bp, Artificial; identical to SEQ ID NO: 242064
  Synthetic oligonucleotide

SEQ ID NO: 643246 - DNA, 55 bp, Artificial; identical to SEQ ID NO: 171760
  Synthetic oligonucleotide

SEQ ID NO: 643247 - DNA, 59 bp, Artificial; identical to SEQ ID NO: 209138
  Synthetic oligonucleotide

SEQ ID NO: 643248 - DNA, 51 bp, Artificial; identical to SEQ ID NO: 186641
  Synthetic oligonucleotide

SEQ ID NO: 643249 - DNA, 60 bp, Artificial; identical to SEQ ID NO: 203536
  Synthetic oligonucleotide

SEQ ID NO: 643250 - DNA, 55 bp, Artificial; identical to SEQ ID NO: 190938
  Synthetic oligonucleotide

SEQ ID NO: 643251 - DNA, 59 bp, Artificial; identical to SEQ ID NO: 178941
  Synthetic oligonucleotide

SEQ ID NO: 643252 - DNA, 54 bp, Artificial; identical to SEQ ID NO: 244274
  Synthetic oligonucleotide

SEQ ID NO: 643253 - DNA, 55 bp, Artificial; identical to SEQ ID NO: 239746
  Synthetic oligonucleotide

SEQ ID NO: 643254 - DNA, 60 bp, Artificial; identical to SEQ ID NO: 148860
  Synthetic oligonucleotide

SEQ ID NO: 643255 - DNA, 55 bp, Artificial; identical to SEQ ID NO: 261842
  Synthetic oligonucleotide

SEQ ID NO: 643256 - DNA, 55 bp, Artificial; identical to SEQ ID NO: 218870
  Synthetic oligonucleotide

SEQ ID NO: 643257 - DNA, 55 bp, Artificial; identical to SEQ ID NO: 154517
  Synthetic oligonucleotide

SEQ ID NO: 643258 - DNA, 55 bp, Artificial; identical to SEQ ID NO: 182653
  Synthetic oligonucleotide

SEQ ID NO: 643259 - DNA, 55 bp, Artificial; identical to SEQ ID NO: 147933
  Synthetic oligonucleotide

SEQ ID NO: 643260 - DNA, 55 bp, Artificial; identical to SEQ ID NO: 182652
  Synthetic oligonucleotide

SEQ ID NO: 643261 - DNA, 50 bp, Artificial; identical to SEQ ID NO: 263532
  Synthetic oligonucleotide

SEQ ID NO: 643262 - DNA, 55 bp, Artificial; identical to SEQ ID NO: 147934
  Synthetic oligonucleotide

SEQ ID NO: 643263 - DNA, 54 bp, Artificial; identical to SEQ ID NO: 153572
  Synthetic oligonucleotide

SEQ ID NO: 643264 - DNA, 60 bp, Artificial; identical to SEQ ID NO: 242075
  Synthetic oligonucleotide

SEQ ID NO: 643265 - DNA, 52 bp, Artificial; identical to SEQ ID NO: 199928
  Synthetic oligonucleotide

SEQ ID NO: 643266 - DNA, 58 bp, Artificial; identical to SEQ ID NO: 225533
  Synthetic oligonucleotide

SEQ ID NO: 643267 - DNA, 54 bp, Artificial; identical to SEQ ID NO: 168823
  Synthetic oligonucleotide

SEQ ID NO: 643268 - DNA, 56 bp, Artificial; identical to SEQ ID NO: 197892
  Synthetic oligonucleotide

SEQ ID NO: 643269 - DNA, 55 bp, Artificial; identical to SEQ ID NO: 147936
  Synthetic oligonucleotide

SEQ ID NO: 643270 - DNA, 55 bp, Artificial; identical to SEQ ID NO: 248907
  Synthetic oligonucleotide

SEQ ID NO: 643271 - DNA, 55 bp, Artificial; identical to SEQ ID NO: 210930
  Synthetic oligonucleotide

SEQ ID NO: 643272 - DNA, 60 bp, Artificial; identical to SEQ ID NO: 187191
  Synthetic oligonucleotide

SEQ ID NO: 643273 - DNA, 55 bp, Artificial; identical to SEQ ID NO: 212667
  Synthetic oligonucleotide

SEQ ID NO: 643274 - DNA, 55 bp, Artificial; identical to SEQ ID NO: 182646
  Synthetic oligonucleotide

SEQ ID NO: 643275 - DNA, 51 bp, Artificial; identical to SEQ ID NO: 186634
  Synthetic oligonucleotide

SEQ ID NO: 643276 - DNA, 51 bp, Artificial; identical to SEQ ID NO: 152484
  Synthetic oligonucleotide

SEQ ID NO: 643277 - DNA, 55 bp, Artificial; identical to SEQ ID NO: 244870
  Synthetic oligonucleotide

SEQ ID NO: 643278 - DNA, 56 bp, Artificial; identical to SEQ ID NO: 266089
  Synthetic oligonucleotide

SEQ ID NO: 643279 - DNA, 52 bp, Artificial; identical to SEQ ID NO: 186259
  Synthetic oligonucleotide

SEQ ID NO: 643280 - DNA, 57 bp, Artificial; identical to SEQ ID NO: 262755
  Synthetic oligonucleotide

SEQ ID NO: 643281 - DNA, 55 bp, Artificial; identical to SEQ ID NO: 147938
  Synthetic oligonucleotide

SEQ ID NO: 643282 - DNA, 55 bp, Artificial; identical to SEQ ID NO: 198745
  Synthetic oligonucleotide

SEQ ID NO: 643283 - DNA, 59 bp, Artificial; identical to SEQ ID NO: 209068
  Synthetic oligonucleotide

SEQ ID NO: 643284 - DNA, 55 bp, Artificial; identical to SEQ ID NO: 182645
  Synthetic oligonucleotide

SEQ ID NO: 643285 - DNA, 55 bp, Artificial; identical to SEQ ID NO: 168444
  Synthetic oligonucleotide

SEQ ID NO: 643286 - DNA, 60 bp, Artificial; identical to SEQ ID NO: 200704
  Synthetic oligonucleotide

SEQ ID NO: 643287 - DNA, 50 bp, Artificial; identical to SEQ ID NO: 196792
  Synthetic oligonucleotide

SEQ ID NO: 643288 - DNA, 52 bp, Artificial; identical to SEQ ID NO: 191949
  Synthetic oligonucleotide

SEQ ID NO: 643289 - DNA, 58 bp, Artificial; identical to SEQ ID NO: 243963
  Synthetic oligonucleotide

SEQ ID NO: 643290 - DNA, 55 bp, Artificial; identical to SEQ ID NO: 198744
  Synthetic oligonucleotide

SEQ ID NO: 643291 - DNA, 50 bp, Artificial; identical to SEQ ID NO: 209787
  Synthetic oligonucleotide

SEQ ID NO: 643292 - DNA, 52 bp, Artificial; identical to SEQ ID NO: 178673
  Synthetic oligonucleotide

SEQ ID NO: 643293 - DNA, 54 bp, Artificial; identical to SEQ ID NO: 185078
  Synthetic oligonucleotide

SEQ ID NO: 643294 - DNA, 60 bp, Artificial; identical to SEQ ID NO: 141780
  Synthetic oligonucleotide

SEQ ID NO: 643295 - DNA, 55 bp, Artificial; identical to SEQ ID NO: 244278
  Synthetic oligonucleotide

SEQ ID NO: 643296 - DNA, 55 bp, Artificial; identical to SEQ ID NO: 153158
  Synthetic oligonucleotide

SEQ ID NO: 643297 - DNA, 60 bp, Artificial; identical to SEQ ID NO: 210764
  Synthetic oligonucleotide

SEQ ID NO: 643298 - DNA, 55 bp, Artificial; identical to SEQ ID NO: 210973
  Synthetic oligonucleotide

SEQ ID NO: 643299 - DNA, 55 bp, Artificial; identical to SEQ ID NO: 244279
  Synthetic oligonucleotide

SEQ ID NO: 643300 - DNA, 55 bp, Artificial; identical to SEQ ID NO: 249427
  Synthetic oligonucleotide

SEQ ID NO: 643301 - DNA, 55 bp, Artificial; identical to SEQ ID NO: 166909
  Synthetic oligonucleotide

SEQ ID NO: 643302 - DNA, 55 bp, Artificial; identical to SEQ ID NO: 194494
  Synthetic oligonucleotide

SEQ ID NO: 643303 - DNA, 60 bp, Artificial; identical to SEQ ID NO: 200703
  Synthetic oligonucleotide

SEQ ID NO: 643304 - DNA, 55 bp, Artificial; identical to SEQ ID NO: 252704
  Synthetic oligonucleotide

SEQ ID NO: 643305 - DNA, 60 bp, Artificial; identical to SEQ ID NO: 168500
  Synthetic oligonucleotide

SEQ ID NO: 643306 - DNA, 58 bp, Artificial; identical to SEQ ID NO: 197548
  Synthetic oligonucleotide

SEQ ID NO: 643307 - DNA, 52 bp, Artificial; identical to SEQ ID NO: 253726
  Synthetic oligonucleotide

SEQ ID NO: 643308 - DNA, 52 bp, Artificial; identical to SEQ ID NO: 141734
  Synthetic oligonucleotide

SEQ ID NO: 643309 - DNA, 55 bp, Artificial; identical to SEQ ID NO: 210966
  Synthetic oligonucleotide

SEQ ID NO: 643310 - DNA, 60 bp, Artificial; identical to SEQ ID NO: 200701
  Synthetic oligonucleotide

SEQ ID NO: 643311 - DNA, 55 bp, Artificial; identical to SEQ ID NO: 168439
  Synthetic oligonucleotide

SEQ ID NO: 643312 - DNA, 55 bp, Artificial; identical to SEQ ID NO: 142244
  Synthetic oligonucleotide

SEQ ID NO: 643313 - DNA, 55 bp, Artificial; identical to SEQ ID NO: 208544
  Synthetic oligonucleotide

SEQ ID NO: 643314 - DNA, 58 bp, Artificial; identical to SEQ ID NO: 178671
  Synthetic oligonucleotide

SEQ ID NO: 643315 - DNA, 55 bp, Artificial; identical to SEQ ID NO: 238347
  Synthetic oligonucleotide

SEQ ID NO: 643316 - DNA, 58 bp, Artificial; identical to SEQ ID NO: 148882
  Synthetic oligonucleotide

SEQ ID NO: 643317 - DNA, 55 bp, Artificial; identical to SEQ ID NO: 239863
  Synthetic oligonucleotide

SEQ ID NO: 643318 - DNA, 55 bp, Artificial; identical to SEQ ID NO: 220606
  Synthetic oligonucleotide

SEQ ID NO: 643319 - DNA, 55 bp, Artificial; identical to SEQ ID NO: 207272
  Synthetic oligonucleotide

SEQ ID NO: 643320 - DNA, 55 bp, Artificial; identical to SEQ ID NO: 194495
  Synthetic oligonucleotide

SEQ ID NO: 643321 - DNA, 52 bp, Artificial; identical to SEQ ID NO: 242455
  Synthetic oligonucleotide

SEQ ID NO: 643322 - DNA, 55 bp, Artificial; identical to SEQ ID NO: 155922
  Synthetic oligonucleotide

SEQ ID NO: 643323 - DNA, 57 bp, Artificial; identical to SEQ ID NO: 160508
  Synthetic oligonucleotide

SEQ ID NO: 643324 - DNA, 55 bp, Artificial; identical to SEQ ID NO: 160018
  Synthetic oligonucleotide

SEQ ID NO: 643325 - DNA, 55 bp, Artificial; identical to SEQ ID NO: 147939
  Synthetic oligonucleotide

SEQ ID NO: 643326 - DNA, 55 bp, Artificial; identical to SEQ ID NO: 182642
  Synthetic oligonucleotide

SEQ ID NO: 643327 - DNA, 55 bp, Artificial; identical to SEQ ID NO: 244280
  Synthetic oligonucleotide

SEQ ID NO: 643328 - DNA, 55 bp, Artificial; identical to SEQ ID NO: 161150
  Synthetic oligonucleotide

SEQ ID NO: 643329 - DNA, 51 bp, Artificial; identical to SEQ ID NO: 208820
  Synthetic oligonucleotide

SEQ ID NO: 643330 - DNA, 51 bp, Artificial; identical to SEQ ID NO: 157724
  Synthetic oligonucleotide

SEQ ID NO: 643331 - DNA, 60 bp, Artificial; identical to SEQ ID NO: 257444
  Synthetic oligonucleotide

SEQ ID NO: 643332 - DNA, 55 bp, Artificial; identical to SEQ ID NO: 212696
  Synthetic oligonucleotide

SEQ ID NO: 643333 - DNA, 54 bp, Artificial; identical to SEQ ID NO: 199547
  Synthetic oligonucleotide

SEQ ID NO: 643334 - DNA, 55 bp, Artificial; identical to SEQ ID NO: 161149
  Synthetic oligonucleotide

SEQ ID NO: 643335 - DNA, 60 bp, Artificial; identical to SEQ ID NO: 252741
  Synthetic oligonucleotide

SEQ ID NO: 643336 - DNA, 55 bp, Artificial; identical to SEQ ID NO: 203833
  Synthetic oligonucleotide

SEQ ID NO: 643337 - DNA, 55 bp, Artificial; identical to SEQ ID NO: 202142
  Synthetic oligonucleotide

SEQ ID NO: 643338 - DNA, 55 bp, Artificial; identical to SEQ ID NO: 146613
  Synthetic oligonucleotide

SEQ ID NO: 643339 - DNA, 55 bp, Artificial; identical to SEQ ID NO: 245798
  Synthetic oligonucleotide

SEQ ID NO: 643340 - DNA, 55 bp, Artificial; identical to SEQ ID NO: 182639
  Synthetic oligonucleotide

SEQ ID NO: 643341 - DNA, 55 bp, Artificial; identical to SEQ ID NO: 236455
  Synthetic oligonucleotide

SEQ ID NO: 643342 - DNA, 55 bp, Artificial; identical to SEQ ID NO: 198743
  Synthetic oligonucleotide

SEQ ID NO: 643343 - DNA, 55 bp, Artificial; identical to SEQ ID NO: 244873
  Synthetic oligonucleotide

SEQ ID NO: 643344 - DNA, 60 bp, Artificial; identical to SEQ ID NO: 206807
  Synthetic oligonucleotide

SEQ ID NO: 643345 - DNA, 57 bp, Artificial; identical to SEQ ID NO: 148904
  Synthetic oligonucleotide

SEQ ID NO: 643346 - DNA, 59 bp, Artificial; identical to SEQ ID NO: 159801
  Synthetic oligonucleotide

SEQ ID NO: 643347 - DNA, 55 bp, Artificial; identical to SEQ ID NO: 182637
  Synthetic oligonucleotide

SEQ ID NO: 643348 - DNA, 55 bp, Artificial; identical to SEQ ID NO: 190352
  Synthetic oligonucleotide

SEQ ID NO: 643349 - DNA, 51 bp, Artificial; identical to SEQ ID NO: 241099
  Synthetic oligonucleotide

SEQ ID NO: 643350 - DNA, 55 bp, Artificial; identical to SEQ ID NO: 233469
  Synthetic oligonucleotide

SEQ ID NO: 643351 - DNA, 54 bp, Artificial; identical to SEQ ID NO: 246069
  Synthetic oligonucleotide

SEQ ID NO: 643352 - DNA, 55 bp, Artificial; identical to SEQ ID NO: 238346
  Synthetic oligonucleotide

SEQ ID NO: 643353 - DNA, 55 bp, Artificial; identical to SEQ ID NO: 152563
  Synthetic oligonucleotide

SEQ ID NO: 643354 - DNA, 55 bp, Artificial; identical to SEQ ID NO: 194496
  Synthetic oligonucleotide

SEQ ID NO: 643355 - DNA, 55 bp, Artificial; identical to SEQ ID NO: 142534
  Synthetic oligonucleotide

SEQ ID NO: 643356 - DNA, 55 bp, Artificial; identical to SEQ ID NO: 210962
  Synthetic oligonucleotide

SEQ ID NO: 643357 - DNA, 55 bp, Artificial; identical to SEQ ID NO: 182766
  Synthetic oligonucleotide

SEQ ID NO: 643358 - DNA, 55 bp, Artificial; identical to SEQ ID NO: 216388
  Synthetic oligonucleotide

SEQ ID NO: 643359 - DNA, 60 bp, Artificial; identical to SEQ ID NO: 178667
  Synthetic oligonucleotide

SEQ ID NO: 643360 - DNA, 55 bp, Artificial; identical to SEQ ID NO: 166709
  Synthetic oligonucleotide

SEQ ID NO: 643361 - DNA, 53 bp, Artificial; identical to SEQ ID NO: 199823
  Synthetic oligonucleotide

SEQ ID NO: 643362 - DNA, 55 bp, Artificial; identical to SEQ ID NO: 265941
  Synthetic oligonucleotide

SEQ ID NO: 643363 - DNA, 60 bp, Artificial; identical to SEQ ID NO: 206808
  Synthetic oligonucleotide

SEQ ID NO: 643364 - DNA, 55 bp, Artificial; identical to SEQ ID NO: 146234
  Synthetic oligonucleotide

SEQ ID NO: 643365 - DNA, 54 bp, Artificial; identical to SEQ ID NO: 202022
  Synthetic oligonucleotide

SEQ ID NO: 643366 - DNA, 58 bp, Artificial; identical to SEQ ID NO: 147152
  Synthetic oligonucleotide

SEQ ID NO: 643367 - DNA, 55 bp, Artificial; identical to SEQ ID NO: 147903
  Synthetic oligonucleotide

SEQ ID NO: 643368 - DNA, 59 bp, Artificial; identical to SEQ ID NO: 179448
  Synthetic oligonucleotide

SEQ ID NO: 643369 - DNA, 60 bp, Artificial; identical to SEQ ID NO: 178666
  Synthetic oligonucleotide

SEQ ID NO: 643370 - DNA, 55 bp, Artificial; identical to SEQ ID NO: 198677
  Synthetic oligonucleotide

SEQ ID NO: 643371 - DNA, 51 bp, Artificial; identical to SEQ ID NO: 206556
  Synthetic oligonucleotide

SEQ ID NO: 643372 - DNA, 55 bp, Artificial; identical to SEQ ID NO: 233467
  Synthetic oligonucleotide

SEQ ID NO: 643373 - DNA, 59 bp, Artificial; identical to SEQ ID NO: 208263
  Synthetic oligonucleotide

SEQ ID NO: 643374 - DNA, 55 bp, Artificial; identical to SEQ ID NO: 203835
  Synthetic oligonucleotide

SEQ ID NO: 643375 - DNA, 53 bp, Artificial; identical to SEQ ID NO: 238612
  Synthetic oligonucleotide

SEQ ID NO: 643376 - DNA, 55 bp, Artificial; identical to SEQ ID NO: 254014
  Synthetic oligonucleotide

SEQ ID NO: 643377 - DNA, 60 bp, Artificial; identical to SEQ ID NO: 178665
  Synthetic oligonucleotide

SEQ ID NO: 643378 - DNA, 53 bp, Artificial; identical to SEQ ID NO: 253109
  Synthetic oligonucleotide

SEQ ID NO: 643379 - DNA, 55 bp, Artificial; identical to SEQ ID NO: 244236
  Synthetic oligonucleotide

SEQ ID NO: 643380 - DNA, 55 bp, Artificial; identical to SEQ ID NO: 244879
  Synthetic oligonucleotide

SEQ ID NO: 643381 - DNA, 59 bp, Artificial; identical to SEQ ID NO: 266011
  Synthetic oligonucleotide

SEQ ID NO: 643382 - DNA, 55 bp, Artificial; identical to SEQ ID NO: 147906
  Synthetic oligonucleotide

SEQ ID NO: 643383 - DNA, 54 bp, Artificial; identical to SEQ ID NO: 240547
  Synthetic oligonucleotide

SEQ ID NO: 643384 - DNA, 53 bp, Artificial; identical to SEQ ID NO: 197473
  Synthetic oligonucleotide

SEQ ID NO: 643385 - DNA, 60 bp, Artificial; identical to SEQ ID NO: 242120
  Synthetic oligonucleotide

SEQ ID NO: 643386 - DNA, 55 bp, Artificial; identical to SEQ ID NO: 147907
  Synthetic oligonucleotide

SEQ ID NO: 643387 - DNA, 55 bp, Artificial; identical to SEQ ID NO: 201808
  Synthetic oligonucleotide

SEQ ID NO: 643388 - DNA, 55 bp, Artificial; identical to SEQ ID NO: 147908
  Synthetic oligonucleotide

SEQ ID NO: 643389 - DNA, 55 bp, Artificial; identical to SEQ ID NO: 182762
  Synthetic oligonucleotide

SEQ ID NO: 643390 - DNA, 55 bp, Artificial; identical to SEQ ID NO: 167506
  Synthetic oligonucleotide

SEQ ID NO: 643391 - DNA, 55 bp, Artificial; identical to SEQ ID NO: 212687
  Synthetic oligonucleotide

SEQ ID NO: 643392 - DNA, 55 bp, Artificial; identical to SEQ ID NO: 188797
  Synthetic oligonucleotide

SEQ ID NO: 643393 - DNA, 52 bp, Artificial; identical to SEQ ID NO: 243289
  Synthetic oligonucleotide

SEQ ID NO: 643394 - DNA, 55 bp, Artificial; identical to SEQ ID NO: 198676
  Synthetic oligonucleotide

SEQ ID NO: 643395 - DNA, 55 bp, Artificial; identical to SEQ ID NO: 258935
  Synthetic oligonucleotide

SEQ ID NO: 643396 - DNA, 55 bp, Artificial; identical to SEQ ID NO: 207264
  Synthetic oligonucleotide

SEQ ID NO: 643397 - DNA, 60 bp, Artificial; identical to SEQ ID NO: 148948
  Synthetic oligonucleotide

SEQ ID NO: 643398 - DNA, 54 bp, Artificial; identical to SEQ ID NO: 167049
  Synthetic oligonucleotide

SEQ ID NO: 643399 - DNA, 55 bp, Artificial; identical to SEQ ID NO: 190937
  Synthetic oligonucleotide

SEQ ID NO: 643400 - DNA, 55 bp, Artificial; identical to SEQ ID NO: 155448
  Synthetic oligonucleotide

SEQ ID NO: 643401 - DNA, 55 bp, Artificial; identical to SEQ ID NO: 249510
  Synthetic oligonucleotide

SEQ ID NO: 643402 - DNA, 58 bp, Artificial; identical to SEQ ID NO: 167270
  Synthetic oligonucleotide

SEQ ID NO: 643403 - DNA, 55 bp, Artificial; identical to SEQ ID NO: 239598
  Synthetic oligonucleotide

SEQ ID NO: 643404 - DNA, 51 bp, Artificial; identical to SEQ ID NO: 149807
  Synthetic oligonucleotide

SEQ ID NO: 643405 - DNA, 55 bp, Artificial; identical to SEQ ID NO: 190936
  Synthetic oligonucleotide

SEQ ID NO: 643406 - DNA, 51 bp, Artificial; identical to SEQ ID NO: 193829
  Synthetic oligonucleotide

SEQ ID NO: 643407 - DNA, 55 bp, Artificial; identical to SEQ ID NO: 182757
  Synthetic oligonucleotide

SEQ ID NO: 643408 - DNA, 55 bp, Artificial; identical to SEQ ID NO: 178657
  Synthetic oligonucleotide

SEQ ID NO: 643409 - DNA, 53 bp, Artificial; identical to SEQ ID NO: 212972
  Synthetic oligonucleotide

SEQ ID NO: 643410 - DNA, 55 bp, Artificial; identical to SEQ ID NO: 191952
  Synthetic oligonucleotide

SEQ ID NO: 643411 - DNA, 51 bp, Artificial; identical to SEQ ID NO: 149856
  Synthetic oligonucleotide

SEQ ID NO: 643412 - DNA, 55 bp, Artificial; identical to SEQ ID NO: 222586
  Synthetic oligonucleotide

SEQ ID NO: 643413 - DNA, 55 bp, Artificial; identical to SEQ ID NO: 220607
  Synthetic oligonucleotide

SEQ ID NO: 643414 - DNA, 55 bp, Artificial; identical to SEQ ID NO: 198675
  Synthetic oligonucleotide

SEQ ID NO: 643415 - DNA, 54 bp, Artificial; identical to SEQ ID NO: 162262
  Synthetic oligonucleotide

SEQ ID NO: 643416 - DNA, 55 bp, Artificial; identical to SEQ ID NO: 212685
  Synthetic oligonucleotide

SEQ ID NO: 643417 - DNA, 55 bp, Artificial; identical to SEQ ID NO: 207379
  Synthetic oligonucleotide

SEQ ID NO: 643418 - DNA, 55 bp, Artificial; identical to SEQ ID NO: 194497
  Synthetic oligonucleotide

SEQ ID NO: 643419 - DNA, 55 bp, Artificial; identical to SEQ ID NO: 248909
  Synthetic oligonucleotide

SEQ ID NO: 643420 - DNA, 53 bp, Artificial; identical to SEQ ID NO: 199834
  Synthetic oligonucleotide

SEQ ID NO: 643421 - DNA, 55 bp, Artificial; identical to SEQ ID NO: 182755
  Synthetic oligonucleotide

SEQ ID NO: 643422 - DNA, 55 bp, Artificial; identical to SEQ ID NO: 198673
  Synthetic oligonucleotide

SEQ ID NO: 643423 - DNA, 55 bp, Artificial; identical to SEQ ID NO: 182754
  Synthetic oligonucleotide

SEQ ID NO: 643424 - DNA, 55 bp, Artificial; identical to SEQ ID NO: 208542
  Synthetic oligonucleotide

SEQ ID NO: 643425 - DNA, 55 bp, Artificial; identical to SEQ ID NO: 155871
  Synthetic oligonucleotide

SEQ ID NO: 643426 - DNA, 55 bp, Artificial; identical to SEQ ID NO: 233466
  Synthetic oligonucleotide

SEQ ID NO: 643427 - DNA, 55 bp, Artificial; identical to SEQ ID NO: 219650
  Synthetic oligonucleotide

SEQ ID NO: 643428 - DNA, 55 bp, Artificial; identical to SEQ ID NO: 257714
  Synthetic oligonucleotide

SEQ ID NO: 643429 - DNA, 55 bp, Artificial; identical to SEQ ID NO: 198671
  Synthetic oligonucleotide

SEQ ID NO: 643430 - DNA, 56 bp, Artificial; identical to SEQ ID NO: 242153
  Synthetic oligonucleotide

SEQ ID NO: 643431 - DNA, 53 bp, Artificial; identical to SEQ ID NO: 168932
  Synthetic oligonucleotide

SEQ ID NO: 643432 - DNA, 55 bp, Artificial; identical to SEQ ID NO: 207376
  Synthetic oligonucleotide

SEQ ID NO: 643433 - DNA, 55 bp, Artificial; identical to SEQ ID NO: 222587
  Synthetic oligonucleotide

SEQ ID NO: 643434 - DNA, 55 bp, Artificial; identical to SEQ ID NO: 258933
  Synthetic oligonucleotide

SEQ ID NO: 643435 - DNA, 57 bp, Artificial; identical to SEQ ID NO: 179820
  Synthetic oligonucleotide

SEQ ID NO: 643436 - DNA, 60 bp, Artificial; identical to SEQ ID NO: 152974
  Synthetic oligonucleotide

SEQ ID NO: 643437 - DNA, 55 bp, Artificial; identical to SEQ ID NO: 244708
  Synthetic oligonucleotide

SEQ ID NO: 643438 - DNA, 55 bp, Artificial; identical to SEQ ID NO: 244709
  Synthetic oligonucleotide

SEQ ID NO: 643439 - DNA, 55 bp, Artificial; identical to SEQ ID NO: 155872
  Synthetic oligonucleotide

SEQ ID NO: 643440 - DNA, 59 bp, Artificial; identical to SEQ ID NO: 249119
  Synthetic oligonucleotide

SEQ ID NO: 643441 - DNA, 55 bp, Artificial; identical to SEQ ID NO: 144099
  Synthetic oligonucleotide

SEQ ID NO: 643442 - DNA, 55 bp, Artificial; identical to SEQ ID NO: 147911
  Synthetic oligonucleotide

SEQ ID NO: 643443 - DNA, 51 bp, Artificial; identical to SEQ ID NO: 141346
  Synthetic oligonucleotide

SEQ ID NO: 643444 - DNA, 55 bp, Artificial; identical to SEQ ID NO: 223437
  Synthetic oligonucleotide

SEQ ID NO: 643445 - DNA, 55 bp, Artificial; identical to SEQ ID NO: 248913
  Synthetic oligonucleotide

SEQ ID NO: 643446 - DNA, 55 bp, Artificial; identical to SEQ ID NO: 210960
  Synthetic oligonucleotide

SEQ ID NO: 643447 - DNA, 55 bp, Artificial; identical to SEQ ID NO: 223436
  Synthetic oligonucleotide

SEQ ID NO: 643448 - DNA, 55 bp, Artificial; identical to SEQ ID NO: 160024
  Synthetic oligonucleotide

SEQ ID NO: 643449 - DNA, 58 bp, Artificial; identical to SEQ ID NO: 187189
  Synthetic oligonucleotide

SEQ ID NO: 643450 - DNA, 54 bp, Artificial; identical to SEQ ID NO: 245353
  Synthetic oligonucleotide

SEQ ID NO: 643451 - DNA, 50 bp, Artificial; identical to SEQ ID NO: 176926
  Synthetic oligonucleotide

SEQ ID NO: 643452 - DNA, 55 bp, Artificial; identical to SEQ ID NO: 205437
  Synthetic oligonucleotide

SEQ ID NO: 643453 - DNA, 55 bp, Artificial; identical to SEQ ID NO: 182746
  Synthetic oligonucleotide

SEQ ID NO: 643454 - DNA, 52 bp, Artificial; identical to SEQ ID NO: 152970
  Synthetic oligonucleotide

SEQ ID NO: 643455 - DNA, 57 bp, Artificial; identical to SEQ ID NO: 266085
  Synthetic oligonucleotide

SEQ ID NO: 643456 - DNA, 52 bp, Artificial; identical to SEQ ID NO: 174876
  Synthetic oligonucleotide

SEQ ID NO: 643457 - DNA, 55 bp, Artificial; identical to SEQ ID NO: 244715
  Synthetic oligonucleotide

SEQ ID NO: 643458 - DNA, 51 bp, Artificial; identical to SEQ ID NO: 191229
  Synthetic oligonucleotide

SEQ ID NO: 643459 - DNA, 59 bp, Artificial; identical to SEQ ID NO: 262753
  Synthetic oligonucleotide

SEQ ID NO: 643460 - DNA, 55 bp, Artificial; identical to SEQ ID NO: 217691
  Synthetic oligonucleotide

SEQ ID NO: 643461 - DNA, 59 bp, Artificial; identical to SEQ ID NO: 168155
  Synthetic oligonucleotide

SEQ ID NO: 643462 - DNA, 57 bp, Artificial; identical to SEQ ID NO: 203236
  Synthetic oligonucleotide

SEQ ID NO: 643463 - DNA, 55 bp, Artificial; identical to SEQ ID NO: 239899
  Synthetic oligonucleotide

SEQ ID NO: 643464 - DNA, 53 bp, Artificial; identical to SEQ ID NO: 157306
  Synthetic oligonucleotide

SEQ ID NO: 643465 - DNA, 55 bp, Artificial; identical to SEQ ID NO: 171594
  Synthetic oligonucleotide

SEQ ID NO: 643466 - DNA, 55 bp, Artificial; identical to SEQ ID NO: 205438
  Synthetic oligonucleotide

SEQ ID NO: 643467 - DNA, 54 bp, Artificial; identical to SEQ ID NO: 157183
  Synthetic oligonucleotide

SEQ ID NO: 643468 - DNA, 55 bp, Artificial; identical to SEQ ID NO: 182744
  Synthetic oligonucleotide

SEQ ID NO: 643469 - DNA, 55 bp, Artificial; identical to SEQ ID NO: 155874
  Synthetic oligonucleotide

SEQ ID NO: 643470 - DNA, 55 bp, Artificial; identical to SEQ ID NO: 155875
  Synthetic oligonucleotide

SEQ ID NO: 643471 - DNA, 55 bp, Artificial; identical to SEQ ID NO: 207374
  Synthetic oligonucleotide

SEQ ID NO: 643472 - DNA, 53 bp, Artificial; identical to SEQ ID NO: 182789
  Synthetic oligonucleotide

SEQ ID NO: 643473 - DNA, 54 bp, Artificial; identical to SEQ ID NO: 234399
  Synthetic oligonucleotide

SEQ ID NO: 643474 - DNA, 55 bp, Artificial; identical to SEQ ID NO: 187443
  Synthetic oligonucleotide

SEQ ID NO: 643475 - DNA, 55 bp, Artificial; identical to SEQ ID NO: 243651
  Synthetic oligonucleotide

SEQ ID NO: 643476 - DNA, 54 bp, Artificial; identical to SEQ ID NO: 143788
  Synthetic oligonucleotide

SEQ ID NO: 643477 - DNA, 52 bp, Artificial; identical to SEQ ID NO: 206817
  Synthetic oligonucleotide

SEQ ID NO: 643478 - DNA, 55 bp, Artificial; identical to SEQ ID NO: 200699
  Synthetic oligonucleotide

SEQ ID NO: 643479 - DNA, 55 bp, Artificial; identical to SEQ ID NO: 166903
  Synthetic oligonucleotide

SEQ ID NO: 643480 - DNA, 52 bp, Artificial; identical to SEQ ID NO: 216750
  Synthetic oligonucleotide

SEQ ID NO: 643481 - DNA, 51 bp, Artificial; identical to SEQ ID NO: 209757
  Synthetic oligonucleotide

SEQ ID NO: 643482 - DNA, 55 bp, Artificial; identical to SEQ ID NO: 166635
  Synthetic oligonucleotide

SEQ ID NO: 643483 - DNA, 58 bp, Artificial; identical to SEQ ID NO: 191261
  Synthetic oligonucleotide

SEQ ID NO: 643484 - DNA, 55 bp, Artificial; identical to SEQ ID NO: 197128
  Synthetic oligonucleotide

SEQ ID NO: 643485 - DNA, 60 bp, Artificial; identical to SEQ ID NO: 152969
  Synthetic oligonucleotide

SEQ ID NO: 643486 - DNA, 54 bp, Artificial; identical to SEQ ID NO: 147914
  Synthetic oligonucleotide

SEQ ID NO: 643487 - DNA, 55 bp, Artificial; identical to SEQ ID NO: 190349
  Synthetic oligonucleotide

SEQ ID NO: 643488 - DNA, 55 bp, Artificial; identical to SEQ ID NO: 244241
  Synthetic oligonucleotide

SEQ ID NO: 643489 - DNA, 57 bp, Artificial; identical to SEQ ID NO: 141954
  Synthetic oligonucleotide

SEQ ID NO: 643490 - DNA, 54 bp, Artificial; identical to SEQ ID NO: 199529
  Synthetic oligonucleotide

SEQ ID NO: 643491 - DNA, 55 bp, Artificial; identical to SEQ ID NO: 166632
  Synthetic oligonucleotide

SEQ ID NO: 643492 - DNA, 55 bp, Artificial; identical to SEQ ID NO: 168437
  Synthetic oligonucleotide

SEQ ID NO: 643493 - DNA, 51 bp, Artificial; identical to SEQ ID NO: 217273
  Synthetic oligonucleotide

SEQ ID NO: 643494 - DNA, 53 bp, Artificial; identical to SEQ ID NO: 240701
  Synthetic oligonucleotide

SEQ ID NO: 643495 - DNA, 60 bp, Artificial; identical to SEQ ID NO: 245020
  Synthetic oligonucleotide

SEQ ID NO: 643496 - DNA, 55 bp, Artificial; identical to SEQ ID NO: 198668
  Synthetic oligonucleotide

SEQ ID NO: 643497 - DNA, 56 bp, Artificial; identical to SEQ ID NO: 249141
  Synthetic oligonucleotide

SEQ ID NO: 643498 - DNA, 60 bp, Artificial; identical to SEQ ID NO: 249152
  Synthetic oligonucleotide

SEQ ID NO: 643499 - DNA, 60 bp, Artificial; identical to SEQ ID NO: 203569
  Synthetic oligonucleotide

SEQ ID NO: 643500 - DNA, 52 bp, Artificial; identical to SEQ ID NO: 157649
  Synthetic oligonucleotide

SEQ ID NO: 643501 - DNA, 55 bp, Artificial; identical to SEQ ID NO: 257716
  Synthetic oligonucleotide

SEQ ID NO: 643502 - DNA, 53 bp, Artificial; identical to SEQ ID NO: 243077
  Synthetic oligonucleotide

SEQ ID NO: 643503 - DNA, 55 bp, Artificial; identical to SEQ ID NO: 182784
  Synthetic oligonucleotide

SEQ ID NO: 643504 - DNA, 59 bp, Artificial; identical to SEQ ID NO: 166032
  Synthetic oligonucleotide

SEQ ID NO: 643505 - DNA, 53 bp, Artificial; identical to SEQ ID NO: 185843
  Synthetic oligonucleotide

SEQ ID NO: 643506 - DNA, 55 bp, Artificial; identical to SEQ ID NO: 233464
  Synthetic oligonucleotide

SEQ ID NO: 643507 - DNA, 55 bp, Artificial; identical to SEQ ID NO: 198667
  Synthetic oligonucleotide

SEQ ID NO: 643508 - DNA, 55 bp, Artificial; identical to SEQ ID NO: 244244
  Synthetic oligonucleotide

SEQ ID NO: 643509 - DNA, 50 bp, Artificial; identical to SEQ ID NO: 176919
  Synthetic oligonucleotide

SEQ ID NO: 643510 - DNA, 53 bp, Artificial; identical to SEQ ID NO: 221696
  Synthetic oligonucleotide

SEQ ID NO: 643511 - DNA, 53 bp, Artificial; identical to SEQ ID NO: 234402
  Synthetic oligonucleotide

SEQ ID NO: 643512 - DNA, 51 bp, Artificial; identical to SEQ ID NO: 186650
  Synthetic oligonucleotide

SEQ ID NO: 643513 - DNA, 55 bp, Artificial; identical to SEQ ID NO: 196161
  Synthetic oligonucleotide

SEQ ID NO: 643514 - DNA, 56 bp, Artificial; identical to SEQ ID NO: 256742
  Synthetic oligonucleotide

SEQ ID NO: 643515 - DNA, 58 bp, Artificial; identical to SEQ ID NO: 147135
  Synthetic oligonucleotide

SEQ ID NO: 643516 - DNA, 59 bp, Artificial; identical to SEQ ID NO: 159975
  Synthetic oligonucleotide

SEQ ID NO: 643517 - DNA, 55 bp, Artificial; identical to SEQ ID NO: 254005
  Synthetic oligonucleotide

SEQ ID NO: 643518 - DNA, 55 bp, Artificial; identical to SEQ ID NO: 248920
  Synthetic oligonucleotide

SEQ ID NO: 643519 - DNA, 51 bp, Artificial; identical to SEQ ID NO: 142630
  Synthetic oligonucleotide

SEQ ID NO: 643520 - DNA, 50 bp, Artificial; identical to SEQ ID NO: 209788
  Synthetic oligonucleotide

SEQ ID NO: 643521 - DNA, 58 bp, Artificial; identical to SEQ ID NO: 206818
  Synthetic oligonucleotide

SEQ ID NO: 643522 - DNA, 55 bp, Artificial; identical to SEQ ID NO: 244733
  Synthetic oligonucleotide

SEQ ID NO: 643523 - DNA, 50 bp, Artificial; identical to SEQ ID NO: 193980
  Synthetic oligonucleotide

SEQ ID NO: 643524 - DNA, 53 bp, Artificial; identical to SEQ ID NO: 185833
  Synthetic oligonucleotide

SEQ ID NO: 643525 - DNA, 55 bp, Artificial; identical to SEQ ID NO: 207373
  Synthetic oligonucleotide

SEQ ID NO: 643526 - DNA, 55 bp, Artificial; identical to SEQ ID NO: 182780
  Synthetic oligonucleotide

SEQ ID NO: 643527 - DNA, 52 bp, Artificial; identical to SEQ ID NO: 247518
  Synthetic oligonucleotide

SEQ ID NO: 643528 - DNA, 53 bp, Artificial; identical to SEQ ID NO: 256720
  Synthetic oligonucleotide

SEQ ID NO: 643529 - DNA, 60 bp, Artificial; identical to SEQ ID NO: 233335
  Synthetic oligonucleotide

SEQ ID NO: 643530 - DNA, 56 bp, Artificial; identical to SEQ ID NO: 146352
  Synthetic oligonucleotide

SEQ ID NO: 643531 - DNA, 55 bp, Artificial; identical to SEQ ID NO: 142246
  Synthetic oligonucleotide

SEQ ID NO: 643532 - DNA, 55 bp, Artificial; identical to SEQ ID NO: 166631
  Synthetic oligonucleotide

SEQ ID NO: 643533 - DNA, 55 bp, Artificial; identical to SEQ ID NO: 169278
  Synthetic oligonucleotide

SEQ ID NO: 643534 - DNA, 56 bp, Artificial; identical to SEQ ID NO: 249174
  Synthetic oligonucleotide

SEQ ID NO: 643535 - DNA, 55 bp, Artificial; identical to SEQ ID NO: 248582
  Synthetic oligonucleotide

SEQ ID NO: 643536 - DNA, 60 bp, Artificial; identical to SEQ ID NO: 159920
  Synthetic oligonucleotide

SEQ ID NO: 643537 - DNA, 60 bp, Artificial; identical to SEQ ID NO: 156321
  Synthetic oligonucleotide

SEQ ID NO: 643538 - DNA, 53 bp, Artificial; identical to SEQ ID NO: 244909
  Synthetic oligonucleotide

SEQ ID NO: 643539 - DNA, 55 bp, Artificial; identical to SEQ ID NO: 221423
  Synthetic oligonucleotide

SEQ ID NO: 643540 - DNA, 55 bp, Artificial; identical to SEQ ID NO: 201814
  Synthetic oligonucleotide

SEQ ID NO: 643541 - DNA, 54 bp, Artificial; identical to SEQ ID NO: 167037
  Synthetic oligonucleotide

SEQ ID NO: 643542 - DNA, 60 bp, Artificial; identical to SEQ ID NO: 241437
  Synthetic oligonucleotide

SEQ ID NO: 643543 - DNA, 55 bp, Artificial; identical to SEQ ID NO: 257717
  Synthetic oligonucleotide

SEQ ID NO: 643544 - DNA, 52 bp, Artificial; identical to SEQ ID NO: 243270
  Synthetic oligonucleotide

SEQ ID NO: 643545 - DNA, 55 bp, Artificial; identical to SEQ ID NO: 147921
  Synthetic oligonucleotide

SEQ ID NO: 643546 - DNA, 55 bp, Artificial; identical to SEQ ID NO: 182777
  Synthetic oligonucleotide

SEQ ID NO: 643547 - DNA, 55 bp, Artificial; identical to SEQ ID NO: 155883
  Synthetic oligonucleotide

SEQ ID NO: 643548 - DNA, 50 bp, Artificial; identical to SEQ ID NO: 167666
  Synthetic oligonucleotide

SEQ ID NO: 643549 - DNA, 51 bp, Artificial; identical to SEQ ID NO: 149854
  Synthetic oligonucleotide

SEQ ID NO: 643550 - DNA, 60 bp, Artificial; identical to SEQ ID NO: 149037
  Synthetic oligonucleotide

SEQ ID NO: 643551 - DNA, 60 bp, Artificial; identical to SEQ ID NO: 243652
  Synthetic oligonucleotide

SEQ ID NO: 643552 - DNA, 55 bp, Artificial; identical to SEQ ID NO: 254004
  Synthetic oligonucleotide

SEQ ID NO: 643553 - DNA, 50 bp, Artificial; identical to SEQ ID NO: 193976
  Synthetic oligonucleotide

SEQ ID NO: 643554 - DNA, 54 bp, Artificial; identical to SEQ ID NO: 258962
  Synthetic oligonucleotide

SEQ ID NO: 643555 - DNA, 55 bp, Artificial; identical to SEQ ID NO: 198663
  Synthetic oligonucleotide

SEQ ID NO: 643556 - DNA, 57 bp, Artificial; identical to SEQ ID NO: 253175
  Synthetic oligonucleotide

SEQ ID NO: 643557 - DNA, 52 bp, Artificial; identical to SEQ ID NO: 147962
  Synthetic oligonucleotide

SEQ ID NO: 643558 - DNA, 55 bp, Artificial; identical to SEQ ID NO: 209067
  Synthetic oligonucleotide

SEQ ID NO: 643559 - DNA, 56 bp, Artificial; identical to SEQ ID NO: 179924
  Synthetic oligonucleotide

SEQ ID NO: 643560 - DNA, 53 bp, Artificial; identical to SEQ ID NO: 188462
  Synthetic oligonucleotide

SEQ ID NO: 643561 - DNA, 53 bp, Artificial; identical to SEQ ID NO: 246346
  Synthetic oligonucleotide

SEQ ID NO: 643562 - DNA, 60 bp, Artificial; identical to SEQ ID NO: 159888
  Synthetic oligonucleotide

SEQ ID NO: 643563 - DNA, 50 bp, Artificial; identical to SEQ ID NO: 176851
  Synthetic oligonucleotide

SEQ ID NO: 643564 - DNA, 57 bp, Artificial; identical to SEQ ID NO: 205222
  Synthetic oligonucleotide

SEQ ID NO: 643565 - DNA, 60 bp, Artificial; identical to SEQ ID NO: 148593
  Synthetic oligonucleotide

SEQ ID NO: 643566 - DNA, 51 bp, Artificial; identical to SEQ ID NO: 203997
  Synthetic oligonucleotide

SEQ ID NO: 643567 - DNA, 55 bp, Artificial; identical to SEQ ID NO: 242558
  Synthetic oligonucleotide

SEQ ID NO: 643568 - DNA, 55 bp, Artificial; identical to SEQ ID NO: 244247
  Synthetic oligonucleotide

SEQ ID NO: 643569 - DNA, 55 bp, Artificial; identical to SEQ ID NO: 244702
  Synthetic oligonucleotide

SEQ ID NO: 643570 - DNA, 55 bp, Artificial; identical to SEQ ID NO: 144493
  Synthetic oligonucleotide

SEQ ID NO: 643571 - DNA, 51 bp, Artificial; identical to SEQ ID NO: 192173
  Synthetic oligonucleotide

SEQ ID NO: 643572 - DNA, 55 bp, Artificial; identical to SEQ ID NO: 233463
  Synthetic oligonucleotide

SEQ ID NO: 643573 - DNA, 51 bp, Artificial; identical to SEQ ID NO: 157671
  Synthetic oligonucleotide

SEQ ID NO: 643574 - DNA, 55 bp, Artificial; identical to SEQ ID NO: 147964
  Synthetic oligonucleotide

SEQ ID NO: 643575 - DNA, 55 bp, Artificial; identical to SEQ ID NO: 248924
  Synthetic oligonucleotide

SEQ ID NO: 643576 - DNA, 55 bp, Artificial; identical to SEQ ID NO: 182769
  Synthetic oligonucleotide

SEQ ID NO: 643577 - DNA, 60 bp, Artificial; identical to SEQ ID NO: 178677
  Synthetic oligonucleotide

SEQ ID NO: 643578 - DNA, 60 bp, Artificial; identical to SEQ ID NO: 248558
  Synthetic oligonucleotide

SEQ ID NO: 643579 - DNA, 51 bp, Artificial; identical to SEQ ID NO: 167623
  Synthetic oligonucleotide

SEQ ID NO: 643580 - DNA, 55 bp, Artificial; identical to SEQ ID NO: 211426
  Synthetic oligonucleotide

SEQ ID NO: 643581 - DNA, 55 bp, Artificial; identical to SEQ ID NO: 148638
  Synthetic oligonucleotide

SEQ ID NO: 643582 - DNA, 55 bp, Artificial; identical to SEQ ID NO: 182767
  Synthetic oligonucleotide

SEQ ID NO: 643583 - DNA, 60 bp, Artificial; identical to SEQ ID NO: 148649
  Synthetic oligonucleotide

SEQ ID NO: 643584 - DNA, 55 bp, Artificial; identical to SEQ ID NO: 248923
  Synthetic oligonucleotide

SEQ ID NO: 643585 - DNA, 58 bp, Artificial; identical to SEQ ID NO: 194263
  Synthetic oligonucleotide

SEQ ID NO: 643586 - DNA, 59 bp, Artificial; identical to SEQ ID NO: 217066
  Synthetic oligonucleotide

SEQ ID NO: 643587 - DNA, 60 bp, Artificial; identical to SEQ ID NO: 267329
  Synthetic oligonucleotide

SEQ ID NO: 643588 - DNA, 55 bp, Artificial; identical to SEQ ID NO: 239810
  Synthetic oligonucleotide

SEQ ID NO: 643589 - DNA, 56 bp, Artificial; identical to SEQ ID NO: 239541
  Synthetic oligonucleotide

SEQ ID NO: 643590 - DNA, 55 bp, Artificial; identical to SEQ ID NO: 162030
  Synthetic oligonucleotide

SEQ ID NO: 643591 - DNA, 54 bp, Artificial; identical to SEQ ID NO: 212641
  Synthetic oligonucleotide

SEQ ID NO: 643592 - DNA, 55 bp, Artificial; identical to SEQ ID NO: 161849
  Synthetic oligonucleotide

SEQ ID NO: 643593 - DNA, 55 bp, Artificial; identical to SEQ ID NO: 166629
  Synthetic oligonucleotide

SEQ ID NO: 643594 - DNA, 50 bp, Artificial; identical to SEQ ID NO: 246874
  Synthetic oligonucleotide

SEQ ID NO: 643595 - DNA, 55 bp, Artificial; identical to SEQ ID NO: 212639
  Synthetic oligonucleotide

SEQ ID NO: 643596 - DNA, 55 bp, Artificial; identical to SEQ ID NO: 155884
  Synthetic oligonucleotide

SEQ ID NO: 643597 - DNA, 55 bp, Artificial; identical to SEQ ID NO: 187611
  Synthetic oligonucleotide

SEQ ID NO: 643598 - DNA, 50 bp, Artificial; identical to SEQ ID NO: 208946
  Synthetic oligonucleotide

SEQ ID NO: 643599 - DNA, 58 bp, Artificial; identical to SEQ ID NO: 147186
  Synthetic oligonucleotide

SEQ ID NO: 643600 - DNA, 57 bp, Artificial; identical to SEQ ID NO: 178614
  Synthetic oligonucleotide

SEQ ID NO: 643601 - DNA, 58 bp, Artificial; identical to SEQ ID NO: 147192
  Synthetic oligonucleotide

SEQ ID NO: 643602 - DNA, 55 bp, Artificial; identical to SEQ ID NO: 224845
  Synthetic oligonucleotide

SEQ ID NO: 643603 - DNA, 54 bp, Artificial; identical to SEQ ID NO: 243653
  Synthetic oligonucleotide

SEQ ID NO: 643604 - DNA, 55 bp, Artificial; identical to SEQ ID NO: 189006
  Synthetic oligonucleotide

SEQ ID NO: 643605 - DNA, 60 bp, Artificial; identical to SEQ ID NO: 209066
  Synthetic oligonucleotide

SEQ ID NO: 643606 - DNA, 55 bp, Artificial; identical to SEQ ID NO: 155886
  Synthetic oligonucleotide

SEQ ID NO: 643607 - DNA, 55 bp, Artificial; identical to SEQ ID NO: 239836
  Synthetic oligonucleotide

SEQ ID NO: 643608 - DNA, 60 bp, Artificial; identical to SEQ ID NO: 241615
  Synthetic oligonucleotide

SEQ ID NO: 643609 - DNA, 57 bp, Artificial; identical to SEQ ID NO: 241626
  Synthetic oligonucleotide

SEQ ID NO: 643610 - DNA, 56 bp, Artificial; identical to SEQ ID NO: 212472
  Synthetic oligonucleotide

SEQ ID NO: 643611 - DNA, 54 bp, Artificial; identical to SEQ ID NO: 149114
  Synthetic oligonucleotide

SEQ ID NO: 643612 - DNA, 55 bp, Artificial; identical to SEQ ID NO: 253924
  Synthetic oligonucleotide

SEQ ID NO: 643613 - DNA, 59 bp, Artificial; identical to SEQ ID NO: 178609
  Synthetic oligonucleotide

SEQ ID NO: 643614 - DNA, 60 bp, Artificial; identical to SEQ ID NO: 178608
  Synthetic oligonucleotide

SEQ ID NO: 643615 - DNA, 55 bp, Artificial; identical to SEQ ID NO: 253922
  Synthetic oligonucleotide

SEQ ID NO: 643616 - DNA, 55 bp, Artificial; identical to SEQ ID NO: 225101
  Synthetic oligonucleotide

SEQ ID NO: 643617 - DNA, 60 bp, Artificial; identical to SEQ ID NO: 203791
  Synthetic oligonucleotide

SEQ ID NO: 643618 - DNA, 52 bp, Artificial; identical to SEQ ID NO: 240938
  Synthetic oligonucleotide

SEQ ID NO: 643619 - DNA, 51 bp, Artificial; identical to SEQ ID NO: 157793
  Synthetic oligonucleotide

SEQ ID NO: 643620 - DNA, 54 bp, Artificial; identical to SEQ ID NO: 217693
  Synthetic oligonucleotide

SEQ ID NO: 643621 - DNA, 54 bp, Artificial; identical to SEQ ID NO: 182713
  Synthetic oligonucleotide

SEQ ID NO: 643622 - DNA, 53 bp, Artificial; identical to SEQ ID NO: 190348
  Synthetic oligonucleotide

SEQ ID NO: 643623 - DNA, 59 bp, Artificial; identical to SEQ ID NO: 179442
  Synthetic oligonucleotide

SEQ ID NO: 643624 - DNA, 55 bp, Artificial; identical to SEQ ID NO: 208539
  Synthetic oligonucleotide

SEQ ID NO: 643625 - DNA, 55 bp, Artificial; identical to SEQ ID NO: 203671
  Synthetic oligonucleotide

SEQ ID NO: 643626 - DNA, 51 bp, Artificial; identical to SEQ ID NO: 255738
  Synthetic oligonucleotide

SEQ ID NO: 643627 - DNA, 55 bp, Artificial; identical to SEQ ID NO: 193568
  Synthetic oligonucleotide

SEQ ID NO: 643628 - DNA, 52 bp, Artificial; identical to SEQ ID NO: 247919
  Synthetic oligonucleotide

SEQ ID NO: 643629 - DNA, 55 bp, Artificial; identical to SEQ ID NO: 151728
  Synthetic oligonucleotide

SEQ ID NO: 643630 - DNA, 52 bp, Artificial; identical to SEQ ID NO: 144695
  Synthetic oligonucleotide

SEQ ID NO: 643631 - DNA, 55 bp, Artificial; identical to SEQ ID NO: 239753
  Synthetic oligonucleotide

SEQ ID NO: 643632 - DNA, 55 bp, Artificial; identical to SEQ ID NO: 239756
  Synthetic oligonucleotide

SEQ ID NO: 643633 - DNA, 58 bp, Artificial; identical to SEQ ID NO: 194237
  Synthetic oligonucleotide

SEQ ID NO: 643634 - DNA, 58 bp, Artificial; identical to SEQ ID NO: 243949
  Synthetic oligonucleotide

SEQ ID NO: 643635 - DNA, 51 bp, Artificial; identical to SEQ ID NO: 190910
  Synthetic oligonucleotide

SEQ ID NO: 643636 - DNA, 55 bp, Artificial; identical to SEQ ID NO: 166628
  Synthetic oligonucleotide

SEQ ID NO: 643637 - DNA, 53 bp, Artificial; identical to SEQ ID NO: 243655
  Synthetic oligonucleotide

SEQ ID NO: 643638 - DNA, 60 bp, Artificial; identical to SEQ ID NO: 178607
  Synthetic oligonucleotide

SEQ ID NO: 643639 - DNA, 51 bp, Artificial; identical to SEQ ID NO: 200208
  Synthetic oligonucleotide

SEQ ID NO: 643640 - DNA, 55 bp, Artificial; identical to SEQ ID NO: 144933
  Synthetic oligonucleotide

SEQ ID NO: 643641 - DNA, 55 bp, Artificial; identical to SEQ ID NO: 194505
  Synthetic oligonucleotide

SEQ ID NO: 643642 - DNA, 58 bp, Artificial; identical to SEQ ID NO: 144691
  Synthetic oligonucleotide

SEQ ID NO: 643643 - DNA, 56 bp, Artificial; identical to SEQ ID NO: 224400
  Synthetic oligonucleotide

SEQ ID NO: 643644 - DNA, 55 bp, Artificial; identical to SEQ ID NO: 168494
  Synthetic oligonucleotide

SEQ ID NO: 643645 - DNA, 59 bp, Artificial; identical to SEQ ID NO: 201102
  Synthetic oligonucleotide

SEQ ID NO: 643646 - DNA, 50 bp, Artificial; identical to SEQ ID NO: 172884
  Synthetic oligonucleotide

SEQ ID NO: 643647 - DNA, 55 bp, Artificial; identical to SEQ ID NO: 190346
  Synthetic oligonucleotide

SEQ ID NO: 643648 - DNA, 60 bp, Artificial; identical to SEQ ID NO: 241681
  Synthetic oligonucleotide

SEQ ID NO: 643649 - DNA, 54 bp, Artificial; identical to SEQ ID NO: 164278
  Synthetic oligonucleotide

SEQ ID NO: 643650 - DNA, 60 bp, Artificial; identical to SEQ ID NO: 187188
  Synthetic oligonucleotide

SEQ ID NO: 643651 - DNA, 55 bp, Artificial; identical to SEQ ID NO: 154342
  Synthetic oligonucleotide

SEQ ID NO: 643652 - DNA, 58 bp, Artificial; identical to SEQ ID NO: 243656
  Synthetic oligonucleotide

SEQ ID NO: 643653 - DNA, 55 bp, Artificial; identical to SEQ ID NO: 166627
  Synthetic oligonucleotide

SEQ ID NO: 643654 - DNA, 55 bp, Artificial; identical to SEQ ID NO: 155890
  Synthetic oligonucleotide

SEQ ID NO: 643655 - DNA, 55 bp, Artificial; identical to SEQ ID NO: 166626
  Synthetic oligonucleotide

SEQ ID NO: 643656 - DNA, 55 bp, Artificial; identical to SEQ ID NO: 239723
  Synthetic oligonucleotide

SEQ ID NO: 643657 - DNA, 55 bp, Artificial; identical to SEQ ID NO: 147969
  Synthetic oligonucleotide

SEQ ID NO: 643658 - DNA, 55 bp, Artificial; identical to SEQ ID NO: 239728
  Synthetic oligonucleotide

SEQ ID NO: 643659 - DNA, 55 bp, Artificial; identical to SEQ ID NO: 188236
  Synthetic oligonucleotide

SEQ ID NO: 643660 - DNA, 52 bp, Artificial; identical to SEQ ID NO: 255520
  Synthetic oligonucleotide

SEQ ID NO: 643661 - DNA, 57 bp, Artificial; identical to SEQ ID NO: 241714
  Synthetic oligonucleotide

SEQ ID NO: 643662 - DNA, 50 bp, Artificial; identical to SEQ ID NO: 215267
  Synthetic oligonucleotide

SEQ ID NO: 643663 - DNA, 55 bp, Artificial; identical to SEQ ID NO: 162029
  Synthetic oligonucleotide

SEQ ID NO: 643664 - DNA, 55 bp, Artificial; identical to SEQ ID NO: 234396
  Synthetic oligonucleotide

SEQ ID NO: 643665 - DNA, 51 bp, Artificial; identical to SEQ ID NO: 191995
  Synthetic oligonucleotide

SEQ ID NO: 643666 - DNA, 55 bp, Artificial; identical to SEQ ID NO: 171589
  Synthetic oligonucleotide

SEQ ID NO: 643667 - DNA, 55 bp, Artificial; identical to SEQ ID NO: 234393
  Synthetic oligonucleotide

SEQ ID NO: 643668 - DNA, 55 bp, Artificial; identical to SEQ ID NO: 194455
  Synthetic oligonucleotide

SEQ ID NO: 643669 - DNA, 55 bp, Artificial; identical to SEQ ID NO: 217694
  Synthetic oligonucleotide

SEQ ID NO: 643670 - DNA, 55 bp, Artificial; identical to SEQ ID NO: 190345
  Synthetic oligonucleotide

SEQ ID NO: 643671 - DNA, 57 bp, Artificial; identical to SEQ ID NO: 233889
  Synthetic oligonucleotide

SEQ ID NO: 643672 - DNA, 55 bp, Artificial; identical to SEQ ID NO: 265632
  Synthetic oligonucleotide

SEQ ID NO: 643673 - DNA, 52 bp, Artificial; identical to SEQ ID NO: 199924
  Synthetic oligonucleotide

SEQ ID NO: 643674 - DNA, 59 bp, Artificial; identical to SEQ ID NO: 148726
  Synthetic oligonucleotide

SEQ ID NO: 643675 - DNA, 54 bp, Artificial; identical to SEQ ID NO: 182711
  Synthetic oligonucleotide

SEQ ID NO: 643676 - DNA, 49 bp, Artificial; identical to SEQ ID NO: 241137
  Synthetic oligonucleotide

SEQ ID NO: 643677 - DNA, 60 bp, Artificial; identical to SEQ ID NO: 241171
  Synthetic oligonucleotide

SEQ ID NO: 643678 - DNA, 60 bp, Artificial; identical to SEQ ID NO: 241182
  Synthetic oligonucleotide

SEQ ID NO: 643679 - DNA, 53 bp, Artificial; identical to SEQ ID NO: 190695
  Synthetic oligonucleotide

SEQ ID NO: 643680 - DNA, 55 bp, Artificial; identical to SEQ ID NO: 244015
  Synthetic oligonucleotide

SEQ ID NO: 643681 - DNA, 57 bp, Artificial; identical to SEQ ID NO: 241193
  Synthetic oligonucleotide

SEQ ID NO: 643682 - DNA, 55 bp, Artificial; identical to SEQ ID NO: 142536
  Synthetic oligonucleotide

SEQ ID NO: 643683 - DNA, 52 bp, Artificial; identical to SEQ ID NO: 243260
  Synthetic oligonucleotide

SEQ ID NO: 643684 - DNA, 55 bp, Artificial; identical to SEQ ID NO: 257443
  Synthetic oligonucleotide

SEQ ID NO: 643685 - DNA, 55 bp, Artificial; identical to SEQ ID NO: 244253
  Synthetic oligonucleotide

SEQ ID NO: 643686 - DNA, 55 bp, Artificial; identical to SEQ ID NO: 144731
  Synthetic oligonucleotide

SEQ ID NO: 643687 - DNA, 58 bp, Artificial; identical to SEQ ID NO: 241215
  Synthetic oligonucleotide

SEQ ID NO: 643688 - DNA, 55 bp, Artificial; identical to SEQ ID NO: 198660
  Synthetic oligonucleotide

SEQ ID NO: 643689 - DNA, 53 bp, Artificial; identical to SEQ ID NO: 188071
  Synthetic oligonucleotide

SEQ ID NO: 643690 - DNA, 55 bp, Artificial; identical to SEQ ID NO: 238344
  Synthetic oligonucleotide

SEQ ID NO: 643691 - DNA, 51 bp, Artificial; identical to SEQ ID NO: 220829
  Synthetic oligonucleotide

SEQ ID NO: 643692 - DNA, 55 bp, Artificial; identical to SEQ ID NO: 239784
  Synthetic oligonucleotide

SEQ ID NO: 643693 - DNA, 55 bp, Artificial; identical to SEQ ID NO: 244257
  Synthetic oligonucleotide

SEQ ID NO: 643694 - DNA, 57 bp, Artificial; identical to SEQ ID NO: 256620
  Synthetic oligonucleotide

SEQ ID NO: 643695 - DNA, 60 bp, Artificial; identical to SEQ ID NO: 241248
  Synthetic oligonucleotide

SEQ ID NO: 643696 - DNA, 55 bp, Artificial; identical to SEQ ID NO: 247586
  Synthetic oligonucleotide

SEQ ID NO: 643697 - DNA, 55 bp, Artificial; identical to SEQ ID NO: 200696
  Synthetic oligonucleotide

SEQ ID NO: 643698 - DNA, 55 bp, Artificial; identical to SEQ ID NO: 244784
  Synthetic oligonucleotide

SEQ ID NO: 643699 - DNA, 55 bp, Artificial; identical to SEQ ID NO: 142249
  Synthetic oligonucleotide

SEQ ID NO: 643700 - DNA, 55 bp, Artificial; identical to SEQ ID NO: 244792
  Synthetic oligonucleotide

SEQ ID NO: 643701 - DNA, 55 bp, Artificial; identical to SEQ ID NO: 198658
  Synthetic oligonucleotide

SEQ ID NO: 643702 - DNA, 53 bp, Artificial; identical to SEQ ID NO: 265714
  Synthetic oligonucleotide

SEQ ID NO: 643703 - DNA, 54 bp, Artificial; identical to SEQ ID NO: 202732
  Synthetic oligonucleotide

SEQ ID NO: 643704 - DNA, 58 bp, Artificial; identical to SEQ ID NO: 241270
  Synthetic oligonucleotide

SEQ ID NO: 643705 - DNA, 51 bp, Artificial; identical to SEQ ID NO: 241121
  Synthetic oligonucleotide

SEQ ID NO: 643706 - DNA, 55 bp, Artificial; identical to SEQ ID NO: 190344
  Synthetic oligonucleotide

SEQ ID NO: 643707 - DNA, 51 bp, Artificial; identical to SEQ ID NO: 241123
  Synthetic oligonucleotide

SEQ ID NO: 643708 - DNA, 58 bp, Artificial; identical to SEQ ID NO: 217068
  Synthetic oligonucleotide

SEQ ID NO: 643709 - DNA, 56 bp, Artificial; identical to SEQ ID NO: 142693
  Synthetic oligonucleotide

SEQ ID NO: 643710 - DNA, 55 bp, Artificial; identical to SEQ ID NO: 244742
  Synthetic oligonucleotide

SEQ ID NO: 643711 - DNA, 55 bp, Artificial; identical to SEQ ID NO: 197896
  Synthetic oligonucleotide

SEQ ID NO: 643712 - DNA, 56 bp, Artificial; identical to SEQ ID NO: 166169
  Synthetic oligonucleotide

SEQ ID NO: 643713 - DNA, 59 bp, Artificial; identical to SEQ ID NO: 243658
  Synthetic oligonucleotide

SEQ ID NO: 643714 - DNA, 52 bp, Artificial; identical to SEQ ID NO: 203959
  Synthetic oligonucleotide

SEQ ID NO: 643715 - DNA, 54 bp, Artificial; identical to SEQ ID NO: 144505
  Synthetic oligonucleotide

SEQ ID NO: 643716 - DNA, 55 bp, Artificial; identical to SEQ ID NO: 166623
  Synthetic oligonucleotide

SEQ ID NO: 643717 - DNA, 60 bp, Artificial; identical to SEQ ID NO: 209065
  Synthetic oligonucleotide

SEQ ID NO: 643718 - DNA, 60 bp, Artificial; identical to SEQ ID NO: 164722
  Synthetic oligonucleotide

SEQ ID NO: 643719 - DNA, 54 bp, Artificial; identical to SEQ ID NO: 190633
  Synthetic oligonucleotide

SEQ ID NO: 643720 - DNA, 57 bp, Artificial; identical to SEQ ID NO: 178646
  Synthetic oligonucleotide

SEQ ID NO: 643721 - DNA, 60 bp, Artificial; identical to SEQ ID NO: 141736
  Synthetic oligonucleotide

SEQ ID NO: 643722 - DNA, 55 bp, Artificial; identical to SEQ ID NO: 198657
  Synthetic oligonucleotide

SEQ ID NO: 643723 - DNA, 55 bp, Artificial; identical to SEQ ID NO: 187607
  Synthetic oligonucleotide

SEQ ID NO: 643724 - DNA, 54 bp, Artificial; identical to SEQ ID NO: 151360
  Synthetic oligonucleotide

SEQ ID NO: 643725 - DNA, 53 bp, Artificial; identical to SEQ ID NO: 194337
  Synthetic oligonucleotide

SEQ ID NO: 643726 - DNA, 53 bp, Artificial; identical to SEQ ID NO: 255320
  Synthetic oligonucleotide

SEQ ID NO: 643727 - DNA, 51 bp, Artificial; identical to SEQ ID NO: 241131
  Synthetic oligonucleotide

SEQ ID NO: 643728 - DNA, 55 bp, Artificial; identical to SEQ ID NO: 147976
  Synthetic oligonucleotide

SEQ ID NO: 643729 - DNA, 55 bp, Artificial; identical to SEQ ID NO: 182704
  Synthetic oligonucleotide

SEQ ID NO: 643730 - DNA, 55 bp, Artificial; identical to SEQ ID NO: 252927
  Synthetic oligonucleotide

SEQ ID NO: 643731 - DNA, 57 bp, Artificial; identical to SEQ ID NO: 257441
  Synthetic oligonucleotide

SEQ ID NO: 643732 - DNA, 55 bp, Artificial; identical to SEQ ID NO: 253917
  Synthetic oligonucleotide

SEQ ID NO: 643733 - DNA, 54 bp, Artificial; identical to SEQ ID NO: 221421
  Synthetic oligonucleotide

SEQ ID NO: 643734 - DNA, 53 bp, Artificial; identical to SEQ ID NO: 202986
  Synthetic oligonucleotide

SEQ ID NO: 643735 - DNA, 58 bp, Artificial; identical to SEQ ID NO: 168966
  Synthetic oligonucleotide

SEQ ID NO: 643736 - DNA, 55 bp, Artificial; identical to SEQ ID NO: 209334
  Synthetic oligonucleotide

SEQ ID NO: 643737 - DNA, 55 bp, Artificial; identical to SEQ ID NO: 253711
  Synthetic oligonucleotide

SEQ ID NO: 643738 - DNA, 55 bp, Artificial; identical to SEQ ID NO: 162068
  Synthetic oligonucleotide

SEQ ID NO: 643739 - DNA, 55 bp, Artificial; identical to SEQ ID NO: 159777
  Synthetic oligonucleotide

SEQ ID NO: 643740 - DNA, 50 bp, Artificial; identical to SEQ ID NO: 197782
  Synthetic oligonucleotide

SEQ ID NO: 643741 - DNA, 55 bp, Artificial; identical to SEQ ID NO: 166621
  Synthetic oligonucleotide

SEQ ID NO: 643742 - DNA, 60 bp, Artificial; identical to SEQ ID NO: 256575
  Synthetic oligonucleotide

SEQ ID NO: 643743 - DNA, 51 bp, Artificial; identical to SEQ ID NO: 240715
  Synthetic oligonucleotide

SEQ ID NO: 643744 - DNA, 50 bp, Artificial; identical to SEQ ID NO: 209793
  Synthetic oligonucleotide

SEQ ID NO: 643745 - DNA, 57 bp, Artificial; identical to SEQ ID NO: 191722
  Synthetic oligonucleotide

SEQ ID NO: 643746 - DNA, 52 bp, Artificial; identical to SEQ ID NO: 192118
  Synthetic oligonucleotide

SEQ ID NO: 643747 - DNA, 57 bp, Artificial; identical to SEQ ID NO: 147097
  Synthetic oligonucleotide

SEQ ID NO: 643748 - DNA, 55 bp, Artificial; identical to SEQ ID NO: 151723
  Synthetic oligonucleotide

SEQ ID NO: 643749 - DNA, 55 bp, Artificial; identical to SEQ ID NO: 221419
  Synthetic oligonucleotide

SEQ ID NO: 643750 - DNA, 53 bp, Artificial; identical to SEQ ID NO: 255313
  Synthetic oligonucleotide

SEQ ID NO: 643751 - DNA, 51 bp, Artificial; identical to SEQ ID NO: 192170
  Synthetic oligonucleotide

SEQ ID NO: 643752 - DNA, 60 bp, Artificial; identical to SEQ ID NO: 178643
  Synthetic oligonucleotide

SEQ ID NO: 643753 - DNA, 58 bp, Artificial; identical to SEQ ID NO: 164945
  Synthetic oligonucleotide

SEQ ID NO: 643754 - DNA, 53 bp, Artificial; identical to SEQ ID NO: 209629
  Synthetic oligonucleotide

SEQ ID NO: 643755 - DNA, 55 bp, Artificial; identical to SEQ ID NO: 253915
  Synthetic oligonucleotide

SEQ ID NO: 643756 - DNA, 55 bp, Artificial; identical to SEQ ID NO: 147977
  Synthetic oligonucleotide

SEQ ID NO: 643757 - DNA, 56 bp, Artificial; identical to SEQ ID NO: 178642
  Synthetic oligonucleotide

SEQ ID NO: 643758 - DNA, 56 bp, Artificial; identical to SEQ ID NO: 172890
  Synthetic oligonucleotide

SEQ ID NO: 643759 - DNA, 55 bp, Artificial; identical to SEQ ID NO: 187671
  Synthetic oligonucleotide

SEQ ID NO: 643760 - DNA, 55 bp, Artificial; identical to SEQ ID NO: 197132
  Synthetic oligonucleotide

SEQ ID NO: 643761 - DNA, 50 bp, Artificial; identical to SEQ ID NO: 187114
  Synthetic oligonucleotide

SEQ ID NO: 643762 - DNA, 57 bp, Artificial; identical to SEQ ID NO: 187379
  Synthetic oligonucleotide

SEQ ID NO: 643763 - DNA, 55 bp, Artificial; identical to SEQ ID NO: 182742
  Synthetic oligonucleotide

SEQ ID NO: 643764 - DNA, 54 bp, Artificial; identical to SEQ ID NO: 240591
  Synthetic oligonucleotide

SEQ ID NO: 643765 - DNA, 52 bp, Artificial; identical to SEQ ID NO: 255528
  Synthetic oligonucleotide

SEQ ID NO: 643766 - DNA, 57 bp, Artificial; identical to SEQ ID NO: 178641
  Synthetic oligonucleotide

SEQ ID NO: 643767 - DNA, 54 bp, Artificial; identical to SEQ ID NO: 240593
  Synthetic oligonucleotide

SEQ ID NO: 643768 - DNA, 55 bp, Artificial; identical to SEQ ID NO: 190340
  Synthetic oligonucleotide

SEQ ID NO: 643769 - DNA, 51 bp, Artificial; identical to SEQ ID NO: 233862
  Synthetic oligonucleotide

SEQ ID NO: 643770 - DNA, 55 bp, Artificial; identical to SEQ ID NO: 198656
  Synthetic oligonucleotide

SEQ ID NO: 643771 - DNA, 57 bp, Artificial; identical to SEQ ID NO: 201195
  Synthetic oligonucleotide

SEQ ID NO: 643772 - DNA, 58 bp, Artificial; identical to SEQ ID NO: 224736
  Synthetic oligonucleotide

SEQ ID NO: 643773 - DNA, 55 bp, Artificial; identical to SEQ ID NO: 178640
  Synthetic oligonucleotide

SEQ ID NO: 643774 - DNA, 54 bp, Artificial; identical to SEQ ID NO: 142692
  Synthetic oligonucleotide

SEQ ID NO: 643775 - DNA, 54 bp, Artificial; identical to SEQ ID NO: 244317
  Synthetic oligonucleotide

SEQ ID NO: 643776 - DNA, 52 bp, Artificial; identical to SEQ ID NO: 243660
  Synthetic oligonucleotide

SEQ ID NO: 643777 - DNA, 57 bp, Artificial; identical to SEQ ID NO: 209215
  Synthetic oligonucleotide

SEQ ID NO: 643778 - DNA, 51 bp, Artificial; identical to SEQ ID NO: 148749
  Synthetic oligonucleotide

SEQ ID NO: 643779 - DNA, 56 bp, Artificial; identical to SEQ ID NO: 254444
  Synthetic oligonucleotide

SEQ ID NO: 643780 - DNA, 51 bp, Artificial; identical to SEQ ID NO: 200109
  Synthetic oligonucleotide

SEQ ID NO: 643781 - DNA, 55 bp, Artificial; identical to SEQ ID NO: 179567
  Synthetic oligonucleotide

SEQ ID NO: 643782 - DNA, 51 bp, Artificial; identical to SEQ ID NO: 241304
  Synthetic oligonucleotide

SEQ ID NO: 643783 - DNA, 60 bp, Artificial; identical to SEQ ID NO: 223339
  Synthetic oligonucleotide

SEQ ID NO: 643784 - DNA, 57 bp, Artificial; identical to SEQ ID NO: 207049
  Synthetic oligonucleotide

SEQ ID NO: 643785 - DNA, 55 bp, Artificial; identical to SEQ ID NO: 187555
  Synthetic oligonucleotide

SEQ ID NO: 643786 - DNA, 54 bp, Artificial; identical to SEQ ID NO: 185059
  Synthetic oligonucleotide

SEQ ID NO: 643787 - DNA, 57 bp, Artificial; identical to SEQ ID NO: 201194
  Synthetic oligonucleotide

SEQ ID NO: 643788 - DNA, 57 bp, Artificial; identical to SEQ ID NO: 147267
  Synthetic oligonucleotide

SEQ ID NO: 643789 - DNA, 55 bp, Artificial; identical to SEQ ID NO: 253913
  Synthetic oligonucleotide

SEQ ID NO: 643790 - DNA, 55 bp, Artificial; identical to SEQ ID NO: 253911
  Synthetic oligonucleotide

SEQ ID NO: 643791 - DNA, 50 bp, Artificial; identical to SEQ ID NO: 259542
  Synthetic oligonucleotide

SEQ ID NO: 643792 - DNA, 53 bp, Artificial; identical to SEQ ID NO: 169481
  Synthetic oligonucleotide

SEQ ID NO: 643793 - DNA, 55 bp, Artificial; identical to SEQ ID NO: 234371
  Synthetic oligonucleotide

SEQ ID NO: 643794 - DNA, 59 bp, Artificial; identical to SEQ ID NO: 159839
  Synthetic oligonucleotide

SEQ ID NO: 643795 - DNA, 55 bp, Artificial; identical to SEQ ID NO: 219564
  Synthetic oligonucleotide

SEQ ID NO: 643796 - DNA, 58 bp, Artificial; identical to SEQ ID NO: 202407
  Synthetic oligonucleotide

SEQ ID NO: 643797 - DNA, 52 bp, Artificial; identical to SEQ ID NO: 246532
  Synthetic oligonucleotide

SEQ ID NO: 643798 - DNA, 55 bp, Artificial; identical to SEQ ID NO: 239769
  Synthetic oligonucleotide

SEQ ID NO: 643799 - DNA, 57 bp, Artificial; identical to SEQ ID NO: 247498
  Synthetic oligonucleotide

SEQ ID NO: 643800 - DNA, 54 bp, Artificial; identical to SEQ ID NO: 165056
  Synthetic oligonucleotide

SEQ ID NO: 643801 - DNA, 51 bp, Artificial; identical to SEQ ID NO: 209743
  Synthetic oligonucleotide

SEQ ID NO: 643802 - DNA, 54 bp, Artificial; identical to SEQ ID NO: 244755
  Synthetic oligonucleotide

SEQ ID NO: 643803 - DNA, 60 bp, Artificial; identical to SEQ ID NO: 148804
  Synthetic oligonucleotide

SEQ ID NO: 643804 - DNA, 51 bp, Artificial; identical to SEQ ID NO: 239778
  Synthetic oligonucleotide

SEQ ID NO: 643805 - DNA, 55 bp, Artificial; identical to SEQ ID NO: 182737
  Synthetic oligonucleotide

SEQ ID NO: 643806 - DNA, 55 bp, Artificial; identical to SEQ ID NO: 260198
  Synthetic oligonucleotide

SEQ ID NO: 643807 - DNA, 55 bp, Artificial; identical to SEQ ID NO: 252928
  Synthetic oligonucleotide

SEQ ID NO: 643808 - DNA, 55 bp, Artificial; identical to SEQ ID NO: 182736
  Synthetic oligonucleotide

SEQ ID NO: 643809 - DNA, 55 bp, Artificial; identical to SEQ ID NO: 182735
  Synthetic oligonucleotide

SEQ ID NO: 643810 - DNA, 53 bp, Artificial; identical to SEQ ID NO: 243603
  Synthetic oligonucleotide

SEQ ID NO: 643811 - DNA, 52 bp, Artificial; identical to SEQ ID NO: 154016
  Synthetic oligonucleotide

SEQ ID NO: 643812 - DNA, 60 bp, Artificial; identical to SEQ ID NO: 266028
  Synthetic oligonucleotide

SEQ ID NO: 643813 - DNA, 51 bp, Artificial; identical to SEQ ID NO: 246773
  Synthetic oligonucleotide

SEQ ID NO: 643814 - DNA, 52 bp, Artificial; identical to SEQ ID NO: 178639
  Synthetic oligonucleotide

SEQ ID NO: 643815 - DNA, 60 bp, Artificial; identical to SEQ ID NO: 217069
  Synthetic oligonucleotide

SEQ ID NO: 643816 - DNA, 57 bp, Artificial; identical to SEQ ID NO: 243922
  Synthetic oligonucleotide

SEQ ID NO: 643817 - DNA, 55 bp, Artificial; identical to SEQ ID NO: 217697
  Synthetic oligonucleotide

SEQ ID NO: 643818 - DNA, 58 bp, Artificial; identical to SEQ ID NO: 159943
  Synthetic oligonucleotide

SEQ ID NO: 643819 - DNA, 55 bp, Artificial; identical to SEQ ID NO: 253909
  Synthetic oligonucleotide

SEQ ID NO: 643820 - DNA, 51 bp, Artificial; identical to SEQ ID NO: 186509
  Synthetic oligonucleotide

SEQ ID NO: 643821 - DNA, 55 bp, Artificial; identical to SEQ ID NO: 198655
  Synthetic oligonucleotide

SEQ ID NO: 643822 - DNA, 52 bp, Artificial; identical to SEQ ID NO: 186285
  Synthetic oligonucleotide

SEQ ID NO: 643823 - DNA, 55 bp, Artificial; identical to SEQ ID NO: 144490
  Synthetic oligonucleotide

SEQ ID NO: 643824 - DNA, 58 bp, Artificial; identical to SEQ ID NO: 188968
  Synthetic oligonucleotide

SEQ ID NO: 643825 - DNA, 54 bp, Artificial; identical to SEQ ID NO: 149316
  Synthetic oligonucleotide

SEQ ID NO: 643826 - DNA, 53 bp, Artificial; identical to SEQ ID NO: 243184
  Synthetic oligonucleotide

SEQ ID NO: 643827 - DNA, 54 bp, Artificial; identical to SEQ ID NO: 216551
  Synthetic oligonucleotide

SEQ ID NO: 643828 - DNA, 54 bp, Artificial; identical to SEQ ID NO: 164763
  Synthetic oligonucleotide

SEQ ID NO: 643829 - DNA, 55 bp, Artificial; identical to SEQ ID NO: 191990
  Synthetic oligonucleotide

SEQ ID NO: 643830 - DNA, 60 bp, Artificial; identical to SEQ ID NO: 256930
  Synthetic oligonucleotide

SEQ ID NO: 643831 - DNA, 50 bp, Artificial; identical to SEQ ID NO: 200441
  Synthetic oligonucleotide

SEQ ID NO: 643832 - DNA, 55 bp, Artificial; identical to SEQ ID NO: 166789
  Synthetic oligonucleotide

SEQ ID NO: 643833 - DNA, 54 bp, Artificial; identical to SEQ ID NO: 187996
  Synthetic oligonucleotide

SEQ ID NO: 643834 - DNA, 50 bp, Artificial; identical to SEQ ID NO: 176945
  Synthetic oligonucleotide

SEQ ID NO: 643835 - DNA, 55 bp, Artificial; identical to SEQ ID NO: 224824
  Synthetic oligonucleotide

SEQ ID NO: 643836 - DNA, 58 bp, Artificial; identical to SEQ ID NO: 247276
  Synthetic oligonucleotide

SEQ ID NO: 643837 - DNA, 58 bp, Artificial; identical to SEQ ID NO: 200692
  Synthetic oligonucleotide

SEQ ID NO: 643838 - DNA, 55 bp, Artificial; identical to SEQ ID NO: 244323
  Synthetic oligonucleotide

SEQ ID NO: 643839 - DNA, 58 bp, Artificial; identical to SEQ ID NO: 210763
  Synthetic oligonucleotide

SEQ ID NO: 643840 - DNA, 56 bp, Artificial; identical to SEQ ID NO: 247570
  Synthetic oligonucleotide

SEQ ID NO: 643841 - DNA, 53 bp, Artificial; identical to SEQ ID NO: 185459
  Synthetic oligonucleotide

SEQ ID NO: 643842 - DNA, 54 bp, Artificial; identical to SEQ ID NO: 212941
  Synthetic oligonucleotide

SEQ ID NO: 643843 - DNA, 59 bp, Artificial; identical to SEQ ID NO: 256517
  Synthetic oligonucleotide

SEQ ID NO: 643844 - DNA, 55 bp, Artificial; identical to SEQ ID NO: 198654
  Synthetic oligonucleotide

SEQ ID NO: 643845 - DNA, 52 bp, Artificial; identical to SEQ ID NO: 255474
  Synthetic oligonucleotide

SEQ ID NO: 643846 - DNA, 55 bp, Artificial; identical to SEQ ID NO: 244324
  Synthetic oligonucleotide

SEQ ID NO: 643847 - DNA, 52 bp, Artificial; identical to SEQ ID NO: 247917
  Synthetic oligonucleotide

SEQ ID NO: 643848 - DNA, 56 bp, Artificial; identical to SEQ ID NO: 149349
  Synthetic oligonucleotide

SEQ ID NO: 643849 - DNA, 55 bp, Artificial; identical to SEQ ID NO: 252929
  Synthetic oligonucleotide

SEQ ID NO: 643850 - DNA, 50 bp, Artificial; identical to SEQ ID NO: 145156
  Synthetic oligonucleotide

SEQ ID NO: 643851 - DNA, 55 bp, Artificial; identical to SEQ ID NO: 239969
  Synthetic oligonucleotide

SEQ ID NO: 643852 - DNA, 55 bp, Artificial; identical to SEQ ID NO: 166619
  Synthetic oligonucleotide

SEQ ID NO: 643853 - DNA, 51 bp, Artificial; identical to SEQ ID NO: 186456
  Synthetic oligonucleotide

SEQ ID NO: 643854 - DNA, 54 bp, Artificial; identical to SEQ ID NO: 223486
  Synthetic oligonucleotide

SEQ ID NO: 643855 - DNA, 55 bp, Artificial; identical to SEQ ID NO: 182725
  Synthetic oligonucleotide

SEQ ID NO: 643856 - DNA, 55 bp, Artificial; identical to SEQ ID NO: 253907
  Synthetic oligonucleotide

SEQ ID NO: 643857 - DNA, 60 bp, Artificial; identical to SEQ ID NO: 152517
  Synthetic oligonucleotide

SEQ ID NO: 643858 - DNA, 52 bp, Artificial; identical to SEQ ID NO: 209624
  Synthetic oligonucleotide

SEQ ID NO: 643859 - DNA, 50 bp, Artificial; identical to SEQ ID NO: 201731
  Synthetic oligonucleotide

SEQ ID NO: 643860 - DNA, 54 bp, Artificial; identical to SEQ ID NO: 178632
  Synthetic oligonucleotide

SEQ ID NO: 643861 - DNA, 52 bp, Artificial; identical to SEQ ID NO: 209700
  Synthetic oligonucleotide

SEQ ID NO: 643862 - DNA, 60 bp, Artificial; identical to SEQ ID NO: 203248
  Synthetic oligonucleotide

SEQ ID NO: 643863 - DNA, 55 bp, Artificial; identical to SEQ ID NO: 209333
  Synthetic oligonucleotide

SEQ ID NO: 643864 - DNA, 53 bp, Artificial; identical to SEQ ID NO: 236994
  Synthetic oligonucleotide

SEQ ID NO: 643865 - DNA, 51 bp, Artificial; identical to SEQ ID NO: 141344
  Synthetic oligonucleotide

SEQ ID NO: 643866 - DNA, 51 bp, Artificial; identical to SEQ ID NO: 200087
  Synthetic oligonucleotide

SEQ ID NO: 643867 - DNA, 55 bp, Artificial; identical to SEQ ID NO: 159784
  Synthetic oligonucleotide

SEQ ID NO: 643868 - DNA, 55 bp, Artificial; identical to SEQ ID NO: 253906
  Synthetic oligonucleotide

SEQ ID NO: 643869 - DNA, 55 bp, Artificial; identical to SEQ ID NO: 144491
  Synthetic oligonucleotide

SEQ ID NO: 643870 - DNA, 57 bp, Artificial; identical to SEQ ID NO: 224270
  Synthetic oligonucleotide

SEQ ID NO: 643871 - DNA, 53 bp, Artificial; identical to SEQ ID NO: 151719
  Synthetic oligonucleotide

SEQ ID NO: 643872 - DNA, 50 bp, Artificial; identical to SEQ ID NO: 216899
  Synthetic oligonucleotide

SEQ ID NO: 643873 - DNA, 52 bp, Artificial; identical to SEQ ID NO: 164993
  Synthetic oligonucleotide

SEQ ID NO: 643874 - DNA, 55 bp, Artificial; identical to SEQ ID NO: 197133
  Synthetic oligonucleotide

SEQ ID NO: 643875 - DNA, 55 bp, Artificial; identical to SEQ ID NO: 201815
  Synthetic oligonucleotide

SEQ ID NO: 643876 - DNA, 50 bp, Artificial; identical to SEQ ID NO: 177010
  Synthetic oligonucleotide

SEQ ID NO: 643877 - DNA, 55 bp, Artificial; identical to SEQ ID NO: 144901
  Synthetic oligonucleotide

SEQ ID NO: 643878 - DNA, 59 bp, Artificial; identical to SEQ ID NO: 167278
  Synthetic oligonucleotide

SEQ ID NO: 643879 - DNA, 55 bp, Artificial; identical to SEQ ID NO: 257440
  Synthetic oligonucleotide

SEQ ID NO: 643880 - DNA, 54 bp, Artificial; identical to SEQ ID NO: 185068
  Synthetic oligonucleotide

SEQ ID NO: 643881 - DNA, 59 bp, Artificial; identical to SEQ ID NO: 243604
  Synthetic oligonucleotide

SEQ ID NO: 643882 - DNA, 56 bp, Artificial; identical to SEQ ID NO: 247054
  Synthetic oligonucleotide

SEQ ID NO: 643883 - DNA, 56 bp, Artificial; identical to SEQ ID NO: 151336
  Synthetic oligonucleotide

SEQ ID NO: 643884 - DNA, 58 bp, Artificial; identical to SEQ ID NO: 178625
  Synthetic oligonucleotide

SEQ ID NO: 643885 - DNA, 58 bp, Artificial; identical to SEQ ID NO: 197304
  Synthetic oligonucleotide

SEQ ID NO: 643886 - DNA, 55 bp, Artificial; identical to SEQ ID NO: 211421
  Synthetic oligonucleotide

SEQ ID NO: 643887 - DNA, 57 bp, Artificial; identical to SEQ ID NO: 178622
  Synthetic oligonucleotide

SEQ ID NO: 643888 - DNA, 60 bp, Artificial; identical to SEQ ID NO: 178621
  Synthetic oligonucleotide

SEQ ID NO: 643889 - DNA, 53 bp, Artificial; identical to SEQ ID NO: 239394
  Synthetic oligonucleotide

SEQ ID NO: 643890 - DNA, 55 bp, Artificial; identical to SEQ ID NO: 154344
  Synthetic oligonucleotide

SEQ ID NO: 643891 - DNA, 55 bp, Artificial; identical to SEQ ID NO: 160334
  Synthetic oligonucleotide

SEQ ID NO: 643892 - DNA, 57 bp, Artificial; identical to SEQ ID NO: 209211
  Synthetic oligonucleotide

SEQ ID NO: 643893 - DNA, 54 bp, Artificial; identical to SEQ ID NO: 192123
  Synthetic oligonucleotide

SEQ ID NO: 643894 - DNA, 55 bp, Artificial; identical to SEQ ID NO: 248912
  Synthetic oligonucleotide

SEQ ID NO: 643895 - DNA, 51 bp, Artificial; identical to SEQ ID NO: 191227
  Synthetic oligonucleotide

SEQ ID NO: 643896 - DNA, 51 bp, Artificial; identical to SEQ ID NO: 141343
  Synthetic oligonucleotide

SEQ ID NO: 643897 - DNA, 55 bp, Artificial; identical to SEQ ID NO: 159787
  Synthetic oligonucleotide

SEQ ID NO: 643898 - DNA, 55 bp, Artificial; identical to SEQ ID NO: 169280
  Synthetic oligonucleotide

SEQ ID NO: 643899 - DNA, 55 bp, Artificial; identical to SEQ ID NO: 248911
  Synthetic oligonucleotide

SEQ ID NO: 643900 - DNA, 59 bp, Artificial; identical to SEQ ID NO: 194348
  Synthetic oligonucleotide

SEQ ID NO: 643901 - DNA, 54 bp, Artificial; identical to SEQ ID NO: 253904
  Synthetic oligonucleotide

SEQ ID NO: 643902 - DNA, 55 bp, Artificial; identical to SEQ ID NO: 147947
  Synthetic oligonucleotide

SEQ ID NO: 643903 - DNA, 51 bp, Artificial; identical to SEQ ID NO: 149360
  Synthetic oligonucleotide

SEQ ID NO: 643904 - DNA, 55 bp, Artificial; identical to SEQ ID NO: 151665
  Synthetic oligonucleotide

SEQ ID NO: 643905 - DNA, 55 bp, Artificial; identical to SEQ ID NO: 187603
  Synthetic oligonucleotide

SEQ ID NO: 643906 - DNA, 60 bp, Artificial; identical to SEQ ID NO: 187187
  Synthetic oligonucleotide

SEQ ID NO: 643907 - DNA, 51 bp, Artificial; identical to SEQ ID NO: 154645
  Synthetic oligonucleotide

SEQ ID NO: 643908 - DNA, 53 bp, Artificial; identical to SEQ ID NO: 248555
  Synthetic oligonucleotide

SEQ ID NO: 643909 - DNA, 55 bp, Artificial; identical to SEQ ID NO: 265816
  Synthetic oligonucleotide

SEQ ID NO: 643910 - DNA, 53 bp, Artificial; identical to SEQ ID NO: 174361
  Synthetic oligonucleotide

SEQ ID NO: 643911 - DNA, 55 bp, Artificial; identical to SEQ ID NO: 171535
  Synthetic oligonucleotide

SEQ ID NO: 643912 - DNA, 55 bp, Artificial; identical to SEQ ID NO: 144907
  Synthetic oligonucleotide

SEQ ID NO: 643913 - DNA, 53 bp, Artificial; identical to SEQ ID NO: 157289
  Synthetic oligonucleotide

SEQ ID NO: 643914 - DNA, 54 bp, Artificial; identical to SEQ ID NO: 185174
  Synthetic oligonucleotide

SEQ ID NO: 643915 - DNA, 56 bp, Artificial; identical to SEQ ID NO: 256375
  Synthetic oligonucleotide

SEQ ID NO: 643916 - DNA, 58 bp, Artificial; identical to SEQ ID NO: 200691
  Synthetic oligonucleotide

SEQ ID NO: 643917 - DNA, 55 bp, Artificial; identical to SEQ ID NO: 168490
  Synthetic oligonucleotide

SEQ ID NO: 643918 - DNA, 55 bp, Artificial; identical to SEQ ID NO: 182492
  Synthetic oligonucleotide

SEQ ID NO: 643919 - DNA, 55 bp, Artificial; identical to SEQ ID NO: 238341
  Synthetic oligonucleotide

SEQ ID NO: 643920 - DNA, 50 bp, Artificial; identical to SEQ ID NO: 217308
  Synthetic oligonucleotide

SEQ ID NO: 643921 - DNA, 55 bp, Artificial; identical to SEQ ID NO: 182491
  Synthetic oligonucleotide

SEQ ID NO: 643922 - DNA, 55 bp, Artificial; identical to SEQ ID NO: 159790
  Synthetic oligonucleotide

SEQ ID NO: 643923 - DNA, 55 bp, Artificial; identical to SEQ ID NO: 245042
  Synthetic oligonucleotide

SEQ ID NO: 643924 - DNA, 55 bp, Artificial; identical to SEQ ID NO: 182490
  Synthetic oligonucleotide

SEQ ID NO: 643925 - DNA, 55 bp, Artificial; identical to SEQ ID NO: 182489
  Synthetic oligonucleotide

SEQ ID NO: 643926 - DNA, 54 bp, Artificial; identical to SEQ ID NO: 144974
  Synthetic oligonucleotide

SEQ ID NO: 643927 - DNA, 56 bp, Artificial; identical to SEQ ID NO: 225535
  Synthetic oligonucleotide

SEQ ID NO: 643928 - DNA, 57 bp, Artificial; identical to SEQ ID NO: 167351
  Synthetic oligonucleotide

SEQ ID NO: 643929 - DNA, 54 bp, Artificial; identical to SEQ ID NO: 255276
  Synthetic oligonucleotide

SEQ ID NO: 643930 - DNA, 59 bp, Artificial; identical to SEQ ID NO: 200690
  Synthetic oligonucleotide

SEQ ID NO: 643931 - DNA, 55 bp, Artificial; identical to SEQ ID NO: 174608
  Synthetic oligonucleotide

SEQ ID NO: 643932 - DNA, 55 bp, Artificial; identical to SEQ ID NO: 261921
  Synthetic oligonucleotide

SEQ ID NO: 643933 - DNA, 51 bp, Artificial; identical to SEQ ID NO: 253369
  Synthetic oligonucleotide

SEQ ID NO: 643934 - DNA, 55 bp, Artificial; identical to SEQ ID NO: 188992
  Synthetic oligonucleotide

SEQ ID NO: 643935 - DNA, 51 bp, Artificial; identical to SEQ ID NO: 194261
  Synthetic oligonucleotide

SEQ ID NO: 643936 - DNA, 50 bp, Artificial; identical to SEQ ID NO: 150208
  Synthetic oligonucleotide

SEQ ID NO: 643937 - DNA, 60 bp, Artificial; identical to SEQ ID NO: 237807
  Synthetic oligonucleotide

SEQ ID NO: 643938 - DNA, 57 bp, Artificial; identical to SEQ ID NO: 252685
  Synthetic oligonucleotide

SEQ ID NO: 643939 - DNA, 55 bp, Artificial; identical to SEQ ID NO: 147951
  Synthetic oligonucleotide

SEQ ID NO: 643940 - DNA, 56 bp, Artificial; identical to SEQ ID NO: 248651
  Synthetic oligonucleotide

SEQ ID NO: 643941 - DNA, 50 bp, Artificial; identical to SEQ ID NO: 176610
  Synthetic oligonucleotide

SEQ ID NO: 643942 - DNA, 51 bp, Artificial; identical to SEQ ID NO: 209747
  Synthetic oligonucleotide

SEQ ID NO: 643943 - DNA, 55 bp, Artificial; identical to SEQ ID NO: 238340
  Synthetic oligonucleotide

SEQ ID NO: 643944 - DNA, 56 bp, Artificial; identical to SEQ ID NO: 239496
  Synthetic oligonucleotide

SEQ ID NO: 643945 - DNA, 55 bp, Artificial; identical to SEQ ID NO: 200819
  Synthetic oligonucleotide

SEQ ID NO: 643946 - DNA, 60 bp, Artificial; identical to SEQ ID NO: 156598
  Synthetic oligonucleotide

SEQ ID NO: 643947 - DNA, 55 bp, Artificial; identical to SEQ ID NO: 159792
  Synthetic oligonucleotide

SEQ ID NO: 643948 - DNA, 51 bp, Artificial; identical to SEQ ID NO: 186470
  Synthetic oligonucleotide

SEQ ID NO: 643949 - DNA, 54 bp, Artificial; identical to SEQ ID NO: 209566
  Synthetic oligonucleotide

SEQ ID NO: 643950 - DNA, 60 bp, Artificial; identical to SEQ ID NO: 178774
  Synthetic oligonucleotide

SEQ ID NO: 643951 - DNA, 60 bp, Artificial; identical to SEQ ID NO: 256342
  Synthetic oligonucleotide

SEQ ID NO: 643952 - DNA, 60 bp, Artificial; identical to SEQ ID NO: 178773
  Synthetic oligonucleotide

SEQ ID NO: 643953 - DNA, 52 bp, Artificial; identical to SEQ ID NO: 157615
  Synthetic oligonucleotide

SEQ ID NO: 643954 - DNA, 57 bp, Artificial; identical to SEQ ID NO: 224247
  Synthetic oligonucleotide

SEQ ID NO: 643955 - DNA, 52 bp, Artificial; identical to SEQ ID NO: 164985
  Synthetic oligonucleotide

SEQ ID NO: 643956 - DNA, 55 bp, Artificial; identical to SEQ ID NO: 224192
  Synthetic oligonucleotide

SEQ ID NO: 643957 - DNA, 55 bp, Artificial; identical to SEQ ID NO: 182484
  Synthetic oligonucleotide

SEQ ID NO: 643958 - DNA, 57 bp, Artificial; identical to SEQ ID NO: 147178
  Synthetic oligonucleotide

SEQ ID NO: 643959 - DNA, 52 bp, Artificial; identical to SEQ ID NO: 246529
  Synthetic oligonucleotide

SEQ ID NO: 643960 - DNA, 55 bp, Artificial; identical to SEQ ID NO: 200817
  Synthetic oligonucleotide

SEQ ID NO: 643961 - DNA, 51 bp, Artificial; identical to SEQ ID NO: 221780
  Synthetic oligonucleotide

SEQ ID NO: 643962 - DNA, 55 bp, Artificial; identical to SEQ ID NO: 182483
  Synthetic oligonucleotide

SEQ ID NO: 643963 - DNA, 55 bp, Artificial; identical to SEQ ID NO: 152319
  Synthetic oligonucleotide

SEQ ID NO: 643964 - DNA, 55 bp, Artificial; identical to SEQ ID NO: 253899
  Synthetic oligonucleotide

SEQ ID NO: 643965 - DNA, 55 bp, Artificial; identical to SEQ ID NO: 187575
  Synthetic oligonucleotide

SEQ ID NO: 643966 - DNA, 56 bp, Artificial; identical to SEQ ID NO: 189682
  Synthetic oligonucleotide

SEQ ID NO: 643967 - DNA, 55 bp, Artificial; identical to SEQ ID NO: 147952
  Synthetic oligonucleotide

SEQ ID NO: 643968 - DNA, 58 bp, Artificial; identical to SEQ ID NO: 241802
  Synthetic oligonucleotide

SEQ ID NO: 643969 - DNA, 59 bp, Artificial; identical to SEQ ID NO: 233667
  Synthetic oligonucleotide

SEQ ID NO: 643970 - DNA, 52 bp, Artificial; identical to SEQ ID NO: 197600
  Synthetic oligonucleotide

SEQ ID NO: 643971 - DNA, 55 bp, Artificial; identical to SEQ ID NO: 153489
  Synthetic oligonucleotide

SEQ ID NO: 643972 - DNA, 55 bp, Artificial; identical to SEQ ID NO: 253898
  Synthetic oligonucleotide

SEQ ID NO: 643973 - DNA, 56 bp, Artificial; identical to SEQ ID NO: 247199
  Synthetic oligonucleotide

SEQ ID NO: 643974 - DNA, 53 bp, Artificial; identical to SEQ ID NO: 192071
  Synthetic oligonucleotide

SEQ ID NO: 643975 - DNA, 55 bp, Artificial; identical to SEQ ID NO: 159795
  Synthetic oligonucleotide

SEQ ID NO: 643976 - DNA, 55 bp, Artificial; identical to SEQ ID NO: 239966
  Synthetic oligonucleotide

SEQ ID NO: 643977 - DNA, 57 bp, Artificial; identical to SEQ ID NO: 149404
  Synthetic oligonucleotide

SEQ ID NO: 643978 - DNA, 55 bp, Artificial; identical to SEQ ID NO: 211457
  Synthetic oligonucleotide

SEQ ID NO: 643979 - DNA, 51 bp, Artificial; identical to SEQ ID NO: 197685
  Synthetic oligonucleotide

SEQ ID NO: 643980 - DNA, 53 bp, Artificial; identical to SEQ ID NO: 199677
  Synthetic oligonucleotide

SEQ ID NO: 643981 - DNA, 55 bp, Artificial; identical to SEQ ID NO: 182481
  Synthetic oligonucleotide

SEQ ID NO: 643982 - DNA, 55 bp, Artificial; identical to SEQ ID NO: 159796
  Synthetic oligonucleotide

SEQ ID NO: 643983 - DNA, 60 bp, Artificial; identical to SEQ ID NO: 200815
  Synthetic oligonucleotide

SEQ ID NO: 643984 - DNA, 52 bp, Artificial; identical to SEQ ID NO: 240923
  Synthetic oligonucleotide

SEQ ID NO: 643985 - DNA, 55 bp, Artificial; identical to SEQ ID NO: 253897
  Synthetic oligonucleotide

SEQ ID NO: 643986 - DNA, 52 bp, Artificial; identical to SEQ ID NO: 154349
  Synthetic oligonucleotide

SEQ ID NO: 643987 - DNA, 55 bp, Artificial; identical to SEQ ID NO: 253896
  Synthetic oligonucleotide

SEQ ID NO: 643988 - DNA, 53 bp, Artificial; identical to SEQ ID NO: 155756
  Synthetic oligonucleotide

SEQ ID NO: 643989 - DNA, 55 bp, Artificial; identical to SEQ ID NO: 182480
  Synthetic oligonucleotide

SEQ ID NO: 643990 - DNA, 52 bp, Artificial; identical to SEQ ID NO: 247912
  Synthetic oligonucleotide

SEQ ID NO: 643991 - DNA, 52 bp, Artificial; identical to SEQ ID NO: 213033
  Synthetic oligonucleotide

SEQ ID NO: 643992 - DNA, 55 bp, Artificial; identical to SEQ ID NO: 155454
  Synthetic oligonucleotide

SEQ ID NO: 643993 - DNA, 55 bp, Artificial; identical to SEQ ID NO: 155757
  Synthetic oligonucleotide

SEQ ID NO: 643994 - DNA, 55 bp, Artificial; identical to SEQ ID NO: 244328
  Synthetic oligonucleotide

SEQ ID NO: 643995 - DNA, 59 bp, Artificial; identical to SEQ ID NO: 243607
  Synthetic oligonucleotide

SEQ ID NO: 643996 - DNA, 55 bp, Artificial; identical to SEQ ID NO: 238339
  Synthetic oligonucleotide

SEQ ID NO: 643997 - DNA, 52 bp, Artificial; identical to SEQ ID NO: 240925
  Synthetic oligonucleotide

SEQ ID NO: 643998 - DNA, 60 bp, Artificial; identical to SEQ ID NO: 202418
  Synthetic oligonucleotide

SEQ ID NO: 643999 - DNA, 53 bp, Artificial; identical to SEQ ID NO: 185520
  Synthetic oligonucleotide

SEQ ID NO: 644000 - DNA, 56 bp, Artificial; identical to SEQ ID NO: 247177
  Synthetic oligonucleotide

SEQ ID NO: 644001 - DNA, 53 bp, Artificial; identical to SEQ ID NO: 196915
  Synthetic oligonucleotide

SEQ ID NO: 644002 - DNA, 55 bp, Artificial; identical to SEQ ID NO: 152317
  Synthetic oligonucleotide

SEQ ID NO: 644003 - DNA, 55 bp, Artificial; identical to SEQ ID NO: 253895
  Synthetic oligonucleotide

SEQ ID NO: 644004 - DNA, 57 bp, Artificial; identical to SEQ ID NO: 256309
  Synthetic oligonucleotide

SEQ ID NO: 644005 - DNA, 60 bp, Artificial; identical to SEQ ID NO: 248539
  Synthetic oligonucleotide

SEQ ID NO: 644006 - DNA, 55 bp, Artificial; identical to SEQ ID NO: 154350
  Synthetic oligonucleotide

SEQ ID NO: 644007 - DNA, 55 bp, Artificial; identical to SEQ ID NO: 233461
  Synthetic oligonucleotide

SEQ ID NO: 644008 - DNA, 56 bp, Artificial; identical to SEQ ID NO: 244063
  Synthetic oligonucleotide

SEQ ID NO: 644009 - DNA, 55 bp, Artificial; identical to SEQ ID NO: 171534
  Synthetic oligonucleotide

SEQ ID NO: 644010 - DNA, 60 bp, Artificial; identical to SEQ ID NO: 178766
  Synthetic oligonucleotide

SEQ ID NO: 644011 - DNA, 56 bp, Artificial; identical to SEQ ID NO: 241806
  Synthetic oligonucleotide

SEQ ID NO: 644012 - DNA, 55 bp, Artificial; identical to SEQ ID NO: 233460
  Synthetic oligonucleotide

SEQ ID NO: 644013 - DNA, 50 bp, Artificial; identical to SEQ ID NO: 241680
  Synthetic oligonucleotide

SEQ ID NO: 644014 - DNA, 55 bp, Artificial; identical to SEQ ID NO: 187588
  Synthetic oligonucleotide

SEQ ID NO: 644015 - DNA, 55 bp, Artificial; identical to SEQ ID NO: 147953
  Synthetic oligonucleotide

SEQ ID NO: 644016 - DNA, 54 bp, Artificial; identical to SEQ ID NO: 220610
  Synthetic oligonucleotide

SEQ ID NO: 644017 - DNA, 52 bp, Artificial; identical to SEQ ID NO: 240929
  Synthetic oligonucleotide

SEQ ID NO: 644018 - DNA, 60 bp, Artificial; identical to SEQ ID NO: 212423
  Synthetic oligonucleotide

SEQ ID NO: 644019 - DNA, 60 bp, Artificial; identical to SEQ ID NO: 233334
  Synthetic oligonucleotide

SEQ ID NO: 644020 - DNA, 55 bp, Artificial; identical to SEQ ID NO: 147954
  Synthetic oligonucleotide

SEQ ID NO: 644021 - DNA, 55 bp, Artificial; identical to SEQ ID NO: 240006
  Synthetic oligonucleotide

SEQ ID NO: 644022 - DNA, 51 bp, Artificial; identical to SEQ ID NO: 186450
  Synthetic oligonucleotide

SEQ ID NO: 644023 - DNA, 60 bp, Artificial; identical to SEQ ID NO: 241810
  Synthetic oligonucleotide

SEQ ID NO: 644024 - DNA, 50 bp, Artificial; identical to SEQ ID NO: 206700
  Synthetic oligonucleotide

SEQ ID NO: 644025 - DNA, 55 bp, Artificial; identical to SEQ ID NO: 198647
  Synthetic oligonucleotide

SEQ ID NO: 644026 - DNA, 55 bp, Artificial; identical to SEQ ID NO: 198708
  Synthetic oligonucleotide

SEQ ID NO: 644027 - DNA, 54 bp, Artificial; identical to SEQ ID NO: 203875
  Synthetic oligonucleotide

SEQ ID NO: 644028 - DNA, 58 bp, Artificial; identical to SEQ ID NO: 206826
  Synthetic oligonucleotide

SEQ ID NO: 644029 - DNA, 55 bp, Artificial; identical to SEQ ID NO: 168485
  Synthetic oligonucleotide

SEQ ID NO: 644030 - DNA, 55 bp, Artificial; identical to SEQ ID NO: 238336
  Synthetic oligonucleotide

SEQ ID NO: 644031 - DNA, 53 bp, Artificial; identical to SEQ ID NO: 247903
  Synthetic oligonucleotide

SEQ ID NO: 644032 - DNA, 60 bp, Artificial; identical to SEQ ID NO: 155832
  Synthetic oligonucleotide

SEQ ID NO: 644033 - DNA, 53 bp, Artificial; identical to SEQ ID NO: 157293
  Synthetic oligonucleotide

SEQ ID NO: 644034 - DNA, 56 bp, Artificial; identical to SEQ ID NO: 141901
  Synthetic oligonucleotide

SEQ ID NO: 644035 - DNA, 59 bp, Artificial; identical to SEQ ID NO: 248537
  Synthetic oligonucleotide

SEQ ID NO: 644036 - DNA, 55 bp, Artificial; identical to SEQ ID NO: 253893
  Synthetic oligonucleotide

SEQ ID NO: 644037 - DNA, 55 bp, Artificial; identical to SEQ ID NO: 182521
  Synthetic oligonucleotide

SEQ ID NO: 644038 - DNA, 51 bp, Artificial; identical to SEQ ID NO: 144159
  Synthetic oligonucleotide

SEQ ID NO: 644039 - DNA, 55 bp, Artificial; identical to SEQ ID NO: 198706
  Synthetic oligonucleotide

SEQ ID NO: 644040 - DNA, 54 bp, Artificial; identical to SEQ ID NO: 221651
  Synthetic oligonucleotide

SEQ ID NO: 644041 - DNA, 55 bp, Artificial; identical to SEQ ID NO: 215148
  Synthetic oligonucleotide

SEQ ID NO: 644042 - DNA, 55 bp, Artificial; identical to SEQ ID NO: 144439
  Synthetic oligonucleotide

SEQ ID NO: 644043 - DNA, 51 bp, Artificial; identical to SEQ ID NO: 186479
  Synthetic oligonucleotide

SEQ ID NO: 644044 - DNA, 55 bp, Artificial; identical to SEQ ID NO: 253892
  Synthetic oligonucleotide

SEQ ID NO: 644045 - DNA, 55 bp, Artificial; identical to SEQ ID NO: 219625
  Synthetic oligonucleotide

SEQ ID NO: 644046 - DNA, 55 bp, Artificial; identical to SEQ ID NO: 207367
  Synthetic oligonucleotide

SEQ ID NO: 644047 - DNA, 54 bp, Artificial; identical to SEQ ID NO: 240016
  Synthetic oligonucleotide

SEQ ID NO: 644048 - DNA, 55 bp, Artificial; identical to SEQ ID NO: 257721
  Synthetic oligonucleotide

SEQ ID NO: 644049 - DNA, 55 bp, Artificial; identical to SEQ ID NO: 225100
  Synthetic oligonucleotide

SEQ ID NO: 644050 - DNA, 57 bp, Artificial; identical to SEQ ID NO: 149427
  Synthetic oligonucleotide

SEQ ID NO: 644051 - DNA, 55 bp, Artificial; identical to SEQ ID NO: 147956
  Synthetic oligonucleotide

SEQ ID NO: 644052 - DNA, 55 bp, Artificial; identical to SEQ ID NO: 155178
  Synthetic oligonucleotide

SEQ ID NO: 644053 - DNA, 50 bp, Artificial; identical to SEQ ID NO: 206702
  Synthetic oligonucleotide

SEQ ID NO: 644054 - DNA, 55 bp, Artificial; identical to SEQ ID NO: 178764
  Synthetic oligonucleotide

SEQ ID NO: 644055 - DNA, 60 bp, Artificial; identical to SEQ ID NO: 178763
  Synthetic oligonucleotide

SEQ ID NO: 644056 - DNA, 55 bp, Artificial; identical to SEQ ID NO: 146485
  Synthetic oligonucleotide

SEQ ID NO: 644057 - DNA, 59 bp, Artificial; identical to SEQ ID NO: 161770
  Synthetic oligonucleotide

SEQ ID NO: 644058 - DNA, 52 bp, Artificial; identical to SEQ ID NO: 188234
  Synthetic oligonucleotide

SEQ ID NO: 644059 - DNA, 59 bp, Artificial; identical to SEQ ID NO: 262743
  Synthetic oligonucleotide

SEQ ID NO: 644060 - DNA, 55 bp, Artificial; identical to SEQ ID NO: 248953
  Synthetic oligonucleotide

SEQ ID NO: 644061 - DNA, 55 bp, Artificial; identical to SEQ ID NO: 224875
  Synthetic oligonucleotide

SEQ ID NO: 644062 - DNA, 55 bp, Artificial; identical to SEQ ID NO: 233459
  Synthetic oligonucleotide

SEQ ID NO: 644063 - DNA, 55 bp, Artificial; identical to SEQ ID NO: 253891
  Synthetic oligonucleotide

SEQ ID NO: 644064 - DNA, 53 bp, Artificial; identical to SEQ ID NO: 245064
  Synthetic oligonucleotide

SEQ ID NO: 644065 - DNA, 53 bp, Artificial; identical to SEQ ID NO: 261920
  Synthetic oligonucleotide

SEQ ID NO: 644066 - DNA, 60 bp, Artificial; identical to SEQ ID NO: 201465
  Synthetic oligonucleotide

SEQ ID NO: 644067 - DNA, 54 bp, Artificial; identical to SEQ ID NO: 144278
  Synthetic oligonucleotide

SEQ ID NO: 644068 - DNA, 57 bp, Artificial; identical to SEQ ID NO: 247143
  Synthetic oligonucleotide

SEQ ID NO: 644069 - DNA, 55 bp, Artificial; identical to SEQ ID NO: 182514
  Synthetic oligonucleotide

SEQ ID NO: 644070 - DNA, 55 bp, Artificial; identical to SEQ ID NO: 190291
  Synthetic oligonucleotide

SEQ ID NO: 644071 - DNA, 55 bp, Artificial; identical to SEQ ID NO: 166612
  Synthetic oligonucleotide

SEQ ID NO: 644072 - DNA, 50 bp, Artificial; identical to SEQ ID NO: 151248
  Synthetic oligonucleotide

SEQ ID NO: 644073 - DNA, 55 bp, Artificial; identical to SEQ ID NO: 194458
  Synthetic oligonucleotide

SEQ ID NO: 644074 - DNA, 55 bp, Artificial; identical to SEQ ID NO: 245133
  Synthetic oligonucleotide

SEQ ID NO: 644075 - DNA, 55 bp, Artificial; identical to SEQ ID NO: 217649
  Synthetic oligonucleotide

SEQ ID NO: 644076 - DNA, 55 bp, Artificial; identical to SEQ ID NO: 224873
  Synthetic oligonucleotide

SEQ ID NO: 644077 - DNA, 56 bp, Artificial; identical to SEQ ID NO: 149449
  Synthetic oligonucleotide

SEQ ID NO: 644078 - DNA, 55 bp, Artificial; identical to SEQ ID NO: 221374
  Synthetic oligonucleotide

SEQ ID NO: 644079 - DNA, 54 bp, Artificial; identical to SEQ ID NO: 157196
  Synthetic oligonucleotide

SEQ ID NO: 644080 - DNA, 55 bp, Artificial; identical to SEQ ID NO: 253943
  Synthetic oligonucleotide

SEQ ID NO: 644081 - DNA, 55 bp, Artificial; identical to SEQ ID NO: 211441
  Synthetic oligonucleotide

SEQ ID NO: 644082 - DNA, 53 bp, Artificial; identical to SEQ ID NO: 171758
  Synthetic oligonucleotide

SEQ ID NO: 644083 - DNA, 52 bp, Artificial; identical to SEQ ID NO: 243259
  Synthetic oligonucleotide

SEQ ID NO: 644084 - DNA, 55 bp, Artificial; identical to SEQ ID NO: 244332
  Synthetic oligonucleotide

SEQ ID NO: 644085 - DNA, 53 bp, Artificial; identical to SEQ ID NO: 174837
  Synthetic oligonucleotide

SEQ ID NO: 644086 - DNA, 55 bp, Artificial; identical to SEQ ID NO: 266153
  Synthetic oligonucleotide

SEQ ID NO: 644087 - DNA, 55 bp, Artificial; identical to SEQ ID NO: 182512
  Synthetic oligonucleotide

SEQ ID NO: 644088 - DNA, 50 bp, Artificial; identical to SEQ ID NO: 210695
  Synthetic oligonucleotide

SEQ ID NO: 644089 - DNA, 55 bp, Artificial; identical to SEQ ID NO: 162067
  Synthetic oligonucleotide

SEQ ID NO: 644090 - DNA, 55 bp, Artificial; identical to SEQ ID NO: 187238
  Synthetic oligonucleotide

SEQ ID NO: 644091 - DNA, 56 bp, Artificial; identical to SEQ ID NO: 191279
  Synthetic oligonucleotide

SEQ ID NO: 644092 - DNA, 55 bp, Artificial; identical to SEQ ID NO: 245157
  Synthetic oligonucleotide

SEQ ID NO: 644093 - DNA, 60 bp, Artificial; identical to SEQ ID NO: 202584
  Synthetic oligonucleotide

SEQ ID NO: 644094 - DNA, 56 bp, Artificial; identical to SEQ ID NO: 225548
  Synthetic oligonucleotide

SEQ ID NO: 644095 - DNA, 55 bp, Artificial; identical to SEQ ID NO: 238334
  Synthetic oligonucleotide

SEQ ID NO: 644096 - DNA, 55 bp, Artificial; identical to SEQ ID NO: 159750
  Synthetic oligonucleotide

SEQ ID NO: 644097 - DNA, 55 bp, Artificial; identical to SEQ ID NO: 209329
  Synthetic oligonucleotide

SEQ ID NO: 644098 - DNA, 55 bp, Artificial; identical to SEQ ID NO: 171757
  Synthetic oligonucleotide

SEQ ID NO: 644099 - DNA, 52 bp, Artificial; identical to SEQ ID NO: 216754
  Synthetic oligonucleotide

SEQ ID NO: 644100 - DNA, 55 bp, Artificial; identical to SEQ ID NO: 147846
  Synthetic oligonucleotide

SEQ ID NO: 644101 - DNA, 57 bp, Artificial; identical to SEQ ID NO: 210761
  Synthetic oligonucleotide

SEQ ID NO: 644102 - DNA, 48 bp, Artificial; identical to SEQ ID NO: 187237
  Synthetic oligonucleotide

SEQ ID NO: 644103 - DNA, 50 bp, Artificial; identical to SEQ ID NO: 209806
  Synthetic oligonucleotide

SEQ ID NO: 644104 - DNA, 55 bp, Artificial; identical to SEQ ID NO: 197139
  Synthetic oligonucleotide

SEQ ID NO: 644105 - DNA, 53 bp, Artificial; identical to SEQ ID NO: 258091
  Synthetic oligonucleotide

SEQ ID NO: 644106 - DNA, 55 bp, Artificial; identical to SEQ ID NO: 203684
  Synthetic oligonucleotide

SEQ ID NO: 644107 - DNA, 54 bp, Artificial; identical to SEQ ID NO: 192100
  Synthetic oligonucleotide

SEQ ID NO: 644108 - DNA, 55 bp, Artificial; identical to SEQ ID NO: 240024
  Synthetic oligonucleotide

SEQ ID NO: 644109 - DNA, 55 bp, Artificial; identical to SEQ ID NO: 215142
  Synthetic oligonucleotide

SEQ ID NO: 644110 - DNA, 51 bp, Artificial; identical to SEQ ID NO: 196172
  Synthetic oligonucleotide

SEQ ID NO: 644111 - DNA, 57 bp, Artificial; identical to SEQ ID NO: 159857
  Synthetic oligonucleotide

SEQ ID NO: 644112 - DNA, 53 bp, Artificial; identical to SEQ ID NO: 149443
  Synthetic oligonucleotide

SEQ ID NO: 644113 - DNA, 55 bp, Artificial; identical to SEQ ID NO: 212652
  Synthetic oligonucleotide

SEQ ID NO: 644114 - DNA, 55 bp, Artificial; identical to SEQ ID NO: 159751
  Synthetic oligonucleotide

SEQ ID NO: 644115 - DNA, 60 bp, Artificial; identical to SEQ ID NO: 141739
  Synthetic oligonucleotide

SEQ ID NO: 644116 - DNA, 55 bp, Artificial; identical to SEQ ID NO: 208568
  Synthetic oligonucleotide

SEQ ID NO: 644117 - DNA, 55 bp, Artificial; identical to SEQ ID NO: 168469
  Synthetic oligonucleotide

SEQ ID NO: 644118 - DNA, 55 bp, Artificial; identical to SEQ ID NO: 154353
  Synthetic oligonucleotide

SEQ ID NO: 644119 - DNA, 55 bp, Artificial; identical to SEQ ID NO: 182510
  Synthetic oligonucleotide

SEQ ID NO: 644120 - DNA, 52 bp, Artificial; identical to SEQ ID NO: 149524
  Synthetic oligonucleotide

SEQ ID NO: 644121 - DNA, 55 bp, Artificial; identical to SEQ ID NO: 211383
  Synthetic oligonucleotide

SEQ ID NO: 644122 - DNA, 55 bp, Artificial; identical to SEQ ID NO: 149482
  Synthetic oligonucleotide

SEQ ID NO: 644123 - DNA, 55 bp, Artificial; identical to SEQ ID NO: 144435
  Synthetic oligonucleotide

SEQ ID NO: 644124 - DNA, 60 bp, Artificial; identical to SEQ ID NO: 192089
  Synthetic oligonucleotide

SEQ ID NO: 644125 - DNA, 55 bp, Artificial; identical to SEQ ID NO: 182509
  Synthetic oligonucleotide

SEQ ID NO: 644126 - DNA, 55 bp, Artificial; identical to SEQ ID NO: 147849
  Synthetic oligonucleotide

SEQ ID NO: 644127 - DNA, 55 bp, Artificial; identical to SEQ ID NO: 143726
  Synthetic oligonucleotide

SEQ ID NO: 644128 - DNA, 55 bp, Artificial; identical to SEQ ID NO: 171451
  Synthetic oligonucleotide

SEQ ID NO: 644129 - DNA, 55 bp, Artificial; identical to SEQ ID NO: 160343
  Synthetic oligonucleotide

SEQ ID NO: 644130 - DNA, 55 bp, Artificial; identical to SEQ ID NO: 171531
  Synthetic oligonucleotide

SEQ ID NO: 644131 - DNA, 55 bp, Artificial; identical to SEQ ID NO: 160814
  Synthetic oligonucleotide

SEQ ID NO: 644132 - DNA, 56 bp, Artificial; identical to SEQ ID NO: 237809
  Synthetic oligonucleotide

SEQ ID NO: 644133 - DNA, 56 bp, Artificial; identical to SEQ ID NO: 200811
  Synthetic oligonucleotide

SEQ ID NO: 644134 - DNA, 50 bp, Artificial; identical to SEQ ID NO: 204196
  Synthetic oligonucleotide

SEQ ID NO: 644135 - DNA, 55 bp, Artificial; identical to SEQ ID NO: 253944
  Synthetic oligonucleotide

SEQ ID NO: 644136 - DNA, 51 bp, Artificial; identical to SEQ ID NO: 246786
  Synthetic oligonucleotide

SEQ ID NO: 644137 - DNA, 60 bp, Artificial; identical to SEQ ID NO: 241759
  Synthetic oligonucleotide

SEQ ID NO: 644138 - DNA, 55 bp, Artificial; identical to SEQ ID NO: 146419
  Synthetic oligonucleotide

SEQ ID NO: 644139 - DNA, 55 bp, Artificial; identical to SEQ ID NO: 182505
  Synthetic oligonucleotide

SEQ ID NO: 644140 - DNA, 55 bp, Artificial; identical to SEQ ID NO: 198700
  Synthetic oligonucleotide

SEQ ID NO: 644141 - DNA, 55 bp, Artificial; identical to SEQ ID NO: 253946
  Synthetic oligonucleotide

SEQ ID NO: 644142 - DNA, 57 bp, Artificial; identical to SEQ ID NO: 196871
  Synthetic oligonucleotide

SEQ ID NO: 644143 - DNA, 55 bp, Artificial; identical to SEQ ID NO: 253947
  Synthetic oligonucleotide

SEQ ID NO: 644144 - DNA, 52 bp, Artificial; identical to SEQ ID NO: 207402
  Synthetic oligonucleotide

SEQ ID NO: 644145 - DNA, 52 bp, Artificial; identical to SEQ ID NO: 217651
  Synthetic oligonucleotide

SEQ ID NO: 644146 - DNA, 52 bp, Artificial; identical to SEQ ID NO: 154015
  Synthetic oligonucleotide

SEQ ID NO: 644147 - DNA, 57 bp, Artificial; identical to SEQ ID NO: 200810
  Synthetic oligonucleotide

SEQ ID NO: 644148 - DNA, 60 bp, Artificial; identical to SEQ ID NO: 200809
  Synthetic oligonucleotide

SEQ ID NO: 644149 - DNA, 50 bp, Artificial; identical to SEQ ID NO: 176517
  Synthetic oligonucleotide

SEQ ID NO: 644150 - DNA, 55 bp, Artificial; identical to SEQ ID NO: 182501
  Synthetic oligonucleotide

SEQ ID NO: 644151 - DNA, 55 bp, Artificial; identical to SEQ ID NO: 146396
  Synthetic oligonucleotide

SEQ ID NO: 644152 - DNA, 55 bp, Artificial; identical to SEQ ID NO: 151660
  Synthetic oligonucleotide

SEQ ID NO: 644153 - DNA, 55 bp, Artificial; identical to SEQ ID NO: 233458
  Synthetic oligonucleotide

SEQ ID NO: 644154 - DNA, 55 bp, Artificial; identical to SEQ ID NO: 182500
  Synthetic oligonucleotide

SEQ ID NO: 644155 - DNA, 55 bp, Artificial; identical to SEQ ID NO: 245111
  Synthetic oligonucleotide

SEQ ID NO: 644156 - DNA, 54 bp, Artificial; identical to SEQ ID NO: 218192
  Synthetic oligonucleotide

SEQ ID NO: 644157 - DNA, 57 bp, Artificial; identical to SEQ ID NO: 206829
  Synthetic oligonucleotide

SEQ ID NO: 644158 - DNA, 53 bp, Artificial; identical to SEQ ID NO: 190289
  Synthetic oligonucleotide

SEQ ID NO: 644159 - DNA, 53 bp, Artificial; identical to SEQ ID NO: 205658
  Synthetic oligonucleotide

SEQ ID NO: 644160 - DNA, 54 bp, Artificial; identical to SEQ ID NO: 185126
  Synthetic oligonucleotide

SEQ ID NO: 644161 - DNA, 54 bp, Artificial; identical to SEQ ID NO: 205635
  Synthetic oligonucleotide

SEQ ID NO: 644162 - DNA, 58 bp, Artificial; identical to SEQ ID NO: 212502
  Synthetic oligonucleotide

SEQ ID NO: 644163 - DNA, 54 bp, Artificial; identical to SEQ ID NO: 247110
  Synthetic oligonucleotide

SEQ ID NO: 644164 - DNA, 54 bp, Artificial; identical to SEQ ID NO: 207062
  Synthetic oligonucleotide

SEQ ID NO: 644165 - DNA, 52 bp, Artificial; identical to SEQ ID NO: 243223
  Synthetic oligonucleotide

SEQ ID NO: 644166 - DNA, 54 bp, Artificial; identical to SEQ ID NO: 178757
  Synthetic oligonucleotide

SEQ ID NO: 644167 - DNA, 55 bp, Artificial; identical to SEQ ID NO: 152316
  Synthetic oligonucleotide

SEQ ID NO: 644168 - DNA, 54 bp, Artificial; identical to SEQ ID NO: 252934
  Synthetic oligonucleotide

SEQ ID NO: 644169 - DNA, 58 bp, Artificial; identical to SEQ ID NO: 156165
  Synthetic oligonucleotide

SEQ ID NO: 644170 - DNA, 55 bp, Artificial; identical to SEQ ID NO: 147850
  Synthetic oligonucleotide

SEQ ID NO: 644171 - DNA, 60 bp, Artificial; identical to SEQ ID NO: 145203
  Synthetic oligonucleotide

SEQ ID NO: 644172 - DNA, 56 bp, Artificial; identical to SEQ ID NO: 178756
  Synthetic oligonucleotide

SEQ ID NO: 644173 - DNA, 55 bp, Artificial; identical to SEQ ID NO: 190928
  Synthetic oligonucleotide

SEQ ID NO: 644174 - DNA, 55 bp, Artificial; identical to SEQ ID NO: 255777
  Synthetic oligonucleotide

SEQ ID NO: 644175 - DNA, 55 bp, Artificial; identical to SEQ ID NO: 144434
  Synthetic oligonucleotide

SEQ ID NO: 644176 - DNA, 55 bp, Artificial; identical to SEQ ID NO: 237810
  Synthetic oligonucleotide

SEQ ID NO: 644177 - DNA, 56 bp, Artificial; identical to SEQ ID NO: 200808
  Synthetic oligonucleotide

SEQ ID NO: 644178 - DNA, 51 bp, Artificial; identical to SEQ ID NO: 246751
  Synthetic oligonucleotide

SEQ ID NO: 644179 - DNA, 52 bp, Artificial; identical to SEQ ID NO: 225036
  Synthetic oligonucleotide

SEQ ID NO: 644180 - DNA, 60 bp, Artificial; identical to SEQ ID NO: 149115
  Synthetic oligonucleotide

SEQ ID NO: 644181 - DNA, 54 bp, Artificial; identical to SEQ ID NO: 243110
  Synthetic oligonucleotide

SEQ ID NO: 644182 - DNA, 52 bp, Artificial; identical to SEQ ID NO: 217071
  Synthetic oligonucleotide

SEQ ID NO: 644183 - DNA, 52 bp, Artificial; identical to SEQ ID NO: 246519
  Synthetic oligonucleotide

SEQ ID NO: 644184 - DNA, 55 bp, Artificial; identical to SEQ ID NO: 205499
  Synthetic oligonucleotide

SEQ ID NO: 644185 - DNA, 55 bp, Artificial; identical to SEQ ID NO: 198696
  Synthetic oligonucleotide

SEQ ID NO: 644186 - DNA, 55 bp, Artificial; identical to SEQ ID NO: 207398
  Synthetic oligonucleotide

SEQ ID NO: 644187 - DNA, 56 bp, Artificial; identical to SEQ ID NO: 178752
  Synthetic oligonucleotide

SEQ ID NO: 644188 - DNA, 53 bp, Artificial; identical to SEQ ID NO: 243608
  Synthetic oligonucleotide

SEQ ID NO: 644189 - DNA, 55 bp, Artificial; identical to SEQ ID NO: 182452
  Synthetic oligonucleotide

SEQ ID NO: 644190 - DNA, 60 bp, Artificial; identical to SEQ ID NO: 241774
  Synthetic oligonucleotide

SEQ ID NO: 644191 - DNA, 55 bp, Artificial; identical to SEQ ID NO: 191980
  Synthetic oligonucleotide

SEQ ID NO: 644192 - DNA, 51 bp, Artificial; identical to SEQ ID NO: 169038
  Synthetic oligonucleotide

SEQ ID NO: 644193 - DNA, 53 bp, Artificial; identical to SEQ ID NO: 149137
  Synthetic oligonucleotide

SEQ ID NO: 644194 - DNA, 55 bp, Artificial; identical to SEQ ID NO: 239902
  Synthetic oligonucleotide

SEQ ID NO: 644195 - DNA, 60 bp, Artificial; identical to SEQ ID NO: 200807
  Synthetic oligonucleotide

SEQ ID NO: 644196 - DNA, 54 bp, Artificial; identical to SEQ ID NO: 245122
  Synthetic oligonucleotide

SEQ ID NO: 644197 - DNA, 57 bp, Artificial; identical to SEQ ID NO: 147274
  Synthetic oligonucleotide

SEQ ID NO: 644198 - DNA, 60 bp, Artificial; identical to SEQ ID NO: 237811
  Synthetic oligonucleotide

SEQ ID NO: 644199 - DNA, 52 bp, Artificial; identical to SEQ ID NO: 240963
  Synthetic oligonucleotide

SEQ ID NO: 644200 - DNA, 51 bp, Artificial; identical to SEQ ID NO: 149831
  Synthetic oligonucleotide

SEQ ID NO: 644201 - DNA, 54 bp, Artificial; identical to SEQ ID NO: 205586
  Synthetic oligonucleotide

SEQ ID NO: 644202 - DNA, 55 bp, Artificial; identical to SEQ ID NO: 222589
  Synthetic oligonucleotide

SEQ ID NO: 644203 - DNA, 56 bp, Artificial; identical to SEQ ID NO: 203325
  Synthetic oligonucleotide

SEQ ID NO: 644204 - DNA, 56 bp, Artificial; identical to SEQ ID NO: 149170
  Synthetic oligonucleotide

SEQ ID NO: 644205 - DNA, 50 bp, Artificial; identical to SEQ ID NO: 252936
  Synthetic oligonucleotide

SEQ ID NO: 644206 - DNA, 53 bp, Artificial; identical to SEQ ID NO: 198695
  Synthetic oligonucleotide

SEQ ID NO: 644207 - DNA, 57 bp, Artificial; identical to SEQ ID NO: 151722
  Synthetic oligonucleotide

SEQ ID NO: 644208 - DNA, 55 bp, Artificial; identical to SEQ ID NO: 234376
  Synthetic oligonucleotide

SEQ ID NO: 644209 - DNA, 60 bp, Artificial; identical to SEQ ID NO: 237812
  Synthetic oligonucleotide

SEQ ID NO: 644210 - DNA, 56 bp, Artificial; identical to SEQ ID NO: 217072
  Synthetic oligonucleotide

SEQ ID NO: 644211 - DNA, 55 bp, Artificial; identical to SEQ ID NO: 218191
  Synthetic oligonucleotide

SEQ ID NO: 644212 - DNA, 60 bp, Artificial; identical to SEQ ID NO: 178803
  Synthetic oligonucleotide

SEQ ID NO: 644213 - DNA, 54 bp, Artificial; identical to SEQ ID NO: 208674
  Synthetic oligonucleotide

SEQ ID NO: 644214 - DNA, 51 bp, Artificial; identical to SEQ ID NO: 155615
  Synthetic oligonucleotide

SEQ ID NO: 644215 - DNA, 58 bp, Artificial; identical to SEQ ID NO: 223784
  Synthetic oligonucleotide

SEQ ID NO: 644216 - DNA, 55 bp, Artificial; identical to SEQ ID NO: 218190
  Synthetic oligonucleotide

SEQ ID NO: 644217 - DNA, 55 bp, Artificial; identical to SEQ ID NO: 193738
  Synthetic oligonucleotide

SEQ ID NO: 644218 - DNA, 60 bp, Artificial; identical to SEQ ID NO: 247099
  Synthetic oligonucleotide

SEQ ID NO: 644219 - DNA, 54 bp, Artificial; identical to SEQ ID NO: 178802
  Synthetic oligonucleotide

SEQ ID NO: 644220 - DNA, 55 bp, Artificial; identical to SEQ ID NO: 253948
  Synthetic oligonucleotide

SEQ ID NO: 644221 - DNA, 55 bp, Artificial; identical to SEQ ID NO: 252937
  Synthetic oligonucleotide

SEQ ID NO: 644222 - DNA, 55 bp, Artificial; identical to SEQ ID NO: 159752
  Synthetic oligonucleotide

SEQ ID NO: 644223 - DNA, 60 bp, Artificial; identical to SEQ ID NO: 217073
  Synthetic oligonucleotide

SEQ ID NO: 644224 - DNA, 55 bp, Artificial; identical to SEQ ID NO: 147857
  Synthetic oligonucleotide

SEQ ID NO: 644225 - DNA, 53 bp, Artificial; identical to SEQ ID NO: 157335
  Synthetic oligonucleotide

SEQ ID NO: 644226 - DNA, 57 bp, Artificial; identical to SEQ ID NO: 149194
  Synthetic oligonucleotide

SEQ ID NO: 644227 - DNA, 58 bp, Artificial; identical to SEQ ID NO: 187340
  Synthetic oligonucleotide

SEQ ID NO: 644228 - DNA, 55 bp, Artificial; identical to SEQ ID NO: 190967
  Synthetic oligonucleotide

SEQ ID NO: 644229 - DNA, 52 bp, Artificial; identical to SEQ ID NO: 192120
  Synthetic oligonucleotide

SEQ ID NO: 644230 - DNA, 53 bp, Artificial; identical to SEQ ID NO: 203886
  Synthetic oligonucleotide

SEQ ID NO: 644231 - DNA, 57 bp, Artificial; identical to SEQ ID NO: 152534
  Synthetic oligonucleotide

SEQ ID NO: 644232 - DNA, 60 bp, Artificial; identical to SEQ ID NO: 223728
  Synthetic oligonucleotide

SEQ ID NO: 644233 - DNA, 55 bp, Artificial; identical to SEQ ID NO: 144915
  Synthetic oligonucleotide

SEQ ID NO: 644234 - DNA, 54 bp, Artificial; identical to SEQ ID NO: 194460
  Synthetic oligonucleotide

SEQ ID NO: 644235 - DNA, 52 bp, Artificial; identical to SEQ ID NO: 141740
  Synthetic oligonucleotide

SEQ ID NO: 644236 - DNA, 55 bp, Artificial; identical to SEQ ID NO: 147858
  Synthetic oligonucleotide

SEQ ID NO: 644237 - DNA, 55 bp, Artificial; identical to SEQ ID NO: 253950
  Synthetic oligonucleotide

SEQ ID NO: 644238 - DNA, 55 bp, Artificial; identical to SEQ ID NO: 154347
  Synthetic oligonucleotide

SEQ ID NO: 644239 - DNA, 53 bp, Artificial; identical to SEQ ID NO: 149392
  Synthetic oligonucleotide

SEQ ID NO: 644240 - DNA, 52 bp, Artificial; identical to SEQ ID NO: 186334
  Synthetic oligonucleotide

SEQ ID NO: 644241 - DNA, 57 bp, Artificial; identical to SEQ ID NO: 209210
  Synthetic oligonucleotide

SEQ ID NO: 644242 - DNA, 54 bp, Artificial; identical to SEQ ID NO: 199534
  Synthetic oligonucleotide

SEQ ID NO: 644243 - DNA, 55 bp, Artificial; identical to SEQ ID NO: 182447
  Synthetic oligonucleotide

SEQ ID NO: 644244 - DNA, 55 bp, Artificial; identical to SEQ ID NO: 146552
  Synthetic oligonucleotide

SEQ ID NO: 644245 - DNA, 55 bp, Artificial; identical to SEQ ID NO: 244963
  Synthetic oligonucleotide

SEQ ID NO: 644246 - DNA, 55 bp, Artificial; identical to SEQ ID NO: 225047
  Synthetic oligonucleotide

SEQ ID NO: 644247 - DNA, 55 bp, Artificial; identical to SEQ ID NO: 194461
  Synthetic oligonucleotide

SEQ ID NO: 644248 - DNA, 55 bp, Artificial; identical to SEQ ID NO: 197854
  Synthetic oligonucleotide

SEQ ID NO: 644249 - DNA, 52 bp, Artificial; identical to SEQ ID NO: 216745
  Synthetic oligonucleotide

SEQ ID NO: 644250 - DNA, 54 bp, Artificial; identical to SEQ ID NO: 185146
  Synthetic oligonucleotide

SEQ ID NO: 644251 - DNA, 55 bp, Artificial; identical to SEQ ID NO: 238332
  Synthetic oligonucleotide

SEQ ID NO: 644252 - DNA, 56 bp, Artificial; identical to SEQ ID NO: 154070
  Synthetic oligonucleotide

SEQ ID NO: 644253 - DNA, 52 bp, Artificial; identical to SEQ ID NO: 243239
  Synthetic oligonucleotide

SEQ ID NO: 644254 - DNA, 55 bp, Artificial; identical to SEQ ID NO: 239889
  Synthetic oligonucleotide

SEQ ID NO: 644255 - DNA, 57 bp, Artificial; identical to SEQ ID NO: 159821
  Synthetic oligonucleotide

SEQ ID NO: 644256 - DNA, 55 bp, Artificial; identical to SEQ ID NO: 194462
  Synthetic oligonucleotide

SEQ ID NO: 644257 - DNA, 55 bp, Artificial; identical to SEQ ID NO: 244973
  Synthetic oligonucleotide

SEQ ID NO: 644258 - DNA, 54 bp, Artificial; identical to SEQ ID NO: 240555
  Synthetic oligonucleotide

SEQ ID NO: 644259 - DNA, 51 bp, Artificial; identical to SEQ ID NO: 223721
  Synthetic oligonucleotide

SEQ ID NO: 644260 - DNA, 55 bp, Artificial; identical to SEQ ID NO: 198694
  Synthetic oligonucleotide

SEQ ID NO: 644261 - DNA, 55 bp, Artificial; identical to SEQ ID NO: 253951
  Synthetic oligonucleotide

SEQ ID NO: 644262 - DNA, 55 bp, Artificial; identical to SEQ ID NO: 203632
  Synthetic oligonucleotide

SEQ ID NO: 644263 - DNA, 55 bp, Artificial; identical to SEQ ID NO: 182442
  Synthetic oligonucleotide

SEQ ID NO: 644264 - DNA, 55 bp, Artificial; identical to SEQ ID NO: 212643
  Synthetic oligonucleotide

SEQ ID NO: 644265 - DNA, 55 bp, Artificial; identical to SEQ ID NO: 182441
  Synthetic oligonucleotide

SEQ ID NO: 644266 - DNA, 55 bp, Artificial; identical to SEQ ID NO: 205501
  Synthetic oligonucleotide

SEQ ID NO: 644267 - DNA, 56 bp, Artificial; identical to SEQ ID NO: 217074
  Synthetic oligonucleotide

SEQ ID NO: 644268 - DNA, 54 bp, Artificial; identical to SEQ ID NO: 151992
  Synthetic oligonucleotide

SEQ ID NO: 644269 - DNA, 55 bp, Artificial; identical to SEQ ID NO: 252984
  Synthetic oligonucleotide

SEQ ID NO: 644270 - DNA, 51 bp, Artificial; identical to SEQ ID NO: 241081
  Synthetic oligonucleotide

SEQ ID NO: 644271 - DNA, 50 bp, Artificial; identical to SEQ ID NO: 202332
  Synthetic oligonucleotide

SEQ ID NO: 644272 - DNA, 52 bp, Artificial; identical to SEQ ID NO: 198693
  Synthetic oligonucleotide

SEQ ID NO: 644273 - DNA, 60 bp, Artificial; identical to SEQ ID NO: 178796
  Synthetic oligonucleotide

SEQ ID NO: 644274 - DNA, 59 bp, Artificial; identical to SEQ ID NO: 206791
  Synthetic oligonucleotide

SEQ ID NO: 644275 - DNA, 52 bp, Artificial; identical to SEQ ID NO: 198690
  Synthetic oligonucleotide

SEQ ID NO: 644276 - DNA, 60 bp, Artificial; identical to SEQ ID NO: 149227
  Synthetic oligonucleotide

SEQ ID NO: 644277 - DNA, 55 bp, Artificial; identical to SEQ ID NO: 244285
  Synthetic oligonucleotide

SEQ ID NO: 644278 - DNA, 54 bp, Artificial; identical to SEQ ID NO: 187235
  Synthetic oligonucleotide

SEQ ID NO: 644279 - DNA, 52 bp, Artificial; identical to SEQ ID NO: 208805
  Synthetic oligonucleotide

SEQ ID NO: 644280 - DNA, 60 bp, Artificial; identical to SEQ ID NO: 266027
  Synthetic oligonucleotide

SEQ ID NO: 644281 - DNA, 54 bp, Artificial; identical to SEQ ID NO: 190624
  Synthetic oligonucleotide

SEQ ID NO: 644282 - DNA, 55 bp, Artificial; identical to SEQ ID NO: 190282
  Synthetic oligonucleotide

SEQ ID NO: 644283 - DNA, 55 bp, Artificial; identical to SEQ ID NO: 147862
  Synthetic oligonucleotide

SEQ ID NO: 644284 - DNA, 55 bp, Artificial; identical to SEQ ID NO: 182436
  Synthetic oligonucleotide

SEQ ID NO: 644285 - DNA, 56 bp, Artificial; identical to SEQ ID NO: 237956
  Synthetic oligonucleotide

SEQ ID NO: 644286 - DNA, 54 bp, Artificial; identical to SEQ ID NO: 166603
  Synthetic oligonucleotide

SEQ ID NO: 644287 - DNA, 55 bp, Artificial; identical to SEQ ID NO: 247055
  Synthetic oligonucleotide

SEQ ID NO: 644288 - DNA, 53 bp, Artificial; identical to SEQ ID NO: 212417
  Synthetic oligonucleotide

SEQ ID NO: 644289 - DNA, 55 bp, Artificial; identical to SEQ ID NO: 212416
  Synthetic oligonucleotide

SEQ ID NO: 644290 - DNA, 49 bp, Artificial; identical to SEQ ID NO: 149260
  Synthetic oligonucleotide

SEQ ID NO: 644291 - DNA, 54 bp, Artificial; identical to SEQ ID NO: 240282
  Synthetic oligonucleotide

SEQ ID NO: 644292 - DNA, 50 bp, Artificial; identical to SEQ ID NO: 255000
  Synthetic oligonucleotide

SEQ ID NO: 644293 - DNA, 60 bp, Artificial; identical to SEQ ID NO: 243611
  Synthetic oligonucleotide

SEQ ID NO: 644294 - DNA, 55 bp, Artificial; identical to SEQ ID NO: 194614
  Synthetic oligonucleotide

SEQ ID NO: 644295 - DNA, 55 bp, Artificial; identical to SEQ ID NO: 240315
  Synthetic oligonucleotide

SEQ ID NO: 644296 - DNA, 60 bp, Artificial; identical to SEQ ID NO: 165611
  Synthetic oligonucleotide

SEQ ID NO: 644297 - DNA, 51 bp, Artificial; identical to SEQ ID NO: 243310
  Synthetic oligonucleotide

SEQ ID NO: 644298 - DNA, 58 bp, Artificial; identical to SEQ ID NO: 187334
  Synthetic oligonucleotide

SEQ ID NO: 644299 - DNA, 54 bp, Artificial; identical to SEQ ID NO: 184973
  Synthetic oligonucleotide

SEQ ID NO: 644300 - DNA, 56 bp, Artificial; identical to SEQ ID NO: 240326
  Synthetic oligonucleotide

SEQ ID NO: 644301 - DNA, 51 bp, Artificial; identical to SEQ ID NO: 193876
  Synthetic oligonucleotide

SEQ ID NO: 644302 - DNA, 55 bp, Artificial; identical to SEQ ID NO: 224871
  Synthetic oligonucleotide

SEQ ID NO: 644303 - DNA, 55 bp, Artificial; identical to SEQ ID NO: 171525
  Synthetic oligonucleotide

SEQ ID NO: 644304 - DNA, 60 bp, Artificial; identical to SEQ ID NO: 217112
  Synthetic oligonucleotide

SEQ ID NO: 644305 - DNA, 59 bp, Artificial; identical to SEQ ID NO: 240337
  Synthetic oligonucleotide

SEQ ID NO: 644306 - DNA, 54 bp, Artificial; identical to SEQ ID NO: 149233
  Synthetic oligonucleotide

SEQ ID NO: 644307 - DNA, 55 bp, Artificial; identical to SEQ ID NO: 217113
  Synthetic oligonucleotide

SEQ ID NO: 644308 - DNA, 50 bp, Artificial; identical to SEQ ID NO: 237599
  Synthetic oligonucleotide

SEQ ID NO: 644309 - DNA, 60 bp, Artificial; identical to SEQ ID NO: 253208
  Synthetic oligonucleotide

SEQ ID NO: 644310 - DNA, 56 bp, Artificial; identical to SEQ ID NO: 200803
  Synthetic oligonucleotide

SEQ ID NO: 644311 - DNA, 51 bp, Artificial; identical to SEQ ID NO: 192164
  Synthetic oligonucleotide

SEQ ID NO: 644312 - DNA, 50 bp, Artificial; identical to SEQ ID NO: 210687
  Synthetic oligonucleotide

SEQ ID NO: 644313 - DNA, 57 bp, Artificial; identical to SEQ ID NO: 200802
  Synthetic oligonucleotide

SEQ ID NO: 644314 - DNA, 55 bp, Artificial; identical to SEQ ID NO: 147915
  Synthetic oligonucleotide

SEQ ID NO: 644315 - DNA, 55 bp, Artificial; identical to SEQ ID NO: 254256
  Synthetic oligonucleotide

SEQ ID NO: 644316 - DNA, 51 bp, Artificial; identical to SEQ ID NO: 216762
  Synthetic oligonucleotide

SEQ ID NO: 644317 - DNA, 60 bp, Artificial; identical to SEQ ID NO: 142691
  Synthetic oligonucleotide

SEQ ID NO: 644318 - DNA, 58 bp, Artificial; identical to SEQ ID NO: 247502
  Synthetic oligonucleotide

SEQ ID NO: 644319 - DNA, 53 bp, Artificial; identical to SEQ ID NO: 200801
  Synthetic oligonucleotide

SEQ ID NO: 644320 - DNA, 56 bp, Artificial; identical to SEQ ID NO: 147091
  Synthetic oligonucleotide

SEQ ID NO: 644321 - DNA, 59 bp, Artificial; identical to SEQ ID NO: 200800
  Synthetic oligonucleotide

SEQ ID NO: 644322 - DNA, 50 bp, Artificial; identical to SEQ ID NO: 246840
  Synthetic oligonucleotide

SEQ ID NO: 644323 - DNA, 53 bp, Artificial; identical to SEQ ID NO: 243612
  Synthetic oligonucleotide

SEQ ID NO: 644324 - DNA, 55 bp, Artificial; identical to SEQ ID NO: 244917
  Synthetic oligonucleotide

SEQ ID NO: 644325 - DNA, 54 bp, Artificial; identical to SEQ ID NO: 185008
  Synthetic oligonucleotide

SEQ ID NO: 644326 - DNA, 57 bp, Artificial; identical to SEQ ID NO: 178784
  Synthetic oligonucleotide

SEQ ID NO: 644327 - DNA, 55 bp, Artificial; identical to SEQ ID NO: 239912
  Synthetic oligonucleotide

SEQ ID NO: 644328 - DNA, 55 bp, Artificial; identical to SEQ ID NO: 208567
  Synthetic oligonucleotide

SEQ ID NO: 644329 - DNA, 55 bp, Artificial; identical to SEQ ID NO: 207394
  Synthetic oligonucleotide

SEQ ID NO: 644330 - DNA, 59 bp, Artificial; identical to SEQ ID NO: 178782
  Synthetic oligonucleotide

SEQ ID NO: 644331 - DNA, 52 bp, Artificial; identical to SEQ ID NO: 186318
  Synthetic oligonucleotide

SEQ ID NO: 644332 - DNA, 52 bp, Artificial; identical to SEQ ID NO: 255494
  Synthetic oligonucleotide

SEQ ID NO: 644333 - DNA, 55 bp, Artificial; identical to SEQ ID NO: 182476
  Synthetic oligonucleotide

SEQ ID NO: 644334 - DNA, 58 bp, Artificial; identical to SEQ ID NO: 141927
  Synthetic oligonucleotide

SEQ ID NO: 644335 - DNA, 54 bp, Artificial; identical to SEQ ID NO: 147948
  Synthetic oligonucleotide

SEQ ID NO: 644336 - DNA, 54 bp, Artificial; identical to SEQ ID NO: 157185
  Synthetic oligonucleotide

SEQ ID NO: 644337 - DNA, 50 bp, Artificial; identical to SEQ ID NO: 167717
  Synthetic oligonucleotide

SEQ ID NO: 644338 - DNA, 53 bp, Artificial; identical to SEQ ID NO: 198688
  Synthetic oligonucleotide

SEQ ID NO: 644339 - DNA, 58 bp, Artificial; identical to SEQ ID NO: 159824
  Synthetic oligonucleotide

SEQ ID NO: 644340 - DNA, 55 bp, Artificial; identical to SEQ ID NO: 166654
  Synthetic oligonucleotide

SEQ ID NO: 644341 - DNA, 59 bp, Artificial; identical to SEQ ID NO: 224121
  Synthetic oligonucleotide

SEQ ID NO: 644342 - DNA, 55 bp, Artificial; identical to SEQ ID NO: 178781
  Synthetic oligonucleotide

SEQ ID NO: 644343 - DNA, 55 bp, Artificial; identical to SEQ ID NO: 239913
  Synthetic oligonucleotide

SEQ ID NO: 644344 - DNA, 58 bp, Artificial; identical to SEQ ID NO: 206792
  Synthetic oligonucleotide

SEQ ID NO: 644345 - DNA, 55 bp, Artificial; identical to SEQ ID NO: 171524
  Synthetic oligonucleotide

SEQ ID NO: 644346 - DNA, 52 bp, Artificial; identical to SEQ ID NO: 237083
  Synthetic oligonucleotide

SEQ ID NO: 644347 - DNA, 58 bp, Artificial; identical to SEQ ID NO: 200798
  Synthetic oligonucleotide

SEQ ID NO: 644348 - DNA, 59 bp, Artificial; identical to SEQ ID NO: 206794
  Synthetic oligonucleotide

SEQ ID NO: 644349 - DNA, 52 bp, Artificial; identical to SEQ ID NO: 165027
  Synthetic oligonucleotide

SEQ ID NO: 644350 - DNA, 53 bp, Artificial; identical to SEQ ID NO: 197845
  Synthetic oligonucleotide

SEQ ID NO: 644351 - DNA, 55 bp, Artificial; identical to SEQ ID NO: 207391
  Synthetic oligonucleotide

SEQ ID NO: 644352 - DNA, 55 bp, Artificial; identical to SEQ ID NO: 182474
  Synthetic oligonucleotide

SEQ ID NO: 644353 - DNA, 58 bp, Artificial; identical to SEQ ID NO: 240393
  Synthetic oligonucleotide

SEQ ID NO: 644354 - DNA, 54 bp, Artificial; identical to SEQ ID NO: 233795
  Synthetic oligonucleotide

SEQ ID NO: 644355 - DNA, 54 bp, Artificial; identical to SEQ ID NO: 154355
  Synthetic oligonucleotide

SEQ ID NO: 644356 - DNA, 54 bp, Artificial; identical to SEQ ID NO: 237814
  Synthetic oligonucleotide

SEQ ID NO: 644357 - DNA, 56 bp, Artificial; identical to SEQ ID NO: 147982
  Synthetic oligonucleotide

SEQ ID NO: 644358 - DNA, 55 bp, Artificial; identical to SEQ ID NO: 194463
  Synthetic oligonucleotide

SEQ ID NO: 644359 - DNA, 55 bp, Artificial; identical to SEQ ID NO: 244919
  Synthetic oligonucleotide

SEQ ID NO: 644360 - DNA, 55 bp, Artificial; identical to SEQ ID NO: 166656
  Synthetic oligonucleotide

SEQ ID NO: 644361 - DNA, 55 bp, Artificial; identical to SEQ ID NO: 182473
  Synthetic oligonucleotide

SEQ ID NO: 644362 - DNA, 55 bp, Artificial; identical to SEQ ID NO: 159757
  Synthetic oligonucleotide

SEQ ID NO: 644363 - DNA, 58 bp, Artificial; identical to SEQ ID NO: 152549
  Synthetic oligonucleotide

SEQ ID NO: 644364 - DNA, 55 bp, Artificial; identical to SEQ ID NO: 239919
  Synthetic oligonucleotide

SEQ ID NO: 644365 - DNA, 59 bp, Artificial; identical to SEQ ID NO: 247438
  Synthetic oligonucleotide

SEQ ID NO: 644366 - DNA, 59 bp, Artificial; identical to SEQ ID NO: 154103
  Synthetic oligonucleotide

SEQ ID NO: 644367 - DNA, 57 bp, Artificial; identical to SEQ ID NO: 200842
  Synthetic oligonucleotide

SEQ ID NO: 644368 - DNA, 58 bp, Artificial; identical to SEQ ID NO: 178722
  Synthetic oligonucleotide

SEQ ID NO: 644369 - DNA, 55 bp, Artificial; identical to SEQ ID NO: 194464
  Synthetic oligonucleotide

SEQ ID NO: 644370 - DNA, 51 bp, Artificial; identical to SEQ ID NO: 157733
  Synthetic oligonucleotide

SEQ ID NO: 644371 - DNA, 60 bp, Artificial; identical to SEQ ID NO: 258374
  Synthetic oligonucleotide

SEQ ID NO: 644372 - DNA, 52 bp, Artificial; identical to SEQ ID NO: 186354
  Synthetic oligonucleotide

SEQ ID NO: 644373 - DNA, 51 bp, Artificial; identical to SEQ ID NO: 174897
  Synthetic oligonucleotide

SEQ ID NO: 644374 - DNA, 58 bp, Artificial; identical to SEQ ID NO: 171417
  Synthetic oligonucleotide

SEQ ID NO: 644375 - DNA, 51 bp, Artificial; identical to SEQ ID NO: 249520
  Synthetic oligonucleotide

SEQ ID NO: 644376 - DNA, 55 bp, Artificial; identical to SEQ ID NO: 206803
  Synthetic oligonucleotide

SEQ ID NO: 644377 - DNA, 58 bp, Artificial; identical to SEQ ID NO: 217239
  Synthetic oligonucleotide

SEQ ID NO: 644378 - DNA, 55 bp, Artificial; identical to SEQ ID NO: 194465
  Synthetic oligonucleotide

SEQ ID NO: 644379 - DNA, 56 bp, Artificial; identical to SEQ ID NO: 178720
  Synthetic oligonucleotide

SEQ ID NO: 644380 - DNA, 54 bp, Artificial; identical to SEQ ID NO: 185036
  Synthetic oligonucleotide

SEQ ID NO: 644381 - DNA, 57 bp, Artificial; identical to SEQ ID NO: 171395
  Synthetic oligonucleotide

SEQ ID NO: 644382 - DNA, 55 bp, Artificial; identical to SEQ ID NO: 211409
  Synthetic oligonucleotide

SEQ ID NO: 644383 - DNA, 57 bp, Artificial; identical to SEQ ID NO: 192056
  Synthetic oligonucleotide

SEQ ID NO: 644384 - DNA, 57 bp, Artificial; identical to SEQ ID NO: 254234
  Synthetic oligonucleotide

SEQ ID NO: 644385 - DNA, 55 bp, Artificial; identical to SEQ ID NO: 182472
  Synthetic oligonucleotide

SEQ ID NO: 644386 - DNA, 55 bp, Artificial; identical to SEQ ID NO: 222590
  Synthetic oligonucleotide

SEQ ID NO: 644387 - DNA, 55 bp, Artificial; identical to SEQ ID NO: 160317
  Synthetic oligonucleotide

SEQ ID NO: 644388 - DNA, 60 bp, Artificial; identical to SEQ ID NO: 243613
  Synthetic oligonucleotide

SEQ ID NO: 644389 - DNA, 54 bp, Artificial; identical to SEQ ID NO: 199491
  Synthetic oligonucleotide

SEQ ID NO: 644390 - DNA, 50 bp, Artificial; identical to SEQ ID NO: 256020
  Synthetic oligonucleotide

SEQ ID NO: 644391 - DNA, 50 bp, Artificial; identical to SEQ ID NO: 258088
  Synthetic oligonucleotide

SEQ ID NO: 644392 - DNA, 52 bp, Artificial; identical to SEQ ID NO: 243279
  Synthetic oligonucleotide

SEQ ID NO: 644393 - DNA, 55 bp, Artificial; identical to SEQ ID NO: 159758
  Synthetic oligonucleotide

SEQ ID NO: 644394 - DNA, 53 bp, Artificial; identical to SEQ ID NO: 164849
  Synthetic oligonucleotide

SEQ ID NO: 644395 - DNA, 60 bp, Artificial; identical to SEQ ID NO: 217115
  Synthetic oligonucleotide

SEQ ID NO: 644396 - DNA, 60 bp, Artificial; identical to SEQ ID NO: 209060
  Synthetic oligonucleotide

SEQ ID NO: 644397 - DNA, 55 bp, Artificial; identical to SEQ ID NO: 194466
  Synthetic oligonucleotide

SEQ ID NO: 644398 - DNA, 56 bp, Artificial; identical to SEQ ID NO: 159883
  Synthetic oligonucleotide

SEQ ID NO: 644399 - DNA, 55 bp, Artificial; identical to SEQ ID NO: 169283
  Synthetic oligonucleotide

SEQ ID NO: 644400 - DNA, 55 bp, Artificial; identical to SEQ ID NO: 207345
  Synthetic oligonucleotide

SEQ ID NO: 644401 - DNA, 53 bp, Artificial; identical to SEQ ID NO: 197480
  Synthetic oligonucleotide

SEQ ID NO: 644402 - DNA, 52 bp, Artificial; identical to SEQ ID NO: 157608
  Synthetic oligonucleotide

SEQ ID NO: 644403 - DNA, 55 bp, Artificial; identical to SEQ ID NO: 253957
  Synthetic oligonucleotide

SEQ ID NO: 644404 - DNA, 55 bp, Artificial; identical to SEQ ID NO: 239335
  Synthetic oligonucleotide

SEQ ID NO: 644405 - DNA, 55 bp, Artificial; identical to SEQ ID NO: 166657
  Synthetic oligonucleotide

SEQ ID NO: 644406 - DNA, 55 bp, Artificial; identical to SEQ ID NO: 166658
  Synthetic oligonucleotide

SEQ ID NO: 644407 - DNA, 53 bp, Artificial; identical to SEQ ID NO: 255186
  Synthetic oligonucleotide

SEQ ID NO: 644408 - DNA, 57 bp, Artificial; identical to SEQ ID NO: 240481
  Synthetic oligonucleotide

SEQ ID NO: 644409 - DNA, 60 bp, Artificial; identical to SEQ ID NO: 171713
  Synthetic oligonucleotide

SEQ ID NO: 644410 - DNA, 55 bp, Artificial; identical to SEQ ID NO: 188232
  Synthetic oligonucleotide

SEQ ID NO: 644411 - DNA, 55 bp, Artificial; identical to SEQ ID NO: 142538
  Synthetic oligonucleotide

SEQ ID NO: 644412 - DNA, 53 bp, Artificial; identical to SEQ ID NO: 209622
  Synthetic oligonucleotide

SEQ ID NO: 644413 - DNA, 60 bp, Artificial; identical to SEQ ID NO: 243614
  Synthetic oligonucleotide

SEQ ID NO: 644414 - DNA, 52 bp, Artificial; identical to SEQ ID NO: 215213
  Synthetic oligonucleotide

SEQ ID NO: 644415 - DNA, 55 bp, Artificial; identical to SEQ ID NO: 166600
  Synthetic oligonucleotide

SEQ ID NO: 644416 - DNA, 54 bp, Artificial; identical to SEQ ID NO: 157186
  Synthetic oligonucleotide

SEQ ID NO: 644417 - DNA, 55 bp, Artificial; identical to SEQ ID NO: 244291
  Synthetic oligonucleotide

SEQ ID NO: 644418 - DNA, 55 bp, Artificial; identical to SEQ ID NO: 182468
  Synthetic oligonucleotide

SEQ ID NO: 644419 - DNA, 60 bp, Artificial; identical to SEQ ID NO: 192045
  Synthetic oligonucleotide

SEQ ID NO: 644420 - DNA, 51 bp, Artificial; identical to SEQ ID NO: 149925
  Synthetic oligonucleotide

SEQ ID NO: 644421 - DNA, 56 bp, Artificial; identical to SEQ ID NO: 187233
  Synthetic oligonucleotide

SEQ ID NO: 644422 - DNA, 51 bp, Artificial; identical to SEQ ID NO: 262677
  Synthetic oligonucleotide

SEQ ID NO: 644423 - DNA, 55 bp, Artificial; identical to SEQ ID NO: 166659
  Synthetic oligonucleotide

SEQ ID NO: 644424 - DNA, 55 bp, Artificial; identical to SEQ ID NO: 244292
  Synthetic oligonucleotide

SEQ ID NO: 644425 - DNA, 60 bp, Artificial; identical to SEQ ID NO: 234164
  Synthetic oligonucleotide

SEQ ID NO: 644426 - DNA, 56 bp, Artificial; identical to SEQ ID NO: 159951
  Synthetic oligonucleotide

SEQ ID NO: 644427 - DNA, 51 bp, Artificial; identical to SEQ ID NO: 160594
  Synthetic oligonucleotide

SEQ ID NO: 644428 - DNA, 54 bp, Artificial; identical to SEQ ID NO: 199500
  Synthetic oligonucleotide

SEQ ID NO: 644429 - DNA, 50 bp, Artificial; identical to SEQ ID NO: 241502
  Synthetic oligonucleotide

SEQ ID NO: 644430 - DNA, 50 bp, Artificial; identical to SEQ ID NO: 200479
  Synthetic oligonucleotide

SEQ ID NO: 644431 - DNA, 53 bp, Artificial; identical to SEQ ID NO: 256679
  Synthetic oligonucleotide

SEQ ID NO: 644432 - DNA, 54 bp, Artificial; identical to SEQ ID NO: 152419
  Synthetic oligonucleotide

SEQ ID NO: 644433 - DNA, 57 bp, Artificial; identical to SEQ ID NO: 258352
  Synthetic oligonucleotide

SEQ ID NO: 644434 - DNA, 50 bp, Artificial; identical to SEQ ID NO: 153712
  Synthetic oligonucleotide

SEQ ID NO: 644435 - DNA, 55 bp, Artificial; identical to SEQ ID NO: 182467
  Synthetic oligonucleotide

SEQ ID NO: 644436 - DNA, 57 bp, Artificial; identical to SEQ ID NO: 155715
  Synthetic oligonucleotide

SEQ ID NO: 644437 - DNA, 50 bp, Artificial; identical to SEQ ID NO: 246844
  Synthetic oligonucleotide

SEQ ID NO: 644438 - DNA, 55 bp, Artificial; identical to SEQ ID NO: 166660
  Synthetic oligonucleotide

SEQ ID NO: 644439 - DNA, 57 bp, Artificial; identical to SEQ ID NO: 147103
  Synthetic oligonucleotide

SEQ ID NO: 644440 - DNA, 53 bp, Artificial; identical to SEQ ID NO: 206805
  Synthetic oligonucleotide

SEQ ID NO: 644441 - DNA, 59 bp, Artificial; identical to SEQ ID NO: 243928
  Synthetic oligonucleotide

SEQ ID NO: 644442 - DNA, 60 bp, Artificial; identical to SEQ ID NO: 194115
  Synthetic oligonucleotide

SEQ ID NO: 644443 - DNA, 53 bp, Artificial; identical to SEQ ID NO: 223566
  Synthetic oligonucleotide

SEQ ID NO: 644444 - DNA, 55 bp, Artificial; identical to SEQ ID NO: 253958
  Synthetic oligonucleotide

SEQ ID NO: 644445 - DNA, 50 bp, Artificial; identical to SEQ ID NO: 248566
  Synthetic oligonucleotide

SEQ ID NO: 644446 - DNA, 57 bp, Artificial; identical to SEQ ID NO: 200837
  Synthetic oligonucleotide

SEQ ID NO: 644447 - DNA, 56 bp, Artificial; identical to SEQ ID NO: 178709
  Synthetic oligonucleotide

SEQ ID NO: 644448 - DNA, 60 bp, Artificial; identical to SEQ ID NO: 156121
  Synthetic oligonucleotide

SEQ ID NO: 644449 - DNA, 55 bp, Artificial; identical to SEQ ID NO: 151658
  Synthetic oligonucleotide

SEQ ID NO: 644450 - DNA, 55 bp, Artificial; identical to SEQ ID NO: 254145
  Synthetic oligonucleotide

SEQ ID NO: 644451 - DNA, 56 bp, Artificial; identical to SEQ ID NO: 142690
  Synthetic oligonucleotide

SEQ ID NO: 644452 - DNA, 55 bp, Artificial; identical to SEQ ID NO: 257724
  Synthetic oligonucleotide

SEQ ID NO: 644453 - DNA, 53 bp, Artificial; identical to SEQ ID NO: 210755
  Synthetic oligonucleotide

SEQ ID NO: 644454 - DNA, 55 bp, Artificial; identical to SEQ ID NO: 182465
  Synthetic oligonucleotide

SEQ ID NO: 644455 - DNA, 55 bp, Artificial; identical to SEQ ID NO: 211398
  Synthetic oligonucleotide

SEQ ID NO: 644456 - DNA, 53 bp, Artificial; identical to SEQ ID NO: 185639
  Synthetic oligonucleotide

SEQ ID NO: 644457 - DNA, 55 bp, Artificial; identical to SEQ ID NO: 182464
  Synthetic oligonucleotide

SEQ ID NO: 644458 - DNA, 53 bp, Artificial; identical to SEQ ID NO: 178704
  Synthetic oligonucleotide

SEQ ID NO: 644459 - DNA, 57 bp, Artificial; identical to SEQ ID NO: 147217
  Synthetic oligonucleotide

SEQ ID NO: 644460 - DNA, 53 bp, Artificial; identical to SEQ ID NO: 202467
  Synthetic oligonucleotide

SEQ ID NO: 644461 - DNA, 55 bp, Artificial; identical to SEQ ID NO: 239960
  Synthetic oligonucleotide

SEQ ID NO: 644462 - DNA, 50 bp, Artificial; identical to SEQ ID NO: 151251
  Synthetic oligonucleotide

SEQ ID NO: 644463 - DNA, 54 bp, Artificial; identical to SEQ ID NO: 243616
  Synthetic oligonucleotide

SEQ ID NO: 644464 - DNA, 55 bp, Artificial; identical to SEQ ID NO: 182463
  Synthetic oligonucleotide

SEQ ID NO: 644465 - DNA, 52 bp, Artificial; identical to SEQ ID NO: 167092
  Synthetic oligonucleotide

SEQ ID NO: 644466 - DNA, 60 bp, Artificial; identical to SEQ ID NO: 243617
  Synthetic oligonucleotide

SEQ ID NO: 644467 - DNA, 49 bp, Artificial; identical to SEQ ID NO: 203814
  Synthetic oligonucleotide

SEQ ID NO: 644468 - DNA, 53 bp, Artificial; identical to SEQ ID NO: 194974
  Synthetic oligonucleotide

SEQ ID NO: 644469 - DNA, 50 bp, Artificial; identical to SEQ ID NO: 150339
  Synthetic oligonucleotide

SEQ ID NO: 644470 - DNA, 54 bp, Artificial; identical to SEQ ID NO: 185003
  Synthetic oligonucleotide

SEQ ID NO: 644471 - DNA, 55 bp, Artificial; identical to SEQ ID NO: 201825
  Synthetic oligonucleotide

SEQ ID NO: 644472 - DNA, 54 bp, Artificial; identical to SEQ ID NO: 243618
  Synthetic oligonucleotide

SEQ ID NO: 644473 - DNA, 50 bp, Artificial; identical to SEQ ID NO: 256029
  Synthetic oligonucleotide

SEQ ID NO: 644474 - DNA, 51 bp, Artificial; identical to SEQ ID NO: 200114
  Synthetic oligonucleotide

SEQ ID NO: 644475 - DNA, 55 bp, Artificial; identical to SEQ ID NO: 188795
  Synthetic oligonucleotide

SEQ ID NO: 644476 - DNA, 58 bp, Artificial; identical to SEQ ID NO: 147693
  Synthetic oligonucleotide

SEQ ID NO: 644477 - DNA, 55 bp, Artificial; identical to SEQ ID NO: 159759
  Synthetic oligonucleotide

SEQ ID NO: 644478 - DNA, 53 bp, Artificial; identical to SEQ ID NO: 216651
  Synthetic oligonucleotide

SEQ ID NO: 644479 - DNA, 53 bp, Artificial; identical to SEQ ID NO: 149457
  Synthetic oligonucleotide

SEQ ID NO: 644480 - DNA, 55 bp, Artificial; identical to SEQ ID NO: 182462
  Synthetic oligonucleotide

SEQ ID NO: 644481 - DNA, 53 bp, Artificial; identical to SEQ ID NO: 255421
  Synthetic oligonucleotide

SEQ ID NO: 644482 - DNA, 60 bp, Artificial; identical to SEQ ID NO: 200836
  Synthetic oligonucleotide

SEQ ID NO: 644483 - DNA, 50 bp, Artificial; identical to SEQ ID NO: 158067
  Synthetic oligonucleotide

SEQ ID NO: 644484 - DNA, 46 bp, Artificial; identical to SEQ ID NO: 212413
  Synthetic oligonucleotide

SEQ ID NO: 644485 - DNA, 54 bp, Artificial; identical to SEQ ID NO: 152420
  Synthetic oligonucleotide

SEQ ID NO: 644486 - DNA, 51 bp, Artificial; identical to SEQ ID NO: 201717
  Synthetic oligonucleotide

SEQ ID NO: 644487 - DNA, 54 bp, Artificial; identical to SEQ ID NO: 190623
  Synthetic oligonucleotide

SEQ ID NO: 644488 - DNA, 55 bp, Artificial; identical to SEQ ID NO: 207343
  Synthetic oligonucleotide

SEQ ID NO: 644489 - DNA, 54 bp, Artificial; identical to SEQ ID NO: 178750
  Synthetic oligonucleotide

SEQ ID NO: 644490 - DNA, 55 bp, Artificial; identical to SEQ ID NO: 198680
  Synthetic oligonucleotide

SEQ ID NO: 644491 - DNA, 50 bp, Artificial; identical to SEQ ID NO: 200835
  Synthetic oligonucleotide

SEQ ID NO: 644492 - DNA, 51 bp, Artificial; identical to SEQ ID NO: 141342
  Synthetic oligonucleotide

SEQ ID NO: 644493 - DNA, 53 bp, Artificial; identical to SEQ ID NO: 199743
  Synthetic oligonucleotide

SEQ ID NO: 644494 - DNA, 60 bp, Artificial; identical to SEQ ID NO: 217117
  Synthetic oligonucleotide

SEQ ID NO: 644495 - DNA, 56 bp, Artificial; identical to SEQ ID NO: 225002
  Synthetic oligonucleotide

SEQ ID NO: 644496 - DNA, 55 bp, Artificial; identical to SEQ ID NO: 201263
  Synthetic oligonucleotide

SEQ ID NO: 644497 - DNA, 57 bp, Artificial; identical to SEQ ID NO: 239982
  Synthetic oligonucleotide

SEQ ID NO: 644498 - DNA, 56 bp, Artificial; identical to SEQ ID NO: 205653
  Synthetic oligonucleotide

SEQ ID NO: 644499 - DNA, 60 bp, Artificial; identical to SEQ ID NO: 239993
  Synthetic oligonucleotide

SEQ ID NO: 644500 - DNA, 58 bp, Artificial; identical to SEQ ID NO: 179509
  Synthetic oligonucleotide

SEQ ID NO: 644501 - DNA, 60 bp, Artificial; identical to SEQ ID NO: 152976
  Synthetic oligonucleotide

SEQ ID NO: 644502 - DNA, 54 bp, Artificial; identical to SEQ ID NO: 147836
  Synthetic oligonucleotide

SEQ ID NO: 644503 - DNA, 57 bp, Artificial; identical to SEQ ID NO: 147737
  Synthetic oligonucleotide

SEQ ID NO: 644504 - DNA, 50 bp, Artificial; identical to SEQ ID NO: 165949
  Synthetic oligonucleotide

SEQ ID NO: 644505 - DNA, 55 bp, Artificial; identical to SEQ ID NO: 182458
  Synthetic oligonucleotide

SEQ ID NO: 644506 - DNA, 55 bp, Artificial; identical to SEQ ID NO: 182457
  Synthetic oligonucleotide

SEQ ID NO: 644507 - DNA, 55 bp, Artificial; identical to SEQ ID NO: 224866
  Synthetic oligonucleotide

SEQ ID NO: 644508 - DNA, 55 bp, Artificial; identical to SEQ ID NO: 233969
  Synthetic oligonucleotide

SEQ ID NO: 644509 - DNA, 58 bp, Artificial; identical to SEQ ID NO: 206911
  Synthetic oligonucleotide

SEQ ID NO: 644510 - DNA, 55 bp, Artificial; identical to SEQ ID NO: 248560
  Synthetic oligonucleotide

SEQ ID NO: 644511 - DNA, 54 bp, Artificial; identical to SEQ ID NO: 199535
  Synthetic oligonucleotide

SEQ ID NO: 644512 - DNA, 53 bp, Artificial; identical to SEQ ID NO: 240595
  Synthetic oligonucleotide

SEQ ID NO: 644513 - DNA, 57 bp, Artificial; identical to SEQ ID NO: 171071
  Synthetic oligonucleotide

SEQ ID NO: 644514 - DNA, 55 bp, Artificial; identical to SEQ ID NO: 207341
  Synthetic oligonucleotide

SEQ ID NO: 644515 - DNA, 54 bp, Artificial; identical to SEQ ID NO: 234443
  Synthetic oligonucleotide

SEQ ID NO: 644516 - DNA, 56 bp, Artificial; identical to SEQ ID NO: 240026
  Synthetic oligonucleotide

SEQ ID NO: 644517 - DNA, 51 bp, Artificial; identical to SEQ ID NO: 170186
  Synthetic oligonucleotide

SEQ ID NO: 644518 - DNA, 58 bp, Artificial; identical to SEQ ID NO: 201464
  Synthetic oligonucleotide

SEQ ID NO: 644519 - DNA, 56 bp, Artificial; identical to SEQ ID NO: 178747
  Synthetic oligonucleotide

SEQ ID NO: 644520 - DNA, 55 bp, Artificial; identical to SEQ ID NO: 198678
  Synthetic oligonucleotide

SEQ ID NO: 644521 - DNA, 55 bp, Artificial; identical to SEQ ID NO: 174610
  Synthetic oligonucleotide

SEQ ID NO: 644522 - DNA, 59 bp, Artificial; identical to SEQ ID NO: 179332
  Synthetic oligonucleotide

SEQ ID NO: 644523 - DNA, 60 bp, Artificial; identical to SEQ ID NO: 200834
  Synthetic oligonucleotide

SEQ ID NO: 644524 - DNA, 52 bp, Artificial; identical to SEQ ID NO: 246515
  Synthetic oligonucleotide

SEQ ID NO: 644525 - DNA, 55 bp, Artificial; identical to SEQ ID NO: 197152
  Synthetic oligonucleotide

SEQ ID NO: 644526 - DNA, 55 bp, Artificial; identical to SEQ ID NO: 244923
  Synthetic oligonucleotide

SEQ ID NO: 644527 - DNA, 53 bp, Artificial; identical to SEQ ID NO: 205659
  Synthetic oligonucleotide

SEQ ID NO: 644528 - DNA, 51 bp, Artificial; identical to SEQ ID NO: 154023
  Synthetic oligonucleotide

SEQ ID NO: 644529 - DNA, 53 bp, Artificial; identical to SEQ ID NO: 199698
  Synthetic oligonucleotide

SEQ ID NO: 644530 - DNA, 51 bp, Artificial; identical to SEQ ID NO: 205745
  Synthetic oligonucleotide

SEQ ID NO: 644531 - DNA, 53 bp, Artificial; identical to SEQ ID NO: 190531
  Synthetic oligonucleotide

SEQ ID NO: 644532 - DNA, 57 bp, Artificial; identical to SEQ ID NO: 203847
  Synthetic oligonucleotide

SEQ ID NO: 644533 - DNA, 59 bp, Artificial; identical to SEQ ID NO: 171373
  Synthetic oligonucleotide

SEQ ID NO: 644534 - DNA, 57 bp, Artificial; identical to SEQ ID NO: 256618
  Synthetic oligonucleotide

SEQ ID NO: 644535 - DNA, 55 bp, Artificial; identical to SEQ ID NO: 188985
  Synthetic oligonucleotide

SEQ ID NO: 644536 - DNA, 58 bp, Artificial; identical to SEQ ID NO: 200833
  Synthetic oligonucleotide

SEQ ID NO: 644537 - DNA, 60 bp, Artificial; identical to SEQ ID NO: 147771
  Synthetic oligonucleotide

SEQ ID NO: 644538 - DNA, 51 bp, Artificial; identical to SEQ ID NO: 246753
  Synthetic oligonucleotide

SEQ ID NO: 644539 - DNA, 55 bp, Artificial; identical to SEQ ID NO: 147782
  Synthetic oligonucleotide

SEQ ID NO: 644540 - DNA, 60 bp, Artificial; identical to SEQ ID NO: 246999
  Synthetic oligonucleotide

SEQ ID NO: 644541 - DNA, 58 bp, Artificial; identical to SEQ ID NO: 203858
  Synthetic oligonucleotide

SEQ ID NO: 644542 - DNA, 59 bp, Artificial; identical to SEQ ID NO: 171362
  Synthetic oligonucleotide

SEQ ID NO: 644543 - DNA, 55 bp, Artificial; identical to SEQ ID NO: 190965
  Synthetic oligonucleotide

SEQ ID NO: 644544 - DNA, 55 bp, Artificial; identical to SEQ ID NO: 178745
  Synthetic oligonucleotide

SEQ ID NO: 644545 - DNA, 52 bp, Artificial; identical to SEQ ID NO: 246518
  Synthetic oligonucleotide

SEQ ID NO: 644546 - DNA, 59 bp, Artificial; identical to SEQ ID NO: 240060
  Synthetic oligonucleotide

SEQ ID NO: 644547 - DNA, 55 bp, Artificial; identical to SEQ ID NO: 208093
  Synthetic oligonucleotide

SEQ ID NO: 644548 - DNA, 54 bp, Artificial; identical to SEQ ID NO: 164777
  Synthetic oligonucleotide

SEQ ID NO: 644549 - DNA, 60 bp, Artificial; identical to SEQ ID NO: 141744
  Synthetic oligonucleotide

SEQ ID NO: 644550 - DNA, 53 bp, Artificial; identical to SEQ ID NO: 147804
  Synthetic oligonucleotide

SEQ ID NO: 644551 - DNA, 50 bp, Artificial; identical to SEQ ID NO: 249541
  Synthetic oligonucleotide

SEQ ID NO: 644552 - DNA, 56 bp, Artificial; identical to SEQ ID NO: 147333
  Synthetic oligonucleotide

SEQ ID NO: 644553 - DNA, 58 bp, Artificial; identical to SEQ ID NO: 178741
  Synthetic oligonucleotide

SEQ ID NO: 644554 - DNA, 55 bp, Artificial; identical to SEQ ID NO: 159760
  Synthetic oligonucleotide

SEQ ID NO: 644555 - DNA, 51 bp, Artificial; identical to SEQ ID NO: 167067
  Synthetic oligonucleotide

SEQ ID NO: 644556 - DNA, 55 bp, Artificial; identical to SEQ ID NO: 203644
  Synthetic oligonucleotide

SEQ ID NO: 644557 - DNA, 55 bp, Artificial; identical to SEQ ID NO: 198361
  Synthetic oligonucleotide

SEQ ID NO: 644558 - DNA, 60 bp, Artificial; identical to SEQ ID NO: 246988
  Synthetic oligonucleotide

SEQ ID NO: 644559 - DNA, 58 bp, Artificial; identical to SEQ ID NO: 247514
  Synthetic oligonucleotide

SEQ ID NO: 644560 - DNA, 54 bp, Artificial; identical to SEQ ID NO: 261876
  Synthetic oligonucleotide

SEQ ID NO: 644561 - DNA, 53 bp, Artificial; identical to SEQ ID NO: 263321
  Synthetic oligonucleotide

SEQ ID NO: 644562 - DNA, 55 bp, Artificial; identical to SEQ ID NO: 155177
  Synthetic oligonucleotide

SEQ ID NO: 644563 - DNA, 55 bp, Artificial; identical to SEQ ID NO: 178739
  Synthetic oligonucleotide

SEQ ID NO: 644564 - DNA, 57 bp, Artificial; identical to SEQ ID NO: 147826
  Synthetic oligonucleotide

SEQ ID NO: 644565 - DNA, 60 bp, Artificial; identical to SEQ ID NO: 162036
  Synthetic oligonucleotide

SEQ ID NO: 644566 - DNA, 55 bp, Artificial; identical to SEQ ID NO: 198360
  Synthetic oligonucleotide

SEQ ID NO: 644567 - DNA, 57 bp, Artificial; identical to SEQ ID NO: 217118
  Synthetic oligonucleotide

SEQ ID NO: 644568 - DNA, 55 bp, Artificial; identical to SEQ ID NO: 253960
  Synthetic oligonucleotide

SEQ ID NO: 644569 - DNA, 60 bp, Artificial; identical to SEQ ID NO: 246909
  Synthetic oligonucleotide

SEQ ID NO: 644570 - DNA, 55 bp, Artificial; identical to SEQ ID NO: 239621
  Synthetic oligonucleotide

SEQ ID NO: 644571 - DNA, 55 bp, Artificial; identical to SEQ ID NO: 198358
  Synthetic oligonucleotide

SEQ ID NO: 644572 - DNA, 53 bp, Artificial; identical to SEQ ID NO: 159763
  Synthetic oligonucleotide

SEQ ID NO: 644573 - DNA, 55 bp, Artificial; identical to SEQ ID NO: 198357
  Synthetic oligonucleotide

SEQ ID NO: 644574 - DNA, 55 bp, Artificial; identical to SEQ ID NO: 182581
  Synthetic oligonucleotide

SEQ ID NO: 644575 - DNA, 55 bp, Artificial; identical to SEQ ID NO: 262786
  Synthetic oligonucleotide

SEQ ID NO: 644576 - DNA, 55 bp, Artificial; identical to SEQ ID NO: 224854
  Synthetic oligonucleotide

SEQ ID NO: 644577 - DNA, 55 bp, Artificial; identical to SEQ ID NO: 147871
  Synthetic oligonucleotide

SEQ ID NO: 644578 - DNA, 57 bp, Artificial; identical to SEQ ID NO: 147893
  Synthetic oligonucleotide

SEQ ID NO: 644579 - DNA, 53 bp, Artificial; identical to SEQ ID NO: 199556
  Synthetic oligonucleotide

SEQ ID NO: 644580 - DNA, 57 bp, Artificial; identical to SEQ ID NO: 147225
  Synthetic oligonucleotide

SEQ ID NO: 644581 - DNA, 51 bp, Artificial; identical to SEQ ID NO: 211516
  Synthetic oligonucleotide

SEQ ID NO: 644582 - DNA, 53 bp, Artificial; identical to SEQ ID NO: 179517
  Synthetic oligonucleotide

SEQ ID NO: 644583 - DNA, 55 bp, Artificial; identical to SEQ ID NO: 217120
  Synthetic oligonucleotide

SEQ ID NO: 644584 - DNA, 53 bp, Artificial; identical to SEQ ID NO: 147845
  Synthetic oligonucleotide

SEQ ID NO: 644585 - DNA, 57 bp, Artificial; identical to SEQ ID NO: 166644
  Synthetic oligonucleotide

SEQ ID NO: 644586 - DNA, 55 bp, Artificial; identical to SEQ ID NO: 146564
  Synthetic oligonucleotide

SEQ ID NO: 644587 - DNA, 59 bp, Artificial; identical to SEQ ID NO: 151644
  Synthetic oligonucleotide

SEQ ID NO: 644588 - DNA, 58 bp, Artificial; identical to SEQ ID NO: 171351
  Synthetic oligonucleotide

SEQ ID NO: 644589 - DNA, 53 bp, Artificial; identical to SEQ ID NO: 191157
  Synthetic oligonucleotide

SEQ ID NO: 644590 - DNA, 52 bp, Artificial; identical to SEQ ID NO: 190848
  Synthetic oligonucleotide

SEQ ID NO: 644591 - DNA, 51 bp, Artificial; identical to SEQ ID NO: 174907
  Synthetic oligonucleotide

SEQ ID NO: 644592 - DNA, 59 bp, Artificial; identical to SEQ ID NO: 178733
  Synthetic oligonucleotide

SEQ ID NO: 644593 - DNA, 56 bp, Artificial; identical to SEQ ID NO: 193178
  Synthetic oligonucleotide

SEQ ID NO: 644594 - DNA, 51 bp, Artificial; identical to SEQ ID NO: 165196
  Synthetic oligonucleotide

SEQ ID NO: 644595 - DNA, 56 bp, Artificial; identical to SEQ ID NO: 240082
  Synthetic oligonucleotide

SEQ ID NO: 644596 - DNA, 50 bp, Artificial; identical to SEQ ID NO: 243432
  Synthetic oligonucleotide

SEQ ID NO: 644597 - DNA, 51 bp, Artificial; identical to SEQ ID NO: 188831
  Synthetic oligonucleotide

SEQ ID NO: 644598 - DNA, 55 bp, Artificial; identical to SEQ ID NO: 244301
  Synthetic oligonucleotide

SEQ ID NO: 644599 - DNA, 54 bp, Artificial; identical to SEQ ID NO: 207686
  Synthetic oligonucleotide

SEQ ID NO: 644600 - DNA, 60 bp, Artificial; identical to SEQ ID NO: 246687
  Synthetic oligonucleotide

SEQ ID NO: 644601 - DNA, 54 bp, Artificial; identical to SEQ ID NO: 155492
  Synthetic oligonucleotide

SEQ ID NO: 644602 - DNA, 55 bp, Artificial; identical to SEQ ID NO: 144950
  Synthetic oligonucleotide

SEQ ID NO: 644603 - DNA, 54 bp, Artificial; identical to SEQ ID NO: 243090
  Synthetic oligonucleotide

SEQ ID NO: 644604 - DNA, 55 bp, Artificial; identical to SEQ ID NO: 142258
  Synthetic oligonucleotide

SEQ ID NO: 644605 - DNA, 60 bp, Artificial; identical to SEQ ID NO: 240126
  Synthetic oligonucleotide

SEQ ID NO: 644606 - DNA, 58 bp, Artificial; identical to SEQ ID NO: 240148
  Synthetic oligonucleotide

SEQ ID NO: 644607 - DNA, 55 bp, Artificial; identical to SEQ ID NO: 187665
  Synthetic oligonucleotide

SEQ ID NO: 644608 - DNA, 52 bp, Artificial; identical to SEQ ID NO: 247945
  Synthetic oligonucleotide

SEQ ID NO: 644609 - DNA, 54 bp, Artificial; identical to SEQ ID NO: 243091
  Synthetic oligonucleotide

SEQ ID NO: 644610 - DNA, 55 bp, Artificial; identical to SEQ ID NO: 244303
  Synthetic oligonucleotide

SEQ ID NO: 644611 - DNA, 52 bp, Artificial; identical to SEQ ID NO: 189138
  Synthetic oligonucleotide

SEQ ID NO: 644612 - DNA, 52 bp, Artificial; identical to SEQ ID NO: 167091
  Synthetic oligonucleotide

SEQ ID NO: 644613 - DNA, 52 bp, Artificial; identical to SEQ ID NO: 206450
  Synthetic oligonucleotide

SEQ ID NO: 644614 - DNA, 59 bp, Artificial; identical to SEQ ID NO: 169921
  Synthetic oligonucleotide

SEQ ID NO: 644615 - DNA, 54 bp, Artificial; identical to SEQ ID NO: 148360
  Synthetic oligonucleotide

SEQ ID NO: 644616 - DNA, 58 bp, Artificial; identical to SEQ ID NO: 187229
  Synthetic oligonucleotide

SEQ ID NO: 644617 - DNA, 59 bp, Artificial; identical to SEQ ID NO: 243619
  Synthetic oligonucleotide

SEQ ID NO: 644618 - DNA, 60 bp, Artificial; identical to SEQ ID NO: 206967
  Synthetic oligonucleotide

SEQ ID NO: 644619 - DNA, 60 bp, Artificial; identical to SEQ ID NO: 243620
  Synthetic oligonucleotide

SEQ ID NO: 644620 - DNA, 53 bp, Artificial; identical to SEQ ID NO: 174805
  Synthetic oligonucleotide

SEQ ID NO: 644621 - DNA, 50 bp, Artificial; identical to SEQ ID NO: 216974
  Synthetic oligonucleotide

SEQ ID NO: 644622 - DNA, 60 bp, Artificial; identical to SEQ ID NO: 178731
  Synthetic oligonucleotide

SEQ ID NO: 644623 - DNA, 55 bp, Artificial; identical to SEQ ID NO: 244929
  Synthetic oligonucleotide

SEQ ID NO: 644624 - DNA, 57 bp, Artificial; identical to SEQ ID NO: 239436
  Synthetic oligonucleotide

SEQ ID NO: 644625 - DNA, 54 bp, Artificial; identical to SEQ ID NO: 153545
  Synthetic oligonucleotide

SEQ ID NO: 644626 - DNA, 60 bp, Artificial; identical to SEQ ID NO: 148371
  Synthetic oligonucleotide

SEQ ID NO: 644627 - DNA, 55 bp, Artificial; identical to SEQ ID NO: 190963
  Synthetic oligonucleotide

SEQ ID NO: 644628 - DNA, 58 bp, Artificial; identical to SEQ ID NO: 171015
  Synthetic oligonucleotide

SEQ ID NO: 644629 - DNA, 60 bp, Artificial; identical to SEQ ID NO: 243622
  Synthetic oligonucleotide

SEQ ID NO: 644630 - DNA, 54 bp, Artificial; identical to SEQ ID NO: 166655
  Synthetic oligonucleotide

SEQ ID NO: 644631 - DNA, 55 bp, Artificial; identical to SEQ ID NO: 246576
  Synthetic oligonucleotide

SEQ ID NO: 644632 - DNA, 58 bp, Artificial; identical to SEQ ID NO: 160541
  Synthetic oligonucleotide

SEQ ID NO: 644633 - DNA, 55 bp, Artificial; identical to SEQ ID NO: 244935
  Synthetic oligonucleotide

SEQ ID NO: 644634 - DNA, 59 bp, Artificial; identical to SEQ ID NO: 239183
  Synthetic oligonucleotide

SEQ ID NO: 644635 - DNA, 60 bp, Artificial; identical to SEQ ID NO: 206978
  Synthetic oligonucleotide

SEQ ID NO: 644636 - DNA, 55 bp, Artificial; identical to SEQ ID NO: 239410
  Synthetic oligonucleotide

SEQ ID NO: 644637 - DNA, 54 bp, Artificial; identical to SEQ ID NO: 215177
  Synthetic oligonucleotide

SEQ ID NO: 644638 - DNA, 51 bp, Artificial; identical to SEQ ID NO: 241069
  Synthetic oligonucleotide

SEQ ID NO: 644639 - DNA, 52 bp, Artificial; identical to SEQ ID NO: 154599
  Synthetic oligonucleotide

SEQ ID NO: 644640 - DNA, 59 bp, Artificial; identical to SEQ ID NO: 224312
  Synthetic oligonucleotide

SEQ ID NO: 644641 - DNA, 58 bp, Artificial; identical to SEQ ID NO: 239265
  Synthetic oligonucleotide

SEQ ID NO: 644642 - DNA, 55 bp, Artificial; identical to SEQ ID NO: 198355
  Synthetic oligonucleotide

SEQ ID NO: 644643 - DNA, 53 bp, Artificial; identical to SEQ ID NO: 253282
  Synthetic oligonucleotide

SEQ ID NO: 644644 - DNA, 57 bp, Artificial; identical to SEQ ID NO: 174230
  Synthetic oligonucleotide

SEQ ID NO: 644645 - DNA, 55 bp, Artificial; identical to SEQ ID NO: 160999
  Synthetic oligonucleotide

SEQ ID NO: 644646 - DNA, 57 bp, Artificial; identical to SEQ ID NO: 217121
  Synthetic oligonucleotide

SEQ ID NO: 644647 - DNA, 60 bp, Artificial; identical to SEQ ID NO: 194592
  Synthetic oligonucleotide

SEQ ID NO: 644648 - DNA, 54 bp, Artificial; identical to SEQ ID NO: 154552
  Synthetic oligonucleotide

SEQ ID NO: 644649 - DNA, 55 bp, Artificial; identical to SEQ ID NO: 151651
  Synthetic oligonucleotide

SEQ ID NO: 644650 - DNA, 57 bp, Artificial; identical to SEQ ID NO: 239396
  Synthetic oligonucleotide

SEQ ID NO: 644651 - DNA, 51 bp, Artificial; identical to SEQ ID NO: 255617
  Synthetic oligonucleotide

SEQ ID NO: 644652 - DNA, 55 bp, Artificial; identical to SEQ ID NO: 153501
  Synthetic oligonucleotide

SEQ ID NO: 644653 - DNA, 51 bp, Artificial; identical to SEQ ID NO: 203990
  Synthetic oligonucleotide

SEQ ID NO: 644654 - DNA, 56 bp, Artificial; identical to SEQ ID NO: 180028
  Synthetic oligonucleotide

SEQ ID NO: 644655 - DNA, 52 bp, Artificial; identical to SEQ ID NO: 186381
  Synthetic oligonucleotide

SEQ ID NO: 644656 - DNA, 57 bp, Artificial; identical to SEQ ID NO: 237951
  Synthetic oligonucleotide

SEQ ID NO: 644657 - DNA, 60 bp, Artificial; identical to SEQ ID NO: 166666
  Synthetic oligonucleotide

SEQ ID NO: 644658 - DNA, 52 bp, Artificial; identical to SEQ ID NO: 246527
  Synthetic oligonucleotide

SEQ ID NO: 644659 - DNA, 55 bp, Artificial; identical to SEQ ID NO: 217659
  Synthetic oligonucleotide

SEQ ID NO: 644660 - DNA, 54 bp, Artificial; identical to SEQ ID NO: 216566
  Synthetic oligonucleotide

SEQ ID NO: 644661 - DNA, 53 bp, Artificial; identical to SEQ ID NO: 180025
  Synthetic oligonucleotide

SEQ ID NO: 644662 - DNA, 55 bp, Artificial; identical to SEQ ID NO: 190962
  Synthetic oligonucleotide

SEQ ID NO: 644663 - DNA, 55 bp, Artificial; identical to SEQ ID NO: 239717
  Synthetic oligonucleotide

SEQ ID NO: 644664 - DNA, 52 bp, Artificial; identical to SEQ ID NO: 186239
  Synthetic oligonucleotide

SEQ ID NO: 644665 - DNA, 59 bp, Artificial; identical to SEQ ID NO: 178730
  Synthetic oligonucleotide

SEQ ID NO: 644666 - DNA, 51 bp, Artificial; identical to SEQ ID NO: 191226
  Synthetic oligonucleotide

SEQ ID NO: 644667 - DNA, 60 bp, Artificial; identical to SEQ ID NO: 144709
  Synthetic oligonucleotide

SEQ ID NO: 644668 - DNA, 55 bp, Artificial; identical to SEQ ID NO: 182571
  Synthetic oligonucleotide

SEQ ID NO: 644669 - DNA, 55 bp, Artificial; identical to SEQ ID NO: 217660
  Synthetic oligonucleotide

SEQ ID NO: 644670 - DNA, 59 bp, Artificial; identical to SEQ ID NO: 240882
  Synthetic oligonucleotide

SEQ ID NO: 644671 - DNA, 59 bp, Artificial; identical to SEQ ID NO: 194267
  Synthetic oligonucleotide

SEQ ID NO: 644672 - DNA, 60 bp, Artificial; identical to SEQ ID NO: 207078
  Synthetic oligonucleotide

SEQ ID NO: 644673 - DNA, 60 bp, Artificial; identical to SEQ ID NO: 240893
  Synthetic oligonucleotide

SEQ ID NO: 644674 - DNA, 54 bp, Artificial; identical to SEQ ID NO: 199494
  Synthetic oligonucleotide

SEQ ID NO: 644675 - DNA, 59 bp, Artificial; identical to SEQ ID NO: 240904
  Synthetic oligonucleotide

SEQ ID NO: 644676 - DNA, 60 bp, Artificial; identical to SEQ ID NO: 200829
  Synthetic oligonucleotide

SEQ ID NO: 644677 - DNA, 55 bp, Artificial; identical to SEQ ID NO: 203645
  Synthetic oligonucleotide

SEQ ID NO: 644678 - DNA, 51 bp, Artificial; identical to SEQ ID NO: 165198
  Synthetic oligonucleotide

SEQ ID NO: 644679 - DNA, 52 bp, Artificial; identical to SEQ ID NO: 149537
  Synthetic oligonucleotide

SEQ ID NO: 644680 - DNA, 55 bp, Artificial; identical to SEQ ID NO: 198352
  Synthetic oligonucleotide

SEQ ID NO: 644681 - DNA, 55 bp, Artificial; identical to SEQ ID NO: 265939
  Synthetic oligonucleotide

SEQ ID NO: 644682 - DNA, 50 bp, Artificial; identical to SEQ ID NO: 150356
  Synthetic oligonucleotide

SEQ ID NO: 644683 - DNA, 50 bp, Artificial; identical to SEQ ID NO: 209798
  Synthetic oligonucleotide

SEQ ID NO: 644684 - DNA, 60 bp, Artificial; identical to SEQ ID NO: 197004
  Synthetic oligonucleotide

SEQ ID NO: 644685 - DNA, 57 bp, Artificial; identical to SEQ ID NO: 240949
  Synthetic oligonucleotide

SEQ ID NO: 644686 - DNA, 55 bp, Artificial; identical to SEQ ID NO: 239708
  Synthetic oligonucleotide

SEQ ID NO: 644687 - DNA, 54 bp, Artificial; identical to SEQ ID NO: 241015
  Synthetic oligonucleotide

SEQ ID NO: 644688 - DNA, 55 bp, Artificial; identical to SEQ ID NO: 244945
  Synthetic oligonucleotide

SEQ ID NO: 644689 - DNA, 57 bp, Artificial; identical to SEQ ID NO: 147222
  Synthetic oligonucleotide

SEQ ID NO: 644690 - DNA, 52 bp, Artificial; identical to SEQ ID NO: 191212
  Synthetic oligonucleotide

SEQ ID NO: 644691 - DNA, 54 bp, Artificial; identical to SEQ ID NO: 241037
  Synthetic oligonucleotide

SEQ ID NO: 644692 - DNA, 60 bp, Artificial; identical to SEQ ID NO: 200828
  Synthetic oligonucleotide

SEQ ID NO: 644693 - DNA, 60 bp, Artificial; identical to SEQ ID NO: 144754
  Synthetic oligonucleotide

SEQ ID NO: 644694 - DNA, 60 bp, Artificial; identical to SEQ ID NO: 194615
  Synthetic oligonucleotide

SEQ ID NO: 644695 - DNA, 55 bp, Artificial; identical to SEQ ID NO: 239701
  Synthetic oligonucleotide

SEQ ID NO: 644696 - DNA, 55 bp, Artificial; identical to SEQ ID NO: 221365
  Synthetic oligonucleotide

SEQ ID NO: 644697 - DNA, 60 bp, Artificial; identical to SEQ ID NO: 178728
  Synthetic oligonucleotide

SEQ ID NO: 644698 - DNA, 58 bp, Artificial; identical to SEQ ID NO: 207089
  Synthetic oligonucleotide

SEQ ID NO: 644699 - DNA, 54 bp, Artificial; identical to SEQ ID NO: 266746
  Synthetic oligonucleotide

SEQ ID NO: 644700 - DNA, 56 bp, Artificial; identical to SEQ ID NO: 241048
  Synthetic oligonucleotide

SEQ ID NO: 644701 - DNA, 52 bp, Artificial; identical to SEQ ID NO: 186252
  Synthetic oligonucleotide

SEQ ID NO: 644702 - DNA, 51 bp, Artificial; identical to SEQ ID NO: 243324
  Synthetic oligonucleotide

SEQ ID NO: 644703 - DNA, 52 bp, Artificial; identical to SEQ ID NO: 223641
  Synthetic oligonucleotide

SEQ ID NO: 644704 - DNA, 56 bp, Artificial; identical to SEQ ID NO: 245342
  Synthetic oligonucleotide

SEQ ID NO: 644705 - DNA, 60 bp, Artificial; identical to SEQ ID NO: 210753
  Synthetic oligonucleotide

SEQ ID NO: 644706 - DNA, 56 bp, Artificial; identical to SEQ ID NO: 247404
  Synthetic oligonucleotide

SEQ ID NO: 644707 - DNA, 54 bp, Artificial; identical to SEQ ID NO: 179223
  Synthetic oligonucleotide

SEQ ID NO: 644708 - DNA, 55 bp, Artificial; identical to SEQ ID NO: 245014
  Synthetic oligonucleotide

SEQ ID NO: 644709 - DNA, 55 bp, Artificial; identical to SEQ ID NO: 252989
  Synthetic oligonucleotide

SEQ ID NO: 644710 - DNA, 55 bp, Artificial; identical to SEQ ID NO: 182611
  Synthetic oligonucleotide

SEQ ID NO: 644711 - DNA, 50 bp, Artificial; identical to SEQ ID NO: 241589
  Synthetic oligonucleotide

SEQ ID NO: 644712 - DNA, 52 bp, Artificial; identical to SEQ ID NO: 241060
  Synthetic oligonucleotide

SEQ ID NO: 644713 - DNA, 60 bp, Artificial; identical to SEQ ID NO: 201618
  Synthetic oligonucleotide

SEQ ID NO: 644714 - DNA, 55 bp, Artificial; identical to SEQ ID NO: 245017
  Synthetic oligonucleotide

SEQ ID NO: 644715 - DNA, 60 bp, Artificial; identical to SEQ ID NO: 245320
  Synthetic oligonucleotide

SEQ ID NO: 644716 - DNA, 60 bp, Artificial; identical to SEQ ID NO: 166689
  Synthetic oligonucleotide

SEQ ID NO: 644717 - DNA, 60 bp, Artificial; identical to SEQ ID NO: 187227
  Synthetic oligonucleotide

SEQ ID NO: 644718 - DNA, 55 bp, Artificial; identical to SEQ ID NO: 207361
  Synthetic oligonucleotide

SEQ ID NO: 644719 - DNA, 60 bp, Artificial; identical to SEQ ID NO: 223661
  Synthetic oligonucleotide

SEQ ID NO: 644720 - DNA, 56 bp, Artificial; identical to SEQ ID NO: 166171
  Synthetic oligonucleotide

SEQ ID NO: 644721 - DNA, 58 bp, Artificial; identical to SEQ ID NO: 201818
  Synthetic oligonucleotide

SEQ ID NO: 644722 - DNA, 51 bp, Artificial; identical to SEQ ID NO: 197673
  Synthetic oligonucleotide

SEQ ID NO: 644723 - DNA, 55 bp, Artificial; identical to SEQ ID NO: 142259
  Synthetic oligonucleotide

SEQ ID NO: 644724 - DNA, 53 bp, Artificial; identical to SEQ ID NO: 189123
  Synthetic oligonucleotide

SEQ ID NO: 644725 - DNA, 56 bp, Artificial; identical to SEQ ID NO: 179242
  Synthetic oligonucleotide

SEQ ID NO: 644726 - DNA, 55 bp, Artificial; identical to SEQ ID NO: 144100
  Synthetic oligonucleotide

SEQ ID NO: 644727 - DNA, 50 bp, Artificial; identical to SEQ ID NO: 153714
  Synthetic oligonucleotide

SEQ ID NO: 644728 - DNA, 50 bp, Artificial; identical to SEQ ID NO: 216975
  Synthetic oligonucleotide

SEQ ID NO: 644729 - DNA, 54 bp, Artificial; identical to SEQ ID NO: 240575
  Synthetic oligonucleotide

SEQ ID NO: 644730 - DNA, 55 bp, Artificial; identical to SEQ ID NO: 205503
  Synthetic oligonucleotide

SEQ ID NO: 644731 - DNA, 51 bp, Artificial; identical to SEQ ID NO: 157750
  Synthetic oligonucleotide

SEQ ID NO: 644732 - DNA, 54 bp, Artificial; identical to SEQ ID NO: 197414
  Synthetic oligonucleotide

SEQ ID NO: 644733 - DNA, 57 bp, Artificial; identical to SEQ ID NO: 147221
  Synthetic oligonucleotide

SEQ ID NO: 644734 - DNA, 55 bp, Artificial; identical to SEQ ID NO: 224790
  Synthetic oligonucleotide

SEQ ID NO: 644735 - DNA, 54 bp, Artificial; identical to SEQ ID NO: 154117
  Synthetic oligonucleotide

SEQ ID NO: 644736 - DNA, 55 bp, Artificial; identical to SEQ ID NO: 142130
  Synthetic oligonucleotide

SEQ ID NO: 644737 - DNA, 53 bp, Artificial; identical to SEQ ID NO: 243197
  Synthetic oligonucleotide

SEQ ID NO: 644738 - DNA, 60 bp, Artificial; identical to SEQ ID NO: 141747
  Synthetic oligonucleotide

SEQ ID NO: 644739 - DNA, 55 bp, Artificial; identical to SEQ ID NO: 253942
  Synthetic oligonucleotide

SEQ ID NO: 644740 - DNA, 54 bp, Artificial; identical to SEQ ID NO: 148427
  Synthetic oligonucleotide

SEQ ID NO: 644741 - DNA, 56 bp, Artificial; identical to SEQ ID NO: 205708
  Synthetic oligonucleotide

SEQ ID NO: 644742 - DNA, 59 bp, Artificial; identical to SEQ ID NO: 148449
  Synthetic oligonucleotide

SEQ ID NO: 644743 - DNA, 55 bp, Artificial; identical to SEQ ID NO: 203646
  Synthetic oligonucleotide

SEQ ID NO: 644744 - DNA, 55 bp, Artificial; identical to SEQ ID NO: 151685
  Synthetic oligonucleotide

SEQ ID NO: 644745 - DNA, 60 bp, Artificial; identical to SEQ ID NO: 179220
  Synthetic oligonucleotide

SEQ ID NO: 644746 - DNA, 55 bp, Artificial; identical to SEQ ID NO: 244304
  Synthetic oligonucleotide

SEQ ID NO: 644747 - DNA, 52 bp, Artificial; identical to SEQ ID NO: 162345
  Synthetic oligonucleotide

SEQ ID NO: 644748 - DNA, 54 bp, Artificial; identical to SEQ ID NO: 185033
  Synthetic oligonucleotide

SEQ ID NO: 644749 - DNA, 52 bp, Artificial; identical to SEQ ID NO: 246534
  Synthetic oligonucleotide

SEQ ID NO: 644750 - DNA, 50 bp, Artificial; identical to SEQ ID NO: 191257
  Synthetic oligonucleotide

SEQ ID NO: 644751 - DNA, 60 bp, Artificial; identical to SEQ ID NO: 179227
  Synthetic oligonucleotide

SEQ ID NO: 644752 - DNA, 52 bp, Artificial; identical to SEQ ID NO: 152092
  Synthetic oligonucleotide

SEQ ID NO: 644753 - DNA, 55 bp, Artificial; identical to SEQ ID NO: 182603
  Synthetic oligonucleotide

SEQ ID NO: 644754 - DNA, 55 bp, Artificial; identical to SEQ ID NO: 198349
  Synthetic oligonucleotide

SEQ ID NO: 644755 - DNA, 55 bp, Artificial; identical to SEQ ID NO: 189028
  Synthetic oligonucleotide

SEQ ID NO: 644756 - DNA, 53 bp, Artificial; identical to SEQ ID NO: 188035
  Synthetic oligonucleotide

SEQ ID NO: 644757 - DNA, 59 bp, Artificial; identical to SEQ ID NO: 203357
  Synthetic oligonucleotide

SEQ ID NO: 644758 - DNA, 49 bp, Artificial; identical to SEQ ID NO: 209326
  Synthetic oligonucleotide

SEQ ID NO: 644759 - DNA, 55 bp, Artificial; identical to SEQ ID NO: 248939
  Synthetic oligonucleotide

SEQ ID NO: 644760 - DNA, 55 bp, Artificial; identical to SEQ ID NO: 182601
  Synthetic oligonucleotide

SEQ ID NO: 644761 - DNA, 52 bp, Artificial; identical to SEQ ID NO: 223640
  Synthetic oligonucleotide

SEQ ID NO: 644762 - DNA, 54 bp, Artificial; identical to SEQ ID NO: 164755
  Synthetic oligonucleotide

SEQ ID NO: 644763 - DNA, 58 bp, Artificial; identical to SEQ ID NO: 240592
  Synthetic oligonucleotide

SEQ ID NO: 644764 - DNA, 60 bp, Artificial; identical to SEQ ID NO: 240603
  Synthetic oligonucleotide

SEQ ID NO: 644765 - DNA, 55 bp, Artificial; identical to SEQ ID NO: 172957
  Synthetic oligonucleotide

SEQ ID NO: 644766 - DNA, 55 bp, Artificial; identical to SEQ ID NO: 202297
  Synthetic oligonucleotide

SEQ ID NO: 644767 - DNA, 54 bp, Artificial; identical to SEQ ID NO: 192008
  Synthetic oligonucleotide

SEQ ID NO: 644768 - DNA, 54 bp, Artificial; identical to SEQ ID NO: 184943
  Synthetic oligonucleotide

SEQ ID NO: 644769 - DNA, 55 bp, Artificial; identical to SEQ ID NO: 166850
  Synthetic oligonucleotide

SEQ ID NO: 644770 - DNA, 50 bp, Artificial; identical to SEQ ID NO: 256232
  Synthetic oligonucleotide

SEQ ID NO: 644771 - DNA, 50 bp, Artificial; identical to SEQ ID NO: 206665
  Synthetic oligonucleotide

SEQ ID NO: 644772 - DNA, 59 bp, Artificial; identical to SEQ ID NO: 240626
  Synthetic oligonucleotide

SEQ ID NO: 644773 - DNA, 50 bp, Artificial; identical to SEQ ID NO: 200491
  Synthetic oligonucleotide

SEQ ID NO: 644774 - DNA, 55 bp, Artificial; identical to SEQ ID NO: 198347
  Synthetic oligonucleotide

SEQ ID NO: 644775 - DNA, 54 bp, Artificial; identical to SEQ ID NO: 162252
  Synthetic oligonucleotide

SEQ ID NO: 644776 - DNA, 58 bp, Artificial; identical to SEQ ID NO: 148471
  Synthetic oligonucleotide

SEQ ID NO: 644777 - DNA, 54 bp, Artificial; identical to SEQ ID NO: 182598
  Synthetic oligonucleotide

SEQ ID NO: 644778 - DNA, 51 bp, Artificial; identical to SEQ ID NO: 174908
  Synthetic oligonucleotide

SEQ ID NO: 644779 - DNA, 55 bp, Artificial; identical to SEQ ID NO: 159772
  Synthetic oligonucleotide

SEQ ID NO: 644780 - DNA, 54 bp, Artificial; identical to SEQ ID NO: 157191
  Synthetic oligonucleotide

SEQ ID NO: 644781 - DNA, 54 bp, Artificial; identical to SEQ ID NO: 149208
  Synthetic oligonucleotide

SEQ ID NO: 644782 - DNA, 54 bp, Artificial; identical to SEQ ID NO: 168860
  Synthetic oligonucleotide

SEQ ID NO: 644783 - DNA, 57 bp, Artificial; identical to SEQ ID NO: 200826
  Synthetic oligonucleotide

SEQ ID NO: 644784 - DNA, 55 bp, Artificial; identical to SEQ ID NO: 212748
  Synthetic oligonucleotide

SEQ ID NO: 644785 - DNA, 55 bp, Artificial; identical to SEQ ID NO: 202310
  Synthetic oligonucleotide

SEQ ID NO: 644786 - DNA, 57 bp, Artificial; identical to SEQ ID NO: 201080
  Synthetic oligonucleotide

SEQ ID NO: 644787 - DNA, 57 bp, Artificial; identical to SEQ ID NO: 224380
  Synthetic oligonucleotide

SEQ ID NO: 644788 - DNA, 55 bp, Artificial; identical to SEQ ID NO: 146541
  Synthetic oligonucleotide

SEQ ID NO: 644789 - DNA, 51 bp, Artificial; identical to SEQ ID NO: 186844
  Synthetic oligonucleotide

SEQ ID NO: 644790 - DNA, 55 bp, Artificial; identical to SEQ ID NO: 182593
  Synthetic oligonucleotide

SEQ ID NO: 644791 - DNA, 60 bp, Artificial; identical to SEQ ID NO: 179257
  Synthetic oligonucleotide

SEQ ID NO: 644792 - DNA, 55 bp, Artificial; identical to SEQ ID NO: 168637
  Synthetic oligonucleotide

SEQ ID NO: 644793 - DNA, 60 bp, Artificial; identical to SEQ ID NO: 179230
  Synthetic oligonucleotide

SEQ ID NO: 644794 - DNA, 52 bp, Artificial; identical to SEQ ID NO: 199915
  Synthetic oligonucleotide

SEQ ID NO: 644795 - DNA, 50 bp, Artificial; identical to SEQ ID NO: 165937
  Synthetic oligonucleotide

SEQ ID NO: 644796 - DNA, 54 bp, Artificial; identical to SEQ ID NO: 199514
  Synthetic oligonucleotide

SEQ ID NO: 644797 - DNA, 56 bp, Artificial; identical to SEQ ID NO: 201244
  Synthetic oligonucleotide

SEQ ID NO: 644798 - DNA, 60 bp, Artificial; identical to SEQ ID NO: 179229
  Synthetic oligonucleotide

SEQ ID NO: 644799 - DNA, 55 bp, Artificial; identical to SEQ ID NO: 166669
  Synthetic oligonucleotide

SEQ ID NO: 644800 - DNA, 52 bp, Artificial; identical to SEQ ID NO: 199919
  Synthetic oligonucleotide

SEQ ID NO: 644801 - DNA, 55 bp, Artificial; identical to SEQ ID NO: 166670
  Synthetic oligonucleotide

SEQ ID NO: 644802 - DNA, 60 bp, Artificial; identical to SEQ ID NO: 210751
  Synthetic oligonucleotide

SEQ ID NO: 644803 - DNA, 58 bp, Artificial; identical to SEQ ID NO: 179609
  Synthetic oligonucleotide

SEQ ID NO: 644804 - DNA, 54 bp, Artificial; identical to SEQ ID NO: 184956
  Synthetic oligonucleotide

SEQ ID NO: 644805 - DNA, 56 bp, Artificial; identical to SEQ ID NO: 207521
  Synthetic oligonucleotide

SEQ ID NO: 644806 - DNA, 55 bp, Artificial; identical to SEQ ID NO: 159776
  Synthetic oligonucleotide

SEQ ID NO: 644807 - DNA, 53 bp, Artificial; identical to SEQ ID NO: 166671
  Synthetic oligonucleotide

SEQ ID NO: 644808 - DNA, 55 bp, Artificial; identical to SEQ ID NO: 142133
  Synthetic oligonucleotide

SEQ ID NO: 644809 - DNA, 55 bp, Artificial; identical to SEQ ID NO: 171558
  Synthetic oligonucleotide

SEQ ID NO: 644810 - DNA, 51 bp, Artificial; identical to SEQ ID NO: 149945
  Synthetic oligonucleotide

SEQ ID NO: 644811 - DNA, 55 bp, Artificial; identical to SEQ ID NO: 171557
  Synthetic oligonucleotide

SEQ ID NO: 644812 - DNA, 55 bp, Artificial; identical to SEQ ID NO: 151684
  Synthetic oligonucleotide

SEQ ID NO: 644813 - DNA, 56 bp, Artificial; identical to SEQ ID NO: 240648
  Synthetic oligonucleotide

SEQ ID NO: 644814 - DNA, 53 bp, Artificial; identical to SEQ ID NO: 169360
  Synthetic oligonucleotide

SEQ ID NO: 644815 - DNA, 55 bp, Artificial; identical to SEQ ID NO: 182544
  Synthetic oligonucleotide

SEQ ID NO: 644816 - DNA, 54 bp, Artificial; identical to SEQ ID NO: 253940
  Synthetic oligonucleotide

SEQ ID NO: 644817 - DNA, 57 bp, Artificial; identical to SEQ ID NO: 168833
  Synthetic oligonucleotide

SEQ ID NO: 644818 - DNA, 55 bp, Artificial; identical to SEQ ID NO: 171556
  Synthetic oligonucleotide

SEQ ID NO: 644819 - DNA, 55 bp, Artificial; identical to SEQ ID NO: 182543
  Synthetic oligonucleotide

SEQ ID NO: 644820 - DNA, 54 bp, Artificial; identical to SEQ ID NO: 253939
  Synthetic oligonucleotide

SEQ ID NO: 644821 - DNA, 55 bp, Artificial; identical to SEQ ID NO: 208240
  Synthetic oligonucleotide

SEQ ID NO: 644822 - DNA, 58 bp, Artificial; identical to SEQ ID NO: 193180
  Synthetic oligonucleotide

SEQ ID NO: 644823 - DNA, 55 bp, Artificial; identical to SEQ ID NO: 224786
  Synthetic oligonucleotide

SEQ ID NO: 644824 - DNA, 53 bp, Artificial; identical to SEQ ID NO: 200823
  Synthetic oligonucleotide

SEQ ID NO: 644825 - DNA, 53 bp, Artificial; identical to SEQ ID NO: 240736
  Synthetic oligonucleotide

SEQ ID NO: 644826 - DNA, 60 bp, Artificial; identical to SEQ ID NO: 200822
  Synthetic oligonucleotide

SEQ ID NO: 644827 - DNA, 60 bp, Artificial; identical to SEQ ID NO: 266026
  Synthetic oligonucleotide

SEQ ID NO: 644828 - DNA, 51 bp, Artificial; identical to SEQ ID NO: 174909
  Synthetic oligonucleotide

SEQ ID NO: 644829 - DNA, 55 bp, Artificial; identical to SEQ ID NO: 169284
  Synthetic oligonucleotide

SEQ ID NO: 644830 - DNA, 51 bp, Artificial; identical to SEQ ID NO: 221791
  Synthetic oligonucleotide

SEQ ID NO: 644831 - DNA, 58 bp, Artificial; identical to SEQ ID NO: 247400
  Synthetic oligonucleotide

SEQ ID NO: 644832 - DNA, 55 bp, Artificial; identical to SEQ ID NO: 203655
  Synthetic oligonucleotide

SEQ ID NO: 644833 - DNA, 55 bp, Artificial; identical to SEQ ID NO: 198342
  Synthetic oligonucleotide

SEQ ID NO: 644834 - DNA, 50 bp, Artificial; identical to SEQ ID NO: 206669
  Synthetic oligonucleotide

SEQ ID NO: 644835 - DNA, 53 bp, Artificial; identical to SEQ ID NO: 185598
  Synthetic oligonucleotide

SEQ ID NO: 644836 - DNA, 54 bp, Artificial; identical to SEQ ID NO: 190614
  Synthetic oligonucleotide

SEQ ID NO: 644837 - DNA, 55 bp, Artificial; identical to SEQ ID NO: 208561
  Synthetic oligonucleotide

SEQ ID NO: 644838 - DNA, 50 bp, Artificial; identical to SEQ ID NO: 200363
  Synthetic oligonucleotide

SEQ ID NO: 644839 - DNA, 55 bp, Artificial; identical to SEQ ID NO: 182540
  Synthetic oligonucleotide

SEQ ID NO: 644840 - DNA, 53 bp, Artificial; identical to SEQ ID NO: 266281
  Synthetic oligonucleotide

SEQ ID NO: 644841 - DNA, 58 bp, Artificial; identical to SEQ ID NO: 247500
  Synthetic oligonucleotide

SEQ ID NO: 644842 - DNA, 53 bp, Artificial; identical to SEQ ID NO: 223587
  Synthetic oligonucleotide

SEQ ID NO: 644843 - DNA, 55 bp, Artificial; identical to SEQ ID NO: 146600
  Synthetic oligonucleotide

SEQ ID NO: 644844 - DNA, 55 bp, Artificial; identical to SEQ ID NO: 144946
  Synthetic oligonucleotide

SEQ ID NO: 644845 - DNA, 53 bp, Artificial; identical to SEQ ID NO: 185601
  Synthetic oligonucleotide

SEQ ID NO: 644846 - DNA, 56 bp, Artificial; identical to SEQ ID NO: 179234
  Synthetic oligonucleotide

SEQ ID NO: 644847 - DNA, 54 bp, Artificial; identical to SEQ ID NO: 141748
  Synthetic oligonucleotide

SEQ ID NO: 644848 - DNA, 55 bp, Artificial; identical to SEQ ID NO: 147895
  Synthetic oligonucleotide

SEQ ID NO: 644849 - DNA, 54 bp, Artificial; identical to SEQ ID NO: 164757
  Synthetic oligonucleotide

SEQ ID NO: 644850 - DNA, 52 bp, Artificial; identical to SEQ ID NO: 169377
  Synthetic oligonucleotide

SEQ ID NO: 644851 - DNA, 55 bp, Artificial; identical to SEQ ID NO: 166653
  Synthetic oligonucleotide

SEQ ID NO: 644852 - DNA, 55 bp, Artificial; identical to SEQ ID NO: 222592
  Synthetic oligonucleotide

SEQ ID NO: 644853 - DNA, 50 bp, Artificial; identical to SEQ ID NO: 158074
  Synthetic oligonucleotide

SEQ ID NO: 644854 - DNA, 55 bp, Artificial; identical to SEQ ID NO: 238289
  Synthetic oligonucleotide

SEQ ID NO: 644855 - DNA, 55 bp, Artificial; identical to SEQ ID NO: 182535
  Synthetic oligonucleotide

SEQ ID NO: 644856 - DNA, 53 bp, Artificial; identical to SEQ ID NO: 151680
  Synthetic oligonucleotide

SEQ ID NO: 644857 - DNA, 55 bp, Artificial; identical to SEQ ID NO: 253937
  Synthetic oligonucleotide

SEQ ID NO: 644858 - DNA, 52 bp, Artificial; identical to SEQ ID NO: 186269
  Synthetic oligonucleotide

SEQ ID NO: 644859 - DNA, 55 bp, Artificial; identical to SEQ ID NO: 197147
  Synthetic oligonucleotide

SEQ ID NO: 644860 - DNA, 58 bp, Artificial; identical to SEQ ID NO: 243946
  Synthetic oligonucleotide

SEQ ID NO: 644861 - DNA, 50 bp, Artificial; identical to SEQ ID NO: 202608
  Synthetic oligonucleotide

SEQ ID NO: 644862 - DNA, 51 bp, Artificial; identical to SEQ ID NO: 141371
  Synthetic oligonucleotide

SEQ ID NO: 644863 - DNA, 54 bp, Artificial; identical to SEQ ID NO: 166840
  Synthetic oligonucleotide

SEQ ID NO: 644864 - DNA, 55 bp, Artificial; identical to SEQ ID NO: 190958
  Synthetic oligonucleotide

SEQ ID NO: 644865 - DNA, 50 bp, Artificial; identical to SEQ ID NO: 263342
  Synthetic oligonucleotide

SEQ ID NO: 644866 - DNA, 58 bp, Artificial; identical to SEQ ID NO: 187226
  Synthetic oligonucleotide

SEQ ID NO: 644867 - DNA, 55 bp, Artificial; identical to SEQ ID NO: 201131
  Synthetic oligonucleotide

SEQ ID NO: 644868 - DNA, 51 bp, Artificial; identical to SEQ ID NO: 243627
  Synthetic oligonucleotide

SEQ ID NO: 644869 - DNA, 60 bp, Artificial; identical to SEQ ID NO: 240714
  Synthetic oligonucleotide

SEQ ID NO: 644870 - DNA, 50 bp, Artificial; identical to SEQ ID NO: 213315
  Synthetic oligonucleotide

SEQ ID NO: 644871 - DNA, 50 bp, Artificial; identical to SEQ ID NO: 241530
  Synthetic oligonucleotide

SEQ ID NO: 644872 - DNA, 55 bp, Artificial; identical to SEQ ID NO: 171756
  Synthetic oligonucleotide

SEQ ID NO: 644873 - DNA, 55 bp, Artificial; identical to SEQ ID NO: 166652
  Synthetic oligonucleotide

SEQ ID NO: 644874 - DNA, 55 bp, Artificial; identical to SEQ ID NO: 194648
  Synthetic oligonucleotide

SEQ ID NO: 644875 - DNA, 58 bp, Artificial; identical to SEQ ID NO: 153046
  Synthetic oligonucleotide

SEQ ID NO: 644876 - DNA, 59 bp, Artificial; identical to SEQ ID NO: 212407
  Synthetic oligonucleotide

SEQ ID NO: 644877 - DNA, 55 bp, Artificial; identical to SEQ ID NO: 190957
  Synthetic oligonucleotide

SEQ ID NO: 644878 - DNA, 51 bp, Artificial; identical to SEQ ID NO: 200089
  Synthetic oligonucleotide

SEQ ID NO: 644879 - DNA, 55 bp, Artificial; identical to SEQ ID NO: 142542
  Synthetic oligonucleotide

SEQ ID NO: 644880 - DNA, 55 bp, Artificial; identical to SEQ ID NO: 224785
  Synthetic oligonucleotide

SEQ ID NO: 644881 - DNA, 55 bp, Artificial; identical to SEQ ID NO: 224784
  Synthetic oligonucleotide

SEQ ID NO: 644882 - DNA, 60 bp, Artificial; identical to SEQ ID NO: 154403
  Synthetic oligonucleotide

SEQ ID NO: 644883 - DNA, 60 bp, Artificial; identical to SEQ ID NO: 148527
  Synthetic oligonucleotide

SEQ ID NO: 644884 - DNA, 55 bp, Artificial; identical to SEQ ID NO: 182533
  Synthetic oligonucleotide

SEQ ID NO: 644885 - DNA, 53 bp, Artificial; identical to SEQ ID NO: 208690
  Synthetic oligonucleotide

SEQ ID NO: 644886 - DNA, 59 bp, Artificial; identical to SEQ ID NO: 148549
  Synthetic oligonucleotide

SEQ ID NO: 644887 - DNA, 51 bp, Artificial; identical to SEQ ID NO: 216846
  Synthetic oligonucleotide

SEQ ID NO: 644888 - DNA, 53 bp, Artificial; identical to SEQ ID NO: 239540
  Synthetic oligonucleotide

SEQ ID NO: 644889 - DNA, 60 bp, Artificial; identical to SEQ ID NO: 217123
  Synthetic oligonucleotide

SEQ ID NO: 644890 - DNA, 50 bp, Artificial; identical to SEQ ID NO: 261892
  Synthetic oligonucleotide

SEQ ID NO: 644891 - DNA, 51 bp, Artificial; identical to SEQ ID NO: 233874
  Synthetic oligonucleotide

SEQ ID NO: 644892 - DNA, 55 bp, Artificial; identical to SEQ ID NO: 155790
  Synthetic oligonucleotide

SEQ ID NO: 644893 - DNA, 60 bp, Artificial; identical to SEQ ID NO: 179254
  Synthetic oligonucleotide

SEQ ID NO: 644894 - DNA, 60 bp, Artificial; identical to SEQ ID NO: 189384
  Synthetic oligonucleotide

SEQ ID NO: 644895 - DNA, 55 bp, Artificial; identical to SEQ ID NO: 257801
  Synthetic oligonucleotide

SEQ ID NO: 644896 - DNA, 57 bp, Artificial; identical to SEQ ID NO: 148560
  Synthetic oligonucleotide

SEQ ID NO: 644897 - DNA, 55 bp, Artificial; identical to SEQ ID NO: 244293
  Synthetic oligonucleotide

SEQ ID NO: 644898 - DNA, 46 bp, Artificial; identical to SEQ ID NO: 212406
  Synthetic oligonucleotide

SEQ ID NO: 644899 - DNA, 57 bp, Artificial; identical to SEQ ID NO: 153058
  Synthetic oligonucleotide

SEQ ID NO: 644900 - DNA, 55 bp, Artificial; identical to SEQ ID NO: 179712
  Synthetic oligonucleotide

SEQ ID NO: 644901 - DNA, 55 bp, Artificial; identical to SEQ ID NO: 195192
  Synthetic oligonucleotide

SEQ ID NO: 644902 - DNA, 55 bp, Artificial; identical to SEQ ID NO: 154363
  Synthetic oligonucleotide

SEQ ID NO: 644903 - DNA, 60 bp, Artificial; identical to SEQ ID NO: 179206
  Synthetic oligonucleotide

SEQ ID NO: 644904 - DNA, 54 bp, Artificial; identical to SEQ ID NO: 206497
  Synthetic oligonucleotide

SEQ ID NO: 644905 - DNA, 55 bp, Artificial; identical to SEQ ID NO: 248935
  Synthetic oligonucleotide

SEQ ID NO: 644906 - DNA, 52 bp, Artificial; identical to SEQ ID NO: 246491
  Synthetic oligonucleotide

SEQ ID NO: 644907 - DNA, 55 bp, Artificial; identical to SEQ ID NO: 182529
  Synthetic oligonucleotide

SEQ ID NO: 644908 - DNA, 60 bp, Artificial; identical to SEQ ID NO: 200821
  Synthetic oligonucleotide

SEQ ID NO: 644909 - DNA, 55 bp, Artificial; identical to SEQ ID NO: 190564
  Synthetic oligonucleotide

SEQ ID NO: 644910 - DNA, 52 bp, Artificial; identical to SEQ ID NO: 255496
  Synthetic oligonucleotide

SEQ ID NO: 644911 - DNA, 53 bp, Artificial; identical to SEQ ID NO: 188467
  Synthetic oligonucleotide

SEQ ID NO: 644912 - DNA, 55 bp, Artificial; identical to SEQ ID NO: 147900
  Synthetic oligonucleotide

SEQ ID NO: 644913 - DNA, 60 bp, Artificial; identical to SEQ ID NO: 179207
  Synthetic oligonucleotide

SEQ ID NO: 644914 - DNA, 55 bp, Artificial; identical to SEQ ID NO: 224781
  Synthetic oligonucleotide

SEQ ID NO: 644915 - DNA, 53 bp, Artificial; identical to SEQ ID NO: 254422
  Synthetic oligonucleotide

SEQ ID NO: 644916 - DNA, 58 bp, Artificial; identical to SEQ ID NO: 171650
  Synthetic oligonucleotide

SEQ ID NO: 644917 - DNA, 53 bp, Artificial; identical to SEQ ID NO: 209627
  Synthetic oligonucleotide

SEQ ID NO: 644918 - DNA, 55 bp, Artificial; identical to SEQ ID NO: 160336
  Synthetic oligonucleotide

SEQ ID NO: 644919 - DNA, 60 bp, Artificial; identical to SEQ ID NO: 144698
  Synthetic oligonucleotide

SEQ ID NO: 644920 - DNA, 55 bp, Artificial; identical to SEQ ID NO: 253936
  Synthetic oligonucleotide

SEQ ID NO: 644921 - DNA, 58 bp, Artificial; identical to SEQ ID NO: 153005
  Synthetic oligonucleotide

SEQ ID NO: 644922 - DNA, 55 bp, Artificial; identical to SEQ ID NO: 142135
  Synthetic oligonucleotide

SEQ ID NO: 644923 - DNA, 53 bp, Artificial; identical to SEQ ID NO: 240741
  Synthetic oligonucleotide

SEQ ID NO: 644924 - DNA, 55 bp, Artificial; identical to SEQ ID NO: 155792
  Synthetic oligonucleotide

SEQ ID NO: 644925 - DNA, 60 bp, Artificial; identical to SEQ ID NO: 243628
  Synthetic oligonucleotide

SEQ ID NO: 644926 - DNA, 54 bp, Artificial; identical to SEQ ID NO: 203656
  Synthetic oligonucleotide

SEQ ID NO: 644927 - DNA, 50 bp, Artificial; identical to SEQ ID NO: 241522
  Synthetic oligonucleotide

SEQ ID NO: 644928 - DNA, 51 bp, Artificial; identical to SEQ ID NO: 223753
  Synthetic oligonucleotide

SEQ ID NO: 644929 - DNA, 55 bp, Artificial; identical to SEQ ID NO: 220611
  Synthetic oligonucleotide

SEQ ID NO: 644930 - DNA, 56 bp, Artificial; identical to SEQ ID NO: 203980
  Synthetic oligonucleotide

SEQ ID NO: 644931 - DNA, 55 bp, Artificial; identical to SEQ ID NO: 205504
  Synthetic oligonucleotide

SEQ ID NO: 644932 - DNA, 57 bp, Artificial; identical to SEQ ID NO: 153057
  Synthetic oligonucleotide

SEQ ID NO: 644933 - DNA, 60 bp, Artificial; identical to SEQ ID NO: 245265
  Synthetic oligonucleotide

SEQ ID NO: 644934 - DNA, 55 bp, Artificial; identical to SEQ ID NO: 245254
  Synthetic oligonucleotide

SEQ ID NO: 644935 - DNA, 55 bp, Artificial; identical to SEQ ID NO: 221363
  Synthetic oligonucleotide

SEQ ID NO: 644936 - DNA, 55 bp, Artificial; identical to SEQ ID NO: 179208
  Synthetic oligonucleotide

SEQ ID NO: 644937 - DNA, 51 bp, Artificial; identical to SEQ ID NO: 253374
  Synthetic oligonucleotide

SEQ ID NO: 644938 - DNA, 55 bp, Artificial; identical to SEQ ID NO: 208560
  Synthetic oligonucleotide

SEQ ID NO: 644939 - DNA, 55 bp, Artificial; identical to SEQ ID NO: 253933
  Synthetic oligonucleotide

SEQ ID NO: 644940 - DNA, 51 bp, Artificial; identical to SEQ ID NO: 223754
  Synthetic oligonucleotide

SEQ ID NO: 644941 - DNA, 55 bp, Artificial; identical to SEQ ID NO: 244325
  Synthetic oligonucleotide

SEQ ID NO: 644942 - DNA, 58 bp, Artificial; identical to SEQ ID NO: 171639
  Synthetic oligonucleotide

SEQ ID NO: 644943 - DNA, 55 bp, Artificial; identical to SEQ ID NO: 182524
  Synthetic oligonucleotide

SEQ ID NO: 644944 - DNA, 58 bp, Artificial; identical to SEQ ID NO: 147107
  Synthetic oligonucleotide

SEQ ID NO: 644945 - DNA, 57 bp, Artificial; identical to SEQ ID NO: 141968
  Synthetic oligonucleotide

SEQ ID NO: 644946 - DNA, 52 bp, Artificial; identical to SEQ ID NO: 179407
  Synthetic oligonucleotide

SEQ ID NO: 644947 - DNA, 55 bp, Artificial; identical to SEQ ID NO: 168632
  Synthetic oligonucleotide

SEQ ID NO: 644948 - DNA, 57 bp, Artificial; identical to SEQ ID NO: 155575
  Synthetic oligonucleotide

SEQ ID NO: 644949 - DNA, 55 bp, Artificial; identical to SEQ ID NO: 175664
  Synthetic oligonucleotide

SEQ ID NO: 644950 - DNA, 60 bp, Artificial; identical to SEQ ID NO: 179218
  Synthetic oligonucleotide

SEQ ID NO: 644951 - DNA, 55 bp, Artificial; identical to SEQ ID NO: 205297
  Synthetic oligonucleotide

SEQ ID NO: 644952 - DNA, 55 bp, Artificial; identical to SEQ ID NO: 238287
  Synthetic oligonucleotide

SEQ ID NO: 644953 - DNA, 52 bp, Artificial; identical to SEQ ID NO: 141267
  Synthetic oligonucleotide

SEQ ID NO: 644954 - DNA, 53 bp, Artificial; identical to SEQ ID NO: 185557
  Synthetic oligonucleotide

SEQ ID NO: 644955 - DNA, 60 bp, Artificial; identical to SEQ ID NO: 243629
  Synthetic oligonucleotide

SEQ ID NO: 644956 - DNA, 55 bp, Artificial; identical to SEQ ID NO: 238286
  Synthetic oligonucleotide

SEQ ID NO: 644957 - DNA, 54 bp, Artificial; identical to SEQ ID NO: 164709
  Synthetic oligonucleotide

SEQ ID NO: 644958 - DNA, 56 bp, Artificial; identical to SEQ ID NO: 144687
  Synthetic oligonucleotide

SEQ ID NO: 644959 - DNA, 50 bp, Artificial; identical to SEQ ID NO: 200369
  Synthetic oligonucleotide

SEQ ID NO: 644960 - DNA, 50 bp, Artificial; identical to SEQ ID NO: 206608
  Synthetic oligonucleotide

SEQ ID NO: 644961 - DNA, 57 bp, Artificial; identical to SEQ ID NO: 206719
  Synthetic oligonucleotide

SEQ ID NO: 644962 - DNA, 54 bp, Artificial; identical to SEQ ID NO: 185198
  Synthetic oligonucleotide

SEQ ID NO: 644963 - DNA, 52 bp, Artificial; identical to SEQ ID NO: 167095
  Synthetic oligonucleotide

SEQ ID NO: 644964 - DNA, 55 bp, Artificial; identical to SEQ ID NO: 248934
  Synthetic oligonucleotide

SEQ ID NO: 644965 - DNA, 60 bp, Artificial; identical to SEQ ID NO: 153030
  Synthetic oligonucleotide

SEQ ID NO: 644966 - DNA, 55 bp, Artificial; identical to SEQ ID NO: 202395
  Synthetic oligonucleotide

SEQ ID NO: 644967 - DNA, 56 bp, Artificial; identical to SEQ ID NO: 187396
  Synthetic oligonucleotide

SEQ ID NO: 644968 - DNA, 55 bp, Artificial; identical to SEQ ID NO: 155793
  Synthetic oligonucleotide

SEQ ID NO: 644969 - DNA, 56 bp, Artificial; identical to SEQ ID NO: 171082
  Synthetic oligonucleotide

SEQ ID NO: 644970 - DNA, 56 bp, Artificial; identical to SEQ ID NO: 200777
  Synthetic oligonucleotide

SEQ ID NO: 644971 - DNA, 57 bp, Artificial; identical to SEQ ID NO: 161748
  Synthetic oligonucleotide

SEQ ID NO: 644972 - DNA, 55 bp, Artificial; identical to SEQ ID NO: 189496
  Synthetic oligonucleotide

SEQ ID NO: 644973 - DNA, 52 bp, Artificial; identical to SEQ ID NO: 247931
  Synthetic oligonucleotide

SEQ ID NO: 644974 - DNA, 55 bp, Artificial; identical to SEQ ID NO: 155794
  Synthetic oligonucleotide

SEQ ID NO: 644975 - DNA, 60 bp, Artificial; identical to SEQ ID NO: 187225
  Synthetic oligonucleotide

SEQ ID NO: 644976 - DNA, 56 bp, Artificial; identical to SEQ ID NO: 217298
  Synthetic oligonucleotide

SEQ ID NO: 644977 - DNA, 55 bp, Artificial; identical to SEQ ID NO: 247685
  Synthetic oligonucleotide

SEQ ID NO: 644978 - DNA, 55 bp, Artificial; identical to SEQ ID NO: 221361
  Synthetic oligonucleotide

SEQ ID NO: 644979 - DNA, 51 bp, Artificial; identical to SEQ ID NO: 161401
  Synthetic oligonucleotide

SEQ ID NO: 644980 - DNA, 60 bp, Artificial; identical to SEQ ID NO: 179221
  Synthetic oligonucleotide

SEQ ID NO: 644981 - DNA, 58 bp, Artificial; identical to SEQ ID NO: 175135
  Synthetic oligonucleotide

SEQ ID NO: 644982 - DNA, 55 bp, Artificial; identical to SEQ ID NO: 206811
  Synthetic oligonucleotide

SEQ ID NO: 644983 - DNA, 60 bp, Artificial; identical to SEQ ID NO: 179260
  Synthetic oligonucleotide

SEQ ID NO: 644984 - DNA, 60 bp, Artificial; identical to SEQ ID NO: 245220
  Synthetic oligonucleotide

SEQ ID NO: 644985 - DNA, 55 bp, Artificial; identical to SEQ ID NO: 239664
  Synthetic oligonucleotide

SEQ ID NO: 644986 - DNA, 59 bp, Artificial; identical to SEQ ID NO: 206844
  Synthetic oligonucleotide

SEQ ID NO: 644987 - DNA, 55 bp, Artificial; identical to SEQ ID NO: 220650
  Synthetic oligonucleotide

SEQ ID NO: 644988 - DNA, 52 bp, Artificial; identical to SEQ ID NO: 188488
  Synthetic oligonucleotide

SEQ ID NO: 644989 - DNA, 60 bp, Artificial; identical to SEQ ID NO: 223972
  Synthetic oligonucleotide

SEQ ID NO: 644990 - DNA, 55 bp, Artificial; identical to SEQ ID NO: 182563
  Synthetic oligonucleotide

SEQ ID NO: 644991 - DNA, 53 bp, Artificial; identical to SEQ ID NO: 188066
  Synthetic oligonucleotide

SEQ ID NO: 644992 - DNA, 55 bp, Artificial; identical to SEQ ID NO: 171551
  Synthetic oligonucleotide

SEQ ID NO: 644993 - DNA, 51 bp, Artificial; identical to SEQ ID NO: 266302
  Synthetic oligonucleotide

SEQ ID NO: 644994 - DNA, 60 bp, Artificial; identical to SEQ ID NO: 166777
  Synthetic oligonucleotide

SEQ ID NO: 644995 - DNA, 55 bp, Artificial; identical to SEQ ID NO: 194474
  Synthetic oligonucleotide

SEQ ID NO: 644996 - DNA, 55 bp, Artificial; identical to SEQ ID NO: 252992
  Synthetic oligonucleotide

SEQ ID NO: 644997 - DNA, 59 bp, Artificial; identical to SEQ ID NO: 245198
  Synthetic oligonucleotide

SEQ ID NO: 644998 - DNA, 60 bp, Artificial; identical to SEQ ID NO: 240792
  Synthetic oligonucleotide

SEQ ID NO: 644999 - DNA, 55 bp, Artificial; identical to SEQ ID NO: 198336
  Synthetic oligonucleotide

SEQ ID NO: 645000 - DNA, 55 bp, Artificial; identical to SEQ ID NO: 160211
  Synthetic oligonucleotide

SEQ ID NO: 645001 - DNA, 53 bp, Artificial; identical to SEQ ID NO: 149367
  Synthetic oligonucleotide

SEQ ID NO: 645002 - DNA, 53 bp, Artificial; identical to SEQ ID NO: 209631
  Synthetic oligonucleotide

SEQ ID NO: 645003 - DNA, 60 bp, Artificial; identical to SEQ ID NO: 179262
  Synthetic oligonucleotide

SEQ ID NO: 645004 - DNA, 54 bp, Artificial; identical to SEQ ID NO: 246067
  Synthetic oligonucleotide

SEQ ID NO: 645005 - DNA, 51 bp, Artificial; identical to SEQ ID NO: 169064
  Synthetic oligonucleotide

SEQ ID NO: 645006 - DNA, 55 bp, Artificial; identical to SEQ ID NO: 147867
  Synthetic oligonucleotide

SEQ ID NO: 645007 - DNA, 51 bp, Artificial; identical to SEQ ID NO: 149944
  Synthetic oligonucleotide

SEQ ID NO: 645008 - DNA, 55 bp, Artificial; identical to SEQ ID NO: 257795
  Synthetic oligonucleotide

SEQ ID NO: 645009 - DNA, 55 bp, Artificial; identical to SEQ ID NO: 189031
  Synthetic oligonucleotide

SEQ ID NO: 645010 - DNA, 55 bp, Artificial; identical to SEQ ID NO: 253932
  Synthetic oligonucleotide

SEQ ID NO: 645011 - DNA, 55 bp, Artificial; identical to SEQ ID NO: 203729
  Synthetic oligonucleotide

SEQ ID NO: 645012 - DNA, 59 bp, Artificial; identical to SEQ ID NO: 194670
  Synthetic oligonucleotide

SEQ ID NO: 645013 - DNA, 55 bp, Artificial; identical to SEQ ID NO: 257793
  Synthetic oligonucleotide

SEQ ID NO: 645014 - DNA, 57 bp, Artificial; identical to SEQ ID NO: 148216
  Synthetic oligonucleotide

SEQ ID NO: 645015 - DNA, 50 bp, Artificial; identical to SEQ ID NO: 160701
  Synthetic oligonucleotide

SEQ ID NO: 645016 - DNA, 55 bp, Artificial; identical to SEQ ID NO: 257791
  Synthetic oligonucleotide

SEQ ID NO: 645017 - DNA, 57 bp, Artificial; identical to SEQ ID NO: 194681
  Synthetic oligonucleotide

SEQ ID NO: 645018 - DNA, 55 bp, Artificial; identical to SEQ ID NO: 147869
  Synthetic oligonucleotide

SEQ ID NO: 645019 - DNA, 54 bp, Artificial; identical to SEQ ID NO: 263318
  Synthetic oligonucleotide

SEQ ID NO: 645020 - DNA, 53 bp, Artificial; identical to SEQ ID NO: 159892
  Synthetic oligonucleotide

SEQ ID NO: 645021 - DNA, 55 bp, Artificial; identical to SEQ ID NO: 190310
  Synthetic oligonucleotide

SEQ ID NO: 645022 - DNA, 57 bp, Artificial; identical to SEQ ID NO: 151297
  Synthetic oligonucleotide

SEQ ID NO: 645023 - DNA, 56 bp, Artificial; identical to SEQ ID NO: 239341
  Synthetic oligonucleotide

SEQ ID NO: 645024 - DNA, 58 bp, Artificial; identical to SEQ ID NO: 233337
  Synthetic oligonucleotide

SEQ ID NO: 645025 - DNA, 55 bp, Artificial; identical to SEQ ID NO: 225098
  Synthetic oligonucleotide

SEQ ID NO: 645026 - DNA, 53 bp, Artificial; identical to SEQ ID NO: 202973
  Synthetic oligonucleotide

SEQ ID NO: 645027 - DNA, 52 bp, Artificial; identical to SEQ ID NO: 155708
  Synthetic oligonucleotide

SEQ ID NO: 645028 - DNA, 51 bp, Artificial; identical to SEQ ID NO: 186840
  Synthetic oligonucleotide

SEQ ID NO: 645029 - DNA, 57 bp, Artificial; identical to SEQ ID NO: 239047
  Synthetic oligonucleotide

SEQ ID NO: 645030 - DNA, 55 bp, Artificial; identical to SEQ ID NO: 218186
  Synthetic oligonucleotide

SEQ ID NO: 645031 - DNA, 53 bp, Artificial; identical to SEQ ID NO: 185662
  Synthetic oligonucleotide

SEQ ID NO: 645032 - DNA, 60 bp, Artificial; identical to SEQ ID NO: 197060
  Synthetic oligonucleotide

SEQ ID NO: 645033 - DNA, 55 bp, Artificial; identical to SEQ ID NO: 208559
  Synthetic oligonucleotide

SEQ ID NO: 645034 - DNA, 54 bp, Artificial; identical to SEQ ID NO: 185069
  Synthetic oligonucleotide

SEQ ID NO: 645035 - DNA, 53 bp, Artificial; identical to SEQ ID NO: 201680
  Synthetic oligonucleotide

SEQ ID NO: 645036 - DNA, 58 bp, Artificial; identical to SEQ ID NO: 257136
  Synthetic oligonucleotide

SEQ ID NO: 645037 - DNA, 52 bp, Artificial; identical to SEQ ID NO: 149529
  Synthetic oligonucleotide

SEQ ID NO: 645038 - DNA, 53 bp, Artificial; identical to SEQ ID NO: 221694
  Synthetic oligonucleotide

SEQ ID NO: 645039 - DNA, 60 bp, Artificial; identical to SEQ ID NO: 237696
  Synthetic oligonucleotide

SEQ ID NO: 645040 - DNA, 55 bp, Artificial; identical to SEQ ID NO: 182558
  Synthetic oligonucleotide

SEQ ID NO: 645041 - DNA, 55 bp, Artificial; identical to SEQ ID NO: 248925
  Synthetic oligonucleotide

SEQ ID NO: 645042 - DNA, 55 bp, Artificial; identical to SEQ ID NO: 211464
  Synthetic oligonucleotide

SEQ ID NO: 645043 - DNA, 55 bp, Artificial; identical to SEQ ID NO: 172961
  Synthetic oligonucleotide

SEQ ID NO: 645044 - DNA, 55 bp, Artificial; identical to SEQ ID NO: 153502
  Synthetic oligonucleotide

SEQ ID NO: 645045 - DNA, 55 bp, Artificial; identical to SEQ ID NO: 147870
  Synthetic oligonucleotide

SEQ ID NO: 645046 - DNA, 51 bp, Artificial; identical to SEQ ID NO: 186834
  Synthetic oligonucleotide

SEQ ID NO: 645047 - DNA, 53 bp, Artificial; identical to SEQ ID NO: 161321
  Synthetic oligonucleotide

SEQ ID NO: 645048 - DNA, 55 bp, Artificial; identical to SEQ ID NO: 155797
  Synthetic oligonucleotide

SEQ ID NO: 645049 - DNA, 55 bp, Artificial; identical to SEQ ID NO: 155798
  Synthetic oligonucleotide

SEQ ID NO: 645050 - DNA, 55 bp, Artificial; identical to SEQ ID NO: 197146
  Synthetic oligonucleotide

SEQ ID NO: 645051 - DNA, 60 bp, Artificial; identical to SEQ ID NO: 206867
  Synthetic oligonucleotide

SEQ ID NO: 645052 - DNA, 55 bp, Artificial; identical to SEQ ID NO: 253930
  Synthetic oligonucleotide

SEQ ID NO: 645053 - DNA, 55 bp, Artificial; identical to SEQ ID NO: 153514
  Synthetic oligonucleotide

SEQ ID NO: 645054 - DNA, 55 bp, Artificial; identical to SEQ ID NO: 244314
  Synthetic oligonucleotide

SEQ ID NO: 645055 - DNA, 53 bp, Artificial; identical to SEQ ID NO: 199709
  Synthetic oligonucleotide

SEQ ID NO: 645056 - DNA, 55 bp, Artificial; identical to SEQ ID NO: 248858
  Synthetic oligonucleotide

SEQ ID NO: 645057 - DNA, 52 bp, Artificial; identical to SEQ ID NO: 258161
  Synthetic oligonucleotide

SEQ ID NO: 645058 - DNA, 50 bp, Artificial; identical to SEQ ID NO: 200380
  Synthetic oligonucleotide

SEQ ID NO: 645059 - DNA, 55 bp, Artificial; identical to SEQ ID NO: 244312
  Synthetic oligonucleotide

SEQ ID NO: 645060 - DNA, 58 bp, Artificial; identical to SEQ ID NO: 243693
  Synthetic oligonucleotide

SEQ ID NO: 645061 - DNA, 51 bp, Artificial; identical to SEQ ID NO: 162371
  Synthetic oligonucleotide

SEQ ID NO: 645062 - DNA, 57 bp, Artificial; identical to SEQ ID NO: 239055
  Synthetic oligonucleotide

SEQ ID NO: 645063 - DNA, 59 bp, Artificial; identical to SEQ ID NO: 148238
  Synthetic oligonucleotide

SEQ ID NO: 645064 - DNA, 51 bp, Artificial; identical to SEQ ID NO: 153019
  Synthetic oligonucleotide

SEQ ID NO: 645065 - DNA, 54 bp, Artificial; identical to SEQ ID NO: 216577
  Synthetic oligonucleotide

SEQ ID NO: 645066 - DNA, 50 bp, Artificial; identical to SEQ ID NO: 205881
  Synthetic oligonucleotide

SEQ ID NO: 645067 - DNA, 55 bp, Artificial; identical to SEQ ID NO: 148249
  Synthetic oligonucleotide

SEQ ID NO: 645068 - DNA, 55 bp, Artificial; identical to SEQ ID NO: 203082
  Synthetic oligonucleotide

SEQ ID NO: 645069 - DNA, 57 bp, Artificial; identical to SEQ ID NO: 248484
  Synthetic oligonucleotide

SEQ ID NO: 645070 - DNA, 50 bp, Artificial; identical to SEQ ID NO: 220928
  Synthetic oligonucleotide

SEQ ID NO: 645071 - DNA, 55 bp, Artificial; identical to SEQ ID NO: 190307
  Synthetic oligonucleotide

SEQ ID NO: 645072 - DNA, 51 bp, Artificial; identical to SEQ ID NO: 165211
  Synthetic oligonucleotide

SEQ ID NO: 645073 - DNA, 60 bp, Artificial; identical to SEQ ID NO: 217128
  Synthetic oligonucleotide

SEQ ID NO: 645074 - DNA, 55 bp, Artificial; identical to SEQ ID NO: 203731
  Synthetic oligonucleotide

SEQ ID NO: 645075 - DNA, 60 bp, Artificial; identical to SEQ ID NO: 243695
  Synthetic oligonucleotide

SEQ ID NO: 645076 - DNA, 55 bp, Artificial; identical to SEQ ID NO: 147873
  Synthetic oligonucleotide

SEQ ID NO: 645077 - DNA, 55 bp, Artificial; identical to SEQ ID NO: 198333
  Synthetic oligonucleotide

SEQ ID NO: 645078 - DNA, 55 bp, Artificial; identical to SEQ ID NO: 182553
  Synthetic oligonucleotide

SEQ ID NO: 645079 - DNA, 51 bp, Artificial; identical to SEQ ID NO: 239622
  Synthetic oligonucleotide

SEQ ID NO: 645080 - DNA, 55 bp, Artificial; identical to SEQ ID NO: 247648
  Synthetic oligonucleotide

SEQ ID NO: 645081 - DNA, 60 bp, Artificial; identical to SEQ ID NO: 171617
  Synthetic oligonucleotide

SEQ ID NO: 645082 - DNA, 52 bp, Artificial; identical to SEQ ID NO: 197607
  Synthetic oligonucleotide

SEQ ID NO: 645083 - DNA, 53 bp, Artificial; identical to SEQ ID NO: 254356
  Synthetic oligonucleotide

SEQ ID NO: 645084 - DNA, 51 bp, Artificial; identical to SEQ ID NO: 243314
  Synthetic oligonucleotide

SEQ ID NO: 645085 - DNA, 60 bp, Artificial; identical to SEQ ID NO: 163879
  Synthetic oligonucleotide

SEQ ID NO: 645086 - DNA, 60 bp, Artificial; identical to SEQ ID NO: 200774
  Synthetic oligonucleotide

SEQ ID NO: 645087 - DNA, 53 bp, Artificial; identical to SEQ ID NO: 142605
  Synthetic oligonucleotide

SEQ ID NO: 645088 - DNA, 55 bp, Artificial; identical to SEQ ID NO: 207350
  Synthetic oligonucleotide

SEQ ID NO: 645089 - DNA, 56 bp, Artificial; identical to SEQ ID NO: 239063
  Synthetic oligonucleotide

SEQ ID NO: 645090 - DNA, 50 bp, Artificial; identical to SEQ ID NO: 176380
  Synthetic oligonucleotide

SEQ ID NO: 645091 - DNA, 55 bp, Artificial; identical to SEQ ID NO: 222594
  Synthetic oligonucleotide

SEQ ID NO: 645092 - DNA, 55 bp, Artificial; identical to SEQ ID NO: 233856
  Synthetic oligonucleotide

SEQ ID NO: 645093 - DNA, 52 bp, Artificial; identical to SEQ ID NO: 246500
  Synthetic oligonucleotide

SEQ ID NO: 645094 - DNA, 55 bp, Artificial; identical to SEQ ID NO: 239628
  Synthetic oligonucleotide

SEQ ID NO: 645095 - DNA, 60 bp, Artificial; identical to SEQ ID NO: 243698
  Synthetic oligonucleotide

SEQ ID NO: 645096 - DNA, 59 bp, Artificial; identical to SEQ ID NO: 141751
  Synthetic oligonucleotide

SEQ ID NO: 645097 - DNA, 57 bp, Artificial; identical to SEQ ID NO: 248620
  Synthetic oligonucleotide

SEQ ID NO: 645098 - DNA, 55 bp, Artificial; identical to SEQ ID NO: 152279
  Synthetic oligonucleotide

SEQ ID NO: 645099 - DNA, 57 bp, Artificial; identical to SEQ ID NO: 212398
  Synthetic oligonucleotide

SEQ ID NO: 645100 - DNA, 55 bp, Artificial; identical to SEQ ID NO: 217664
  Synthetic oligonucleotide

SEQ ID NO: 645101 - DNA, 55 bp, Artificial; identical to SEQ ID NO: 198394
  Synthetic oligonucleotide

SEQ ID NO: 645102 - DNA, 53 bp, Artificial; identical to SEQ ID NO: 254345
  Synthetic oligonucleotide

SEQ ID NO: 645103 - DNA, 54 bp, Artificial; identical to SEQ ID NO: 159878
  Synthetic oligonucleotide

SEQ ID NO: 645104 - DNA, 52 bp, Artificial; identical to SEQ ID NO: 185084
  Synthetic oligonucleotide

SEQ ID NO: 645105 - DNA, 55 bp, Artificial; identical to SEQ ID NO: 147874
  Synthetic oligonucleotide

SEQ ID NO: 645106 - DNA, 57 bp, Artificial; identical to SEQ ID NO: 209216
  Synthetic oligonucleotide

SEQ ID NO: 645107 - DNA, 55 bp, Artificial; identical to SEQ ID NO: 203734
  Synthetic oligonucleotide

SEQ ID NO: 645108 - DNA, 60 bp, Artificial; identical to SEQ ID NO: 194692
  Synthetic oligonucleotide

SEQ ID NO: 645109 - DNA, 59 bp, Artificial; identical to SEQ ID NO: 239192
  Synthetic oligonucleotide

SEQ ID NO: 645110 - DNA, 53 bp, Artificial; identical to SEQ ID NO: 266748
  Synthetic oligonucleotide

SEQ ID NO: 645111 - DNA, 55 bp, Artificial; identical to SEQ ID NO: 239636
  Synthetic oligonucleotide

SEQ ID NO: 645112 - DNA, 51 bp, Artificial; identical to SEQ ID NO: 258955
  Synthetic oligonucleotide

SEQ ID NO: 645113 - DNA, 60 bp, Artificial; identical to SEQ ID NO: 205408
  Synthetic oligonucleotide

SEQ ID NO: 645114 - DNA, 55 bp, Artificial; identical to SEQ ID NO: 197141
  Synthetic oligonucleotide

SEQ ID NO: 645115 - DNA, 60 bp, Artificial; identical to SEQ ID NO: 194714
  Synthetic oligonucleotide

SEQ ID NO: 645116 - DNA, 53 bp, Artificial; identical to SEQ ID NO: 242468
  Synthetic oligonucleotide

SEQ ID NO: 645117 - DNA, 55 bp, Artificial; identical to SEQ ID NO: 242548
  Synthetic oligonucleotide

SEQ ID NO: 645118 - DNA, 55 bp, Artificial; identical to SEQ ID NO: 171606
  Synthetic oligonucleotide

SEQ ID NO: 645119 - DNA, 56 bp, Artificial; identical to SEQ ID NO: 248659
  Synthetic oligonucleotide

SEQ ID NO: 645120 - DNA, 55 bp, Artificial; identical to SEQ ID NO: 147875
  Synthetic oligonucleotide

SEQ ID NO: 645121 - DNA, 50 bp, Artificial; identical to SEQ ID NO: 187150
  Synthetic oligonucleotide

SEQ ID NO: 645122 - DNA, 55 bp, Artificial; identical to SEQ ID NO: 253928
  Synthetic oligonucleotide

SEQ ID NO: 645123 - DNA, 55 bp, Artificial; identical to SEQ ID NO: 198391
  Synthetic oligonucleotide

SEQ ID NO: 645124 - DNA, 55 bp, Artificial; identical to SEQ ID NO: 209325
  Synthetic oligonucleotide

SEQ ID NO: 645125 - DNA, 55 bp, Artificial; identical to SEQ ID NO: 144844
  Synthetic oligonucleotide

SEQ ID NO: 645126 - DNA, 58 bp, Artificial; identical to SEQ ID NO: 200773
  Synthetic oligonucleotide

SEQ ID NO: 645127 - DNA, 55 bp, Artificial; identical to SEQ ID NO: 147876
  Synthetic oligonucleotide

SEQ ID NO: 645128 - DNA, 55 bp, Artificial; identical to SEQ ID NO: 197140
  Synthetic oligonucleotide

SEQ ID NO: 645129 - DNA, 57 bp, Artificial; identical to SEQ ID NO: 239457
  Synthetic oligonucleotide

SEQ ID NO: 645130 - DNA, 54 bp, Artificial; identical to SEQ ID NO: 152000
  Synthetic oligonucleotide

SEQ ID NO: 645131 - DNA, 57 bp, Artificial; identical to SEQ ID NO: 147106
  Synthetic oligonucleotide

SEQ ID NO: 645132 - DNA, 51 bp, Artificial; identical to SEQ ID NO: 258204
  Synthetic oligonucleotide

SEQ ID NO: 645133 - DNA, 57 bp, Artificial; identical to SEQ ID NO: 159831
  Synthetic oligonucleotide

SEQ ID NO: 645134 - DNA, 54 bp, Artificial; identical to SEQ ID NO: 168862
  Synthetic oligonucleotide

SEQ ID NO: 645135 - DNA, 54 bp, Artificial; identical to SEQ ID NO: 162148
  Synthetic oligonucleotide

SEQ ID NO: 645136 - DNA, 50 bp, Artificial; identical to SEQ ID NO: 150314
  Synthetic oligonucleotide

SEQ ID NO: 645137 - DNA, 55 bp, Artificial; identical to SEQ ID NO: 239460
  Synthetic oligonucleotide

SEQ ID NO: 645138 - DNA, 55 bp, Artificial; identical to SEQ ID NO: 249992
  Synthetic oligonucleotide

SEQ ID NO: 645139 - DNA, 57 bp, Artificial; identical to SEQ ID NO: 200772
  Synthetic oligonucleotide

SEQ ID NO: 645140 - DNA, 52 bp, Artificial; identical to SEQ ID NO: 186240
  Synthetic oligonucleotide

SEQ ID NO: 645141 - DNA, 58 bp, Artificial; identical to SEQ ID NO: 254334
  Synthetic oligonucleotide

SEQ ID NO: 645142 - DNA, 60 bp, Artificial; identical to SEQ ID NO: 154425
  Synthetic oligonucleotide

SEQ ID NO: 645143 - DNA, 55 bp, Artificial; identical to SEQ ID NO: 261841
  Synthetic oligonucleotide

SEQ ID NO: 645144 - DNA, 53 bp, Artificial; identical to SEQ ID NO: 149346
  Synthetic oligonucleotide

SEQ ID NO: 645145 - DNA, 50 bp, Artificial; identical to SEQ ID NO: 241535
  Synthetic oligonucleotide

SEQ ID NO: 645146 - DNA, 55 bp, Artificial; identical to SEQ ID NO: 253927
  Synthetic oligonucleotide

SEQ ID NO: 645147 - DNA, 50 bp, Artificial; identical to SEQ ID NO: 246845
  Synthetic oligonucleotide

SEQ ID NO: 645148 - DNA, 52 bp, Artificial; identical to SEQ ID NO: 164994
  Synthetic oligonucleotide

SEQ ID NO: 645149 - DNA, 57 bp, Artificial; identical to SEQ ID NO: 200770
  Synthetic oligonucleotide

SEQ ID NO: 645150 - DNA, 57 bp, Artificial; identical to SEQ ID NO: 219509
  Synthetic oligonucleotide

SEQ ID NO: 645151 - DNA, 51 bp, Artificial; identical to SEQ ID NO: 186745
  Synthetic oligonucleotide

SEQ ID NO: 645152 - DNA, 55 bp, Artificial; identical to SEQ ID NO: 198390
  Synthetic oligonucleotide

SEQ ID NO: 645153 - DNA, 50 bp, Artificial; identical to SEQ ID NO: 261838
  Synthetic oligonucleotide

SEQ ID NO: 645154 - DNA, 52 bp, Artificial; identical to SEQ ID NO: 147877
  Synthetic oligonucleotide

SEQ ID NO: 645155 - DNA, 55 bp, Artificial; identical to SEQ ID NO: 174658
  Synthetic oligonucleotide

SEQ ID NO: 645156 - DNA, 59 bp, Artificial; identical to SEQ ID NO: 245588
  Synthetic oligonucleotide

SEQ ID NO: 645157 - DNA, 54 bp, Artificial; identical to SEQ ID NO: 164726
  Synthetic oligonucleotide

SEQ ID NO: 645158 - DNA, 59 bp, Artificial; identical to SEQ ID NO: 162136
  Synthetic oligonucleotide

SEQ ID NO: 645159 - DNA, 53 bp, Artificial; identical to SEQ ID NO: 203892
  Synthetic oligonucleotide

SEQ ID NO: 645160 - DNA, 55 bp, Artificial; identical to SEQ ID NO: 168621
  Synthetic oligonucleotide

SEQ ID NO: 645161 - DNA, 60 bp, Artificial; identical to SEQ ID NO: 152532
  Synthetic oligonucleotide

SEQ ID NO: 645162 - DNA, 58 bp, Artificial; identical to SEQ ID NO: 200769
  Synthetic oligonucleotide

SEQ ID NO: 645163 - DNA, 51 bp, Artificial; identical to SEQ ID NO: 165216
  Synthetic oligonucleotide

SEQ ID NO: 645164 - DNA, 53 bp, Artificial; identical to SEQ ID NO: 221695
  Synthetic oligonucleotide

SEQ ID NO: 645165 - DNA, 55 bp, Artificial; identical to SEQ ID NO: 190305
  Synthetic oligonucleotide

SEQ ID NO: 645166 - DNA, 57 bp, Artificial; identical to SEQ ID NO: 142683
  Synthetic oligonucleotide

SEQ ID NO: 645167 - DNA, 60 bp, Artificial; identical to SEQ ID NO: 148293
  Synthetic oligonucleotide

SEQ ID NO: 645168 - DNA, 55 bp, Artificial; identical to SEQ ID NO: 224775
  Synthetic oligonucleotide

SEQ ID NO: 645169 - DNA, 60 bp, Artificial; identical to SEQ ID NO: 239068
  Synthetic oligonucleotide

SEQ ID NO: 645170 - DNA, 60 bp, Artificial; identical to SEQ ID NO: 166289
  Synthetic oligonucleotide

SEQ ID NO: 645171 - DNA, 55 bp, Artificial; identical to SEQ ID NO: 182551
  Synthetic oligonucleotide

SEQ ID NO: 645172 - DNA, 55 bp, Artificial; identical to SEQ ID NO: 260197
  Synthetic oligonucleotide

SEQ ID NO: 645173 - DNA, 60 bp, Artificial; identical to SEQ ID NO: 207455
  Synthetic oligonucleotide

SEQ ID NO: 645174 - DNA, 58 bp, Artificial; identical to SEQ ID NO: 190209
  Synthetic oligonucleotide

SEQ ID NO: 645175 - DNA, 58 bp, Artificial; identical to SEQ ID NO: 200768
  Synthetic oligonucleotide

SEQ ID NO: 645176 - DNA, 53 bp, Artificial; identical to SEQ ID NO: 193599
  Synthetic oligonucleotide

SEQ ID NO: 645177 - DNA, 56 bp, Artificial; identical to SEQ ID NO: 207073
  Synthetic oligonucleotide

SEQ ID NO: 645178 - DNA, 53 bp, Artificial; identical to SEQ ID NO: 239580
  Synthetic oligonucleotide

SEQ ID NO: 645179 - DNA, 52 bp, Artificial; identical to SEQ ID NO: 149514
  Synthetic oligonucleotide

SEQ ID NO: 645180 - DNA, 55 bp, Artificial; identical to SEQ ID NO: 244251
  Synthetic oligonucleotide

SEQ ID NO: 645181 - DNA, 52 bp, Artificial; identical to SEQ ID NO: 246505
  Synthetic oligonucleotide

SEQ ID NO: 645182 - DNA, 51 bp, Artificial; identical to SEQ ID NO: 154653
  Synthetic oligonucleotide

SEQ ID NO: 645183 - DNA, 56 bp, Artificial; identical to SEQ ID NO: 239583
  Synthetic oligonucleotide

SEQ ID NO: 645184 - DNA, 55 bp, Artificial; identical to SEQ ID NO: 147879
  Synthetic oligonucleotide

SEQ ID NO: 645185 - DNA, 60 bp, Artificial; identical to SEQ ID NO: 166300
  Synthetic oligonucleotide

SEQ ID NO: 645186 - DNA, 55 bp, Artificial; identical to SEQ ID NO: 155802
  Synthetic oligonucleotide

SEQ ID NO: 645187 - DNA, 55 bp, Artificial; identical to SEQ ID NO: 169286
  Synthetic oligonucleotide

SEQ ID NO: 645188 - DNA, 56 bp, Artificial; identical to SEQ ID NO: 243701
  Synthetic oligonucleotide

SEQ ID NO: 645189 - DNA, 57 bp, Artificial; identical to SEQ ID NO: 179081
  Synthetic oligonucleotide

SEQ ID NO: 645190 - DNA, 53 bp, Artificial; identical to SEQ ID NO: 146414
  Synthetic oligonucleotide

SEQ ID NO: 645191 - DNA, 58 bp, Artificial; identical to SEQ ID NO: 179079
  Synthetic oligonucleotide

SEQ ID NO: 645192 - DNA, 54 bp, Artificial; identical to SEQ ID NO: 170000
  Synthetic oligonucleotide

SEQ ID NO: 645193 - DNA, 51 bp, Artificial; identical to SEQ ID NO: 209765
  Synthetic oligonucleotide

SEQ ID NO: 645194 - DNA, 50 bp, Artificial; identical to SEQ ID NO: 221884
  Synthetic oligonucleotide

SEQ ID NO: 645195 - DNA, 55 bp, Artificial; identical to SEQ ID NO: 147880
  Synthetic oligonucleotide

SEQ ID NO: 645196 - DNA, 59 bp, Artificial; identical to SEQ ID NO: 179421
  Synthetic oligonucleotide

SEQ ID NO: 645197 - DNA, 52 bp, Artificial; identical to SEQ ID NO: 206459
  Synthetic oligonucleotide

SEQ ID NO: 645198 - DNA, 52 bp, Artificial; identical to SEQ ID NO: 240858
  Synthetic oligonucleotide

SEQ ID NO: 645199 - DNA, 55 bp, Artificial; identical to SEQ ID NO: 198388
  Synthetic oligonucleotide

SEQ ID NO: 645200 - DNA, 60 bp, Artificial; identical to SEQ ID NO: 239028
  Synthetic oligonucleotide

SEQ ID NO: 645201 - DNA, 60 bp, Artificial; identical to SEQ ID NO: 239029
  Synthetic oligonucleotide

SEQ ID NO: 645202 - DNA, 55 bp, Artificial; identical to SEQ ID NO: 181599
  Synthetic oligonucleotide

SEQ ID NO: 645203 - DNA, 50 bp, Artificial; identical to SEQ ID NO: 150315
  Synthetic oligonucleotide

SEQ ID NO: 645204 - DNA, 55 bp, Artificial; identical to SEQ ID NO: 248848
  Synthetic oligonucleotide

SEQ ID NO: 645205 - DNA, 51 bp, Artificial; identical to SEQ ID NO: 186788
  Synthetic oligonucleotide

SEQ ID NO: 645206 - DNA, 54 bp, Artificial; identical to SEQ ID NO: 194935
  Synthetic oligonucleotide

SEQ ID NO: 645207 - DNA, 54 bp, Artificial; identical to SEQ ID NO: 192009
  Synthetic oligonucleotide

SEQ ID NO: 645208 - DNA, 56 bp, Artificial; identical to SEQ ID NO: 207488
  Synthetic oligonucleotide

SEQ ID NO: 645209 - DNA, 55 bp, Artificial; identical to SEQ ID NO: 233451
  Synthetic oligonucleotide

SEQ ID NO: 645210 - DNA, 53 bp, Artificial; identical to SEQ ID NO: 261970
  Synthetic oligonucleotide

SEQ ID NO: 645211 - DNA, 60 bp, Artificial; identical to SEQ ID NO: 148305
  Synthetic oligonucleotide

SEQ ID NO: 645212 - DNA, 58 bp, Artificial; identical to SEQ ID NO: 248474
  Synthetic oligonucleotide

SEQ ID NO: 645213 - DNA, 60 bp, Artificial; identical to SEQ ID NO: 243702
  Synthetic oligonucleotide

SEQ ID NO: 645214 - DNA, 55 bp, Artificial; identical to SEQ ID NO: 187467
  Synthetic oligonucleotide

SEQ ID NO: 645215 - DNA, 59 bp, Artificial; identical to SEQ ID NO: 254300
  Synthetic oligonucleotide

SEQ ID NO: 645216 - DNA, 55 bp, Artificial; identical to SEQ ID NO: 253926
  Synthetic oligonucleotide

SEQ ID NO: 645217 - DNA, 50 bp, Artificial; identical to SEQ ID NO: 246794
  Synthetic oligonucleotide

SEQ ID NO: 645218 - DNA, 55 bp, Artificial; identical to SEQ ID NO: 190304
  Synthetic oligonucleotide

SEQ ID NO: 645219 - DNA, 60 bp, Artificial; identical to SEQ ID NO: 187223
  Synthetic oligonucleotide

SEQ ID NO: 645220 - DNA, 54 bp, Artificial; identical to SEQ ID NO: 246080
  Synthetic oligonucleotide

SEQ ID NO: 645221 - DNA, 55 bp, Artificial; identical to SEQ ID NO: 181598
  Synthetic oligonucleotide

SEQ ID NO: 645222 - DNA, 56 bp, Artificial; identical to SEQ ID NO: 148327
  Synthetic oligonucleotide

SEQ ID NO: 645223 - DNA, 54 bp, Artificial; identical to SEQ ID NO: 155803
  Synthetic oligonucleotide

SEQ ID NO: 645224 - DNA, 55 bp, Artificial; identical to SEQ ID NO: 153344
  Synthetic oligonucleotide

SEQ ID NO: 645225 - DNA, 60 bp, Artificial; identical to SEQ ID NO: 179072
  Synthetic oligonucleotide

SEQ ID NO: 645226 - DNA, 60 bp, Artificial; identical to SEQ ID NO: 262739
  Synthetic oligonucleotide

SEQ ID NO: 645227 - DNA, 55 bp, Artificial; identical to SEQ ID NO: 259511
  Synthetic oligonucleotide

SEQ ID NO: 645228 - DNA, 51 bp, Artificial; identical to SEQ ID NO: 155587
  Synthetic oligonucleotide

SEQ ID NO: 645229 - DNA, 51 bp, Artificial; identical to SEQ ID NO: 223757
  Synthetic oligonucleotide

SEQ ID NO: 645230 - DNA, 52 bp, Artificial; identical to SEQ ID NO: 202500
  Synthetic oligonucleotide

SEQ ID NO: 645231 - DNA, 51 bp, Artificial; identical to SEQ ID NO: 243146
  Synthetic oligonucleotide

SEQ ID NO: 645232 - DNA, 55 bp, Artificial; identical to SEQ ID NO: 189030
  Synthetic oligonucleotide

SEQ ID NO: 645233 - DNA, 55 bp, Artificial; identical to SEQ ID NO: 207347
  Synthetic oligonucleotide

SEQ ID NO: 645234 - DNA, 57 bp, Artificial; identical to SEQ ID NO: 212396
  Synthetic oligonucleotide

SEQ ID NO: 645235 - DNA, 50 bp, Artificial; identical to SEQ ID NO: 246281
  Synthetic oligonucleotide

SEQ ID NO: 645236 - DNA, 60 bp, Artificial; identical to SEQ ID NO: 217094
  Synthetic oligonucleotide

SEQ ID NO: 645237 - DNA, 50 bp, Artificial; identical to SEQ ID NO: 151264
  Synthetic oligonucleotide

SEQ ID NO: 645238 - DNA, 55 bp, Artificial; identical to SEQ ID NO: 204025
  Synthetic oligonucleotide

SEQ ID NO: 645239 - DNA, 60 bp, Artificial; identical to SEQ ID NO: 239038
  Synthetic oligonucleotide

SEQ ID NO: 645240 - DNA, 55 bp, Artificial; identical to SEQ ID NO: 257813
  Synthetic oligonucleotide

SEQ ID NO: 645241 - DNA, 60 bp, Artificial; identical to SEQ ID NO: 179069
  Synthetic oligonucleotide

SEQ ID NO: 645242 - DNA, 57 bp, Artificial; identical to SEQ ID NO: 239039
  Synthetic oligonucleotide

SEQ ID NO: 645243 - DNA, 55 bp, Artificial; identical to SEQ ID NO: 168618
  Synthetic oligonucleotide

SEQ ID NO: 645244 - DNA, 55 bp, Artificial; identical to SEQ ID NO: 197233
  Synthetic oligonucleotide

SEQ ID NO: 645245 - DNA, 55 bp, Artificial; identical to SEQ ID NO: 239040
  Synthetic oligonucleotide

SEQ ID NO: 645246 - DNA, 60 bp, Artificial; identical to SEQ ID NO: 200766
  Synthetic oligonucleotide

SEQ ID NO: 645247 - DNA, 55 bp, Artificial; identical to SEQ ID NO: 225097
  Synthetic oligonucleotide

SEQ ID NO: 645248 - DNA, 55 bp, Artificial; identical to SEQ ID NO: 249991
  Synthetic oligonucleotide

SEQ ID NO: 645249 - DNA, 55 bp, Artificial; identical to SEQ ID NO: 151678
  Synthetic oligonucleotide

SEQ ID NO: 645250 - DNA, 55 bp, Artificial; identical to SEQ ID NO: 166642
  Synthetic oligonucleotide

SEQ ID NO: 645251 - DNA, 56 bp, Artificial; identical to SEQ ID NO: 145120
  Synthetic oligonucleotide

SEQ ID NO: 645252 - DNA, 55 bp, Artificial; identical to SEQ ID NO: 171546
  Synthetic oligonucleotide

SEQ ID NO: 645253 - DNA, 59 bp, Artificial; identical to SEQ ID NO: 252787
  Synthetic oligonucleotide

SEQ ID NO: 645254 - DNA, 55 bp, Artificial; identical to SEQ ID NO: 224771
  Synthetic oligonucleotide

SEQ ID NO: 645255 - DNA, 53 bp, Artificial; identical to SEQ ID NO: 246283
  Synthetic oligonucleotide

SEQ ID NO: 645256 - DNA, 52 bp, Artificial; identical to SEQ ID NO: 149541
  Synthetic oligonucleotide

SEQ ID NO: 645257 - DNA, 57 bp, Artificial; identical to SEQ ID NO: 245543
  Synthetic oligonucleotide

SEQ ID NO: 645258 - DNA, 56 bp, Artificial; identical to SEQ ID NO: 239390
  Synthetic oligonucleotide

SEQ ID NO: 645259 - DNA, 60 bp, Artificial; identical to SEQ ID NO: 179067
  Synthetic oligonucleotide

SEQ ID NO: 645260 - DNA, 59 bp, Artificial; identical to SEQ ID NO: 243704
  Synthetic oligonucleotide

SEQ ID NO: 645261 - DNA, 60 bp, Artificial; identical to SEQ ID NO: 179066
  Synthetic oligonucleotide

SEQ ID NO: 645262 - DNA, 60 bp, Artificial; identical to SEQ ID NO: 248470
  Synthetic oligonucleotide

SEQ ID NO: 645263 - DNA, 55 bp, Artificial; identical to SEQ ID NO: 190954
  Synthetic oligonucleotide

SEQ ID NO: 645264 - DNA, 55 bp, Artificial; identical to SEQ ID NO: 166641
  Synthetic oligonucleotide

SEQ ID NO: 645265 - DNA, 50 bp, Artificial; identical to SEQ ID NO: 165985
  Synthetic oligonucleotide

SEQ ID NO: 645266 - DNA, 60 bp, Artificial; identical to SEQ ID NO: 171584
  Synthetic oligonucleotide

SEQ ID NO: 645267 - DNA, 56 bp, Artificial; identical to SEQ ID NO: 187222
  Synthetic oligonucleotide

SEQ ID NO: 645268 - DNA, 55 bp, Artificial; identical to SEQ ID NO: 195191
  Synthetic oligonucleotide

SEQ ID NO: 645269 - DNA, 55 bp, Artificial; identical to SEQ ID NO: 239484
  Synthetic oligonucleotide

SEQ ID NO: 645270 - DNA, 57 bp, Artificial; identical to SEQ ID NO: 247523
  Synthetic oligonucleotide

SEQ ID NO: 645271 - DNA, 51 bp, Artificial; identical to SEQ ID NO: 216825
  Synthetic oligonucleotide

SEQ ID NO: 645272 - DNA, 53 bp, Artificial; identical to SEQ ID NO: 162125
  Synthetic oligonucleotide

SEQ ID NO: 645273 - DNA, 55 bp, Artificial; identical to SEQ ID NO: 244435
  Synthetic oligonucleotide

SEQ ID NO: 645274 - DNA, 51 bp, Artificial; identical to SEQ ID NO: 149719
  Synthetic oligonucleotide

SEQ ID NO: 645275 - DNA, 55 bp, Artificial; identical to SEQ ID NO: 191884
  Synthetic oligonucleotide

SEQ ID NO: 645276 - DNA, 53 bp, Artificial; identical to SEQ ID NO: 141247
  Synthetic oligonucleotide

SEQ ID NO: 645277 - DNA, 50 bp, Artificial; identical to SEQ ID NO: 165861
  Synthetic oligonucleotide

SEQ ID NO: 645278 - DNA, 54 bp, Artificial; identical to SEQ ID NO: 216563
  Synthetic oligonucleotide

SEQ ID NO: 645279 - DNA, 58 bp, Artificial; identical to SEQ ID NO: 179584
  Synthetic oligonucleotide

SEQ ID NO: 645280 - DNA, 56 bp, Artificial; identical to SEQ ID NO: 147351
  Synthetic oligonucleotide

SEQ ID NO: 645281 - DNA, 60 bp, Artificial; identical to SEQ ID NO: 248533
  Synthetic oligonucleotide

SEQ ID NO: 645282 - DNA, 55 bp, Artificial; identical to SEQ ID NO: 194533
  Synthetic oligonucleotide

SEQ ID NO: 645283 - DNA, 55 bp, Artificial; identical to SEQ ID NO: 151676
  Synthetic oligonucleotide

SEQ ID NO: 645284 - DNA, 60 bp, Artificial; identical to SEQ ID NO: 217096
  Synthetic oligonucleotide

SEQ ID NO: 645285 - DNA, 54 bp, Artificial; identical to SEQ ID NO: 164737
  Synthetic oligonucleotide

SEQ ID NO: 645286 - DNA, 58 bp, Artificial; identical to SEQ ID NO: 239044
  Synthetic oligonucleotide

SEQ ID NO: 645287 - DNA, 52 bp, Artificial; identical to SEQ ID NO: 149498
  Synthetic oligonucleotide

SEQ ID NO: 645288 - DNA, 51 bp, Artificial; identical to SEQ ID NO: 215235
  Synthetic oligonucleotide

SEQ ID NO: 645289 - DNA, 55 bp, Artificial; identical to SEQ ID NO: 224770
  Synthetic oligonucleotide

SEQ ID NO: 645290 - DNA, 57 bp, Artificial; identical to SEQ ID NO: 171573
  Synthetic oligonucleotide

SEQ ID NO: 645291 - DNA, 55 bp, Artificial; identical to SEQ ID NO: 147884
  Synthetic oligonucleotide

SEQ ID NO: 645292 - DNA, 55 bp, Artificial; identical to SEQ ID NO: 147883
  Synthetic oligonucleotide

SEQ ID NO: 645293 - DNA, 50 bp, Artificial; identical to SEQ ID NO: 165864
  Synthetic oligonucleotide

SEQ ID NO: 645294 - DNA, 55 bp, Artificial; identical to SEQ ID NO: 153345
  Synthetic oligonucleotide

SEQ ID NO: 645295 - DNA, 50 bp, Artificial; identical to SEQ ID NO: 165865
  Synthetic oligonucleotide

SEQ ID NO: 645296 - DNA, 50 bp, Artificial; identical to SEQ ID NO: 246809
  Synthetic oligonucleotide

SEQ ID NO: 645297 - DNA, 56 bp, Artificial; identical to SEQ ID NO: 166356
  Synthetic oligonucleotide

SEQ ID NO: 645298 - DNA, 55 bp, Artificial; identical to SEQ ID NO: 266177
  Synthetic oligonucleotide

SEQ ID NO: 645299 - DNA, 55 bp, Artificial; identical to SEQ ID NO: 202698
  Synthetic oligonucleotide

SEQ ID NO: 645300 - DNA, 55 bp, Artificial; identical to SEQ ID NO: 155383
  Synthetic oligonucleotide

SEQ ID NO: 645301 - DNA, 55 bp, Artificial; identical to SEQ ID NO: 196160
  Synthetic oligonucleotide

SEQ ID NO: 645302 - DNA, 55 bp, Artificial; identical to SEQ ID NO: 217667
  Synthetic oligonucleotide

SEQ ID NO: 645303 - DNA, 53 bp, Artificial; identical to SEQ ID NO: 215201
  Synthetic oligonucleotide

SEQ ID NO: 645304 - DNA, 55 bp, Artificial; identical to SEQ ID NO: 155807
  Synthetic oligonucleotide

SEQ ID NO: 645305 - DNA, 55 bp, Artificial; identical to SEQ ID NO: 166640
  Synthetic oligonucleotide

SEQ ID NO: 645306 - DNA, 54 bp, Artificial; identical to SEQ ID NO: 256986
  Synthetic oligonucleotide

SEQ ID NO: 645307 - DNA, 55 bp, Artificial; identical to SEQ ID NO: 244408
  Synthetic oligonucleotide

SEQ ID NO: 645308 - DNA, 50 bp, Artificial; identical to SEQ ID NO: 176324
  Synthetic oligonucleotide

SEQ ID NO: 645309 - DNA, 55 bp, Artificial; identical to SEQ ID NO: 171544
  Synthetic oligonucleotide

SEQ ID NO: 645310 - DNA, 53 bp, Artificial; identical to SEQ ID NO: 236988
  Synthetic oligonucleotide

SEQ ID NO: 645311 - DNA, 55 bp, Artificial; identical to SEQ ID NO: 190951
  Synthetic oligonucleotide

SEQ ID NO: 645312 - DNA, 55 bp, Artificial; identical to SEQ ID NO: 207131
  Synthetic oligonucleotide

SEQ ID NO: 645313 - DNA, 53 bp, Artificial; identical to SEQ ID NO: 168941
  Synthetic oligonucleotide

SEQ ID NO: 645314 - DNA, 55 bp, Artificial; identical to SEQ ID NO: 166638
  Synthetic oligonucleotide

SEQ ID NO: 645315 - DNA, 50 bp, Artificial; identical to SEQ ID NO: 176330
  Synthetic oligonucleotide

SEQ ID NO: 645316 - DNA, 60 bp, Artificial; identical to SEQ ID NO: 166378
  Synthetic oligonucleotide

SEQ ID NO: 645317 - DNA, 60 bp, Artificial; identical to SEQ ID NO: 160575
  Synthetic oligonucleotide

SEQ ID NO: 645318 - DNA, 53 bp, Artificial; identical to SEQ ID NO: 205662
  Synthetic oligonucleotide

SEQ ID NO: 645319 - DNA, 55 bp, Artificial; identical to SEQ ID NO: 147881
  Synthetic oligonucleotide

SEQ ID NO: 645320 - DNA, 52 bp, Artificial; identical to SEQ ID NO: 246551
  Synthetic oligonucleotide

SEQ ID NO: 645321 - DNA, 55 bp, Artificial; identical to SEQ ID NO: 209323
  Synthetic oligonucleotide

SEQ ID NO: 645322 - DNA, 57 bp, Artificial; identical to SEQ ID NO: 141894
  Synthetic oligonucleotide

SEQ ID NO: 645323 - DNA, 52 bp, Artificial; identical to SEQ ID NO: 253318
  Synthetic oligonucleotide

SEQ ID NO: 645324 - DNA, 52 bp, Artificial; identical to SEQ ID NO: 168956
  Synthetic oligonucleotide

SEQ ID NO: 645325 - DNA, 58 bp, Artificial; identical to SEQ ID NO: 179110
  Synthetic oligonucleotide

SEQ ID NO: 645326 - DNA, 55 bp, Artificial; identical to SEQ ID NO: 239685
  Synthetic oligonucleotide

SEQ ID NO: 645327 - DNA, 60 bp, Artificial; identical to SEQ ID NO: 217097
  Synthetic oligonucleotide

SEQ ID NO: 645328 - DNA, 55 bp, Artificial; identical to SEQ ID NO: 237699
  Synthetic oligonucleotide

SEQ ID NO: 645329 - DNA, 55 bp, Artificial; identical to SEQ ID NO: 217669
  Synthetic oligonucleotide

SEQ ID NO: 645330 - DNA, 55 bp, Artificial; identical to SEQ ID NO: 154368
  Synthetic oligonucleotide

SEQ ID NO: 645331 - DNA, 52 bp, Artificial; identical to SEQ ID NO: 165122
  Synthetic oligonucleotide

SEQ ID NO: 645332 - DNA, 57 bp, Artificial; identical to SEQ ID NO: 201096
  Synthetic oligonucleotide

SEQ ID NO: 645333 - DNA, 53 bp, Artificial; identical to SEQ ID NO: 164860
  Synthetic oligonucleotide

SEQ ID NO: 645334 - DNA, 60 bp, Artificial; identical to SEQ ID NO: 239099
  Synthetic oligonucleotide

SEQ ID NO: 645335 - DNA, 55 bp, Artificial; identical to SEQ ID NO: 208557
  Synthetic oligonucleotide

SEQ ID NO: 645336 - DNA, 60 bp, Artificial; identical to SEQ ID NO: 239100
  Synthetic oligonucleotide

SEQ ID NO: 645337 - DNA, 55 bp, Artificial; identical to SEQ ID NO: 192233
  Synthetic oligonucleotide

SEQ ID NO: 645338 - DNA, 54 bp, Artificial; identical to SEQ ID NO: 144850
  Synthetic oligonucleotide

SEQ ID NO: 645339 - DNA, 51 bp, Artificial; identical to SEQ ID NO: 216839
  Synthetic oligonucleotide

SEQ ID NO: 645340 - DNA, 50 bp, Artificial; identical to SEQ ID NO: 252734
  Synthetic oligonucleotide

SEQ ID NO: 645341 - DNA, 55 bp, Artificial; identical to SEQ ID NO: 166389
  Synthetic oligonucleotide

SEQ ID NO: 645342 - DNA, 55 bp, Artificial; identical to SEQ ID NO: 209322
  Synthetic oligonucleotide

SEQ ID NO: 645343 - DNA, 60 bp, Artificial; identical to SEQ ID NO: 239101
  Synthetic oligonucleotide

SEQ ID NO: 645344 - DNA, 59 bp, Artificial; identical to SEQ ID NO: 203592
  Synthetic oligonucleotide

SEQ ID NO: 645345 - DNA, 54 bp, Artificial; identical to SEQ ID NO: 197433
  Synthetic oligonucleotide

SEQ ID NO: 645346 - DNA, 55 bp, Artificial; identical to SEQ ID NO: 146973
  Synthetic oligonucleotide

SEQ ID NO: 645347 - DNA, 56 bp, Artificial; identical to SEQ ID NO: 194781
  Synthetic oligonucleotide

SEQ ID NO: 645348 - DNA, 54 bp, Artificial; identical to SEQ ID NO: 185118
  Synthetic oligonucleotide

SEQ ID NO: 645349 - DNA, 50 bp, Artificial; identical to SEQ ID NO: 246808
  Synthetic oligonucleotide

SEQ ID NO: 645350 - DNA, 52 bp, Artificial; identical to SEQ ID NO: 246549
  Synthetic oligonucleotide

SEQ ID NO: 645351 - DNA, 51 bp, Artificial; identical to SEQ ID NO: 200095
  Synthetic oligonucleotide

SEQ ID NO: 645352 - DNA, 53 bp, Artificial; identical to SEQ ID NO: 151177
  Synthetic oligonucleotide

SEQ ID NO: 645353 - DNA, 57 bp, Artificial; identical to SEQ ID NO: 147158
  Synthetic oligonucleotide

SEQ ID NO: 645354 - DNA, 60 bp, Artificial; identical to SEQ ID NO: 233390
  Synthetic oligonucleotide

SEQ ID NO: 645355 - DNA, 55 bp, Artificial; identical to SEQ ID NO: 155808
  Synthetic oligonucleotide

SEQ ID NO: 645356 - DNA, 55 bp, Artificial; identical to SEQ ID NO: 155809
  Synthetic oligonucleotide

SEQ ID NO: 645357 - DNA, 53 bp, Artificial; identical to SEQ ID NO: 234461
  Synthetic oligonucleotide

SEQ ID NO: 645358 - DNA, 51 bp, Artificial; identical to SEQ ID NO: 146468
  Synthetic oligonucleotide

SEQ ID NO: 645359 - DNA, 51 bp, Artificial; identical to SEQ ID NO: 240983
  Synthetic oligonucleotide

SEQ ID NO: 645360 - DNA, 51 bp, Artificial; identical to SEQ ID NO: 141368
  Synthetic oligonucleotide

SEQ ID NO: 645361 - DNA, 55 bp, Artificial; identical to SEQ ID NO: 189018
  Synthetic oligonucleotide

SEQ ID NO: 645362 - DNA, 51 bp, Artificial; identical to SEQ ID NO: 255601
  Synthetic oligonucleotide

SEQ ID NO: 645363 - DNA, 51 bp, Artificial; identical to SEQ ID NO: 174910
  Synthetic oligonucleotide

SEQ ID NO: 645364 - DNA, 55 bp, Artificial; identical to SEQ ID NO: 171543
  Synthetic oligonucleotide

SEQ ID NO: 645365 - DNA, 54 bp, Artificial; identical to SEQ ID NO: 199653
  Synthetic oligonucleotide

SEQ ID NO: 645366 - DNA, 53 bp, Artificial; identical to SEQ ID NO: 161146
  Synthetic oligonucleotide

SEQ ID NO: 645367 - DNA, 52 bp, Artificial; identical to SEQ ID NO: 206463
  Synthetic oligonucleotide

SEQ ID NO: 645368 - DNA, 53 bp, Artificial; identical to SEQ ID NO: 246297
  Synthetic oligonucleotide

SEQ ID NO: 645369 - DNA, 51 bp, Artificial; identical to SEQ ID NO: 237152
  Synthetic oligonucleotide

SEQ ID NO: 645370 - DNA, 58 bp, Artificial; identical to SEQ ID NO: 194275
  Synthetic oligonucleotide

SEQ ID NO: 645371 - DNA, 55 bp, Artificial; identical to SEQ ID NO: 155811
  Synthetic oligonucleotide

SEQ ID NO: 645372 - DNA, 55 bp, Artificial; identical to SEQ ID NO: 151171
  Synthetic oligonucleotide

SEQ ID NO: 645373 - DNA, 55 bp, Artificial; identical to SEQ ID NO: 245398
  Synthetic oligonucleotide

SEQ ID NO: 645374 - DNA, 55 bp, Artificial; identical to SEQ ID NO: 163895
  Synthetic oligonucleotide

SEQ ID NO: 645375 - DNA, 60 bp, Artificial; identical to SEQ ID NO: 151170
  Synthetic oligonucleotide

SEQ ID NO: 645376 - DNA, 54 bp, Artificial; identical to SEQ ID NO: 225096
  Synthetic oligonucleotide

SEQ ID NO: 645377 - DNA, 55 bp, Artificial; identical to SEQ ID NO: 203746
  Synthetic oligonucleotide

SEQ ID NO: 645378 - DNA, 53 bp, Artificial; identical to SEQ ID NO: 258129
  Synthetic oligonucleotide

SEQ ID NO: 645379 - DNA, 57 bp, Artificial; identical to SEQ ID NO: 217098
  Synthetic oligonucleotide

SEQ ID NO: 645380 - DNA, 55 bp, Artificial; identical to SEQ ID NO: 254127
  Synthetic oligonucleotide

SEQ ID NO: 645381 - DNA, 51 bp, Artificial; identical to SEQ ID NO: 243705
  Synthetic oligonucleotide

SEQ ID NO: 645382 - DNA, 54 bp, Artificial; identical to SEQ ID NO: 233777
  Synthetic oligonucleotide

SEQ ID NO: 645383 - DNA, 59 bp, Artificial; identical to SEQ ID NO: 252677
  Synthetic oligonucleotide

SEQ ID NO: 645384 - DNA, 55 bp, Artificial; identical to SEQ ID NO: 171542
  Synthetic oligonucleotide

SEQ ID NO: 645385 - DNA, 55 bp, Artificial; identical to SEQ ID NO: 168670
  Synthetic oligonucleotide

SEQ ID NO: 645386 - DNA, 56 bp, Artificial; identical to SEQ ID NO: 171562
  Synthetic oligonucleotide

SEQ ID NO: 645387 - DNA, 55 bp, Artificial; identical to SEQ ID NO: 147866
  Synthetic oligonucleotide

SEQ ID NO: 645388 - DNA, 52 bp, Artificial; identical to SEQ ID NO: 240903
  Synthetic oligonucleotide

SEQ ID NO: 645389 - DNA, 55 bp, Artificial; identical to SEQ ID NO: 144851
  Synthetic oligonucleotide

SEQ ID NO: 645390 - DNA, 55 bp, Artificial; identical to SEQ ID NO: 243706
  Synthetic oligonucleotide

SEQ ID NO: 645391 - DNA, 51 bp, Artificial; identical to SEQ ID NO: 263528
  Synthetic oligonucleotide

SEQ ID NO: 645392 - DNA, 55 bp, Artificial; identical to SEQ ID NO: 247690
  Synthetic oligonucleotide

SEQ ID NO: 645393 - DNA, 55 bp, Artificial; identical to SEQ ID NO: 190950
  Synthetic oligonucleotide

SEQ ID NO: 645394 - DNA, 55 bp, Artificial; identical to SEQ ID NO: 202367
  Synthetic oligonucleotide

SEQ ID NO: 645395 - DNA, 60 bp, Artificial; identical to SEQ ID NO: 243707
  Synthetic oligonucleotide

SEQ ID NO: 645396 - DNA, 55 bp, Artificial; identical to SEQ ID NO: 181582
  Synthetic oligonucleotide

SEQ ID NO: 645397 - DNA, 54 bp, Artificial; identical to SEQ ID NO: 249516
  Synthetic oligonucleotide

SEQ ID NO: 645398 - DNA, 54 bp, Artificial; identical to SEQ ID NO: 240551
  Synthetic oligonucleotide

SEQ ID NO: 645399 - DNA, 55 bp, Artificial; identical to SEQ ID NO: 181581
  Synthetic oligonucleotide

SEQ ID NO: 645400 - DNA, 56 bp, Artificial; identical to SEQ ID NO: 166132
  Synthetic oligonucleotide

SEQ ID NO: 645401 - DNA, 59 bp, Artificial; identical to SEQ ID NO: 191260
  Synthetic oligonucleotide

SEQ ID NO: 645402 - DNA, 55 bp, Artificial; identical to SEQ ID NO: 220659
  Synthetic oligonucleotide

SEQ ID NO: 645403 - DNA, 57 bp, Artificial; identical to SEQ ID NO: 141921
  Synthetic oligonucleotide

SEQ ID NO: 645404 - DNA, 50 bp, Artificial; identical to SEQ ID NO: 200354
  Synthetic oligonucleotide

SEQ ID NO: 645405 - DNA, 58 bp, Artificial; identical to SEQ ID NO: 167274
  Synthetic oligonucleotide

SEQ ID NO: 645406 - DNA, 55 bp, Artificial; identical to SEQ ID NO: 146318
  Synthetic oligonucleotide

SEQ ID NO: 645407 - DNA, 53 bp, Artificial; identical to SEQ ID NO: 255441
  Synthetic oligonucleotide

SEQ ID NO: 645408 - DNA, 55 bp, Artificial; identical to SEQ ID NO: 254128
  Synthetic oligonucleotide

SEQ ID NO: 645409 - DNA, 51 bp, Artificial; identical to SEQ ID NO: 193117
  Synthetic oligonucleotide

SEQ ID NO: 645410 - DNA, 60 bp, Artificial; identical to SEQ ID NO: 171550
  Synthetic oligonucleotide

SEQ ID NO: 645411 - DNA, 55 bp, Artificial; identical to SEQ ID NO: 171886
  Synthetic oligonucleotide

SEQ ID NO: 645412 - DNA, 54 bp, Artificial; identical to SEQ ID NO: 255286
  Synthetic oligonucleotide

SEQ ID NO: 645413 - DNA, 58 bp, Artificial; identical to SEQ ID NO: 179102
  Synthetic oligonucleotide

SEQ ID NO: 645414 - DNA, 55 bp, Artificial; identical to SEQ ID NO: 249990
  Synthetic oligonucleotide

SEQ ID NO: 645415 - DNA, 55 bp, Artificial; identical to SEQ ID NO: 202374
  Synthetic oligonucleotide

SEQ ID NO: 645416 - DNA, 54 bp, Artificial; identical to SEQ ID NO: 261592
  Synthetic oligonucleotide

SEQ ID NO: 645417 - DNA, 58 bp, Artificial; identical to SEQ ID NO: 233645
  Synthetic oligonucleotide

SEQ ID NO: 645418 - DNA, 54 bp, Artificial; identical to SEQ ID NO: 185088
  Synthetic oligonucleotide

SEQ ID NO: 645419 - DNA, 56 bp, Artificial; identical to SEQ ID NO: 170969
  Synthetic oligonucleotide

SEQ ID NO: 645420 - DNA, 58 bp, Artificial; identical to SEQ ID NO: 179099
  Synthetic oligonucleotide

SEQ ID NO: 645421 - DNA, 54 bp, Artificial; identical to SEQ ID NO: 185098
  Synthetic oligonucleotide

SEQ ID NO: 645422 - DNA, 55 bp, Artificial; identical to SEQ ID NO: 224820
  Synthetic oligonucleotide

SEQ ID NO: 645423 - DNA, 50 bp, Artificial; identical to SEQ ID NO: 200357
  Synthetic oligonucleotide

SEQ ID NO: 645424 - DNA, 52 bp, Artificial; identical to SEQ ID NO: 186361
  Synthetic oligonucleotide

SEQ ID NO: 645425 - DNA, 53 bp, Artificial; identical to SEQ ID NO: 199696
  Synthetic oligonucleotide

SEQ ID NO: 645426 - DNA, 52 bp, Artificial; identical to SEQ ID NO: 243248
  Synthetic oligonucleotide

SEQ ID NO: 645427 - DNA, 55 bp, Artificial; identical to SEQ ID NO: 171540
  Synthetic oligonucleotide

SEQ ID NO: 645428 - DNA, 55 bp, Artificial; identical to SEQ ID NO: 171541
  Synthetic oligonucleotide

SEQ ID NO: 645429 - DNA, 55 bp, Artificial; identical to SEQ ID NO: 254129
  Synthetic oligonucleotide

SEQ ID NO: 645430 - DNA, 55 bp, Artificial; identical to SEQ ID NO: 154311
  Synthetic oligonucleotide

SEQ ID NO: 645431 - DNA, 51 bp, Artificial; identical to SEQ ID NO: 188166
  Synthetic oligonucleotide

SEQ ID NO: 645432 - DNA, 56 bp, Artificial; identical to SEQ ID NO: 179098
  Synthetic oligonucleotide

SEQ ID NO: 645433 - DNA, 55 bp, Artificial; identical to SEQ ID NO: 161145
  Synthetic oligonucleotide

SEQ ID NO: 645434 - DNA, 56 bp, Artificial; identical to SEQ ID NO: 208090
  Synthetic oligonucleotide

SEQ ID NO: 645435 - DNA, 60 bp, Artificial; identical to SEQ ID NO: 239106
  Synthetic oligonucleotide

SEQ ID NO: 645436 - DNA, 55 bp, Artificial; identical to SEQ ID NO: 207126
  Synthetic oligonucleotide

SEQ ID NO: 645437 - DNA, 60 bp, Artificial; identical to SEQ ID NO: 243708
  Synthetic oligonucleotide

SEQ ID NO: 645438 - DNA, 53 bp, Artificial; identical to SEQ ID NO: 203897
  Synthetic oligonucleotide

SEQ ID NO: 645439 - DNA, 52 bp, Artificial; identical to SEQ ID NO: 167102
  Synthetic oligonucleotide

SEQ ID NO: 645440 - DNA, 52 bp, Artificial; identical to SEQ ID NO: 149520
  Synthetic oligonucleotide

SEQ ID NO: 645441 - DNA, 57 bp, Artificial; identical to SEQ ID NO: 209805
  Synthetic oligonucleotide

SEQ ID NO: 645442 - DNA, 55 bp, Artificial; identical to SEQ ID NO: 160178
  Synthetic oligonucleotide

SEQ ID NO: 645443 - DNA, 60 bp, Artificial; identical to SEQ ID NO: 200763
  Synthetic oligonucleotide

SEQ ID NO: 645444 - DNA, 60 bp, Artificial; identical to SEQ ID NO: 166433
  Synthetic oligonucleotide

SEQ ID NO: 645445 - DNA, 60 bp, Artificial; identical to SEQ ID NO: 258274
  Synthetic oligonucleotide

SEQ ID NO: 645446 - DNA, 57 bp, Artificial; identical to SEQ ID NO: 147244
  Synthetic oligonucleotide

SEQ ID NO: 645447 - DNA, 51 bp, Artificial; identical to SEQ ID NO: 209756
  Synthetic oligonucleotide

SEQ ID NO: 645448 - DNA, 52 bp, Artificial; identical to SEQ ID NO: 170112
  Synthetic oligonucleotide

SEQ ID NO: 645449 - DNA, 58 bp, Artificial; identical to SEQ ID NO: 203603
  Synthetic oligonucleotide

SEQ ID NO: 645450 - DNA, 58 bp, Artificial; identical to SEQ ID NO: 160871
  Synthetic oligonucleotide

SEQ ID NO: 645451 - DNA, 57 bp, Artificial; identical to SEQ ID NO: 239108
  Synthetic oligonucleotide

SEQ ID NO: 645452 - DNA, 59 bp, Artificial; identical to SEQ ID NO: 209783
  Synthetic oligonucleotide

SEQ ID NO: 645453 - DNA, 55 bp, Artificial; identical to SEQ ID NO: 247692
  Synthetic oligonucleotide

SEQ ID NO: 645454 - DNA, 55 bp, Artificial; identical to SEQ ID NO: 169287
  Synthetic oligonucleotide

SEQ ID NO: 645455 - DNA, 57 bp, Artificial; identical to SEQ ID NO: 239109
  Synthetic oligonucleotide

SEQ ID NO: 645456 - DNA, 55 bp, Artificial; identical to SEQ ID NO: 201985
  Synthetic oligonucleotide

SEQ ID NO: 645457 - DNA, 55 bp, Artificial; identical to SEQ ID NO: 198380
  Synthetic oligonucleotide

SEQ ID NO: 645458 - DNA, 56 bp, Artificial; identical to SEQ ID NO: 239110
  Synthetic oligonucleotide

SEQ ID NO: 645459 - DNA, 55 bp, Artificial; identical to SEQ ID NO: 234391
  Synthetic oligonucleotide

SEQ ID NO: 645460 - DNA, 60 bp, Artificial; identical to SEQ ID NO: 237701
  Synthetic oligonucleotide

SEQ ID NO: 645461 - DNA, 50 bp, Artificial; identical to SEQ ID NO: 203036
  Synthetic oligonucleotide

SEQ ID NO: 645462 - DNA, 55 bp, Artificial; identical to SEQ ID NO: 218184
  Synthetic oligonucleotide

SEQ ID NO: 645463 - DNA, 52 bp, Artificial; identical to SEQ ID NO: 149525
  Synthetic oligonucleotide

SEQ ID NO: 645464 - DNA, 54 bp, Artificial; identical to SEQ ID NO: 171547
  Synthetic oligonucleotide

SEQ ID NO: 645465 - DNA, 55 bp, Artificial; identical to SEQ ID NO: 233448
  Synthetic oligonucleotide

SEQ ID NO: 645466 - DNA, 50 bp, Artificial; identical to SEQ ID NO: 221433
  Synthetic oligonucleotide

SEQ ID NO: 645467 - DNA, 56 bp, Artificial; identical to SEQ ID NO: 202002
  Synthetic oligonucleotide

SEQ ID NO: 645468 - DNA, 55 bp, Artificial; identical to SEQ ID NO: 147899
  Synthetic oligonucleotide

SEQ ID NO: 645469 - DNA, 50 bp, Artificial; identical to SEQ ID NO: 158191
  Synthetic oligonucleotide

SEQ ID NO: 645470 - DNA, 53 bp, Artificial; identical to SEQ ID NO: 266084
  Synthetic oligonucleotide

SEQ ID NO: 645471 - DNA, 57 bp, Artificial; identical to SEQ ID NO: 179090
  Synthetic oligonucleotide

SEQ ID NO: 645472 - DNA, 58 bp, Artificial; identical to SEQ ID NO: 187343
  Synthetic oligonucleotide

SEQ ID NO: 645473 - DNA, 53 bp, Artificial; identical to SEQ ID NO: 258948
  Synthetic oligonucleotide

SEQ ID NO: 645474 - DNA, 55 bp, Artificial; identical to SEQ ID NO: 243712
  Synthetic oligonucleotide

SEQ ID NO: 645475 - DNA, 59 bp, Artificial; identical to SEQ ID NO: 209772
  Synthetic oligonucleotide

SEQ ID NO: 645476 - DNA, 55 bp, Artificial; identical to SEQ ID NO: 266022
  Synthetic oligonucleotide

SEQ ID NO: 645477 - DNA, 60 bp, Artificial; identical to SEQ ID NO: 234297
  Synthetic oligonucleotide

SEQ ID NO: 645478 - DNA, 55 bp, Artificial; identical to SEQ ID NO: 162054
  Synthetic oligonucleotide

SEQ ID NO: 645479 - DNA, 52 bp, Artificial; identical to SEQ ID NO: 186347
  Synthetic oligonucleotide

SEQ ID NO: 645480 - DNA, 57 bp, Artificial; identical to SEQ ID NO: 147251
  Synthetic oligonucleotide

SEQ ID NO: 645481 - DNA, 55 bp, Artificial; identical to SEQ ID NO: 254131
  Synthetic oligonucleotide

SEQ ID NO: 645482 - DNA, 55 bp, Artificial; identical to SEQ ID NO: 247695
  Synthetic oligonucleotide

SEQ ID NO: 645483 - DNA, 50 bp, Artificial; identical to SEQ ID NO: 241524
  Synthetic oligonucleotide

SEQ ID NO: 645484 - DNA, 54 bp, Artificial; identical to SEQ ID NO: 246060
  Synthetic oligonucleotide

SEQ ID NO: 645485 - DNA, 52 bp, Artificial; identical to SEQ ID NO: 190843
  Synthetic oligonucleotide

SEQ ID NO: 645486 - DNA, 58 bp, Artificial; identical to SEQ ID NO: 252798
  Synthetic oligonucleotide

SEQ ID NO: 645487 - DNA, 53 bp, Artificial; identical to SEQ ID NO: 194535
  Synthetic oligonucleotide

SEQ ID NO: 645488 - DNA, 58 bp, Artificial; identical to SEQ ID NO: 245387
  Synthetic oligonucleotide

SEQ ID NO: 645489 - DNA, 50 bp, Artificial; identical to SEQ ID NO: 202663
  Synthetic oligonucleotide

SEQ ID NO: 645490 - DNA, 59 bp, Artificial; identical to SEQ ID NO: 166456
  Synthetic oligonucleotide

SEQ ID NO: 645491 - DNA, 59 bp, Artificial; identical to SEQ ID NO: 166467
  Synthetic oligonucleotide

SEQ ID NO: 645492 - DNA, 50 bp, Artificial; identical to SEQ ID NO: 221878
  Synthetic oligonucleotide

SEQ ID NO: 645493 - DNA, 51 bp, Artificial; identical to SEQ ID NO: 165206
  Synthetic oligonucleotide

SEQ ID NO: 645494 - DNA, 54 bp, Artificial; identical to SEQ ID NO: 207030
  Synthetic oligonucleotide

SEQ ID NO: 645495 - DNA, 60 bp, Artificial; identical to SEQ ID NO: 179088
  Synthetic oligonucleotide

SEQ ID NO: 645496 - DNA, 53 bp, Artificial; identical to SEQ ID NO: 239343
  Synthetic oligonucleotide

SEQ ID NO: 645497 - DNA, 52 bp, Artificial; identical to SEQ ID NO: 165116
  Synthetic oligonucleotide

SEQ ID NO: 645498 - DNA, 55 bp, Artificial; identical to SEQ ID NO: 202700
  Synthetic oligonucleotide

SEQ ID NO: 645499 - DNA, 52 bp, Artificial; identical to SEQ ID NO: 149545
  Synthetic oligonucleotide

SEQ ID NO: 645500 - DNA, 59 bp, Artificial; identical to SEQ ID NO: 239114
  Synthetic oligonucleotide

SEQ ID NO: 645501 - DNA, 60 bp, Artificial; identical to SEQ ID NO: 174591
  Synthetic oligonucleotide

SEQ ID NO: 645502 - DNA, 55 bp, Artificial; identical to SEQ ID NO: 181617
  Synthetic oligonucleotide

SEQ ID NO: 645503 - DNA, 55 bp, Artificial; identical to SEQ ID NO: 194536
  Synthetic oligonucleotide

SEQ ID NO: 645504 - DNA, 55 bp, Artificial; identical to SEQ ID NO: 151675
  Synthetic oligonucleotide

SEQ ID NO: 645505 - DNA, 52 bp, Artificial; identical to SEQ ID NO: 189149
  Synthetic oligonucleotide

SEQ ID NO: 645506 - DNA, 55 bp, Artificial; identical to SEQ ID NO: 252995
  Synthetic oligonucleotide

SEQ ID NO: 645507 - DNA, 55 bp, Artificial; identical to SEQ ID NO: 218245
  Synthetic oligonucleotide

SEQ ID NO: 645508 - DNA, 53 bp, Artificial; identical to SEQ ID NO: 220766
  Synthetic oligonucleotide

SEQ ID NO: 645509 - DNA, 55 bp, Artificial; identical to SEQ ID NO: 190422
  Synthetic oligonucleotide

SEQ ID NO: 645510 - DNA, 55 bp, Artificial; identical to SEQ ID NO: 147897
  Synthetic oligonucleotide

SEQ ID NO: 645511 - DNA, 60 bp, Artificial; identical to SEQ ID NO: 167236
  Synthetic oligonucleotide

SEQ ID NO: 645512 - DNA, 56 bp, Artificial; identical to SEQ ID NO: 256897
  Synthetic oligonucleotide

SEQ ID NO: 645513 - DNA, 55 bp, Artificial; identical to SEQ ID NO: 221392
  Synthetic oligonucleotide

SEQ ID NO: 645514 - DNA, 55 bp, Artificial; identical to SEQ ID NO: 181615
  Synthetic oligonucleotide

SEQ ID NO: 645515 - DNA, 56 bp, Artificial; identical to SEQ ID NO: 168212
  Synthetic oligonucleotide

SEQ ID NO: 645516 - DNA, 51 bp, Artificial; identical to SEQ ID NO: 200191
  Synthetic oligonucleotide

SEQ ID NO: 645517 - DNA, 51 bp, Artificial; identical to SEQ ID NO: 202553
  Synthetic oligonucleotide

SEQ ID NO: 645518 - DNA, 54 bp, Artificial; identical to SEQ ID NO: 147035
  Synthetic oligonucleotide

SEQ ID NO: 645519 - DNA, 50 bp, Artificial; identical to SEQ ID NO: 165858
  Synthetic oligonucleotide

SEQ ID NO: 645520 - DNA, 60 bp, Artificial; identical to SEQ ID NO: 243713
  Synthetic oligonucleotide

SEQ ID NO: 645521 - DNA, 54 bp, Artificial; identical to SEQ ID NO: 190617
  Synthetic oligonucleotide

SEQ ID NO: 645522 - DNA, 55 bp, Artificial; identical to SEQ ID NO: 194538
  Synthetic oligonucleotide

SEQ ID NO: 645523 - DNA, 60 bp, Artificial; identical to SEQ ID NO: 262735
  Synthetic oligonucleotide

SEQ ID NO: 645524 - DNA, 60 bp, Artificial; identical to SEQ ID NO: 197171
  Synthetic oligonucleotide

SEQ ID NO: 645525 - DNA, 52 bp, Artificial; identical to SEQ ID NO: 197595
  Synthetic oligonucleotide

SEQ ID NO: 645526 - DNA, 53 bp, Artificial; identical to SEQ ID NO: 199745
  Synthetic oligonucleotide

SEQ ID NO: 645527 - DNA, 58 bp, Artificial; identical to SEQ ID NO: 239321
  Synthetic oligonucleotide

SEQ ID NO: 645528 - DNA, 55 bp, Artificial; identical to SEQ ID NO: 155812
  Synthetic oligonucleotide

SEQ ID NO: 645529 - DNA, 50 bp, Artificial; identical to SEQ ID NO: 191258
  Synthetic oligonucleotide

SEQ ID NO: 645530 - DNA, 59 bp, Artificial; identical to SEQ ID NO: 239117
  Synthetic oligonucleotide

SEQ ID NO: 645531 - DNA, 50 bp, Artificial; identical to SEQ ID NO: 221875
  Synthetic oligonucleotide

SEQ ID NO: 645532 - DNA, 58 bp, Artificial; identical to SEQ ID NO: 239358
  Synthetic oligonucleotide

SEQ ID NO: 645533 - DNA, 53 bp, Artificial; identical to SEQ ID NO: 164890
  Synthetic oligonucleotide

SEQ ID NO: 645534 - DNA, 55 bp, Artificial; identical to SEQ ID NO: 239118
  Synthetic oligonucleotide

SEQ ID NO: 645535 - DNA, 58 bp, Artificial; identical to SEQ ID NO: 201461
  Synthetic oligonucleotide

SEQ ID NO: 645536 - DNA, 53 bp, Artificial; identical to SEQ ID NO: 245376
  Synthetic oligonucleotide

SEQ ID NO: 645537 - DNA, 55 bp, Artificial; identical to SEQ ID NO: 198378
  Synthetic oligonucleotide

SEQ ID NO: 645538 - DNA, 55 bp, Artificial; identical to SEQ ID NO: 146323
  Synthetic oligonucleotide

SEQ ID NO: 645539 - DNA, 55 bp, Artificial; identical to SEQ ID NO: 207125
  Synthetic oligonucleotide

SEQ ID NO: 645540 - DNA, 55 bp, Artificial; identical to SEQ ID NO: 209319
  Synthetic oligonucleotide

SEQ ID NO: 645541 - DNA, 55 bp, Artificial; identical to SEQ ID NO: 239939
  Synthetic oligonucleotide

SEQ ID NO: 645542 - DNA, 54 bp, Artificial; identical to SEQ ID NO: 233787
  Synthetic oligonucleotide

SEQ ID NO: 645543 - DNA, 58 bp, Artificial; identical to SEQ ID NO: 239258
  Synthetic oligonucleotide

SEQ ID NO: 645544 - DNA, 55 bp, Artificial; identical to SEQ ID NO: 153353
  Synthetic oligonucleotide

SEQ ID NO: 645545 - DNA, 50 bp, Artificial; identical to SEQ ID NO: 241580
  Synthetic oligonucleotide

SEQ ID NO: 645546 - DNA, 55 bp, Artificial; identical to SEQ ID NO: 163889
  Synthetic oligonucleotide

SEQ ID NO: 645547 - DNA, 55 bp, Artificial; identical to SEQ ID NO: 224818
  Synthetic oligonucleotide

SEQ ID NO: 645548 - DNA, 55 bp, Artificial; identical to SEQ ID NO: 239881
  Synthetic oligonucleotide

SEQ ID NO: 645549 - DNA, 55 bp, Artificial; identical to SEQ ID NO: 247696
  Synthetic oligonucleotide

SEQ ID NO: 645550 - DNA, 55 bp, Artificial; identical to SEQ ID NO: 166511
  Synthetic oligonucleotide

SEQ ID NO: 645551 - DNA, 55 bp, Artificial; identical to SEQ ID NO: 234255
  Synthetic oligonucleotide

SEQ ID NO: 645552 - DNA, 60 bp, Artificial; identical to SEQ ID NO: 166522
  Synthetic oligonucleotide

SEQ ID NO: 645553 - DNA, 54 bp, Artificial; identical to SEQ ID NO: 203614
  Synthetic oligonucleotide

SEQ ID NO: 645554 - DNA, 60 bp, Artificial; identical to SEQ ID NO: 239080
  Synthetic oligonucleotide

SEQ ID NO: 645555 - DNA, 53 bp, Artificial; identical to SEQ ID NO: 221697
  Synthetic oligonucleotide

SEQ ID NO: 645556 - DNA, 57 bp, Artificial; identical to SEQ ID NO: 147218
  Synthetic oligonucleotide

SEQ ID NO: 645557 - DNA, 50 bp, Artificial; identical to SEQ ID NO: 216989
  Synthetic oligonucleotide

SEQ ID NO: 645558 - DNA, 55 bp, Artificial; identical to SEQ ID NO: 190416
  Synthetic oligonucleotide

SEQ ID NO: 645559 - DNA, 59 bp, Artificial; identical to SEQ ID NO: 144573
  Synthetic oligonucleotide

SEQ ID NO: 645560 - DNA, 60 bp, Artificial; identical to SEQ ID NO: 207155
  Synthetic oligonucleotide

SEQ ID NO: 645561 - DNA, 60 bp, Artificial; identical to SEQ ID NO: 239081
  Synthetic oligonucleotide

SEQ ID NO: 645562 - DNA, 55 bp, Artificial; identical to SEQ ID NO: 191899
  Synthetic oligonucleotide

SEQ ID NO: 645563 - DNA, 52 bp, Artificial; identical to SEQ ID NO: 142632
  Synthetic oligonucleotide

SEQ ID NO: 645564 - DNA, 57 bp, Artificial; identical to SEQ ID NO: 179757
  Synthetic oligonucleotide

SEQ ID NO: 645565 - DNA, 53 bp, Artificial; identical to SEQ ID NO: 149303
  Synthetic oligonucleotide

SEQ ID NO: 645566 - DNA, 52 bp, Artificial; identical to SEQ ID NO: 161325
  Synthetic oligonucleotide

SEQ ID NO: 645567 - DNA, 55 bp, Artificial; identical to SEQ ID NO: 217512
  Synthetic oligonucleotide

SEQ ID NO: 645568 - DNA, 60 bp, Artificial; identical to SEQ ID NO: 142682
  Synthetic oligonucleotide

SEQ ID NO: 645569 - DNA, 60 bp, Artificial; identical to SEQ ID NO: 239084
  Synthetic oligonucleotide

SEQ ID NO: 645570 - DNA, 55 bp, Artificial; identical to SEQ ID NO: 181609
  Synthetic oligonucleotide

SEQ ID NO: 645571 - DNA, 51 bp, Artificial; identical to SEQ ID NO: 200188
  Synthetic oligonucleotide

SEQ ID NO: 645572 - DNA, 55 bp, Artificial; identical to SEQ ID NO: 181608
  Synthetic oligonucleotide

SEQ ID NO: 645573 - DNA, 52 bp, Artificial; identical to SEQ ID NO: 185930
  Synthetic oligonucleotide

SEQ ID NO: 645574 - DNA, 52 bp, Artificial; identical to SEQ ID NO: 157589
  Synthetic oligonucleotide

SEQ ID NO: 645575 - DNA, 60 bp, Artificial; identical to SEQ ID NO: 179034
  Synthetic oligonucleotide

SEQ ID NO: 645576 - DNA, 54 bp, Artificial; identical to SEQ ID NO: 160391
  Synthetic oligonucleotide

SEQ ID NO: 645577 - DNA, 53 bp, Artificial; identical to SEQ ID NO: 190812
  Synthetic oligonucleotide

SEQ ID NO: 645578 - DNA, 60 bp, Artificial; identical to SEQ ID NO: 256886
  Synthetic oligonucleotide

SEQ ID NO: 645579 - DNA, 51 bp, Artificial; identical to SEQ ID NO: 255680
  Synthetic oligonucleotide

SEQ ID NO: 645580 - DNA, 55 bp, Artificial; identical to SEQ ID NO: 207117
  Synthetic oligonucleotide

SEQ ID NO: 645581 - DNA, 58 bp, Artificial; identical to SEQ ID NO: 179544
  Synthetic oligonucleotide

SEQ ID NO: 645582 - DNA, 50 bp, Artificial; identical to SEQ ID NO: 186898
  Synthetic oligonucleotide

SEQ ID NO: 645583 - DNA, 58 bp, Artificial; identical to SEQ ID NO: 179545
  Synthetic oligonucleotide

SEQ ID NO: 645584 - DNA, 51 bp, Artificial; identical to SEQ ID NO: 161896
  Synthetic oligonucleotide

SEQ ID NO: 645585 - DNA, 53 bp, Artificial; identical to SEQ ID NO: 185538
  Synthetic oligonucleotide

SEQ ID NO: 645586 - DNA, 55 bp, Artificial; identical to SEQ ID NO: 181604
  Synthetic oligonucleotide

SEQ ID NO: 645587 - DNA, 55 bp, Artificial; identical to SEQ ID NO: 181603
  Synthetic oligonucleotide

SEQ ID NO: 645588 - DNA, 55 bp, Artificial; identical to SEQ ID NO: 181602
  Synthetic oligonucleotide

SEQ ID NO: 645589 - DNA, 55 bp, Artificial; identical to SEQ ID NO: 203081
  Synthetic oligonucleotide

SEQ ID NO: 645590 - DNA, 59 bp, Artificial; identical to SEQ ID NO: 207006
  Synthetic oligonucleotide

SEQ ID NO: 645591 - DNA, 57 bp, Artificial; identical to SEQ ID NO: 243714
  Synthetic oligonucleotide

SEQ ID NO: 645592 - DNA, 53 bp, Artificial; identical to SEQ ID NO: 164888
  Synthetic oligonucleotide

SEQ ID NO: 645593 - DNA, 55 bp, Artificial; identical to SEQ ID NO: 242614
  Synthetic oligonucleotide

SEQ ID NO: 645594 - DNA, 56 bp, Artificial; identical to SEQ ID NO: 244743
  Synthetic oligonucleotide

SEQ ID NO: 645595 - DNA, 54 bp, Artificial; identical to SEQ ID NO: 153546
  Synthetic oligonucleotide

SEQ ID NO: 645596 - DNA, 55 bp, Artificial; identical to SEQ ID NO: 194541
  Synthetic oligonucleotide

SEQ ID NO: 645597 - DNA, 53 bp, Artificial; identical to SEQ ID NO: 266682
  Synthetic oligonucleotide

SEQ ID NO: 645598 - DNA, 56 bp, Artificial; identical to SEQ ID NO: 212460
  Synthetic oligonucleotide

SEQ ID NO: 645599 - DNA, 60 bp, Artificial; identical to SEQ ID NO: 179029
  Synthetic oligonucleotide

SEQ ID NO: 645600 - DNA, 55 bp, Artificial; identical to SEQ ID NO: 153360
  Synthetic oligonucleotide

SEQ ID NO: 645601 - DNA, 60 bp, Artificial; identical to SEQ ID NO: 194470
  Synthetic oligonucleotide

SEQ ID NO: 645602 - DNA, 55 bp, Artificial; identical to SEQ ID NO: 168668
  Synthetic oligonucleotide

SEQ ID NO: 645603 - DNA, 55 bp, Artificial; identical to SEQ ID NO: 171552
  Synthetic oligonucleotide

SEQ ID NO: 645604 - DNA, 60 bp, Artificial; identical to SEQ ID NO: 243715
  Synthetic oligonucleotide

SEQ ID NO: 645605 - DNA, 54 bp, Artificial; identical to SEQ ID NO: 199573
  Synthetic oligonucleotide

SEQ ID NO: 645606 - DNA, 52 bp, Artificial; identical to SEQ ID NO: 242612
  Synthetic oligonucleotide

SEQ ID NO: 645607 - DNA, 54 bp, Artificial; identical to SEQ ID NO: 164710
  Synthetic oligonucleotide

SEQ ID NO: 645608 - DNA, 53 bp, Artificial; identical to SEQ ID NO: 253276
  Synthetic oligonucleotide

SEQ ID NO: 645609 - DNA, 55 bp, Artificial; identical to SEQ ID NO: 147891
  Synthetic oligonucleotide

SEQ ID NO: 645610 - DNA, 53 bp, Artificial; identical to SEQ ID NO: 208698
  Synthetic oligonucleotide

SEQ ID NO: 645611 - DNA, 53 bp, Artificial; identical to SEQ ID NO: 243204
  Synthetic oligonucleotide

SEQ ID NO: 645612 - DNA, 54 bp, Artificial; identical to SEQ ID NO: 246200
  Synthetic oligonucleotide

SEQ ID NO: 645613 - DNA, 55 bp, Artificial; identical to SEQ ID NO: 163887
  Synthetic oligonucleotide

SEQ ID NO: 645614 - DNA, 56 bp, Artificial; identical to SEQ ID NO: 201918
  Synthetic oligonucleotide

SEQ ID NO: 645615 - DNA, 60 bp, Artificial; identical to SEQ ID NO: 200757
  Synthetic oligonucleotide

SEQ ID NO: 645616 - DNA, 60 bp, Artificial; identical to SEQ ID NO: 223817
  Synthetic oligonucleotide

SEQ ID NO: 645617 - DNA, 55 bp, Artificial; identical to SEQ ID NO: 162053
  Synthetic oligonucleotide

SEQ ID NO: 645618 - DNA, 51 bp, Artificial; identical to SEQ ID NO: 246708
  Synthetic oligonucleotide

SEQ ID NO: 645619 - DNA, 55 bp, Artificial; identical to SEQ ID NO: 147890
  Synthetic oligonucleotide

SEQ ID NO: 645620 - DNA, 60 bp, Artificial; identical to SEQ ID NO: 252842
  Synthetic oligonucleotide

SEQ ID NO: 645621 - DNA, 60 bp, Artificial; identical to SEQ ID NO: 194481
  Synthetic oligonucleotide

SEQ ID NO: 645622 - DNA, 55 bp, Artificial; identical to SEQ ID NO: 218241
  Synthetic oligonucleotide

SEQ ID NO: 645623 - DNA, 50 bp, Artificial; identical to SEQ ID NO: 233902
  Synthetic oligonucleotide

SEQ ID NO: 645624 - DNA, 50 bp, Artificial; identical to SEQ ID NO: 261985
  Synthetic oligonucleotide

SEQ ID NO: 645625 - DNA, 51 bp, Artificial; identical to SEQ ID NO: 186868
  Synthetic oligonucleotide

SEQ ID NO: 645626 - DNA, 52 bp, Artificial; identical to SEQ ID NO: 179023
  Synthetic oligonucleotide

SEQ ID NO: 645627 - DNA, 55 bp, Artificial; identical to SEQ ID NO: 181553
  Synthetic oligonucleotide

SEQ ID NO: 645628 - DNA, 55 bp, Artificial; identical to SEQ ID NO: 163886
  Synthetic oligonucleotide

SEQ ID NO: 645629 - DNA, 60 bp, Artificial; identical to SEQ ID NO: 237702
  Synthetic oligonucleotide

SEQ ID NO: 645630 - DNA, 55 bp, Artificial; identical to SEQ ID NO: 174274
  Synthetic oligonucleotide

SEQ ID NO: 645631 - DNA, 55 bp, Artificial; identical to SEQ ID NO: 155762
  Synthetic oligonucleotide

SEQ ID NO: 645632 - DNA, 52 bp, Artificial; identical to SEQ ID NO: 185923
  Synthetic oligonucleotide

SEQ ID NO: 645633 - DNA, 52 bp, Artificial; identical to SEQ ID NO: 201700
  Synthetic oligonucleotide

SEQ ID NO: 645634 - DNA, 55 bp, Artificial; identical to SEQ ID NO: 248834
  Synthetic oligonucleotide

SEQ ID NO: 645635 - DNA, 50 bp, Artificial; identical to SEQ ID NO: 243435
  Synthetic oligonucleotide

SEQ ID NO: 645636 - DNA, 59 bp, Artificial; identical to SEQ ID NO: 147068
  Synthetic oligonucleotide

SEQ ID NO: 645637 - DNA, 55 bp, Artificial; identical to SEQ ID NO: 151671
  Synthetic oligonucleotide

SEQ ID NO: 645638 - DNA, 58 bp, Artificial; identical to SEQ ID NO: 144562
  Synthetic oligonucleotide

SEQ ID NO: 645639 - DNA, 53 bp, Artificial; identical to SEQ ID NO: 179619
  Synthetic oligonucleotide

SEQ ID NO: 645640 - DNA, 51 bp, Artificial; identical to SEQ ID NO: 243372
  Synthetic oligonucleotide

SEQ ID NO: 645641 - DNA, 55 bp, Artificial; identical to SEQ ID NO: 252997
  Synthetic oligonucleotide

SEQ ID NO: 645642 - DNA, 54 bp, Artificial; identical to SEQ ID NO: 185061
  Synthetic oligonucleotide

SEQ ID NO: 645643 - DNA, 60 bp, Artificial; identical to SEQ ID NO: 179020
  Synthetic oligonucleotide

SEQ ID NO: 645644 - DNA, 51 bp, Artificial; identical to SEQ ID NO: 243375
  Synthetic oligonucleotide

SEQ ID NO: 645645 - DNA, 55 bp, Artificial; identical to SEQ ID NO: 144244
  Synthetic oligonucleotide

SEQ ID NO: 645646 - DNA, 60 bp, Artificial; identical to SEQ ID NO: 179018
  Synthetic oligonucleotide

SEQ ID NO: 645647 - DNA, 53 bp, Artificial; identical to SEQ ID NO: 164886
  Synthetic oligonucleotide

SEQ ID NO: 645648 - DNA, 55 bp, Artificial; identical to SEQ ID NO: 249603
  Synthetic oligonucleotide

SEQ ID NO: 645649 - DNA, 58 bp, Artificial; identical to SEQ ID NO: 256842
  Synthetic oligonucleotide

SEQ ID NO: 645650 - DNA, 57 bp, Artificial; identical to SEQ ID NO: 191724
  Synthetic oligonucleotide

SEQ ID NO: 645651 - DNA, 58 bp, Artificial; identical to SEQ ID NO: 243716
  Synthetic oligonucleotide

SEQ ID NO: 645652 - DNA, 54 bp, Artificial; identical to SEQ ID NO: 168189
  Synthetic oligonucleotide

SEQ ID NO: 645653 - DNA, 54 bp, Artificial; identical to SEQ ID NO: 197427
  Synthetic oligonucleotide

SEQ ID NO: 645654 - DNA, 60 bp, Artificial; identical to SEQ ID NO: 233490
  Synthetic oligonucleotide

SEQ ID NO: 645655 - DNA, 60 bp, Artificial; identical to SEQ ID NO: 179061
  Synthetic oligonucleotide

SEQ ID NO: 645656 - DNA, 60 bp, Artificial; identical to SEQ ID NO: 144551
  Synthetic oligonucleotide

SEQ ID NO: 645657 - DNA, 52 bp, Artificial; identical to SEQ ID NO: 185998
  Synthetic oligonucleotide

SEQ ID NO: 645658 - DNA, 55 bp, Artificial; identical to SEQ ID NO: 247711
  Synthetic oligonucleotide

SEQ ID NO: 645659 - DNA, 52 bp, Artificial; identical to SEQ ID NO: 197618
  Synthetic oligonucleotide

SEQ ID NO: 645660 - DNA, 55 bp, Artificial; identical to SEQ ID NO: 155764
  Synthetic oligonucleotide

SEQ ID NO: 645661 - DNA, 55 bp, Artificial; identical to SEQ ID NO: 155765
  Synthetic oligonucleotide

SEQ ID NO: 645662 - DNA, 58 bp, Artificial; identical to SEQ ID NO: 147198
  Synthetic oligonucleotide

SEQ ID NO: 645663 - DNA, 55 bp, Artificial; identical to SEQ ID NO: 239897
  Synthetic oligonucleotide

SEQ ID NO: 645664 - DNA, 58 bp, Artificial; identical to SEQ ID NO: 200796
  Synthetic oligonucleotide

SEQ ID NO: 645665 - DNA, 55 bp, Artificial; identical to SEQ ID NO: 190960
  Synthetic oligonucleotide

SEQ ID NO: 645666 - DNA, 60 bp, Artificial; identical to SEQ ID NO: 239095
  Synthetic oligonucleotide

SEQ ID NO: 645667 - DNA, 51 bp, Artificial; identical to SEQ ID NO: 161405
  Synthetic oligonucleotide

SEQ ID NO: 645668 - DNA, 52 bp, Artificial; identical to SEQ ID NO: 246407
  Synthetic oligonucleotide

SEQ ID NO: 645669 - DNA, 58 bp, Artificial; identical to SEQ ID NO: 257498
  Synthetic oligonucleotide

SEQ ID NO: 645670 - DNA, 55 bp, Artificial; identical to SEQ ID NO: 224816
  Synthetic oligonucleotide

SEQ ID NO: 645671 - DNA, 50 bp, Artificial; identical to SEQ ID NO: 176269
  Synthetic oligonucleotide

SEQ ID NO: 645672 - DNA, 60 bp, Artificial; identical to SEQ ID NO: 243717
  Synthetic oligonucleotide

SEQ ID NO: 645673 - DNA, 55 bp, Artificial; identical to SEQ ID NO: 155384
  Synthetic oligonucleotide

SEQ ID NO: 645674 - DNA, 51 bp, Artificial; identical to SEQ ID NO: 257060
  Synthetic oligonucleotide

SEQ ID NO: 645675 - DNA, 58 bp, Artificial; identical to SEQ ID NO: 141937
  Synthetic oligonucleotide

SEQ ID NO: 645676 - DNA, 60 bp, Artificial; identical to SEQ ID NO: 141757
  Synthetic oligonucleotide

SEQ ID NO: 645677 - DNA, 56 bp, Artificial; identical to SEQ ID NO: 244052
  Synthetic oligonucleotide

SEQ ID NO: 645678 - DNA, 55 bp, Artificial; identical to SEQ ID NO: 208510
  Synthetic oligonucleotide

SEQ ID NO: 645679 - DNA, 60 bp, Artificial; identical to SEQ ID NO: 238956
  Synthetic oligonucleotide

SEQ ID NO: 645680 - DNA, 53 bp, Artificial; identical to SEQ ID NO: 199733
  Synthetic oligonucleotide

SEQ ID NO: 645681 - DNA, 51 bp, Artificial; identical to SEQ ID NO: 257156
  Synthetic oligonucleotide

SEQ ID NO: 645682 - DNA, 54 bp, Artificial; identical to SEQ ID NO: 240600
  Synthetic oligonucleotide

SEQ ID NO: 645683 - DNA, 58 bp, Artificial; identical to SEQ ID NO: 170986
  Synthetic oligonucleotide

SEQ ID NO: 645684 - DNA, 55 bp, Artificial; identical to SEQ ID NO: 202212
  Synthetic oligonucleotide

SEQ ID NO: 645685 - DNA, 55 bp, Artificial; identical to SEQ ID NO: 242606
  Synthetic oligonucleotide

SEQ ID NO: 645686 - DNA, 54 bp, Artificial; identical to SEQ ID NO: 149245
  Synthetic oligonucleotide

SEQ ID NO: 645687 - DNA, 51 bp, Artificial; identical to SEQ ID NO: 186872
  Synthetic oligonucleotide

SEQ ID NO: 645688 - DNA, 55 bp, Artificial; identical to SEQ ID NO: 163885
  Synthetic oligonucleotide

SEQ ID NO: 645689 - DNA, 60 bp, Artificial; identical to SEQ ID NO: 238958
  Synthetic oligonucleotide

SEQ ID NO: 645690 - DNA, 52 bp, Artificial; identical to SEQ ID NO: 246406
  Synthetic oligonucleotide

SEQ ID NO: 645691 - DNA, 55 bp, Artificial; identical to SEQ ID NO: 254137
  Synthetic oligonucleotide

SEQ ID NO: 645692 - DNA, 60 bp, Artificial; identical to SEQ ID NO: 146991
  Synthetic oligonucleotide

SEQ ID NO: 645693 - DNA, 51 bp, Artificial; identical to SEQ ID NO: 253379
  Synthetic oligonucleotide

SEQ ID NO: 645694 - DNA, 51 bp, Artificial; identical to SEQ ID NO: 246700
  Synthetic oligonucleotide

SEQ ID NO: 645695 - DNA, 57 bp, Artificial; identical to SEQ ID NO: 159972
  Synthetic oligonucleotide

SEQ ID NO: 645696 - DNA, 55 bp, Artificial; identical to SEQ ID NO: 238283
  Synthetic oligonucleotide

SEQ ID NO: 645697 - DNA, 55 bp, Artificial; identical to SEQ ID NO: 147840
  Synthetic oligonucleotide

SEQ ID NO: 645698 - DNA, 60 bp, Artificial; identical to SEQ ID NO: 225124
  Synthetic oligonucleotide

SEQ ID NO: 645699 - DNA, 55 bp, Artificial; identical to SEQ ID NO: 181541
  Synthetic oligonucleotide

SEQ ID NO: 645700 - DNA, 60 bp, Artificial; identical to SEQ ID NO: 144529
  Synthetic oligonucleotide

SEQ ID NO: 645701 - DNA, 59 bp, Artificial; identical to SEQ ID NO: 179047
  Synthetic oligonucleotide

SEQ ID NO: 645702 - DNA, 55 bp, Artificial; identical to SEQ ID NO: 189044
  Synthetic oligonucleotide

SEQ ID NO: 645703 - DNA, 55 bp, Artificial; identical to SEQ ID NO: 168664
  Synthetic oligonucleotide

SEQ ID NO: 645704 - DNA, 55 bp, Artificial; identical to SEQ ID NO: 196159
  Synthetic oligonucleotide

SEQ ID NO: 645705 - DNA, 60 bp, Artificial; identical to SEQ ID NO: 146988
  Synthetic oligonucleotide

SEQ ID NO: 645706 - DNA, 52 bp, Artificial; identical to SEQ ID NO: 247925
  Synthetic oligonucleotide

SEQ ID NO: 645707 - DNA, 51 bp, Artificial; identical to SEQ ID NO: 208821
  Synthetic oligonucleotide

SEQ ID NO: 645708 - DNA, 54 bp, Artificial; identical to SEQ ID NO: 211505
  Synthetic oligonucleotide

SEQ ID NO: 645709 - DNA, 50 bp, Artificial; identical to SEQ ID NO: 187151
  Synthetic oligonucleotide

SEQ ID NO: 645710 - DNA, 60 bp, Artificial; identical to SEQ ID NO: 200794
  Synthetic oligonucleotide

SEQ ID NO: 645711 - DNA, 55 bp, Artificial; identical to SEQ ID NO: 155767
  Synthetic oligonucleotide

SEQ ID NO: 645712 - DNA, 59 bp, Artificial; identical to SEQ ID NO: 151302
  Synthetic oligonucleotide

SEQ ID NO: 645713 - DNA, 54 bp, Artificial; identical to SEQ ID NO: 188435
  Synthetic oligonucleotide

SEQ ID NO: 645714 - DNA, 55 bp, Artificial; identical to SEQ ID NO: 198368
  Synthetic oligonucleotide

SEQ ID NO: 645715 - DNA, 51 bp, Artificial; identical to SEQ ID NO: 200203
  Synthetic oligonucleotide

SEQ ID NO: 645716 - DNA, 55 bp, Artificial; identical to SEQ ID NO: 147839
  Synthetic oligonucleotide

SEQ ID NO: 645717 - DNA, 55 bp, Artificial; identical to SEQ ID NO: 215572
  Synthetic oligonucleotide

SEQ ID NO: 645718 - DNA, 60 bp, Artificial; identical to SEQ ID NO: 243663
  Synthetic oligonucleotide

SEQ ID NO: 645719 - DNA, 52 bp, Artificial; identical to SEQ ID NO: 238961
  Synthetic oligonucleotide

SEQ ID NO: 645720 - DNA, 55 bp, Artificial; identical to SEQ ID NO: 202214
  Synthetic oligonucleotide

SEQ ID NO: 645721 - DNA, 60 bp, Artificial; identical to SEQ ID NO: 203625
  Synthetic oligonucleotide

SEQ ID NO: 645722 - DNA, 50 bp, Artificial; identical to SEQ ID NO: 188621
  Synthetic oligonucleotide

SEQ ID NO: 645723 - DNA, 55 bp, Artificial; identical to SEQ ID NO: 238280
  Synthetic oligonucleotide

SEQ ID NO: 645724 - DNA, 53 bp, Artificial; identical to SEQ ID NO: 164882
  Synthetic oligonucleotide

SEQ ID NO: 645725 - DNA, 51 bp, Artificial; identical to SEQ ID NO: 149773
  Synthetic oligonucleotide

SEQ ID NO: 645726 - DNA, 55 bp, Artificial; identical to SEQ ID NO: 147838
  Synthetic oligonucleotide

SEQ ID NO: 645727 - DNA, 51 bp, Artificial; identical to SEQ ID NO: 205736
  Synthetic oligonucleotide

SEQ ID NO: 645728 - DNA, 55 bp, Artificial; identical to SEQ ID NO: 167510
  Synthetic oligonucleotide

SEQ ID NO: 645729 - DNA, 55 bp, Artificial; identical to SEQ ID NO: 160808
  Synthetic oligonucleotide

SEQ ID NO: 645730 - DNA, 50 bp, Artificial; identical to SEQ ID NO: 158138
  Synthetic oligonucleotide

SEQ ID NO: 645731 - DNA, 52 bp, Artificial; identical to SEQ ID NO: 186013
  Synthetic oligonucleotide

SEQ ID NO: 645732 - DNA, 59 bp, Artificial; identical to SEQ ID NO: 237703
  Synthetic oligonucleotide

SEQ ID NO: 645733 - DNA, 55 bp, Artificial; identical to SEQ ID NO: 224812
  Synthetic oligonucleotide

SEQ ID NO: 645734 - DNA, 55 bp, Artificial; identical to SEQ ID NO: 155768
  Synthetic oligonucleotide

SEQ ID NO: 645735 - DNA, 59 bp, Artificial; identical to SEQ ID NO: 217102
  Synthetic oligonucleotide

SEQ ID NO: 645736 - DNA, 55 bp, Artificial; identical to SEQ ID NO: 163882
  Synthetic oligonucleotide

SEQ ID NO: 645737 - DNA, 55 bp, Artificial; identical to SEQ ID NO: 244604
  Synthetic oligonucleotide

SEQ ID NO: 645738 - DNA, 60 bp, Artificial; identical to SEQ ID NO: 223850
  Synthetic oligonucleotide

SEQ ID NO: 645739 - DNA, 55 bp, Artificial; identical to SEQ ID NO: 153362
  Synthetic oligonucleotide

SEQ ID NO: 645740 - DNA, 52 bp, Artificial; identical to SEQ ID NO: 189139
  Synthetic oligonucleotide

SEQ ID NO: 645741 - DNA, 60 bp, Artificial; identical to SEQ ID NO: 146986
  Synthetic oligonucleotide

SEQ ID NO: 645742 - DNA, 55 bp, Artificial; identical to SEQ ID NO: 261874
  Synthetic oligonucleotide

SEQ ID NO: 645743 - DNA, 60 bp, Artificial; identical to SEQ ID NO: 252864
  Synthetic oligonucleotide

SEQ ID NO: 645744 - DNA, 59 bp, Artificial; identical to SEQ ID NO: 179284
  Synthetic oligonucleotide

SEQ ID NO: 645745 - DNA, 55 bp, Artificial; identical to SEQ ID NO: 166578
  Synthetic oligonucleotide

SEQ ID NO: 645746 - DNA, 55 bp, Artificial; identical to SEQ ID NO: 215165
  Synthetic oligonucleotide

SEQ ID NO: 645747 - DNA, 51 bp, Artificial; identical to SEQ ID NO: 149767
  Synthetic oligonucleotide

SEQ ID NO: 645748 - DNA, 53 bp, Artificial; identical to SEQ ID NO: 233805
  Synthetic oligonucleotide

SEQ ID NO: 645749 - DNA, 60 bp, Artificial; identical to SEQ ID NO: 146984
  Synthetic oligonucleotide

SEQ ID NO: 645750 - DNA, 51 bp, Artificial; identical to SEQ ID NO: 225255
  Synthetic oligonucleotide

SEQ ID NO: 645751 - DNA, 55 bp, Artificial; identical to SEQ ID NO: 244605
  Synthetic oligonucleotide

SEQ ID NO: 645752 - DNA, 58 bp, Artificial; identical to SEQ ID NO: 141941
  Synthetic oligonucleotide

SEQ ID NO: 645753 - DNA, 60 bp, Artificial; identical to SEQ ID NO: 146982
  Synthetic oligonucleotide

SEQ ID NO: 645754 - DNA, 51 bp, Artificial; identical to SEQ ID NO: 188521
  Synthetic oligonucleotide

SEQ ID NO: 645755 - DNA, 59 bp, Artificial; identical to SEQ ID NO: 243664
  Synthetic oligonucleotide

SEQ ID NO: 645756 - DNA, 51 bp, Artificial; identical to SEQ ID NO: 261601
  Synthetic oligonucleotide

SEQ ID NO: 645757 - DNA, 60 bp, Artificial; identical to SEQ ID NO: 217104
  Synthetic oligonucleotide

SEQ ID NO: 645758 - DNA, 55 bp, Artificial; identical to SEQ ID NO: 257551
  Synthetic oligonucleotide

SEQ ID NO: 645759 - DNA, 52 bp, Artificial; identical to SEQ ID NO: 186006
  Synthetic oligonucleotide

SEQ ID NO: 645760 - DNA, 60 bp, Artificial; identical to SEQ ID NO: 244676
  Synthetic oligonucleotide

SEQ ID NO: 645761 - DNA, 60 bp, Artificial; identical to SEQ ID NO: 237705
  Synthetic oligonucleotide

SEQ ID NO: 645762 - DNA, 55 bp, Artificial; identical to SEQ ID NO: 181578
  Synthetic oligonucleotide

SEQ ID NO: 645763 - DNA, 60 bp, Artificial; identical to SEQ ID NO: 233523
  Synthetic oligonucleotide

SEQ ID NO: 645764 - DNA, 53 bp, Artificial; identical to SEQ ID NO: 223563
  Synthetic oligonucleotide

SEQ ID NO: 645765 - DNA, 55 bp, Artificial; identical to SEQ ID NO: 209318
  Synthetic oligonucleotide

SEQ ID NO: 645766 - DNA, 60 bp, Artificial; identical to SEQ ID NO: 156088
  Synthetic oligonucleotide

SEQ ID NO: 645767 - DNA, 55 bp, Artificial; identical to SEQ ID NO: 188792
  Synthetic oligonucleotide

SEQ ID NO: 645768 - DNA, 50 bp, Artificial; identical to SEQ ID NO: 237310
  Synthetic oligonucleotide

SEQ ID NO: 645769 - DNA, 53 bp, Artificial; identical to SEQ ID NO: 146394
  Synthetic oligonucleotide

SEQ ID NO: 645770 - DNA, 60 bp, Artificial; identical to SEQ ID NO: 187218
  Synthetic oligonucleotide

SEQ ID NO: 645771 - DNA, 60 bp, Artificial; identical to SEQ ID NO: 179042
  Synthetic oligonucleotide

SEQ ID NO: 645772 - DNA, 53 bp, Artificial; identical to SEQ ID NO: 185510
  Synthetic oligonucleotide

SEQ ID NO: 645773 - DNA, 55 bp, Artificial; identical to SEQ ID NO: 242596
  Synthetic oligonucleotide

SEQ ID NO: 645774 - DNA, 59 bp, Artificial; identical to SEQ ID NO: 266081
  Synthetic oligonucleotide

SEQ ID NO: 645775 - DNA, 60 bp, Artificial; identical to SEQ ID NO: 238963
  Synthetic oligonucleotide

SEQ ID NO: 645776 - DNA, 54 bp, Artificial; identical to SEQ ID NO: 240567
  Synthetic oligonucleotide

SEQ ID NO: 645777 - DNA, 50 bp, Artificial; identical to SEQ ID NO: 241562
  Synthetic oligonucleotide

SEQ ID NO: 645778 - DNA, 55 bp, Artificial; identical to SEQ ID NO: 215166
  Synthetic oligonucleotide

SEQ ID NO: 645779 - DNA, 51 bp, Artificial; identical to SEQ ID NO: 159804
  Synthetic oligonucleotide

SEQ ID NO: 645780 - DNA, 60 bp, Artificial; identical to SEQ ID NO: 142681
  Synthetic oligonucleotide

SEQ ID NO: 645781 - DNA, 55 bp, Artificial; identical to SEQ ID NO: 242595
  Synthetic oligonucleotide

SEQ ID NO: 645782 - DNA, 50 bp, Artificial; identical to SEQ ID NO: 200422
  Synthetic oligonucleotide

SEQ ID NO: 645783 - DNA, 50 bp, Artificial; identical to SEQ ID NO: 189262
  Synthetic oligonucleotide

SEQ ID NO: 645784 - DNA, 55 bp, Artificial; identical to SEQ ID NO: 181575
  Synthetic oligonucleotide

SEQ ID NO: 645785 - DNA, 51 bp, Artificial; identical to SEQ ID NO: 169070
  Synthetic oligonucleotide

SEQ ID NO: 645786 - DNA, 55 bp, Artificial; identical to SEQ ID NO: 219680
  Synthetic oligonucleotide

SEQ ID NO: 645787 - DNA, 55 bp, Artificial; identical to SEQ ID NO: 198365
  Synthetic oligonucleotide

SEQ ID NO: 645788 - DNA, 54 bp, Artificial; identical to SEQ ID NO: 240585
  Synthetic oligonucleotide

SEQ ID NO: 645789 - DNA, 60 bp, Artificial; identical to SEQ ID NO: 179040
  Synthetic oligonucleotide

SEQ ID NO: 645790 - DNA, 55 bp, Artificial; identical to SEQ ID NO: 217521
  Synthetic oligonucleotide

SEQ ID NO: 645791 - DNA, 53 bp, Artificial; identical to SEQ ID NO: 185473
  Synthetic oligonucleotide

SEQ ID NO: 645792 - DNA, 60 bp, Artificial; identical to SEQ ID NO: 238967
  Synthetic oligonucleotide

SEQ ID NO: 645793 - DNA, 60 bp, Artificial; identical to SEQ ID NO: 200790
  Synthetic oligonucleotide

SEQ ID NO: 645794 - DNA, 59 bp, Artificial; identical to SEQ ID NO: 142680
  Synthetic oligonucleotide

SEQ ID NO: 645795 - DNA, 52 bp, Artificial; identical to SEQ ID NO: 209673
  Synthetic oligonucleotide

SEQ ID NO: 645796 - DNA, 59 bp, Artificial; identical to SEQ ID NO: 146980
  Synthetic oligonucleotide

SEQ ID NO: 645797 - DNA, 57 bp, Artificial; identical to SEQ ID NO: 166018
  Synthetic oligonucleotide

SEQ ID NO: 645798 - DNA, 54 bp, Artificial; identical to SEQ ID NO: 197424
  Synthetic oligonucleotide

SEQ ID NO: 645799 - DNA, 55 bp, Artificial; identical to SEQ ID NO: 171755
  Synthetic oligonucleotide

SEQ ID NO: 645800 - DNA, 53 bp, Artificial; identical to SEQ ID NO: 147246
  Synthetic oligonucleotide

SEQ ID NO: 645801 - DNA, 60 bp, Artificial; identical to SEQ ID NO: 266020
  Synthetic oligonucleotide

SEQ ID NO: 645802 - DNA, 55 bp, Artificial; identical to SEQ ID NO: 211264
  Synthetic oligonucleotide

SEQ ID NO: 645803 - DNA, 55 bp, Artificial; identical to SEQ ID NO: 238970
  Synthetic oligonucleotide

SEQ ID NO: 645804 - DNA, 55 bp, Artificial; identical to SEQ ID NO: 143723
  Synthetic oligonucleotide

SEQ ID NO: 645805 - DNA, 53 bp, Artificial; identical to SEQ ID NO: 167305
  Synthetic oligonucleotide

SEQ ID NO: 645806 - DNA, 55 bp, Artificial; identical to SEQ ID NO: 233447
  Synthetic oligonucleotide

SEQ ID NO: 645807 - DNA, 55 bp, Artificial; identical to SEQ ID NO: 218238
  Synthetic oligonucleotide

SEQ ID NO: 645808 - DNA, 57 bp, Artificial; identical to SEQ ID NO: 179589
  Synthetic oligonucleotide

SEQ ID NO: 645809 - DNA, 55 bp, Artificial; identical to SEQ ID NO: 193566
  Synthetic oligonucleotide

SEQ ID NO: 645810 - DNA, 52 bp, Artificial; identical to SEQ ID NO: 149217
  Synthetic oligonucleotide

SEQ ID NO: 645811 - DNA, 50 bp, Artificial; identical to SEQ ID NO: 150228
  Synthetic oligonucleotide

SEQ ID NO: 645812 - DNA, 52 bp, Artificial; identical to SEQ ID NO: 247923
  Synthetic oligonucleotide

SEQ ID NO: 645813 - DNA, 55 bp, Artificial; identical to SEQ ID NO: 244557
  Synthetic oligonucleotide

SEQ ID NO: 645814 - DNA, 58 bp, Artificial; identical to SEQ ID NO: 201907
  Synthetic oligonucleotide

SEQ ID NO: 645815 - DNA, 55 bp, Artificial; identical to SEQ ID NO: 198363
  Synthetic oligonucleotide

SEQ ID NO: 645816 - DNA, 53 bp, Artificial; identical to SEQ ID NO: 254138
  Synthetic oligonucleotide

SEQ ID NO: 645817 - DNA, 54 bp, Artificial; identical to SEQ ID NO: 149219
  Synthetic oligonucleotide

SEQ ID NO: 645818 - DNA, 55 bp, Artificial; identical to SEQ ID NO: 174673
  Synthetic oligonucleotide

SEQ ID NO: 645819 - DNA, 50 bp, Artificial; identical to SEQ ID NO: 241571
  Synthetic oligonucleotide

SEQ ID NO: 645820 - DNA, 55 bp, Artificial; identical to SEQ ID NO: 154072
  Synthetic oligonucleotide

SEQ ID NO: 645821 - DNA, 58 bp, Artificial; identical to SEQ ID NO: 237706
  Synthetic oligonucleotide

SEQ ID NO: 645822 - DNA, 60 bp, Artificial; identical to SEQ ID NO: 200789
  Synthetic oligonucleotide

SEQ ID NO: 645823 - DNA, 58 bp, Artificial; identical to SEQ ID NO: 179175
  Synthetic oligonucleotide

SEQ ID NO: 645824 - DNA, 55 bp, Artificial; identical to SEQ ID NO: 244560
  Synthetic oligonucleotide

SEQ ID NO: 645825 - DNA, 58 bp, Artificial; identical to SEQ ID NO: 252876
  Synthetic oligonucleotide

SEQ ID NO: 645826 - DNA, 55 bp, Artificial; identical to SEQ ID NO: 240010
  Synthetic oligonucleotide

SEQ ID NO: 645827 - DNA, 55 bp, Artificial; identical to SEQ ID NO: 142144
  Synthetic oligonucleotide

SEQ ID NO: 645828 - DNA, 54 bp, Artificial; identical to SEQ ID NO: 233784
  Synthetic oligonucleotide

SEQ ID NO: 645829 - DNA, 57 bp, Artificial; identical to SEQ ID NO: 201458
  Synthetic oligonucleotide

SEQ ID NO: 645830 - DNA, 60 bp, Artificial; identical to SEQ ID NO: 244632
  Synthetic oligonucleotide

SEQ ID NO: 645831 - DNA, 55 bp, Artificial; identical to SEQ ID NO: 147832
  Synthetic oligonucleotide

SEQ ID NO: 645832 - DNA, 60 bp, Artificial; identical to SEQ ID NO: 200788
  Synthetic oligonucleotide

SEQ ID NO: 645833 - DNA, 55 bp, Artificial; identical to SEQ ID NO: 211263
  Synthetic oligonucleotide

SEQ ID NO: 645834 - DNA, 60 bp, Artificial; identical to SEQ ID NO: 170990
  Synthetic oligonucleotide

SEQ ID NO: 645835 - DNA, 55 bp, Artificial; identical to SEQ ID NO: 203078
  Synthetic oligonucleotide

SEQ ID NO: 645836 - DNA, 50 bp, Artificial; identical to SEQ ID NO: 165892
  Synthetic oligonucleotide

SEQ ID NO: 645837 - DNA, 55 bp, Artificial; identical to SEQ ID NO: 181569
  Synthetic oligonucleotide

SEQ ID NO: 645838 - DNA, 60 bp, Artificial; identical to SEQ ID NO: 207211
  Synthetic oligonucleotide

SEQ ID NO: 645839 - DNA, 55 bp, Artificial; identical to SEQ ID NO: 238973
  Synthetic oligonucleotide

SEQ ID NO: 645840 - DNA, 56 bp, Artificial; identical to SEQ ID NO: 238974
  Synthetic oligonucleotide

SEQ ID NO: 645841 - DNA, 50 bp, Artificial; identical to SEQ ID NO: 176300
  Synthetic oligonucleotide

SEQ ID NO: 645842 - DNA, 60 bp, Artificial; identical to SEQ ID NO: 238975
  Synthetic oligonucleotide

SEQ ID NO: 645843 - DNA, 51 bp, Artificial; identical to SEQ ID NO: 200162
  Synthetic oligonucleotide

SEQ ID NO: 645844 - DNA, 51 bp, Artificial; identical to SEQ ID NO: 186796
  Synthetic oligonucleotide

SEQ ID NO: 645845 - DNA, 52 bp, Artificial; identical to SEQ ID NO: 240902
  Synthetic oligonucleotide

SEQ ID NO: 645846 - DNA, 56 bp, Artificial; identical to SEQ ID NO: 146978
  Synthetic oligonucleotide

SEQ ID NO: 645847 - DNA, 53 bp, Artificial; identical to SEQ ID NO: 161303
  Synthetic oligonucleotide

SEQ ID NO: 645848 - DNA, 52 bp, Artificial; identical to SEQ ID NO: 174882
  Synthetic oligonucleotide

SEQ ID NO: 645849 - DNA, 59 bp, Artificial; identical to SEQ ID NO: 146977
  Synthetic oligonucleotide

SEQ ID NO: 645850 - DNA, 60 bp, Artificial; identical to SEQ ID NO: 179173
  Synthetic oligonucleotide

SEQ ID NO: 645851 - DNA, 52 bp, Artificial; identical to SEQ ID NO: 189143
  Synthetic oligonucleotide

SEQ ID NO: 645852 - DNA, 60 bp, Artificial; identical to SEQ ID NO: 179172
  Synthetic oligonucleotide

SEQ ID NO: 645853 - DNA, 54 bp, Artificial; identical to SEQ ID NO: 142679
  Synthetic oligonucleotide

SEQ ID NO: 645854 - DNA, 51 bp, Artificial; identical to SEQ ID NO: 247998
  Synthetic oligonucleotide

SEQ ID NO: 645855 - DNA, 55 bp, Artificial; identical to SEQ ID NO: 207153
  Synthetic oligonucleotide

SEQ ID NO: 645856 - DNA, 56 bp, Artificial; identical to SEQ ID NO: 179169
  Synthetic oligonucleotide

SEQ ID NO: 645857 - DNA, 55 bp, Artificial; identical to SEQ ID NO: 160998
  Synthetic oligonucleotide

SEQ ID NO: 645858 - DNA, 52 bp, Artificial; identical to SEQ ID NO: 144243
  Synthetic oligonucleotide

SEQ ID NO: 645859 - DNA, 55 bp, Artificial; identical to SEQ ID NO: 265937
  Synthetic oligonucleotide

SEQ ID NO: 645860 - DNA, 57 bp, Artificial; identical to SEQ ID NO: 203636
  Synthetic oligonucleotide

SEQ ID NO: 645861 - DNA, 57 bp, Artificial; identical to SEQ ID NO: 238976
  Synthetic oligonucleotide

SEQ ID NO: 645862 - DNA, 60 bp, Artificial; identical to SEQ ID NO: 244599
  Synthetic oligonucleotide

SEQ ID NO: 645863 - DNA, 60 bp, Artificial; identical to SEQ ID NO: 200785
  Synthetic oligonucleotide

SEQ ID NO: 645864 - DNA, 55 bp, Artificial; identical to SEQ ID NO: 257547
  Synthetic oligonucleotide

SEQ ID NO: 645865 - DNA, 52 bp, Artificial; identical to SEQ ID NO: 246411
  Synthetic oligonucleotide

SEQ ID NO: 645866 - DNA, 55 bp, Artificial; identical to SEQ ID NO: 207152
  Synthetic oligonucleotide

SEQ ID NO: 645867 - DNA, 51 bp, Artificial; identical to SEQ ID NO: 236487
  Synthetic oligonucleotide

SEQ ID NO: 645868 - DNA, 55 bp, Artificial; identical to SEQ ID NO: 259000
  Synthetic oligonucleotide

SEQ ID NO: 645869 - DNA, 55 bp, Artificial; identical to SEQ ID NO: 202222
  Synthetic oligonucleotide

SEQ ID NO: 645870 - DNA, 60 bp, Artificial; identical to SEQ ID NO: 243667
  Synthetic oligonucleotide

SEQ ID NO: 645871 - DNA, 58 bp, Artificial; identical to SEQ ID NO: 167237
  Synthetic oligonucleotide

SEQ ID NO: 645872 - DNA, 54 bp, Artificial; identical to SEQ ID NO: 243061
  Synthetic oligonucleotide

SEQ ID NO: 645873 - DNA, 55 bp, Artificial; identical to SEQ ID NO: 181568
  Synthetic oligonucleotide

SEQ ID NO: 645874 - DNA, 58 bp, Artificial; identical to SEQ ID NO: 151125
  Synthetic oligonucleotide

SEQ ID NO: 645875 - DNA, 52 bp, Artificial; identical to SEQ ID NO: 160479
  Synthetic oligonucleotide

SEQ ID NO: 645876 - DNA, 53 bp, Artificial; identical to SEQ ID NO: 212959
  Synthetic oligonucleotide

SEQ ID NO: 645877 - DNA, 53 bp, Artificial; identical to SEQ ID NO: 151124
  Synthetic oligonucleotide

SEQ ID NO: 645878 - DNA, 58 bp, Artificial; identical to SEQ ID NO: 179599
  Synthetic oligonucleotide

SEQ ID NO: 645879 - DNA, 55 bp, Artificial; identical to SEQ ID NO: 163877
  Synthetic oligonucleotide

SEQ ID NO: 645880 - DNA, 54 bp, Artificial; identical to SEQ ID NO: 191690
  Synthetic oligonucleotide

SEQ ID NO: 645881 - DNA, 51 bp, Artificial; identical to SEQ ID NO: 216822
  Synthetic oligonucleotide

SEQ ID NO: 645882 - DNA, 56 bp, Artificial; identical to SEQ ID NO: 243983
  Synthetic oligonucleotide

SEQ ID NO: 645883 - DNA, 53 bp, Artificial; identical to SEQ ID NO: 157314
  Synthetic oligonucleotide

SEQ ID NO: 645884 - DNA, 53 bp, Artificial; identical to SEQ ID NO: 199727
  Synthetic oligonucleotide

SEQ ID NO: 645885 - DNA, 60 bp, Artificial; identical to SEQ ID NO: 254056
  Synthetic oligonucleotide

SEQ ID NO: 645886 - DNA, 60 bp, Artificial; identical to SEQ ID NO: 212457
  Synthetic oligonucleotide

SEQ ID NO: 645887 - DNA, 60 bp, Artificial; identical to SEQ ID NO: 191679
  Synthetic oligonucleotide

SEQ ID NO: 645888 - DNA, 56 bp, Artificial; identical to SEQ ID NO: 210526
  Synthetic oligonucleotide

SEQ ID NO: 645889 - DNA, 55 bp, Artificial; identical to SEQ ID NO: 203694
  Synthetic oligonucleotide

SEQ ID NO: 645890 - DNA, 52 bp, Artificial; identical to SEQ ID NO: 221750
  Synthetic oligonucleotide

SEQ ID NO: 645891 - DNA, 53 bp, Artificial; identical to SEQ ID NO: 243194
  Synthetic oligonucleotide

SEQ ID NO: 645892 - DNA, 59 bp, Artificial; identical to SEQ ID NO: 243670
  Synthetic oligonucleotide

SEQ ID NO: 645893 - DNA, 60 bp, Artificial; identical to SEQ ID NO: 141615
  Synthetic oligonucleotide

SEQ ID NO: 645894 - DNA, 52 bp, Artificial; identical to SEQ ID NO: 246414
  Synthetic oligonucleotide

SEQ ID NO: 645895 - DNA, 59 bp, Artificial; identical to SEQ ID NO: 254045
  Synthetic oligonucleotide

SEQ ID NO: 645896 - DNA, 55 bp, Artificial; identical to SEQ ID NO: 254023
  Synthetic oligonucleotide

SEQ ID NO: 645897 - DNA, 52 bp, Artificial; identical to SEQ ID NO: 199901
  Synthetic oligonucleotide

SEQ ID NO: 645898 - DNA, 58 bp, Artificial; identical to SEQ ID NO: 194537
  Synthetic oligonucleotide

SEQ ID NO: 645899 - DNA, 55 bp, Artificial; identical to SEQ ID NO: 198297
  Synthetic oligonucleotide

SEQ ID NO: 645900 - DNA, 53 bp, Artificial; identical to SEQ ID NO: 185643
  Synthetic oligonucleotide

SEQ ID NO: 645901 - DNA, 55 bp, Artificial; identical to SEQ ID NO: 155771
  Synthetic oligonucleotide

SEQ ID NO: 645902 - DNA, 60 bp, Artificial; identical to SEQ ID NO: 179163
  Synthetic oligonucleotide

SEQ ID NO: 645903 - DNA, 58 bp, Artificial; identical to SEQ ID NO: 209750
  Synthetic oligonucleotide

SEQ ID NO: 645904 - DNA, 52 bp, Artificial; identical to SEQ ID NO: 216706
  Synthetic oligonucleotide

SEQ ID NO: 645905 - DNA, 59 bp, Artificial; identical to SEQ ID NO: 179162
  Synthetic oligonucleotide

SEQ ID NO: 645906 - DNA, 60 bp, Artificial; identical to SEQ ID NO: 187214
  Synthetic oligonucleotide

SEQ ID NO: 645907 - DNA, 58 bp, Artificial; identical to SEQ ID NO: 187213
  Synthetic oligonucleotide

SEQ ID NO: 645908 - DNA, 58 bp, Artificial; identical to SEQ ID NO: 162059
  Synthetic oligonucleotide

SEQ ID NO: 645909 - DNA, 54 bp, Artificial; identical to SEQ ID NO: 243067
  Synthetic oligonucleotide

SEQ ID NO: 645910 - DNA, 60 bp, Artificial; identical to SEQ ID NO: 223872
  Synthetic oligonucleotide

SEQ ID NO: 645911 - DNA, 55 bp, Artificial; identical to SEQ ID NO: 248527
  Synthetic oligonucleotide

SEQ ID NO: 645912 - DNA, 60 bp, Artificial; identical to SEQ ID NO: 238931
  Synthetic oligonucleotide

SEQ ID NO: 645913 - DNA, 55 bp, Artificial; identical to SEQ ID NO: 248831
  Synthetic oligonucleotide

SEQ ID NO: 645914 - DNA, 60 bp, Artificial; identical to SEQ ID NO: 238932
  Synthetic oligonucleotide

SEQ ID NO: 645915 - DNA, 55 bp, Artificial; identical to SEQ ID NO: 196257
  Synthetic oligonucleotide

SEQ ID NO: 645916 - DNA, 55 bp, Artificial; identical to SEQ ID NO: 257540
  Synthetic oligonucleotide

SEQ ID NO: 645917 - DNA, 60 bp, Artificial; identical to SEQ ID NO: 200781
  Synthetic oligonucleotide

SEQ ID NO: 645918 - DNA, 55 bp, Artificial; identical to SEQ ID NO: 168646
  Synthetic oligonucleotide

SEQ ID NO: 645919 - DNA, 58 bp, Artificial; identical to SEQ ID NO: 225147
  Synthetic oligonucleotide

SEQ ID NO: 645920 - DNA, 55 bp, Artificial; identical to SEQ ID NO: 171754
  Synthetic oligonucleotide

SEQ ID NO: 645921 - DNA, 54 bp, Artificial; identical to SEQ ID NO: 141209
  Synthetic oligonucleotide

SEQ ID NO: 645922 - DNA, 60 bp, Artificial; identical to SEQ ID NO: 244554
  Synthetic oligonucleotide

SEQ ID NO: 645923 - DNA, 51 bp, Artificial; identical to SEQ ID NO: 149788
  Synthetic oligonucleotide

SEQ ID NO: 645924 - DNA, 55 bp, Artificial; identical to SEQ ID NO: 221388
  Synthetic oligonucleotide

SEQ ID NO: 645925 - DNA, 50 bp, Artificial; identical to SEQ ID NO: 162388
  Synthetic oligonucleotide

SEQ ID NO: 645926 - DNA, 58 bp, Artificial; identical to SEQ ID NO: 248526
  Synthetic oligonucleotide

SEQ ID NO: 645927 - DNA, 59 bp, Artificial; identical to SEQ ID NO: 202495
  Synthetic oligonucleotide

SEQ ID NO: 645928 - DNA, 60 bp, Artificial; identical to SEQ ID NO: 155486
  Synthetic oligonucleotide

SEQ ID NO: 645929 - DNA, 58 bp, Artificial; identical to SEQ ID NO: 201455
  Synthetic oligonucleotide

SEQ ID NO: 645930 - DNA, 58 bp, Artificial; identical to SEQ ID NO: 244532
  Synthetic oligonucleotide

SEQ ID NO: 645931 - DNA, 55 bp, Artificial; identical to SEQ ID NO: 174674
  Synthetic oligonucleotide

SEQ ID NO: 645932 - DNA, 60 bp, Artificial; identical to SEQ ID NO: 156254
  Synthetic oligonucleotide

SEQ ID NO: 645933 - DNA, 55 bp, Artificial; identical to SEQ ID NO: 198296
  Synthetic oligonucleotide

SEQ ID NO: 645934 - DNA, 58 bp, Artificial; identical to SEQ ID NO: 239229
  Synthetic oligonucleotide

SEQ ID NO: 645935 - DNA, 60 bp, Artificial; identical to SEQ ID NO: 200780
  Synthetic oligonucleotide

SEQ ID NO: 645936 - DNA, 55 bp, Artificial; identical to SEQ ID NO: 147861
  Synthetic oligonucleotide

SEQ ID NO: 645937 - DNA, 60 bp, Artificial; identical to SEQ ID NO: 141620
  Synthetic oligonucleotide

SEQ ID NO: 645938 - DNA, 56 bp, Artificial; identical to SEQ ID NO: 243672
  Synthetic oligonucleotide

SEQ ID NO: 645939 - DNA, 51 bp, Artificial; identical to SEQ ID NO: 215219
  Synthetic oligonucleotide

SEQ ID NO: 645940 - DNA, 55 bp, Artificial; identical to SEQ ID NO: 160195
  Synthetic oligonucleotide

SEQ ID NO: 645941 - DNA, 51 bp, Artificial; identical to SEQ ID NO: 200153
  Synthetic oligonucleotide

SEQ ID NO: 645942 - DNA, 55 bp, Artificial; identical to SEQ ID NO: 194543
  Synthetic oligonucleotide

SEQ ID NO: 645943 - DNA, 55 bp, Artificial; identical to SEQ ID NO: 144855
  Synthetic oligonucleotide

SEQ ID NO: 645944 - DNA, 60 bp, Artificial; identical to SEQ ID NO: 207266
  Synthetic oligonucleotide

SEQ ID NO: 645945 - DNA, 55 bp, Artificial; identical to SEQ ID NO: 202230
  Synthetic oligonucleotide

SEQ ID NO: 645946 - DNA, 55 bp, Artificial; identical to SEQ ID NO: 221384
  Synthetic oligonucleotide

SEQ ID NO: 645947 - DNA, 55 bp, Artificial; identical to SEQ ID NO: 160198
  Synthetic oligonucleotide

SEQ ID NO: 645948 - DNA, 55 bp, Artificial; identical to SEQ ID NO: 174675
  Synthetic oligonucleotide

SEQ ID NO: 645949 - DNA, 52 bp, Artificial; identical to SEQ ID NO: 246421
  Synthetic oligonucleotide

SEQ ID NO: 645950 - DNA, 53 bp, Artificial; identical to SEQ ID NO: 157315
  Synthetic oligonucleotide

SEQ ID NO: 645951 - DNA, 53 bp, Artificial; identical to SEQ ID NO: 168893
  Synthetic oligonucleotide

SEQ ID NO: 645952 - DNA, 55 bp, Artificial; identical to SEQ ID NO: 248891
  Synthetic oligonucleotide

SEQ ID NO: 645953 - DNA, 52 bp, Artificial; identical to SEQ ID NO: 149534
  Synthetic oligonucleotide

SEQ ID NO: 645954 - DNA, 53 bp, Artificial; identical to SEQ ID NO: 152266
  Synthetic oligonucleotide

SEQ ID NO: 645955 - DNA, 51 bp, Artificial; identical to SEQ ID NO: 186750
  Synthetic oligonucleotide

SEQ ID NO: 645956 - DNA, 55 bp, Artificial; identical to SEQ ID NO: 160807
  Synthetic oligonucleotide

SEQ ID NO: 645957 - DNA, 55 bp, Artificial; identical to SEQ ID NO: 207141
  Synthetic oligonucleotide

SEQ ID NO: 645958 - DNA, 55 bp, Artificial; identical to SEQ ID NO: 151790
  Synthetic oligonucleotide

SEQ ID NO: 645959 - DNA, 50 bp, Artificial; identical to SEQ ID NO: 202656
  Synthetic oligonucleotide

SEQ ID NO: 645960 - DNA, 59 bp, Artificial; identical to SEQ ID NO: 253967
  Synthetic oligonucleotide

SEQ ID NO: 645961 - DNA, 60 bp, Artificial; identical to SEQ ID NO: 179198
  Synthetic oligonucleotide

SEQ ID NO: 645962 - DNA, 55 bp, Artificial; identical to SEQ ID NO: 239973
  Synthetic oligonucleotide

SEQ ID NO: 645963 - DNA, 51 bp, Artificial; identical to SEQ ID NO: 189633
  Synthetic oligonucleotide

SEQ ID NO: 645964 - DNA, 60 bp, Artificial; identical to SEQ ID NO: 187158
  Synthetic oligonucleotide

SEQ ID NO: 645965 - DNA, 55 bp, Artificial; identical to SEQ ID NO: 244674
  Synthetic oligonucleotide

SEQ ID NO: 645966 - DNA, 53 bp, Artificial; identical to SEQ ID NO: 223559
  Synthetic oligonucleotide

SEQ ID NO: 645967 - DNA, 58 bp, Artificial; identical to SEQ ID NO: 147121
  Synthetic oligonucleotide

SEQ ID NO: 645968 - DNA, 57 bp, Artificial; identical to SEQ ID NO: 144343
  Synthetic oligonucleotide

SEQ ID NO: 645969 - DNA, 54 bp, Artificial; identical to SEQ ID NO: 142729
  Synthetic oligonucleotide

SEQ ID NO: 645970 - DNA, 55 bp, Artificial; identical to SEQ ID NO: 171518
  Synthetic oligonucleotide

SEQ ID NO: 645971 - DNA, 58 bp, Artificial; identical to SEQ ID NO: 166009
  Synthetic oligonucleotide

SEQ ID NO: 645972 - DNA, 60 bp, Artificial; identical to SEQ ID NO: 203647
  Synthetic oligonucleotide

SEQ ID NO: 645973 - DNA, 55 bp, Artificial; identical to SEQ ID NO: 198291
  Synthetic oligonucleotide

SEQ ID NO: 645974 - DNA, 56 bp, Artificial; identical to SEQ ID NO: 239296
  Synthetic oligonucleotide

SEQ ID NO: 645975 - DNA, 55 bp, Artificial; identical to SEQ ID NO: 244351
  Synthetic oligonucleotide

SEQ ID NO: 645976 - DNA, 55 bp, Artificial; identical to SEQ ID NO: 225093
  Synthetic oligonucleotide

SEQ ID NO: 645977 - DNA, 55 bp, Artificial; identical to SEQ ID NO: 181562
  Synthetic oligonucleotide

SEQ ID NO: 645978 - DNA, 53 bp, Artificial; identical to SEQ ID NO: 185633
  Synthetic oligonucleotide

SEQ ID NO: 645979 - DNA, 52 bp, Artificial; identical to SEQ ID NO: 160476
  Synthetic oligonucleotide

SEQ ID NO: 645980 - DNA, 52 bp, Artificial; identical to SEQ ID NO: 223658
  Synthetic oligonucleotide

SEQ ID NO: 645981 - DNA, 54 bp, Artificial; identical to SEQ ID NO: 199588
  Synthetic oligonucleotide

SEQ ID NO: 645982 - DNA, 60 bp, Artificial; identical to SEQ ID NO: 179196
  Synthetic oligonucleotide

SEQ ID NO: 645983 - DNA, 55 bp, Artificial; identical to SEQ ID NO: 202175
  Synthetic oligonucleotide

SEQ ID NO: 645984 - DNA, 53 bp, Artificial; identical to SEQ ID NO: 225220
  Synthetic oligonucleotide

SEQ ID NO: 645985 - DNA, 57 bp, Artificial; identical to SEQ ID NO: 179874
  Synthetic oligonucleotide

SEQ ID NO: 645986 - DNA, 54 bp, Artificial; identical to SEQ ID NO: 164751
  Synthetic oligonucleotide

SEQ ID NO: 645987 - DNA, 55 bp, Artificial; identical to SEQ ID NO: 155775
  Synthetic oligonucleotide

SEQ ID NO: 645988 - DNA, 60 bp, Artificial; identical to SEQ ID NO: 167713
  Synthetic oligonucleotide

SEQ ID NO: 645989 - DNA, 60 bp, Artificial; identical to SEQ ID NO: 203658
  Synthetic oligonucleotide

SEQ ID NO: 645990 - DNA, 58 bp, Artificial; identical to SEQ ID NO: 203374
  Synthetic oligonucleotide

SEQ ID NO: 645991 - DNA, 60 bp, Artificial; identical to SEQ ID NO: 267330
  Synthetic oligonucleotide

SEQ ID NO: 645992 - DNA, 55 bp, Artificial; identical to SEQ ID NO: 181687
  Synthetic oligonucleotide

SEQ ID NO: 645993 - DNA, 55 bp, Artificial; identical to SEQ ID NO: 147854
  Synthetic oligonucleotide

SEQ ID NO: 645994 - DNA, 55 bp, Artificial; identical to SEQ ID NO: 207092
  Synthetic oligonucleotide

SEQ ID NO: 645995 - DNA, 60 bp, Artificial; identical to SEQ ID NO: 248522
  Synthetic oligonucleotide

SEQ ID NO: 645996 - DNA, 52 bp, Artificial; identical to SEQ ID NO: 187374
  Synthetic oligonucleotide

SEQ ID NO: 645997 - DNA, 55 bp, Artificial; identical to SEQ ID NO: 181686
  Synthetic oligonucleotide

SEQ ID NO: 645998 - DNA, 55 bp, Artificial; identical to SEQ ID NO: 142146
  Synthetic oligonucleotide

SEQ ID NO: 645999 - DNA, 60 bp, Artificial; identical to SEQ ID NO: 222865
  Synthetic oligonucleotide

SEQ ID NO: 646000 - DNA, 52 bp, Artificial; identical to SEQ ID NO: 179186
  Synthetic oligonucleotide

SEQ ID NO: 646001 - DNA, 60 bp, Artificial; identical to SEQ ID NO: 200778
  Synthetic oligonucleotide

SEQ ID NO: 646002 - DNA, 57 bp, Artificial; identical to SEQ ID NO: 168192
  Synthetic oligonucleotide

SEQ ID NO: 646003 - DNA, 52 bp, Artificial; identical to SEQ ID NO: 216696
  Synthetic oligonucleotide

SEQ ID NO: 646004 - DNA, 55 bp, Artificial; identical to SEQ ID NO: 198289
  Synthetic oligonucleotide

SEQ ID NO: 646005 - DNA, 57 bp, Artificial; identical to SEQ ID NO: 208080
  Synthetic oligonucleotide

SEQ ID NO: 646006 - DNA, 53 bp, Artificial; identical to SEQ ID NO: 236999
  Synthetic oligonucleotide

SEQ ID NO: 646007 - DNA, 53 bp, Artificial; identical to SEQ ID NO: 258113
  Synthetic oligonucleotide

SEQ ID NO: 646008 - DNA, 58 bp, Artificial; identical to SEQ ID NO: 200556
  Synthetic oligonucleotide

SEQ ID NO: 646009 - DNA, 55 bp, Artificial; identical to SEQ ID NO: 181679
  Synthetic oligonucleotide

SEQ ID NO: 646010 - DNA, 55 bp, Artificial; identical to SEQ ID NO: 197242
  Synthetic oligonucleotide

SEQ ID NO: 646011 - DNA, 59 bp, Artificial; identical to SEQ ID NO: 203681
  Synthetic oligonucleotide

SEQ ID NO: 646012 - DNA, 54 bp, Artificial; identical to SEQ ID NO: 185141
  Synthetic oligonucleotide

SEQ ID NO: 646013 - DNA, 54 bp, Artificial; identical to SEQ ID NO: 208660
  Synthetic oligonucleotide

SEQ ID NO: 646014 - DNA, 55 bp, Artificial; identical to SEQ ID NO: 151110
  Synthetic oligonucleotide

SEQ ID NO: 646015 - DNA, 55 bp, Artificial; identical to SEQ ID NO: 142147
  Synthetic oligonucleotide

SEQ ID NO: 646016 - DNA, 54 bp, Artificial; identical to SEQ ID NO: 247802
  Synthetic oligonucleotide

SEQ ID NO: 646017 - DNA, 52 bp, Artificial; identical to SEQ ID NO: 174883
  Synthetic oligonucleotide

SEQ ID NO: 646018 - DNA, 51 bp, Artificial; identical to SEQ ID NO: 208815
  Synthetic oligonucleotide

SEQ ID NO: 646019 - DNA, 55 bp, Artificial; identical to SEQ ID NO: 155778
  Synthetic oligonucleotide

SEQ ID NO: 646020 - DNA, 55 bp, Artificial; identical to SEQ ID NO: 155394
  Synthetic oligonucleotide

SEQ ID NO: 646021 - DNA, 51 bp, Artificial; identical to SEQ ID NO: 202565
  Synthetic oligonucleotide

SEQ ID NO: 646022 - DNA, 54 bp, Artificial; identical to SEQ ID NO: 149269
  Synthetic oligonucleotide

SEQ ID NO: 646023 - DNA, 50 bp, Artificial; identical to SEQ ID NO: 241432
  Synthetic oligonucleotide

SEQ ID NO: 646024 - DNA, 55 bp, Artificial; identical to SEQ ID NO: 151787
  Synthetic oligonucleotide

SEQ ID NO: 646025 - DNA, 59 bp, Artificial; identical to SEQ ID NO: 179131
  Synthetic oligonucleotide

SEQ ID NO: 646026 - DNA, 55 bp, Artificial; identical to SEQ ID NO: 154319
  Synthetic oligonucleotide

SEQ ID NO: 646027 - DNA, 55 bp, Artificial; identical to SEQ ID NO: 181677
  Synthetic oligonucleotide

SEQ ID NO: 646028 - DNA, 52 bp, Artificial; identical to SEQ ID NO: 189148
  Synthetic oligonucleotide

SEQ ID NO: 646029 - DNA, 55 bp, Artificial; identical to SEQ ID NO: 160258
  Synthetic oligonucleotide

SEQ ID NO: 646030 - DNA, 55 bp, Artificial; identical to SEQ ID NO: 234267
  Synthetic oligonucleotide

SEQ ID NO: 646031 - DNA, 55 bp, Artificial; identical to SEQ ID NO: 244622
  Synthetic oligonucleotide

SEQ ID NO: 646032 - DNA, 51 bp, Artificial; identical to SEQ ID NO: 246726
  Synthetic oligonucleotide

SEQ ID NO: 646033 - DNA, 51 bp, Artificial; identical to SEQ ID NO: 186841
  Synthetic oligonucleotide

SEQ ID NO: 646034 - DNA, 56 bp, Artificial; identical to SEQ ID NO: 179130
  Synthetic oligonucleotide

SEQ ID NO: 646035 - DNA, 55 bp, Artificial; identical to SEQ ID NO: 155779
  Synthetic oligonucleotide

SEQ ID NO: 646036 - DNA, 55 bp, Artificial; identical to SEQ ID NO: 257636
  Synthetic oligonucleotide

SEQ ID NO: 646037 - DNA, 51 bp, Artificial; identical to SEQ ID NO: 246725
  Synthetic oligonucleotide

SEQ ID NO: 646038 - DNA, 60 bp, Artificial; identical to SEQ ID NO: 217106
  Synthetic oligonucleotide

SEQ ID NO: 646039 - DNA, 55 bp, Artificial; identical to SEQ ID NO: 242574
  Synthetic oligonucleotide

SEQ ID NO: 646040 - DNA, 60 bp, Artificial; identical to SEQ ID NO: 237707
  Synthetic oligonucleotide

SEQ ID NO: 646041 - DNA, 55 bp, Artificial; identical to SEQ ID NO: 248577
  Synthetic oligonucleotide

SEQ ID NO: 646042 - DNA, 58 bp, Artificial; identical to SEQ ID NO: 207355
  Synthetic oligonucleotide

SEQ ID NO: 646043 - DNA, 55 bp, Artificial; identical to SEQ ID NO: 219682
  Synthetic oligonucleotide

SEQ ID NO: 646044 - DNA, 45 bp, Artificial; identical to SEQ ID NO: 253285
  Synthetic oligonucleotide

SEQ ID NO: 646045 - DNA, 54 bp, Artificial; identical to SEQ ID NO: 141216
  Synthetic oligonucleotide

SEQ ID NO: 646046 - DNA, 51 bp, Artificial; identical to SEQ ID NO: 206503
  Synthetic oligonucleotide

SEQ ID NO: 646047 - DNA, 55 bp, Artificial; identical to SEQ ID NO: 181676
  Synthetic oligonucleotide

SEQ ID NO: 646048 - DNA, 59 bp, Artificial; identical to SEQ ID NO: 201481
  Synthetic oligonucleotide

SEQ ID NO: 646049 - DNA, 51 bp, Artificial; identical to SEQ ID NO: 209703
  Synthetic oligonucleotide

SEQ ID NO: 646050 - DNA, 55 bp, Artificial; identical to SEQ ID NO: 254124
  Synthetic oligonucleotide

SEQ ID NO: 646051 - DNA, 56 bp, Artificial; identical to SEQ ID NO: 147346
  Synthetic oligonucleotide

SEQ ID NO: 646052 - DNA, 55 bp, Artificial; identical to SEQ ID NO: 162052
  Synthetic oligonucleotide

SEQ ID NO: 646053 - DNA, 54 bp, Artificial; identical to SEQ ID NO: 238945
  Synthetic oligonucleotide

SEQ ID NO: 646054 - DNA, 51 bp, Artificial; identical to SEQ ID NO: 255698
  Synthetic oligonucleotide

SEQ ID NO: 646055 - DNA, 55 bp, Artificial; identical to SEQ ID NO: 198285
  Synthetic oligonucleotide

SEQ ID NO: 646056 - DNA, 55 bp, Artificial; identical to SEQ ID NO: 160259
  Synthetic oligonucleotide

SEQ ID NO: 646057 - DNA, 55 bp, Artificial; identical to SEQ ID NO: 163874
  Synthetic oligonucleotide

SEQ ID NO: 646058 - DNA, 60 bp, Artificial; identical to SEQ ID NO: 166007
  Synthetic oligonucleotide

SEQ ID NO: 646059 - DNA, 54 bp, Artificial; identical to SEQ ID NO: 149155
  Synthetic oligonucleotide

SEQ ID NO: 646060 - DNA, 60 bp, Artificial; identical to SEQ ID NO: 200553
  Synthetic oligonucleotide

SEQ ID NO: 646061 - DNA, 55 bp, Artificial; identical to SEQ ID NO: 193207
  Synthetic oligonucleotide

SEQ ID NO: 646062 - DNA, 55 bp, Artificial; identical to SEQ ID NO: 163873
  Synthetic oligonucleotide

SEQ ID NO: 646063 - DNA, 55 bp, Artificial; identical to SEQ ID NO: 160804
  Synthetic oligonucleotide

SEQ ID NO: 646064 - DNA, 58 bp, Artificial; identical to SEQ ID NO: 201959
  Synthetic oligonucleotide

SEQ ID NO: 646065 - DNA, 54 bp, Artificial; identical to SEQ ID NO: 240588
  Synthetic oligonucleotide

SEQ ID NO: 646066 - DNA, 50 bp, Artificial; identical to SEQ ID NO: 253427
  Synthetic oligonucleotide

SEQ ID NO: 646067 - DNA, 53 bp, Artificial; identical to SEQ ID NO: 185674
  Synthetic oligonucleotide

SEQ ID NO: 646068 - DNA, 58 bp, Artificial; identical to SEQ ID NO: 179123
  Synthetic oligonucleotide

SEQ ID NO: 646069 - DNA, 50 bp, Artificial; identical to SEQ ID NO: 248309
  Synthetic oligonucleotide

SEQ ID NO: 646070 - DNA, 55 bp, Artificial; identical to SEQ ID NO: 155780
  Synthetic oligonucleotide

SEQ ID NO: 646071 - DNA, 55 bp, Artificial; identical to SEQ ID NO: 239768
  Synthetic oligonucleotide

SEQ ID NO: 646072 - DNA, 55 bp, Artificial; identical to SEQ ID NO: 181712
  Synthetic oligonucleotide

SEQ ID NO: 646073 - DNA, 55 bp, Artificial; identical to SEQ ID NO: 225092
  Synthetic oligonucleotide

SEQ ID NO: 646074 - DNA, 50 bp, Artificial; identical to SEQ ID NO: 200395
  Synthetic oligonucleotide

SEQ ID NO: 646075 - DNA, 55 bp, Artificial; identical to SEQ ID NO: 203701
  Synthetic oligonucleotide

SEQ ID NO: 646076 - DNA, 55 bp, Artificial; identical to SEQ ID NO: 254122
  Synthetic oligonucleotide

SEQ ID NO: 646077 - DNA, 55 bp, Artificial; identical to SEQ ID NO: 197243
  Synthetic oligonucleotide

SEQ ID NO: 646078 - DNA, 55 bp, Artificial; identical to SEQ ID NO: 193206
  Synthetic oligonucleotide

SEQ ID NO: 646079 - DNA, 55 bp, Artificial; identical to SEQ ID NO: 163872
  Synthetic oligonucleotide

SEQ ID NO: 646080 - DNA, 56 bp, Artificial; identical to SEQ ID NO: 209186
  Synthetic oligonucleotide

SEQ ID NO: 646081 - DNA, 55 bp, Artificial; identical to SEQ ID NO: 147957
  Synthetic oligonucleotide

SEQ ID NO: 646082 - DNA, 59 bp, Artificial; identical to SEQ ID NO: 151153
  Synthetic oligonucleotide

SEQ ID NO: 646083 - DNA, 54 bp, Artificial; identical to SEQ ID NO: 157170
  Synthetic oligonucleotide

SEQ ID NO: 646084 - DNA, 60 bp, Artificial; identical to SEQ ID NO: 179115
  Synthetic oligonucleotide

SEQ ID NO: 646085 - DNA, 55 bp, Artificial; identical to SEQ ID NO: 155782
  Synthetic oligonucleotide

SEQ ID NO: 646086 - DNA, 55 bp, Artificial; identical to SEQ ID NO: 181708
  Synthetic oligonucleotide

SEQ ID NO: 646087 - DNA, 59 bp, Artificial; identical to SEQ ID NO: 141621
  Synthetic oligonucleotide

SEQ ID NO: 646088 - DNA, 60 bp, Artificial; identical to SEQ ID NO: 153022
  Synthetic oligonucleotide

SEQ ID NO: 646089 - DNA, 55 bp, Artificial; identical to SEQ ID NO: 181707
  Synthetic oligonucleotide

SEQ ID NO: 646090 - DNA, 55 bp, Artificial; identical to SEQ ID NO: 181706
  Synthetic oligonucleotide

SEQ ID NO: 646091 - DNA, 60 bp, Artificial; identical to SEQ ID NO: 217107
  Synthetic oligonucleotide

SEQ ID NO: 646092 - DNA, 54 bp, Artificial; identical to SEQ ID NO: 199565
  Synthetic oligonucleotide

SEQ ID NO: 646093 - DNA, 51 bp, Artificial; identical to SEQ ID NO: 202539
  Synthetic oligonucleotide

SEQ ID NO: 646094 - DNA, 51 bp, Artificial; identical to SEQ ID NO: 206567
  Synthetic oligonucleotide

SEQ ID NO: 646095 - DNA, 55 bp, Artificial; identical to SEQ ID NO: 144859
  Synthetic oligonucleotide

SEQ ID NO: 646096 - DNA, 55 bp, Artificial; identical to SEQ ID NO: 208505
  Synthetic oligonucleotide

SEQ ID NO: 646097 - DNA, 57 bp, Artificial; identical to SEQ ID NO: 179531
  Synthetic oligonucleotide

SEQ ID NO: 646098 - DNA, 60 bp, Artificial; identical to SEQ ID NO: 153033
  Synthetic oligonucleotide

SEQ ID NO: 646099 - DNA, 60 bp, Artificial; identical to SEQ ID NO: 217108
  Synthetic oligonucleotide

SEQ ID NO: 646100 - DNA, 52 bp, Artificial; identical to SEQ ID NO: 188118
  Synthetic oligonucleotide

SEQ ID NO: 646101 - DNA, 52 bp, Artificial; identical to SEQ ID NO: 165152
  Synthetic oligonucleotide

SEQ ID NO: 646102 - DNA, 55 bp, Artificial; identical to SEQ ID NO: 254119
  Synthetic oligonucleotide

SEQ ID NO: 646103 - DNA, 60 bp, Artificial; identical to SEQ ID NO: 237708
  Synthetic oligonucleotide

SEQ ID NO: 646104 - DNA, 54 bp, Artificial; identical to SEQ ID NO: 164746
  Synthetic oligonucleotide

SEQ ID NO: 646105 - DNA, 60 bp, Artificial; identical to SEQ ID NO: 238952
  Synthetic oligonucleotide

SEQ ID NO: 646106 - DNA, 52 bp, Artificial; identical to SEQ ID NO: 186002
  Synthetic oligonucleotide

SEQ ID NO: 646107 - DNA, 55 bp, Artificial; identical to SEQ ID NO: 198283
  Synthetic oligonucleotide

SEQ ID NO: 646108 - DNA, 52 bp, Artificial; identical to SEQ ID NO: 199871
  Synthetic oligonucleotide

SEQ ID NO: 646109 - DNA, 60 bp, Artificial; identical to SEQ ID NO: 248517
  Synthetic oligonucleotide

SEQ ID NO: 646110 - DNA, 55 bp, Artificial; identical to SEQ ID NO: 181703
  Synthetic oligonucleotide

SEQ ID NO: 646111 - DNA, 59 bp, Artificial; identical to SEQ ID NO: 147062
  Synthetic oligonucleotide

SEQ ID NO: 646112 - DNA, 54 bp, Artificial; identical to SEQ ID NO: 184955
  Synthetic oligonucleotide

SEQ ID NO: 646113 - DNA, 55 bp, Artificial; identical to SEQ ID NO: 142148
  Synthetic oligonucleotide

SEQ ID NO: 646114 - DNA, 55 bp, Artificial; identical to SEQ ID NO: 147949
  Synthetic oligonucleotide

SEQ ID NO: 646115 - DNA, 50 bp, Artificial; identical to SEQ ID NO: 150218
  Synthetic oligonucleotide

SEQ ID NO: 646116 - DNA, 51 bp, Artificial; identical to SEQ ID NO: 204003
  Synthetic oligonucleotide

SEQ ID NO: 646117 - DNA, 58 bp, Artificial; identical to SEQ ID NO: 266018
  Synthetic oligonucleotide

SEQ ID NO: 646118 - DNA, 60 bp, Artificial; identical to SEQ ID NO: 168422
  Synthetic oligonucleotide

SEQ ID NO: 646119 - DNA, 55 bp, Artificial; identical to SEQ ID NO: 154322
  Synthetic oligonucleotide

SEQ ID NO: 646120 - DNA, 56 bp, Artificial; identical to SEQ ID NO: 205198
  Synthetic oligonucleotide

SEQ ID NO: 646121 - DNA, 51 bp, Artificial; identical to SEQ ID NO: 170173
  Synthetic oligonucleotide

SEQ ID NO: 646122 - DNA, 60 bp, Artificial; identical to SEQ ID NO: 179153
  Synthetic oligonucleotide

SEQ ID NO: 646123 - DNA, 59 bp, Artificial; identical to SEQ ID NO: 159842
  Synthetic oligonucleotide

SEQ ID NO: 646124 - DNA, 51 bp, Artificial; identical to SEQ ID NO: 225260
  Synthetic oligonucleotide

SEQ ID NO: 646125 - DNA, 60 bp, Artificial; identical to SEQ ID NO: 179152
  Synthetic oligonucleotide

SEQ ID NO: 646126 - DNA, 57 bp, Artificial; identical to SEQ ID NO: 224375
  Synthetic oligonucleotide

SEQ ID NO: 646127 - DNA, 50 bp, Artificial; identical to SEQ ID NO: 150219
  Synthetic oligonucleotide

SEQ ID NO: 646128 - DNA, 60 bp, Artificial; identical to SEQ ID NO: 222866
  Synthetic oligonucleotide

SEQ ID NO: 646129 - DNA, 55 bp, Artificial; identical to SEQ ID NO: 238277
  Synthetic oligonucleotide

SEQ ID NO: 646130 - DNA, 58 bp, Artificial; identical to SEQ ID NO: 141622
  Synthetic oligonucleotide

SEQ ID NO: 646131 - DNA, 55 bp, Artificial; identical to SEQ ID NO: 179148
  Synthetic oligonucleotide

SEQ ID NO: 646132 - DNA, 51 bp, Artificial; identical to SEQ ID NO: 255702
  Synthetic oligonucleotide

SEQ ID NO: 646133 - DNA, 55 bp, Artificial; identical to SEQ ID NO: 163871
  Synthetic oligonucleotide

SEQ ID NO: 646134 - DNA, 55 bp, Artificial; identical to SEQ ID NO: 169288
  Synthetic oligonucleotide

SEQ ID NO: 646135 - DNA, 55 bp, Artificial; identical to SEQ ID NO: 238275
  Synthetic oligonucleotide

SEQ ID NO: 646136 - DNA, 56 bp, Artificial; identical to SEQ ID NO: 179896
  Synthetic oligonucleotide

SEQ ID NO: 646137 - DNA, 55 bp, Artificial; identical to SEQ ID NO: 155785
  Synthetic oligonucleotide

SEQ ID NO: 646138 - DNA, 56 bp, Artificial; identical to SEQ ID NO: 217109
  Synthetic oligonucleotide

SEQ ID NO: 646139 - DNA, 54 bp, Artificial; identical to SEQ ID NO: 194933
  Synthetic oligonucleotide

SEQ ID NO: 646140 - DNA, 51 bp, Artificial; identical to SEQ ID NO: 220833
  Synthetic oligonucleotide

SEQ ID NO: 646141 - DNA, 57 bp, Artificial; identical to SEQ ID NO: 142741
  Synthetic oligonucleotide

SEQ ID NO: 646142 - DNA, 55 bp, Artificial; identical to SEQ ID NO: 142149
  Synthetic oligonucleotide

SEQ ID NO: 646143 - DNA, 55 bp, Artificial; identical to SEQ ID NO: 142150
  Synthetic oligonucleotide

SEQ ID NO: 646144 - DNA, 55 bp, Artificial; identical to SEQ ID NO: 244629
  Synthetic oligonucleotide

SEQ ID NO: 646145 - DNA, 51 bp, Artificial; identical to SEQ ID NO: 201724
  Synthetic oligonucleotide

SEQ ID NO: 646146 - DNA, 56 bp, Artificial; identical to SEQ ID NO: 141989
  Synthetic oligonucleotide

SEQ ID NO: 646147 - DNA, 52 bp, Artificial; identical to SEQ ID NO: 157635
  Synthetic oligonucleotide

SEQ ID NO: 646148 - DNA, 58 bp, Artificial; identical to SEQ ID NO: 179526
  Synthetic oligonucleotide

SEQ ID NO: 646149 - DNA, 54 bp, Artificial; identical to SEQ ID NO: 157174
  Synthetic oligonucleotide

SEQ ID NO: 646150 - DNA, 55 bp, Artificial; identical to SEQ ID NO: 248881
  Synthetic oligonucleotide

SEQ ID NO: 646151 - DNA, 54 bp, Artificial; identical to SEQ ID NO: 141189
  Synthetic oligonucleotide

SEQ ID NO: 646152 - DNA, 60 bp, Artificial; identical to SEQ ID NO: 141623
  Synthetic oligonucleotide

SEQ ID NO: 646153 - DNA, 60 bp, Artificial; identical to SEQ ID NO: 206951
  Synthetic oligonucleotide

SEQ ID NO: 646154 - DNA, 53 bp, Artificial; identical to SEQ ID NO: 246291
  Synthetic oligonucleotide

SEQ ID NO: 646155 - DNA, 55 bp, Artificial; identical to SEQ ID NO: 209315
  Synthetic oligonucleotide

SEQ ID NO: 646156 - DNA, 55 bp, Artificial; identical to SEQ ID NO: 257626
  Synthetic oligonucleotide

SEQ ID NO: 646157 - DNA, 51 bp, Artificial; identical to SEQ ID NO: 162361
  Synthetic oligonucleotide

SEQ ID NO: 646158 - DNA, 55 bp, Artificial; identical to SEQ ID NO: 155787
  Synthetic oligonucleotide

SEQ ID NO: 646159 - DNA, 55 bp, Artificial; identical to SEQ ID NO: 225090
  Synthetic oligonucleotide

SEQ ID NO: 646160 - DNA, 55 bp, Artificial; identical to SEQ ID NO: 254117
  Synthetic oligonucleotide

SEQ ID NO: 646161 - DNA, 56 bp, Artificial; identical to SEQ ID NO: 179142
  Synthetic oligonucleotide

SEQ ID NO: 646162 - DNA, 55 bp, Artificial; identical to SEQ ID NO: 198278
  Synthetic oligonucleotide

SEQ ID NO: 646163 - DNA, 55 bp, Artificial; identical to SEQ ID NO: 218873
  Synthetic oligonucleotide

SEQ ID NO: 646164 - DNA, 57 bp, Artificial; identical to SEQ ID NO: 239000
  Synthetic oligonucleotide

SEQ ID NO: 646165 - DNA, 53 bp, Artificial; identical to SEQ ID NO: 220763
  Synthetic oligonucleotide

SEQ ID NO: 646166 - DNA, 54 bp, Artificial; identical to SEQ ID NO: 192020
  Synthetic oligonucleotide

SEQ ID NO: 646167 - DNA, 55 bp, Artificial; identical to SEQ ID NO: 208504
  Synthetic oligonucleotide

SEQ ID NO: 646168 - DNA, 60 bp, Artificial; identical to SEQ ID NO: 239001
  Synthetic oligonucleotide

SEQ ID NO: 646169 - DNA, 55 bp, Artificial; identical to SEQ ID NO: 248879
  Synthetic oligonucleotide

SEQ ID NO: 646170 - DNA, 60 bp, Artificial; identical to SEQ ID NO: 217110
  Synthetic oligonucleotide

SEQ ID NO: 646171 - DNA, 51 bp, Artificial; identical to SEQ ID NO: 165195
  Synthetic oligonucleotide

SEQ ID NO: 646172 - DNA, 54 bp, Artificial; identical to SEQ ID NO: 185017
  Synthetic oligonucleotide

SEQ ID NO: 646173 - DNA, 58 bp, Artificial; identical to SEQ ID NO: 153044
  Synthetic oligonucleotide

SEQ ID NO: 646174 - DNA, 57 bp, Artificial; identical to SEQ ID NO: 243675
  Synthetic oligonucleotide

SEQ ID NO: 646175 - DNA, 51 bp, Artificial; identical to SEQ ID NO: 165194
  Synthetic oligonucleotide

SEQ ID NO: 646176 - DNA, 50 bp, Artificial; identical to SEQ ID NO: 176140
  Synthetic oligonucleotide

SEQ ID NO: 646177 - DNA, 55 bp, Artificial; identical to SEQ ID NO: 198277
  Synthetic oligonucleotide

SEQ ID NO: 646178 - DNA, 55 bp, Artificial; identical to SEQ ID NO: 254116
  Synthetic oligonucleotide

SEQ ID NO: 646179 - DNA, 55 bp, Artificial; identical to SEQ ID NO: 203105
  Synthetic oligonucleotide

SEQ ID NO: 646180 - DNA, 53 bp, Artificial; identical to SEQ ID NO: 199688
  Synthetic oligonucleotide

SEQ ID NO: 646181 - DNA, 50 bp, Artificial; identical to SEQ ID NO: 165457
  Synthetic oligonucleotide

SEQ ID NO: 646182 - DNA, 54 bp, Artificial; identical to SEQ ID NO: 164782
  Synthetic oligonucleotide

SEQ ID NO: 646183 - DNA, 54 bp, Artificial; identical to SEQ ID NO: 207714
  Synthetic oligonucleotide

SEQ ID NO: 646184 - DNA, 51 bp, Artificial; identical to SEQ ID NO: 149732
  Synthetic oligonucleotide

SEQ ID NO: 646185 - DNA, 60 bp, Artificial; identical to SEQ ID NO: 187157
  Synthetic oligonucleotide

SEQ ID NO: 646186 - DNA, 60 bp, Artificial; identical to SEQ ID NO: 243677
  Synthetic oligonucleotide

SEQ ID NO: 646187 - DNA, 55 bp, Artificial; identical to SEQ ID NO: 171533
  Synthetic oligonucleotide

SEQ ID NO: 646188 - DNA, 55 bp, Artificial; identical to SEQ ID NO: 197244
  Synthetic oligonucleotide

SEQ ID NO: 646189 - DNA, 55 bp, Artificial; identical to SEQ ID NO: 142110
  Synthetic oligonucleotide

SEQ ID NO: 646190 - DNA, 55 bp, Artificial; identical to SEQ ID NO: 253000
  Synthetic oligonucleotide

SEQ ID NO: 646191 - DNA, 55 bp, Artificial; identical to SEQ ID NO: 181646
  Synthetic oligonucleotide

SEQ ID NO: 646192 - DNA, 56 bp, Artificial; identical to SEQ ID NO: 166803
  Synthetic oligonucleotide

SEQ ID NO: 646193 - DNA, 60 bp, Artificial; identical to SEQ ID NO: 243678
  Synthetic oligonucleotide

SEQ ID NO: 646194 - DNA, 54 bp, Artificial; identical to SEQ ID NO: 208666
  Synthetic oligonucleotide

SEQ ID NO: 646195 - DNA, 55 bp, Artificial; identical to SEQ ID NO: 265690
  Synthetic oligonucleotide

SEQ ID NO: 646196 - DNA, 50 bp, Artificial; identical to SEQ ID NO: 176127
  Synthetic oligonucleotide

SEQ ID NO: 646197 - DNA, 57 bp, Artificial; identical to SEQ ID NO: 253664
  Synthetic oligonucleotide

SEQ ID NO: 646198 - DNA, 50 bp, Artificial; identical to SEQ ID NO: 256163
  Synthetic oligonucleotide

SEQ ID NO: 646199 - DNA, 55 bp, Artificial; identical to SEQ ID NO: 151781
  Synthetic oligonucleotide

SEQ ID NO: 646200 - DNA, 53 bp, Artificial; identical to SEQ ID NO: 185594
  Synthetic oligonucleotide

SEQ ID NO: 646201 - DNA, 55 bp, Artificial; identical to SEQ ID NO: 253001
  Synthetic oligonucleotide

SEQ ID NO: 646202 - DNA, 55 bp, Artificial; identical to SEQ ID NO: 254115
  Synthetic oligonucleotide

SEQ ID NO: 646203 - DNA, 60 bp, Artificial; identical to SEQ ID NO: 258252
  Synthetic oligonucleotide

SEQ ID NO: 646204 - DNA, 55 bp, Artificial; identical to SEQ ID NO: 156061
  Synthetic oligonucleotide

SEQ ID NO: 646205 - DNA, 55 bp, Artificial; identical to SEQ ID NO: 221383
  Synthetic oligonucleotide

SEQ ID NO: 646206 - DNA, 55 bp, Artificial; identical to SEQ ID NO: 156062
  Synthetic oligonucleotide

SEQ ID NO: 646207 - DNA, 60 bp, Artificial; identical to SEQ ID NO: 248514
  Synthetic oligonucleotide

SEQ ID NO: 646208 - DNA, 58 bp, Artificial; identical to SEQ ID NO: 225523
  Synthetic oligonucleotide

SEQ ID NO: 646209 - DNA, 53 bp, Artificial; identical to SEQ ID NO: 247865
  Synthetic oligonucleotide

SEQ ID NO: 646210 - DNA, 57 bp, Artificial; identical to SEQ ID NO: 201218
  Synthetic oligonucleotide

SEQ ID NO: 646211 - DNA, 56 bp, Artificial; identical to SEQ ID NO: 152377
  Synthetic oligonucleotide

SEQ ID NO: 646212 - DNA, 55 bp, Artificial; identical to SEQ ID NO: 181639
  Synthetic oligonucleotide

SEQ ID NO: 646213 - DNA, 60 bp, Artificial; identical to SEQ ID NO: 179136
  Synthetic oligonucleotide

SEQ ID NO: 646214 - DNA, 55 bp, Artificial; identical to SEQ ID NO: 198276
  Synthetic oligonucleotide

SEQ ID NO: 646215 - DNA, 50 bp, Artificial; identical to SEQ ID NO: 150224
  Synthetic oligonucleotide

SEQ ID NO: 646216 - DNA, 55 bp, Artificial; identical to SEQ ID NO: 254114
  Synthetic oligonucleotide

SEQ ID NO: 646217 - DNA, 55 bp, Artificial; identical to SEQ ID NO: 239734
  Synthetic oligonucleotide

SEQ ID NO: 646218 - DNA, 55 bp, Artificial; identical to SEQ ID NO: 198275
  Synthetic oligonucleotide

SEQ ID NO: 646219 - DNA, 55 bp, Artificial; identical to SEQ ID NO: 142112
  Synthetic oligonucleotide

SEQ ID NO: 646220 - DNA, 52 bp, Artificial; identical to SEQ ID NO: 199877
  Synthetic oligonucleotide

SEQ ID NO: 646221 - DNA, 53 bp, Artificial; identical to SEQ ID NO: 157320
  Synthetic oligonucleotide

SEQ ID NO: 646222 - DNA, 56 bp, Artificial; identical to SEQ ID NO: 179134
  Synthetic oligonucleotide

SEQ ID NO: 646223 - DNA, 56 bp, Artificial; identical to SEQ ID NO: 168206
  Synthetic oligonucleotide

SEQ ID NO: 646224 - DNA, 55 bp, Artificial; identical to SEQ ID NO: 261610
  Synthetic oligonucleotide

SEQ ID NO: 646225 - DNA, 60 bp, Artificial; identical to SEQ ID NO: 266015
  Synthetic oligonucleotide

SEQ ID NO: 646226 - DNA, 54 bp, Artificial; identical to SEQ ID NO: 153558
  Synthetic oligonucleotide

SEQ ID NO: 646227 - DNA, 60 bp, Artificial; identical to SEQ ID NO: 239011
  Synthetic oligonucleotide

SEQ ID NO: 646228 - DNA, 53 bp, Artificial; identical to SEQ ID NO: 149408
  Synthetic oligonucleotide

SEQ ID NO: 646229 - DNA, 59 bp, Artificial; identical to SEQ ID NO: 257489
  Synthetic oligonucleotide

SEQ ID NO: 646230 - DNA, 51 bp, Artificial; identical to SEQ ID NO: 241010
  Synthetic oligonucleotide

SEQ ID NO: 646231 - DNA, 52 bp, Artificial; identical to SEQ ID NO: 168957
  Synthetic oligonucleotide

SEQ ID NO: 646232 - DNA, 51 bp, Artificial; identical to SEQ ID NO: 233882
  Synthetic oligonucleotide

SEQ ID NO: 646233 - DNA, 50 bp, Artificial; identical to SEQ ID NO: 200400
  Synthetic oligonucleotide

SEQ ID NO: 646234 - DNA, 55 bp, Artificial; identical to SEQ ID NO: 181637
  Synthetic oligonucleotide

SEQ ID NO: 646235 - DNA, 55 bp, Artificial; identical to SEQ ID NO: 203705
  Synthetic oligonucleotide

SEQ ID NO: 646236 - DNA, 55 bp, Artificial; identical to SEQ ID NO: 155377
  Synthetic oligonucleotide

SEQ ID NO: 646237 - DNA, 54 bp, Artificial; identical to SEQ ID NO: 157177
  Synthetic oligonucleotide

SEQ ID NO: 646238 - DNA, 59 bp, Artificial; identical to SEQ ID NO: 153699
  Synthetic oligonucleotide

SEQ ID NO: 646239 - DNA, 54 bp, Artificial; identical to SEQ ID NO: 199671
  Synthetic oligonucleotide

SEQ ID NO: 646240 - DNA, 51 bp, Artificial; identical to SEQ ID NO: 174306
  Synthetic oligonucleotide

SEQ ID NO: 646241 - DNA, 56 bp, Artificial; identical to SEQ ID NO: 141993
  Synthetic oligonucleotide

SEQ ID NO: 646242 - DNA, 60 bp, Artificial; identical to SEQ ID NO: 191230
  Synthetic oligonucleotide

SEQ ID NO: 646243 - DNA, 51 bp, Artificial; identical to SEQ ID NO: 165193
  Synthetic oligonucleotide

SEQ ID NO: 646244 - DNA, 60 bp, Artificial; identical to SEQ ID NO: 239016
  Synthetic oligonucleotide

SEQ ID NO: 646245 - DNA, 55 bp, Artificial; identical to SEQ ID NO: 154580
  Synthetic oligonucleotide

SEQ ID NO: 646246 - DNA, 53 bp, Artificial; identical to SEQ ID NO: 246288
  Synthetic oligonucleotide

SEQ ID NO: 646247 - DNA, 57 bp, Artificial; identical to SEQ ID NO: 239018
  Synthetic oligonucleotide

SEQ ID NO: 646248 - DNA, 55 bp, Artificial; identical to SEQ ID NO: 147941
  Synthetic oligonucleotide

SEQ ID NO: 646249 - DNA, 55 bp, Artificial; identical to SEQ ID NO: 198273
  Synthetic oligonucleotide

SEQ ID NO: 646250 - DNA, 55 bp, Artificial; identical to SEQ ID NO: 260034
  Synthetic oligonucleotide

SEQ ID NO: 646251 - DNA, 57 bp, Artificial; identical to SEQ ID NO: 212511
  Synthetic oligonucleotide

SEQ ID NO: 646252 - DNA, 55 bp, Artificial; identical to SEQ ID NO: 205509
  Synthetic oligonucleotide

SEQ ID NO: 646253 - DNA, 55 bp, Artificial; identical to SEQ ID NO: 202900
  Synthetic oligonucleotide

SEQ ID NO: 646254 - DNA, 54 bp, Artificial; identical to SEQ ID NO: 192022
  Synthetic oligonucleotide

SEQ ID NO: 646255 - DNA, 60 bp, Artificial; identical to SEQ ID NO: 170899
  Synthetic oligonucleotide

SEQ ID NO: 646256 - DNA, 54 bp, Artificial; identical to SEQ ID NO: 215179
  Synthetic oligonucleotide

SEQ ID NO: 646257 - DNA, 57 bp, Artificial; identical to SEQ ID NO: 237709
  Synthetic oligonucleotide

SEQ ID NO: 646258 - DNA, 53 bp, Artificial; identical to SEQ ID NO: 152034
  Synthetic oligonucleotide

SEQ ID NO: 646259 - DNA, 60 bp, Artificial; identical to SEQ ID NO: 151144
  Synthetic oligonucleotide

SEQ ID NO: 646260 - DNA, 55 bp, Artificial; identical to SEQ ID NO: 196157
  Synthetic oligonucleotide

SEQ ID NO: 646261 - DNA, 60 bp, Artificial; identical to SEQ ID NO: 202385
  Synthetic oligonucleotide

SEQ ID NO: 646262 - DNA, 53 bp, Artificial; identical to SEQ ID NO: 165956
  Synthetic oligonucleotide

SEQ ID NO: 646263 - DNA, 55 bp, Artificial; identical to SEQ ID NO: 244479
  Synthetic oligonucleotide

SEQ ID NO: 646264 - DNA, 57 bp, Artificial; identical to SEQ ID NO: 248512
  Synthetic oligonucleotide

SEQ ID NO: 646265 - DNA, 54 bp, Artificial; identical to SEQ ID NO: 151142
  Synthetic oligonucleotide

SEQ ID NO: 646266 - DNA, 53 bp, Artificial; identical to SEQ ID NO: 211543
  Synthetic oligonucleotide

SEQ ID NO: 646267 - DNA, 55 bp, Artificial; identical to SEQ ID NO: 156070
  Synthetic oligonucleotide

SEQ ID NO: 646268 - DNA, 55 bp, Artificial; identical to SEQ ID NO: 198269
  Synthetic oligonucleotide

SEQ ID NO: 646269 - DNA, 57 bp, Artificial; identical to SEQ ID NO: 224374
  Synthetic oligonucleotide

SEQ ID NO: 646270 - DNA, 55 bp, Artificial; identical to SEQ ID NO: 168572
  Synthetic oligonucleotide

SEQ ID NO: 646271 - DNA, 54 bp, Artificial; identical to SEQ ID NO: 157180
  Synthetic oligonucleotide

SEQ ID NO: 646272 - DNA, 55 bp, Artificial; identical to SEQ ID NO: 147046
  Synthetic oligonucleotide

SEQ ID NO: 646273 - DNA, 55 bp, Artificial; identical to SEQ ID NO: 244484
  Synthetic oligonucleotide

SEQ ID NO: 646274 - DNA, 55 bp, Artificial; identical to SEQ ID NO: 220660
  Synthetic oligonucleotide

SEQ ID NO: 646275 - DNA, 52 bp, Artificial; identical to SEQ ID NO: 209676
  Synthetic oligonucleotide

SEQ ID NO: 646276 - DNA, 55 bp, Artificial; identical to SEQ ID NO: 203706
  Synthetic oligonucleotide

SEQ ID NO: 646277 - DNA, 60 bp, Artificial; identical to SEQ ID NO: 244998
  Synthetic oligonucleotide

SEQ ID NO: 646278 - DNA, 55 bp, Artificial; identical to SEQ ID NO: 224807
  Synthetic oligonucleotide

SEQ ID NO: 646279 - DNA, 51 bp, Artificial; identical to SEQ ID NO: 192172
  Synthetic oligonucleotide

SEQ ID NO: 646280 - DNA, 50 bp, Artificial; identical to SEQ ID NO: 209824
  Synthetic oligonucleotide

SEQ ID NO: 646281 - DNA, 60 bp, Artificial; identical to SEQ ID NO: 203714
  Synthetic oligonucleotide

SEQ ID NO: 646282 - DNA, 57 bp, Artificial; identical to SEQ ID NO: 212456
  Synthetic oligonucleotide

SEQ ID NO: 646283 - DNA, 55 bp, Artificial; identical to SEQ ID NO: 162050
  Synthetic oligonucleotide

SEQ ID NO: 646284 - DNA, 55 bp, Artificial; identical to SEQ ID NO: 212754
  Synthetic oligonucleotide

SEQ ID NO: 646285 - DNA, 55 bp, Artificial; identical to SEQ ID NO: 211294
  Synthetic oligonucleotide

SEQ ID NO: 646286 - DNA, 52 bp, Artificial; identical to SEQ ID NO: 247927
  Synthetic oligonucleotide

SEQ ID NO: 646287 - DNA, 54 bp, Artificial; identical to SEQ ID NO: 151998
  Synthetic oligonucleotide

SEQ ID NO: 646288 - DNA, 52 bp, Artificial; identical to SEQ ID NO: 185929
  Synthetic oligonucleotide

SEQ ID NO: 646289 - DNA, 55 bp, Artificial; identical to SEQ ID NO: 261916
  Synthetic oligonucleotide

SEQ ID NO: 646290 - DNA, 55 bp, Artificial; identical to SEQ ID NO: 217528
  Synthetic oligonucleotide

SEQ ID NO: 646291 - DNA, 54 bp, Artificial; identical to SEQ ID NO: 211504
  Synthetic oligonucleotide

SEQ ID NO: 646292 - DNA, 55 bp, Artificial; identical to SEQ ID NO: 244497
  Synthetic oligonucleotide

SEQ ID NO: 646293 - DNA, 53 bp, Artificial; identical to SEQ ID NO: 185606
  Synthetic oligonucleotide

SEQ ID NO: 646294 - DNA, 55 bp, Artificial; identical to SEQ ID NO: 190411
  Synthetic oligonucleotide

SEQ ID NO: 646295 - DNA, 55 bp, Artificial; identical to SEQ ID NO: 163865
  Synthetic oligonucleotide

SEQ ID NO: 646296 - DNA, 57 bp, Artificial; identical to SEQ ID NO: 178001
  Synthetic oligonucleotide

SEQ ID NO: 646297 - DNA, 55 bp, Artificial; identical to SEQ ID NO: 234272
  Synthetic oligonucleotide

SEQ ID NO: 646298 - DNA, 50 bp, Artificial; identical to SEQ ID NO: 246978
  Synthetic oligonucleotide

SEQ ID NO: 646299 - DNA, 55 bp, Artificial; identical to SEQ ID NO: 174676
  Synthetic oligonucleotide

SEQ ID NO: 646300 - DNA, 51 bp, Artificial; identical to SEQ ID NO: 257061
  Synthetic oligonucleotide

SEQ ID NO: 646301 - DNA, 55 bp, Artificial; identical to SEQ ID NO: 201601
  Synthetic oligonucleotide

SEQ ID NO: 646302 - DNA, 54 bp, Artificial; identical to SEQ ID NO: 149129
  Synthetic oligonucleotide

SEQ ID NO: 646303 - DNA, 50 bp, Artificial; identical to SEQ ID NO: 258235
  Synthetic oligonucleotide

SEQ ID NO: 646304 - DNA, 50 bp, Artificial; identical to SEQ ID NO: 265874
  Synthetic oligonucleotide

SEQ ID NO: 646305 - DNA, 55 bp, Artificial; identical to SEQ ID NO: 181633
  Synthetic oligonucleotide

SEQ ID NO: 646306 - DNA, 58 bp, Artificial; identical to SEQ ID NO: 143661
  Synthetic oligonucleotide

SEQ ID NO: 646307 - DNA, 60 bp, Artificial; identical to SEQ ID NO: 153799
  Synthetic oligonucleotide

SEQ ID NO: 646308 - DNA, 60 bp, Artificial; identical to SEQ ID NO: 221300
  Synthetic oligonucleotide

SEQ ID NO: 646309 - DNA, 51 bp, Artificial; identical to SEQ ID NO: 149761
  Synthetic oligonucleotide

SEQ ID NO: 646310 - DNA, 52 bp, Artificial; identical to SEQ ID NO: 162344
  Synthetic oligonucleotide

SEQ ID NO: 646311 - DNA, 55 bp, Artificial; identical to SEQ ID NO: 254110
  Synthetic oligonucleotide

SEQ ID NO: 646312 - DNA, 55 bp, Artificial; identical to SEQ ID NO: 263315
  Synthetic oligonucleotide

SEQ ID NO: 646313 - DNA, 60 bp, Artificial; identical to SEQ ID NO: 222867
  Synthetic oligonucleotide

SEQ ID NO: 646314 - DNA, 53 bp, Artificial; identical to SEQ ID NO: 223583
  Synthetic oligonucleotide

SEQ ID NO: 646315 - DNA, 55 bp, Artificial; identical to SEQ ID NO: 188223
  Synthetic oligonucleotide

SEQ ID NO: 646316 - DNA, 55 bp, Artificial; identical to SEQ ID NO: 209314
  Synthetic oligonucleotide

SEQ ID NO: 646317 - DNA, 51 bp, Artificial; identical to SEQ ID NO: 248071
  Synthetic oligonucleotide

SEQ ID NO: 646318 - DNA, 52 bp, Artificial; identical to SEQ ID NO: 190410
  Synthetic oligonucleotide

SEQ ID NO: 646319 - DNA, 58 bp, Artificial; identical to SEQ ID NO: 191689
  Synthetic oligonucleotide

SEQ ID NO: 646320 - DNA, 53 bp, Artificial; identical to SEQ ID NO: 170874
  Synthetic oligonucleotide

SEQ ID NO: 646321 - DNA, 56 bp, Artificial; identical to SEQ ID NO: 209253
  Synthetic oligonucleotide

SEQ ID NO: 646322 - DNA, 52 bp, Artificial; identical to SEQ ID NO: 165137
  Synthetic oligonucleotide

SEQ ID NO: 646323 - DNA, 55 bp, Artificial; identical to SEQ ID NO: 163862
  Synthetic oligonucleotide

SEQ ID NO: 646324 - DNA, 55 bp, Artificial; identical to SEQ ID NO: 144830
  Synthetic oligonucleotide

SEQ ID NO: 646325 - DNA, 53 bp, Artificial; identical to SEQ ID NO: 199679
  Synthetic oligonucleotide

SEQ ID NO: 646326 - DNA, 55 bp, Artificial; identical to SEQ ID NO: 147972
  Synthetic oligonucleotide

SEQ ID NO: 646327 - DNA, 55 bp, Artificial; identical to SEQ ID NO: 144101
  Synthetic oligonucleotide

SEQ ID NO: 646328 - DNA, 53 bp, Artificial; identical to SEQ ID NO: 255353
  Synthetic oligonucleotide

SEQ ID NO: 646329 - DNA, 55 bp, Artificial; identical to SEQ ID NO: 188790
  Synthetic oligonucleotide

SEQ ID NO: 646330 - DNA, 52 bp, Artificial; identical to SEQ ID NO: 144559
  Synthetic oligonucleotide

SEQ ID NO: 646331 - DNA, 57 bp, Artificial; identical to SEQ ID NO: 224225
  Synthetic oligonucleotide

SEQ ID NO: 646332 - DNA, 59 bp, Artificial; identical to SEQ ID NO: 177997
  Synthetic oligonucleotide

SEQ ID NO: 646333 - DNA, 58 bp, Artificial; identical to SEQ ID NO: 187138
  Synthetic oligonucleotide

SEQ ID NO: 646334 - DNA, 55 bp, Artificial; identical to SEQ ID NO: 163861
  Synthetic oligonucleotide

SEQ ID NO: 646335 - DNA, 53 bp, Artificial; identical to SEQ ID NO: 222702
  Synthetic oligonucleotide

SEQ ID NO: 646336 - DNA, 53 bp, Artificial; identical to SEQ ID NO: 246285
  Synthetic oligonucleotide

SEQ ID NO: 646337 - DNA, 60 bp, Artificial; identical to SEQ ID NO: 151135
  Synthetic oligonucleotide

SEQ ID NO: 646338 - DNA, 60 bp, Artificial; identical to SEQ ID NO: 248505
  Synthetic oligonucleotide

SEQ ID NO: 646339 - DNA, 55 bp, Artificial; identical to SEQ ID NO: 151289
  Synthetic oligonucleotide

SEQ ID NO: 646340 - DNA, 55 bp, Artificial; identical to SEQ ID NO: 217529
  Synthetic oligonucleotide

SEQ ID NO: 646341 - DNA, 55 bp, Artificial; identical to SEQ ID NO: 181629
  Synthetic oligonucleotide

SEQ ID NO: 646342 - DNA, 57 bp, Artificial; identical to SEQ ID NO: 170936
  Synthetic oligonucleotide

SEQ ID NO: 646343 - DNA, 52 bp, Artificial; identical to SEQ ID NO: 206429
  Synthetic oligonucleotide

SEQ ID NO: 646344 - DNA, 55 bp, Artificial; identical to SEQ ID NO: 254108
  Synthetic oligonucleotide

SEQ ID NO: 646345 - DNA, 55 bp, Artificial; identical to SEQ ID NO: 198331
  Synthetic oligonucleotide

SEQ ID NO: 646346 - DNA, 52 bp, Artificial; identical to SEQ ID NO: 157629
  Synthetic oligonucleotide

SEQ ID NO: 646347 - DNA, 57 bp, Artificial; identical to SEQ ID NO: 171067
  Synthetic oligonucleotide

SEQ ID NO: 646348 - DNA, 55 bp, Artificial; identical to SEQ ID NO: 161200
  Synthetic oligonucleotide

SEQ ID NO: 646349 - DNA, 50 bp, Artificial; identical to SEQ ID NO: 246970
  Synthetic oligonucleotide

SEQ ID NO: 646350 - DNA, 55 bp, Artificial; identical to SEQ ID NO: 143721
  Synthetic oligonucleotide

SEQ ID NO: 646351 - DNA, 55 bp, Artificial; identical to SEQ ID NO: 257600
  Synthetic oligonucleotide

SEQ ID NO: 646352 - DNA, 50 bp, Artificial; identical to SEQ ID NO: 176911
  Synthetic oligonucleotide

SEQ ID NO: 646353 - DNA, 55 bp, Artificial; identical to SEQ ID NO: 249599
  Synthetic oligonucleotide

SEQ ID NO: 646354 - DNA, 51 bp, Artificial; identical to SEQ ID NO: 252724
  Synthetic oligonucleotide

SEQ ID NO: 646355 - DNA, 55 bp, Artificial; identical to SEQ ID NO: 181628
  Synthetic oligonucleotide

SEQ ID NO: 646356 - DNA, 51 bp, Artificial; identical to SEQ ID NO: 149756
  Synthetic oligonucleotide

SEQ ID NO: 646357 - DNA, 54 bp, Artificial; identical to SEQ ID NO: 162014
  Synthetic oligonucleotide

SEQ ID NO: 646358 - DNA, 51 bp, Artificial; identical to SEQ ID NO: 241014
  Synthetic oligonucleotide

SEQ ID NO: 646359 - DNA, 60 bp, Artificial; identical to SEQ ID NO: 177989
  Synthetic oligonucleotide

SEQ ID NO: 646360 - DNA, 60 bp, Artificial; identical to SEQ ID NO: 177987
  Synthetic oligonucleotide

SEQ ID NO: 646361 - DNA, 55 bp, Artificial; identical to SEQ ID NO: 156073
  Synthetic oligonucleotide

SEQ ID NO: 646362 - DNA, 51 bp, Artificial; identical to SEQ ID NO: 186813
  Synthetic oligonucleotide

SEQ ID NO: 646363 - DNA, 56 bp, Artificial; identical to SEQ ID NO: 247625
  Synthetic oligonucleotide

SEQ ID NO: 646364 - DNA, 54 bp, Artificial; identical to SEQ ID NO: 247785
  Synthetic oligonucleotide

SEQ ID NO: 646365 - DNA, 55 bp, Artificial; identical to SEQ ID NO: 224805
  Synthetic oligonucleotide

SEQ ID NO: 646366 - DNA, 55 bp, Artificial; identical to SEQ ID NO: 266014
  Synthetic oligonucleotide

SEQ ID NO: 646367 - DNA, 55 bp, Artificial; identical to SEQ ID NO: 257621
  Synthetic oligonucleotide

SEQ ID NO: 646368 - DNA, 52 bp, Artificial; identical to SEQ ID NO: 152081
  Synthetic oligonucleotide

SEQ ID NO: 646369 - DNA, 55 bp, Artificial; identical to SEQ ID NO: 248867
  Synthetic oligonucleotide

SEQ ID NO: 646370 - DNA, 55 bp, Artificial; identical to SEQ ID NO: 198329
  Synthetic oligonucleotide

SEQ ID NO: 646371 - DNA, 55 bp, Artificial; identical to SEQ ID NO: 187871
  Synthetic oligonucleotide

SEQ ID NO: 646372 - DNA, 56 bp, Artificial; identical to SEQ ID NO: 238979
  Synthetic oligonucleotide

SEQ ID NO: 646373 - DNA, 55 bp, Artificial; identical to SEQ ID NO: 212501
  Synthetic oligonucleotide

SEQ ID NO: 646374 - DNA, 57 bp, Artificial; identical to SEQ ID NO: 177986
  Synthetic oligonucleotide

SEQ ID NO: 646375 - DNA, 54 bp, Artificial; identical to SEQ ID NO: 199668
  Synthetic oligonucleotide

SEQ ID NO: 646376 - DNA, 55 bp, Artificial; identical to SEQ ID NO: 181625
  Synthetic oligonucleotide

SEQ ID NO: 646377 - DNA, 55 bp, Artificial; identical to SEQ ID NO: 208501
  Synthetic oligonucleotide

SEQ ID NO: 646378 - DNA, 50 bp, Artificial; identical to SEQ ID NO: 165437
  Synthetic oligonucleotide

SEQ ID NO: 646379 - DNA, 56 bp, Artificial; identical to SEQ ID NO: 170933
  Synthetic oligonucleotide

SEQ ID NO: 646380 - DNA, 51 bp, Artificial; identical to SEQ ID NO: 191234
  Synthetic oligonucleotide

SEQ ID NO: 646381 - DNA, 50 bp, Artificial; identical to SEQ ID NO: 176823
  Synthetic oligonucleotide

SEQ ID NO: 646382 - DNA, 52 bp, Artificial; identical to SEQ ID NO: 223633
  Synthetic oligonucleotide

SEQ ID NO: 646383 - DNA, 50 bp, Artificial; identical to SEQ ID NO: 240772
  Synthetic oligonucleotide

SEQ ID NO: 646384 - DNA, 51 bp, Artificial; identical to SEQ ID NO: 149510
  Synthetic oligonucleotide

SEQ ID NO: 646385 - DNA, 50 bp, Artificial; identical to SEQ ID NO: 256490
  Synthetic oligonucleotide

SEQ ID NO: 646386 - DNA, 52 bp, Artificial; identical to SEQ ID NO: 203002
  Synthetic oligonucleotide

SEQ ID NO: 646387 - DNA, 53 bp, Artificial; identical to SEQ ID NO: 157323
  Synthetic oligonucleotide

SEQ ID NO: 646388 - DNA, 51 bp, Artificial; identical to SEQ ID NO: 174305
  Synthetic oligonucleotide

SEQ ID NO: 646389 - DNA, 60 bp, Artificial; identical to SEQ ID NO: 151133
  Synthetic oligonucleotide

SEQ ID NO: 646390 - DNA, 57 bp, Artificial; identical to SEQ ID NO: 187127
  Synthetic oligonucleotide

SEQ ID NO: 646391 - DNA, 59 bp, Artificial; identical to SEQ ID NO: 175124
  Synthetic oligonucleotide

SEQ ID NO: 646392 - DNA, 57 bp, Artificial; identical to SEQ ID NO: 141625
  Synthetic oligonucleotide

SEQ ID NO: 646393 - DNA, 55 bp, Artificial; identical to SEQ ID NO: 181667
  Synthetic oligonucleotide

SEQ ID NO: 646394 - DNA, 52 bp, Artificial; identical to SEQ ID NO: 195233
  Synthetic oligonucleotide

SEQ ID NO: 646395 - DNA, 51 bp, Artificial; identical to SEQ ID NO: 205750
  Synthetic oligonucleotide

SEQ ID NO: 646396 - DNA, 55 bp, Artificial; identical to SEQ ID NO: 238274
  Synthetic oligonucleotide

SEQ ID NO: 646397 - DNA, 55 bp, Artificial; identical to SEQ ID NO: 181666
  Synthetic oligonucleotide

SEQ ID NO: 646398 - DNA, 55 bp, Artificial; identical to SEQ ID NO: 174677
  Synthetic oligonucleotide

SEQ ID NO: 646399 - DNA, 55 bp, Artificial; identical to SEQ ID NO: 211286
  Synthetic oligonucleotide

SEQ ID NO: 646400 - DNA, 55 bp, Artificial; identical to SEQ ID NO: 225089
  Synthetic oligonucleotide

SEQ ID NO: 646401 - DNA, 55 bp, Artificial; identical to SEQ ID NO: 161847
  Synthetic oligonucleotide

SEQ ID NO: 646402 - DNA, 52 bp, Artificial; identical to SEQ ID NO: 154691
  Synthetic oligonucleotide

SEQ ID NO: 646403 - DNA, 55 bp, Artificial; identical to SEQ ID NO: 224799
  Synthetic oligonucleotide

SEQ ID NO: 646404 - DNA, 51 bp, Artificial; identical to SEQ ID NO: 248078
  Synthetic oligonucleotide

SEQ ID NO: 646405 - DNA, 54 bp, Artificial; identical to SEQ ID NO: 200550
  Synthetic oligonucleotide

SEQ ID NO: 646406 - DNA, 55 bp, Artificial; identical to SEQ ID NO: 209178
  Synthetic oligonucleotide

SEQ ID NO: 646407 - DNA, 54 bp, Artificial; identical to SEQ ID NO: 248504
  Synthetic oligonucleotide

SEQ ID NO: 646408 - DNA, 55 bp, Artificial; identical to SEQ ID NO: 189000
  Synthetic oligonucleotide

SEQ ID NO: 646409 - DNA, 52 bp, Artificial; identical to SEQ ID NO: 174569
  Synthetic oligonucleotide

SEQ ID NO: 646410 - DNA, 52 bp, Artificial; identical to SEQ ID NO: 199684
  Synthetic oligonucleotide

SEQ ID NO: 646411 - DNA, 60 bp, Artificial; identical to SEQ ID NO: 144787
  Synthetic oligonucleotide

SEQ ID NO: 646412 - DNA, 56 bp, Artificial; identical to SEQ ID NO: 171080
  Synthetic oligonucleotide

SEQ ID NO: 646413 - DNA, 54 bp, Artificial; identical to SEQ ID NO: 147095
  Synthetic oligonucleotide

SEQ ID NO: 646414 - DNA, 55 bp, Artificial; identical to SEQ ID NO: 253003
  Synthetic oligonucleotide

SEQ ID NO: 646415 - DNA, 54 bp, Artificial; identical to SEQ ID NO: 199569
  Synthetic oligonucleotide

SEQ ID NO: 646416 - DNA, 55 bp, Artificial; identical to SEQ ID NO: 169252
  Synthetic oligonucleotide

SEQ ID NO: 646417 - DNA, 55 bp, Artificial; identical to SEQ ID NO: 254107
  Synthetic oligonucleotide

SEQ ID NO: 646418 - DNA, 55 bp, Artificial; identical to SEQ ID NO: 203709
  Synthetic oligonucleotide

SEQ ID NO: 646419 - DNA, 55 bp, Artificial; identical to SEQ ID NO: 234276
  Synthetic oligonucleotide

SEQ ID NO: 646420 - DNA, 59 bp, Artificial; identical to SEQ ID NO: 206954
  Synthetic oligonucleotide

SEQ ID NO: 646421 - DNA, 52 bp, Artificial; identical to SEQ ID NO: 145008
  Synthetic oligonucleotide

SEQ ID NO: 646422 - DNA, 51 bp, Artificial; identical to SEQ ID NO: 157717
  Synthetic oligonucleotide

SEQ ID NO: 646423 - DNA, 50 bp, Artificial; identical to SEQ ID NO: 200397
  Synthetic oligonucleotide

SEQ ID NO: 646424 - DNA, 55 bp, Artificial; identical to SEQ ID NO: 181664
  Synthetic oligonucleotide

SEQ ID NO: 646425 - DNA, 56 bp, Artificial; identical to SEQ ID NO: 165878
  Synthetic oligonucleotide

SEQ ID NO: 646426 - DNA, 55 bp, Artificial; identical to SEQ ID NO: 208498
  Synthetic oligonucleotide

SEQ ID NO: 646427 - DNA, 55 bp, Artificial; identical to SEQ ID NO: 160685
  Synthetic oligonucleotide

SEQ ID NO: 646428 - DNA, 60 bp, Artificial; identical to SEQ ID NO: 178032
  Synthetic oligonucleotide

SEQ ID NO: 646429 - DNA, 54 bp, Artificial; identical to SEQ ID NO: 246218
  Synthetic oligonucleotide

SEQ ID NO: 646430 - DNA, 51 bp, Artificial; identical to SEQ ID NO: 157718
  Synthetic oligonucleotide

SEQ ID NO: 646431 - DNA, 56 bp, Artificial; identical to SEQ ID NO: 147185
  Synthetic oligonucleotide

SEQ ID NO: 646432 - DNA, 51 bp, Artificial; identical to SEQ ID NO: 234560
  Synthetic oligonucleotide

SEQ ID NO: 646433 - DNA, 54 bp, Artificial; identical to SEQ ID NO: 249045
  Synthetic oligonucleotide

SEQ ID NO: 646434 - DNA, 59 bp, Artificial; identical to SEQ ID NO: 144451
  Synthetic oligonucleotide

SEQ ID NO: 646435 - DNA, 53 bp, Artificial; identical to SEQ ID NO: 188038
  Synthetic oligonucleotide

SEQ ID NO: 646436 - DNA, 60 bp, Artificial; identical to SEQ ID NO: 170928
  Synthetic oligonucleotide

SEQ ID NO: 646437 - DNA, 55 bp, Artificial; identical to SEQ ID NO: 153322
  Synthetic oligonucleotide

SEQ ID NO: 646438 - DNA, 55 bp, Artificial; identical to SEQ ID NO: 147965
  Synthetic oligonucleotide

SEQ ID NO: 646439 - DNA, 55 bp, Artificial; identical to SEQ ID NO: 244540
  Synthetic oligonucleotide

SEQ ID NO: 646440 - DNA, 57 bp, Artificial; identical to SEQ ID NO: 179497
  Synthetic oligonucleotide

SEQ ID NO: 646441 - DNA, 60 bp, Artificial; identical to SEQ ID NO: 151129
  Synthetic oligonucleotide

SEQ ID NO: 646442 - DNA, 56 bp, Artificial; identical to SEQ ID NO: 170921
  Synthetic oligonucleotide

SEQ ID NO: 646443 - DNA, 51 bp, Artificial; identical to SEQ ID NO: 157719
  Synthetic oligonucleotide

SEQ ID NO: 646444 - DNA, 51 bp, Artificial; identical to SEQ ID NO: 186803
  Synthetic oligonucleotide

SEQ ID NO: 646445 - DNA, 55 bp, Artificial; identical to SEQ ID NO: 244502
  Synthetic oligonucleotide

SEQ ID NO: 646446 - DNA, 51 bp, Artificial; identical to SEQ ID NO: 173587
  Synthetic oligonucleotide

SEQ ID NO: 646447 - DNA, 55 bp, Artificial; identical to SEQ ID NO: 262789
  Synthetic oligonucleotide

SEQ ID NO: 646448 - DNA, 55 bp, Artificial; identical to SEQ ID NO: 142120
  Synthetic oligonucleotide

SEQ ID NO: 646449 - DNA, 50 bp, Artificial; identical to SEQ ID NO: 150252
  Synthetic oligonucleotide

SEQ ID NO: 646450 - DNA, 55 bp, Artificial; identical to SEQ ID NO: 257127
  Synthetic oligonucleotide

SEQ ID NO: 646451 - DNA, 55 bp, Artificial; identical to SEQ ID NO: 212709
  Synthetic oligonucleotide

SEQ ID NO: 646452 - DNA, 60 bp, Artificial; identical to SEQ ID NO: 160574
  Synthetic oligonucleotide

SEQ ID NO: 646453 - DNA, 54 bp, Artificial; identical to SEQ ID NO: 175668
  Synthetic oligonucleotide

SEQ ID NO: 646454 - DNA, 50 bp, Artificial; identical to SEQ ID NO: 241507
  Synthetic oligonucleotide

SEQ ID NO: 646455 - DNA, 53 bp, Artificial; identical to SEQ ID NO: 223571
  Synthetic oligonucleotide

SEQ ID NO: 646456 - DNA, 55 bp, Artificial; identical to SEQ ID NO: 156078
  Synthetic oligonucleotide

SEQ ID NO: 646457 - DNA, 55 bp, Artificial; identical to SEQ ID NO: 257051
  Synthetic oligonucleotide

SEQ ID NO: 646458 - DNA, 55 bp, Artificial; identical to SEQ ID NO: 257611
  Synthetic oligonucleotide

SEQ ID NO: 646459 - DNA, 51 bp, Artificial; identical to SEQ ID NO: 218371
  Synthetic oligonucleotide

SEQ ID NO: 646460 - DNA, 59 bp, Artificial; identical to SEQ ID NO: 243680
  Synthetic oligonucleotide

SEQ ID NO: 646461 - DNA, 60 bp, Artificial; identical to SEQ ID NO: 168445
  Synthetic oligonucleotide

SEQ ID NO: 646462 - DNA, 60 bp, Artificial; identical to SEQ ID NO: 168434
  Synthetic oligonucleotide

SEQ ID NO: 646463 - DNA, 53 bp, Artificial; identical to SEQ ID NO: 147030
  Synthetic oligonucleotide

SEQ ID NO: 646464 - DNA, 54 bp, Artificial; identical to SEQ ID NO: 240571
  Synthetic oligonucleotide

SEQ ID NO: 646465 - DNA, 53 bp, Artificial; identical to SEQ ID NO: 222700
  Synthetic oligonucleotide

SEQ ID NO: 646466 - DNA, 53 bp, Artificial; identical to SEQ ID NO: 208734
  Synthetic oligonucleotide

SEQ ID NO: 646467 - DNA, 55 bp, Artificial; identical to SEQ ID NO: 174356
  Synthetic oligonucleotide

SEQ ID NO: 646468 - DNA, 50 bp, Artificial; identical to SEQ ID NO: 221842
  Synthetic oligonucleotide

SEQ ID NO: 646469 - DNA, 55 bp, Artificial; identical to SEQ ID NO: 257592
  Synthetic oligonucleotide

SEQ ID NO: 646470 - DNA, 52 bp, Artificial; identical to SEQ ID NO: 157625
  Synthetic oligonucleotide

SEQ ID NO: 646471 - DNA, 52 bp, Artificial; identical to SEQ ID NO: 186144
  Synthetic oligonucleotide

SEQ ID NO: 646472 - DNA, 53 bp, Artificial; identical to SEQ ID NO: 192059
  Synthetic oligonucleotide

SEQ ID NO: 646473 - DNA, 51 bp, Artificial; identical to SEQ ID NO: 165186
  Synthetic oligonucleotide

SEQ ID NO: 646474 - DNA, 55 bp, Artificial; identical to SEQ ID NO: 171611
  Synthetic oligonucleotide

SEQ ID NO: 646475 - DNA, 60 bp, Artificial; identical to SEQ ID NO: 225525
  Synthetic oligonucleotide

SEQ ID NO: 646476 - DNA, 59 bp, Artificial; identical to SEQ ID NO: 224358
  Synthetic oligonucleotide

SEQ ID NO: 646477 - DNA, 52 bp, Artificial; identical to SEQ ID NO: 258146
  Synthetic oligonucleotide

SEQ ID NO: 646478 - DNA, 55 bp, Artificial; identical to SEQ ID NO: 181656
  Synthetic oligonucleotide

SEQ ID NO: 646479 - DNA, 60 bp, Artificial; identical to SEQ ID NO: 194235
  Synthetic oligonucleotide

SEQ ID NO: 646480 - DNA, 52 bp, Artificial; identical to SEQ ID NO: 165069
  Synthetic oligonucleotide

SEQ ID NO: 646481 - DNA, 53 bp, Artificial; identical to SEQ ID NO: 261971
  Synthetic oligonucleotide

SEQ ID NO: 646482 - DNA, 50 bp, Artificial; identical to SEQ ID NO: 151245
  Synthetic oligonucleotide

SEQ ID NO: 646483 - DNA, 55 bp, Artificial; identical to SEQ ID NO: 205511
  Synthetic oligonucleotide

SEQ ID NO: 646484 - DNA, 55 bp, Artificial; identical to SEQ ID NO: 249039
  Synthetic oligonucleotide

SEQ ID NO: 646485 - DNA, 54 bp, Artificial; identical to SEQ ID NO: 151997
  Synthetic oligonucleotide

SEQ ID NO: 646486 - DNA, 56 bp, Artificial; identical to SEQ ID NO: 237972
  Synthetic oligonucleotide

SEQ ID NO: 646487 - DNA, 60 bp, Artificial; identical to SEQ ID NO: 212446
  Synthetic oligonucleotide

SEQ ID NO: 646488 - DNA, 55 bp, Artificial; identical to SEQ ID NO: 266120
  Synthetic oligonucleotide

SEQ ID NO: 646489 - DNA, 60 bp, Artificial; identical to SEQ ID NO: 151821
  Synthetic oligonucleotide

SEQ ID NO: 646490 - DNA, 59 bp, Artificial; identical to SEQ ID NO: 266079
  Synthetic oligonucleotide

SEQ ID NO: 646491 - DNA, 57 bp, Artificial; identical to SEQ ID NO: 178026
  Synthetic oligonucleotide

SEQ ID NO: 646492 - DNA, 55 bp, Artificial; identical to SEQ ID NO: 188222
  Synthetic oligonucleotide

SEQ ID NO: 646493 - DNA, 60 bp, Artificial; identical to SEQ ID NO: 178024
  Synthetic oligonucleotide

SEQ ID NO: 646494 - DNA, 53 bp, Artificial; identical to SEQ ID NO: 223569
  Synthetic oligonucleotide

SEQ ID NO: 646495 - DNA, 54 bp, Artificial; identical to SEQ ID NO: 249598
  Synthetic oligonucleotide

SEQ ID NO: 646496 - DNA, 55 bp, Artificial; identical to SEQ ID NO: 181654
  Synthetic oligonucleotide

SEQ ID NO: 646497 - DNA, 51 bp, Artificial; identical to SEQ ID NO: 186852
  Synthetic oligonucleotide

SEQ ID NO: 646498 - DNA, 51 bp, Artificial; identical to SEQ ID NO: 197684
  Synthetic oligonucleotide

SEQ ID NO: 646499 - DNA, 55 bp, Artificial; identical to SEQ ID NO: 171753
  Synthetic oligonucleotide

SEQ ID NO: 646500 - DNA, 55 bp, Artificial; identical to SEQ ID NO: 156080
  Synthetic oligonucleotide

SEQ ID NO: 646501 - DNA, 56 bp, Artificial; identical to SEQ ID NO: 238991
  Synthetic oligonucleotide

SEQ ID NO: 646502 - DNA, 54 bp, Artificial; identical to SEQ ID NO: 184942
  Synthetic oligonucleotide

SEQ ID NO: 646503 - DNA, 55 bp, Artificial; identical to SEQ ID NO: 220663
  Synthetic oligonucleotide

SEQ ID NO: 646504 - DNA, 55 bp, Artificial; identical to SEQ ID NO: 156081
  Synthetic oligonucleotide

SEQ ID NO: 646505 - DNA, 58 bp, Artificial; identical to SEQ ID NO: 178021
  Synthetic oligonucleotide

SEQ ID NO: 646506 - DNA, 55 bp, Artificial; identical to SEQ ID NO: 156082
  Synthetic oligonucleotide

SEQ ID NO: 646507 - DNA, 51 bp, Artificial; identical to SEQ ID NO: 170197
  Synthetic oligonucleotide

SEQ ID NO: 646508 - DNA, 54 bp, Artificial; identical to SEQ ID NO: 249035
  Synthetic oligonucleotide

SEQ ID NO: 646509 - DNA, 55 bp, Artificial; identical to SEQ ID NO: 187886
  Synthetic oligonucleotide

SEQ ID NO: 646510 - DNA, 55 bp, Artificial; identical to SEQ ID NO: 168612
  Synthetic oligonucleotide

SEQ ID NO: 646511 - DNA, 48 bp, Artificial; identical to SEQ ID NO: 155374
  Synthetic oligonucleotide

SEQ ID NO: 646512 - DNA, 55 bp, Artificial; identical to SEQ ID NO: 190406
  Synthetic oligonucleotide

SEQ ID NO: 646513 - DNA, 57 bp, Artificial; identical to SEQ ID NO: 141956
  Synthetic oligonucleotide

SEQ ID NO: 646514 - DNA, 60 bp, Artificial; identical to SEQ ID NO: 178020
  Synthetic oligonucleotide

SEQ ID NO: 646515 - DNA, 60 bp, Artificial; identical to SEQ ID NO: 237713
  Synthetic oligonucleotide

SEQ ID NO: 646516 - DNA, 55 bp, Artificial; identical to SEQ ID NO: 156084
  Synthetic oligonucleotide

SEQ ID NO: 646517 - DNA, 55 bp, Artificial; identical to SEQ ID NO: 156085
  Synthetic oligonucleotide

SEQ ID NO: 646518 - DNA, 57 bp, Artificial; identical to SEQ ID NO: 244799
  Synthetic oligonucleotide

SEQ ID NO: 646519 - DNA, 55 bp, Artificial; identical to SEQ ID NO: 151771
  Synthetic oligonucleotide

SEQ ID NO: 646520 - DNA, 60 bp, Artificial; identical to SEQ ID NO: 159598
  Synthetic oligonucleotide

SEQ ID NO: 646521 - DNA, 51 bp, Artificial; identical to SEQ ID NO: 154634
  Synthetic oligonucleotide

SEQ ID NO: 646522 - DNA, 54 bp, Artificial; identical to SEQ ID NO: 243037
  Synthetic oligonucleotide

SEQ ID NO: 646523 - DNA, 51 bp, Artificial; identical to SEQ ID NO: 157725
  Synthetic oligonucleotide

SEQ ID NO: 646524 - DNA, 55 bp, Artificial; identical to SEQ ID NO: 168603
  Synthetic oligonucleotide

SEQ ID NO: 646525 - DNA, 54 bp, Artificial; identical to SEQ ID NO: 185020
  Synthetic oligonucleotide

SEQ ID NO: 646526 - DNA, 58 bp, Artificial; identical to SEQ ID NO: 178011
  Synthetic oligonucleotide

SEQ ID NO: 646527 - DNA, 52 bp, Artificial; identical to SEQ ID NO: 149646
  Synthetic oligonucleotide

SEQ ID NO: 646528 - DNA, 56 bp, Artificial; identical to SEQ ID NO: 141627
  Synthetic oligonucleotide

SEQ ID NO: 646529 - DNA, 57 bp, Artificial; identical to SEQ ID NO: 187116
  Synthetic oligonucleotide

SEQ ID NO: 646530 - DNA, 57 bp, Artificial; identical to SEQ ID NO: 179345
  Synthetic oligonucleotide

SEQ ID NO: 646531 - DNA, 54 bp, Artificial; identical to SEQ ID NO: 238994
  Synthetic oligonucleotide

SEQ ID NO: 646532 - DNA, 55 bp, Artificial; identical to SEQ ID NO: 217533
  Synthetic oligonucleotide

SEQ ID NO: 646533 - DNA, 57 bp, Artificial; identical to SEQ ID NO: 179804
  Synthetic oligonucleotide

SEQ ID NO: 646534 - DNA, 51 bp, Artificial; identical to SEQ ID NO: 262673
  Synthetic oligonucleotide

SEQ ID NO: 646535 - DNA, 60 bp, Artificial; identical to SEQ ID NO: 243681
  Synthetic oligonucleotide

SEQ ID NO: 646536 - DNA, 54 bp, Artificial; identical to SEQ ID NO: 224795
  Synthetic oligonucleotide

SEQ ID NO: 646537 - DNA, 51 bp, Artificial; identical to SEQ ID NO: 218370
  Synthetic oligonucleotide

SEQ ID NO: 646538 - DNA, 53 bp, Artificial; identical to SEQ ID NO: 185617
  Synthetic oligonucleotide

SEQ ID NO: 646539 - DNA, 52 bp, Artificial; identical to SEQ ID NO: 203955
  Synthetic oligonucleotide

SEQ ID NO: 646540 - DNA, 51 bp, Artificial; identical to SEQ ID NO: 160946
  Synthetic oligonucleotide

SEQ ID NO: 646541 - DNA, 58 bp, Artificial; identical to SEQ ID NO: 191715
  Synthetic oligonucleotide

SEQ ID NO: 646542 - DNA, 59 bp, Artificial; identical to SEQ ID NO: 237570
  Synthetic oligonucleotide

SEQ ID NO: 646543 - DNA, 54 bp, Artificial; identical to SEQ ID NO: 149112
  Synthetic oligonucleotide

SEQ ID NO: 646544 - DNA, 54 bp, Artificial; identical to SEQ ID NO: 164772
  Synthetic oligonucleotide

SEQ ID NO: 646545 - DNA, 55 bp, Artificial; identical to SEQ ID NO: 239160
  Synthetic oligonucleotide

SEQ ID NO: 646546 - DNA, 52 bp, Artificial; identical to SEQ ID NO: 186152
  Synthetic oligonucleotide

SEQ ID NO: 646547 - DNA, 55 bp, Artificial; identical to SEQ ID NO: 222597
  Synthetic oligonucleotide

SEQ ID NO: 646548 - DNA, 53 bp, Artificial; identical to SEQ ID NO: 167306
  Synthetic oligonucleotide

SEQ ID NO: 646549 - DNA, 53 bp, Artificial; identical to SEQ ID NO: 246278
  Synthetic oligonucleotide

SEQ ID NO: 646550 - DNA, 54 bp, Artificial; identical to SEQ ID NO: 244520
  Synthetic oligonucleotide

SEQ ID NO: 646551 - DNA, 53 bp, Artificial; identical to SEQ ID NO: 206406
  Synthetic oligonucleotide

SEQ ID NO: 646552 - DNA, 55 bp, Artificial; identical to SEQ ID NO: 254106
  Synthetic oligonucleotide

SEQ ID NO: 646553 - DNA, 60 bp, Artificial; identical to SEQ ID NO: 201448
  Synthetic oligonucleotide

SEQ ID NO: 646554 - DNA, 51 bp, Artificial; identical to SEQ ID NO: 149745
  Synthetic oligonucleotide

SEQ ID NO: 646555 - DNA, 55 bp, Artificial; identical to SEQ ID NO: 249032
  Synthetic oligonucleotide

SEQ ID NO: 646556 - DNA, 50 bp, Artificial; identical to SEQ ID NO: 142658
  Synthetic oligonucleotide

SEQ ID NO: 646557 - DNA, 55 bp, Artificial; identical to SEQ ID NO: 244528
  Synthetic oligonucleotide

SEQ ID NO: 646558 - DNA, 60 bp, Artificial; identical to SEQ ID NO: 212445
  Synthetic oligonucleotide

SEQ ID NO: 646559 - DNA, 55 bp, Artificial; identical to SEQ ID NO: 193205
  Synthetic oligonucleotide

SEQ ID NO: 646560 - DNA, 53 bp, Artificial; identical to SEQ ID NO: 153562
  Synthetic oligonucleotide

SEQ ID NO: 646561 - DNA, 51 bp, Artificial; identical to SEQ ID NO: 149746
  Synthetic oligonucleotide

SEQ ID NO: 646562 - DNA, 55 bp, Artificial; identical to SEQ ID NO: 156036
  Synthetic oligonucleotide

SEQ ID NO: 646563 - DNA, 55 bp, Artificial; identical to SEQ ID NO: 181648
  Synthetic oligonucleotide

SEQ ID NO: 646564 - DNA, 55 bp, Artificial; identical to SEQ ID NO: 244527
  Synthetic oligonucleotide

SEQ ID NO: 646565 - DNA, 60 bp, Artificial; identical to SEQ ID NO: 177950
  Synthetic oligonucleotide

SEQ ID NO: 646566 - DNA, 55 bp, Artificial; identical to SEQ ID NO: 225088
  Synthetic oligonucleotide

SEQ ID NO: 646567 - DNA, 54 bp, Artificial; identical to SEQ ID NO: 262787
  Synthetic oligonucleotide

SEQ ID NO: 646568 - DNA, 54 bp, Artificial; identical to SEQ ID NO: 149162
  Synthetic oligonucleotide

SEQ ID NO: 646569 - DNA, 55 bp, Artificial; identical to SEQ ID NO: 181647
  Synthetic oligonucleotide

SEQ ID NO: 646570 - DNA, 50 bp, Artificial; identical to SEQ ID NO: 220900
  Synthetic oligonucleotide

SEQ ID NO: 646571 - DNA, 55 bp, Artificial; identical to SEQ ID NO: 198323
  Synthetic oligonucleotide

SEQ ID NO: 646572 - DNA, 58 bp, Artificial; identical to SEQ ID NO: 248600
  Synthetic oligonucleotide

SEQ ID NO: 646573 - DNA, 51 bp, Artificial; identical to SEQ ID NO: 241027
  Synthetic oligonucleotide

SEQ ID NO: 646574 - DNA, 50 bp, Artificial; identical to SEQ ID NO: 187134
  Synthetic oligonucleotide

SEQ ID NO: 646575 - DNA, 53 bp, Artificial; identical to SEQ ID NO: 247319
  Synthetic oligonucleotide

SEQ ID NO: 646576 - DNA, 50 bp, Artificial; identical to SEQ ID NO: 241480
  Synthetic oligonucleotide

SEQ ID NO: 646577 - DNA, 60 bp, Artificial; identical to SEQ ID NO: 239139
  Synthetic oligonucleotide

SEQ ID NO: 646578 - DNA, 53 bp, Artificial; identical to SEQ ID NO: 168896
  Synthetic oligonucleotide

SEQ ID NO: 646579 - DNA, 54 bp, Artificial; identical to SEQ ID NO: 238551
  Synthetic oligonucleotide

SEQ ID NO: 646580 - DNA, 50 bp, Artificial; identical to SEQ ID NO: 176978
  Synthetic oligonucleotide

SEQ ID NO: 646581 - DNA, 60 bp, Artificial; identical to SEQ ID NO: 239134
  Synthetic oligonucleotide

SEQ ID NO: 646582 - DNA, 60 bp, Artificial; identical to SEQ ID NO: 153554
  Synthetic oligonucleotide

SEQ ID NO: 646583 - DNA, 54 bp, Artificial; identical to SEQ ID NO: 185000
  Synthetic oligonucleotide

SEQ ID NO: 646584 - DNA, 60 bp, Artificial; identical to SEQ ID NO: 177944
  Synthetic oligonucleotide

SEQ ID NO: 646585 - DNA, 60 bp, Artificial; identical to SEQ ID NO: 201437
  Synthetic oligonucleotide

SEQ ID NO: 646586 - DNA, 59 bp, Artificial; identical to SEQ ID NO: 147017
  Synthetic oligonucleotide

SEQ ID NO: 646587 - DNA, 55 bp, Artificial; identical to SEQ ID NO: 151812
  Synthetic oligonucleotide

SEQ ID NO: 646588 - DNA, 57 bp, Artificial; identical to SEQ ID NO: 171063
  Synthetic oligonucleotide

SEQ ID NO: 646589 - DNA, 55 bp, Artificial; identical to SEQ ID NO: 168601
  Synthetic oligonucleotide

SEQ ID NO: 646590 - DNA, 55 bp, Artificial; identical to SEQ ID NO: 163918
  Synthetic oligonucleotide

SEQ ID NO: 646591 - DNA, 55 bp, Artificial; identical to SEQ ID NO: 212706
  Synthetic oligonucleotide

SEQ ID NO: 646592 - DNA, 60 bp, Artificial; identical to SEQ ID NO: 165334
  Synthetic oligonucleotide

SEQ ID NO: 646593 - DNA, 55 bp, Artificial; identical to SEQ ID NO: 171577
  Synthetic oligonucleotide

SEQ ID NO: 646594 - DNA, 60 bp, Artificial; identical to SEQ ID NO: 212444
  Synthetic oligonucleotide

SEQ ID NO: 646595 - DNA, 59 bp, Artificial; identical to SEQ ID NO: 147013
  Synthetic oligonucleotide

SEQ ID NO: 646596 - DNA, 56 bp, Artificial; identical to SEQ ID NO: 239132
  Synthetic oligonucleotide

SEQ ID NO: 646597 - DNA, 53 bp, Artificial; identical to SEQ ID NO: 233977
  Synthetic oligonucleotide

SEQ ID NO: 646598 - DNA, 56 bp, Artificial; identical to SEQ ID NO: 197852
  Synthetic oligonucleotide

SEQ ID NO: 646599 - DNA, 59 bp, Artificial; identical to SEQ ID NO: 239222
  Synthetic oligonucleotide

SEQ ID NO: 646600 - DNA, 56 bp, Artificial; identical to SEQ ID NO: 170890
  Synthetic oligonucleotide

SEQ ID NO: 646601 - DNA, 59 bp, Artificial; identical to SEQ ID NO: 256492
  Synthetic oligonucleotide

SEQ ID NO: 646602 - DNA, 57 bp, Artificial; identical to SEQ ID NO: 151319
  Synthetic oligonucleotide

SEQ ID NO: 646603 - DNA, 55 bp, Artificial; identical to SEQ ID NO: 163919
  Synthetic oligonucleotide

SEQ ID NO: 646604 - DNA, 60 bp, Artificial; identical to SEQ ID NO: 217004
  Synthetic oligonucleotide

SEQ ID NO: 646605 - DNA, 57 bp, Artificial; identical to SEQ ID NO: 239127
  Synthetic oligonucleotide

SEQ ID NO: 646606 - DNA, 52 bp, Artificial; identical to SEQ ID NO: 188108
  Synthetic oligonucleotide

SEQ ID NO: 646607 - DNA, 55 bp, Artificial; identical to SEQ ID NO: 194554
  Synthetic oligonucleotide

SEQ ID NO: 646608 - DNA, 50 bp, Artificial; identical to SEQ ID NO: 150483
  Synthetic oligonucleotide

SEQ ID NO: 646609 - DNA, 58 bp, Artificial; identical to SEQ ID NO: 151599
  Synthetic oligonucleotide

SEQ ID NO: 646610 - DNA, 51 bp, Artificial; identical to SEQ ID NO: 155591
  Synthetic oligonucleotide

SEQ ID NO: 646611 - DNA, 55 bp, Artificial; identical to SEQ ID NO: 211284
  Synthetic oligonucleotide

SEQ ID NO: 646612 - DNA, 56 bp, Artificial; identical to SEQ ID NO: 217005
  Synthetic oligonucleotide

SEQ ID NO: 646613 - DNA, 52 bp, Artificial; identical to SEQ ID NO: 157624
  Synthetic oligonucleotide

SEQ ID NO: 646614 - DNA, 55 bp, Artificial; identical to SEQ ID NO: 163920
  Synthetic oligonucleotide

SEQ ID NO: 646615 - DNA, 48 bp, Artificial; identical to SEQ ID NO: 200543
  Synthetic oligonucleotide

SEQ ID NO: 646616 - DNA, 50 bp, Artificial; identical to SEQ ID NO: 233886
  Synthetic oligonucleotide

SEQ ID NO: 646617 - DNA, 53 bp, Artificial; identical to SEQ ID NO: 157325
  Synthetic oligonucleotide

SEQ ID NO: 646618 - DNA, 55 bp, Artificial; identical to SEQ ID NO: 160262
  Synthetic oligonucleotide

SEQ ID NO: 646619 - DNA, 58 bp, Artificial; identical to SEQ ID NO: 200542
  Synthetic oligonucleotide

SEQ ID NO: 646620 - DNA, 55 bp, Artificial; identical to SEQ ID NO: 155373
  Synthetic oligonucleotide

SEQ ID NO: 646621 - DNA, 59 bp, Artificial; identical to SEQ ID NO: 150898
  Synthetic oligonucleotide

SEQ ID NO: 646622 - DNA, 55 bp, Artificial; identical to SEQ ID NO: 224957
  Synthetic oligonucleotide

SEQ ID NO: 646623 - DNA, 60 bp, Artificial; identical to SEQ ID NO: 200541
  Synthetic oligonucleotide

SEQ ID NO: 646624 - DNA, 55 bp, Artificial; identical to SEQ ID NO: 244504
  Synthetic oligonucleotide

SEQ ID NO: 646625 - DNA, 60 bp, Artificial; identical to SEQ ID NO: 239123
  Synthetic oligonucleotide

SEQ ID NO: 646626 - DNA, 56 bp, Artificial; identical to SEQ ID NO: 256681
  Synthetic oligonucleotide

SEQ ID NO: 646627 - DNA, 51 bp, Artificial; identical to SEQ ID NO: 203019
  Synthetic oligonucleotide

SEQ ID NO: 646628 - DNA, 56 bp, Artificial; identical to SEQ ID NO: 147330
  Synthetic oligonucleotide

SEQ ID NO: 646629 - DNA, 58 bp, Artificial; identical to SEQ ID NO: 141628
  Synthetic oligonucleotide

SEQ ID NO: 646630 - DNA, 60 bp, Artificial; identical to SEQ ID NO: 153654
  Synthetic oligonucleotide

SEQ ID NO: 646631 - DNA, 51 bp, Artificial; identical to SEQ ID NO: 149747
  Synthetic oligonucleotide

SEQ ID NO: 646632 - DNA, 52 bp, Artificial; identical to SEQ ID NO: 186111
  Synthetic oligonucleotide

SEQ ID NO: 646633 - DNA, 55 bp, Artificial; identical to SEQ ID NO: 198321
  Synthetic oligonucleotide

SEQ ID NO: 646634 - DNA, 55 bp, Artificial; identical to SEQ ID NO: 238303
  Synthetic oligonucleotide

SEQ ID NO: 646635 - DNA, 51 bp, Artificial; identical to SEQ ID NO: 149750
  Synthetic oligonucleotide

SEQ ID NO: 646636 - DNA, 55 bp, Artificial; identical to SEQ ID NO: 168599
  Synthetic oligonucleotide

SEQ ID NO: 646637 - DNA, 57 bp, Artificial; identical to SEQ ID NO: 145020
  Synthetic oligonucleotide

SEQ ID NO: 646638 - DNA, 52 bp, Artificial; identical to SEQ ID NO: 196170
  Synthetic oligonucleotide

SEQ ID NO: 646639 - DNA, 53 bp, Artificial; identical to SEQ ID NO: 160319
  Synthetic oligonucleotide

SEQ ID NO: 646640 - DNA, 52 bp, Artificial; identical to SEQ ID NO: 174863
  Synthetic oligonucleotide

SEQ ID NO: 646641 - DNA, 55 bp, Artificial; identical to SEQ ID NO: 249017
  Synthetic oligonucleotide

SEQ ID NO: 646642 - DNA, 55 bp, Artificial; identical to SEQ ID NO: 249077
  Synthetic oligonucleotide

SEQ ID NO: 646643 - DNA, 55 bp, Artificial; identical to SEQ ID NO: 221485
  Synthetic oligonucleotide

SEQ ID NO: 646644 - DNA, 55 bp, Artificial; identical to SEQ ID NO: 147927
  Synthetic oligonucleotide

SEQ ID NO: 646645 - DNA, 55 bp, Artificial; identical to SEQ ID NO: 202182
  Synthetic oligonucleotide

SEQ ID NO: 646646 - DNA, 59 bp, Artificial; identical to SEQ ID NO: 212442
  Synthetic oligonucleotide

SEQ ID NO: 646647 - DNA, 55 bp, Artificial; identical to SEQ ID NO: 163922
  Synthetic oligonucleotide

SEQ ID NO: 646648 - DNA, 55 bp, Artificial; identical to SEQ ID NO: 205512
  Synthetic oligonucleotide

SEQ ID NO: 646649 - DNA, 60 bp, Artificial; identical to SEQ ID NO: 243683
  Synthetic oligonucleotide

SEQ ID NO: 646650 - DNA, 52 bp, Artificial; identical to SEQ ID NO: 208530
  Synthetic oligonucleotide

SEQ ID NO: 646651 - DNA, 60 bp, Artificial; identical to SEQ ID NO: 247280
  Synthetic oligonucleotide

SEQ ID NO: 646652 - DNA, 52 bp, Artificial; identical to SEQ ID NO: 190405
  Synthetic oligonucleotide

SEQ ID NO: 646653 - DNA, 52 bp, Artificial; identical to SEQ ID NO: 155562
  Synthetic oligonucleotide

SEQ ID NO: 646654 - DNA, 55 bp, Artificial; identical to SEQ ID NO: 153334
  Synthetic oligonucleotide

SEQ ID NO: 646655 - DNA, 55 bp, Artificial; identical to SEQ ID NO: 156040
  Synthetic oligonucleotide

SEQ ID NO: 646656 - DNA, 54 bp, Artificial; identical to SEQ ID NO: 149143
  Synthetic oligonucleotide

SEQ ID NO: 646657 - DNA, 55 bp, Artificial; identical to SEQ ID NO: 244501
  Synthetic oligonucleotide

SEQ ID NO: 646658 - DNA, 55 bp, Artificial; identical to SEQ ID NO: 181414
  Synthetic oligonucleotide

SEQ ID NO: 646659 - DNA, 57 bp, Artificial; identical to SEQ ID NO: 168356
  Synthetic oligonucleotide

SEQ ID NO: 646660 - DNA, 55 bp, Artificial; identical to SEQ ID NO: 147924
  Synthetic oligonucleotide

SEQ ID NO: 646661 - DNA, 55 bp, Artificial; identical to SEQ ID NO: 156041
  Synthetic oligonucleotide

SEQ ID NO: 646662 - DNA, 52 bp, Artificial; identical to SEQ ID NO: 266285
  Synthetic oligonucleotide

SEQ ID NO: 646663 - DNA, 54 bp, Artificial; identical to SEQ ID NO: 149157
  Synthetic oligonucleotide

SEQ ID NO: 646664 - DNA, 60 bp, Artificial; identical to SEQ ID NO: 141629
  Synthetic oligonucleotide

SEQ ID NO: 646665 - DNA, 59 bp, Artificial; identical to SEQ ID NO: 141919
  Synthetic oligonucleotide

SEQ ID NO: 646666 - DNA, 55 bp, Artificial; identical to SEQ ID NO: 217536
  Synthetic oligonucleotide

SEQ ID NO: 646667 - DNA, 51 bp, Artificial; identical to SEQ ID NO: 208528
  Synthetic oligonucleotide

SEQ ID NO: 646668 - DNA, 55 bp, Artificial; identical to SEQ ID NO: 181411
  Synthetic oligonucleotide

SEQ ID NO: 646669 - DNA, 51 bp, Artificial; identical to SEQ ID NO: 174918
  Synthetic oligonucleotide

SEQ ID NO: 646670 - DNA, 52 bp, Artificial; identical to SEQ ID NO: 255473
  Synthetic oligonucleotide

SEQ ID NO: 646671 - DNA, 59 bp, Artificial; identical to SEQ ID NO: 150904
  Synthetic oligonucleotide

SEQ ID NO: 646672 - DNA, 54 bp, Artificial; identical to SEQ ID NO: 243684
  Synthetic oligonucleotide

SEQ ID NO: 646673 - DNA, 58 bp, Artificial; identical to SEQ ID NO: 224340
  Synthetic oligonucleotide

SEQ ID NO: 646674 - DNA, 55 bp, Artificial; identical to SEQ ID NO: 159786
  Synthetic oligonucleotide

SEQ ID NO: 646675 - DNA, 56 bp, Artificial; identical to SEQ ID NO: 212534
  Synthetic oligonucleotide

SEQ ID NO: 646676 - DNA, 55 bp, Artificial; identical to SEQ ID NO: 150906
  Synthetic oligonucleotide

SEQ ID NO: 646677 - DNA, 50 bp, Artificial; identical to SEQ ID NO: 150456
  Synthetic oligonucleotide

SEQ ID NO: 646678 - DNA, 60 bp, Artificial; identical to SEQ ID NO: 177931
  Synthetic oligonucleotide

SEQ ID NO: 646679 - DNA, 52 bp, Artificial; identical to SEQ ID NO: 208749
  Synthetic oligonucleotide

SEQ ID NO: 646680 - DNA, 60 bp, Artificial; identical to SEQ ID NO: 256432
  Synthetic oligonucleotide

SEQ ID NO: 646681 - DNA, 51 bp, Artificial; identical to SEQ ID NO: 223770
  Synthetic oligonucleotide

SEQ ID NO: 646682 - DNA, 58 bp, Artificial; identical to SEQ ID NO: 150908
  Synthetic oligonucleotide

SEQ ID NO: 646683 - DNA, 59 bp, Artificial; identical to SEQ ID NO: 200540
  Synthetic oligonucleotide

SEQ ID NO: 646684 - DNA, 54 bp, Artificial; identical to SEQ ID NO: 266258
  Synthetic oligonucleotide

SEQ ID NO: 646685 - DNA, 51 bp, Artificial; identical to SEQ ID NO: 197652
  Synthetic oligonucleotide

SEQ ID NO: 646686 - DNA, 57 bp, Artificial; identical to SEQ ID NO: 247525
  Synthetic oligonucleotide

SEQ ID NO: 646687 - DNA, 55 bp, Artificial; identical to SEQ ID NO: 142121
  Synthetic oligonucleotide

SEQ ID NO: 646688 - DNA, 55 bp, Artificial; identical to SEQ ID NO: 249075
  Synthetic oligonucleotide

SEQ ID NO: 646689 - DNA, 55 bp, Artificial; identical to SEQ ID NO: 252709
  Synthetic oligonucleotide

SEQ ID NO: 646690 - DNA, 54 bp, Artificial; identical to SEQ ID NO: 233974
  Synthetic oligonucleotide

SEQ ID NO: 646691 - DNA, 54 bp, Artificial; identical to SEQ ID NO: 160362
  Synthetic oligonucleotide

SEQ ID NO: 646692 - DNA, 55 bp, Artificial; identical to SEQ ID NO: 233444
  Synthetic oligonucleotide

SEQ ID NO: 646693 - DNA, 53 bp, Artificial; identical to SEQ ID NO: 192054
  Synthetic oligonucleotide

SEQ ID NO: 646694 - DNA, 54 bp, Artificial; identical to SEQ ID NO: 246229
  Synthetic oligonucleotide

SEQ ID NO: 646695 - DNA, 55 bp, Artificial; identical to SEQ ID NO: 196156
  Synthetic oligonucleotide

SEQ ID NO: 646696 - DNA, 58 bp, Artificial; identical to SEQ ID NO: 157243
  Synthetic oligonucleotide

SEQ ID NO: 646697 - DNA, 50 bp, Artificial; identical to SEQ ID NO: 261982
  Synthetic oligonucleotide

SEQ ID NO: 646698 - DNA, 55 bp, Artificial; identical to SEQ ID NO: 203712
  Synthetic oligonucleotide

SEQ ID NO: 646699 - DNA, 55 bp, Artificial; identical to SEQ ID NO: 187908
  Synthetic oligonucleotide

SEQ ID NO: 646700 - DNA, 50 bp, Artificial; identical to SEQ ID NO: 176987
  Synthetic oligonucleotide

SEQ ID NO: 646701 - DNA, 55 bp, Artificial; identical to SEQ ID NO: 238301
  Synthetic oligonucleotide

SEQ ID NO: 646702 - DNA, 58 bp, Artificial; identical to SEQ ID NO: 237917
  Synthetic oligonucleotide

SEQ ID NO: 646703 - DNA, 53 bp, Artificial; identical to SEQ ID NO: 237581
  Synthetic oligonucleotide

SEQ ID NO: 646704 - DNA, 60 bp, Artificial; identical to SEQ ID NO: 234264
  Synthetic oligonucleotide

SEQ ID NO: 646705 - DNA, 52 bp, Artificial; identical to SEQ ID NO: 193111
  Synthetic oligonucleotide

SEQ ID NO: 646706 - DNA, 55 bp, Artificial; identical to SEQ ID NO: 203713
  Synthetic oligonucleotide

SEQ ID NO: 646707 - DNA, 57 bp, Artificial; identical to SEQ ID NO: 266097
  Synthetic oligonucleotide

SEQ ID NO: 646708 - DNA, 51 bp, Artificial; identical to SEQ ID NO: 208841
  Synthetic oligonucleotide

SEQ ID NO: 646709 - DNA, 55 bp, Artificial; identical to SEQ ID NO: 203715
  Synthetic oligonucleotide

SEQ ID NO: 646710 - DNA, 55 bp, Artificial; identical to SEQ ID NO: 147729
  Synthetic oligonucleotide

SEQ ID NO: 646711 - DNA, 50 bp, Artificial; identical to SEQ ID NO: 241489
  Synthetic oligonucleotide

SEQ ID NO: 646712 - DNA, 60 bp, Artificial; identical to SEQ ID NO: 200536
  Synthetic oligonucleotide

SEQ ID NO: 646713 - DNA, 59 bp, Artificial; identical to SEQ ID NO: 248580
  Synthetic oligonucleotide

SEQ ID NO: 646714 - DNA, 54 bp, Artificial; identical to SEQ ID NO: 216583
  Synthetic oligonucleotide

SEQ ID NO: 646715 - DNA, 60 bp, Artificial; identical to SEQ ID NO: 144418
  Synthetic oligonucleotide

SEQ ID NO: 646716 - DNA, 54 bp, Artificial; identical to SEQ ID NO: 223552
  Synthetic oligonucleotide

SEQ ID NO: 646717 - DNA, 55 bp, Artificial; identical to SEQ ID NO: 239891
  Synthetic oligonucleotide

SEQ ID NO: 646718 - DNA, 60 bp, Artificial; identical to SEQ ID NO: 161927
  Synthetic oligonucleotide

SEQ ID NO: 646719 - DNA, 60 bp, Artificial; identical to SEQ ID NO: 200578
  Synthetic oligonucleotide

SEQ ID NO: 646720 - DNA, 60 bp, Artificial; identical to SEQ ID NO: 247260
  Synthetic oligonucleotide

SEQ ID NO: 646721 - DNA, 56 bp, Artificial; identical to SEQ ID NO: 180004
  Synthetic oligonucleotide

SEQ ID NO: 646722 - DNA, 58 bp, Artificial; identical to SEQ ID NO: 243685
  Synthetic oligonucleotide

SEQ ID NO: 646723 - DNA, 55 bp, Artificial; identical to SEQ ID NO: 166951
  Synthetic oligonucleotide

SEQ ID NO: 646724 - DNA, 60 bp, Artificial; identical to SEQ ID NO: 258241
  Synthetic oligonucleotide

SEQ ID NO: 646725 - DNA, 53 bp, Artificial; identical to SEQ ID NO: 174834
  Synthetic oligonucleotide

SEQ ID NO: 646726 - DNA, 50 bp, Artificial; identical to SEQ ID NO: 167801
  Synthetic oligonucleotide

SEQ ID NO: 646727 - DNA, 54 bp, Artificial; identical to SEQ ID NO: 194907
  Synthetic oligonucleotide

SEQ ID NO: 646728 - DNA, 58 bp, Artificial; identical to SEQ ID NO: 200577
  Synthetic oligonucleotide

SEQ ID NO: 646729 - DNA, 51 bp, Artificial; identical to SEQ ID NO: 237171
  Synthetic oligonucleotide

SEQ ID NO: 646730 - DNA, 54 bp, Artificial; identical to SEQ ID NO: 193245
  Synthetic oligonucleotide

SEQ ID NO: 646731 - DNA, 55 bp, Artificial; identical to SEQ ID NO: 156044
  Synthetic oligonucleotide

SEQ ID NO: 646732 - DNA, 60 bp, Artificial; identical to SEQ ID NO: 237592
  Synthetic oligonucleotide

SEQ ID NO: 646733 - DNA, 51 bp, Artificial; identical to SEQ ID NO: 223771
  Synthetic oligonucleotide

SEQ ID NO: 646734 - DNA, 55 bp, Artificial; identical to SEQ ID NO: 144419
  Synthetic oligonucleotide

SEQ ID NO: 646735 - DNA, 58 bp, Artificial; identical to SEQ ID NO: 267331
  Synthetic oligonucleotide

SEQ ID NO: 646736 - DNA, 53 bp, Artificial; identical to SEQ ID NO: 141252
  Synthetic oligonucleotide

SEQ ID NO: 646737 - DNA, 53 bp, Artificial; identical to SEQ ID NO: 205665
  Synthetic oligonucleotide

SEQ ID NO: 646738 - DNA, 59 bp, Artificial; identical to SEQ ID NO: 143883
  Synthetic oligonucleotide

SEQ ID NO: 646739 - DNA, 55 bp, Artificial; identical to SEQ ID NO: 224954
  Synthetic oligonucleotide

SEQ ID NO: 646740 - DNA, 55 bp, Artificial; identical to SEQ ID NO: 147750
  Synthetic oligonucleotide

SEQ ID NO: 646741 - DNA, 53 bp, Artificial; identical to SEQ ID NO: 243686
  Synthetic oligonucleotide

SEQ ID NO: 646742 - DNA, 58 bp, Artificial; identical to SEQ ID NO: 223894
  Synthetic oligonucleotide

SEQ ID NO: 646743 - DNA, 54 bp, Artificial; identical to SEQ ID NO: 168323
  Synthetic oligonucleotide

SEQ ID NO: 646744 - DNA, 51 bp, Artificial; identical to SEQ ID NO: 259538
  Synthetic oligonucleotide

SEQ ID NO: 646745 - DNA, 54 bp, Artificial; identical to SEQ ID NO: 240560
  Synthetic oligonucleotide

SEQ ID NO: 646746 - DNA, 60 bp, Artificial; identical to SEQ ID NO: 200575
  Synthetic oligonucleotide

SEQ ID NO: 646747 - DNA, 55 bp, Artificial; identical to SEQ ID NO: 239604
  Synthetic oligonucleotide

SEQ ID NO: 646748 - DNA, 55 bp, Artificial; identical to SEQ ID NO: 156045
  Synthetic oligonucleotide

SEQ ID NO: 646749 - DNA, 60 bp, Artificial; identical to SEQ ID NO: 160264
  Synthetic oligonucleotide

SEQ ID NO: 646750 - DNA, 55 bp, Artificial; identical to SEQ ID NO: 142122
  Synthetic oligonucleotide

SEQ ID NO: 646751 - DNA, 55 bp, Artificial; identical to SEQ ID NO: 208527
  Synthetic oligonucleotide

SEQ ID NO: 646752 - DNA, 55 bp, Artificial; identical to SEQ ID NO: 181407
  Synthetic oligonucleotide

SEQ ID NO: 646753 - DNA, 60 bp, Artificial; identical to SEQ ID NO: 159453
  Synthetic oligonucleotide

SEQ ID NO: 646754 - DNA, 54 bp, Artificial; identical to SEQ ID NO: 246230
  Synthetic oligonucleotide

SEQ ID NO: 646755 - DNA, 50 bp, Artificial; identical to SEQ ID NO: 189741
  Synthetic oligonucleotide

SEQ ID NO: 646756 - DNA, 52 bp, Artificial; identical to SEQ ID NO: 186120
  Synthetic oligonucleotide

SEQ ID NO: 646757 - DNA, 53 bp, Artificial; identical to SEQ ID NO: 185564
  Synthetic oligonucleotide

SEQ ID NO: 646758 - DNA, 60 bp, Artificial; identical to SEQ ID NO: 167246
  Synthetic oligonucleotide

SEQ ID NO: 646759 - DNA, 50 bp, Artificial; identical to SEQ ID NO: 165503
  Synthetic oligonucleotide

SEQ ID NO: 646760 - DNA, 55 bp, Artificial; identical to SEQ ID NO: 156046
  Synthetic oligonucleotide

SEQ ID NO: 646761 - DNA, 50 bp, Artificial; identical to SEQ ID NO: 145140
  Synthetic oligonucleotide

SEQ ID NO: 646762 - DNA, 55 bp, Artificial; identical to SEQ ID NO: 168284
  Synthetic oligonucleotide

SEQ ID NO: 646763 - DNA, 55 bp, Artificial; identical to SEQ ID NO: 154071
  Synthetic oligonucleotide

SEQ ID NO: 646764 - DNA, 51 bp, Artificial; identical to SEQ ID NO: 255658
  Synthetic oligonucleotide

SEQ ID NO: 646765 - DNA, 50 bp, Artificial; identical to SEQ ID NO: 158046
  Synthetic oligonucleotide

SEQ ID NO: 646766 - DNA, 53 bp, Artificial; identical to SEQ ID NO: 149374
  Synthetic oligonucleotide

SEQ ID NO: 646767 - DNA, 60 bp, Artificial; identical to SEQ ID NO: 256473
  Synthetic oligonucleotide

SEQ ID NO: 646768 - DNA, 55 bp, Artificial; identical to SEQ ID NO: 181406
  Synthetic oligonucleotide

SEQ ID NO: 646769 - DNA, 57 bp, Artificial; identical to SEQ ID NO: 200574
  Synthetic oligonucleotide

SEQ ID NO: 646770 - DNA, 51 bp, Artificial; identical to SEQ ID NO: 249683
  Synthetic oligonucleotide

SEQ ID NO: 646771 - DNA, 55 bp, Artificial; identical to SEQ ID NO: 181405
  Synthetic oligonucleotide

SEQ ID NO: 646772 - DNA, 56 bp, Artificial; identical to SEQ ID NO: 208070
  Synthetic oligonucleotide

SEQ ID NO: 646773 - DNA, 57 bp, Artificial; identical to SEQ ID NO: 177976
  Synthetic oligonucleotide

SEQ ID NO: 646774 - DNA, 55 bp, Artificial; identical to SEQ ID NO: 217538
  Synthetic oligonucleotide

SEQ ID NO: 646775 - DNA, 55 bp, Artificial; identical to SEQ ID NO: 181402
  Synthetic oligonucleotide

SEQ ID NO: 646776 - DNA, 56 bp, Artificial; identical to SEQ ID NO: 247282
  Synthetic oligonucleotide

SEQ ID NO: 646777 - DNA, 51 bp, Artificial; identical to SEQ ID NO: 216770
  Synthetic oligonucleotide

SEQ ID NO: 646778 - DNA, 51 bp, Artificial; identical to SEQ ID NO: 145063
  Synthetic oligonucleotide

SEQ ID NO: 646779 - DNA, 60 bp, Artificial; identical to SEQ ID NO: 212438
  Synthetic oligonucleotide

SEQ ID NO: 646780 - DNA, 53 bp, Artificial; identical to SEQ ID NO: 180031
  Synthetic oligonucleotide

SEQ ID NO: 646781 - DNA, 55 bp, Artificial; identical to SEQ ID NO: 189009
  Synthetic oligonucleotide

SEQ ID NO: 646782 - DNA, 51 bp, Artificial; identical to SEQ ID NO: 218369
  Synthetic oligonucleotide

SEQ ID NO: 646783 - DNA, 60 bp, Artificial; identical to SEQ ID NO: 177972
  Synthetic oligonucleotide

SEQ ID NO: 646784 - DNA, 55 bp, Artificial; identical to SEQ ID NO: 211279
  Synthetic oligonucleotide

SEQ ID NO: 646785 - DNA, 55 bp, Artificial; identical to SEQ ID NO: 181400
  Synthetic oligonucleotide

SEQ ID NO: 646786 - DNA, 55 bp, Artificial; identical to SEQ ID NO: 141632
  Synthetic oligonucleotide

SEQ ID NO: 646787 - DNA, 55 bp, Artificial; identical to SEQ ID NO: 197266
  Synthetic oligonucleotide

SEQ ID NO: 646788 - DNA, 60 bp, Artificial; identical to SEQ ID NO: 177970
  Synthetic oligonucleotide

SEQ ID NO: 646789 - DNA, 51 bp, Artificial; identical to SEQ ID NO: 223774
  Synthetic oligonucleotide

SEQ ID NO: 646790 - DNA, 55 bp, Artificial; identical to SEQ ID NO: 254165
  Synthetic oligonucleotide

SEQ ID NO: 646791 - DNA, 57 bp, Artificial; identical to SEQ ID NO: 210504
  Synthetic oligonucleotide

SEQ ID NO: 646792 - DNA, 56 bp, Artificial; identical to SEQ ID NO: 170983
  Synthetic oligonucleotide

SEQ ID NO: 646793 - DNA, 55 bp, Artificial; identical to SEQ ID NO: 211277
  Synthetic oligonucleotide

SEQ ID NO: 646794 - DNA, 56 bp, Artificial; identical to SEQ ID NO: 180024
  Synthetic oligonucleotide

SEQ ID NO: 646795 - DNA, 50 bp, Artificial; identical to SEQ ID NO: 261839
  Synthetic oligonucleotide

SEQ ID NO: 646796 - DNA, 52 bp, Artificial; identical to SEQ ID NO: 216729
  Synthetic oligonucleotide

SEQ ID NO: 646797 - DNA, 55 bp, Artificial; identical to SEQ ID NO: 260195
  Synthetic oligonucleotide

SEQ ID NO: 646798 - DNA, 55 bp, Artificial; identical to SEQ ID NO: 254166
  Synthetic oligonucleotide

SEQ ID NO: 646799 - DNA, 60 bp, Artificial; identical to SEQ ID NO: 177966
  Synthetic oligonucleotide

SEQ ID NO: 646800 - DNA, 60 bp, Artificial; identical to SEQ ID NO: 177965
  Synthetic oligonucleotide

SEQ ID NO: 646801 - DNA, 55 bp, Artificial; identical to SEQ ID NO: 208526
  Synthetic oligonucleotide

SEQ ID NO: 646802 - DNA, 60 bp, Artificial; identical to SEQ ID NO: 170989
  Synthetic oligonucleotide

SEQ ID NO: 646803 - DNA, 55 bp, Artificial; identical to SEQ ID NO: 219684
  Synthetic oligonucleotide

SEQ ID NO: 646804 - DNA, 55 bp, Artificial; identical to SEQ ID NO: 238403
  Synthetic oligonucleotide

SEQ ID NO: 646805 - DNA, 55 bp, Artificial; identical to SEQ ID NO: 254169
  Synthetic oligonucleotide

SEQ ID NO: 646806 - DNA, 55 bp, Artificial; identical to SEQ ID NO: 156048
  Synthetic oligonucleotide

SEQ ID NO: 646807 - DNA, 55 bp, Artificial; identical to SEQ ID NO: 156049
  Synthetic oligonucleotide

SEQ ID NO: 646808 - DNA, 57 bp, Artificial; identical to SEQ ID NO: 179821
  Synthetic oligonucleotide

SEQ ID NO: 646809 - DNA, 58 bp, Artificial; identical to SEQ ID NO: 170941
  Synthetic oligonucleotide

SEQ ID NO: 646810 - DNA, 50 bp, Artificial; identical to SEQ ID NO: 233899
  Synthetic oligonucleotide

SEQ ID NO: 646811 - DNA, 55 bp, Artificial; identical to SEQ ID NO: 244617
  Synthetic oligonucleotide

SEQ ID NO: 646812 - DNA, 57 bp, Artificial; identical to SEQ ID NO: 167247
  Synthetic oligonucleotide

SEQ ID NO: 646813 - DNA, 55 bp, Artificial; identical to SEQ ID NO: 198313
  Synthetic oligonucleotide

SEQ ID NO: 646814 - DNA, 54 bp, Artificial; identical to SEQ ID NO: 162263
  Synthetic oligonucleotide

SEQ ID NO: 646815 - DNA, 56 bp, Artificial; identical to SEQ ID NO: 179970
  Synthetic oligonucleotide

SEQ ID NO: 646816 - DNA, 55 bp, Artificial; identical to SEQ ID NO: 190403
  Synthetic oligonucleotide

SEQ ID NO: 646817 - DNA, 55 bp, Artificial; identical to SEQ ID NO: 194555
  Synthetic oligonucleotide

SEQ ID NO: 646818 - DNA, 55 bp, Artificial; identical to SEQ ID NO: 171414
  Synthetic oligonucleotide

SEQ ID NO: 646819 - DNA, 55 bp, Artificial; identical to SEQ ID NO: 181440
  Synthetic oligonucleotide

SEQ ID NO: 646820 - DNA, 55 bp, Artificial; identical to SEQ ID NO: 218237
  Synthetic oligonucleotide

SEQ ID NO: 646821 - DNA, 55 bp, Artificial; identical to SEQ ID NO: 249067
  Synthetic oligonucleotide

SEQ ID NO: 646822 - DNA, 55 bp, Artificial; identical to SEQ ID NO: 208525
  Synthetic oligonucleotide

SEQ ID NO: 646823 - DNA, 55 bp, Artificial; identical to SEQ ID NO: 225133
  Synthetic oligonucleotide

SEQ ID NO: 646824 - DNA, 58 bp, Artificial; identical to SEQ ID NO: 150889
  Synthetic oligonucleotide

SEQ ID NO: 646825 - DNA, 58 bp, Artificial; identical to SEQ ID NO: 150930
  Synthetic oligonucleotide

SEQ ID NO: 646826 - DNA, 55 bp, Artificial; identical to SEQ ID NO: 181436
  Synthetic oligonucleotide

SEQ ID NO: 646827 - DNA, 55 bp, Artificial; identical to SEQ ID NO: 217486
  Synthetic oligonucleotide

SEQ ID NO: 646828 - DNA, 52 bp, Artificial; identical to SEQ ID NO: 213015
  Synthetic oligonucleotide

SEQ ID NO: 646829 - DNA, 60 bp, Artificial; identical to SEQ ID NO: 152916
  Synthetic oligonucleotide

SEQ ID NO: 646830 - DNA, 52 bp, Artificial; identical to SEQ ID NO: 193746
  Synthetic oligonucleotide

SEQ ID NO: 646831 - DNA, 55 bp, Artificial; identical to SEQ ID NO: 208524
  Synthetic oligonucleotide

SEQ ID NO: 646832 - DNA, 54 bp, Artificial; identical to SEQ ID NO: 151994
  Synthetic oligonucleotide

SEQ ID NO: 646833 - DNA, 52 bp, Artificial; identical to SEQ ID NO: 255530
  Synthetic oligonucleotide

SEQ ID NO: 646834 - DNA, 54 bp, Artificial; identical to SEQ ID NO: 179602
  Synthetic oligonucleotide

SEQ ID NO: 646835 - DNA, 52 bp, Artificial; identical to SEQ ID NO: 188111
  Synthetic oligonucleotide

SEQ ID NO: 646836 - DNA, 57 bp, Artificial; identical to SEQ ID NO: 179344
  Synthetic oligonucleotide

SEQ ID NO: 646837 - DNA, 55 bp, Artificial; identical to SEQ ID NO: 144837
  Synthetic oligonucleotide

SEQ ID NO: 646838 - DNA, 53 bp, Artificial; identical to SEQ ID NO: 191187
  Synthetic oligonucleotide

SEQ ID NO: 646839 - DNA, 60 bp, Artificial; identical to SEQ ID NO: 155419
  Synthetic oligonucleotide

SEQ ID NO: 646840 - DNA, 60 bp, Artificial; identical to SEQ ID NO: 233656
  Synthetic oligonucleotide

SEQ ID NO: 646841 - DNA, 54 bp, Artificial; identical to SEQ ID NO: 199577
  Synthetic oligonucleotide

SEQ ID NO: 646842 - DNA, 54 bp, Artificial; identical to SEQ ID NO: 243053
  Synthetic oligonucleotide

SEQ ID NO: 646843 - DNA, 52 bp, Artificial; identical to SEQ ID NO: 239683
  Synthetic oligonucleotide

SEQ ID NO: 646844 - DNA, 55 bp, Artificial; identical to SEQ ID NO: 253005
  Synthetic oligonucleotide

SEQ ID NO: 646845 - DNA, 53 bp, Artificial; identical to SEQ ID NO: 246274
  Synthetic oligonucleotide

SEQ ID NO: 646846 - DNA, 55 bp, Artificial; identical to SEQ ID NO: 244668
  Synthetic oligonucleotide

SEQ ID NO: 646847 - DNA, 58 bp, Artificial; identical to SEQ ID NO: 247503
  Synthetic oligonucleotide

SEQ ID NO: 646848 - DNA, 58 bp, Artificial; identical to SEQ ID NO: 144743
  Synthetic oligonucleotide

SEQ ID NO: 646849 - DNA, 51 bp, Artificial; identical to SEQ ID NO: 153706
  Synthetic oligonucleotide

SEQ ID NO: 646850 - DNA, 52 bp, Artificial; identical to SEQ ID NO: 154627
  Synthetic oligonucleotide

SEQ ID NO: 646851 - DNA, 55 bp, Artificial; identical to SEQ ID NO: 257980
  Synthetic oligonucleotide

SEQ ID NO: 646852 - DNA, 55 bp, Artificial; identical to SEQ ID NO: 181433
  Synthetic oligonucleotide

SEQ ID NO: 646853 - DNA, 60 bp, Artificial; identical to SEQ ID NO: 209717
  Synthetic oligonucleotide

SEQ ID NO: 646854 - DNA, 60 bp, Artificial; identical to SEQ ID NO: 177956
  Synthetic oligonucleotide

SEQ ID NO: 646855 - DNA, 55 bp, Artificial; identical to SEQ ID NO: 181431
  Synthetic oligonucleotide

SEQ ID NO: 646856 - DNA, 54 bp, Artificial; identical to SEQ ID NO: 184950
  Synthetic oligonucleotide

SEQ ID NO: 646857 - DNA, 54 bp, Artificial; identical to SEQ ID NO: 169330
  Synthetic oligonucleotide

SEQ ID NO: 646858 - DNA, 55 bp, Artificial; identical to SEQ ID NO: 201528
  Synthetic oligonucleotide

SEQ ID NO: 646859 - DNA, 53 bp, Artificial; identical to SEQ ID NO: 212960
  Synthetic oligonucleotide

SEQ ID NO: 646860 - DNA, 55 bp, Artificial; identical to SEQ ID NO: 155176
  Synthetic oligonucleotide

SEQ ID NO: 646861 - DNA, 55 bp, Artificial; identical to SEQ ID NO: 156050
  Synthetic oligonucleotide

SEQ ID NO: 646862 - DNA, 53 bp, Artificial; identical to SEQ ID NO: 170059
  Synthetic oligonucleotide

SEQ ID NO: 646863 - DNA, 55 bp, Artificial; identical to SEQ ID NO: 191866
  Synthetic oligonucleotide

SEQ ID NO: 646864 - DNA, 55 bp, Artificial; identical to SEQ ID NO: 154402
  Synthetic oligonucleotide

SEQ ID NO: 646865 - DNA, 55 bp, Artificial; identical to SEQ ID NO: 181429
  Synthetic oligonucleotide

SEQ ID NO: 646866 - DNA, 55 bp, Artificial; identical to SEQ ID NO: 181428
  Synthetic oligonucleotide

SEQ ID NO: 646867 - DNA, 55 bp, Artificial; identical to SEQ ID NO: 187900
  Synthetic oligonucleotide

SEQ ID NO: 646868 - DNA, 52 bp, Artificial; identical to SEQ ID NO: 208756
  Synthetic oligonucleotide

SEQ ID NO: 646869 - DNA, 55 bp, Artificial; identical to SEQ ID NO: 167514
  Synthetic oligonucleotide

SEQ ID NO: 646870 - DNA, 52 bp, Artificial; identical to SEQ ID NO: 190837
  Synthetic oligonucleotide

SEQ ID NO: 646871 - DNA, 51 bp, Artificial; identical to SEQ ID NO: 248031
  Synthetic oligonucleotide

SEQ ID NO: 646872 - DNA, 55 bp, Artificial; identical to SEQ ID NO: 208523
  Synthetic oligonucleotide

SEQ ID NO: 646873 - DNA, 59 bp, Artificial; identical to SEQ ID NO: 208207
  Synthetic oligonucleotide

SEQ ID NO: 646874 - DNA, 60 bp, Artificial; identical to SEQ ID NO: 201752
  Synthetic oligonucleotide

SEQ ID NO: 646875 - DNA, 55 bp, Artificial; identical to SEQ ID NO: 168282
  Synthetic oligonucleotide

SEQ ID NO: 646876 - DNA, 50 bp, Artificial; identical to SEQ ID NO: 224040
  Synthetic oligonucleotide

SEQ ID NO: 646877 - DNA, 60 bp, Artificial; identical to SEQ ID NO: 252681
  Synthetic oligonucleotide

SEQ ID NO: 646878 - DNA, 56 bp, Artificial; identical to SEQ ID NO: 239145
  Synthetic oligonucleotide

SEQ ID NO: 646879 - DNA, 53 bp, Artificial; identical to SEQ ID NO: 155536
  Synthetic oligonucleotide

SEQ ID NO: 646880 - DNA, 60 bp, Artificial; identical to SEQ ID NO: 239144
  Synthetic oligonucleotide

SEQ ID NO: 646881 - DNA, 53 bp, Artificial; identical to SEQ ID NO: 206425
  Synthetic oligonucleotide

SEQ ID NO: 646882 - DNA, 55 bp, Artificial; identical to SEQ ID NO: 198312
  Synthetic oligonucleotide

SEQ ID NO: 646883 - DNA, 51 bp, Artificial; identical to SEQ ID NO: 160942
  Synthetic oligonucleotide

SEQ ID NO: 646884 - DNA, 53 bp, Artificial; identical to SEQ ID NO: 177954
  Synthetic oligonucleotide

SEQ ID NO: 646885 - DNA, 58 bp, Artificial; identical to SEQ ID NO: 237918
  Synthetic oligonucleotide

SEQ ID NO: 646886 - DNA, 55 bp, Artificial; identical to SEQ ID NO: 210493
  Synthetic oligonucleotide

SEQ ID NO: 646887 - DNA, 51 bp, Artificial; identical to SEQ ID NO: 219500
  Synthetic oligonucleotide

SEQ ID NO: 646888 - DNA, 55 bp, Artificial; identical to SEQ ID NO: 150935
  Synthetic oligonucleotide

SEQ ID NO: 646889 - DNA, 50 bp, Artificial; identical to SEQ ID NO: 204186
  Synthetic oligonucleotide

SEQ ID NO: 646890 - DNA, 55 bp, Artificial; identical to SEQ ID NO: 197264
  Synthetic oligonucleotide

SEQ ID NO: 646891 - DNA, 55 bp, Artificial; identical to SEQ ID NO: 244662
  Synthetic oligonucleotide

SEQ ID NO: 646892 - DNA, 54 bp, Artificial; identical to SEQ ID NO: 255260
  Synthetic oligonucleotide

SEQ ID NO: 646893 - DNA, 60 bp, Artificial; identical to SEQ ID NO: 170892
  Synthetic oligonucleotide

SEQ ID NO: 646894 - DNA, 55 bp, Artificial; identical to SEQ ID NO: 205514
  Synthetic oligonucleotide

SEQ ID NO: 646895 - DNA, 60 bp, Artificial; identical to SEQ ID NO: 243689
  Synthetic oligonucleotide

SEQ ID NO: 646896 - DNA, 55 bp, Artificial; identical to SEQ ID NO: 181425
  Synthetic oligonucleotide

SEQ ID NO: 646897 - DNA, 55 bp, Artificial; identical to SEQ ID NO: 266141
  Synthetic oligonucleotide

SEQ ID NO: 646898 - DNA, 55 bp, Artificial; identical to SEQ ID NO: 154404
  Synthetic oligonucleotide

SEQ ID NO: 646899 - DNA, 58 bp, Artificial; identical to SEQ ID NO: 212497
  Synthetic oligonucleotide

SEQ ID NO: 646900 - DNA, 59 bp, Artificial; identical to SEQ ID NO: 150937
  Synthetic oligonucleotide

SEQ ID NO: 646901 - DNA, 59 bp, Artificial; identical to SEQ ID NO: 141633
  Synthetic oligonucleotide

SEQ ID NO: 646902 - DNA, 52 bp, Artificial; identical to SEQ ID NO: 209677
  Synthetic oligonucleotide

SEQ ID NO: 646903 - DNA, 55 bp, Artificial; identical to SEQ ID NO: 154406
  Synthetic oligonucleotide

SEQ ID NO: 646904 - DNA, 52 bp, Artificial; identical to SEQ ID NO: 246438
  Synthetic oligonucleotide

SEQ ID NO: 646905 - DNA, 58 bp, Artificial; identical to SEQ ID NO: 237625
  Synthetic oligonucleotide

SEQ ID NO: 646906 - DNA, 53 bp, Artificial; identical to SEQ ID NO: 239704
  Synthetic oligonucleotide

SEQ ID NO: 646907 - DNA, 60 bp, Artificial; identical to SEQ ID NO: 141635
  Synthetic oligonucleotide

SEQ ID NO: 646908 - DNA, 52 bp, Artificial; identical to SEQ ID NO: 237057
  Synthetic oligonucleotide

SEQ ID NO: 646909 - DNA, 55 bp, Artificial; identical to SEQ ID NO: 181424
  Synthetic oligonucleotide

SEQ ID NO: 646910 - DNA, 55 bp, Artificial; identical to SEQ ID NO: 187895
  Synthetic oligonucleotide

SEQ ID NO: 646911 - DNA, 51 bp, Artificial; identical to SEQ ID NO: 189644
  Synthetic oligonucleotide

SEQ ID NO: 646912 - DNA, 55 bp, Artificial; identical to SEQ ID NO: 169254
  Synthetic oligonucleotide

SEQ ID NO: 646913 - DNA, 51 bp, Artificial; identical to SEQ ID NO: 258206
  Synthetic oligonucleotide

SEQ ID NO: 646914 - DNA, 51 bp, Artificial; identical to SEQ ID NO: 170170
  Synthetic oligonucleotide

SEQ ID NO: 646915 - DNA, 60 bp, Artificial; identical to SEQ ID NO: 154159
  Synthetic oligonucleotide

SEQ ID NO: 646916 - DNA, 52 bp, Artificial; identical to SEQ ID NO: 149634
  Synthetic oligonucleotide

SEQ ID NO: 646917 - DNA, 53 bp, Artificial; identical to SEQ ID NO: 249061
  Synthetic oligonucleotide

SEQ ID NO: 646918 - DNA, 53 bp, Artificial; identical to SEQ ID NO: 205666
  Synthetic oligonucleotide

SEQ ID NO: 646919 - DNA, 56 bp, Artificial; identical to SEQ ID NO: 141636
  Synthetic oligonucleotide

SEQ ID NO: 646920 - DNA, 53 bp, Artificial; identical to SEQ ID NO: 224802
  Synthetic oligonucleotide

SEQ ID NO: 646921 - DNA, 54 bp, Artificial; identical to SEQ ID NO: 185153
  Synthetic oligonucleotide

SEQ ID NO: 646922 - DNA, 55 bp, Artificial; identical to SEQ ID NO: 156055
  Synthetic oligonucleotide

SEQ ID NO: 646923 - DNA, 55 bp, Artificial; identical to SEQ ID NO: 142126
  Synthetic oligonucleotide

SEQ ID NO: 646924 - DNA, 51 bp, Artificial; identical to SEQ ID NO: 222725
  Synthetic oligonucleotide

SEQ ID NO: 646925 - DNA, 53 bp, Artificial; identical to SEQ ID NO: 217007
  Synthetic oligonucleotide

SEQ ID NO: 646926 - DNA, 55 bp, Artificial; identical to SEQ ID NO: 156056
  Synthetic oligonucleotide

SEQ ID NO: 646927 - DNA, 51 bp, Artificial; identical to SEQ ID NO: 246788
  Synthetic oligonucleotide

SEQ ID NO: 646928 - DNA, 55 bp, Artificial; identical to SEQ ID NO: 256476
  Synthetic oligonucleotide

SEQ ID NO: 646929 - DNA, 58 bp, Artificial; identical to SEQ ID NO: 225513
  Synthetic oligonucleotide

SEQ ID NO: 646930 - DNA, 51 bp, Artificial; identical to SEQ ID NO: 223727
  Synthetic oligonucleotide

SEQ ID NO: 646931 - DNA, 56 bp, Artificial; identical to SEQ ID NO: 180089
  Synthetic oligonucleotide

SEQ ID NO: 646932 - DNA, 45 bp, Artificial; identical to SEQ ID NO: 249058
  Synthetic oligonucleotide

SEQ ID NO: 646933 - DNA, 55 bp, Artificial; identical to SEQ ID NO: 188265
  Synthetic oligonucleotide

SEQ ID NO: 646934 - DNA, 56 bp, Artificial; identical to SEQ ID NO: 160242
  Synthetic oligonucleotide

SEQ ID NO: 646935 - DNA, 50 bp, Artificial; identical to SEQ ID NO: 189697
  Synthetic oligonucleotide

SEQ ID NO: 646936 - DNA, 50 bp, Artificial; identical to SEQ ID NO: 142659
  Synthetic oligonucleotide

SEQ ID NO: 646937 - DNA, 51 bp, Artificial; identical to SEQ ID NO: 174919
  Synthetic oligonucleotide

SEQ ID NO: 646938 - DNA, 55 bp, Artificial; identical to SEQ ID NO: 147735
  Synthetic oligonucleotide

SEQ ID NO: 646939 - DNA, 60 bp, Artificial; identical to SEQ ID NO: 210482
  Synthetic oligonucleotide

SEQ ID NO: 646940 - DNA, 52 bp, Artificial; identical to SEQ ID NO: 145021
  Synthetic oligonucleotide

SEQ ID NO: 646941 - DNA, 55 bp, Artificial; identical to SEQ ID NO: 168277
  Synthetic oligonucleotide

SEQ ID NO: 646942 - DNA, 51 bp, Artificial; identical to SEQ ID NO: 197658
  Synthetic oligonucleotide

SEQ ID NO: 646943 - DNA, 54 bp, Artificial; identical to SEQ ID NO: 157248
  Synthetic oligonucleotide

SEQ ID NO: 646944 - DNA, 60 bp, Artificial; identical to SEQ ID NO: 144312
  Synthetic oligonucleotide

SEQ ID NO: 646945 - DNA, 52 bp, Artificial; identical to SEQ ID NO: 247934
  Synthetic oligonucleotide

SEQ ID NO: 646946 - DNA, 54 bp, Artificial; identical to SEQ ID NO: 167030
  Synthetic oligonucleotide

SEQ ID NO: 646947 - DNA, 55 bp, Artificial; identical to SEQ ID NO: 244655
  Synthetic oligonucleotide

SEQ ID NO: 646948 - DNA, 57 bp, Artificial; identical to SEQ ID NO: 248478
  Synthetic oligonucleotide

SEQ ID NO: 646949 - DNA, 59 bp, Artificial; identical to SEQ ID NO: 248482
  Synthetic oligonucleotide

SEQ ID NO: 646950 - DNA, 57 bp, Artificial; identical to SEQ ID NO: 239143
  Synthetic oligonucleotide

SEQ ID NO: 646951 - DNA, 58 bp, Artificial; identical to SEQ ID NO: 212431
  Synthetic oligonucleotide

SEQ ID NO: 646952 - DNA, 58 bp, Artificial; identical to SEQ ID NO: 191856
  Synthetic oligonucleotide

SEQ ID NO: 646953 - DNA, 52 bp, Artificial; identical to SEQ ID NO: 208760
  Synthetic oligonucleotide

SEQ ID NO: 646954 - DNA, 60 bp, Artificial; identical to SEQ ID NO: 151233
  Synthetic oligonucleotide

SEQ ID NO: 646955 - DNA, 57 bp, Artificial; identical to SEQ ID NO: 179700
  Synthetic oligonucleotide

SEQ ID NO: 646956 - DNA, 51 bp, Artificial; identical to SEQ ID NO: 165249
  Synthetic oligonucleotide

SEQ ID NO: 646957 - DNA, 52 bp, Artificial; identical to SEQ ID NO: 206445
  Synthetic oligonucleotide

SEQ ID NO: 646958 - DNA, 55 bp, Artificial; identical to SEQ ID NO: 181374
  Synthetic oligonucleotide

SEQ ID NO: 646959 - DNA, 55 bp, Artificial; identical to SEQ ID NO: 155366
  Synthetic oligonucleotide

SEQ ID NO: 646960 - DNA, 55 bp, Artificial; identical to SEQ ID NO: 244615
  Synthetic oligonucleotide

SEQ ID NO: 646961 - DNA, 58 bp, Artificial; identical to SEQ ID NO: 159930
  Synthetic oligonucleotide

SEQ ID NO: 646962 - DNA, 57 bp, Artificial; identical to SEQ ID NO: 150943
  Synthetic oligonucleotide

SEQ ID NO: 646963 - DNA, 55 bp, Artificial; identical to SEQ ID NO: 202190
  Synthetic oligonucleotide

SEQ ID NO: 646964 - DNA, 58 bp, Artificial; identical to SEQ ID NO: 150946
  Synthetic oligonucleotide

SEQ ID NO: 646965 - DNA, 54 bp, Artificial; identical to SEQ ID NO: 185133
  Synthetic oligonucleotide

SEQ ID NO: 646966 - DNA, 55 bp, Artificial; identical to SEQ ID NO: 191003
  Synthetic oligonucleotide

SEQ ID NO: 646967 - DNA, 59 bp, Artificial; identical to SEQ ID NO: 234098
  Synthetic oligonucleotide

SEQ ID NO: 646968 - DNA, 56 bp, Artificial; identical to SEQ ID NO: 239518
  Synthetic oligonucleotide

SEQ ID NO: 646969 - DNA, 51 bp, Artificial; identical to SEQ ID NO: 186887
  Synthetic oligonucleotide

SEQ ID NO: 646970 - DNA, 55 bp, Artificial; identical to SEQ ID NO: 190441
  Synthetic oligonucleotide

SEQ ID NO: 646971 - DNA, 56 bp, Artificial; identical to SEQ ID NO: 147335
  Synthetic oligonucleotide

SEQ ID NO: 646972 - DNA, 55 bp, Artificial; identical to SEQ ID NO: 153422
  Synthetic oligonucleotide

SEQ ID NO: 646973 - DNA, 55 bp, Artificial; identical to SEQ ID NO: 233442
  Synthetic oligonucleotide

SEQ ID NO: 646974 - DNA, 53 bp, Artificial; identical to SEQ ID NO: 199695
  Synthetic oligonucleotide

SEQ ID NO: 646975 - DNA, 60 bp, Artificial; identical to SEQ ID NO: 258230
  Synthetic oligonucleotide

SEQ ID NO: 646976 - DNA, 60 bp, Artificial; identical to SEQ ID NO: 178115
  Synthetic oligonucleotide

SEQ ID NO: 646977 - DNA, 56 bp, Artificial; identical to SEQ ID NO: 239142
  Synthetic oligonucleotide

SEQ ID NO: 646978 - DNA, 55 bp, Artificial; identical to SEQ ID NO: 205515
  Synthetic oligonucleotide

SEQ ID NO: 646979 - DNA, 59 bp, Artificial; identical to SEQ ID NO: 179375
  Synthetic oligonucleotide

SEQ ID NO: 646980 - DNA, 55 bp, Artificial; identical to SEQ ID NO: 207115
  Synthetic oligonucleotide

SEQ ID NO: 646981 - DNA, 55 bp, Artificial; identical to SEQ ID NO: 142546
  Synthetic oligonucleotide

SEQ ID NO: 646982 - DNA, 52 bp, Artificial; identical to SEQ ID NO: 150948
  Synthetic oligonucleotide

SEQ ID NO: 646983 - DNA, 60 bp, Artificial; identical to SEQ ID NO: 256479
  Synthetic oligonucleotide

SEQ ID NO: 646984 - DNA, 55 bp, Artificial; identical to SEQ ID NO: 156058
  Synthetic oligonucleotide

SEQ ID NO: 646985 - DNA, 50 bp, Artificial; identical to SEQ ID NO: 176779
  Synthetic oligonucleotide

SEQ ID NO: 646986 - DNA, 57 bp, Artificial; identical to SEQ ID NO: 252683
  Synthetic oligonucleotide

SEQ ID NO: 646987 - DNA, 50 bp, Artificial; identical to SEQ ID NO: 263534
  Synthetic oligonucleotide

SEQ ID NO: 646988 - DNA, 55 bp, Artificial; identical to SEQ ID NO: 248982
  Synthetic oligonucleotide

SEQ ID NO: 646989 - DNA, 55 bp, Artificial; identical to SEQ ID NO: 234239
  Synthetic oligonucleotide

SEQ ID NO: 646990 - DNA, 53 bp, Artificial; identical to SEQ ID NO: 185668
  Synthetic oligonucleotide

SEQ ID NO: 646991 - DNA, 60 bp, Artificial; identical to SEQ ID NO: 200569
  Synthetic oligonucleotide

SEQ ID NO: 646992 - DNA, 51 bp, Artificial; identical to SEQ ID NO: 213056
  Synthetic oligonucleotide

SEQ ID NO: 646993 - DNA, 55 bp, Artificial; identical to SEQ ID NO: 239655
  Synthetic oligonucleotide

SEQ ID NO: 646994 - DNA, 54 bp, Artificial; identical to SEQ ID NO: 246118
  Synthetic oligonucleotide

SEQ ID NO: 646995 - DNA, 55 bp, Artificial; identical to SEQ ID NO: 181365
  Synthetic oligonucleotide

SEQ ID NO: 646996 - DNA, 52 bp, Artificial; identical to SEQ ID NO: 161354
  Synthetic oligonucleotide

SEQ ID NO: 646997 - DNA, 57 bp, Artificial; identical to SEQ ID NO: 141969
  Synthetic oligonucleotide

SEQ ID NO: 646998 - DNA, 53 bp, Artificial; identical to SEQ ID NO: 190763
  Synthetic oligonucleotide

SEQ ID NO: 646999 - DNA, 55 bp, Artificial; identical to SEQ ID NO: 173643
  Synthetic oligonucleotide

SEQ ID NO: 647000 - DNA, 55 bp, Artificial; identical to SEQ ID NO: 248495
  Synthetic oligonucleotide

SEQ ID NO: 647001 - DNA, 55 bp, Artificial; identical to SEQ ID NO: 221476
  Synthetic oligonucleotide

SEQ ID NO: 647002 - DNA, 55 bp, Artificial; identical to SEQ ID NO: 155174
  Synthetic oligonucleotide

SEQ ID NO: 647003 - DNA, 55 bp, Artificial; identical to SEQ ID NO: 256605
  Synthetic oligonucleotide

SEQ ID NO: 647004 - DNA, 52 bp, Artificial; identical to SEQ ID NO: 154626
  Synthetic oligonucleotide

SEQ ID NO: 647005 - DNA, 54 bp, Artificial; identical to SEQ ID NO: 255259
  Synthetic oligonucleotide

SEQ ID NO: 647006 - DNA, 53 bp, Artificial; identical to SEQ ID NO: 170041
  Synthetic oligonucleotide

SEQ ID NO: 647007 - DNA, 55 bp, Artificial; identical to SEQ ID NO: 238400
  Synthetic oligonucleotide

SEQ ID NO: 647008 - DNA, 60 bp, Artificial; identical to SEQ ID NO: 165401
  Synthetic oligonucleotide

SEQ ID NO: 647009 - DNA, 55 bp, Artificial; identical to SEQ ID NO: 154409
  Synthetic oligonucleotide

SEQ ID NO: 647010 - DNA, 55 bp, Artificial; identical to SEQ ID NO: 154410
  Synthetic oligonucleotide

SEQ ID NO: 647011 - DNA, 51 bp, Artificial; identical to SEQ ID NO: 241008
  Synthetic oligonucleotide

SEQ ID NO: 647012 - DNA, 55 bp, Artificial; identical to SEQ ID NO: 248496
  Synthetic oligonucleotide

SEQ ID NO: 647013 - DNA, 54 bp, Artificial; identical to SEQ ID NO: 188445
  Synthetic oligonucleotide

SEQ ID NO: 647014 - DNA, 55 bp, Artificial; identical to SEQ ID NO: 156115
  Synthetic oligonucleotide

SEQ ID NO: 647015 - DNA, 57 bp, Artificial; identical to SEQ ID NO: 238617
  Synthetic oligonucleotide

SEQ ID NO: 647016 - DNA, 55 bp, Artificial; identical to SEQ ID NO: 248978
  Synthetic oligonucleotide

SEQ ID NO: 647017 - DNA, 60 bp, Artificial; identical to SEQ ID NO: 178101
  Synthetic oligonucleotide

SEQ ID NO: 647018 - DNA, 51 bp, Artificial; identical to SEQ ID NO: 213057
  Synthetic oligonucleotide

SEQ ID NO: 647019 - DNA, 60 bp, Artificial; identical to SEQ ID NO: 238618
  Synthetic oligonucleotide

SEQ ID NO: 647020 - DNA, 57 bp, Artificial; identical to SEQ ID NO: 194223
  Synthetic oligonucleotide

SEQ ID NO: 647021 - DNA, 57 bp, Artificial; identical to SEQ ID NO: 171059
  Synthetic oligonucleotide

SEQ ID NO: 647022 - DNA, 55 bp, Artificial; identical to SEQ ID NO: 238397
  Synthetic oligonucleotide

SEQ ID NO: 647023 - DNA, 54 bp, Artificial; identical to SEQ ID NO: 167533
  Synthetic oligonucleotide

SEQ ID NO: 647024 - DNA, 50 bp, Artificial; identical to SEQ ID NO: 176670
  Synthetic oligonucleotide

SEQ ID NO: 647025 - DNA, 58 bp, Artificial; identical to SEQ ID NO: 203792
  Synthetic oligonucleotide

SEQ ID NO: 647026 - DNA, 55 bp, Artificial; identical to SEQ ID NO: 187849
  Synthetic oligonucleotide

SEQ ID NO: 647027 - DNA, 60 bp, Artificial; identical to SEQ ID NO: 178100
  Synthetic oligonucleotide

SEQ ID NO: 647028 - DNA, 51 bp, Artificial; identical to SEQ ID NO: 256502
  Synthetic oligonucleotide

SEQ ID NO: 647029 - DNA, 50 bp, Artificial; identical to SEQ ID NO: 243399
  Synthetic oligonucleotide

SEQ ID NO: 647030 - DNA, 53 bp, Artificial; identical to SEQ ID NO: 195026
  Synthetic oligonucleotide

SEQ ID NO: 647031 - DNA, 55 bp, Artificial; identical to SEQ ID NO: 238396
  Synthetic oligonucleotide

SEQ ID NO: 647032 - DNA, 54 bp, Artificial; identical to SEQ ID NO: 203717
  Synthetic oligonucleotide

SEQ ID NO: 647033 - DNA, 56 bp, Artificial; identical to SEQ ID NO: 217008
  Synthetic oligonucleotide

SEQ ID NO: 647034 - DNA, 56 bp, Artificial; identical to SEQ ID NO: 243514
  Synthetic oligonucleotide

SEQ ID NO: 647035 - DNA, 54 bp, Artificial; identical to SEQ ID NO: 247783
  Synthetic oligonucleotide

SEQ ID NO: 647036 - DNA, 55 bp, Artificial; identical to SEQ ID NO: 198306
  Synthetic oligonucleotide

SEQ ID NO: 647037 - DNA, 55 bp, Artificial; identical to SEQ ID NO: 198303
  Synthetic oligonucleotide

SEQ ID NO: 647038 - DNA, 54 bp, Artificial; identical to SEQ ID NO: 154549
  Synthetic oligonucleotide

SEQ ID NO: 647039 - DNA, 55 bp, Artificial; identical to SEQ ID NO: 147679
  Synthetic oligonucleotide

SEQ ID NO: 647040 - DNA, 60 bp, Artificial; identical to SEQ ID NO: 194219
  Synthetic oligonucleotide

SEQ ID NO: 647041 - DNA, 55 bp, Artificial; identical to SEQ ID NO: 244138
  Synthetic oligonucleotide

SEQ ID NO: 647042 - DNA, 55 bp, Artificial; identical to SEQ ID NO: 160996
  Synthetic oligonucleotide

SEQ ID NO: 647043 - DNA, 54 bp, Artificial; identical to SEQ ID NO: 199657
  Synthetic oligonucleotide

SEQ ID NO: 647044 - DNA, 51 bp, Artificial; identical to SEQ ID NO: 261978
  Synthetic oligonucleotide

SEQ ID NO: 647045 - DNA, 54 bp, Artificial; identical to SEQ ID NO: 217009
  Synthetic oligonucleotide

SEQ ID NO: 647046 - DNA, 55 bp, Artificial; identical to SEQ ID NO: 151805
  Synthetic oligonucleotide

SEQ ID NO: 647047 - DNA, 60 bp, Artificial; identical to SEQ ID NO: 143994
  Synthetic oligonucleotide

SEQ ID NO: 647048 - DNA, 53 bp, Artificial; identical to SEQ ID NO: 236983
  Synthetic oligonucleotide

SEQ ID NO: 647049 - DNA, 54 bp, Artificial; identical to SEQ ID NO: 238597
  Synthetic oligonucleotide

SEQ ID NO: 647050 - DNA, 55 bp, Artificial; identical to SEQ ID NO: 168275
  Synthetic oligonucleotide

SEQ ID NO: 647051 - DNA, 60 bp, Artificial; identical to SEQ ID NO: 178098
  Synthetic oligonucleotide

SEQ ID NO: 647052 - DNA, 54 bp, Artificial; identical to SEQ ID NO: 246124
  Synthetic oligonucleotide

SEQ ID NO: 647053 - DNA, 52 bp, Artificial; identical to SEQ ID NO: 149692
  Synthetic oligonucleotide

SEQ ID NO: 647054 - DNA, 60 bp, Artificial; identical to SEQ ID NO: 141638
  Synthetic oligonucleotide

SEQ ID NO: 647055 - DNA, 54 bp, Artificial; identical to SEQ ID NO: 185197
  Synthetic oligonucleotide

SEQ ID NO: 647056 - DNA, 55 bp, Artificial; identical to SEQ ID NO: 152577
  Synthetic oligonucleotide

SEQ ID NO: 647057 - DNA, 54 bp, Artificial; identical to SEQ ID NO: 157214
  Synthetic oligonucleotide

SEQ ID NO: 647058 - DNA, 54 bp, Artificial; identical to SEQ ID NO: 223549
  Synthetic oligonucleotide

SEQ ID NO: 647059 - DNA, 54 bp, Artificial; identical to SEQ ID NO: 243058
  Synthetic oligonucleotide

SEQ ID NO: 647060 - DNA, 59 bp, Artificial; identical to SEQ ID NO: 150918
  Synthetic oligonucleotide

SEQ ID NO: 647061 - DNA, 53 bp, Artificial; identical to SEQ ID NO: 185690
  Synthetic oligonucleotide

SEQ ID NO: 647062 - DNA, 60 bp, Artificial; identical to SEQ ID NO: 170912
  Synthetic oligonucleotide

SEQ ID NO: 647063 - DNA, 57 bp, Artificial; identical to SEQ ID NO: 238619
  Synthetic oligonucleotide

SEQ ID NO: 647064 - DNA, 53 bp, Artificial; identical to SEQ ID NO: 190765
  Synthetic oligonucleotide

SEQ ID NO: 647065 - DNA, 60 bp, Artificial; identical to SEQ ID NO: 200566
  Synthetic oligonucleotide

SEQ ID NO: 647066 - DNA, 51 bp, Artificial; identical to SEQ ID NO: 157680
  Synthetic oligonucleotide

SEQ ID NO: 647067 - DNA, 55 bp, Artificial; identical to SEQ ID NO: 190231
  Synthetic oligonucleotide

SEQ ID NO: 647068 - DNA, 60 bp, Artificial; identical to SEQ ID NO: 141591
  Synthetic oligonucleotide

SEQ ID NO: 647069 - DNA, 50 bp, Artificial; identical to SEQ ID NO: 167213
  Synthetic oligonucleotide

SEQ ID NO: 647070 - DNA, 55 bp, Artificial; identical to SEQ ID NO: 266140
  Synthetic oligonucleotide

SEQ ID NO: 647071 - DNA, 53 bp, Artificial; identical to SEQ ID NO: 192052
  Synthetic oligonucleotide

SEQ ID NO: 647072 - DNA, 51 bp, Artificial; identical to SEQ ID NO: 189648
  Synthetic oligonucleotide

SEQ ID NO: 647073 - DNA, 55 bp, Artificial; identical to SEQ ID NO: 244079
  Synthetic oligonucleotide

SEQ ID NO: 647074 - DNA, 60 bp, Artificial; identical to SEQ ID NO: 247338
  Synthetic oligonucleotide

SEQ ID NO: 647075 - DNA, 53 bp, Artificial; identical to SEQ ID NO: 205667
  Synthetic oligonucleotide

SEQ ID NO: 647076 - DNA, 55 bp, Artificial; identical to SEQ ID NO: 150919
  Synthetic oligonucleotide

SEQ ID NO: 647077 - DNA, 55 bp, Artificial; identical to SEQ ID NO: 190440
  Synthetic oligonucleotide

SEQ ID NO: 647078 - DNA, 55 bp, Artificial; identical to SEQ ID NO: 160265
  Synthetic oligonucleotide

SEQ ID NO: 647079 - DNA, 50 bp, Artificial; identical to SEQ ID NO: 241684
  Synthetic oligonucleotide

SEQ ID NO: 647080 - DNA, 60 bp, Artificial; identical to SEQ ID NO: 196553
  Synthetic oligonucleotide

SEQ ID NO: 647081 - DNA, 55 bp, Artificial; identical to SEQ ID NO: 202195
  Synthetic oligonucleotide

SEQ ID NO: 647082 - DNA, 55 bp, Artificial; identical to SEQ ID NO: 169255
  Synthetic oligonucleotide

SEQ ID NO: 647083 - DNA, 60 bp, Artificial; identical to SEQ ID NO: 217010
  Synthetic oligonucleotide

SEQ ID NO: 647084 - DNA, 60 bp, Artificial; identical to SEQ ID NO: 160219
  Synthetic oligonucleotide

SEQ ID NO: 647085 - DNA, 60 bp, Artificial; identical to SEQ ID NO: 200564
  Synthetic oligonucleotide

SEQ ID NO: 647086 - DNA, 50 bp, Artificial; identical to SEQ ID NO: 189709
  Synthetic oligonucleotide

SEQ ID NO: 647087 - DNA, 52 bp, Artificial; identical to SEQ ID NO: 171898
  Synthetic oligonucleotide

SEQ ID NO: 647088 - DNA, 59 bp, Artificial; identical to SEQ ID NO: 239211
  Synthetic oligonucleotide

SEQ ID NO: 647089 - DNA, 59 bp, Artificial; identical to SEQ ID NO: 170922
  Synthetic oligonucleotide

SEQ ID NO: 647090 - DNA, 60 bp, Artificial; identical to SEQ ID NO: 209694
  Synthetic oligonucleotide

SEQ ID NO: 647091 - DNA, 59 bp, Artificial; identical to SEQ ID NO: 247341
  Synthetic oligonucleotide

SEQ ID NO: 647092 - DNA, 60 bp, Artificial; identical to SEQ ID NO: 196664
  Synthetic oligonucleotide

SEQ ID NO: 647093 - DNA, 55 bp, Artificial; identical to SEQ ID NO: 254172
  Synthetic oligonucleotide

SEQ ID NO: 647094 - DNA, 53 bp, Artificial; identical to SEQ ID NO: 164819
  Synthetic oligonucleotide

SEQ ID NO: 647095 - DNA, 54 bp, Artificial; identical to SEQ ID NO: 201351
  Synthetic oligonucleotide

SEQ ID NO: 647096 - DNA, 52 bp, Artificial; identical to SEQ ID NO: 206441
  Synthetic oligonucleotide

SEQ ID NO: 647097 - DNA, 55 bp, Artificial; identical to SEQ ID NO: 225510
  Synthetic oligonucleotide

SEQ ID NO: 647098 - DNA, 50 bp, Artificial; identical to SEQ ID NO: 243388
  Synthetic oligonucleotide

SEQ ID NO: 647099 - DNA, 51 bp, Artificial; identical to SEQ ID NO: 248063
  Synthetic oligonucleotide

SEQ ID NO: 647100 - DNA, 51 bp, Artificial; identical to SEQ ID NO: 174961
  Synthetic oligonucleotide

SEQ ID NO: 647101 - DNA, 55 bp, Artificial; identical to SEQ ID NO: 168268
  Synthetic oligonucleotide

SEQ ID NO: 647102 - DNA, 55 bp, Artificial; identical to SEQ ID NO: 254173
  Synthetic oligonucleotide

SEQ ID NO: 647103 - DNA, 60 bp, Artificial; identical to SEQ ID NO: 224847
  Synthetic oligonucleotide

SEQ ID NO: 647104 - DNA, 55 bp, Artificial; identical to SEQ ID NO: 190439
  Synthetic oligonucleotide

SEQ ID NO: 647105 - DNA, 54 bp, Artificial; identical to SEQ ID NO: 207689
  Synthetic oligonucleotide

SEQ ID NO: 647106 - DNA, 52 bp, Artificial; identical to SEQ ID NO: 237648
  Synthetic oligonucleotide

SEQ ID NO: 647107 - DNA, 55 bp, Artificial; identical to SEQ ID NO: 161198
  Synthetic oligonucleotide

SEQ ID NO: 647108 - DNA, 53 bp, Artificial; identical to SEQ ID NO: 152039
  Synthetic oligonucleotide

SEQ ID NO: 647109 - DNA, 55 bp, Artificial; identical to SEQ ID NO: 147711
  Synthetic oligonucleotide

SEQ ID NO: 647110 - DNA, 54 bp, Artificial; identical to SEQ ID NO: 243056
  Synthetic oligonucleotide

SEQ ID NO: 647111 - DNA, 51 bp, Artificial; identical to SEQ ID NO: 143834
  Synthetic oligonucleotide

SEQ ID NO: 647112 - DNA, 60 bp, Artificial; identical to SEQ ID NO: 168152
  Synthetic oligonucleotide

SEQ ID NO: 647113 - DNA, 55 bp, Artificial; identical to SEQ ID NO: 166946
  Synthetic oligonucleotide

SEQ ID NO: 647114 - DNA, 53 bp, Artificial; identical to SEQ ID NO: 143807
  Synthetic oligonucleotide

SEQ ID NO: 647115 - DNA, 59 bp, Artificial; identical to SEQ ID NO: 162449
  Synthetic oligonucleotide

SEQ ID NO: 647116 - DNA, 58 bp, Artificial; identical to SEQ ID NO: 238629
  Synthetic oligonucleotide

SEQ ID NO: 647117 - DNA, 52 bp, Artificial; identical to SEQ ID NO: 192107
  Synthetic oligonucleotide

SEQ ID NO: 647118 - DNA, 52 bp, Artificial; identical to SEQ ID NO: 216719
  Synthetic oligonucleotide

SEQ ID NO: 647119 - DNA, 55 bp, Artificial; identical to SEQ ID NO: 244069
  Synthetic oligonucleotide

SEQ ID NO: 647120 - DNA, 55 bp, Artificial; identical to SEQ ID NO: 163928
  Synthetic oligonucleotide

SEQ ID NO: 647121 - DNA, 56 bp, Artificial; identical to SEQ ID NO: 247322
  Synthetic oligonucleotide

SEQ ID NO: 647122 - DNA, 60 bp, Artificial; identical to SEQ ID NO: 238632
  Synthetic oligonucleotide

SEQ ID NO: 647123 - DNA, 54 bp, Artificial; identical to SEQ ID NO: 149113
  Synthetic oligonucleotide

SEQ ID NO: 647124 - DNA, 54 bp, Artificial; identical to SEQ ID NO: 218320
  Synthetic oligonucleotide

SEQ ID NO: 647125 - DNA, 52 bp, Artificial; identical to SEQ ID NO: 188164
  Synthetic oligonucleotide

SEQ ID NO: 647126 - DNA, 52 bp, Artificial; identical to SEQ ID NO: 155567
  Synthetic oligonucleotide

SEQ ID NO: 647127 - DNA, 53 bp, Artificial; identical to SEQ ID NO: 149461
  Synthetic oligonucleotide

SEQ ID NO: 647128 - DNA, 53 bp, Artificial; identical to SEQ ID NO: 149459
  Synthetic oligonucleotide

SEQ ID NO: 647129 - DNA, 54 bp, Artificial; identical to SEQ ID NO: 157215
  Synthetic oligonucleotide

SEQ ID NO: 647130 - DNA, 57 bp, Artificial; identical to SEQ ID NO: 141948
  Synthetic oligonucleotide

SEQ ID NO: 647131 - DNA, 54 bp, Artificial; identical to SEQ ID NO: 185202
  Synthetic oligonucleotide

SEQ ID NO: 647132 - DNA, 55 bp, Artificial; identical to SEQ ID NO: 163929
  Synthetic oligonucleotide

SEQ ID NO: 647133 - DNA, 50 bp, Artificial; identical to SEQ ID NO: 255827
  Synthetic oligonucleotide

SEQ ID NO: 647134 - DNA, 55 bp, Artificial; identical to SEQ ID NO: 187837
  Synthetic oligonucleotide

SEQ ID NO: 647135 - DNA, 54 bp, Artificial; identical to SEQ ID NO: 207034
  Synthetic oligonucleotide

SEQ ID NO: 647136 - DNA, 51 bp, Artificial; identical to SEQ ID NO: 211654
  Synthetic oligonucleotide

SEQ ID NO: 647137 - DNA, 53 bp, Artificial; identical to SEQ ID NO: 170046
  Synthetic oligonucleotide

SEQ ID NO: 647138 - DNA, 55 bp, Artificial; identical to SEQ ID NO: 248975
  Synthetic oligonucleotide

SEQ ID NO: 647139 - DNA, 55 bp, Artificial; identical to SEQ ID NO: 187364
  Synthetic oligonucleotide

SEQ ID NO: 647140 - DNA, 60 bp, Artificial; identical to SEQ ID NO: 243516
  Synthetic oligonucleotide

SEQ ID NO: 647141 - DNA, 52 bp, Artificial; identical to SEQ ID NO: 253325
  Synthetic oligonucleotide

SEQ ID NO: 647142 - DNA, 55 bp, Artificial; identical to SEQ ID NO: 207110
  Synthetic oligonucleotide

SEQ ID NO: 647143 - DNA, 58 bp, Artificial; identical to SEQ ID NO: 238633
  Synthetic oligonucleotide

SEQ ID NO: 647144 - DNA, 60 bp, Artificial; identical to SEQ ID NO: 210471
  Synthetic oligonucleotide

SEQ ID NO: 647145 - DNA, 50 bp, Artificial; identical to SEQ ID NO: 246912
  Synthetic oligonucleotide

SEQ ID NO: 647146 - DNA, 52 bp, Artificial; identical to SEQ ID NO: 149696
  Synthetic oligonucleotide

SEQ ID NO: 647147 - DNA, 51 bp, Artificial; identical to SEQ ID NO: 243350
  Synthetic oligonucleotide

SEQ ID NO: 647148 - DNA, 55 bp, Artificial; identical to SEQ ID NO: 208521
  Synthetic oligonucleotide

SEQ ID NO: 647149 - DNA, 53 bp, Artificial; identical to SEQ ID NO: 185678
  Synthetic oligonucleotide

SEQ ID NO: 647150 - DNA, 59 bp, Artificial; identical to SEQ ID NO: 141593
  Synthetic oligonucleotide

SEQ ID NO: 647151 - DNA, 50 bp, Artificial; identical to SEQ ID NO: 241736
  Synthetic oligonucleotide

SEQ ID NO: 647152 - DNA, 60 bp, Artificial; identical to SEQ ID NO: 178144
  Synthetic oligonucleotide

SEQ ID NO: 647153 - DNA, 55 bp, Artificial; identical to SEQ ID NO: 221497
  Synthetic oligonucleotide

SEQ ID NO: 647154 - DNA, 50 bp, Artificial; identical to SEQ ID NO: 261984
  Synthetic oligonucleotide

SEQ ID NO: 647155 - DNA, 55 bp, Artificial; identical to SEQ ID NO: 244085
  Synthetic oligonucleotide

SEQ ID NO: 647156 - DNA, 55 bp, Artificial; identical to SEQ ID NO: 146260
  Synthetic oligonucleotide

SEQ ID NO: 647157 - DNA, 52 bp, Artificial; identical to SEQ ID NO: 149666
  Synthetic oligonucleotide

SEQ ID NO: 647158 - DNA, 54 bp, Artificial; identical to SEQ ID NO: 185176
  Synthetic oligonucleotide

SEQ ID NO: 647159 - DNA, 60 bp, Artificial; identical to SEQ ID NO: 238634
  Synthetic oligonucleotide

SEQ ID NO: 647160 - DNA, 60 bp, Artificial; identical to SEQ ID NO: 238637
  Synthetic oligonucleotide

SEQ ID NO: 647161 - DNA, 55 bp, Artificial; identical to SEQ ID NO: 247664
  Synthetic oligonucleotide

SEQ ID NO: 647162 - DNA, 55 bp, Artificial; identical to SEQ ID NO: 197261
  Synthetic oligonucleotide

SEQ ID NO: 647163 - DNA, 55 bp, Artificial; identical to SEQ ID NO: 168313
  Synthetic oligonucleotide

SEQ ID NO: 647164 - DNA, 55 bp, Artificial; identical to SEQ ID NO: 224944
  Synthetic oligonucleotide

SEQ ID NO: 647165 - DNA, 60 bp, Artificial; identical to SEQ ID NO: 238640
  Synthetic oligonucleotide

SEQ ID NO: 647166 - DNA, 53 bp, Artificial; identical to SEQ ID NO: 147707
  Synthetic oligonucleotide

SEQ ID NO: 647167 - DNA, 55 bp, Artificial; identical to SEQ ID NO: 168309
  Synthetic oligonucleotide

SEQ ID NO: 647168 - DNA, 55 bp, Artificial; identical to SEQ ID NO: 162060
  Synthetic oligonucleotide

SEQ ID NO: 647169 - DNA, 54 bp, Artificial; identical to SEQ ID NO: 161292
  Synthetic oligonucleotide

SEQ ID NO: 647170 - DNA, 58 bp, Artificial; identical to SEQ ID NO: 178141
  Synthetic oligonucleotide

SEQ ID NO: 647171 - DNA, 55 bp, Artificial; identical to SEQ ID NO: 155173
  Synthetic oligonucleotide

SEQ ID NO: 647172 - DNA, 55 bp, Artificial; identical to SEQ ID NO: 168307
  Synthetic oligonucleotide

SEQ ID NO: 647173 - DNA, 55 bp, Artificial; identical to SEQ ID NO: 181395
  Synthetic oligonucleotide

SEQ ID NO: 647174 - DNA, 60 bp, Artificial; identical to SEQ ID NO: 224447
  Synthetic oligonucleotide

SEQ ID NO: 647175 - DNA, 55 bp, Artificial; identical to SEQ ID NO: 197260
  Synthetic oligonucleotide

SEQ ID NO: 647176 - DNA, 60 bp, Artificial; identical to SEQ ID NO: 159265
  Synthetic oligonucleotide

SEQ ID NO: 647177 - DNA, 55 bp, Artificial; identical to SEQ ID NO: 206965
  Synthetic oligonucleotide

SEQ ID NO: 647178 - DNA, 55 bp, Artificial; identical to SEQ ID NO: 181394
  Synthetic oligonucleotide

SEQ ID NO: 647179 - DNA, 60 bp, Artificial; identical to SEQ ID NO: 238641
  Synthetic oligonucleotide

SEQ ID NO: 647180 - DNA, 54 bp, Artificial; identical to SEQ ID NO: 192021
  Synthetic oligonucleotide

SEQ ID NO: 647181 - DNA, 51 bp, Artificial; identical to SEQ ID NO: 258203
  Synthetic oligonucleotide

SEQ ID NO: 647182 - DNA, 53 bp, Artificial; identical to SEQ ID NO: 253809
  Synthetic oligonucleotide

SEQ ID NO: 647183 - DNA, 52 bp, Artificial; identical to SEQ ID NO: 186164
  Synthetic oligonucleotide

SEQ ID NO: 647184 - DNA, 54 bp, Artificial; identical to SEQ ID NO: 247151
  Synthetic oligonucleotide

SEQ ID NO: 647185 - DNA, 54 bp, Artificial; identical to SEQ ID NO: 212928
  Synthetic oligonucleotide

SEQ ID NO: 647186 - DNA, 57 bp, Artificial; identical to SEQ ID NO: 178137
  Synthetic oligonucleotide

SEQ ID NO: 647187 - DNA, 55 bp, Artificial; identical to SEQ ID NO: 221496
  Synthetic oligonucleotide

SEQ ID NO: 647188 - DNA, 60 bp, Artificial; identical to SEQ ID NO: 237659
  Synthetic oligonucleotide

SEQ ID NO: 647189 - DNA, 55 bp, Artificial; identical to SEQ ID NO: 163913
  Synthetic oligonucleotide

SEQ ID NO: 647190 - DNA, 55 bp, Artificial; identical to SEQ ID NO: 171507
  Synthetic oligonucleotide

SEQ ID NO: 647191 - DNA, 58 bp, Artificial; identical to SEQ ID NO: 153042
  Synthetic oligonucleotide

SEQ ID NO: 647192 - DNA, 60 bp, Artificial; identical to SEQ ID NO: 170937
  Synthetic oligonucleotide

SEQ ID NO: 647193 - DNA, 55 bp, Artificial; identical to SEQ ID NO: 193565
  Synthetic oligonucleotide

SEQ ID NO: 647194 - DNA, 57 bp, Artificial; identical to SEQ ID NO: 203355
  Synthetic oligonucleotide

SEQ ID NO: 647195 - DNA, 55 bp, Artificial; identical to SEQ ID NO: 168306
  Synthetic oligonucleotide

SEQ ID NO: 647196 - DNA, 54 bp, Artificial; identical to SEQ ID NO: 212927
  Synthetic oligonucleotide

SEQ ID NO: 647197 - DNA, 60 bp, Artificial; identical to SEQ ID NO: 178135
  Synthetic oligonucleotide

SEQ ID NO: 647198 - DNA, 52 bp, Artificial; identical to SEQ ID NO: 141299
  Synthetic oligonucleotide

SEQ ID NO: 647199 - DNA, 60 bp, Artificial; identical to SEQ ID NO: 200563
  Synthetic oligonucleotide

SEQ ID NO: 647200 - DNA, 55 bp, Artificial; identical to SEQ ID NO: 196153
  Synthetic oligonucleotide

SEQ ID NO: 647201 - DNA, 53 bp, Artificial; identical to SEQ ID NO: 149494
  Synthetic oligonucleotide

SEQ ID NO: 647202 - DNA, 55 bp, Artificial; identical to SEQ ID NO: 171508
  Synthetic oligonucleotide

SEQ ID NO: 647203 - DNA, 55 bp, Artificial; identical to SEQ ID NO: 203710
  Synthetic oligonucleotide

SEQ ID NO: 647204 - DNA, 51 bp, Artificial; identical to SEQ ID NO: 241039
  Synthetic oligonucleotide

SEQ ID NO: 647205 - DNA, 52 bp, Artificial; identical to SEQ ID NO: 266283
  Synthetic oligonucleotide

SEQ ID NO: 647206 - DNA, 58 bp, Artificial; identical to SEQ ID NO: 210460
  Synthetic oligonucleotide

SEQ ID NO: 647207 - DNA, 55 bp, Artificial; identical to SEQ ID NO: 244070
  Synthetic oligonucleotide

SEQ ID NO: 647208 - DNA, 51 bp, Artificial; identical to SEQ ID NO: 186428
  Synthetic oligonucleotide

SEQ ID NO: 647209 - DNA, 55 bp, Artificial; identical to SEQ ID NO: 146259
  Synthetic oligonucleotide

SEQ ID NO: 647210 - DNA, 60 bp, Artificial; identical to SEQ ID NO: 178129
  Synthetic oligonucleotide

SEQ ID NO: 647211 - DNA, 54 bp, Artificial; identical to SEQ ID NO: 205618
  Synthetic oligonucleotide

SEQ ID NO: 647212 - DNA, 60 bp, Artificial; identical to SEQ ID NO: 266395
  Synthetic oligonucleotide

SEQ ID NO: 647213 - DNA, 55 bp, Artificial; identical to SEQ ID NO: 211229
  Synthetic oligonucleotide

SEQ ID NO: 647214 - DNA, 55 bp, Artificial; identical to SEQ ID NO: 254174
  Synthetic oligonucleotide

SEQ ID NO: 647215 - DNA, 55 bp, Artificial; identical to SEQ ID NO: 248570
  Synthetic oligonucleotide

SEQ ID NO: 647216 - DNA, 53 bp, Artificial; identical to SEQ ID NO: 142619
  Synthetic oligonucleotide

SEQ ID NO: 647217 - DNA, 58 bp, Artificial; identical to SEQ ID NO: 179626
  Synthetic oligonucleotide

SEQ ID NO: 647218 - DNA, 53 bp, Artificial; identical to SEQ ID NO: 247857
  Synthetic oligonucleotide

SEQ ID NO: 647219 - DNA, 60 bp, Artificial; identical to SEQ ID NO: 242414
  Synthetic oligonucleotide

SEQ ID NO: 647220 - DNA, 57 bp, Artificial; identical to SEQ ID NO: 207048
  Synthetic oligonucleotide

SEQ ID NO: 647221 - DNA, 55 bp, Artificial; identical to SEQ ID NO: 207106
  Synthetic oligonucleotide

SEQ ID NO: 647222 - DNA, 52 bp, Artificial; identical to SEQ ID NO: 233837
  Synthetic oligonucleotide

SEQ ID NO: 647223 - DNA, 60 bp, Artificial; identical to SEQ ID NO: 170878
  Synthetic oligonucleotide

SEQ ID NO: 647224 - DNA, 54 bp, Artificial; identical to SEQ ID NO: 197399
  Synthetic oligonucleotide

SEQ ID NO: 647225 - DNA, 58 bp, Artificial; identical to SEQ ID NO: 144341
  Synthetic oligonucleotide

SEQ ID NO: 647226 - DNA, 60 bp, Artificial; identical to SEQ ID NO: 187060
  Synthetic oligonucleotide

SEQ ID NO: 647227 - DNA, 59 bp, Artificial; identical to SEQ ID NO: 247147
  Synthetic oligonucleotide

SEQ ID NO: 647228 - DNA, 57 bp, Artificial; identical to SEQ ID NO: 209041
  Synthetic oligonucleotide

SEQ ID NO: 647229 - DNA, 53 bp, Artificial; identical to SEQ ID NO: 233813
  Synthetic oligonucleotide

SEQ ID NO: 647230 - DNA, 51 bp, Artificial; identical to SEQ ID NO: 208827
  Synthetic oligonucleotide

SEQ ID NO: 647231 - DNA, 54 bp, Artificial; identical to SEQ ID NO: 185080
  Synthetic oligonucleotide

SEQ ID NO: 647232 - DNA, 58 bp, Artificial; identical to SEQ ID NO: 171039
  Synthetic oligonucleotide

SEQ ID NO: 647233 - DNA, 55 bp, Artificial; identical to SEQ ID NO: 144102
  Synthetic oligonucleotide

SEQ ID NO: 647234 - DNA, 53 bp, Artificial; identical to SEQ ID NO: 202971
  Synthetic oligonucleotide

SEQ ID NO: 647235 - DNA, 53 bp, Artificial; identical to SEQ ID NO: 240708
  Synthetic oligonucleotide

SEQ ID NO: 647236 - DNA, 55 bp, Artificial; identical to SEQ ID NO: 238388
  Synthetic oligonucleotide

SEQ ID NO: 647237 - DNA, 60 bp, Artificial; identical to SEQ ID NO: 206927
  Synthetic oligonucleotide

SEQ ID NO: 647238 - DNA, 54 bp, Artificial; identical to SEQ ID NO: 202417
  Synthetic oligonucleotide

SEQ ID NO: 647239 - DNA, 57 bp, Artificial; identical to SEQ ID NO: 258219
  Synthetic oligonucleotide

SEQ ID NO: 647240 - DNA, 55 bp, Artificial; identical to SEQ ID NO: 202260
  Synthetic oligonucleotide

SEQ ID NO: 647241 - DNA, 57 bp, Artificial; identical to SEQ ID NO: 202129
  Synthetic oligonucleotide

SEQ ID NO: 647242 - DNA, 55 bp, Artificial; identical to SEQ ID NO: 217011
  Synthetic oligonucleotide

SEQ ID NO: 647243 - DNA, 57 bp, Artificial; identical to SEQ ID NO: 153743
  Synthetic oligonucleotide

SEQ ID NO: 647244 - DNA, 57 bp, Artificial; identical to SEQ ID NO: 258208
  Synthetic oligonucleotide

SEQ ID NO: 647245 - DNA, 55 bp, Artificial; identical to SEQ ID NO: 178124
  Synthetic oligonucleotide

SEQ ID NO: 647246 - DNA, 55 bp, Artificial; identical to SEQ ID NO: 161195
  Synthetic oligonucleotide

SEQ ID NO: 647247 - DNA, 55 bp, Artificial; identical to SEQ ID NO: 162061
  Synthetic oligonucleotide

SEQ ID NO: 647248 - DNA, 55 bp, Artificial; identical to SEQ ID NO: 197257
  Synthetic oligonucleotide

SEQ ID NO: 647249 - DNA, 60 bp, Artificial; identical to SEQ ID NO: 253486
  Synthetic oligonucleotide

SEQ ID NO: 647250 - DNA, 55 bp, Artificial; identical to SEQ ID NO: 181381
  Synthetic oligonucleotide

SEQ ID NO: 647251 - DNA, 60 bp, Artificial; identical to SEQ ID NO: 203352
  Synthetic oligonucleotide

SEQ ID NO: 647252 - DNA, 50 bp, Artificial; identical to SEQ ID NO: 195264
  Synthetic oligonucleotide

SEQ ID NO: 647253 - DNA, 52 bp, Artificial; identical to SEQ ID NO: 246457
  Synthetic oligonucleotide

SEQ ID NO: 647254 - DNA, 57 bp, Artificial; identical to SEQ ID NO: 178061
  Synthetic oligonucleotide

SEQ ID NO: 647255 - DNA, 50 bp, Artificial; identical to SEQ ID NO: 246903
  Synthetic oligonucleotide

SEQ ID NO: 647256 - DNA, 55 bp, Artificial; identical to SEQ ID NO: 244363
  Synthetic oligonucleotide

SEQ ID NO: 647257 - DNA, 54 bp, Artificial; identical to SEQ ID NO: 199664
  Synthetic oligonucleotide

SEQ ID NO: 647258 - DNA, 52 bp, Artificial; identical to SEQ ID NO: 192108
  Synthetic oligonucleotide

SEQ ID NO: 647259 - DNA, 54 bp, Artificial; identical to SEQ ID NO: 223527
  Synthetic oligonucleotide

SEQ ID NO: 647260 - DNA, 55 bp, Artificial; identical to SEQ ID NO: 208520
  Synthetic oligonucleotide

SEQ ID NO: 647261 - DNA, 55 bp, Artificial; identical to SEQ ID NO: 190978
  Synthetic oligonucleotide

SEQ ID NO: 647262 - DNA, 55 bp, Artificial; identical to SEQ ID NO: 238387
  Synthetic oligonucleotide

SEQ ID NO: 647263 - DNA, 55 bp, Artificial; identical to SEQ ID NO: 201605
  Synthetic oligonucleotide

SEQ ID NO: 647264 - DNA, 60 bp, Artificial; identical to SEQ ID NO: 165456
  Synthetic oligonucleotide

SEQ ID NO: 647265 - DNA, 59 bp, Artificial; identical to SEQ ID NO: 144339
  Synthetic oligonucleotide

SEQ ID NO: 647266 - DNA, 60 bp, Artificial; identical to SEQ ID NO: 165467
  Synthetic oligonucleotide

SEQ ID NO: 647267 - DNA, 55 bp, Artificial; identical to SEQ ID NO: 221494
  Synthetic oligonucleotide

SEQ ID NO: 647268 - DNA, 60 bp, Artificial; identical to SEQ ID NO: 256451
  Synthetic oligonucleotide

SEQ ID NO: 647269 - DNA, 53 bp, Artificial; identical to SEQ ID NO: 185629
  Synthetic oligonucleotide

SEQ ID NO: 647270 - DNA, 60 bp, Artificial; identical to SEQ ID NO: 150926
  Synthetic oligonucleotide

SEQ ID NO: 647271 - DNA, 50 bp, Artificial; identical to SEQ ID NO: 165368
  Synthetic oligonucleotide

SEQ ID NO: 647272 - DNA, 55 bp, Artificial; identical to SEQ ID NO: 168298
  Synthetic oligonucleotide

SEQ ID NO: 647273 - DNA, 60 bp, Artificial; identical to SEQ ID NO: 151511
  Synthetic oligonucleotide

SEQ ID NO: 647274 - DNA, 55 bp, Artificial; identical to SEQ ID NO: 147703
  Synthetic oligonucleotide

SEQ ID NO: 647275 - DNA, 54 bp, Artificial; identical to SEQ ID NO: 203855
  Synthetic oligonucleotide

SEQ ID NO: 647276 - DNA, 55 bp, Artificial; identical to SEQ ID NO: 147702
  Synthetic oligonucleotide

SEQ ID NO: 647277 - DNA, 55 bp, Artificial; identical to SEQ ID NO: 155417
  Synthetic oligonucleotide

SEQ ID NO: 647278 - DNA, 54 bp, Artificial; identical to SEQ ID NO: 157217
  Synthetic oligonucleotide

SEQ ID NO: 647279 - DNA, 55 bp, Artificial; identical to SEQ ID NO: 202925
  Synthetic oligonucleotide

SEQ ID NO: 647280 - DNA, 55 bp, Artificial; identical to SEQ ID NO: 156126
  Synthetic oligonucleotide

SEQ ID NO: 647281 - DNA, 50 bp, Artificial; identical to SEQ ID NO: 176681
  Synthetic oligonucleotide

SEQ ID NO: 647282 - DNA, 52 bp, Artificial; identical to SEQ ID NO: 222716
  Synthetic oligonucleotide

SEQ ID NO: 647283 - DNA, 55 bp, Artificial; identical to SEQ ID NO: 181379
  Synthetic oligonucleotide

SEQ ID NO: 647284 - DNA, 55 bp, Artificial; identical to SEQ ID NO: 252961
  Synthetic oligonucleotide

SEQ ID NO: 647285 - DNA, 52 bp, Artificial; identical to SEQ ID NO: 157639
  Synthetic oligonucleotide

SEQ ID NO: 647286 - DNA, 60 bp, Artificial; identical to SEQ ID NO: 200562
  Synthetic oligonucleotide

SEQ ID NO: 647287 - DNA, 52 bp, Artificial; identical to SEQ ID NO: 157640
  Synthetic oligonucleotide

SEQ ID NO: 647288 - DNA, 55 bp, Artificial; identical to SEQ ID NO: 257995
  Synthetic oligonucleotide

SEQ ID NO: 647289 - DNA, 56 bp, Artificial; identical to SEQ ID NO: 248633
  Synthetic oligonucleotide

SEQ ID NO: 647290 - DNA, 55 bp, Artificial; identical to SEQ ID NO: 142176
  Synthetic oligonucleotide

SEQ ID NO: 647291 - DNA, 55 bp, Artificial; identical to SEQ ID NO: 152407
  Synthetic oligonucleotide

SEQ ID NO: 647292 - DNA, 50 bp, Artificial; identical to SEQ ID NO: 218483
  Synthetic oligonucleotide

SEQ ID NO: 647293 - DNA, 55 bp, Artificial; identical to SEQ ID NO: 144882
  Synthetic oligonucleotide

SEQ ID NO: 647294 - DNA, 53 bp, Artificial; identical to SEQ ID NO: 157437
  Synthetic oligonucleotide

SEQ ID NO: 647295 - DNA, 50 bp, Artificial; identical to SEQ ID NO: 206736
  Synthetic oligonucleotide

SEQ ID NO: 647296 - DNA, 56 bp, Artificial; identical to SEQ ID NO: 168205
  Synthetic oligonucleotide

SEQ ID NO: 647297 - DNA, 54 bp, Artificial; identical to SEQ ID NO: 185050
  Synthetic oligonucleotide

SEQ ID NO: 647298 - DNA, 52 bp, Artificial; identical to SEQ ID NO: 222713
  Synthetic oligonucleotide

SEQ ID NO: 647299 - DNA, 55 bp, Artificial; identical to SEQ ID NO: 187960
  Synthetic oligonucleotide

SEQ ID NO: 647300 - DNA, 59 bp, Artificial; identical to SEQ ID NO: 224492
  Synthetic oligonucleotide

SEQ ID NO: 647301 - DNA, 55 bp, Artificial; identical to SEQ ID NO: 266237
  Synthetic oligonucleotide

SEQ ID NO: 647302 - DNA, 58 bp, Artificial; identical to SEQ ID NO: 237923
  Synthetic oligonucleotide

SEQ ID NO: 647303 - DNA, 55 bp, Artificial; identical to SEQ ID NO: 197256
  Synthetic oligonucleotide

SEQ ID NO: 647304 - DNA, 55 bp, Artificial; identical to SEQ ID NO: 142833
  Synthetic oligonucleotide

SEQ ID NO: 647305 - DNA, 55 bp, Artificial; identical to SEQ ID NO: 181512
  Synthetic oligonucleotide

SEQ ID NO: 647306 - DNA, 55 bp, Artificial; identical to SEQ ID NO: 208517
  Synthetic oligonucleotide

SEQ ID NO: 647307 - DNA, 55 bp, Artificial; identical to SEQ ID NO: 181509
  Synthetic oligonucleotide

SEQ ID NO: 647308 - DNA, 54 bp, Artificial; identical to SEQ ID NO: 169258
  Synthetic oligonucleotide

SEQ ID NO: 647309 - DNA, 53 bp, Artificial; identical to SEQ ID NO: 185625
  Synthetic oligonucleotide

SEQ ID NO: 647310 - DNA, 54 bp, Artificial; identical to SEQ ID NO: 247784
  Synthetic oligonucleotide

SEQ ID NO: 647311 - DNA, 55 bp, Artificial; identical to SEQ ID NO: 153427
  Synthetic oligonucleotide

SEQ ID NO: 647312 - DNA, 58 bp, Artificial; identical to SEQ ID NO: 178053
  Synthetic oligonucleotide

SEQ ID NO: 647313 - DNA, 56 bp, Artificial; identical to SEQ ID NO: 178050
  Synthetic oligonucleotide

SEQ ID NO: 647314 - DNA, 55 bp, Artificial; identical to SEQ ID NO: 174690
  Synthetic oligonucleotide

SEQ ID NO: 647315 - DNA, 60 bp, Artificial; identical to SEQ ID NO: 258197
  Synthetic oligonucleotide

SEQ ID NO: 647316 - DNA, 55 bp, Artificial; identical to SEQ ID NO: 194558
  Synthetic oligonucleotide

SEQ ID NO: 647317 - DNA, 60 bp, Artificial; identical to SEQ ID NO: 178047
  Synthetic oligonucleotide

SEQ ID NO: 647318 - DNA, 55 bp, Artificial; identical to SEQ ID NO: 198484
  Synthetic oligonucleotide

SEQ ID NO: 647319 - DNA, 60 bp, Artificial; identical to SEQ ID NO: 144319
  Synthetic oligonucleotide

SEQ ID NO: 647320 - DNA, 53 bp, Artificial; identical to SEQ ID NO: 212993
  Synthetic oligonucleotide

SEQ ID NO: 647321 - DNA, 55 bp, Artificial; identical to SEQ ID NO: 147701
  Synthetic oligonucleotide

SEQ ID NO: 647322 - DNA, 57 bp, Artificial; identical to SEQ ID NO: 200561
  Synthetic oligonucleotide

SEQ ID NO: 647323 - DNA, 55 bp, Artificial; identical to SEQ ID NO: 217494
  Synthetic oligonucleotide

SEQ ID NO: 647324 - DNA, 55 bp, Artificial; identical to SEQ ID NO: 150927
  Synthetic oligonucleotide

SEQ ID NO: 647325 - DNA, 55 bp, Artificial; identical to SEQ ID NO: 244372
  Synthetic oligonucleotide

SEQ ID NO: 647326 - DNA, 53 bp, Artificial; identical to SEQ ID NO: 141226
  Synthetic oligonucleotide

SEQ ID NO: 647327 - DNA, 55 bp, Artificial; identical to SEQ ID NO: 239921
  Synthetic oligonucleotide

SEQ ID NO: 647328 - DNA, 60 bp, Artificial; identical to SEQ ID NO: 237670
  Synthetic oligonucleotide

SEQ ID NO: 647329 - DNA, 51 bp, Artificial; identical to SEQ ID NO: 142879
  Synthetic oligonucleotide

SEQ ID NO: 647330 - DNA, 55 bp, Artificial; identical to SEQ ID NO: 181503
  Synthetic oligonucleotide

SEQ ID NO: 647331 - DNA, 55 bp, Artificial; identical to SEQ ID NO: 221492
  Synthetic oligonucleotide

SEQ ID NO: 647332 - DNA, 55 bp, Artificial; identical to SEQ ID NO: 171469
  Synthetic oligonucleotide

SEQ ID NO: 647333 - DNA, 60 bp, Artificial; identical to SEQ ID NO: 242421
  Synthetic oligonucleotide

SEQ ID NO: 647334 - DNA, 55 bp, Artificial; identical to SEQ ID NO: 162062
  Synthetic oligonucleotide

SEQ ID NO: 647335 - DNA, 60 bp, Artificial; identical to SEQ ID NO: 160186
  Synthetic oligonucleotide

SEQ ID NO: 647336 - DNA, 53 bp, Artificial; identical to SEQ ID NO: 185657
  Synthetic oligonucleotide

SEQ ID NO: 647337 - DNA, 60 bp, Artificial; identical to SEQ ID NO: 266396
  Synthetic oligonucleotide

SEQ ID NO: 647338 - DNA, 48 bp, Artificial; identical to SEQ ID NO: 248551
  Synthetic oligonucleotide

SEQ ID NO: 647339 - DNA, 52 bp, Artificial; identical to SEQ ID NO: 247937
  Synthetic oligonucleotide

SEQ ID NO: 647340 - DNA, 55 bp, Artificial; identical to SEQ ID NO: 187049
  Synthetic oligonucleotide

SEQ ID NO: 647341 - DNA, 59 bp, Artificial; identical to SEQ ID NO: 190242
  Synthetic oligonucleotide

SEQ ID NO: 647342 - DNA, 56 bp, Artificial; identical to SEQ ID NO: 179902
  Synthetic oligonucleotide

SEQ ID NO: 647343 - DNA, 55 bp, Artificial; identical to SEQ ID NO: 174692
  Synthetic oligonucleotide

SEQ ID NO: 647344 - DNA, 60 bp, Artificial; identical to SEQ ID NO: 201426
  Synthetic oligonucleotide

SEQ ID NO: 647345 - DNA, 50 bp, Artificial; identical to SEQ ID NO: 255809
  Synthetic oligonucleotide

SEQ ID NO: 647346 - DNA, 55 bp, Artificial; identical to SEQ ID NO: 242424
  Synthetic oligonucleotide

SEQ ID NO: 647347 - DNA, 57 bp, Artificial; identical to SEQ ID NO: 179713
  Synthetic oligonucleotide

SEQ ID NO: 647348 - DNA, 54 bp, Artificial; identical to SEQ ID NO: 243051
  Synthetic oligonucleotide

SEQ ID NO: 647349 - DNA, 55 bp, Artificial; identical to SEQ ID NO: 146250
  Synthetic oligonucleotide

SEQ ID NO: 647350 - DNA, 50 bp, Artificial; identical to SEQ ID NO: 243050
  Synthetic oligonucleotide

SEQ ID NO: 647351 - DNA, 54 bp, Artificial; identical to SEQ ID NO: 240563
  Synthetic oligonucleotide

SEQ ID NO: 647352 - DNA, 59 bp, Artificial; identical to SEQ ID NO: 242425
  Synthetic oligonucleotide

SEQ ID NO: 647353 - DNA, 55 bp, Artificial; identical to SEQ ID NO: 147700
  Synthetic oligonucleotide

SEQ ID NO: 647354 - DNA, 55 bp, Artificial; identical to SEQ ID NO: 217495
  Synthetic oligonucleotide

SEQ ID NO: 647355 - DNA, 56 bp, Artificial; identical to SEQ ID NO: 141991
  Synthetic oligonucleotide

SEQ ID NO: 647356 - DNA, 55 bp, Artificial; identical to SEQ ID NO: 243520
  Synthetic oligonucleotide

SEQ ID NO: 647357 - DNA, 59 bp, Artificial; identical to SEQ ID NO: 247137
  Synthetic oligonucleotide

SEQ ID NO: 647358 - DNA, 55 bp, Artificial; identical to SEQ ID NO: 202265
  Synthetic oligonucleotide

SEQ ID NO: 647359 - DNA, 51 bp, Artificial; identical to SEQ ID NO: 172821
  Synthetic oligonucleotide

SEQ ID NO: 647360 - DNA, 52 bp, Artificial; identical to SEQ ID NO: 223700
  Synthetic oligonucleotide

SEQ ID NO: 647361 - DNA, 59 bp, Artificial; identical to SEQ ID NO: 242426
  Synthetic oligonucleotide

SEQ ID NO: 647362 - DNA, 55 bp, Artificial; identical to SEQ ID NO: 209311
  Synthetic oligonucleotide

SEQ ID NO: 647363 - DNA, 51 bp, Artificial; identical to SEQ ID NO: 246596
  Synthetic oligonucleotide

SEQ ID NO: 647364 - DNA, 55 bp, Artificial; identical to SEQ ID NO: 151801
  Synthetic oligonucleotide

SEQ ID NO: 647365 - DNA, 55 bp, Artificial; identical to SEQ ID NO: 203698
  Synthetic oligonucleotide

SEQ ID NO: 647366 - DNA, 57 bp, Artificial; identical to SEQ ID NO: 166154
  Synthetic oligonucleotide

SEQ ID NO: 647367 - DNA, 54 bp, Artificial; identical to SEQ ID NO: 187038
  Synthetic oligonucleotide

SEQ ID NO: 647368 - DNA, 60 bp, Artificial; identical to SEQ ID NO: 233938
  Synthetic oligonucleotide

SEQ ID NO: 647369 - DNA, 50 bp, Artificial; identical to SEQ ID NO: 158401
  Synthetic oligonucleotide

SEQ ID NO: 647370 - DNA, 51 bp, Artificial; identical to SEQ ID NO: 200040
  Synthetic oligonucleotide

SEQ ID NO: 647371 - DNA, 52 bp, Artificial; identical to SEQ ID NO: 240944
  Synthetic oligonucleotide

SEQ ID NO: 647372 - DNA, 57 bp, Artificial; identical to SEQ ID NO: 247420
  Synthetic oligonucleotide

SEQ ID NO: 647373 - DNA, 51 bp, Artificial; identical to SEQ ID NO: 142882
  Synthetic oligonucleotide

SEQ ID NO: 647374 - DNA, 51 bp, Artificial; identical to SEQ ID NO: 197664
  Synthetic oligonucleotide

SEQ ID NO: 647375 - DNA, 51 bp, Artificial; identical to SEQ ID NO: 205731
  Synthetic oligonucleotide

SEQ ID NO: 647376 - DNA, 58 bp, Artificial; identical to SEQ ID NO: 243523
  Synthetic oligonucleotide

SEQ ID NO: 647377 - DNA, 60 bp, Artificial; identical to SEQ ID NO: 165478
  Synthetic oligonucleotide

SEQ ID NO: 647378 - DNA, 55 bp, Artificial; identical to SEQ ID NO: 198483
  Synthetic oligonucleotide

SEQ ID NO: 647379 - DNA, 55 bp, Artificial; identical to SEQ ID NO: 167296
  Synthetic oligonucleotide

SEQ ID NO: 647380 - DNA, 59 bp, Artificial; identical to SEQ ID NO: 202970
  Synthetic oligonucleotide

SEQ ID NO: 647381 - DNA, 50 bp, Artificial; identical to SEQ ID NO: 154036
  Synthetic oligonucleotide

SEQ ID NO: 647382 - DNA, 60 bp, Artificial; identical to SEQ ID NO: 256489
  Synthetic oligonucleotide

SEQ ID NO: 647383 - DNA, 60 bp, Artificial; identical to SEQ ID NO: 243524
  Synthetic oligonucleotide

SEQ ID NO: 647384 - DNA, 55 bp, Artificial; identical to SEQ ID NO: 147805
  Synthetic oligonucleotide

SEQ ID NO: 647385 - DNA, 57 bp, Artificial; identical to SEQ ID NO: 256624
  Synthetic oligonucleotide

SEQ ID NO: 647386 - DNA, 57 bp, Artificial; identical to SEQ ID NO: 243525
  Synthetic oligonucleotide

SEQ ID NO: 647387 - DNA, 55 bp, Artificial; identical to SEQ ID NO: 142178
  Synthetic oligonucleotide

SEQ ID NO: 647388 - DNA, 60 bp, Artificial; identical to SEQ ID NO: 155397
  Synthetic oligonucleotide

SEQ ID NO: 647389 - DNA, 55 bp, Artificial; identical to SEQ ID NO: 239903
  Synthetic oligonucleotide

SEQ ID NO: 647390 - DNA, 55 bp, Artificial; identical to SEQ ID NO: 142832
  Synthetic oligonucleotide

SEQ ID NO: 647391 - DNA, 52 bp, Artificial; identical to SEQ ID NO: 186048
  Synthetic oligonucleotide

SEQ ID NO: 647392 - DNA, 55 bp, Artificial; identical to SEQ ID NO: 150818
  Synthetic oligonucleotide

SEQ ID NO: 647393 - DNA, 50 bp, Artificial; identical to SEQ ID NO: 206737
  Synthetic oligonucleotide

SEQ ID NO: 647394 - DNA, 55 bp, Artificial; identical to SEQ ID NO: 212719
  Synthetic oligonucleotide

SEQ ID NO: 647395 - DNA, 55 bp, Artificial; identical to SEQ ID NO: 208185
  Synthetic oligonucleotide

SEQ ID NO: 647396 - DNA, 55 bp, Artificial; identical to SEQ ID NO: 254179
  Synthetic oligonucleotide

SEQ ID NO: 647397 - DNA, 55 bp, Artificial; identical to SEQ ID NO: 198482
  Synthetic oligonucleotide

SEQ ID NO: 647398 - DNA, 60 bp, Artificial; identical to SEQ ID NO: 242433
  Synthetic oligonucleotide

SEQ ID NO: 647399 - DNA, 52 bp, Artificial; identical to SEQ ID NO: 190869
  Synthetic oligonucleotide

SEQ ID NO: 647400 - DNA, 57 bp, Artificial; identical to SEQ ID NO: 247516
  Synthetic oligonucleotide

SEQ ID NO: 647401 - DNA, 60 bp, Artificial; identical to SEQ ID NO: 194201
  Synthetic oligonucleotide

SEQ ID NO: 647402 - DNA, 55 bp, Artificial; identical to SEQ ID NO: 240002
  Synthetic oligonucleotide

SEQ ID NO: 647403 - DNA, 55 bp, Artificial; identical to SEQ ID NO: 181499
  Synthetic oligonucleotide

SEQ ID NO: 647404 - DNA, 55 bp, Artificial; identical to SEQ ID NO: 190437
  Synthetic oligonucleotide

SEQ ID NO: 647405 - DNA, 53 bp, Artificial; identical to SEQ ID NO: 242515
  Synthetic oligonucleotide

SEQ ID NO: 647406 - DNA, 55 bp, Artificial; identical to SEQ ID NO: 187953
  Synthetic oligonucleotide

SEQ ID NO: 647407 - DNA, 60 bp, Artificial; identical to SEQ ID NO: 141597
  Synthetic oligonucleotide

SEQ ID NO: 647408 - DNA, 60 bp, Artificial; identical to SEQ ID NO: 174524
  Synthetic oligonucleotide

SEQ ID NO: 647409 - DNA, 55 bp, Artificial; identical to SEQ ID NO: 163908
  Synthetic oligonucleotide

SEQ ID NO: 647410 - DNA, 60 bp, Artificial; identical to SEQ ID NO: 200558
  Synthetic oligonucleotide

SEQ ID NO: 647411 - DNA, 59 bp, Artificial; identical to SEQ ID NO: 200557
  Synthetic oligonucleotide

SEQ ID NO: 647412 - DNA, 54 bp, Artificial; identical to SEQ ID NO: 157220
  Synthetic oligonucleotide

SEQ ID NO: 647413 - DNA, 54 bp, Artificial; identical to SEQ ID NO: 190630
  Synthetic oligonucleotide

SEQ ID NO: 647414 - DNA, 55 bp, Artificial; identical to SEQ ID NO: 207101
  Synthetic oligonucleotide

SEQ ID NO: 647415 - DNA, 53 bp, Artificial; identical to SEQ ID NO: 246134
  Synthetic oligonucleotide

SEQ ID NO: 647416 - DNA, 52 bp, Artificial; identical to SEQ ID NO: 200470
  Synthetic oligonucleotide

SEQ ID NO: 647417 - DNA, 57 bp, Artificial; identical to SEQ ID NO: 165501
  Synthetic oligonucleotide

SEQ ID NO: 647418 - DNA, 58 bp, Artificial; identical to SEQ ID NO: 266399
  Synthetic oligonucleotide

SEQ ID NO: 647419 - DNA, 55 bp, Artificial; identical to SEQ ID NO: 181498
  Synthetic oligonucleotide

SEQ ID NO: 647420 - DNA, 54 bp, Artificial; identical to SEQ ID NO: 149145
  Synthetic oligonucleotide

SEQ ID NO: 647421 - DNA, 55 bp, Artificial; identical to SEQ ID NO: 200459
  Synthetic oligonucleotide

SEQ ID NO: 647422 - DNA, 52 bp, Artificial; identical to SEQ ID NO: 240974
  Synthetic oligonucleotide

SEQ ID NO: 647423 - DNA, 51 bp, Artificial; identical to SEQ ID NO: 167143
  Synthetic oligonucleotide

SEQ ID NO: 647424 - DNA, 55 bp, Artificial; identical to SEQ ID NO: 147799
  Synthetic oligonucleotide

SEQ ID NO: 647425 - DNA, 55 bp, Artificial; identical to SEQ ID NO: 259002
  Synthetic oligonucleotide

SEQ ID NO: 647426 - DNA, 55 bp, Artificial; identical to SEQ ID NO: 234246
  Synthetic oligonucleotide

SEQ ID NO: 647427 - DNA, 55 bp, Artificial; identical to SEQ ID NO: 220632
  Synthetic oligonucleotide

SEQ ID NO: 647428 - DNA, 59 bp, Artificial; identical to SEQ ID NO: 253542
  Synthetic oligonucleotide

SEQ ID NO: 647429 - DNA, 51 bp, Artificial; identical to SEQ ID NO: 157784
  Synthetic oligonucleotide

SEQ ID NO: 647430 - DNA, 57 bp, Artificial; identical to SEQ ID NO: 242437
  Synthetic oligonucleotide

SEQ ID NO: 647431 - DNA, 60 bp, Artificial; identical to SEQ ID NO: 167199
  Synthetic oligonucleotide

SEQ ID NO: 647432 - DNA, 55 bp, Artificial; identical to SEQ ID NO: 252962
  Synthetic oligonucleotide

SEQ ID NO: 647433 - DNA, 56 bp, Artificial; identical to SEQ ID NO: 200448
  Synthetic oligonucleotide

SEQ ID NO: 647434 - DNA, 55 bp, Artificial; identical to SEQ ID NO: 194508
  Synthetic oligonucleotide

SEQ ID NO: 647435 - DNA, 55 bp, Artificial; identical to SEQ ID NO: 201778
  Synthetic oligonucleotide

SEQ ID NO: 647436 - DNA, 55 bp, Artificial; identical to SEQ ID NO: 200437
  Synthetic oligonucleotide

SEQ ID NO: 647437 - DNA, 51 bp, Artificial; identical to SEQ ID NO: 194238
  Synthetic oligonucleotide

SEQ ID NO: 647438 - DNA, 55 bp, Artificial; identical to SEQ ID NO: 209310
  Synthetic oligonucleotide

SEQ ID NO: 647439 - DNA, 54 bp, Artificial; identical to SEQ ID NO: 185117
  Synthetic oligonucleotide

SEQ ID NO: 647440 - DNA, 55 bp, Artificial; identical to SEQ ID NO: 252963
  Synthetic oligonucleotide

SEQ ID NO: 647441 - DNA, 60 bp, Artificial; identical to SEQ ID NO: 247163
  Synthetic oligonucleotide

SEQ ID NO: 647442 - DNA, 54 bp, Artificial; identical to SEQ ID NO: 246136
  Synthetic oligonucleotide

SEQ ID NO: 647443 - DNA, 55 bp, Artificial; identical to SEQ ID NO: 152403
  Synthetic oligonucleotide

SEQ ID NO: 647444 - DNA, 54 bp, Artificial; identical to SEQ ID NO: 220741
  Synthetic oligonucleotide

SEQ ID NO: 647445 - DNA, 54 bp, Artificial; identical to SEQ ID NO: 243038
  Synthetic oligonucleotide

SEQ ID NO: 647446 - DNA, 57 bp, Artificial; identical to SEQ ID NO: 234197
  Synthetic oligonucleotide

SEQ ID NO: 647447 - DNA, 54 bp, Artificial; identical to SEQ ID NO: 238589
  Synthetic oligonucleotide

SEQ ID NO: 647448 - DNA, 54 bp, Artificial; identical to SEQ ID NO: 246137
  Synthetic oligonucleotide

SEQ ID NO: 647449 - DNA, 56 bp, Artificial; identical to SEQ ID NO: 178088
  Synthetic oligonucleotide

SEQ ID NO: 647450 - DNA, 55 bp, Artificial; identical to SEQ ID NO: 243527
  Synthetic oligonucleotide

SEQ ID NO: 647451 - DNA, 55 bp, Artificial; identical to SEQ ID NO: 142831
  Synthetic oligonucleotide

SEQ ID NO: 647452 - DNA, 55 bp, Artificial; identical to SEQ ID NO: 181535
  Synthetic oligonucleotide

SEQ ID NO: 647453 - DNA, 51 bp, Artificial; identical to SEQ ID NO: 192137
  Synthetic oligonucleotide

SEQ ID NO: 647454 - DNA, 55 bp, Artificial; identical to SEQ ID NO: 209360
  Synthetic oligonucleotide

SEQ ID NO: 647455 - DNA, 55 bp, Artificial; identical to SEQ ID NO: 181534
  Synthetic oligonucleotide

SEQ ID NO: 647456 - DNA, 50 bp, Artificial; identical to SEQ ID NO: 248116
  Synthetic oligonucleotide

SEQ ID NO: 647457 - DNA, 53 bp, Artificial; identical to SEQ ID NO: 170985
  Synthetic oligonucleotide

SEQ ID NO: 647458 - DNA, 59 bp, Artificial; identical to SEQ ID NO: 217015
  Synthetic oligonucleotide

SEQ ID NO: 647459 - DNA, 50 bp, Artificial; identical to SEQ ID NO: 176736
  Synthetic oligonucleotide

SEQ ID NO: 647460 - DNA, 50 bp, Artificial; identical to SEQ ID NO: 210448
  Synthetic oligonucleotide

SEQ ID NO: 647461 - DNA, 51 bp, Artificial; identical to SEQ ID NO: 221784
  Synthetic oligonucleotide

SEQ ID NO: 647462 - DNA, 55 bp, Artificial; identical to SEQ ID NO: 208515
  Synthetic oligonucleotide

SEQ ID NO: 647463 - DNA, 55 bp, Artificial; identical to SEQ ID NO: 188978
  Synthetic oligonucleotide

SEQ ID NO: 647464 - DNA, 50 bp, Artificial; identical to SEQ ID NO: 176734
  Synthetic oligonucleotide

SEQ ID NO: 647465 - DNA, 51 bp, Artificial; identical to SEQ ID NO: 223731
  Synthetic oligonucleotide

SEQ ID NO: 647466 - DNA, 60 bp, Artificial; identical to SEQ ID NO: 238673
  Synthetic oligonucleotide

SEQ ID NO: 647467 - DNA, 55 bp, Artificial; identical to SEQ ID NO: 249594
  Synthetic oligonucleotide

SEQ ID NO: 647468 - DNA, 58 bp, Artificial; identical to SEQ ID NO: 202096
  Synthetic oligonucleotide

SEQ ID NO: 647469 - DNA, 55 bp, Artificial; identical to SEQ ID NO: 174694
  Synthetic oligonucleotide

SEQ ID NO: 647470 - DNA, 55 bp, Artificial; identical to SEQ ID NO: 212718
  Synthetic oligonucleotide

SEQ ID NO: 647471 - DNA, 50 bp, Artificial; identical to SEQ ID NO: 178078
  Synthetic oligonucleotide

SEQ ID NO: 647472 - DNA, 60 bp, Artificial; identical to SEQ ID NO: 150794
  Synthetic oligonucleotide

SEQ ID NO: 647473 - DNA, 55 bp, Artificial; identical to SEQ ID NO: 160268
  Synthetic oligonucleotide

SEQ ID NO: 647474 - DNA, 55 bp, Artificial; identical to SEQ ID NO: 147819
  Synthetic oligonucleotide

SEQ ID NO: 647475 - DNA, 60 bp, Artificial; identical to SEQ ID NO: 168002
  Synthetic oligonucleotide

SEQ ID NO: 647476 - DNA, 58 bp, Artificial; identical to SEQ ID NO: 150795
  Synthetic oligonucleotide

SEQ ID NO: 647477 - DNA, 55 bp, Artificial; identical to SEQ ID NO: 198477
  Synthetic oligonucleotide

SEQ ID NO: 647478 - DNA, 55 bp, Artificial; identical to SEQ ID NO: 168294
  Synthetic oligonucleotide

SEQ ID NO: 647479 - DNA, 54 bp, Artificial; identical to SEQ ID NO: 185092
  Synthetic oligonucleotide

SEQ ID NO: 647480 - DNA, 52 bp, Artificial; identical to SEQ ID NO: 186058
  Synthetic oligonucleotide

SEQ ID NO: 647481 - DNA, 55 bp, Artificial; identical to SEQ ID NO: 156130
  Synthetic oligonucleotide

SEQ ID NO: 647482 - DNA, 60 bp, Artificial; identical to SEQ ID NO: 201415
  Synthetic oligonucleotide

SEQ ID NO: 647483 - DNA, 55 bp, Artificial; identical to SEQ ID NO: 168291
  Synthetic oligonucleotide

SEQ ID NO: 647484 - DNA, 55 bp, Artificial; identical to SEQ ID NO: 224937
  Synthetic oligonucleotide

SEQ ID NO: 647485 - DNA, 60 bp, Artificial; identical to SEQ ID NO: 178073
  Synthetic oligonucleotide

SEQ ID NO: 647486 - DNA, 58 bp, Artificial; identical to SEQ ID NO: 178070
  Synthetic oligonucleotide

SEQ ID NO: 647487 - DNA, 55 bp, Artificial; identical to SEQ ID NO: 147812
  Synthetic oligonucleotide

SEQ ID NO: 647488 - DNA, 58 bp, Artificial; identical to SEQ ID NO: 253508
  Synthetic oligonucleotide

SEQ ID NO: 647489 - DNA, 55 bp, Artificial; identical to SEQ ID NO: 221491
  Synthetic oligonucleotide

SEQ ID NO: 647490 - DNA, 50 bp, Artificial; identical to SEQ ID NO: 150377
  Synthetic oligonucleotide

SEQ ID NO: 647491 - DNA, 53 bp, Artificial; identical to SEQ ID NO: 165290
  Synthetic oligonucleotide

SEQ ID NO: 647492 - DNA, 57 bp, Artificial; identical to SEQ ID NO: 212426
  Synthetic oligonucleotide

SEQ ID NO: 647493 - DNA, 55 bp, Artificial; identical to SEQ ID NO: 144884
  Synthetic oligonucleotide

SEQ ID NO: 647494 - DNA, 54 bp, Artificial; identical to SEQ ID NO: 199632
  Synthetic oligonucleotide

SEQ ID NO: 647495 - DNA, 55 bp, Artificial; identical to SEQ ID NO: 221490
  Synthetic oligonucleotide

SEQ ID NO: 647496 - DNA, 60 bp, Artificial; identical to SEQ ID NO: 234826
  Synthetic oligonucleotide

SEQ ID NO: 647497 - DNA, 53 bp, Artificial; identical to SEQ ID NO: 200415
  Synthetic oligonucleotide

SEQ ID NO: 647498 - DNA, 55 bp, Artificial; identical to SEQ ID NO: 249005
  Synthetic oligonucleotide

SEQ ID NO: 647499 - DNA, 53 bp, Artificial; identical to SEQ ID NO: 188095
  Synthetic oligonucleotide

SEQ ID NO: 647500 - DNA, 51 bp, Artificial; identical to SEQ ID NO: 157781
  Synthetic oligonucleotide

SEQ ID NO: 647501 - DNA, 55 bp, Artificial; identical to SEQ ID NO: 201779
  Synthetic oligonucleotide

SEQ ID NO: 647502 - DNA, 56 bp, Artificial; identical to SEQ ID NO: 179892
  Synthetic oligonucleotide

SEQ ID NO: 647503 - DNA, 51 bp, Artificial; identical to SEQ ID NO: 161378
  Synthetic oligonucleotide

SEQ ID NO: 647504 - DNA, 55 bp, Artificial; identical to SEQ ID NO: 217498
  Synthetic oligonucleotide

SEQ ID NO: 647505 - DNA, 55 bp, Artificial; identical to SEQ ID NO: 181528
  Synthetic oligonucleotide

SEQ ID NO: 647506 - DNA, 55 bp, Artificial; identical to SEQ ID NO: 200393
  Synthetic oligonucleotide

SEQ ID NO: 647507 - DNA, 59 bp, Artificial; identical to SEQ ID NO: 190254
  Synthetic oligonucleotide

SEQ ID NO: 647508 - DNA, 60 bp, Artificial; identical to SEQ ID NO: 150797
  Synthetic oligonucleotide

SEQ ID NO: 647509 - DNA, 55 bp, Artificial; identical to SEQ ID NO: 163906
  Synthetic oligonucleotide

SEQ ID NO: 647510 - DNA, 59 bp, Artificial; identical to SEQ ID NO: 177781
  Synthetic oligonucleotide

SEQ ID NO: 647511 - DNA, 54 bp, Artificial; identical to SEQ ID NO: 185100
  Synthetic oligonucleotide

SEQ ID NO: 647512 - DNA, 58 bp, Artificial; identical to SEQ ID NO: 160108
  Synthetic oligonucleotide

SEQ ID NO: 647513 - DNA, 60 bp, Artificial; identical to SEQ ID NO: 238676
  Synthetic oligonucleotide

SEQ ID NO: 647514 - DNA, 60 bp, Artificial; identical to SEQ ID NO: 215139
  Synthetic oligonucleotide

SEQ ID NO: 647515 - DNA, 60 bp, Artificial; identical to SEQ ID NO: 191130
  Synthetic oligonucleotide

SEQ ID NO: 647516 - DNA, 55 bp, Artificial; identical to SEQ ID NO: 187952
  Synthetic oligonucleotide

SEQ ID NO: 647517 - DNA, 58 bp, Artificial; identical to SEQ ID NO: 221244
  Synthetic oligonucleotide

SEQ ID NO: 647518 - DNA, 55 bp, Artificial; identical to SEQ ID NO: 198475
  Synthetic oligonucleotide

SEQ ID NO: 647519 - DNA, 60 bp, Artificial; identical to SEQ ID NO: 266400
  Synthetic oligonucleotide

SEQ ID NO: 647520 - DNA, 55 bp, Artificial; identical to SEQ ID NO: 208513
  Synthetic oligonucleotide

SEQ ID NO: 647521 - DNA, 57 bp, Artificial; identical to SEQ ID NO: 171048
  Synthetic oligonucleotide

SEQ ID NO: 647522 - DNA, 52 bp, Artificial; identical to SEQ ID NO: 174867
  Synthetic oligonucleotide

SEQ ID NO: 647523 - DNA, 55 bp, Artificial; identical to SEQ ID NO: 249004
  Synthetic oligonucleotide

SEQ ID NO: 647524 - DNA, 60 bp, Artificial; identical to SEQ ID NO: 200381
  Synthetic oligonucleotide

SEQ ID NO: 647525 - DNA, 55 bp, Artificial; identical to SEQ ID NO: 217499
  Synthetic oligonucleotide

SEQ ID NO: 647526 - DNA, 58 bp, Artificial; identical to SEQ ID NO: 256329
  Synthetic oligonucleotide

SEQ ID NO: 647527 - DNA, 59 bp, Artificial; identical to SEQ ID NO: 177778
  Synthetic oligonucleotide

SEQ ID NO: 647528 - DNA, 51 bp, Artificial; identical to SEQ ID NO: 240985
  Synthetic oligonucleotide

SEQ ID NO: 647529 - DNA, 55 bp, Artificial; identical to SEQ ID NO: 222600
  Synthetic oligonucleotide

SEQ ID NO: 647530 - DNA, 53 bp, Artificial; identical to SEQ ID NO: 185487
  Synthetic oligonucleotide

SEQ ID NO: 647531 - DNA, 60 bp, Artificial; identical to SEQ ID NO: 247158
  Synthetic oligonucleotide

SEQ ID NO: 647532 - DNA, 50 bp, Artificial; identical to SEQ ID NO: 241734
  Synthetic oligonucleotide

SEQ ID NO: 647533 - DNA, 55 bp, Artificial; identical to SEQ ID NO: 218233
  Synthetic oligonucleotide

SEQ ID NO: 647534 - DNA, 55 bp, Artificial; identical to SEQ ID NO: 209358
  Synthetic oligonucleotide

SEQ ID NO: 647535 - DNA, 55 bp, Artificial; identical to SEQ ID NO: 208516
  Synthetic oligonucleotide

SEQ ID NO: 647536 - DNA, 55 bp, Artificial; identical to SEQ ID NO: 198473
  Synthetic oligonucleotide

SEQ ID NO: 647537 - DNA, 60 bp, Artificial; identical to SEQ ID NO: 206932
  Synthetic oligonucleotide

SEQ ID NO: 647538 - DNA, 59 bp, Artificial; identical to SEQ ID NO: 141600
  Synthetic oligonucleotide

SEQ ID NO: 647539 - DNA, 59 bp, Artificial; identical to SEQ ID NO: 171020
  Synthetic oligonucleotide

SEQ ID NO: 647540 - DNA, 55 bp, Artificial; identical to SEQ ID NO: 147759
  Synthetic oligonucleotide

SEQ ID NO: 647541 - DNA, 55 bp, Artificial; identical to SEQ ID NO: 156135
  Synthetic oligonucleotide

SEQ ID NO: 647542 - DNA, 55 bp, Artificial; identical to SEQ ID NO: 217500
  Synthetic oligonucleotide

SEQ ID NO: 647543 - DNA, 55 bp, Artificial; identical to SEQ ID NO: 238420
  Synthetic oligonucleotide

SEQ ID NO: 647544 - DNA, 50 bp, Artificial; identical to SEQ ID NO: 176558
  Synthetic oligonucleotide

SEQ ID NO: 647545 - DNA, 59 bp, Artificial; identical to SEQ ID NO: 190276
  Synthetic oligonucleotide

SEQ ID NO: 647546 - DNA, 56 bp, Artificial; identical to SEQ ID NO: 150804
  Synthetic oligonucleotide

SEQ ID NO: 647547 - DNA, 55 bp, Artificial; identical to SEQ ID NO: 166941
  Synthetic oligonucleotide

SEQ ID NO: 647548 - DNA, 55 bp, Artificial; identical to SEQ ID NO: 155422
  Synthetic oligonucleotide

SEQ ID NO: 647549 - DNA, 52 bp, Artificial; identical to SEQ ID NO: 149402
  Synthetic oligonucleotide

SEQ ID NO: 647550 - DNA, 55 bp, Artificial; identical to SEQ ID NO: 181521
  Synthetic oligonucleotide

SEQ ID NO: 647551 - DNA, 55 bp, Artificial; identical to SEQ ID NO: 141601
  Synthetic oligonucleotide

SEQ ID NO: 647552 - DNA, 53 bp, Artificial; identical to SEQ ID NO: 206389
  Synthetic oligonucleotide

SEQ ID NO: 647553 - DNA, 60 bp, Artificial; identical to SEQ ID NO: 194231
  Synthetic oligonucleotide

SEQ ID NO: 647554 - DNA, 55 bp, Artificial; identical to SEQ ID NO: 202266
  Synthetic oligonucleotide

SEQ ID NO: 647555 - DNA, 54 bp, Artificial; identical to SEQ ID NO: 168875
  Synthetic oligonucleotide

SEQ ID NO: 647556 - DNA, 58 bp, Artificial; identical to SEQ ID NO: 187338
  Synthetic oligonucleotide

SEQ ID NO: 647557 - DNA, 55 bp, Artificial; identical to SEQ ID NO: 211218
  Synthetic oligonucleotide

SEQ ID NO: 647558 - DNA, 55 bp, Artificial; identical to SEQ ID NO: 147790
  Synthetic oligonucleotide

SEQ ID NO: 647559 - DNA, 55 bp, Artificial; identical to SEQ ID NO: 257969
  Synthetic oligonucleotide

SEQ ID NO: 647560 - DNA, 59 bp, Artificial; identical to SEQ ID NO: 147064
  Synthetic oligonucleotide

SEQ ID NO: 647561 - DNA, 55 bp, Artificial; identical to SEQ ID NO: 198472
  Synthetic oligonucleotide

SEQ ID NO: 647562 - DNA, 51 bp, Artificial; identical to SEQ ID NO: 165239
  Synthetic oligonucleotide

SEQ ID NO: 647563 - DNA, 55 bp, Artificial; identical to SEQ ID NO: 156136
  Synthetic oligonucleotide

SEQ ID NO: 647564 - DNA, 52 bp, Artificial; identical to SEQ ID NO: 174868
  Synthetic oligonucleotide

SEQ ID NO: 647565 - DNA, 51 bp, Artificial; identical to SEQ ID NO: 165238
  Synthetic oligonucleotide

SEQ ID NO: 647566 - DNA, 55 bp, Artificial; identical to SEQ ID NO: 190926
  Synthetic oligonucleotide

SEQ ID NO: 647567 - DNA, 55 bp, Artificial; identical to SEQ ID NO: 156138
  Synthetic oligonucleotide

SEQ ID NO: 647568 - DNA, 56 bp, Artificial; identical to SEQ ID NO: 233364
  Synthetic oligonucleotide

SEQ ID NO: 647569 - DNA, 50 bp, Artificial; identical to SEQ ID NO: 176552
  Synthetic oligonucleotide

SEQ ID NO: 647570 - DNA, 55 bp, Artificial; identical to SEQ ID NO: 248994
  Synthetic oligonucleotide

SEQ ID NO: 647571 - DNA, 55 bp, Artificial; identical to SEQ ID NO: 248993
  Synthetic oligonucleotide

SEQ ID NO: 647572 - DNA, 52 bp, Artificial; identical to SEQ ID NO: 197556
  Synthetic oligonucleotide

SEQ ID NO: 647573 - DNA, 50 bp, Artificial; identical to SEQ ID NO: 187123
  Synthetic oligonucleotide

SEQ ID NO: 647574 - DNA, 52 bp, Artificial; identical to SEQ ID NO: 247938
  Synthetic oligonucleotide

SEQ ID NO: 647575 - DNA, 55 bp, Artificial; identical to SEQ ID NO: 233495
  Synthetic oligonucleotide

SEQ ID NO: 647576 - DNA, 60 bp, Artificial; identical to SEQ ID NO: 224569
  Synthetic oligonucleotide

SEQ ID NO: 647577 - DNA, 55 bp, Artificial; identical to SEQ ID NO: 212567
  Synthetic oligonucleotide

SEQ ID NO: 647578 - DNA, 60 bp, Artificial; identical to SEQ ID NO: 248567
  Synthetic oligonucleotide

SEQ ID NO: 647579 - DNA, 55 bp, Artificial; identical to SEQ ID NO: 205518
  Synthetic oligonucleotide

SEQ ID NO: 647580 - DNA, 55 bp, Artificial; identical to SEQ ID NO: 181519
  Synthetic oligonucleotide

SEQ ID NO: 647581 - DNA, 55 bp, Artificial; identical to SEQ ID NO: 156139
  Synthetic oligonucleotide

SEQ ID NO: 647582 - DNA, 55 bp, Artificial; identical to SEQ ID NO: 248576
  Synthetic oligonucleotide

SEQ ID NO: 647583 - DNA, 60 bp, Artificial; identical to SEQ ID NO: 170949
  Synthetic oligonucleotide

SEQ ID NO: 647584 - DNA, 55 bp, Artificial; identical to SEQ ID NO: 167515
  Synthetic oligonucleotide

SEQ ID NO: 647585 - DNA, 55 bp, Artificial; identical to SEQ ID NO: 168213
  Synthetic oligonucleotide

SEQ ID NO: 647586 - DNA, 57 bp, Artificial; identical to SEQ ID NO: 258186
  Synthetic oligonucleotide

SEQ ID NO: 647587 - DNA, 58 bp, Artificial; identical to SEQ ID NO: 187342
  Synthetic oligonucleotide

SEQ ID NO: 647588 - DNA, 55 bp, Artificial; identical to SEQ ID NO: 156140
  Synthetic oligonucleotide

SEQ ID NO: 647589 - DNA, 55 bp, Artificial; identical to SEQ ID NO: 237887
  Synthetic oligonucleotide

SEQ ID NO: 647590 - DNA, 58 bp, Artificial; identical to SEQ ID NO: 206935
  Synthetic oligonucleotide

SEQ ID NO: 647591 - DNA, 50 bp, Artificial; identical to SEQ ID NO: 196634
  Synthetic oligonucleotide

SEQ ID NO: 647592 - DNA, 55 bp, Artificial; identical to SEQ ID NO: 154413
  Synthetic oligonucleotide

SEQ ID NO: 647593 - DNA, 58 bp, Artificial; identical to SEQ ID NO: 155150
  Synthetic oligonucleotide

SEQ ID NO: 647594 - DNA, 55 bp, Artificial; identical to SEQ ID NO: 155423
  Synthetic oligonucleotide

SEQ ID NO: 647595 - DNA, 56 bp, Artificial; identical to SEQ ID NO: 168209
  Synthetic oligonucleotide

SEQ ID NO: 647596 - DNA, 53 bp, Artificial; identical to SEQ ID NO: 212571
  Synthetic oligonucleotide

SEQ ID NO: 647597 - DNA, 59 bp, Artificial; identical to SEQ ID NO: 154558
  Synthetic oligonucleotide

SEQ ID NO: 647598 - DNA, 58 bp, Artificial; identical to SEQ ID NO: 238683
  Synthetic oligonucleotide

SEQ ID NO: 647599 - DNA, 54 bp, Artificial; identical to SEQ ID NO: 238609
  Synthetic oligonucleotide

SEQ ID NO: 647600 - DNA, 51 bp, Artificial; identical to SEQ ID NO: 173663
  Synthetic oligonucleotide

SEQ ID NO: 647601 - DNA, 54 bp, Artificial; identical to SEQ ID NO: 167051
  Synthetic oligonucleotide

SEQ ID NO: 647602 - DNA, 59 bp, Artificial; identical to SEQ ID NO: 153055
  Synthetic oligonucleotide

SEQ ID NO: 647603 - DNA, 56 bp, Artificial; identical to SEQ ID NO: 248565
  Synthetic oligonucleotide

SEQ ID NO: 647604 - DNA, 50 bp, Artificial; identical to SEQ ID NO: 171704
  Synthetic oligonucleotide

SEQ ID NO: 647605 - DNA, 55 bp, Artificial; identical to SEQ ID NO: 142180
  Synthetic oligonucleotide

SEQ ID NO: 647606 - DNA, 60 bp, Artificial; identical to SEQ ID NO: 257419
  Synthetic oligonucleotide

SEQ ID NO: 647607 - DNA, 54 bp, Artificial; identical to SEQ ID NO: 185119
  Synthetic oligonucleotide

SEQ ID NO: 647608 - DNA, 60 bp, Artificial; identical to SEQ ID NO: 167969
  Synthetic oligonucleotide

SEQ ID NO: 647609 - DNA, 55 bp, Artificial; identical to SEQ ID NO: 221449
  Synthetic oligonucleotide

SEQ ID NO: 647610 - DNA, 55 bp, Artificial; identical to SEQ ID NO: 181518
  Synthetic oligonucleotide

SEQ ID NO: 647611 - DNA, 54 bp, Artificial; identical to SEQ ID NO: 199495
  Synthetic oligonucleotide

SEQ ID NO: 647612 - DNA, 53 bp, Artificial; identical to SEQ ID NO: 255384
  Synthetic oligonucleotide

SEQ ID NO: 647613 - DNA, 52 bp, Artificial; identical to SEQ ID NO: 157600
  Synthetic oligonucleotide

SEQ ID NO: 647614 - DNA, 53 bp, Artificial; identical to SEQ ID NO: 185464
  Synthetic oligonucleotide

SEQ ID NO: 647615 - DNA, 53 bp, Artificial; identical to SEQ ID NO: 149394
  Synthetic oligonucleotide

SEQ ID NO: 647616 - DNA, 54 bp, Artificial; identical to SEQ ID NO: 185111
  Synthetic oligonucleotide

SEQ ID NO: 647617 - DNA, 53 bp, Artificial; identical to SEQ ID NO: 185468
  Synthetic oligonucleotide

SEQ ID NO: 647618 - DNA, 52 bp, Artificial; identical to SEQ ID NO: 143823
  Synthetic oligonucleotide

SEQ ID NO: 647619 - DNA, 55 bp, Artificial; identical to SEQ ID NO: 156086
  Synthetic oligonucleotide

SEQ ID NO: 647620 - DNA, 60 bp, Artificial; identical to SEQ ID NO: 200348
  Synthetic oligonucleotide

SEQ ID NO: 647621 - DNA, 55 bp, Artificial; identical to SEQ ID NO: 190433
  Synthetic oligonucleotide

SEQ ID NO: 647622 - DNA, 53 bp, Artificial; identical to SEQ ID NO: 197530
  Synthetic oligonucleotide

SEQ ID NO: 647623 - DNA, 53 bp, Artificial; identical to SEQ ID NO: 237690
  Synthetic oligonucleotide

SEQ ID NO: 647624 - DNA, 50 bp, Artificial; identical to SEQ ID NO: 255838
  Synthetic oligonucleotide

SEQ ID NO: 647625 - DNA, 60 bp, Artificial; identical to SEQ ID NO: 206940
  Synthetic oligonucleotide

SEQ ID NO: 647626 - DNA, 55 bp, Artificial; identical to SEQ ID NO: 202268
  Synthetic oligonucleotide

SEQ ID NO: 647627 - DNA, 52 bp, Artificial; identical to SEQ ID NO: 246439
  Synthetic oligonucleotide

SEQ ID NO: 647628 - DNA, 54 bp, Artificial; identical to SEQ ID NO: 243080
  Synthetic oligonucleotide

SEQ ID NO: 647629 - DNA, 56 bp, Artificial; identical to SEQ ID NO: 247501
  Synthetic oligonucleotide

SEQ ID NO: 647630 - DNA, 55 bp, Artificial; identical to SEQ ID NO: 187926
  Synthetic oligonucleotide

SEQ ID NO: 647631 - DNA, 55 bp, Artificial; identical to SEQ ID NO: 142829
  Synthetic oligonucleotide

SEQ ID NO: 647632 - DNA, 55 bp, Artificial; identical to SEQ ID NO: 144885
  Synthetic oligonucleotide

SEQ ID NO: 647633 - DNA, 54 bp, Artificial; identical to SEQ ID NO: 168873
  Synthetic oligonucleotide

SEQ ID NO: 647634 - DNA, 57 bp, Artificial; identical to SEQ ID NO: 266099
  Synthetic oligonucleotide

SEQ ID NO: 647635 - DNA, 50 bp, Artificial; identical to SEQ ID NO: 241619
  Synthetic oligonucleotide

SEQ ID NO: 647636 - DNA, 53 bp, Artificial; identical to SEQ ID NO: 168905
  Synthetic oligonucleotide

SEQ ID NO: 647637 - DNA, 52 bp, Artificial; identical to SEQ ID NO: 186032
  Synthetic oligonucleotide

SEQ ID NO: 647638 - DNA, 54 bp, Artificial; identical to SEQ ID NO: 155520
  Synthetic oligonucleotide

SEQ ID NO: 647639 - DNA, 54 bp, Artificial; identical to SEQ ID NO: 202424
  Synthetic oligonucleotide

SEQ ID NO: 647640 - DNA, 60 bp, Artificial; identical to SEQ ID NO: 155145
  Synthetic oligonucleotide

SEQ ID NO: 647641 - DNA, 55 bp, Artificial; identical to SEQ ID NO: 254157
  Synthetic oligonucleotide

SEQ ID NO: 647642 - DNA, 50 bp, Artificial; identical to SEQ ID NO: 207809
  Synthetic oligonucleotide

SEQ ID NO: 647643 - DNA, 60 bp, Artificial; identical to SEQ ID NO: 152999
  Synthetic oligonucleotide

SEQ ID NO: 647644 - DNA, 56 bp, Artificial; identical to SEQ ID NO: 205228
  Synthetic oligonucleotide

SEQ ID NO: 647645 - DNA, 60 bp, Artificial; identical to SEQ ID NO: 242519
  Synthetic oligonucleotide

SEQ ID NO: 647646 - DNA, 53 bp, Artificial; identical to SEQ ID NO: 149387
  Synthetic oligonucleotide

SEQ ID NO: 647647 - DNA, 57 bp, Artificial; identical to SEQ ID NO: 243530
  Synthetic oligonucleotide

SEQ ID NO: 647648 - DNA, 53 bp, Artificial; identical to SEQ ID NO: 217016
  Synthetic oligonucleotide

SEQ ID NO: 647649 - DNA, 50 bp, Artificial; identical to SEQ ID NO: 204039
  Synthetic oligonucleotide

SEQ ID NO: 647650 - DNA, 57 bp, Artificial; identical to SEQ ID NO: 242523
  Synthetic oligonucleotide

SEQ ID NO: 647651 - DNA, 60 bp, Artificial; identical to SEQ ID NO: 212435
  Synthetic oligonucleotide

SEQ ID NO: 647652 - DNA, 52 bp, Artificial; identical to SEQ ID NO: 162322
  Synthetic oligonucleotide

SEQ ID NO: 647653 - DNA, 55 bp, Artificial; identical to SEQ ID NO: 150863
  Synthetic oligonucleotide

SEQ ID NO: 647654 - DNA, 60 bp, Artificial; identical to SEQ ID NO: 177802
  Synthetic oligonucleotide

SEQ ID NO: 647655 - DNA, 55 bp, Artificial; identical to SEQ ID NO: 212440
  Synthetic oligonucleotide

SEQ ID NO: 647656 - DNA, 54 bp, Artificial; identical to SEQ ID NO: 168835
  Synthetic oligonucleotide

SEQ ID NO: 647657 - DNA, 60 bp, Artificial; identical to SEQ ID NO: 170963
  Synthetic oligonucleotide

SEQ ID NO: 647658 - DNA, 52 bp, Artificial; identical to SEQ ID NO: 170094
  Synthetic oligonucleotide

SEQ ID NO: 647659 - DNA, 60 bp, Artificial; identical to SEQ ID NO: 203321
  Synthetic oligonucleotide

SEQ ID NO: 647660 - DNA, 55 bp, Artificial; identical to SEQ ID NO: 181465
  Synthetic oligonucleotide

SEQ ID NO: 647661 - DNA, 60 bp, Artificial; identical to SEQ ID NO: 238686
  Synthetic oligonucleotide

SEQ ID NO: 647662 - DNA, 60 bp, Artificial; identical to SEQ ID NO: 200326
  Synthetic oligonucleotide

SEQ ID NO: 647663 - DNA, 54 bp, Artificial; identical to SEQ ID NO: 185081
  Synthetic oligonucleotide

SEQ ID NO: 647664 - DNA, 52 bp, Artificial; identical to SEQ ID NO: 234504
  Synthetic oligonucleotide

SEQ ID NO: 647665 - DNA, 55 bp, Artificial; identical to SEQ ID NO: 202271
  Synthetic oligonucleotide

SEQ ID NO: 647666 - DNA, 55 bp, Artificial; identical to SEQ ID NO: 197254
  Synthetic oligonucleotide

SEQ ID NO: 647667 - DNA, 55 bp, Artificial; identical to SEQ ID NO: 169958
  Synthetic oligonucleotide

SEQ ID NO: 647668 - DNA, 51 bp, Artificial; identical to SEQ ID NO: 157800
  Synthetic oligonucleotide

SEQ ID NO: 647669 - DNA, 55 bp, Artificial; identical to SEQ ID NO: 265627
  Synthetic oligonucleotide

SEQ ID NO: 647670 - DNA, 50 bp, Artificial; identical to SEQ ID NO: 241621
  Synthetic oligonucleotide

SEQ ID NO: 647671 - DNA, 60 bp, Artificial; identical to SEQ ID NO: 200315
  Synthetic oligonucleotide

SEQ ID NO: 647672 - DNA, 55 bp, Artificial; identical to SEQ ID NO: 244218
  Synthetic oligonucleotide

SEQ ID NO: 647673 - DNA, 57 bp, Artificial; identical to SEQ ID NO: 177800
  Synthetic oligonucleotide

SEQ ID NO: 647674 - DNA, 52 bp, Artificial; identical to SEQ ID NO: 246437
  Synthetic oligonucleotide

SEQ ID NO: 647675 - DNA, 55 bp, Artificial; identical to SEQ ID NO: 211252
  Synthetic oligonucleotide

SEQ ID NO: 647676 - DNA, 60 bp, Artificial; identical to SEQ ID NO: 194228
  Synthetic oligonucleotide

SEQ ID NO: 647677 - DNA, 52 bp, Artificial; identical to SEQ ID NO: 165040
  Synthetic oligonucleotide

SEQ ID NO: 647678 - DNA, 55 bp, Artificial; identical to SEQ ID NO: 198467
  Synthetic oligonucleotide

SEQ ID NO: 647679 - DNA, 55 bp, Artificial; identical to SEQ ID NO: 257996
  Synthetic oligonucleotide

SEQ ID NO: 647680 - DNA, 60 bp, Artificial; identical to SEQ ID NO: 159542
  Synthetic oligonucleotide

SEQ ID NO: 647681 - DNA, 54 bp, Artificial; identical to SEQ ID NO: 185075
  Synthetic oligonucleotide

SEQ ID NO: 647682 - DNA, 55 bp, Artificial; identical to SEQ ID NO: 217503
  Synthetic oligonucleotide

SEQ ID NO: 647683 - DNA, 60 bp, Artificial; identical to SEQ ID NO: 177793
  Synthetic oligonucleotide

SEQ ID NO: 647684 - DNA, 55 bp, Artificial; identical to SEQ ID NO: 244925
  Synthetic oligonucleotide

SEQ ID NO: 647685 - DNA, 55 bp, Artificial; identical to SEQ ID NO: 233493
  Synthetic oligonucleotide

SEQ ID NO: 647686 - DNA, 52 bp, Artificial; identical to SEQ ID NO: 170134
  Synthetic oligonucleotide

SEQ ID NO: 647687 - DNA, 51 bp, Artificial; identical to SEQ ID NO: 203029
  Synthetic oligonucleotide

SEQ ID NO: 647688 - DNA, 55 bp, Artificial; identical to SEQ ID NO: 169919
  Synthetic oligonucleotide

SEQ ID NO: 647689 - DNA, 52 bp, Artificial; identical to SEQ ID NO: 193255
  Synthetic oligonucleotide

SEQ ID NO: 647690 - DNA, 60 bp, Artificial; identical to SEQ ID NO: 265905
  Synthetic oligonucleotide

SEQ ID NO: 647691 - DNA, 60 bp, Artificial; identical to SEQ ID NO: 224636
  Synthetic oligonucleotide

SEQ ID NO: 647692 - DNA, 59 bp, Artificial; identical to SEQ ID NO: 238687
  Synthetic oligonucleotide

SEQ ID NO: 647693 - DNA, 54 bp, Artificial; identical to SEQ ID NO: 157226
  Synthetic oligonucleotide

SEQ ID NO: 647694 - DNA, 60 bp, Artificial; identical to SEQ ID NO: 238688
  Synthetic oligonucleotide

SEQ ID NO: 647695 - DNA, 50 bp, Artificial; identical to SEQ ID NO: 150435
  Synthetic oligonucleotide

SEQ ID NO: 647696 - DNA, 53 bp, Artificial; identical to SEQ ID NO: 233803
  Synthetic oligonucleotide

SEQ ID NO: 647697 - DNA, 58 bp, Artificial; identical to SEQ ID NO: 257500
  Synthetic oligonucleotide

SEQ ID NO: 647698 - DNA, 52 bp, Artificial; identical to SEQ ID NO: 186033
  Synthetic oligonucleotide

SEQ ID NO: 647699 - DNA, 58 bp, Artificial; identical to SEQ ID NO: 141916
  Synthetic oligonucleotide

SEQ ID NO: 647700 - DNA, 55 bp, Artificial; identical to SEQ ID NO: 142181
  Synthetic oligonucleotide

SEQ ID NO: 647701 - DNA, 57 bp, Artificial; identical to SEQ ID NO: 177792
  Synthetic oligonucleotide

SEQ ID NO: 647702 - DNA, 51 bp, Artificial; identical to SEQ ID NO: 205737
  Synthetic oligonucleotide

SEQ ID NO: 647703 - DNA, 60 bp, Artificial; identical to SEQ ID NO: 150865
  Synthetic oligonucleotide

SEQ ID NO: 647704 - DNA, 55 bp, Artificial; identical to SEQ ID NO: 160803
  Synthetic oligonucleotide

SEQ ID NO: 647705 - DNA, 51 bp, Artificial; identical to SEQ ID NO: 241035
  Synthetic oligonucleotide

SEQ ID NO: 647706 - DNA, 51 bp, Artificial; identical to SEQ ID NO: 234528
  Synthetic oligonucleotide

SEQ ID NO: 647707 - DNA, 55 bp, Artificial; identical to SEQ ID NO: 239731
  Synthetic oligonucleotide

SEQ ID NO: 647708 - DNA, 55 bp, Artificial; identical to SEQ ID NO: 253712
  Synthetic oligonucleotide

SEQ ID NO: 647709 - DNA, 54 bp, Artificial; identical to SEQ ID NO: 175669
  Synthetic oligonucleotide

SEQ ID NO: 647710 - DNA, 50 bp, Artificial; identical to SEQ ID NO: 143886
  Synthetic oligonucleotide

SEQ ID NO: 647711 - DNA, 52 bp, Artificial; identical to SEQ ID NO: 240941
  Synthetic oligonucleotide

SEQ ID NO: 647712 - DNA, 58 bp, Artificial; identical to SEQ ID NO: 201129
  Synthetic oligonucleotide

SEQ ID NO: 647713 - DNA, 56 bp, Artificial; identical to SEQ ID NO: 212524
  Synthetic oligonucleotide

SEQ ID NO: 647714 - DNA, 51 bp, Artificial; identical to SEQ ID NO: 160556
  Synthetic oligonucleotide

SEQ ID NO: 647715 - DNA, 53 bp, Artificial; identical to SEQ ID NO: 153584
  Synthetic oligonucleotide

SEQ ID NO: 647716 - DNA, 59 bp, Artificial; identical to SEQ ID NO: 161364
  Synthetic oligonucleotide

SEQ ID NO: 647717 - DNA, 55 bp, Artificial; identical to SEQ ID NO: 244213
  Synthetic oligonucleotide

SEQ ID NO: 647718 - DNA, 51 bp, Artificial; identical to SEQ ID NO: 241043
  Synthetic oligonucleotide

SEQ ID NO: 647719 - DNA, 59 bp, Artificial; identical to SEQ ID NO: 224302
  Synthetic oligonucleotide

SEQ ID NO: 647720 - DNA, 60 bp, Artificial; identical to SEQ ID NO: 238689
  Synthetic oligonucleotide

SEQ ID NO: 647721 - DNA, 50 bp, Artificial; identical to SEQ ID NO: 265883
  Synthetic oligonucleotide

SEQ ID NO: 647722 - DNA, 55 bp, Artificial; identical to SEQ ID NO: 244966
  Synthetic oligonucleotide

SEQ ID NO: 647723 - DNA, 60 bp, Artificial; identical to SEQ ID NO: 243531
  Synthetic oligonucleotide

SEQ ID NO: 647724 - DNA, 55 bp, Artificial; identical to SEQ ID NO: 194509
  Synthetic oligonucleotide

SEQ ID NO: 647725 - DNA, 60 bp, Artificial; identical to SEQ ID NO: 248559
  Synthetic oligonucleotide

SEQ ID NO: 647726 - DNA, 57 bp, Artificial; identical to SEQ ID NO: 150867
  Synthetic oligonucleotide

SEQ ID NO: 647727 - DNA, 51 bp, Artificial; identical to SEQ ID NO: 213062
  Synthetic oligonucleotide

SEQ ID NO: 647728 - DNA, 55 bp, Artificial; identical to SEQ ID NO: 258017
  Synthetic oligonucleotide

SEQ ID NO: 647729 - DNA, 55 bp, Artificial; identical to SEQ ID NO: 155172
  Synthetic oligonucleotide

SEQ ID NO: 647730 - DNA, 60 bp, Artificial; identical to SEQ ID NO: 150835
  Synthetic oligonucleotide

SEQ ID NO: 647731 - DNA, 60 bp, Artificial; identical to SEQ ID NO: 194136
  Synthetic oligonucleotide

SEQ ID NO: 647732 - DNA, 57 bp, Artificial; identical to SEQ ID NO: 177784
  Synthetic oligonucleotide

SEQ ID NO: 647733 - DNA, 58 bp, Artificial; identical to SEQ ID NO: 144059
  Synthetic oligonucleotide

SEQ ID NO: 647734 - DNA, 57 bp, Artificial; identical to SEQ ID NO: 153063
  Synthetic oligonucleotide

SEQ ID NO: 647735 - DNA, 60 bp, Artificial; identical to SEQ ID NO: 141603
  Synthetic oligonucleotide

SEQ ID NO: 647736 - DNA, 50 bp, Artificial; identical to SEQ ID NO: 162384
  Synthetic oligonucleotide

SEQ ID NO: 647737 - DNA, 55 bp, Artificial; identical to SEQ ID NO: 188261
  Synthetic oligonucleotide

SEQ ID NO: 647738 - DNA, 60 bp, Artificial; identical to SEQ ID NO: 212443
  Synthetic oligonucleotide

SEQ ID NO: 647739 - DNA, 55 bp, Artificial; identical to SEQ ID NO: 177782
  Synthetic oligonucleotide

SEQ ID NO: 647740 - DNA, 55 bp, Artificial; identical to SEQ ID NO: 200304
  Synthetic oligonucleotide

SEQ ID NO: 647741 - DNA, 56 bp, Artificial; identical to SEQ ID NO: 177724
  Synthetic oligonucleotide

SEQ ID NO: 647742 - DNA, 51 bp, Artificial; identical to SEQ ID NO: 255643
  Synthetic oligonucleotide

SEQ ID NO: 647743 - DNA, 53 bp, Artificial; identical to SEQ ID NO: 243180
  Synthetic oligonucleotide

SEQ ID NO: 647744 - DNA, 50 bp, Artificial; identical to SEQ ID NO: 243395
  Synthetic oligonucleotide

SEQ ID NO: 647745 - DNA, 58 bp, Artificial; identical to SEQ ID NO: 161934
  Synthetic oligonucleotide

SEQ ID NO: 647746 - DNA, 56 bp, Artificial; identical to SEQ ID NO: 239519
  Synthetic oligonucleotide

SEQ ID NO: 647747 - DNA, 54 bp, Artificial; identical to SEQ ID NO: 207718
  Synthetic oligonucleotide

SEQ ID NO: 647748 - DNA, 50 bp, Artificial; identical to SEQ ID NO: 196629
  Synthetic oligonucleotide

SEQ ID NO: 647749 - DNA, 55 bp, Artificial; identical to SEQ ID NO: 187923
  Synthetic oligonucleotide

SEQ ID NO: 647750 - DNA, 55 bp, Artificial; identical to SEQ ID NO: 198466
  Synthetic oligonucleotide

SEQ ID NO: 647751 - DNA, 56 bp, Artificial; identical to SEQ ID NO: 155729
  Synthetic oligonucleotide

SEQ ID NO: 647752 - DNA, 50 bp, Artificial; identical to SEQ ID NO: 196628
  Synthetic oligonucleotide

SEQ ID NO: 647753 - DNA, 60 bp, Artificial; identical to SEQ ID NO: 224658
  Synthetic oligonucleotide

SEQ ID NO: 647754 - DNA, 59 bp, Artificial; identical to SEQ ID NO: 165267
  Synthetic oligonucleotide

SEQ ID NO: 647755 - DNA, 53 bp, Artificial; identical to SEQ ID NO: 191922
  Synthetic oligonucleotide

SEQ ID NO: 647756 - DNA, 59 bp, Artificial; identical to SEQ ID NO: 238692
  Synthetic oligonucleotide

SEQ ID NO: 647757 - DNA, 55 bp, Artificial; identical to SEQ ID NO: 224985
  Synthetic oligonucleotide

SEQ ID NO: 647758 - DNA, 54 bp, Artificial; identical to SEQ ID NO: 185201
  Synthetic oligonucleotide

SEQ ID NO: 647759 - DNA, 55 bp, Artificial; identical to SEQ ID NO: 256319
  Synthetic oligonucleotide

SEQ ID NO: 647760 - DNA, 55 bp, Artificial; identical to SEQ ID NO: 161191
  Synthetic oligonucleotide

SEQ ID NO: 647761 - DNA, 55 bp, Artificial; identical to SEQ ID NO: 209357
  Synthetic oligonucleotide

SEQ ID NO: 647762 - DNA, 60 bp, Artificial; identical to SEQ ID NO: 243534
  Synthetic oligonucleotide

SEQ ID NO: 647763 - DNA, 58 bp, Artificial; identical to SEQ ID NO: 147142
  Synthetic oligonucleotide

SEQ ID NO: 647764 - DNA, 50 bp, Artificial; identical to SEQ ID NO: 176535
  Synthetic oligonucleotide

SEQ ID NO: 647765 - DNA, 54 bp, Artificial; identical to SEQ ID NO: 199531
  Synthetic oligonucleotide

SEQ ID NO: 647766 - DNA, 60 bp, Artificial; identical to SEQ ID NO: 177717
  Synthetic oligonucleotide

SEQ ID NO: 647767 - DNA, 60 bp, Artificial; identical to SEQ ID NO: 177715
  Synthetic oligonucleotide

SEQ ID NO: 647768 - DNA, 55 bp, Artificial; identical to SEQ ID NO: 148133
  Synthetic oligonucleotide

SEQ ID NO: 647769 - DNA, 54 bp, Artificial; identical to SEQ ID NO: 258072
  Synthetic oligonucleotide

SEQ ID NO: 647770 - DNA, 60 bp, Artificial; identical to SEQ ID NO: 206946
  Synthetic oligonucleotide

SEQ ID NO: 647771 - DNA, 56 bp, Artificial; identical to SEQ ID NO: 197898
  Synthetic oligonucleotide

SEQ ID NO: 647772 - DNA, 55 bp, Artificial; identical to SEQ ID NO: 181448
  Synthetic oligonucleotide

SEQ ID NO: 647773 - DNA, 57 bp, Artificial; identical to SEQ ID NO: 256318
  Synthetic oligonucleotide

SEQ ID NO: 647774 - DNA, 60 bp, Artificial; identical to SEQ ID NO: 262744
  Synthetic oligonucleotide

SEQ ID NO: 647775 - DNA, 55 bp, Artificial; identical to SEQ ID NO: 248711
  Synthetic oligonucleotide

SEQ ID NO: 647776 - DNA, 60 bp, Artificial; identical to SEQ ID NO: 257418
  Synthetic oligonucleotide

SEQ ID NO: 647777 - DNA, 53 bp, Artificial; identical to SEQ ID NO: 154587
  Synthetic oligonucleotide

SEQ ID NO: 647778 - DNA, 58 bp, Artificial; identical to SEQ ID NO: 212496
  Synthetic oligonucleotide

SEQ ID NO: 647779 - DNA, 52 bp, Artificial; identical to SEQ ID NO: 261834
  Synthetic oligonucleotide

SEQ ID NO: 647780 - DNA, 56 bp, Artificial; identical to SEQ ID NO: 237980
  Synthetic oligonucleotide

SEQ ID NO: 647781 - DNA, 55 bp, Artificial; identical to SEQ ID NO: 257863
  Synthetic oligonucleotide

SEQ ID NO: 647782 - DNA, 54 bp, Artificial; identical to SEQ ID NO: 199533
  Synthetic oligonucleotide

SEQ ID NO: 647783 - DNA, 51 bp, Artificial; identical to SEQ ID NO: 233880
  Synthetic oligonucleotide

SEQ ID NO: 647784 - DNA, 51 bp, Artificial; identical to SEQ ID NO: 233879
  Synthetic oligonucleotide

SEQ ID NO: 647785 - DNA, 55 bp, Artificial; identical to SEQ ID NO: 239868
  Synthetic oligonucleotide

SEQ ID NO: 647786 - DNA, 51 bp, Artificial; identical to SEQ ID NO: 186408
  Synthetic oligonucleotide

SEQ ID NO: 647787 - DNA, 55 bp, Artificial; identical to SEQ ID NO: 153439
  Synthetic oligonucleotide

SEQ ID NO: 647788 - DNA, 51 bp, Artificial; identical to SEQ ID NO: 157769
  Synthetic oligonucleotide

SEQ ID NO: 647789 - DNA, 60 bp, Artificial; identical to SEQ ID NO: 206991
  Synthetic oligonucleotide

SEQ ID NO: 647790 - DNA, 58 bp, Artificial; identical to SEQ ID NO: 201925
  Synthetic oligonucleotide

SEQ ID NO: 647791 - DNA, 60 bp, Artificial; identical to SEQ ID NO: 238696
  Synthetic oligonucleotide

SEQ ID NO: 647792 - DNA, 60 bp, Artificial; identical to SEQ ID NO: 208995
  Synthetic oligonucleotide

SEQ ID NO: 647793 - DNA, 59 bp, Artificial; identical to SEQ ID NO: 243939
  Synthetic oligonucleotide

SEQ ID NO: 647794 - DNA, 60 bp, Artificial; identical to SEQ ID NO: 177704
  Synthetic oligonucleotide

SEQ ID NO: 647795 - DNA, 60 bp, Artificial; identical to SEQ ID NO: 194139
  Synthetic oligonucleotide

SEQ ID NO: 647796 - DNA, 55 bp, Artificial; identical to SEQ ID NO: 266193
  Synthetic oligonucleotide

SEQ ID NO: 647797 - DNA, 60 bp, Artificial; identical to SEQ ID NO: 238697
  Synthetic oligonucleotide

SEQ ID NO: 647798 - DNA, 55 bp, Artificial; identical to SEQ ID NO: 239816
  Synthetic oligonucleotide

SEQ ID NO: 647799 - DNA, 55 bp, Artificial; identical to SEQ ID NO: 254153
  Synthetic oligonucleotide

SEQ ID NO: 647800 - DNA, 53 bp, Artificial; identical to SEQ ID NO: 155537
  Synthetic oligonucleotide

SEQ ID NO: 647801 - DNA, 57 bp, Artificial; identical to SEQ ID NO: 150851
  Synthetic oligonucleotide

SEQ ID NO: 647802 - DNA, 60 bp, Artificial; identical to SEQ ID NO: 150852
  Synthetic oligonucleotide

SEQ ID NO: 647803 - DNA, 60 bp, Artificial; identical to SEQ ID NO: 237692
  Synthetic oligonucleotide

SEQ ID NO: 647804 - DNA, 55 bp, Artificial; identical to SEQ ID NO: 181445
  Synthetic oligonucleotide

SEQ ID NO: 647805 - DNA, 55 bp, Artificial; identical to SEQ ID NO: 154420
  Synthetic oligonucleotide

SEQ ID NO: 647806 - DNA, 55 bp, Artificial; identical to SEQ ID NO: 224984
  Synthetic oligonucleotide

SEQ ID NO: 647807 - DNA, 53 bp, Artificial; identical to SEQ ID NO: 211581
  Synthetic oligonucleotide

SEQ ID NO: 647808 - DNA, 55 bp, Artificial; identical to SEQ ID NO: 211250
  Synthetic oligonucleotide

SEQ ID NO: 647809 - DNA, 52 bp, Artificial; identical to SEQ ID NO: 157612
  Synthetic oligonucleotide

SEQ ID NO: 647810 - DNA, 51 bp, Artificial; identical to SEQ ID NO: 237105
  Synthetic oligonucleotide

SEQ ID NO: 647811 - DNA, 55 bp, Artificial; identical to SEQ ID NO: 156093
  Synthetic oligonucleotide

SEQ ID NO: 647812 - DNA, 54 bp, Artificial; identical to SEQ ID NO: 185188
  Synthetic oligonucleotide

SEQ ID NO: 647813 - DNA, 55 bp, Artificial; identical to SEQ ID NO: 207209
  Synthetic oligonucleotide

SEQ ID NO: 647814 - DNA, 56 bp, Artificial; identical to SEQ ID NO: 266401
  Synthetic oligonucleotide

SEQ ID NO: 647815 - DNA, 55 bp, Artificial; identical to SEQ ID NO: 155425
  Synthetic oligonucleotide

SEQ ID NO: 647816 - DNA, 54 bp, Artificial; identical to SEQ ID NO: 177703
  Synthetic oligonucleotide

SEQ ID NO: 647817 - DNA, 55 bp, Artificial; identical to SEQ ID NO: 181488
  Synthetic oligonucleotide

SEQ ID NO: 647818 - DNA, 60 bp, Artificial; identical to SEQ ID NO: 177702
  Synthetic oligonucleotide

SEQ ID NO: 647819 - DNA, 60 bp, Artificial; identical to SEQ ID NO: 208906
  Synthetic oligonucleotide

SEQ ID NO: 647820 - DNA, 51 bp, Artificial; identical to SEQ ID NO: 241005
  Synthetic oligonucleotide

SEQ ID NO: 647821 - DNA, 52 bp, Artificial; identical to SEQ ID NO: 246432
  Synthetic oligonucleotide

SEQ ID NO: 647822 - DNA, 55 bp, Artificial; identical to SEQ ID NO: 254152
  Synthetic oligonucleotide

SEQ ID NO: 647823 - DNA, 55 bp, Artificial; identical to SEQ ID NO: 248700
  Synthetic oligonucleotide

SEQ ID NO: 647824 - DNA, 56 bp, Artificial; identical to SEQ ID NO: 243911
  Synthetic oligonucleotide

SEQ ID NO: 647825 - DNA, 50 bp, Artificial; identical to SEQ ID NO: 150453
  Synthetic oligonucleotide

SEQ ID NO: 647826 - DNA, 58 bp, Artificial; identical to SEQ ID NO: 243975
  Synthetic oligonucleotide

SEQ ID NO: 647827 - DNA, 55 bp, Artificial; identical to SEQ ID NO: 154422
  Synthetic oligonucleotide

SEQ ID NO: 647828 - DNA, 58 bp, Artificial; identical to SEQ ID NO: 165212
  Synthetic oligonucleotide

SEQ ID NO: 647829 - DNA, 54 bp, Artificial; identical to SEQ ID NO: 191148
  Synthetic oligonucleotide

SEQ ID NO: 647830 - DNA, 54 bp, Artificial; identical to SEQ ID NO: 221663
  Synthetic oligonucleotide

SEQ ID NO: 647831 - DNA, 54 bp, Artificial; identical to SEQ ID NO: 222688
  Synthetic oligonucleotide

SEQ ID NO: 647832 - DNA, 59 bp, Artificial; identical to SEQ ID NO: 239235
  Synthetic oligonucleotide

SEQ ID NO: 647833 - DNA, 51 bp, Artificial; identical to SEQ ID NO: 200043
  Synthetic oligonucleotide

SEQ ID NO: 647834 - DNA, 60 bp, Artificial; identical to SEQ ID NO: 187016
  Synthetic oligonucleotide

SEQ ID NO: 647835 - DNA, 51 bp, Artificial; identical to SEQ ID NO: 209713
  Synthetic oligonucleotide

SEQ ID NO: 647836 - DNA, 52 bp, Artificial; identical to SEQ ID NO: 167098
  Synthetic oligonucleotide

SEQ ID NO: 647837 - DNA, 56 bp, Artificial; identical to SEQ ID NO: 200293
  Synthetic oligonucleotide

SEQ ID NO: 647838 - DNA, 53 bp, Artificial; identical to SEQ ID NO: 185501
  Synthetic oligonucleotide

SEQ ID NO: 647839 - DNA, 55 bp, Artificial; identical to SEQ ID NO: 181484
  Synthetic oligonucleotide

SEQ ID NO: 647840 - DNA, 54 bp, Artificial; identical to SEQ ID NO: 149165
  Synthetic oligonucleotide

SEQ ID NO: 647841 - DNA, 51 bp, Artificial; identical to SEQ ID NO: 193798
  Synthetic oligonucleotide

SEQ ID NO: 647842 - DNA, 60 bp, Artificial; identical to SEQ ID NO: 238699
  Synthetic oligonucleotide

SEQ ID NO: 647843 - DNA, 59 bp, Artificial; identical to SEQ ID NO: 203317
  Synthetic oligonucleotide

SEQ ID NO: 647844 - DNA, 60 bp, Artificial; identical to SEQ ID NO: 153021
  Synthetic oligonucleotide

SEQ ID NO: 647845 - DNA, 55 bp, Artificial; identical to SEQ ID NO: 190429
  Synthetic oligonucleotide

SEQ ID NO: 647846 - DNA, 60 bp, Artificial; identical to SEQ ID NO: 155463
  Synthetic oligonucleotide

SEQ ID NO: 647847 - DNA, 51 bp, Artificial; identical to SEQ ID NO: 242457
  Synthetic oligonucleotide

SEQ ID NO: 647848 - DNA, 53 bp, Artificial; identical to SEQ ID NO: 217001
  Synthetic oligonucleotide

SEQ ID NO: 647849 - DNA, 55 bp, Artificial; identical to SEQ ID NO: 247217
  Synthetic oligonucleotide

SEQ ID NO: 647850 - DNA, 60 bp, Artificial; identical to SEQ ID NO: 238700
  Synthetic oligonucleotide

SEQ ID NO: 647851 - DNA, 51 bp, Artificial; identical to SEQ ID NO: 209714
  Synthetic oligonucleotide

SEQ ID NO: 647852 - DNA, 54 bp, Artificial; identical to SEQ ID NO: 151049
  Synthetic oligonucleotide

SEQ ID NO: 647853 - DNA, 55 bp, Artificial; identical to SEQ ID NO: 239647
  Synthetic oligonucleotide

SEQ ID NO: 647854 - DNA, 55 bp, Artificial; identical to SEQ ID NO: 156095
  Synthetic oligonucleotide

SEQ ID NO: 647855 - DNA, 55 bp, Artificial; identical to SEQ ID NO: 238416
  Synthetic oligonucleotide

SEQ ID NO: 647856 - DNA, 60 bp, Artificial; identical to SEQ ID NO: 162420
  Synthetic oligonucleotide

SEQ ID NO: 647857 - DNA, 60 bp, Artificial; identical to SEQ ID NO: 243538
  Synthetic oligonucleotide

SEQ ID NO: 647858 - DNA, 59 bp, Artificial; identical to SEQ ID NO: 177750
  Synthetic oligonucleotide

SEQ ID NO: 647859 - DNA, 60 bp, Artificial; identical to SEQ ID NO: 217000
  Synthetic oligonucleotide

SEQ ID NO: 647860 - DNA, 56 bp, Artificial; identical to SEQ ID NO: 237694
  Synthetic oligonucleotide

SEQ ID NO: 647861 - DNA, 59 bp, Artificial; identical to SEQ ID NO: 151050
  Synthetic oligonucleotide

SEQ ID NO: 647862 - DNA, 55 bp, Artificial; identical to SEQ ID NO: 211248
  Synthetic oligonucleotide

SEQ ID NO: 647863 - DNA, 55 bp, Artificial; identical to SEQ ID NO: 156096
  Synthetic oligonucleotide

SEQ ID NO: 647864 - DNA, 57 bp, Artificial; identical to SEQ ID NO: 239385
  Synthetic oligonucleotide

SEQ ID NO: 647865 - DNA, 55 bp, Artificial; identical to SEQ ID NO: 148158
  Synthetic oligonucleotide

SEQ ID NO: 647866 - DNA, 51 bp, Artificial; identical to SEQ ID NO: 165231
  Synthetic oligonucleotide

SEQ ID NO: 647867 - DNA, 50 bp, Artificial; identical to SEQ ID NO: 193911
  Synthetic oligonucleotide

SEQ ID NO: 647868 - DNA, 54 bp, Artificial; identical to SEQ ID NO: 156753
  Synthetic oligonucleotide

SEQ ID NO: 647869 - DNA, 55 bp, Artificial; identical to SEQ ID NO: 163902
  Synthetic oligonucleotide

SEQ ID NO: 647870 - DNA, 60 bp, Artificial; identical to SEQ ID NO: 203315
  Synthetic oligonucleotide

SEQ ID NO: 647871 - DNA, 60 bp, Artificial; identical to SEQ ID NO: 177746
  Synthetic oligonucleotide

SEQ ID NO: 647872 - DNA, 60 bp, Artificial; identical to SEQ ID NO: 233434
  Synthetic oligonucleotide

SEQ ID NO: 647873 - DNA, 60 bp, Artificial; identical to SEQ ID NO: 151051
  Synthetic oligonucleotide

SEQ ID NO: 647874 - DNA, 55 bp, Artificial; identical to SEQ ID NO: 254151
  Synthetic oligonucleotide

SEQ ID NO: 647875 - DNA, 52 bp, Artificial; identical to SEQ ID NO: 186088
  Synthetic oligonucleotide

SEQ ID NO: 647876 - DNA, 55 bp, Artificial; identical to SEQ ID NO: 266190
  Synthetic oligonucleotide

SEQ ID NO: 647877 - DNA, 60 bp, Artificial; identical to SEQ ID NO: 263511
  Synthetic oligonucleotide

SEQ ID NO: 647878 - DNA, 55 bp, Artificial; identical to SEQ ID NO: 252966
  Synthetic oligonucleotide

SEQ ID NO: 647879 - DNA, 53 bp, Artificial; identical to SEQ ID NO: 149426
  Synthetic oligonucleotide

SEQ ID NO: 647880 - DNA, 60 bp, Artificial; identical to SEQ ID NO: 266402
  Synthetic oligonucleotide

SEQ ID NO: 647881 - DNA, 51 bp, Artificial; identical to SEQ ID NO: 186503
  Synthetic oligonucleotide

SEQ ID NO: 647882 - DNA, 55 bp, Artificial; identical to SEQ ID NO: 238413
  Synthetic oligonucleotide

SEQ ID NO: 647883 - DNA, 53 bp, Artificial; identical to SEQ ID NO: 203312
  Synthetic oligonucleotide

SEQ ID NO: 647884 - DNA, 59 bp, Artificial; identical to SEQ ID NO: 210426
  Synthetic oligonucleotide

SEQ ID NO: 647885 - DNA, 51 bp, Artificial; identical to SEQ ID NO: 153698
  Synthetic oligonucleotide

SEQ ID NO: 647886 - DNA, 55 bp, Artificial; identical to SEQ ID NO: 156098
  Synthetic oligonucleotide

SEQ ID NO: 647887 - DNA, 60 bp, Artificial; identical to SEQ ID NO: 141605
  Synthetic oligonucleotide

SEQ ID NO: 647888 - DNA, 56 bp, Artificial; identical to SEQ ID NO: 144363
  Synthetic oligonucleotide

SEQ ID NO: 647889 - DNA, 51 bp, Artificial; identical to SEQ ID NO: 206537
  Synthetic oligonucleotide

SEQ ID NO: 647890 - DNA, 57 bp, Artificial; identical to SEQ ID NO: 191733
  Synthetic oligonucleotide

SEQ ID NO: 647891 - DNA, 55 bp, Artificial; identical to SEQ ID NO: 173639
  Synthetic oligonucleotide

SEQ ID NO: 647892 - DNA, 55 bp, Artificial; identical to SEQ ID NO: 217506
  Synthetic oligonucleotide

SEQ ID NO: 647893 - DNA, 53 bp, Artificial; identical to SEQ ID NO: 154589
  Synthetic oligonucleotide

SEQ ID NO: 647894 - DNA, 60 bp, Artificial; identical to SEQ ID NO: 177745
  Synthetic oligonucleotide

SEQ ID NO: 647895 - DNA, 53 bp, Artificial; identical to SEQ ID NO: 144285
  Synthetic oligonucleotide

SEQ ID NO: 647896 - DNA, 50 bp, Artificial; identical to SEQ ID NO: 216959
  Synthetic oligonucleotide

SEQ ID NO: 647897 - DNA, 60 bp, Artificial; identical to SEQ ID NO: 238648
  Synthetic oligonucleotide

SEQ ID NO: 647898 - DNA, 55 bp, Artificial; identical to SEQ ID NO: 163899
  Synthetic oligonucleotide

SEQ ID NO: 647899 - DNA, 55 bp, Artificial; identical to SEQ ID NO: 144241
  Synthetic oligonucleotide

SEQ ID NO: 647900 - DNA, 60 bp, Artificial; identical to SEQ ID NO: 177744
  Synthetic oligonucleotide

SEQ ID NO: 647901 - DNA, 52 bp, Artificial; identical to SEQ ID NO: 152076
  Synthetic oligonucleotide

SEQ ID NO: 647902 - DNA, 55 bp, Artificial; identical to SEQ ID NO: 190427
  Synthetic oligonucleotide

SEQ ID NO: 647903 - DNA, 54 bp, Artificial; identical to SEQ ID NO: 143781
  Synthetic oligonucleotide

SEQ ID NO: 647904 - DNA, 56 bp, Artificial; identical to SEQ ID NO: 248638
  Synthetic oligonucleotide

SEQ ID NO: 647905 - DNA, 58 bp, Artificial; identical to SEQ ID NO: 151052
  Synthetic oligonucleotide

SEQ ID NO: 647906 - DNA, 55 bp, Artificial; identical to SEQ ID NO: 211243
  Synthetic oligonucleotide

SEQ ID NO: 647907 - DNA, 55 bp, Artificial; identical to SEQ ID NO: 234311
  Synthetic oligonucleotide

SEQ ID NO: 647908 - DNA, 60 bp, Artificial; identical to SEQ ID NO: 165190
  Synthetic oligonucleotide

SEQ ID NO: 647909 - DNA, 54 bp, Artificial; identical to SEQ ID NO: 255295
  Synthetic oligonucleotide

SEQ ID NO: 647910 - DNA, 55 bp, Artificial; identical to SEQ ID NO: 238412
  Synthetic oligonucleotide

SEQ ID NO: 647911 - DNA, 51 bp, Artificial; identical to SEQ ID NO: 169402
  Synthetic oligonucleotide

SEQ ID NO: 647912 - DNA, 55 bp, Artificial; identical to SEQ ID NO: 239600
  Synthetic oligonucleotide

SEQ ID NO: 647913 - DNA, 59 bp, Artificial; identical to SEQ ID NO: 171012
  Synthetic oligonucleotide

SEQ ID NO: 647914 - DNA, 54 bp, Artificial; identical to SEQ ID NO: 170018
  Synthetic oligonucleotide

SEQ ID NO: 647915 - DNA, 59 bp, Artificial; identical to SEQ ID NO: 238651
  Synthetic oligonucleotide

SEQ ID NO: 647916 - DNA, 51 bp, Artificial; identical to SEQ ID NO: 223732
  Synthetic oligonucleotide

SEQ ID NO: 647917 - DNA, 54 bp, Artificial; identical to SEQ ID NO: 141185
  Synthetic oligonucleotide

SEQ ID NO: 647918 - DNA, 55 bp, Artificial; identical to SEQ ID NO: 190425
  Synthetic oligonucleotide

SEQ ID NO: 647919 - DNA, 55 bp, Artificial; identical to SEQ ID NO: 203640
  Synthetic oligonucleotide

SEQ ID NO: 647920 - DNA, 60 bp, Artificial; identical to SEQ ID NO: 165179
  Synthetic oligonucleotide

SEQ ID NO: 647921 - DNA, 60 bp, Artificial; identical to SEQ ID NO: 253231
  Synthetic oligonucleotide

SEQ ID NO: 647922 - DNA, 52 bp, Artificial; identical to SEQ ID NO: 240967
  Synthetic oligonucleotide

SEQ ID NO: 647923 - DNA, 53 bp, Artificial; identical to SEQ ID NO: 185507
  Synthetic oligonucleotide

SEQ ID NO: 647924 - DNA, 56 bp, Artificial; identical to SEQ ID NO: 257514
  Synthetic oligonucleotide

SEQ ID NO: 647925 - DNA, 58 bp, Artificial; identical to SEQ ID NO: 151059
  Synthetic oligonucleotide

SEQ ID NO: 647926 - DNA, 56 bp, Artificial; identical to SEQ ID NO: 210415
  Synthetic oligonucleotide

SEQ ID NO: 647927 - DNA, 60 bp, Artificial; identical to SEQ ID NO: 238652
  Synthetic oligonucleotide

SEQ ID NO: 647928 - DNA, 55 bp, Artificial; identical to SEQ ID NO: 162064
  Synthetic oligonucleotide

SEQ ID NO: 647929 - DNA, 60 bp, Artificial; identical to SEQ ID NO: 167188
  Synthetic oligonucleotide

SEQ ID NO: 647930 - DNA, 55 bp, Artificial; identical to SEQ ID NO: 148253
  Synthetic oligonucleotide

SEQ ID NO: 647931 - DNA, 59 bp, Artificial; identical to SEQ ID NO: 238655
  Synthetic oligonucleotide

SEQ ID NO: 647932 - DNA, 54 bp, Artificial; identical to SEQ ID NO: 266260
  Synthetic oligonucleotide

SEQ ID NO: 647933 - DNA, 55 bp, Artificial; identical to SEQ ID NO: 154428
  Synthetic oligonucleotide

SEQ ID NO: 647934 - DNA, 60 bp, Artificial; identical to SEQ ID NO: 151062
  Synthetic oligonucleotide

SEQ ID NO: 647935 - DNA, 51 bp, Artificial; identical to SEQ ID NO: 255704
  Synthetic oligonucleotide

SEQ ID NO: 647936 - DNA, 58 bp, Artificial; identical to SEQ ID NO: 206995
  Synthetic oligonucleotide

SEQ ID NO: 647937 - DNA, 60 bp, Artificial; identical to SEQ ID NO: 237736
  Synthetic oligonucleotide

SEQ ID NO: 647938 - DNA, 58 bp, Artificial; identical to SEQ ID NO: 157110
  Synthetic oligonucleotide

SEQ ID NO: 647939 - DNA, 55 bp, Artificial; identical to SEQ ID NO: 263178
  Synthetic oligonucleotide

SEQ ID NO: 647940 - DNA, 60 bp, Artificial; identical to SEQ ID NO: 144328
  Synthetic oligonucleotide

SEQ ID NO: 647941 - DNA, 60 bp, Artificial; identical to SEQ ID NO: 170875
  Synthetic oligonucleotide

SEQ ID NO: 647942 - DNA, 60 bp, Artificial; identical to SEQ ID NO: 238656
  Synthetic oligonucleotide

SEQ ID NO: 647943 - DNA, 55 bp, Artificial; identical to SEQ ID NO: 203634
  Synthetic oligonucleotide

SEQ ID NO: 647944 - DNA, 55 bp, Artificial; identical to SEQ ID NO: 161188
  Synthetic oligonucleotide

SEQ ID NO: 647945 - DNA, 55 bp, Artificial; identical to SEQ ID NO: 239974
  Synthetic oligonucleotide

SEQ ID NO: 647946 - DNA, 60 bp, Artificial; identical to SEQ ID NO: 210393
  Synthetic oligonucleotide

SEQ ID NO: 647947 - DNA, 52 bp, Artificial; identical to SEQ ID NO: 255515
  Synthetic oligonucleotide

SEQ ID NO: 647948 - DNA, 59 bp, Artificial; identical to SEQ ID NO: 177739
  Synthetic oligonucleotide

SEQ ID NO: 647949 - DNA, 50 bp, Artificial; identical to SEQ ID NO: 150424
  Synthetic oligonucleotide

SEQ ID NO: 647950 - DNA, 52 bp, Artificial; identical to SEQ ID NO: 168962
  Synthetic oligonucleotide

SEQ ID NO: 647951 - DNA, 55 bp, Artificial; identical to SEQ ID NO: 172963
  Synthetic oligonucleotide

SEQ ID NO: 647952 - DNA, 57 bp, Artificial; identical to SEQ ID NO: 247246
  Synthetic oligonucleotide

SEQ ID NO: 647953 - DNA, 57 bp, Artificial; identical to SEQ ID NO: 201913
  Synthetic oligonucleotide

SEQ ID NO: 647954 - DNA, 60 bp, Artificial; identical to SEQ ID NO: 151063
  Synthetic oligonucleotide

SEQ ID NO: 647955 - DNA, 55 bp, Artificial; identical to SEQ ID NO: 198461
  Synthetic oligonucleotide

SEQ ID NO: 647956 - DNA, 55 bp, Artificial; identical to SEQ ID NO: 167516
  Synthetic oligonucleotide

SEQ ID NO: 647957 - DNA, 55 bp, Artificial; identical to SEQ ID NO: 245072
  Synthetic oligonucleotide

SEQ ID NO: 647958 - DNA, 51 bp, Artificial; identical to SEQ ID NO: 174967
  Synthetic oligonucleotide

SEQ ID NO: 647959 - DNA, 60 bp, Artificial; identical to SEQ ID NO: 168035
  Synthetic oligonucleotide

SEQ ID NO: 647960 - DNA, 55 bp, Artificial; identical to SEQ ID NO: 156101
  Synthetic oligonucleotide

SEQ ID NO: 647961 - DNA, 52 bp, Artificial; identical to SEQ ID NO: 246483
  Synthetic oligonucleotide

SEQ ID NO: 647962 - DNA, 55 bp, Artificial; identical to SEQ ID NO: 156102
  Synthetic oligonucleotide

SEQ ID NO: 647963 - DNA, 55 bp, Artificial; identical to SEQ ID NO: 166797
  Synthetic oligonucleotide

SEQ ID NO: 647964 - DNA, 55 bp, Artificial; identical to SEQ ID NO: 217508
  Synthetic oligonucleotide

SEQ ID NO: 647965 - DNA, 55 bp, Artificial; identical to SEQ ID NO: 205525
  Synthetic oligonucleotide

SEQ ID NO: 647966 - DNA, 60 bp, Artificial; identical to SEQ ID NO: 193172
  Synthetic oligonucleotide

SEQ ID NO: 647967 - DNA, 54 bp, Artificial; identical to SEQ ID NO: 160384
  Synthetic oligonucleotide

SEQ ID NO: 647968 - DNA, 55 bp, Artificial; identical to SEQ ID NO: 148251
  Synthetic oligonucleotide

SEQ ID NO: 647969 - DNA, 50 bp, Artificial; identical to SEQ ID NO: 200474
  Synthetic oligonucleotide

SEQ ID NO: 647970 - DNA, 52 bp, Artificial; identical to SEQ ID NO: 186095
  Synthetic oligonucleotide

SEQ ID NO: 647971 - DNA, 59 bp, Artificial; identical to SEQ ID NO: 165700
  Synthetic oligonucleotide

SEQ ID NO: 647972 - DNA, 60 bp, Artificial; identical to SEQ ID NO: 153299
  Synthetic oligonucleotide

SEQ ID NO: 647973 - DNA, 59 bp, Artificial; identical to SEQ ID NO: 243539
  Synthetic oligonucleotide

SEQ ID NO: 647974 - DNA, 54 bp, Artificial; identical to SEQ ID NO: 146391
  Synthetic oligonucleotide

SEQ ID NO: 647975 - DNA, 58 bp, Artificial; identical to SEQ ID NO: 238657
  Synthetic oligonucleotide

SEQ ID NO: 647976 - DNA, 50 bp, Artificial; identical to SEQ ID NO: 176598
  Synthetic oligonucleotide

SEQ ID NO: 647977 - DNA, 59 bp, Artificial; identical to SEQ ID NO: 207013
  Synthetic oligonucleotide

SEQ ID NO: 647978 - DNA, 55 bp, Artificial; identical to SEQ ID NO: 239774
  Synthetic oligonucleotide

SEQ ID NO: 647979 - DNA, 59 bp, Artificial; identical to SEQ ID NO: 177732
  Synthetic oligonucleotide

SEQ ID NO: 647980 - DNA, 51 bp, Artificial; identical to SEQ ID NO: 143836
  Synthetic oligonucleotide

SEQ ID NO: 647981 - DNA, 60 bp, Artificial; identical to SEQ ID NO: 200259
  Synthetic oligonucleotide

SEQ ID NO: 647982 - DNA, 60 bp, Artificial; identical to SEQ ID NO: 155865
  Synthetic oligonucleotide

SEQ ID NO: 647983 - DNA, 55 bp, Artificial; identical to SEQ ID NO: 248735
  Synthetic oligonucleotide

SEQ ID NO: 647984 - DNA, 54 bp, Artificial; identical to SEQ ID NO: 203885
  Synthetic oligonucleotide

SEQ ID NO: 647985 - DNA, 54 bp, Artificial; identical to SEQ ID NO: 174696
  Synthetic oligonucleotide

SEQ ID NO: 647986 - DNA, 56 bp, Artificial; identical to SEQ ID NO: 141606
  Synthetic oligonucleotide

SEQ ID NO: 647987 - DNA, 60 bp, Artificial; identical to SEQ ID NO: 206998
  Synthetic oligonucleotide

SEQ ID NO: 647988 - DNA, 53 bp, Artificial; identical to SEQ ID NO: 211484
  Synthetic oligonucleotide

SEQ ID NO: 647989 - DNA, 55 bp, Artificial; identical to SEQ ID NO: 144710
  Synthetic oligonucleotide

SEQ ID NO: 647990 - DNA, 51 bp, Artificial; identical to SEQ ID NO: 210335
  Synthetic oligonucleotide

SEQ ID NO: 647991 - DNA, 55 bp, Artificial; identical to SEQ ID NO: 156103
  Synthetic oligonucleotide

SEQ ID NO: 647992 - DNA, 58 bp, Artificial; identical to SEQ ID NO: 141608
  Synthetic oligonucleotide

SEQ ID NO: 647993 - DNA, 55 bp, Artificial; identical to SEQ ID NO: 217510
  Synthetic oligonucleotide

SEQ ID NO: 647994 - DNA, 57 bp, Artificial; identical to SEQ ID NO: 237740
  Synthetic oligonucleotide

SEQ ID NO: 647995 - DNA, 52 bp, Artificial; identical to SEQ ID NO: 187017
  Synthetic oligonucleotide

SEQ ID NO: 647996 - DNA, 51 bp, Artificial; identical to SEQ ID NO: 237138
  Synthetic oligonucleotide

SEQ ID NO: 647997 - DNA, 55 bp, Artificial; identical to SEQ ID NO: 248731
  Synthetic oligonucleotide

SEQ ID NO: 647998 - DNA, 60 bp, Artificial; identical to SEQ ID NO: 222856
  Synthetic oligonucleotide

SEQ ID NO: 647999 - DNA, 55 bp, Artificial; identical to SEQ ID NO: 188259
  Synthetic oligonucleotide

SEQ ID NO: 648000 - DNA, 60 bp, Artificial; identical to SEQ ID NO: 153288
  Synthetic oligonucleotide

SEQ ID NO: 648001 - DNA, 54 bp, Artificial; identical to SEQ ID NO: 218324
  Synthetic oligonucleotide

SEQ ID NO: 648002 - DNA, 58 bp, Artificial; identical to SEQ ID NO: 168174
  Synthetic oligonucleotide

SEQ ID NO: 648003 - DNA, 58 bp, Artificial; identical to SEQ ID NO: 210371
  Synthetic oligonucleotide

SEQ ID NO: 648004 - DNA, 55 bp, Artificial; identical to SEQ ID NO: 166778
  Synthetic oligonucleotide

SEQ ID NO: 648005 - DNA, 55 bp, Artificial; identical to SEQ ID NO: 156104
  Synthetic oligonucleotide

SEQ ID NO: 648006 - DNA, 60 bp, Artificial; identical to SEQ ID NO: 238658
  Synthetic oligonucleotide

SEQ ID NO: 648007 - DNA, 58 bp, Artificial; identical to SEQ ID NO: 239252
  Synthetic oligonucleotide

SEQ ID NO: 648008 - DNA, 54 bp, Artificial; identical to SEQ ID NO: 155522
  Synthetic oligonucleotide

SEQ ID NO: 648009 - DNA, 55 bp, Artificial; identical to SEQ ID NO: 181470
  Synthetic oligonucleotide

SEQ ID NO: 648010 - DNA, 55 bp, Artificial; identical to SEQ ID NO: 217511
  Synthetic oligonucleotide

SEQ ID NO: 648011 - DNA, 60 bp, Artificial; identical to SEQ ID NO: 141609
  Synthetic oligonucleotide

SEQ ID NO: 648012 - DNA, 55 bp, Artificial; identical to SEQ ID NO: 208546
  Synthetic oligonucleotide

SEQ ID NO: 648013 - DNA, 58 bp, Artificial; identical to SEQ ID NO: 203373
  Synthetic oligonucleotide

SEQ ID NO: 648014 - DNA, 54 bp, Artificial; identical to SEQ ID NO: 248548
  Synthetic oligonucleotide

SEQ ID NO: 648015 - DNA, 56 bp, Artificial; identical to SEQ ID NO: 209238
  Synthetic oligonucleotide

SEQ ID NO: 648016 - DNA, 59 bp, Artificial; identical to SEQ ID NO: 200535
  Synthetic oligonucleotide

SEQ ID NO: 648017 - DNA, 55 bp, Artificial; identical to SEQ ID NO: 181469
  Synthetic oligonucleotide

SEQ ID NO: 648018 - DNA, 55 bp, Artificial; identical to SEQ ID NO: 181468
  Synthetic oligonucleotide

SEQ ID NO: 648019 - DNA, 54 bp, Artificial; identical to SEQ ID NO: 184959
  Synthetic oligonucleotide

SEQ ID NO: 648020 - DNA, 50 bp, Artificial; identical to SEQ ID NO: 202572
  Synthetic oligonucleotide

SEQ ID NO: 648021 - DNA, 51 bp, Artificial; identical to SEQ ID NO: 192143
  Synthetic oligonucleotide

SEQ ID NO: 648022 - DNA, 52 bp, Artificial; identical to SEQ ID NO: 171897
  Synthetic oligonucleotide

SEQ ID NO: 648023 - DNA, 58 bp, Artificial; identical to SEQ ID NO: 257417
  Synthetic oligonucleotide

SEQ ID NO: 648024 - DNA, 55 bp, Artificial; identical to SEQ ID NO: 187944
  Synthetic oligonucleotide

SEQ ID NO: 648025 - DNA, 55 bp, Artificial; identical to SEQ ID NO: 208550
  Synthetic oligonucleotide

SEQ ID NO: 648026 - DNA, 52 bp, Artificial; identical to SEQ ID NO: 168963
  Synthetic oligonucleotide

SEQ ID NO: 648027 - DNA, 55 bp, Artificial; identical to SEQ ID NO: 146314
  Synthetic oligonucleotide

SEQ ID NO: 648028 - DNA, 55 bp, Artificial; identical to SEQ ID NO: 156107
  Synthetic oligonucleotide

SEQ ID NO: 648029 - DNA, 59 bp, Artificial; identical to SEQ ID NO: 144716
  Synthetic oligonucleotide

SEQ ID NO: 648030 - DNA, 55 bp, Artificial; identical to SEQ ID NO: 248668
  Synthetic oligonucleotide

SEQ ID NO: 648031 - DNA, 56 bp, Artificial; identical to SEQ ID NO: 153266
  Synthetic oligonucleotide

SEQ ID NO: 648032 - DNA, 55 bp, Artificial; identical to SEQ ID NO: 221446
  Synthetic oligonucleotide

SEQ ID NO: 648033 - DNA, 55 bp, Artificial; identical to SEQ ID NO: 218231
  Synthetic oligonucleotide

SEQ ID NO: 648034 - DNA, 57 bp, Artificial; identical to SEQ ID NO: 151032
  Synthetic oligonucleotide

SEQ ID NO: 648035 - DNA, 55 bp, Artificial; identical to SEQ ID NO: 144886
  Synthetic oligonucleotide

SEQ ID NO: 648036 - DNA, 55 bp, Artificial; identical to SEQ ID NO: 154430
  Synthetic oligonucleotide

SEQ ID NO: 648037 - DNA, 51 bp, Artificial; identical to SEQ ID NO: 241016
  Synthetic oligonucleotide

SEQ ID NO: 648038 - DNA, 55 bp, Artificial; identical to SEQ ID NO: 156109
  Synthetic oligonucleotide

SEQ ID NO: 648039 - DNA, 55 bp, Artificial; identical to SEQ ID NO: 233489
  Synthetic oligonucleotide

SEQ ID NO: 648040 - DNA, 58 bp, Artificial; identical to SEQ ID NO: 238659
  Synthetic oligonucleotide

SEQ ID NO: 648041 - DNA, 56 bp, Artificial; identical to SEQ ID NO: 171087
  Synthetic oligonucleotide

SEQ ID NO: 648042 - DNA, 55 bp, Artificial; identical to SEQ ID NO: 166776
  Synthetic oligonucleotide

SEQ ID NO: 648043 - DNA, 55 bp, Artificial; identical to SEQ ID NO: 209356
  Synthetic oligonucleotide

SEQ ID NO: 648044 - DNA, 60 bp, Artificial; identical to SEQ ID NO: 224265
  Synthetic oligonucleotide

SEQ ID NO: 648045 - DNA, 51 bp, Artificial; identical to SEQ ID NO: 243540
  Synthetic oligonucleotide

SEQ ID NO: 648046 - DNA, 59 bp, Artificial; identical to SEQ ID NO: 266073
  Synthetic oligonucleotide

SEQ ID NO: 648047 - DNA, 55 bp, Artificial; identical to SEQ ID NO: 181957
  Synthetic oligonucleotide

SEQ ID NO: 648048 - DNA, 55 bp, Artificial; identical to SEQ ID NO: 181955
  Synthetic oligonucleotide

SEQ ID NO: 648049 - DNA, 52 bp, Artificial; identical to SEQ ID NO: 205695
  Synthetic oligonucleotide

SEQ ID NO: 648050 - DNA, 51 bp, Artificial; identical to SEQ ID NO: 237132
  Synthetic oligonucleotide

SEQ ID NO: 648051 - DNA, 55 bp, Artificial; identical to SEQ ID NO: 238407
  Synthetic oligonucleotide

SEQ ID NO: 648052 - DNA, 55 bp, Artificial; identical to SEQ ID NO: 169969
  Synthetic oligonucleotide

SEQ ID NO: 648053 - DNA, 59 bp, Artificial; identical to SEQ ID NO: 151304
  Synthetic oligonucleotide

SEQ ID NO: 648054 - DNA, 52 bp, Artificial; identical to SEQ ID NO: 216999
  Synthetic oligonucleotide

SEQ ID NO: 648055 - DNA, 50 bp, Artificial; identical to SEQ ID NO: 176615
  Synthetic oligonucleotide

SEQ ID NO: 648056 - DNA, 55 bp, Artificial; identical to SEQ ID NO: 161187
  Synthetic oligonucleotide

SEQ ID NO: 648057 - DNA, 52 bp, Artificial; identical to SEQ ID NO: 247940
  Synthetic oligonucleotide

SEQ ID NO: 648058 - DNA, 51 bp, Artificial; identical to SEQ ID NO: 193820
  Synthetic oligonucleotide

SEQ ID NO: 648059 - DNA, 60 bp, Artificial; identical to SEQ ID NO: 177893
  Synthetic oligonucleotide

SEQ ID NO: 648060 - DNA, 60 bp, Artificial; identical to SEQ ID NO: 257416
  Synthetic oligonucleotide

SEQ ID NO: 648061 - DNA, 55 bp, Artificial; identical to SEQ ID NO: 156111
  Synthetic oligonucleotide

SEQ ID NO: 648062 - DNA, 59 bp, Artificial; identical to SEQ ID NO: 151400
  Synthetic oligonucleotide

SEQ ID NO: 648063 - DNA, 60 bp, Artificial; identical to SEQ ID NO: 159890
  Synthetic oligonucleotide

SEQ ID NO: 648064 - DNA, 55 bp, Artificial; identical to SEQ ID NO: 205474
  Synthetic oligonucleotide

SEQ ID NO: 648065 - DNA, 55 bp, Artificial; identical to SEQ ID NO: 238406
  Synthetic oligonucleotide

SEQ ID NO: 648066 - DNA, 54 bp, Artificial; identical to SEQ ID NO: 144957
  Synthetic oligonucleotide

SEQ ID NO: 648067 - DNA, 55 bp, Artificial; identical to SEQ ID NO: 244170
  Synthetic oligonucleotide

SEQ ID NO: 648068 - DNA, 54 bp, Artificial; identical to SEQ ID NO: 255218
  Synthetic oligonucleotide

SEQ ID NO: 648069 - DNA, 60 bp, Artificial; identical to SEQ ID NO: 177892
  Synthetic oligonucleotide

SEQ ID NO: 648070 - DNA, 55 bp, Artificial; identical to SEQ ID NO: 181952
  Synthetic oligonucleotide

SEQ ID NO: 648071 - DNA, 51 bp, Artificial; identical to SEQ ID NO: 234532
  Synthetic oligonucleotide

SEQ ID NO: 648072 - DNA, 60 bp, Artificial; identical to SEQ ID NO: 212447
  Synthetic oligonucleotide

SEQ ID NO: 648073 - DNA, 52 bp, Artificial; identical to SEQ ID NO: 146436
  Synthetic oligonucleotide

SEQ ID NO: 648074 - DNA, 52 bp, Artificial; identical to SEQ ID NO: 240853
  Synthetic oligonucleotide

SEQ ID NO: 648075 - DNA, 58 bp, Artificial; identical to SEQ ID NO: 153244
  Synthetic oligonucleotide

SEQ ID NO: 648076 - DNA, 60 bp, Artificial; identical to SEQ ID NO: 238662
  Synthetic oligonucleotide

SEQ ID NO: 648077 - DNA, 55 bp, Artificial; identical to SEQ ID NO: 224978
  Synthetic oligonucleotide

SEQ ID NO: 648078 - DNA, 52 bp, Artificial; identical to SEQ ID NO: 168965
  Synthetic oligonucleotide

SEQ ID NO: 648079 - DNA, 55 bp, Artificial; identical to SEQ ID NO: 238405
  Synthetic oligonucleotide

SEQ ID NO: 648080 - DNA, 55 bp, Artificial; identical to SEQ ID NO: 215159
  Synthetic oligonucleotide

SEQ ID NO: 648081 - DNA, 53 bp, Artificial; identical to SEQ ID NO: 185523
  Synthetic oligonucleotide

SEQ ID NO: 648082 - DNA, 55 bp, Artificial; identical to SEQ ID NO: 203683
  Synthetic oligonucleotide

SEQ ID NO: 648083 - DNA, 53 bp, Artificial; identical to SEQ ID NO: 238611
  Synthetic oligonucleotide

SEQ ID NO: 648084 - DNA, 55 bp, Artificial; identical to SEQ ID NO: 156112
  Synthetic oligonucleotide

SEQ ID NO: 648085 - DNA, 56 bp, Artificial; identical to SEQ ID NO: 179910
  Synthetic oligonucleotide

SEQ ID NO: 648086 - DNA, 54 bp, Artificial; identical to SEQ ID NO: 153559
  Synthetic oligonucleotide

SEQ ID NO: 648087 - DNA, 60 bp, Artificial; identical to SEQ ID NO: 141611
  Synthetic oligonucleotide

SEQ ID NO: 648088 - DNA, 55 bp, Artificial; identical to SEQ ID NO: 254148
  Synthetic oligonucleotide

SEQ ID NO: 648089 - DNA, 59 bp, Artificial; identical to SEQ ID NO: 201912
  Synthetic oligonucleotide

SEQ ID NO: 648090 - DNA, 58 bp, Artificial; identical to SEQ ID NO: 237741
  Synthetic oligonucleotide

SEQ ID NO: 648091 - DNA, 52 bp, Artificial; identical to SEQ ID NO: 157661
  Synthetic oligonucleotide

SEQ ID NO: 648092 - DNA, 54 bp, Artificial; identical to SEQ ID NO: 164696
  Synthetic oligonucleotide

SEQ ID NO: 648093 - DNA, 55 bp, Artificial; identical to SEQ ID NO: 155949
  Synthetic oligonucleotide

SEQ ID NO: 648094 - DNA, 51 bp, Artificial; identical to SEQ ID NO: 208830
  Synthetic oligonucleotide

SEQ ID NO: 648095 - DNA, 55 bp, Artificial; identical to SEQ ID NO: 253803
  Synthetic oligonucleotide

SEQ ID NO: 648096 - DNA, 59 bp, Artificial; identical to SEQ ID NO: 179429
  Synthetic oligonucleotide

SEQ ID NO: 648097 - DNA, 55 bp, Artificial; identical to SEQ ID NO: 211346
  Synthetic oligonucleotide

SEQ ID NO: 648098 - DNA, 52 bp, Artificial; identical to SEQ ID NO: 186070
  Synthetic oligonucleotide

SEQ ID NO: 648099 - DNA, 59 bp, Artificial; identical to SEQ ID NO: 224300
  Synthetic oligonucleotide

SEQ ID NO: 648100 - DNA, 60 bp, Artificial; identical to SEQ ID NO: 177874
  Synthetic oligonucleotide

SEQ ID NO: 648101 - DNA, 60 bp, Artificial; identical to SEQ ID NO: 155720
  Synthetic oligonucleotide

SEQ ID NO: 648102 - DNA, 54 bp, Artificial; identical to SEQ ID NO: 184998
  Synthetic oligonucleotide

SEQ ID NO: 648103 - DNA, 60 bp, Artificial; identical to SEQ ID NO: 144718
  Synthetic oligonucleotide

SEQ ID NO: 648104 - DNA, 55 bp, Artificial; identical to SEQ ID NO: 168230
  Synthetic oligonucleotide

SEQ ID NO: 648105 - DNA, 55 bp, Artificial; identical to SEQ ID NO: 155951
  Synthetic oligonucleotide

SEQ ID NO: 648106 - DNA, 55 bp, Artificial; identical to SEQ ID NO: 198456
  Synthetic oligonucleotide

SEQ ID NO: 648107 - DNA, 54 bp, Artificial; identical to SEQ ID NO: 203876
  Synthetic oligonucleotide

SEQ ID NO: 648108 - DNA, 55 bp, Artificial; identical to SEQ ID NO: 203675
  Synthetic oligonucleotide

SEQ ID NO: 648109 - DNA, 58 bp, Artificial; identical to SEQ ID NO: 179532
  Synthetic oligonucleotide

SEQ ID NO: 648110 - DNA, 54 bp, Artificial; identical to SEQ ID NO: 159911
  Synthetic oligonucleotide

SEQ ID NO: 648111 - DNA, 53 bp, Artificial; identical to SEQ ID NO: 239828
  Synthetic oligonucleotide

SEQ ID NO: 648112 - DNA, 57 bp, Artificial; identical to SEQ ID NO: 248611
  Synthetic oligonucleotide

SEQ ID NO: 648113 - DNA, 55 bp, Artificial; identical to SEQ ID NO: 190424
  Synthetic oligonucleotide

SEQ ID NO: 648114 - DNA, 60 bp, Artificial; identical to SEQ ID NO: 170916
  Synthetic oligonucleotide

SEQ ID NO: 648115 - DNA, 51 bp, Artificial; identical to SEQ ID NO: 200005
  Synthetic oligonucleotide

SEQ ID NO: 648116 - DNA, 57 bp, Artificial; identical to SEQ ID NO: 194298
  Synthetic oligonucleotide

SEQ ID NO: 648117 - DNA, 52 bp, Artificial; identical to SEQ ID NO: 157662
  Synthetic oligonucleotide

SEQ ID NO: 648118 - DNA, 55 bp, Artificial; identical to SEQ ID NO: 254147
  Synthetic oligonucleotide

SEQ ID NO: 648119 - DNA, 52 bp, Artificial; identical to SEQ ID NO: 149572
  Synthetic oligonucleotide

SEQ ID NO: 648120 - DNA, 55 bp, Artificial; identical to SEQ ID NO: 187940
  Synthetic oligonucleotide

SEQ ID NO: 648121 - DNA, 55 bp, Artificial; identical to SEQ ID NO: 248499
  Synthetic oligonucleotide

SEQ ID NO: 648122 - DNA, 51 bp, Artificial; identical to SEQ ID NO: 221778
  Synthetic oligonucleotide

SEQ ID NO: 648123 - DNA, 55 bp, Artificial; identical to SEQ ID NO: 257847
  Synthetic oligonucleotide

SEQ ID NO: 648124 - DNA, 60 bp, Artificial; identical to SEQ ID NO: 238663
  Synthetic oligonucleotide

SEQ ID NO: 648125 - DNA, 60 bp, Artificial; identical to SEQ ID NO: 151389
  Synthetic oligonucleotide

SEQ ID NO: 648126 - DNA, 53 bp, Artificial; identical to SEQ ID NO: 188099
  Synthetic oligonucleotide

SEQ ID NO: 648127 - DNA, 60 bp, Artificial; identical to SEQ ID NO: 191186
  Synthetic oligonucleotide

SEQ ID NO: 648128 - DNA, 53 bp, Artificial; identical to SEQ ID NO: 190780
  Synthetic oligonucleotide

SEQ ID NO: 648129 - DNA, 55 bp, Artificial; identical to SEQ ID NO: 208448
  Synthetic oligonucleotide

SEQ ID NO: 648130 - DNA, 60 bp, Artificial; identical to SEQ ID NO: 177922
  Synthetic oligonucleotide

SEQ ID NO: 648131 - DNA, 55 bp, Artificial; identical to SEQ ID NO: 257849
  Synthetic oligonucleotide

SEQ ID NO: 648132 - DNA, 55 bp, Artificial; identical to SEQ ID NO: 155952
  Synthetic oligonucleotide

SEQ ID NO: 648133 - DNA, 54 bp, Artificial; identical to SEQ ID NO: 216993
  Synthetic oligonucleotide

SEQ ID NO: 648134 - DNA, 55 bp, Artificial; identical to SEQ ID NO: 217566
  Synthetic oligonucleotide

SEQ ID NO: 648135 - DNA, 55 bp, Artificial; identical to SEQ ID NO: 155953
  Synthetic oligonucleotide

SEQ ID NO: 648136 - DNA, 52 bp, Artificial; identical to SEQ ID NO: 233979
  Synthetic oligonucleotide

SEQ ID NO: 648137 - DNA, 52 bp, Artificial; identical to SEQ ID NO: 233830
  Synthetic oligonucleotide

SEQ ID NO: 648138 - DNA, 52 bp, Artificial; identical to SEQ ID NO: 258169
  Synthetic oligonucleotide

SEQ ID NO: 648139 - DNA, 55 bp, Artificial; identical to SEQ ID NO: 254146
  Synthetic oligonucleotide

SEQ ID NO: 648140 - DNA, 55 bp, Artificial; identical to SEQ ID NO: 166775
  Synthetic oligonucleotide

SEQ ID NO: 648141 - DNA, 60 bp, Artificial; identical to SEQ ID NO: 243484
  Synthetic oligonucleotide

SEQ ID NO: 648142 - DNA, 53 bp, Artificial; identical to SEQ ID NO: 188073
  Synthetic oligonucleotide

SEQ ID NO: 648143 - DNA, 55 bp, Artificial; identical to SEQ ID NO: 216982
  Synthetic oligonucleotide

SEQ ID NO: 648144 - DNA, 58 bp, Artificial; identical to SEQ ID NO: 144349
  Synthetic oligonucleotide

SEQ ID NO: 648145 - DNA, 52 bp, Artificial; identical to SEQ ID NO: 171685
  Synthetic oligonucleotide

SEQ ID NO: 648146 - DNA, 52 bp, Artificial; identical to SEQ ID NO: 153645
  Synthetic oligonucleotide

SEQ ID NO: 648147 - DNA, 59 bp, Artificial; identical to SEQ ID NO: 248490
  Synthetic oligonucleotide

SEQ ID NO: 648148 - DNA, 60 bp, Artificial; identical to SEQ ID NO: 266404
  Synthetic oligonucleotide

SEQ ID NO: 648149 - DNA, 53 bp, Artificial; identical to SEQ ID NO: 209642
  Synthetic oligonucleotide

SEQ ID NO: 648150 - DNA, 55 bp, Artificial; identical to SEQ ID NO: 244174
  Synthetic oligonucleotide

SEQ ID NO: 648151 - DNA, 52 bp, Artificial; identical to SEQ ID NO: 223711
  Synthetic oligonucleotide

SEQ ID NO: 648152 - DNA, 59 bp, Artificial; identical to SEQ ID NO: 247238
  Synthetic oligonucleotide

SEQ ID NO: 648153 - DNA, 60 bp, Artificial; identical to SEQ ID NO: 247234
  Synthetic oligonucleotide

SEQ ID NO: 648154 - DNA, 60 bp, Artificial; identical to SEQ ID NO: 188127
  Synthetic oligonucleotide

SEQ ID NO: 648155 - DNA, 60 bp, Artificial; identical to SEQ ID NO: 238664
  Synthetic oligonucleotide

SEQ ID NO: 648156 - DNA, 51 bp, Artificial; identical to SEQ ID NO: 191239
  Synthetic oligonucleotide

SEQ ID NO: 648157 - DNA, 59 bp, Artificial; identical to SEQ ID NO: 201111
  Synthetic oligonucleotide

SEQ ID NO: 648158 - DNA, 60 bp, Artificial; identical to SEQ ID NO: 177919
  Synthetic oligonucleotide

SEQ ID NO: 648159 - DNA, 55 bp, Artificial; identical to SEQ ID NO: 153380
  Synthetic oligonucleotide

SEQ ID NO: 648160 - DNA, 56 bp, Artificial; identical to SEQ ID NO: 248628
  Synthetic oligonucleotide

SEQ ID NO: 648161 - DNA, 55 bp, Artificial; identical to SEQ ID NO: 212605
  Synthetic oligonucleotide

SEQ ID NO: 648162 - DNA, 55 bp, Artificial; identical to SEQ ID NO: 190423
  Synthetic oligonucleotide

SEQ ID NO: 648163 - DNA, 51 bp, Artificial; identical to SEQ ID NO: 243334
  Synthetic oligonucleotide

SEQ ID NO: 648164 - DNA, 58 bp, Artificial; identical to SEQ ID NO: 191697
  Synthetic oligonucleotide

SEQ ID NO: 648165 - DNA, 55 bp, Artificial; identical to SEQ ID NO: 224976
  Synthetic oligonucleotide

SEQ ID NO: 648166 - DNA, 59 bp, Artificial; identical to SEQ ID NO: 200533
  Synthetic oligonucleotide

SEQ ID NO: 648167 - DNA, 55 bp, Artificial; identical to SEQ ID NO: 188258
  Synthetic oligonucleotide

SEQ ID NO: 648168 - DNA, 51 bp, Artificial; identical to SEQ ID NO: 197654
  Synthetic oligonucleotide

SEQ ID NO: 648169 - DNA, 58 bp, Artificial; identical to SEQ ID NO: 216971
  Synthetic oligonucleotide

SEQ ID NO: 648170 - DNA, 60 bp, Artificial; identical to SEQ ID NO: 151041
  Synthetic oligonucleotide

SEQ ID NO: 648171 - DNA, 54 bp, Artificial; identical to SEQ ID NO: 221669
  Synthetic oligonucleotide

SEQ ID NO: 648172 - DNA, 55 bp, Artificial; identical to SEQ ID NO: 253713
  Synthetic oligonucleotide

SEQ ID NO: 648173 - DNA, 56 bp, Artificial; identical to SEQ ID NO: 209849
  Synthetic oligonucleotide

SEQ ID NO: 648174 - DNA, 55 bp, Artificial; identical to SEQ ID NO: 194512
  Synthetic oligonucleotide

SEQ ID NO: 648175 - DNA, 57 bp, Artificial; identical to SEQ ID NO: 212395
  Synthetic oligonucleotide

SEQ ID NO: 648176 - DNA, 55 bp, Artificial; identical to SEQ ID NO: 191926
  Synthetic oligonucleotide

SEQ ID NO: 648177 - DNA, 60 bp, Artificial; identical to SEQ ID NO: 177918
  Synthetic oligonucleotide

SEQ ID NO: 648178 - DNA, 60 bp, Artificial; identical to SEQ ID NO: 237743
  Synthetic oligonucleotide

SEQ ID NO: 648179 - DNA, 55 bp, Artificial; identical to SEQ ID NO: 181983
  Synthetic oligonucleotide

SEQ ID NO: 648180 - DNA, 59 bp, Artificial; identical to SEQ ID NO: 151042
  Synthetic oligonucleotide

SEQ ID NO: 648181 - DNA, 58 bp, Artificial; identical to SEQ ID NO: 200531
  Synthetic oligonucleotide

SEQ ID NO: 648182 - DNA, 60 bp, Artificial; identical to SEQ ID NO: 212397
  Synthetic oligonucleotide

SEQ ID NO: 648183 - DNA, 50 bp, Artificial; identical to SEQ ID NO: 221959
  Synthetic oligonucleotide

SEQ ID NO: 648184 - DNA, 53 bp, Artificial; identical to SEQ ID NO: 240796
  Synthetic oligonucleotide

SEQ ID NO: 648185 - DNA, 55 bp, Artificial; identical to SEQ ID NO: 187937
  Synthetic oligonucleotide

SEQ ID NO: 648186 - DNA, 60 bp, Artificial; identical to SEQ ID NO: 222853
  Synthetic oligonucleotide

SEQ ID NO: 648187 - DNA, 55 bp, Artificial; identical to SEQ ID NO: 233488
  Synthetic oligonucleotide

SEQ ID NO: 648188 - DNA, 53 bp, Artificial; identical to SEQ ID NO: 266749
  Synthetic oligonucleotide

SEQ ID NO: 648189 - DNA, 55 bp, Artificial; identical to SEQ ID NO: 148272
  Synthetic oligonucleotide

SEQ ID NO: 648190 - DNA, 57 bp, Artificial; identical to SEQ ID NO: 179718
  Synthetic oligonucleotide

SEQ ID NO: 648191 - DNA, 58 bp, Artificial; identical to SEQ ID NO: 147122
  Synthetic oligonucleotide

SEQ ID NO: 648192 - DNA, 54 bp, Artificial; identical to SEQ ID NO: 188439
  Synthetic oligonucleotide

SEQ ID NO: 648193 - DNA, 60 bp, Artificial; identical to SEQ ID NO: 203345
  Synthetic oligonucleotide

SEQ ID NO: 648194 - DNA, 56 bp, Artificial; identical to SEQ ID NO: 200530
  Synthetic oligonucleotide

SEQ ID NO: 648195 - DNA, 55 bp, Artificial; identical to SEQ ID NO: 233487
  Synthetic oligonucleotide

SEQ ID NO: 648196 - DNA, 60 bp, Artificial; identical to SEQ ID NO: 177917
  Synthetic oligonucleotide

SEQ ID NO: 648197 - DNA, 52 bp, Artificial; identical to SEQ ID NO: 168967
  Synthetic oligonucleotide

SEQ ID NO: 648198 - DNA, 57 bp, Artificial; identical to SEQ ID NO: 187377
  Synthetic oligonucleotide

SEQ ID NO: 648199 - DNA, 55 bp, Artificial; identical to SEQ ID NO: 151793
  Synthetic oligonucleotide

SEQ ID NO: 648200 - DNA, 53 bp, Artificial; identical to SEQ ID NO: 225219
  Synthetic oligonucleotide

SEQ ID NO: 648201 - DNA, 60 bp, Artificial; identical to SEQ ID NO: 170908
  Synthetic oligonucleotide

SEQ ID NO: 648202 - DNA, 53 bp, Artificial; identical to SEQ ID NO: 155534
  Synthetic oligonucleotide

SEQ ID NO: 648203 - DNA, 55 bp, Artificial; identical to SEQ ID NO: 187935
  Synthetic oligonucleotide

SEQ ID NO: 648204 - DNA, 52 bp, Artificial; identical to SEQ ID NO: 255514
  Synthetic oligonucleotide

SEQ ID NO: 648205 - DNA, 55 bp, Artificial; identical to SEQ ID NO: 181980
  Synthetic oligonucleotide

SEQ ID NO: 648206 - DNA, 57 bp, Artificial; identical to SEQ ID NO: 207050
  Synthetic oligonucleotide

SEQ ID NO: 648207 - DNA, 59 bp, Artificial; identical to SEQ ID NO: 247231
  Synthetic oligonucleotide

SEQ ID NO: 648208 - DNA, 60 bp, Artificial; identical to SEQ ID NO: 238667
  Synthetic oligonucleotide

SEQ ID NO: 648209 - DNA, 56 bp, Artificial; identical to SEQ ID NO: 203404
  Synthetic oligonucleotide

SEQ ID NO: 648210 - DNA, 51 bp, Artificial; identical to SEQ ID NO: 157726
  Synthetic oligonucleotide

SEQ ID NO: 648211 - DNA, 58 bp, Artificial; identical to SEQ ID NO: 141612
  Synthetic oligonucleotide

SEQ ID NO: 648212 - DNA, 53 bp, Artificial; identical to SEQ ID NO: 155532
  Synthetic oligonucleotide

SEQ ID NO: 648213 - DNA, 55 bp, Artificial; identical to SEQ ID NO: 173570
  Synthetic oligonucleotide

SEQ ID NO: 648214 - DNA, 59 bp, Artificial; identical to SEQ ID NO: 212401
  Synthetic oligonucleotide

SEQ ID NO: 648215 - DNA, 52 bp, Artificial; identical to SEQ ID NO: 208778
  Synthetic oligonucleotide

SEQ ID NO: 648216 - DNA, 60 bp, Artificial; identical to SEQ ID NO: 238670
  Synthetic oligonucleotide

SEQ ID NO: 648217 - DNA, 60 bp, Artificial; identical to SEQ ID NO: 242325
  Synthetic oligonucleotide

SEQ ID NO: 648218 - DNA, 55 bp, Artificial; identical to SEQ ID NO: 238366
  Synthetic oligonucleotide

SEQ ID NO: 648219 - DNA, 52 bp, Artificial; identical to SEQ ID NO: 205709
  Synthetic oligonucleotide

SEQ ID NO: 648220 - DNA, 55 bp, Artificial; identical to SEQ ID NO: 181974
  Synthetic oligonucleotide

SEQ ID NO: 648221 - DNA, 51 bp, Artificial; identical to SEQ ID NO: 157710
  Synthetic oligonucleotide

SEQ ID NO: 648222 - DNA, 55 bp, Artificial; identical to SEQ ID NO: 211344
  Synthetic oligonucleotide

SEQ ID NO: 648223 - DNA, 53 bp, Artificial; identical to SEQ ID NO: 243171
  Synthetic oligonucleotide

SEQ ID NO: 648224 - DNA, 50 bp, Artificial; identical to SEQ ID NO: 202580
  Synthetic oligonucleotide

SEQ ID NO: 648225 - DNA, 60 bp, Artificial; identical to SEQ ID NO: 222852
  Synthetic oligonucleotide

SEQ ID NO: 648226 - DNA, 55 bp, Artificial; identical to SEQ ID NO: 143719
  Synthetic oligonucleotide

SEQ ID NO: 648227 - DNA, 52 bp, Artificial; identical to SEQ ID NO: 255513
  Synthetic oligonucleotide

SEQ ID NO: 648228 - DNA, 55 bp, Artificial; identical to SEQ ID NO: 244772
  Synthetic oligonucleotide

SEQ ID NO: 648229 - DNA, 55 bp, Artificial; identical to SEQ ID NO: 224974
  Synthetic oligonucleotide

SEQ ID NO: 648230 - DNA, 53 bp, Artificial; identical to SEQ ID NO: 242326
  Synthetic oligonucleotide

SEQ ID NO: 648231 - DNA, 58 bp, Artificial; identical to SEQ ID NO: 243967
  Synthetic oligonucleotide

SEQ ID NO: 648232 - DNA, 60 bp, Artificial; identical to SEQ ID NO: 177908
  Synthetic oligonucleotide

SEQ ID NO: 648233 - DNA, 57 bp, Artificial; identical to SEQ ID NO: 200529
  Synthetic oligonucleotide

SEQ ID NO: 648234 - DNA, 57 bp, Artificial; identical to SEQ ID NO: 209202
  Synthetic oligonucleotide

SEQ ID NO: 648235 - DNA, 54 bp, Artificial; identical to SEQ ID NO: 209579
  Synthetic oligonucleotide

SEQ ID NO: 648236 - DNA, 55 bp, Artificial; identical to SEQ ID NO: 244223
  Synthetic oligonucleotide

SEQ ID NO: 648237 - DNA, 57 bp, Artificial; identical to SEQ ID NO: 177906
  Synthetic oligonucleotide

SEQ ID NO: 648238 - DNA, 51 bp, Artificial; identical to SEQ ID NO: 165228
  Synthetic oligonucleotide

SEQ ID NO: 648239 - DNA, 60 bp, Artificial; identical to SEQ ID NO: 211657
  Synthetic oligonucleotide

SEQ ID NO: 648240 - DNA, 53 bp, Artificial; identical to SEQ ID NO: 243485
  Synthetic oligonucleotide

SEQ ID NO: 648241 - DNA, 52 bp, Artificial; identical to SEQ ID NO: 149577
  Synthetic oligonucleotide

SEQ ID NO: 648242 - DNA, 55 bp, Artificial; identical to SEQ ID NO: 144892
  Synthetic oligonucleotide

SEQ ID NO: 648243 - DNA, 59 bp, Artificial; identical to SEQ ID NO: 177903
  Synthetic oligonucleotide

SEQ ID NO: 648244 - DNA, 55 bp, Artificial; identical to SEQ ID NO: 261852
  Synthetic oligonucleotide

SEQ ID NO: 648245 - DNA, 55 bp, Artificial; identical to SEQ ID NO: 238365
  Synthetic oligonucleotide

SEQ ID NO: 648246 - DNA, 58 bp, Artificial; identical to SEQ ID NO: 242327
  Synthetic oligonucleotide

SEQ ID NO: 648247 - DNA, 59 bp, Artificial; identical to SEQ ID NO: 147069
  Synthetic oligonucleotide

SEQ ID NO: 648248 - DNA, 55 bp, Artificial; identical to SEQ ID NO: 244678
  Synthetic oligonucleotide

SEQ ID NO: 648249 - DNA, 52 bp, Artificial; identical to SEQ ID NO: 157496
  Synthetic oligonucleotide

SEQ ID NO: 648250 - DNA, 53 bp, Artificial; identical to SEQ ID NO: 239383
  Synthetic oligonucleotide

SEQ ID NO: 648251 - DNA, 51 bp, Artificial; identical to SEQ ID NO: 223735
  Synthetic oligonucleotide

SEQ ID NO: 648252 - DNA, 55 bp, Artificial; identical to SEQ ID NO: 244230
  Synthetic oligonucleotide

SEQ ID NO: 648253 - DNA, 54 bp, Artificial; identical to SEQ ID NO: 147111
  Synthetic oligonucleotide

SEQ ID NO: 648254 - DNA, 55 bp, Artificial; identical to SEQ ID NO: 166771
  Synthetic oligonucleotide

SEQ ID NO: 648255 - DNA, 55 bp, Artificial; identical to SEQ ID NO: 181969
  Synthetic oligonucleotide

SEQ ID NO: 648256 - DNA, 55 bp, Artificial; identical to SEQ ID NO: 155960
  Synthetic oligonucleotide

SEQ ID NO: 648257 - DNA, 57 bp, Artificial; identical to SEQ ID NO: 151103
  Synthetic oligonucleotide

SEQ ID NO: 648258 - DNA, 52 bp, Artificial; identical to SEQ ID NO: 186079
  Synthetic oligonucleotide

SEQ ID NO: 648259 - DNA, 55 bp, Artificial; identical to SEQ ID NO: 225126
  Synthetic oligonucleotide

SEQ ID NO: 648260 - DNA, 52 bp, Artificial; identical to SEQ ID NO: 144555
  Synthetic oligonucleotide

SEQ ID NO: 648261 - DNA, 51 bp, Artificial; identical to SEQ ID NO: 155606
  Synthetic oligonucleotide

SEQ ID NO: 648262 - DNA, 56 bp, Artificial; identical to SEQ ID NO: 165778
  Synthetic oligonucleotide

SEQ ID NO: 648263 - DNA, 55 bp, Artificial; identical to SEQ ID NO: 217571
  Synthetic oligonucleotide

SEQ ID NO: 648264 - DNA, 55 bp, Artificial; identical to SEQ ID NO: 142186
  Synthetic oligonucleotide

SEQ ID NO: 648265 - DNA, 59 bp, Artificial; identical to SEQ ID NO: 141662
  Synthetic oligonucleotide

SEQ ID NO: 648266 - DNA, 56 bp, Artificial; identical to SEQ ID NO: 247606
  Synthetic oligonucleotide

SEQ ID NO: 648267 - DNA, 55 bp, Artificial; identical to SEQ ID NO: 160995
  Synthetic oligonucleotide

SEQ ID NO: 648268 - DNA, 58 bp, Artificial; identical to SEQ ID NO: 170943
  Synthetic oligonucleotide

SEQ ID NO: 648269 - DNA, 55 bp, Artificial; identical to SEQ ID NO: 181967
  Synthetic oligonucleotide

SEQ ID NO: 648270 - DNA, 56 bp, Artificial; identical to SEQ ID NO: 237744
  Synthetic oligonucleotide

SEQ ID NO: 648271 - DNA, 60 bp, Artificial; identical to SEQ ID NO: 253286
  Synthetic oligonucleotide

SEQ ID NO: 648272 - DNA, 55 bp, Artificial; identical to SEQ ID NO: 181966
  Synthetic oligonucleotide

SEQ ID NO: 648273 - DNA, 60 bp, Artificial; identical to SEQ ID NO: 206982
  Synthetic oligonucleotide

SEQ ID NO: 648274 - DNA, 55 bp, Artificial; identical to SEQ ID NO: 239805
  Synthetic oligonucleotide

SEQ ID NO: 648275 - DNA, 55 bp, Artificial; identical to SEQ ID NO: 198516
  Synthetic oligonucleotide

SEQ ID NO: 648276 - DNA, 59 bp, Artificial; identical to SEQ ID NO: 188116
  Synthetic oligonucleotide

SEQ ID NO: 648277 - DNA, 55 bp, Artificial; identical to SEQ ID NO: 148203
  Synthetic oligonucleotide

SEQ ID NO: 648278 - DNA, 59 bp, Artificial; identical to SEQ ID NO: 256346
  Synthetic oligonucleotide

SEQ ID NO: 648279 - DNA, 53 bp, Artificial; identical to SEQ ID NO: 247886
  Synthetic oligonucleotide

SEQ ID NO: 648280 - DNA, 60 bp, Artificial; identical to SEQ ID NO: 212402
  Synthetic oligonucleotide

SEQ ID NO: 648281 - DNA, 60 bp, Artificial; identical to SEQ ID NO: 212405
  Synthetic oligonucleotide

SEQ ID NO: 648282 - DNA, 55 bp, Artificial; identical to SEQ ID NO: 174649
  Synthetic oligonucleotide

SEQ ID NO: 648283 - DNA, 57 bp, Artificial; identical to SEQ ID NO: 170975
  Synthetic oligonucleotide

SEQ ID NO: 648284 - DNA, 54 bp, Artificial; identical to SEQ ID NO: 151065
  Synthetic oligonucleotide

SEQ ID NO: 648285 - DNA, 56 bp, Artificial; identical to SEQ ID NO: 256345
  Synthetic oligonucleotide

SEQ ID NO: 648286 - DNA, 54 bp, Artificial; identical to SEQ ID NO: 157160
  Synthetic oligonucleotide

SEQ ID NO: 648287 - DNA, 58 bp, Artificial; identical to SEQ ID NO: 203343
  Synthetic oligonucleotide

SEQ ID NO: 648288 - DNA, 52 bp, Artificial; identical to SEQ ID NO: 151070
  Synthetic oligonucleotide

SEQ ID NO: 648289 - DNA, 57 bp, Artificial; identical to SEQ ID NO: 262745
  Synthetic oligonucleotide

SEQ ID NO: 648290 - DNA, 58 bp, Artificial; identical to SEQ ID NO: 247513
  Synthetic oligonucleotide

SEQ ID NO: 648291 - DNA, 55 bp, Artificial; identical to SEQ ID NO: 198514
  Synthetic oligonucleotide

SEQ ID NO: 648292 - DNA, 54 bp, Artificial; identical to SEQ ID NO: 238562
  Synthetic oligonucleotide

SEQ ID NO: 648293 - DNA, 60 bp, Artificial; identical to SEQ ID NO: 211646
  Synthetic oligonucleotide

SEQ ID NO: 648294 - DNA, 54 bp, Artificial; identical to SEQ ID NO: 161843
  Synthetic oligonucleotide

SEQ ID NO: 648295 - DNA, 57 bp, Artificial; identical to SEQ ID NO: 242333
  Synthetic oligonucleotide

SEQ ID NO: 648296 - DNA, 52 bp, Artificial; identical to SEQ ID NO: 240877
  Synthetic oligonucleotide

SEQ ID NO: 648297 - DNA, 51 bp, Artificial; identical to SEQ ID NO: 152472
  Synthetic oligonucleotide

SEQ ID NO: 648298 - DNA, 55 bp, Artificial; identical to SEQ ID NO: 142187
  Synthetic oligonucleotide

SEQ ID NO: 648299 - DNA, 54 bp, Artificial; identical to SEQ ID NO: 238561
  Synthetic oligonucleotide

SEQ ID NO: 648300 - DNA, 60 bp, Artificial; identical to SEQ ID NO: 170911
  Synthetic oligonucleotide

SEQ ID NO: 648301 - DNA, 52 bp, Artificial; identical to SEQ ID NO: 144558
  Synthetic oligonucleotide

SEQ ID NO: 648302 - DNA, 50 bp, Artificial; identical to SEQ ID NO: 205874
  Synthetic oligonucleotide

SEQ ID NO: 648303 - DNA, 55 bp, Artificial; identical to SEQ ID NO: 148019
  Synthetic oligonucleotide

SEQ ID NO: 648304 - DNA, 57 bp, Artificial; identical to SEQ ID NO: 208087
  Synthetic oligonucleotide

SEQ ID NO: 648305 - DNA, 50 bp, Artificial; identical to SEQ ID NO: 154035
  Synthetic oligonucleotide

SEQ ID NO: 648306 - DNA, 51 bp, Artificial; identical to SEQ ID NO: 193125
  Synthetic oligonucleotide

SEQ ID NO: 648307 - DNA, 58 bp, Artificial; identical to SEQ ID NO: 200526
  Synthetic oligonucleotide

SEQ ID NO: 648308 - DNA, 59 bp, Artificial; identical to SEQ ID NO: 200525
  Synthetic oligonucleotide

SEQ ID NO: 648309 - DNA, 56 bp, Artificial; identical to SEQ ID NO: 166174
  Synthetic oligonucleotide

SEQ ID NO: 648310 - DNA, 55 bp, Artificial; identical to SEQ ID NO: 244899
  Synthetic oligonucleotide

SEQ ID NO: 648311 - DNA, 57 bp, Artificial; identical to SEQ ID NO: 155721
  Synthetic oligonucleotide

SEQ ID NO: 648312 - DNA, 58 bp, Artificial; identical to SEQ ID NO: 151078
  Synthetic oligonucleotide

SEQ ID NO: 648313 - DNA, 55 bp, Artificial; identical to SEQ ID NO: 181962
  Synthetic oligonucleotide

SEQ ID NO: 648314 - DNA, 60 bp, Artificial; identical to SEQ ID NO: 262746
  Synthetic oligonucleotide

SEQ ID NO: 648315 - DNA, 52 bp, Artificial; identical to SEQ ID NO: 213030
  Synthetic oligonucleotide

SEQ ID NO: 648316 - DNA, 52 bp, Artificial; identical to SEQ ID NO: 149583
  Synthetic oligonucleotide

SEQ ID NO: 648317 - DNA, 57 bp, Artificial; identical to SEQ ID NO: 187357
  Synthetic oligonucleotide

SEQ ID NO: 648318 - DNA, 57 bp, Artificial; identical to SEQ ID NO: 147223
  Synthetic oligonucleotide

SEQ ID NO: 648319 - DNA, 55 bp, Artificial; identical to SEQ ID NO: 193221
  Synthetic oligonucleotide

SEQ ID NO: 648320 - DNA, 50 bp, Artificial; identical to SEQ ID NO: 248212
  Synthetic oligonucleotide

SEQ ID NO: 648321 - DNA, 55 bp, Artificial; identical to SEQ ID NO: 198513
  Synthetic oligonucleotide

SEQ ID NO: 648322 - DNA, 60 bp, Artificial; identical to SEQ ID NO: 242336
  Synthetic oligonucleotide

SEQ ID NO: 648323 - DNA, 60 bp, Artificial; identical to SEQ ID NO: 203341
  Synthetic oligonucleotide

SEQ ID NO: 648324 - DNA, 55 bp, Artificial; identical to SEQ ID NO: 254053
  Synthetic oligonucleotide

SEQ ID NO: 648325 - DNA, 52 bp, Artificial; identical to SEQ ID NO: 258177
  Synthetic oligonucleotide

SEQ ID NO: 648326 - DNA, 55 bp, Artificial; identical to SEQ ID NO: 221436
  Synthetic oligonucleotide

SEQ ID NO: 648327 - DNA, 60 bp, Artificial; identical to SEQ ID NO: 243486
  Synthetic oligonucleotide

SEQ ID NO: 648328 - DNA, 52 bp, Artificial; identical to SEQ ID NO: 195050
  Synthetic oligonucleotide

SEQ ID NO: 648329 - DNA, 56 bp, Artificial; identical to SEQ ID NO: 210719
  Synthetic oligonucleotide

SEQ ID NO: 648330 - DNA, 51 bp, Artificial; identical to SEQ ID NO: 225264
  Synthetic oligonucleotide

SEQ ID NO: 648331 - DNA, 50 bp, Artificial; identical to SEQ ID NO: 243438
  Synthetic oligonucleotide

SEQ ID NO: 648332 - DNA, 55 bp, Artificial; identical to SEQ ID NO: 151082
  Synthetic oligonucleotide

SEQ ID NO: 648333 - DNA, 52 bp, Artificial; identical to SEQ ID NO: 149584
  Synthetic oligonucleotide

SEQ ID NO: 648334 - DNA, 59 bp, Artificial; identical to SEQ ID NO: 166075
  Synthetic oligonucleotide

SEQ ID NO: 648335 - DNA, 55 bp, Artificial; identical to SEQ ID NO: 166769
  Synthetic oligonucleotide

SEQ ID NO: 648336 - DNA, 54 bp, Artificial; identical to SEQ ID NO: 185024
  Synthetic oligonucleotide

SEQ ID NO: 648337 - DNA, 54 bp, Artificial; identical to SEQ ID NO: 253265
  Synthetic oligonucleotide

SEQ ID NO: 648338 - DNA, 51 bp, Artificial; identical to SEQ ID NO: 216430
  Synthetic oligonucleotide

SEQ ID NO: 648339 - DNA, 55 bp, Artificial; identical to SEQ ID NO: 244796
  Synthetic oligonucleotide

SEQ ID NO: 648340 - DNA, 55 bp, Artificial; identical to SEQ ID NO: 224971
  Synthetic oligonucleotide

SEQ ID NO: 648341 - DNA, 51 bp, Artificial; identical to SEQ ID NO: 186488
  Synthetic oligonucleotide

SEQ ID NO: 648342 - DNA, 50 bp, Artificial; identical to SEQ ID NO: 160623
  Synthetic oligonucleotide

SEQ ID NO: 648343 - DNA, 55 bp, Artificial; identical to SEQ ID NO: 234316
  Synthetic oligonucleotide

SEQ ID NO: 648344 - DNA, 56 bp, Artificial; identical to SEQ ID NO: 244044
  Synthetic oligonucleotide

SEQ ID NO: 648345 - DNA, 55 bp, Artificial; identical to SEQ ID NO: 198512
  Synthetic oligonucleotide

SEQ ID NO: 648346 - DNA, 60 bp, Artificial; identical to SEQ ID NO: 155112
  Synthetic oligonucleotide

SEQ ID NO: 648347 - DNA, 55 bp, Artificial; identical to SEQ ID NO: 234317
  Synthetic oligonucleotide

SEQ ID NO: 648348 - DNA, 55 bp, Artificial; identical to SEQ ID NO: 166768
  Synthetic oligonucleotide

SEQ ID NO: 648349 - DNA, 55 bp, Artificial; identical to SEQ ID NO: 212582
  Synthetic oligonucleotide

SEQ ID NO: 648350 - DNA, 55 bp, Artificial; identical to SEQ ID NO: 189042
  Synthetic oligonucleotide

SEQ ID NO: 648351 - DNA, 54 bp, Artificial; identical to SEQ ID NO: 247193
  Synthetic oligonucleotide

SEQ ID NO: 648352 - DNA, 50 bp, Artificial; identical to SEQ ID NO: 150067
  Synthetic oligonucleotide

SEQ ID NO: 648353 - DNA, 55 bp, Artificial; identical to SEQ ID NO: 181912
  Synthetic oligonucleotide

SEQ ID NO: 648354 - DNA, 60 bp, Artificial; identical to SEQ ID NO: 237745
  Synthetic oligonucleotide

SEQ ID NO: 648355 - DNA, 55 bp, Artificial; identical to SEQ ID NO: 155963
  Synthetic oligonucleotide

SEQ ID NO: 648356 - DNA, 55 bp, Artificial; identical to SEQ ID NO: 162065
  Synthetic oligonucleotide

SEQ ID NO: 648357 - DNA, 60 bp, Artificial; identical to SEQ ID NO: 224235
  Synthetic oligonucleotide

SEQ ID NO: 648358 - DNA, 56 bp, Artificial; identical to SEQ ID NO: 177834
  Synthetic oligonucleotide

SEQ ID NO: 648359 - DNA, 60 bp, Artificial; identical to SEQ ID NO: 242337
  Synthetic oligonucleotide

SEQ ID NO: 648360 - DNA, 60 bp, Artificial; identical to SEQ ID NO: 257414
  Synthetic oligonucleotide

SEQ ID NO: 648361 - DNA, 54 bp, Artificial; identical to SEQ ID NO: 237746
  Synthetic oligonucleotide

SEQ ID NO: 648362 - DNA, 55 bp, Artificial; identical to SEQ ID NO: 144893
  Synthetic oligonucleotide

SEQ ID NO: 648363 - DNA, 57 bp, Artificial; identical to SEQ ID NO: 242338
  Synthetic oligonucleotide

SEQ ID NO: 648364 - DNA, 55 bp, Artificial; identical to SEQ ID NO: 218230
  Synthetic oligonucleotide

SEQ ID NO: 648365 - DNA, 55 bp, Artificial; identical to SEQ ID NO: 265745
  Synthetic oligonucleotide

SEQ ID NO: 648366 - DNA, 52 bp, Artificial; identical to SEQ ID NO: 255512
  Synthetic oligonucleotide

SEQ ID NO: 648367 - DNA, 55 bp, Artificial; identical to SEQ ID NO: 218227
  Synthetic oligonucleotide

SEQ ID NO: 648368 - DNA, 60 bp, Artificial; identical to SEQ ID NO: 161331
  Synthetic oligonucleotide

SEQ ID NO: 648369 - DNA, 60 bp, Artificial; identical to SEQ ID NO: 177826
  Synthetic oligonucleotide

SEQ ID NO: 648370 - DNA, 55 bp, Artificial; identical to SEQ ID NO: 193223
  Synthetic oligonucleotide

SEQ ID NO: 648371 - DNA, 55 bp, Artificial; identical to SEQ ID NO: 144894
  Synthetic oligonucleotide

SEQ ID NO: 648372 - DNA, 57 bp, Artificial; identical to SEQ ID NO: 142742
  Synthetic oligonucleotide

SEQ ID NO: 648373 - DNA, 60 bp, Artificial; identical to SEQ ID NO: 216926
  Synthetic oligonucleotide

SEQ ID NO: 648374 - DNA, 60 bp, Artificial; identical to SEQ ID NO: 150971
  Synthetic oligonucleotide

SEQ ID NO: 648375 - DNA, 55 bp, Artificial; identical to SEQ ID NO: 221435
  Synthetic oligonucleotide

SEQ ID NO: 648376 - DNA, 60 bp, Artificial; identical to SEQ ID NO: 158309
  Synthetic oligonucleotide

SEQ ID NO: 648377 - DNA, 55 bp, Artificial; identical to SEQ ID NO: 257935
  Synthetic oligonucleotide

SEQ ID NO: 648378 - DNA, 58 bp, Artificial; identical to SEQ ID NO: 209847
  Synthetic oligonucleotide

SEQ ID NO: 648379 - DNA, 50 bp, Artificial; identical to SEQ ID NO: 215237
  Synthetic oligonucleotide

SEQ ID NO: 648380 - DNA, 53 bp, Artificial; identical to SEQ ID NO: 149435
  Synthetic oligonucleotide

SEQ ID NO: 648381 - DNA, 54 bp, Artificial; identical to SEQ ID NO: 190635
  Synthetic oligonucleotide

SEQ ID NO: 648382 - DNA, 54 bp, Artificial; identical to SEQ ID NO: 185029
  Synthetic oligonucleotide

SEQ ID NO: 648383 - DNA, 55 bp, Artificial; identical to SEQ ID NO: 238362
  Synthetic oligonucleotide

SEQ ID NO: 648384 - DNA, 55 bp, Artificial; identical to SEQ ID NO: 203754
  Synthetic oligonucleotide

SEQ ID NO: 648385 - DNA, 55 bp, Artificial; identical to SEQ ID NO: 161184
  Synthetic oligonucleotide

SEQ ID NO: 648386 - DNA, 55 bp, Artificial; identical to SEQ ID NO: 148042
  Synthetic oligonucleotide

SEQ ID NO: 648387 - DNA, 59 bp, Artificial; identical to SEQ ID NO: 237748
  Synthetic oligonucleotide

SEQ ID NO: 648388 - DNA, 51 bp, Artificial; identical to SEQ ID NO: 237124
  Synthetic oligonucleotide

SEQ ID NO: 648389 - DNA, 50 bp, Artificial; identical to SEQ ID NO: 248487
  Synthetic oligonucleotide

SEQ ID NO: 648390 - DNA, 52 bp, Artificial; identical to SEQ ID NO: 186080
  Synthetic oligonucleotide

SEQ ID NO: 648391 - DNA, 55 bp, Artificial; identical to SEQ ID NO: 244851
  Synthetic oligonucleotide

SEQ ID NO: 648392 - DNA, 58 bp, Artificial; identical to SEQ ID NO: 253308
  Synthetic oligonucleotide

SEQ ID NO: 648393 - DNA, 60 bp, Artificial; identical to SEQ ID NO: 141664
  Synthetic oligonucleotide

SEQ ID NO: 648394 - DNA, 52 bp, Artificial; identical to SEQ ID NO: 213027
  Synthetic oligonucleotide

SEQ ID NO: 648395 - DNA, 55 bp, Artificial; identical to SEQ ID NO: 244801
  Synthetic oligonucleotide

SEQ ID NO: 648396 - DNA, 55 bp, Artificial; identical to SEQ ID NO: 218226
  Synthetic oligonucleotide

SEQ ID NO: 648397 - DNA, 55 bp, Artificial; identical to SEQ ID NO: 148040
  Synthetic oligonucleotide

SEQ ID NO: 648398 - DNA, 56 bp, Artificial; identical to SEQ ID NO: 248480
  Synthetic oligonucleotide

SEQ ID NO: 648399 - DNA, 56 bp, Artificial; identical to SEQ ID NO: 256337
  Synthetic oligonucleotide

SEQ ID NO: 648400 - DNA, 56 bp, Artificial; identical to SEQ ID NO: 262748
  Synthetic oligonucleotide

SEQ ID NO: 648401 - DNA, 52 bp, Artificial; identical to SEQ ID NO: 240911
  Synthetic oligonucleotide

SEQ ID NO: 648402 - DNA, 60 bp, Artificial; identical to SEQ ID NO: 237751
  Synthetic oligonucleotide

SEQ ID NO: 648403 - DNA, 55 bp, Artificial; identical to SEQ ID NO: 155966
  Synthetic oligonucleotide

SEQ ID NO: 648404 - DNA, 51 bp, Artificial; identical to SEQ ID NO: 258213
  Synthetic oligonucleotide

SEQ ID NO: 648405 - DNA, 57 bp, Artificial; identical to SEQ ID NO: 203338
  Synthetic oligonucleotide

SEQ ID NO: 648406 - DNA, 55 bp, Artificial; identical to SEQ ID NO: 168251
  Synthetic oligonucleotide

SEQ ID NO: 648407 - DNA, 60 bp, Artificial; identical to SEQ ID NO: 225446
  Synthetic oligonucleotide

SEQ ID NO: 648408 - DNA, 55 bp, Artificial; identical to SEQ ID NO: 217574
  Synthetic oligonucleotide

SEQ ID NO: 648409 - DNA, 55 bp, Artificial; identical to SEQ ID NO: 160994
  Synthetic oligonucleotide

SEQ ID NO: 648410 - DNA, 55 bp, Artificial; identical to SEQ ID NO: 152324
  Synthetic oligonucleotide

SEQ ID NO: 648411 - DNA, 60 bp, Artificial; identical to SEQ ID NO: 170877
  Synthetic oligonucleotide

SEQ ID NO: 648412 - DNA, 53 bp, Artificial; identical to SEQ ID NO: 164905
  Synthetic oligonucleotide

SEQ ID NO: 648413 - DNA, 52 bp, Artificial; identical to SEQ ID NO: 213024
  Synthetic oligonucleotide

SEQ ID NO: 648414 - DNA, 55 bp, Artificial; identical to SEQ ID NO: 155969
  Synthetic oligonucleotide

SEQ ID NO: 648415 - DNA, 60 bp, Artificial; identical to SEQ ID NO: 177866
  Synthetic oligonucleotide

SEQ ID NO: 648416 - DNA, 50 bp, Artificial; identical to SEQ ID NO: 177085
  Synthetic oligonucleotide

SEQ ID NO: 648417 - DNA, 55 bp, Artificial; identical to SEQ ID NO: 181904
  Synthetic oligonucleotide

SEQ ID NO: 648418 - DNA, 60 bp, Artificial; identical to SEQ ID NO: 200523
  Synthetic oligonucleotide

SEQ ID NO: 648419 - DNA, 55 bp, Artificial; identical to SEQ ID NO: 196258
  Synthetic oligonucleotide

SEQ ID NO: 648420 - DNA, 55 bp, Artificial; identical to SEQ ID NO: 155970
  Synthetic oligonucleotide

SEQ ID NO: 648421 - DNA, 55 bp, Artificial; identical to SEQ ID NO: 221434
  Synthetic oligonucleotide

SEQ ID NO: 648422 - DNA, 59 bp, Artificial; identical to SEQ ID NO: 206983
  Synthetic oligonucleotide

SEQ ID NO: 648423 - DNA, 55 bp, Artificial; identical to SEQ ID NO: 170894
  Synthetic oligonucleotide

SEQ ID NO: 648424 - DNA, 52 bp, Artificial; identical to SEQ ID NO: 208792
  Synthetic oligonucleotide

SEQ ID NO: 648425 - DNA, 55 bp, Artificial; identical to SEQ ID NO: 221432
  Synthetic oligonucleotide

SEQ ID NO: 648426 - DNA, 60 bp, Artificial; identical to SEQ ID NO: 145064
  Synthetic oligonucleotide

SEQ ID NO: 648427 - DNA, 55 bp, Artificial; identical to SEQ ID NO: 209352
  Synthetic oligonucleotide

SEQ ID NO: 648428 - DNA, 59 bp, Artificial; identical to SEQ ID NO: 177865
  Synthetic oligonucleotide

SEQ ID NO: 648429 - DNA, 53 bp, Artificial; identical to SEQ ID NO: 164903
  Synthetic oligonucleotide

SEQ ID NO: 648430 - DNA, 55 bp, Artificial; identical to SEQ ID NO: 181903
  Synthetic oligonucleotide

SEQ ID NO: 648431 - DNA, 50 bp, Artificial; identical to SEQ ID NO: 223832
  Synthetic oligonucleotide

SEQ ID NO: 648432 - DNA, 60 bp, Artificial; identical to SEQ ID NO: 237753
  Synthetic oligonucleotide

SEQ ID NO: 648433 - DNA, 54 bp, Artificial; identical to SEQ ID NO: 223555
  Synthetic oligonucleotide

SEQ ID NO: 648434 - DNA, 60 bp, Artificial; identical to SEQ ID NO: 224245
  Synthetic oligonucleotide

SEQ ID NO: 648435 - DNA, 51 bp, Artificial; identical to SEQ ID NO: 256335
  Synthetic oligonucleotide

SEQ ID NO: 648436 - DNA, 55 bp, Artificial; identical to SEQ ID NO: 254057
  Synthetic oligonucleotide

SEQ ID NO: 648437 - DNA, 55 bp, Artificial; identical to SEQ ID NO: 257413
  Synthetic oligonucleotide

SEQ ID NO: 648438 - DNA, 57 bp, Artificial; identical to SEQ ID NO: 266409
  Synthetic oligonucleotide

SEQ ID NO: 648439 - DNA, 60 bp, Artificial; identical to SEQ ID NO: 177864
  Synthetic oligonucleotide

SEQ ID NO: 648440 - DNA, 53 bp, Artificial; identical to SEQ ID NO: 185841
  Synthetic oligonucleotide

SEQ ID NO: 648441 - DNA, 60 bp, Artificial; identical to SEQ ID NO: 253342
  Synthetic oligonucleotide

SEQ ID NO: 648442 - DNA, 50 bp, Artificial; identical to SEQ ID NO: 150061
  Synthetic oligonucleotide

SEQ ID NO: 648443 - DNA, 53 bp, Artificial; identical to SEQ ID NO: 185832
  Synthetic oligonucleotide

SEQ ID NO: 648444 - DNA, 55 bp, Artificial; identical to SEQ ID NO: 166767
  Synthetic oligonucleotide

SEQ ID NO: 648445 - DNA, 54 bp, Artificial; identical to SEQ ID NO: 184991
  Synthetic oligonucleotide

SEQ ID NO: 648446 - DNA, 55 bp, Artificial; identical to SEQ ID NO: 244194
  Synthetic oligonucleotide

SEQ ID NO: 648447 - DNA, 57 bp, Artificial; identical to SEQ ID NO: 242340
  Synthetic oligonucleotide

SEQ ID NO: 648448 - DNA, 57 bp, Artificial; identical to SEQ ID NO: 210835
  Synthetic oligonucleotide

SEQ ID NO: 648449 - DNA, 55 bp, Artificial; identical to SEQ ID NO: 181901
  Synthetic oligonucleotide

SEQ ID NO: 648450 - DNA, 55 bp, Artificial; identical to SEQ ID NO: 244822
  Synthetic oligonucleotide

SEQ ID NO: 648451 - DNA, 52 bp, Artificial; identical to SEQ ID NO: 255509
  Synthetic oligonucleotide

SEQ ID NO: 648452 - DNA, 51 bp, Artificial; identical to SEQ ID NO: 243339
  Synthetic oligonucleotide

SEQ ID NO: 648453 - DNA, 60 bp, Artificial; identical to SEQ ID NO: 200521
  Synthetic oligonucleotide

SEQ ID NO: 648454 - DNA, 53 bp, Artificial; identical to SEQ ID NO: 149436
  Synthetic oligonucleotide

SEQ ID NO: 648455 - DNA, 53 bp, Artificial; identical to SEQ ID NO: 255375
  Synthetic oligonucleotide

SEQ ID NO: 648456 - DNA, 51 bp, Artificial; identical to SEQ ID NO: 257159
  Synthetic oligonucleotide

SEQ ID NO: 648457 - DNA, 56 bp, Artificial; identical to SEQ ID NO: 256330
  Synthetic oligonucleotide

SEQ ID NO: 648458 - DNA, 55 bp, Artificial; identical to SEQ ID NO: 265764
  Synthetic oligonucleotide

SEQ ID NO: 648459 - DNA, 55 bp, Artificial; identical to SEQ ID NO: 207234
  Synthetic oligonucleotide

SEQ ID NO: 648460 - DNA, 55 bp, Artificial; identical to SEQ ID NO: 252710
  Synthetic oligonucleotide

SEQ ID NO: 648461 - DNA, 60 bp, Artificial; identical to SEQ ID NO: 174469
  Synthetic oligonucleotide

SEQ ID NO: 648462 - DNA, 53 bp, Artificial; identical to SEQ ID NO: 208724
  Synthetic oligonucleotide

SEQ ID NO: 648463 - DNA, 55 bp, Artificial; identical to SEQ ID NO: 155972
  Synthetic oligonucleotide

SEQ ID NO: 648464 - DNA, 60 bp, Artificial; identical to SEQ ID NO: 141666
  Synthetic oligonucleotide

SEQ ID NO: 648465 - DNA, 55 bp, Artificial; identical to SEQ ID NO: 254060
  Synthetic oligonucleotide

SEQ ID NO: 648466 - DNA, 60 bp, Artificial; identical to SEQ ID NO: 248476
  Synthetic oligonucleotide

SEQ ID NO: 648467 - DNA, 52 bp, Artificial; identical to SEQ ID NO: 149548
  Synthetic oligonucleotide

SEQ ID NO: 648468 - DNA, 59 bp, Artificial; identical to SEQ ID NO: 201924
  Synthetic oligonucleotide

SEQ ID NO: 648469 - DNA, 54 bp, Artificial; identical to SEQ ID NO: 238557
  Synthetic oligonucleotide

SEQ ID NO: 648470 - DNA, 52 bp, Artificial; identical to SEQ ID NO: 203953
  Synthetic oligonucleotide

SEQ ID NO: 648471 - DNA, 60 bp, Artificial; identical to SEQ ID NO: 200520
  Synthetic oligonucleotide

SEQ ID NO: 648472 - DNA, 55 bp, Artificial; identical to SEQ ID NO: 217575
  Synthetic oligonucleotide

SEQ ID NO: 648473 - DNA, 60 bp, Artificial; identical to SEQ ID NO: 253353
  Synthetic oligonucleotide

SEQ ID NO: 648474 - DNA, 55 bp, Artificial; identical to SEQ ID NO: 188256
  Synthetic oligonucleotide

SEQ ID NO: 648475 - DNA, 55 bp, Artificial; identical to SEQ ID NO: 181898
  Synthetic oligonucleotide

SEQ ID NO: 648476 - DNA, 52 bp, Artificial; identical to SEQ ID NO: 188109
  Synthetic oligonucleotide

SEQ ID NO: 648477 - DNA, 55 bp, Artificial; identical to SEQ ID NO: 254061
  Synthetic oligonucleotide

SEQ ID NO: 648478 - DNA, 60 bp, Artificial; identical to SEQ ID NO: 153133
  Synthetic oligonucleotide

SEQ ID NO: 648479 - DNA, 50 bp, Artificial; identical to SEQ ID NO: 203050
  Synthetic oligonucleotide

SEQ ID NO: 648480 - DNA, 59 bp, Artificial; identical to SEQ ID NO: 177856
  Synthetic oligonucleotide

SEQ ID NO: 648481 - DNA, 52 bp, Artificial; identical to SEQ ID NO: 186067
  Synthetic oligonucleotide

SEQ ID NO: 648482 - DNA, 54 bp, Artificial; identical to SEQ ID NO: 223542
  Synthetic oligonucleotide

SEQ ID NO: 648483 - DNA, 55 bp, Artificial; identical to SEQ ID NO: 155974
  Synthetic oligonucleotide

SEQ ID NO: 648484 - DNA, 50 bp, Artificial; identical to SEQ ID NO: 241223
  Synthetic oligonucleotide

SEQ ID NO: 648485 - DNA, 55 bp, Artificial; identical to SEQ ID NO: 168246
  Synthetic oligonucleotide

SEQ ID NO: 648486 - DNA, 55 bp, Artificial; identical to SEQ ID NO: 144896
  Synthetic oligonucleotide

SEQ ID NO: 648487 - DNA, 55 bp, Artificial; identical to SEQ ID NO: 166765
  Synthetic oligonucleotide

SEQ ID NO: 648488 - DNA, 55 bp, Artificial; identical to SEQ ID NO: 212572
  Synthetic oligonucleotide

SEQ ID NO: 648489 - DNA, 50 bp, Artificial; identical to SEQ ID NO: 255945
  Synthetic oligonucleotide

SEQ ID NO: 648490 - DNA, 51 bp, Artificial; identical to SEQ ID NO: 165225
  Synthetic oligonucleotide

SEQ ID NO: 648491 - DNA, 60 bp, Artificial; identical to SEQ ID NO: 256286
  Synthetic oligonucleotide

SEQ ID NO: 648492 - DNA, 53 bp, Artificial; identical to SEQ ID NO: 169882
  Synthetic oligonucleotide

SEQ ID NO: 648493 - DNA, 52 bp, Artificial; identical to SEQ ID NO: 213022
  Synthetic oligonucleotide

SEQ ID NO: 648494 - DNA, 55 bp, Artificial; identical to SEQ ID NO: 155434
  Synthetic oligonucleotide

SEQ ID NO: 648495 - DNA, 53 bp, Artificial; identical to SEQ ID NO: 167063
  Synthetic oligonucleotide

SEQ ID NO: 648496 - DNA, 59 bp, Artificial; identical to SEQ ID NO: 242344
  Synthetic oligonucleotide

SEQ ID NO: 648497 - DNA, 58 bp, Artificial; identical to SEQ ID NO: 203335
  Synthetic oligonucleotide

SEQ ID NO: 648498 - DNA, 59 bp, Artificial; identical to SEQ ID NO: 247203
  Synthetic oligonucleotide

SEQ ID NO: 648499 - DNA, 56 bp, Artificial; identical to SEQ ID NO: 166197
  Synthetic oligonucleotide

SEQ ID NO: 648500 - DNA, 53 bp, Artificial; identical to SEQ ID NO: 170036
  Synthetic oligonucleotide

SEQ ID NO: 648501 - DNA, 51 bp, Artificial; identical to SEQ ID NO: 150985
  Synthetic oligonucleotide

SEQ ID NO: 648502 - DNA, 52 bp, Artificial; identical to SEQ ID NO: 258190
  Synthetic oligonucleotide

SEQ ID NO: 648503 - DNA, 58 bp, Artificial; identical to SEQ ID NO: 141667
  Synthetic oligonucleotide

SEQ ID NO: 648504 - DNA, 58 bp, Artificial; identical to SEQ ID NO: 203372
  Synthetic oligonucleotide

SEQ ID NO: 648505 - DNA, 55 bp, Artificial; identical to SEQ ID NO: 161842
  Synthetic oligonucleotide

SEQ ID NO: 648506 - DNA, 55 bp, Artificial; identical to SEQ ID NO: 218868
  Synthetic oligonucleotide

SEQ ID NO: 648507 - DNA, 55 bp, Artificial; identical to SEQ ID NO: 181896
  Synthetic oligonucleotide

SEQ ID NO: 648508 - DNA, 55 bp, Artificial; identical to SEQ ID NO: 171128
  Synthetic oligonucleotide

SEQ ID NO: 648509 - DNA, 55 bp, Artificial; identical to SEQ ID NO: 222604
  Synthetic oligonucleotide

SEQ ID NO: 648510 - DNA, 53 bp, Artificial; identical to SEQ ID NO: 167062
  Synthetic oligonucleotide

SEQ ID NO: 648511 - DNA, 54 bp, Artificial; identical to SEQ ID NO: 144508
  Synthetic oligonucleotide

SEQ ID NO: 648512 - DNA, 60 bp, Artificial; identical to SEQ ID NO: 224288
  Synthetic oligonucleotide

SEQ ID NO: 648513 - DNA, 50 bp, Artificial; identical to SEQ ID NO: 143890
  Synthetic oligonucleotide

SEQ ID NO: 648514 - DNA, 49 bp, Artificial; identical to SEQ ID NO: 207227
  Synthetic oligonucleotide

SEQ ID NO: 648515 - DNA, 55 bp, Artificial; identical to SEQ ID NO: 248826
  Synthetic oligonucleotide

SEQ ID NO: 648516 - DNA, 54 bp, Artificial; identical to SEQ ID NO: 242345
  Synthetic oligonucleotide

SEQ ID NO: 648517 - DNA, 58 bp, Artificial; identical to SEQ ID NO: 205189
  Synthetic oligonucleotide

SEQ ID NO: 648518 - DNA, 51 bp, Artificial; identical to SEQ ID NO: 188555
  Synthetic oligonucleotide

SEQ ID NO: 648519 - DNA, 55 bp, Artificial; identical to SEQ ID NO: 244092
  Synthetic oligonucleotide

SEQ ID NO: 648520 - DNA, 58 bp, Artificial; identical to SEQ ID NO: 159906
  Synthetic oligonucleotide

SEQ ID NO: 648521 - DNA, 55 bp, Artificial; identical to SEQ ID NO: 168240
  Synthetic oligonucleotide

SEQ ID NO: 648522 - DNA, 55 bp, Artificial; identical to SEQ ID NO: 224287
  Synthetic oligonucleotide

SEQ ID NO: 648523 - DNA, 55 bp, Artificial; identical to SEQ ID NO: 242346
  Synthetic oligonucleotide

SEQ ID NO: 648524 - DNA, 53 bp, Artificial; identical to SEQ ID NO: 185863
  Synthetic oligonucleotide

SEQ ID NO: 648525 - DNA, 55 bp, Artificial; identical to SEQ ID NO: 181936
  Synthetic oligonucleotide

SEQ ID NO: 648526 - DNA, 55 bp, Artificial; identical to SEQ ID NO: 254066
  Synthetic oligonucleotide

SEQ ID NO: 648527 - DNA, 58 bp, Artificial; identical to SEQ ID NO: 210718
  Synthetic oligonucleotide

SEQ ID NO: 648528 - DNA, 60 bp, Artificial; identical to SEQ ID NO: 262749
  Synthetic oligonucleotide

SEQ ID NO: 648529 - DNA, 58 bp, Artificial; identical to SEQ ID NO: 177853
  Synthetic oligonucleotide

SEQ ID NO: 648530 - DNA, 55 bp, Artificial; identical to SEQ ID NO: 144899
  Synthetic oligonucleotide

SEQ ID NO: 648531 - DNA, 55 bp, Artificial; identical to SEQ ID NO: 239867
  Synthetic oligonucleotide

SEQ ID NO: 648532 - DNA, 58 bp, Artificial; identical to SEQ ID NO: 266425
  Synthetic oligonucleotide

SEQ ID NO: 648533 - DNA, 53 bp, Artificial; identical to SEQ ID NO: 185861
  Synthetic oligonucleotide

SEQ ID NO: 648534 - DNA, 57 bp, Artificial; identical to SEQ ID NO: 150949
  Synthetic oligonucleotide

SEQ ID NO: 648535 - DNA, 58 bp, Artificial; identical to SEQ ID NO: 200519
  Synthetic oligonucleotide

SEQ ID NO: 648536 - DNA, 54 bp, Artificial; identical to SEQ ID NO: 179634
  Synthetic oligonucleotide

SEQ ID NO: 648537 - DNA, 53 bp, Artificial; identical to SEQ ID NO: 160466
  Synthetic oligonucleotide

SEQ ID NO: 648538 - DNA, 58 bp, Artificial; identical to SEQ ID NO: 177851
  Synthetic oligonucleotide

SEQ ID NO: 648539 - DNA, 60 bp, Artificial; identical to SEQ ID NO: 150960
  Synthetic oligonucleotide

SEQ ID NO: 648540 - DNA, 55 bp, Artificial; identical to SEQ ID NO: 244893
  Synthetic oligonucleotide

SEQ ID NO: 648541 - DNA, 54 bp, Artificial; identical to SEQ ID NO: 209351
  Synthetic oligonucleotide

SEQ ID NO: 648542 - DNA, 55 bp, Artificial; identical to SEQ ID NO: 221464
  Synthetic oligonucleotide

SEQ ID NO: 648543 - DNA, 55 bp, Artificial; identical to SEQ ID NO: 207226
  Synthetic oligonucleotide

SEQ ID NO: 648544 - DNA, 60 bp, Artificial; identical to SEQ ID NO: 170955
  Synthetic oligonucleotide

SEQ ID NO: 648545 - DNA, 55 bp, Artificial; identical to SEQ ID NO: 248823
  Synthetic oligonucleotide

SEQ ID NO: 648546 - DNA, 52 bp, Artificial; identical to SEQ ID NO: 152450
  Synthetic oligonucleotide

SEQ ID NO: 648547 - DNA, 59 bp, Artificial; identical to SEQ ID NO: 247357
  Synthetic oligonucleotide

SEQ ID NO: 648548 - DNA, 53 bp, Artificial; identical to SEQ ID NO: 167061
  Synthetic oligonucleotide

SEQ ID NO: 648549 - DNA, 52 bp, Artificial; identical to SEQ ID NO: 186109
  Synthetic oligonucleotide

SEQ ID NO: 648550 - DNA, 52 bp, Artificial; identical to SEQ ID NO: 255505
  Synthetic oligonucleotide

SEQ ID NO: 648551 - DNA, 60 bp, Artificial; identical to SEQ ID NO: 200515
  Synthetic oligonucleotide

SEQ ID NO: 648552 - DNA, 54 bp, Artificial; identical to SEQ ID NO: 187991
  Synthetic oligonucleotide

SEQ ID NO: 648553 - DNA, 58 bp, Artificial; identical to SEQ ID NO: 209182
  Synthetic oligonucleotide

SEQ ID NO: 648554 - DNA, 52 bp, Artificial; identical to SEQ ID NO: 237062
  Synthetic oligonucleotide

SEQ ID NO: 648555 - DNA, 52 bp, Artificial; identical to SEQ ID NO: 142634
  Synthetic oligonucleotide

SEQ ID NO: 648556 - DNA, 60 bp, Artificial; identical to SEQ ID NO: 177850
  Synthetic oligonucleotide

SEQ ID NO: 648557 - DNA, 55 bp, Artificial; identical to SEQ ID NO: 254069
  Synthetic oligonucleotide

SEQ ID NO: 648558 - DNA, 60 bp, Artificial; identical to SEQ ID NO: 207803
  Synthetic oligonucleotide

SEQ ID NO: 648559 - DNA, 60 bp, Artificial; identical to SEQ ID NO: 222849
  Synthetic oligonucleotide

SEQ ID NO: 648560 - DNA, 52 bp, Artificial; identical to SEQ ID NO: 216720
  Synthetic oligonucleotide

SEQ ID NO: 648561 - DNA, 55 bp, Artificial; identical to SEQ ID NO: 142189
  Synthetic oligonucleotide

SEQ ID NO: 648562 - DNA, 55 bp, Artificial; identical to SEQ ID NO: 141669
  Synthetic oligonucleotide

SEQ ID NO: 648563 - DNA, 55 bp, Artificial; identical to SEQ ID NO: 171153
  Synthetic oligonucleotide

SEQ ID NO: 648564 - DNA, 55 bp, Artificial; identical to SEQ ID NO: 198507
  Synthetic oligonucleotide

SEQ ID NO: 648565 - DNA, 60 bp, Artificial; identical to SEQ ID NO: 150965
  Synthetic oligonucleotide

SEQ ID NO: 648566 - DNA, 55 bp, Artificial; identical to SEQ ID NO: 244902
  Synthetic oligonucleotide

SEQ ID NO: 648567 - DNA, 52 bp, Artificial; identical to SEQ ID NO: 191195
  Synthetic oligonucleotide

SEQ ID NO: 648568 - DNA, 55 bp, Artificial; identical to SEQ ID NO: 148000
  Synthetic oligonucleotide

SEQ ID NO: 648569 - DNA, 60 bp, Artificial; identical to SEQ ID NO: 253364
  Synthetic oligonucleotide

SEQ ID NO: 648570 - DNA, 55 bp, Artificial; identical to SEQ ID NO: 148101
  Synthetic oligonucleotide

SEQ ID NO: 648571 - DNA, 53 bp, Artificial; identical to SEQ ID NO: 187186
  Synthetic oligonucleotide

SEQ ID NO: 648572 - DNA, 55 bp, Artificial; identical to SEQ ID NO: 198506
  Synthetic oligonucleotide

SEQ ID NO: 648573 - DNA, 59 bp, Artificial; identical to SEQ ID NO: 187185
  Synthetic oligonucleotide

SEQ ID NO: 648574 - DNA, 55 bp, Artificial; identical to SEQ ID NO: 173573
  Synthetic oligonucleotide

SEQ ID NO: 648575 - DNA, 55 bp, Artificial; identical to SEQ ID NO: 239840
  Synthetic oligonucleotide

SEQ ID NO: 648576 - DNA, 52 bp, Artificial; identical to SEQ ID NO: 237063
  Synthetic oligonucleotide

SEQ ID NO: 648577 - DNA, 55 bp, Artificial; identical to SEQ ID NO: 244916
  Synthetic oligonucleotide

SEQ ID NO: 648578 - DNA, 60 bp, Artificial; identical to SEQ ID NO: 153110
  Synthetic oligonucleotide

SEQ ID NO: 648579 - DNA, 60 bp, Artificial; identical to SEQ ID NO: 200504
  Synthetic oligonucleotide

SEQ ID NO: 648580 - DNA, 55 bp, Artificial; identical to SEQ ID NO: 166761
  Synthetic oligonucleotide

SEQ ID NO: 648581 - DNA, 55 bp, Artificial; identical to SEQ ID NO: 254070
  Synthetic oligonucleotide

SEQ ID NO: 648582 - DNA, 59 bp, Artificial; identical to SEQ ID NO: 243489
  Synthetic oligonucleotide

SEQ ID NO: 648583 - DNA, 53 bp, Artificial; identical to SEQ ID NO: 141255
  Synthetic oligonucleotide

SEQ ID NO: 648584 - DNA, 55 bp, Artificial; identical to SEQ ID NO: 181928
  Synthetic oligonucleotide

SEQ ID NO: 648585 - DNA, 60 bp, Artificial; identical to SEQ ID NO: 216915
  Synthetic oligonucleotide

SEQ ID NO: 648586 - DNA, 52 bp, Artificial; identical to SEQ ID NO: 211612
  Synthetic oligonucleotide

SEQ ID NO: 648587 - DNA, 56 bp, Artificial; identical to SEQ ID NO: 200492
  Synthetic oligonucleotide

SEQ ID NO: 648588 - DNA, 55 bp, Artificial; identical to SEQ ID NO: 153385
  Synthetic oligonucleotide

SEQ ID NO: 648589 - DNA, 59 bp, Artificial; identical to SEQ ID NO: 151010
  Synthetic oligonucleotide

SEQ ID NO: 648590 - DNA, 52 bp, Artificial; identical to SEQ ID NO: 142633
  Synthetic oligonucleotide

SEQ ID NO: 648591 - DNA, 59 bp, Artificial; identical to SEQ ID NO: 187183
  Synthetic oligonucleotide

SEQ ID NO: 648592 - DNA, 58 bp, Artificial; identical to SEQ ID NO: 253586
  Synthetic oligonucleotide

SEQ ID NO: 648593 - DNA, 55 bp, Artificial; identical to SEQ ID NO: 248814
  Synthetic oligonucleotide

SEQ ID NO: 648594 - DNA, 60 bp, Artificial; identical to SEQ ID NO: 243490
  Synthetic oligonucleotide

SEQ ID NO: 648595 - DNA, 52 bp, Artificial; identical to SEQ ID NO: 170120
  Synthetic oligonucleotide

SEQ ID NO: 648596 - DNA, 55 bp, Artificial; identical to SEQ ID NO: 155925
  Synthetic oligonucleotide

SEQ ID NO: 648597 - DNA, 51 bp, Artificial; identical to SEQ ID NO: 161387
  Synthetic oligonucleotide

SEQ ID NO: 648598 - DNA, 60 bp, Artificial; identical to SEQ ID NO: 219641
  Synthetic oligonucleotide

SEQ ID NO: 648599 - DNA, 60 bp, Artificial; identical to SEQ ID NO: 178457
  Synthetic oligonucleotide

SEQ ID NO: 648600 - DNA, 53 bp, Artificial; identical to SEQ ID NO: 246314
  Synthetic oligonucleotide

SEQ ID NO: 648601 - DNA, 55 bp, Artificial; identical to SEQ ID NO: 187182
  Synthetic oligonucleotide

SEQ ID NO: 648602 - DNA, 55 bp, Artificial; identical to SEQ ID NO: 151749
  Synthetic oligonucleotide

SEQ ID NO: 648603 - DNA, 55 bp, Artificial; identical to SEQ ID NO: 254051
  Synthetic oligonucleotide

SEQ ID NO: 648604 - DNA, 57 bp, Artificial; identical to SEQ ID NO: 237756
  Synthetic oligonucleotide

SEQ ID NO: 648605 - DNA, 60 bp, Artificial; identical to SEQ ID NO: 224276
  Synthetic oligonucleotide

SEQ ID NO: 648606 - DNA, 53 bp, Artificial; identical to SEQ ID NO: 240835
  Synthetic oligonucleotide

SEQ ID NO: 648607 - DNA, 54 bp, Artificial; identical to SEQ ID NO: 247206
  Synthetic oligonucleotide

SEQ ID NO: 648608 - DNA, 51 bp, Artificial; identical to SEQ ID NO: 194154
  Synthetic oligonucleotide

SEQ ID NO: 648609 - DNA, 60 bp, Artificial; identical to SEQ ID NO: 151018
  Synthetic oligonucleotide

SEQ ID NO: 648610 - DNA, 52 bp, Artificial; identical to SEQ ID NO: 186101
  Synthetic oligonucleotide

SEQ ID NO: 648611 - DNA, 54 bp, Artificial; identical to SEQ ID NO: 178456
  Synthetic oligonucleotide

SEQ ID NO: 648612 - DNA, 59 bp, Artificial; identical to SEQ ID NO: 191153
  Synthetic oligonucleotide

SEQ ID NO: 648613 - DNA, 55 bp, Artificial; identical to SEQ ID NO: 151748
  Synthetic oligonucleotide

SEQ ID NO: 648614 - DNA, 57 bp, Artificial; identical to SEQ ID NO: 247533
  Synthetic oligonucleotide

SEQ ID NO: 648615 - DNA, 55 bp, Artificial; identical to SEQ ID NO: 165589
  Synthetic oligonucleotide

SEQ ID NO: 648616 - DNA, 60 bp, Artificial; identical to SEQ ID NO: 206857
  Synthetic oligonucleotide

SEQ ID NO: 648617 - DNA, 56 bp, Artificial; identical to SEQ ID NO: 142678
  Synthetic oligonucleotide

SEQ ID NO: 648618 - DNA, 52 bp, Artificial; identical to SEQ ID NO: 149564
  Synthetic oligonucleotide

SEQ ID NO: 648619 - DNA, 60 bp, Artificial; identical to SEQ ID NO: 248532
  Synthetic oligonucleotide

SEQ ID NO: 648620 - DNA, 54 bp, Artificial; identical to SEQ ID NO: 152546
  Synthetic oligonucleotide

SEQ ID NO: 648621 - DNA, 55 bp, Artificial; identical to SEQ ID NO: 179560
  Synthetic oligonucleotide

SEQ ID NO: 648622 - DNA, 53 bp, Artificial; identical to SEQ ID NO: 199822
  Synthetic oligonucleotide

SEQ ID NO: 648623 - DNA, 55 bp, Artificial; identical to SEQ ID NO: 244717
  Synthetic oligonucleotide

SEQ ID NO: 648624 - DNA, 53 bp, Artificial; identical to SEQ ID NO: 187181
  Synthetic oligonucleotide

SEQ ID NO: 648625 - DNA, 53 bp, Artificial; identical to SEQ ID NO: 155531
  Synthetic oligonucleotide

SEQ ID NO: 648626 - DNA, 53 bp, Artificial; identical to SEQ ID NO: 142676
  Synthetic oligonucleotide

SEQ ID NO: 648627 - DNA, 55 bp, Artificial; identical to SEQ ID NO: 154380
  Synthetic oligonucleotide

SEQ ID NO: 648628 - DNA, 58 bp, Artificial; identical to SEQ ID NO: 256200
  Synthetic oligonucleotide

SEQ ID NO: 648629 - DNA, 55 bp, Artificial; identical to SEQ ID NO: 181922
  Synthetic oligonucleotide

SEQ ID NO: 648630 - DNA, 54 bp, Artificial; identical to SEQ ID NO: 209578
  Synthetic oligonucleotide

SEQ ID NO: 648631 - DNA, 58 bp, Artificial; identical to SEQ ID NO: 209846
  Synthetic oligonucleotide

SEQ ID NO: 648632 - DNA, 50 bp, Artificial; identical to SEQ ID NO: 149972
  Synthetic oligonucleotide

SEQ ID NO: 648633 - DNA, 50 bp, Artificial; identical to SEQ ID NO: 266328
  Synthetic oligonucleotide

SEQ ID NO: 648634 - DNA, 58 bp, Artificial; identical to SEQ ID NO: 243494
  Synthetic oligonucleotide

SEQ ID NO: 648635 - DNA, 60 bp, Artificial; identical to SEQ ID NO: 242352
  Synthetic oligonucleotide

SEQ ID NO: 648636 - DNA, 60 bp, Artificial; identical to SEQ ID NO: 200481
  Synthetic oligonucleotide

SEQ ID NO: 648637 - DNA, 54 bp, Artificial; identical to SEQ ID NO: 244719
  Synthetic oligonucleotide

SEQ ID NO: 648638 - DNA, 55 bp, Artificial; identical to SEQ ID NO: 181919
  Synthetic oligonucleotide

SEQ ID NO: 648639 - DNA, 52 bp, Artificial; identical to SEQ ID NO: 199935
  Synthetic oligonucleotide

SEQ ID NO: 648640 - DNA, 60 bp, Artificial; identical to SEQ ID NO: 167702
  Synthetic oligonucleotide

SEQ ID NO: 648641 - DNA, 52 bp, Artificial; identical to SEQ ID NO: 206467
  Synthetic oligonucleotide

SEQ ID NO: 648642 - DNA, 55 bp, Artificial; identical to SEQ ID NO: 191930
  Synthetic oligonucleotide

SEQ ID NO: 648643 - DNA, 56 bp, Artificial; identical to SEQ ID NO: 242354
  Synthetic oligonucleotide

SEQ ID NO: 648644 - DNA, 53 bp, Artificial; identical to SEQ ID NO: 220756
  Synthetic oligonucleotide

SEQ ID NO: 648645 - DNA, 51 bp, Artificial; identical to SEQ ID NO: 169041
  Synthetic oligonucleotide

SEQ ID NO: 648646 - DNA, 54 bp, Artificial; identical to SEQ ID NO: 167177
  Synthetic oligonucleotide

SEQ ID NO: 648647 - DNA, 53 bp, Artificial; identical to SEQ ID NO: 199769
  Synthetic oligonucleotide

SEQ ID NO: 648648 - DNA, 55 bp, Artificial; identical to SEQ ID NO: 181918
  Synthetic oligonucleotide

SEQ ID NO: 648649 - DNA, 55 bp, Artificial; identical to SEQ ID NO: 166756
  Synthetic oligonucleotide

SEQ ID NO: 648650 - DNA, 55 bp, Artificial; identical to SEQ ID NO: 169263
  Synthetic oligonucleotide

SEQ ID NO: 648651 - DNA, 55 bp, Artificial; identical to SEQ ID NO: 209349
  Synthetic oligonucleotide

SEQ ID NO: 648652 - DNA, 52 bp, Artificial; identical to SEQ ID NO: 205699
  Synthetic oligonucleotide

SEQ ID NO: 648653 - DNA, 54 bp, Artificial; identical to SEQ ID NO: 187995
  Synthetic oligonucleotide

SEQ ID NO: 648654 - DNA, 56 bp, Artificial; identical to SEQ ID NO: 151280
  Synthetic oligonucleotide

SEQ ID NO: 648655 - DNA, 57 bp, Artificial; identical to SEQ ID NO: 243495
  Synthetic oligonucleotide

SEQ ID NO: 648656 - DNA, 60 bp, Artificial; identical to SEQ ID NO: 151019
  Synthetic oligonucleotide

SEQ ID NO: 648657 - DNA, 52 bp, Artificial; identical to SEQ ID NO: 152997
  Synthetic oligonucleotide

SEQ ID NO: 648658 - DNA, 53 bp, Artificial; identical to SEQ ID NO: 191030
  Synthetic oligonucleotide

SEQ ID NO: 648659 - DNA, 53 bp, Artificial; identical to SEQ ID NO: 149386
  Synthetic oligonucleotide

SEQ ID NO: 648660 - DNA, 55 bp, Artificial; identical to SEQ ID NO: 191117
  Synthetic oligonucleotide

SEQ ID NO: 648661 - DNA, 53 bp, Artificial; identical to SEQ ID NO: 167068
  Synthetic oligonucleotide

SEQ ID NO: 648662 - DNA, 52 bp, Artificial; identical to SEQ ID NO: 167090
  Synthetic oligonucleotide

SEQ ID NO: 648663 - DNA, 60 bp, Artificial; identical to SEQ ID NO: 237716
  Synthetic oligonucleotide

SEQ ID NO: 648664 - DNA, 55 bp, Artificial; identical to SEQ ID NO: 166754
  Synthetic oligonucleotide

SEQ ID NO: 648665 - DNA, 55 bp, Artificial; identical to SEQ ID NO: 172968
  Synthetic oligonucleotide

SEQ ID NO: 648666 - DNA, 55 bp, Artificial; identical to SEQ ID NO: 244720
  Synthetic oligonucleotide

SEQ ID NO: 648667 - DNA, 54 bp, Artificial; identical to SEQ ID NO: 234437
  Synthetic oligonucleotide

SEQ ID NO: 648668 - DNA, 55 bp, Artificial; identical to SEQ ID NO: 266184
  Synthetic oligonucleotide

SEQ ID NO: 648669 - DNA, 60 bp, Artificial; identical to SEQ ID NO: 256189
  Synthetic oligonucleotide

SEQ ID NO: 648670 - DNA, 58 bp, Artificial; identical to SEQ ID NO: 239356
  Synthetic oligonucleotide

SEQ ID NO: 648671 - DNA, 55 bp, Artificial; identical to SEQ ID NO: 257889
  Synthetic oligonucleotide

SEQ ID NO: 648672 - DNA, 57 bp, Artificial; identical to SEQ ID NO: 191728
  Synthetic oligonucleotide

SEQ ID NO: 648673 - DNA, 51 bp, Artificial; identical to SEQ ID NO: 210328
  Synthetic oligonucleotide

SEQ ID NO: 648674 - DNA, 60 bp, Artificial; identical to SEQ ID NO: 151022
  Synthetic oligonucleotide

SEQ ID NO: 648675 - DNA, 59 bp, Artificial; identical to SEQ ID NO: 151027
  Synthetic oligonucleotide

SEQ ID NO: 648676 - DNA, 56 bp, Artificial; identical to SEQ ID NO: 248578
  Synthetic oligonucleotide

SEQ ID NO: 648677 - DNA, 60 bp, Artificial; identical to SEQ ID NO: 200644
  Synthetic oligonucleotide

SEQ ID NO: 648678 - DNA, 51 bp, Artificial; identical to SEQ ID NO: 233863
  Synthetic oligonucleotide

SEQ ID NO: 648679 - DNA, 55 bp, Artificial; identical to SEQ ID NO: 239855
  Synthetic oligonucleotide

SEQ ID NO: 648680 - DNA, 53 bp, Artificial; identical to SEQ ID NO: 150988
  Synthetic oligonucleotide

SEQ ID NO: 648681 - DNA, 60 bp, Artificial; identical to SEQ ID NO: 178447
  Synthetic oligonucleotide

SEQ ID NO: 648682 - DNA, 55 bp, Artificial; identical to SEQ ID NO: 155926
  Synthetic oligonucleotide

SEQ ID NO: 648683 - DNA, 55 bp, Artificial; identical to SEQ ID NO: 182046
  Synthetic oligonucleotide

SEQ ID NO: 648684 - DNA, 60 bp, Artificial; identical to SEQ ID NO: 178446
  Synthetic oligonucleotide

SEQ ID NO: 648685 - DNA, 51 bp, Artificial; identical to SEQ ID NO: 154640
  Synthetic oligonucleotide

SEQ ID NO: 648686 - DNA, 58 bp, Artificial; identical to SEQ ID NO: 187180
  Synthetic oligonucleotide

SEQ ID NO: 648687 - DNA, 55 bp, Artificial; identical to SEQ ID NO: 244730
  Synthetic oligonucleotide

SEQ ID NO: 648688 - DNA, 58 bp, Artificial; identical to SEQ ID NO: 200643
  Synthetic oligonucleotide

SEQ ID NO: 648689 - DNA, 50 bp, Artificial; identical to SEQ ID NO: 149963
  Synthetic oligonucleotide

SEQ ID NO: 648690 - DNA, 55 bp, Artificial; identical to SEQ ID NO: 198498
  Synthetic oligonucleotide

SEQ ID NO: 648691 - DNA, 58 bp, Artificial; identical to SEQ ID NO: 165556
  Synthetic oligonucleotide

SEQ ID NO: 648692 - DNA, 55 bp, Artificial; identical to SEQ ID NO: 202286
  Synthetic oligonucleotide

SEQ ID NO: 648693 - DNA, 55 bp, Artificial; identical to SEQ ID NO: 148052
  Synthetic oligonucleotide

SEQ ID NO: 648694 - DNA, 54 bp, Artificial; identical to SEQ ID NO: 243062
  Synthetic oligonucleotide

SEQ ID NO: 648695 - DNA, 52 bp, Artificial; identical to SEQ ID NO: 195039
  Synthetic oligonucleotide

SEQ ID NO: 648696 - DNA, 55 bp, Artificial; identical to SEQ ID NO: 198497
  Synthetic oligonucleotide

SEQ ID NO: 648697 - DNA, 55 bp, Artificial; identical to SEQ ID NO: 148088
  Synthetic oligonucleotide

SEQ ID NO: 648698 - DNA, 55 bp, Artificial; identical to SEQ ID NO: 182044
  Synthetic oligonucleotide

SEQ ID NO: 648699 - DNA, 55 bp, Artificial; identical to SEQ ID NO: 244350
  Synthetic oligonucleotide

SEQ ID NO: 648700 - DNA, 58 bp, Artificial; identical to SEQ ID NO: 150998
  Synthetic oligonucleotide

SEQ ID NO: 648701 - DNA, 51 bp, Artificial; identical to SEQ ID NO: 162375
  Synthetic oligonucleotide

SEQ ID NO: 648702 - DNA, 56 bp, Artificial; identical to SEQ ID NO: 206861
  Synthetic oligonucleotide

SEQ ID NO: 648703 - DNA, 50 bp, Artificial; identical to SEQ ID NO: 253477
  Synthetic oligonucleotide

SEQ ID NO: 648704 - DNA, 53 bp, Artificial; identical to SEQ ID NO: 170057
  Synthetic oligonucleotide

SEQ ID NO: 648705 - DNA, 55 bp, Artificial; identical to SEQ ID NO: 209348
  Synthetic oligonucleotide

SEQ ID NO: 648706 - DNA, 58 bp, Artificial; identical to SEQ ID NO: 209844
  Synthetic oligonucleotide

SEQ ID NO: 648707 - DNA, 57 bp, Artificial; identical to SEQ ID NO: 170901
  Synthetic oligonucleotide

SEQ ID NO: 648708 - DNA, 58 bp, Artificial; identical to SEQ ID NO: 151004
  Synthetic oligonucleotide

SEQ ID NO: 648709 - DNA, 57 bp, Artificial; identical to SEQ ID NO: 165545
  Synthetic oligonucleotide

SEQ ID NO: 648710 - DNA, 60 bp, Artificial; identical to SEQ ID NO: 178436
  Synthetic oligonucleotide

SEQ ID NO: 648711 - DNA, 54 bp, Artificial; identical to SEQ ID NO: 240621
  Synthetic oligonucleotide

SEQ ID NO: 648712 - DNA, 60 bp, Artificial; identical to SEQ ID NO: 156454
  Synthetic oligonucleotide

SEQ ID NO: 648713 - DNA, 51 bp, Artificial; identical to SEQ ID NO: 246637
  Synthetic oligonucleotide

SEQ ID NO: 648714 - DNA, 55 bp, Artificial; identical to SEQ ID NO: 182041
  Synthetic oligonucleotide

SEQ ID NO: 648715 - DNA, 53 bp, Artificial; identical to SEQ ID NO: 160462
  Synthetic oligonucleotide

SEQ ID NO: 648716 - DNA, 59 bp, Artificial; identical to SEQ ID NO: 243496
  Synthetic oligonucleotide

SEQ ID NO: 648717 - DNA, 60 bp, Artificial; identical to SEQ ID NO: 152995
  Synthetic oligonucleotide

SEQ ID NO: 648718 - DNA, 53 bp, Artificial; identical to SEQ ID NO: 178485
  Synthetic oligonucleotide

SEQ ID NO: 648719 - DNA, 60 bp, Artificial; identical to SEQ ID NO: 224279
  Synthetic oligonucleotide

SEQ ID NO: 648720 - DNA, 60 bp, Artificial; identical to SEQ ID NO: 210717
  Synthetic oligonucleotide

SEQ ID NO: 648721 - DNA, 51 bp, Artificial; identical to SEQ ID NO: 160935
  Synthetic oligonucleotide

SEQ ID NO: 648722 - DNA, 57 bp, Artificial; identical to SEQ ID NO: 242524
  Synthetic oligonucleotide

SEQ ID NO: 648723 - DNA, 55 bp, Artificial; identical to SEQ ID NO: 191717
  Synthetic oligonucleotide

SEQ ID NO: 648724 - DNA, 55 bp, Artificial; identical to SEQ ID NO: 233485
  Synthetic oligonucleotide

SEQ ID NO: 648725 - DNA, 50 bp, Artificial; identical to SEQ ID NO: 169478
  Synthetic oligonucleotide

SEQ ID NO: 648726 - DNA, 54 bp, Artificial; identical to SEQ ID NO: 190637
  Synthetic oligonucleotide

SEQ ID NO: 648727 - DNA, 57 bp, Artificial; identical to SEQ ID NO: 209843
  Synthetic oligonucleotide

SEQ ID NO: 648728 - DNA, 56 bp, Artificial; identical to SEQ ID NO: 178484
  Synthetic oligonucleotide

SEQ ID NO: 648729 - DNA, 55 bp, Artificial; identical to SEQ ID NO: 198496
  Synthetic oligonucleotide

SEQ ID NO: 648730 - DNA, 60 bp, Artificial; identical to SEQ ID NO: 178482
  Synthetic oligonucleotide

SEQ ID NO: 648731 - DNA, 55 bp, Artificial; identical to SEQ ID NO: 154383
  Synthetic oligonucleotide

SEQ ID NO: 648732 - DNA, 55 bp, Artificial; identical to SEQ ID NO: 266195
  Synthetic oligonucleotide

SEQ ID NO: 648733 - DNA, 51 bp, Artificial; identical to SEQ ID NO: 213041
  Synthetic oligonucleotide

SEQ ID NO: 648734 - DNA, 53 bp, Artificial; identical to SEQ ID NO: 208709
  Synthetic oligonucleotide

SEQ ID NO: 648735 - DNA, 50 bp, Artificial; identical to SEQ ID NO: 218521
  Synthetic oligonucleotide

SEQ ID NO: 648736 - DNA, 55 bp, Artificial; identical to SEQ ID NO: 207218
  Synthetic oligonucleotide

SEQ ID NO: 648737 - DNA, 57 bp, Artificial; identical to SEQ ID NO: 243497
  Synthetic oligonucleotide

SEQ ID NO: 648738 - DNA, 53 bp, Artificial; identical to SEQ ID NO: 185874
  Synthetic oligonucleotide

SEQ ID NO: 648739 - DNA, 59 bp, Artificial; identical to SEQ ID NO: 242305
  Synthetic oligonucleotide

SEQ ID NO: 648740 - DNA, 55 bp, Artificial; identical to SEQ ID NO: 211372
  Synthetic oligonucleotide

SEQ ID NO: 648741 - DNA, 53 bp, Artificial; identical to SEQ ID NO: 212987
  Synthetic oligonucleotide

SEQ ID NO: 648742 - DNA, 55 bp, Artificial; identical to SEQ ID NO: 257905
  Synthetic oligonucleotide

SEQ ID NO: 648743 - DNA, 55 bp, Artificial; identical to SEQ ID NO: 160227
  Synthetic oligonucleotide

SEQ ID NO: 648744 - DNA, 60 bp, Artificial; identical to SEQ ID NO: 141670
  Synthetic oligonucleotide

SEQ ID NO: 648745 - DNA, 55 bp, Artificial; identical to SEQ ID NO: 174653
  Synthetic oligonucleotide

SEQ ID NO: 648746 - DNA, 52 bp, Artificial; identical to SEQ ID NO: 223678
  Synthetic oligonucleotide

SEQ ID NO: 648747 - DNA, 54 bp, Artificial; identical to SEQ ID NO: 208630
  Synthetic oligonucleotide

SEQ ID NO: 648748 - DNA, 57 bp, Artificial; identical to SEQ ID NO: 203059
  Synthetic oligonucleotide

SEQ ID NO: 648749 - DNA, 55 bp, Artificial; identical to SEQ ID NO: 147480
  Synthetic oligonucleotide

SEQ ID NO: 648750 - DNA, 50 bp, Artificial; identical to SEQ ID NO: 187154
  Synthetic oligonucleotide

SEQ ID NO: 648751 - DNA, 54 bp, Artificial; identical to SEQ ID NO: 161298
  Synthetic oligonucleotide

SEQ ID NO: 648752 - DNA, 57 bp, Artificial; identical to SEQ ID NO: 201169
  Synthetic oligonucleotide

SEQ ID NO: 648753 - DNA, 60 bp, Artificial; identical to SEQ ID NO: 178479
  Synthetic oligonucleotide

SEQ ID NO: 648754 - DNA, 54 bp, Artificial; identical to SEQ ID NO: 221662
  Synthetic oligonucleotide

SEQ ID NO: 648755 - DNA, 56 bp, Artificial; identical to SEQ ID NO: 200642
  Synthetic oligonucleotide

SEQ ID NO: 648756 - DNA, 52 bp, Artificial; identical to SEQ ID NO: 186091
  Synthetic oligonucleotide

SEQ ID NO: 648757 - DNA, 50 bp, Artificial; identical to SEQ ID NO: 176809
  Synthetic oligonucleotide

SEQ ID NO: 648758 - DNA, 60 bp, Artificial; identical to SEQ ID NO: 188979
  Synthetic oligonucleotide

SEQ ID NO: 648759 - DNA, 51 bp, Artificial; identical to SEQ ID NO: 247992
  Synthetic oligonucleotide

SEQ ID NO: 648760 - DNA, 56 bp, Artificial; identical to SEQ ID NO: 190287
  Synthetic oligonucleotide

SEQ ID NO: 648761 - DNA, 60 bp, Artificial; identical to SEQ ID NO: 201880
  Synthetic oligonucleotide

SEQ ID NO: 648762 - DNA, 55 bp, Artificial; identical to SEQ ID NO: 155929
  Synthetic oligonucleotide

SEQ ID NO: 648763 - DNA, 54 bp, Artificial; identical to SEQ ID NO: 222689
  Synthetic oligonucleotide

SEQ ID NO: 648764 - DNA, 50 bp, Artificial; identical to SEQ ID NO: 155655
  Synthetic oligonucleotide

SEQ ID NO: 648765 - DNA, 57 bp, Artificial; identical to SEQ ID NO: 203330
  Synthetic oligonucleotide

SEQ ID NO: 648766 - DNA, 55 bp, Artificial; identical to SEQ ID NO: 191120
  Synthetic oligonucleotide

SEQ ID NO: 648767 - DNA, 55 bp, Artificial; identical to SEQ ID NO: 266197
  Synthetic oligonucleotide

SEQ ID NO: 648768 - DNA, 52 bp, Artificial; identical to SEQ ID NO: 223676
  Synthetic oligonucleotide

SEQ ID NO: 648769 - DNA, 54 bp, Artificial; identical to SEQ ID NO: 258050
  Synthetic oligonucleotide

SEQ ID NO: 648770 - DNA, 55 bp, Artificial; identical to SEQ ID NO: 171152
  Synthetic oligonucleotide

SEQ ID NO: 648771 - DNA, 51 bp, Artificial; identical to SEQ ID NO: 192153
  Synthetic oligonucleotide

SEQ ID NO: 648772 - DNA, 55 bp, Artificial; identical to SEQ ID NO: 173640
  Synthetic oligonucleotide

SEQ ID NO: 648773 - DNA, 52 bp, Artificial; identical to SEQ ID NO: 255503
  Synthetic oligonucleotide

SEQ ID NO: 648774 - DNA, 59 bp, Artificial; identical to SEQ ID NO: 162425
  Synthetic oligonucleotide

SEQ ID NO: 648775 - DNA, 60 bp, Artificial; identical to SEQ ID NO: 210716
  Synthetic oligonucleotide

SEQ ID NO: 648776 - DNA, 51 bp, Artificial; identical to SEQ ID NO: 187179
  Synthetic oligonucleotide

SEQ ID NO: 648777 - DNA, 60 bp, Artificial; identical to SEQ ID NO: 248523
  Synthetic oligonucleotide

SEQ ID NO: 648778 - DNA, 53 bp, Artificial; identical to SEQ ID NO: 246312
  Synthetic oligonucleotide

SEQ ID NO: 648779 - DNA, 55 bp, Artificial; identical to SEQ ID NO: 249430
  Synthetic oligonucleotide

SEQ ID NO: 648780 - DNA, 51 bp, Artificial; identical to SEQ ID NO: 141335
  Synthetic oligonucleotide

SEQ ID NO: 648781 - DNA, 55 bp, Artificial; identical to SEQ ID NO: 266199
  Synthetic oligonucleotide

SEQ ID NO: 648782 - DNA, 60 bp, Artificial; identical to SEQ ID NO: 154503
  Synthetic oligonucleotide

SEQ ID NO: 648783 - DNA, 56 bp, Artificial; identical to SEQ ID NO: 141672
  Synthetic oligonucleotide

SEQ ID NO: 648784 - DNA, 58 bp, Artificial; identical to SEQ ID NO: 200641
  Synthetic oligonucleotide

SEQ ID NO: 648785 - DNA, 60 bp, Artificial; identical to SEQ ID NO: 243502
  Synthetic oligonucleotide

SEQ ID NO: 648786 - DNA, 59 bp, Artificial; identical to SEQ ID NO: 209123
  Synthetic oligonucleotide

SEQ ID NO: 648787 - DNA, 59 bp, Artificial; identical to SEQ ID NO: 242307
  Synthetic oligonucleotide

SEQ ID NO: 648788 - DNA, 55 bp, Artificial; identical to SEQ ID NO: 242598
  Synthetic oligonucleotide

SEQ ID NO: 648789 - DNA, 60 bp, Artificial; identical to SEQ ID NO: 247184
  Synthetic oligonucleotide

SEQ ID NO: 648790 - DNA, 60 bp, Artificial; identical to SEQ ID NO: 242309
  Synthetic oligonucleotide

SEQ ID NO: 648791 - DNA, 55 bp, Artificial; identical to SEQ ID NO: 182029
  Synthetic oligonucleotide

SEQ ID NO: 648792 - DNA, 55 bp, Artificial; identical to SEQ ID NO: 168236
  Synthetic oligonucleotide

SEQ ID NO: 648793 - DNA, 55 bp, Artificial; identical to SEQ ID NO: 208146
  Synthetic oligonucleotide

SEQ ID NO: 648794 - DNA, 60 bp, Artificial; identical to SEQ ID NO: 178469
  Synthetic oligonucleotide

SEQ ID NO: 648795 - DNA, 55 bp, Artificial; identical to SEQ ID NO: 208145
  Synthetic oligonucleotide

SEQ ID NO: 648796 - DNA, 55 bp, Artificial; identical to SEQ ID NO: 187702
  Synthetic oligonucleotide

SEQ ID NO: 648797 - DNA, 52 bp, Artificial; identical to SEQ ID NO: 186089
  Synthetic oligonucleotide

SEQ ID NO: 648798 - DNA, 50 bp, Artificial; identical to SEQ ID NO: 223941
  Synthetic oligonucleotide

SEQ ID NO: 648799 - DNA, 60 bp, Artificial; identical to SEQ ID NO: 170945
  Synthetic oligonucleotide

SEQ ID NO: 648800 - DNA, 60 bp, Artificial; identical to SEQ ID NO: 243503
  Synthetic oligonucleotide

SEQ ID NO: 648801 - DNA, 60 bp, Artificial; identical to SEQ ID NO: 167658
  Synthetic oligonucleotide

SEQ ID NO: 648802 - DNA, 50 bp, Artificial; identical to SEQ ID NO: 153717
  Synthetic oligonucleotide

SEQ ID NO: 648803 - DNA, 55 bp, Artificial; identical to SEQ ID NO: 182069
  Synthetic oligonucleotide

SEQ ID NO: 648804 - DNA, 54 bp, Artificial; identical to SEQ ID NO: 179570
  Synthetic oligonucleotide

SEQ ID NO: 648805 - DNA, 55 bp, Artificial; identical to SEQ ID NO: 191101
  Synthetic oligonucleotide

SEQ ID NO: 648806 - DNA, 51 bp, Artificial; identical to SEQ ID NO: 174958
  Synthetic oligonucleotide

SEQ ID NO: 648807 - DNA, 51 bp, Artificial; identical to SEQ ID NO: 213045
  Synthetic oligonucleotide

SEQ ID NO: 648808 - DNA, 57 bp, Artificial; identical to SEQ ID NO: 194292
  Synthetic oligonucleotide

SEQ ID NO: 648809 - DNA, 51 bp, Artificial; identical to SEQ ID NO: 202538
  Synthetic oligonucleotide

SEQ ID NO: 648810 - DNA, 55 bp, Artificial; identical to SEQ ID NO: 248751
  Synthetic oligonucleotide

SEQ ID NO: 648811 - DNA, 55 bp, Artificial; identical to SEQ ID NO: 248745
  Synthetic oligonucleotide

SEQ ID NO: 648812 - DNA, 51 bp, Artificial; identical to SEQ ID NO: 149791
  Synthetic oligonucleotide

SEQ ID NO: 648813 - DNA, 58 bp, Artificial; identical to SEQ ID NO: 209169
  Synthetic oligonucleotide

SEQ ID NO: 648814 - DNA, 52 bp, Artificial; identical to SEQ ID NO: 165074
  Synthetic oligonucleotide

SEQ ID NO: 648815 - DNA, 59 bp, Artificial; identical to SEQ ID NO: 147076
  Synthetic oligonucleotide

SEQ ID NO: 648816 - DNA, 60 bp, Artificial; identical to SEQ ID NO: 155308
  Synthetic oligonucleotide

SEQ ID NO: 648817 - DNA, 51 bp, Artificial; identical to SEQ ID NO: 173665
  Synthetic oligonucleotide

SEQ ID NO: 648818 - DNA, 55 bp, Artificial; identical to SEQ ID NO: 225120
  Synthetic oligonucleotide

SEQ ID NO: 648819 - DNA, 55 bp, Artificial; identical to SEQ ID NO: 168397
  Synthetic oligonucleotide

SEQ ID NO: 648820 - DNA, 54 bp, Artificial; identical to SEQ ID NO: 144108
  Synthetic oligonucleotide

SEQ ID NO: 648821 - DNA, 55 bp, Artificial; identical to SEQ ID NO: 254048
  Synthetic oligonucleotide

SEQ ID NO: 648822 - DNA, 58 bp, Artificial; identical to SEQ ID NO: 147156
  Synthetic oligonucleotide

SEQ ID NO: 648823 - DNA, 50 bp, Artificial; identical to SEQ ID NO: 176921
  Synthetic oligonucleotide

SEQ ID NO: 648824 - DNA, 55 bp, Artificial; identical to SEQ ID NO: 222605
  Synthetic oligonucleotide

SEQ ID NO: 648825 - DNA, 55 bp, Artificial; identical to SEQ ID NO: 147448
  Synthetic oligonucleotide

SEQ ID NO: 648826 - DNA, 55 bp, Artificial; identical to SEQ ID NO: 144864
  Synthetic oligonucleotide

SEQ ID NO: 648827 - DNA, 56 bp, Artificial; identical to SEQ ID NO: 239572
  Synthetic oligonucleotide

SEQ ID NO: 648828 - DNA, 60 bp, Artificial; identical to SEQ ID NO: 256305
  Synthetic oligonucleotide

SEQ ID NO: 648829 - DNA, 55 bp, Artificial; identical to SEQ ID NO: 160232
  Synthetic oligonucleotide

SEQ ID NO: 648830 - DNA, 53 bp, Artificial; identical to SEQ ID NO: 240820
  Synthetic oligonucleotide

SEQ ID NO: 648831 - DNA, 56 bp, Artificial; identical to SEQ ID NO: 247592
  Synthetic oligonucleotide

SEQ ID NO: 648832 - DNA, 51 bp, Artificial; identical to SEQ ID NO: 170172
  Synthetic oligonucleotide

SEQ ID NO: 648833 - DNA, 57 bp, Artificial; identical to SEQ ID NO: 147211
  Synthetic oligonucleotide

SEQ ID NO: 648834 - DNA, 54 bp, Artificial; identical to SEQ ID NO: 201354
  Synthetic oligonucleotide

SEQ ID NO: 648835 - DNA, 52 bp, Artificial; identical to SEQ ID NO: 153619
  Synthetic oligonucleotide

SEQ ID NO: 648836 - DNA, 55 bp, Artificial; identical to SEQ ID NO: 168392
  Synthetic oligonucleotide

SEQ ID NO: 648837 - DNA, 54 bp, Artificial; identical to SEQ ID NO: 167537
  Synthetic oligonucleotide

SEQ ID NO: 648838 - DNA, 59 bp, Artificial; identical to SEQ ID NO: 243504
  Synthetic oligonucleotide

SEQ ID NO: 648839 - DNA, 57 bp, Artificial; identical to SEQ ID NO: 167155
  Synthetic oligonucleotide

SEQ ID NO: 648840 - DNA, 52 bp, Artificial; identical to SEQ ID NO: 243224
  Synthetic oligonucleotide

SEQ ID NO: 648841 - DNA, 53 bp, Artificial; identical to SEQ ID NO: 233827
  Synthetic oligonucleotide

SEQ ID NO: 648842 - DNA, 55 bp, Artificial; identical to SEQ ID NO: 208123
  Synthetic oligonucleotide

SEQ ID NO: 648843 - DNA, 55 bp, Artificial; identical to SEQ ID NO: 254047
  Synthetic oligonucleotide

SEQ ID NO: 648844 - DNA, 60 bp, Artificial; identical to SEQ ID NO: 203329
  Synthetic oligonucleotide

SEQ ID NO: 648845 - DNA, 53 bp, Artificial; identical to SEQ ID NO: 157436
  Synthetic oligonucleotide

SEQ ID NO: 648846 - DNA, 55 bp, Artificial; identical to SEQ ID NO: 217580
  Synthetic oligonucleotide

SEQ ID NO: 648847 - DNA, 58 bp, Artificial; identical to SEQ ID NO: 141673
  Synthetic oligonucleotide

SEQ ID NO: 648848 - DNA, 54 bp, Artificial; identical to SEQ ID NO: 185177
  Synthetic oligonucleotide

SEQ ID NO: 648849 - DNA, 55 bp, Artificial; identical to SEQ ID NO: 221463
  Synthetic oligonucleotide

SEQ ID NO: 648850 - DNA, 50 bp, Artificial; identical to SEQ ID NO: 200455
  Synthetic oligonucleotide

SEQ ID NO: 648851 - DNA, 57 bp, Artificial; identical to SEQ ID NO: 212419
  Synthetic oligonucleotide

SEQ ID NO: 648852 - DNA, 54 bp, Artificial; identical to SEQ ID NO: 233785
  Synthetic oligonucleotide

SEQ ID NO: 648853 - DNA, 57 bp, Artificial; identical to SEQ ID NO: 178388
  Synthetic oligonucleotide

SEQ ID NO: 648854 - DNA, 55 bp, Artificial; identical to SEQ ID NO: 212607
  Synthetic oligonucleotide

SEQ ID NO: 648855 - DNA, 55 bp, Artificial; identical to SEQ ID NO: 211370
  Synthetic oligonucleotide

SEQ ID NO: 648856 - DNA, 60 bp, Artificial; identical to SEQ ID NO: 151288
  Synthetic oligonucleotide

SEQ ID NO: 648857 - DNA, 53 bp, Artificial; identical to SEQ ID NO: 142674
  Synthetic oligonucleotide

SEQ ID NO: 648858 - DNA, 51 bp, Artificial; identical to SEQ ID NO: 157762
  Synthetic oligonucleotide

SEQ ID NO: 648859 - DNA, 53 bp, Artificial; identical to SEQ ID NO: 216904
  Synthetic oligonucleotide

SEQ ID NO: 648860 - DNA, 59 bp, Artificial; identical to SEQ ID NO: 160955
  Synthetic oligonucleotide

SEQ ID NO: 648861 - DNA, 55 bp, Artificial; identical to SEQ ID NO: 248782
  Synthetic oligonucleotide

SEQ ID NO: 648862 - DNA, 55 bp, Artificial; identical to SEQ ID NO: 205480
  Synthetic oligonucleotide

SEQ ID NO: 648863 - DNA, 55 bp, Artificial; identical to SEQ ID NO: 166752
  Synthetic oligonucleotide

SEQ ID NO: 648864 - DNA, 55 bp, Artificial; identical to SEQ ID NO: 147458
  Synthetic oligonucleotide

SEQ ID NO: 648865 - DNA, 58 bp, Artificial; identical to SEQ ID NO: 239244
  Synthetic oligonucleotide

SEQ ID NO: 648866 - DNA, 50 bp, Artificial; identical to SEQ ID NO: 149989
  Synthetic oligonucleotide

SEQ ID NO: 648867 - DNA, 59 bp, Artificial; identical to SEQ ID NO: 178387
  Synthetic oligonucleotide

SEQ ID NO: 648868 - DNA, 60 bp, Artificial; identical to SEQ ID NO: 194117
  Synthetic oligonucleotide

SEQ ID NO: 648869 - DNA, 52 bp, Artificial; identical to SEQ ID NO: 237064
  Synthetic oligonucleotide

SEQ ID NO: 648870 - DNA, 55 bp, Artificial; identical to SEQ ID NO: 225119
  Synthetic oligonucleotide

SEQ ID NO: 648871 - DNA, 59 bp, Artificial; identical to SEQ ID NO: 178384
  Synthetic oligonucleotide

SEQ ID NO: 648872 - DNA, 60 bp, Artificial; identical to SEQ ID NO: 203328
  Synthetic oligonucleotide

SEQ ID NO: 648873 - DNA, 58 bp, Artificial; identical to SEQ ID NO: 151013
  Synthetic oligonucleotide

SEQ ID NO: 648874 - DNA, 60 bp, Artificial; identical to SEQ ID NO: 216893
  Synthetic oligonucleotide

SEQ ID NO: 648875 - DNA, 55 bp, Artificial; identical to SEQ ID NO: 212552
  Synthetic oligonucleotide

SEQ ID NO: 648876 - DNA, 55 bp, Artificial; identical to SEQ ID NO: 182059
  Synthetic oligonucleotide

SEQ ID NO: 648877 - DNA, 55 bp, Artificial; identical to SEQ ID NO: 168391
  Synthetic oligonucleotide

SEQ ID NO: 648878 - DNA, 60 bp, Artificial; identical to SEQ ID NO: 242314
  Synthetic oligonucleotide

SEQ ID NO: 648879 - DNA, 54 bp, Artificial; identical to SEQ ID NO: 248513
  Synthetic oligonucleotide

SEQ ID NO: 648880 - DNA, 55 bp, Artificial; identical to SEQ ID NO: 224900
  Synthetic oligonucleotide

SEQ ID NO: 648881 - DNA, 55 bp, Artificial; identical to SEQ ID NO: 171161
  Synthetic oligonucleotide

SEQ ID NO: 648882 - DNA, 55 bp, Artificial; identical to SEQ ID NO: 221462
  Synthetic oligonucleotide

SEQ ID NO: 648883 - DNA, 52 bp, Artificial; identical to SEQ ID NO: 238554
  Synthetic oligonucleotide

SEQ ID NO: 648884 - DNA, 51 bp, Artificial; identical to SEQ ID NO: 246620
  Synthetic oligonucleotide

SEQ ID NO: 648885 - DNA, 56 bp, Artificial; identical to SEQ ID NO: 180070
  Synthetic oligonucleotide

SEQ ID NO: 648886 - DNA, 50 bp, Artificial; identical to SEQ ID NO: 176942
  Synthetic oligonucleotide

SEQ ID NO: 648887 - DNA, 60 bp, Artificial; identical to SEQ ID NO: 144725
  Synthetic oligonucleotide

SEQ ID NO: 648888 - DNA, 55 bp, Artificial; identical to SEQ ID NO: 201788
  Synthetic oligonucleotide

SEQ ID NO: 648889 - DNA, 55 bp, Artificial; identical to SEQ ID NO: 254044
  Synthetic oligonucleotide

SEQ ID NO: 648890 - DNA, 60 bp, Artificial; identical to SEQ ID NO: 243505
  Synthetic oligonucleotide

SEQ ID NO: 648891 - DNA, 60 bp, Artificial; identical to SEQ ID NO: 151294
  Synthetic oligonucleotide

SEQ ID NO: 648892 - DNA, 54 bp, Artificial; identical to SEQ ID NO: 255203
  Synthetic oligonucleotide

SEQ ID NO: 648893 - DNA, 54 bp, Artificial; identical to SEQ ID NO: 164720
  Synthetic oligonucleotide

SEQ ID NO: 648894 - DNA, 53 bp, Artificial; identical to SEQ ID NO: 185893
  Synthetic oligonucleotide

SEQ ID NO: 648895 - DNA, 52 bp, Artificial; identical to SEQ ID NO: 155573
  Synthetic oligonucleotide

SEQ ID NO: 648896 - DNA, 55 bp, Artificial; identical to SEQ ID NO: 211368
  Synthetic oligonucleotide

SEQ ID NO: 648897 - DNA, 55 bp, Artificial; identical to SEQ ID NO: 244261
  Synthetic oligonucleotide

SEQ ID NO: 648898 - DNA, 55 bp, Artificial; identical to SEQ ID NO: 153391
  Synthetic oligonucleotide

SEQ ID NO: 648899 - DNA, 58 bp, Artificial; identical to SEQ ID NO: 151011
  Synthetic oligonucleotide

SEQ ID NO: 648900 - DNA, 53 bp, Artificial; identical to SEQ ID NO: 188053
  Synthetic oligonucleotide

SEQ ID NO: 648901 - DNA, 57 bp, Artificial; identical to SEQ ID NO: 191726
  Synthetic oligonucleotide

SEQ ID NO: 648902 - DNA, 53 bp, Artificial; identical to SEQ ID NO: 187177
  Synthetic oligonucleotide

SEQ ID NO: 648903 - DNA, 58 bp, Artificial; identical to SEQ ID NO: 224293
  Synthetic oligonucleotide

SEQ ID NO: 648904 - DNA, 60 bp, Artificial; identical to SEQ ID NO: 266422
  Synthetic oligonucleotide

SEQ ID NO: 648905 - DNA, 55 bp, Artificial; identical to SEQ ID NO: 182058
  Synthetic oligonucleotide

SEQ ID NO: 648906 - DNA, 60 bp, Artificial; identical to SEQ ID NO: 151009
  Synthetic oligonucleotide

SEQ ID NO: 648907 - DNA, 55 bp, Artificial; identical to SEQ ID NO: 187810
  Synthetic oligonucleotide

SEQ ID NO: 648908 - DNA, 50 bp, Artificial; identical to SEQ ID NO: 237221
  Synthetic oligonucleotide

SEQ ID NO: 648909 - DNA, 57 bp, Artificial; identical to SEQ ID NO: 247189
  Synthetic oligonucleotide

SEQ ID NO: 648910 - DNA, 55 bp, Artificial; identical to SEQ ID NO: 247190
  Synthetic oligonucleotide

SEQ ID NO: 648911 - DNA, 55 bp, Artificial; identical to SEQ ID NO: 172759
  Synthetic oligonucleotide

SEQ ID NO: 648912 - DNA, 55 bp, Artificial; identical to SEQ ID NO: 238357
  Synthetic oligonucleotide

SEQ ID NO: 648913 - DNA, 50 bp, Artificial; identical to SEQ ID NO: 236506
  Synthetic oligonucleotide

SEQ ID NO: 648914 - DNA, 53 bp, Artificial; identical to SEQ ID NO: 185903
  Synthetic oligonucleotide

SEQ ID NO: 648915 - DNA, 56 bp, Artificial; identical to SEQ ID NO: 224395
  Synthetic oligonucleotide

SEQ ID NO: 648916 - DNA, 58 bp, Artificial; identical to SEQ ID NO: 179574
  Synthetic oligonucleotide

SEQ ID NO: 648917 - DNA, 55 bp, Artificial; identical to SEQ ID NO: 153392
  Synthetic oligonucleotide

SEQ ID NO: 648918 - DNA, 55 bp, Artificial; identical to SEQ ID NO: 254043
  Synthetic oligonucleotide

SEQ ID NO: 648919 - DNA, 55 bp, Artificial; identical to SEQ ID NO: 197250
  Synthetic oligonucleotide

SEQ ID NO: 648920 - DNA, 55 bp, Artificial; identical to SEQ ID NO: 252971
  Synthetic oligonucleotide

SEQ ID NO: 648921 - DNA, 60 bp, Artificial; identical to SEQ ID NO: 188868
  Synthetic oligonucleotide

SEQ ID NO: 648922 - DNA, 59 bp, Artificial; identical to SEQ ID NO: 242387
  Synthetic oligonucleotide

SEQ ID NO: 648923 - DNA, 52 bp, Artificial; identical to SEQ ID NO: 170920
  Synthetic oligonucleotide

SEQ ID NO: 648924 - DNA, 53 bp, Artificial; identical to SEQ ID NO: 170062
  Synthetic oligonucleotide

SEQ ID NO: 648925 - DNA, 53 bp, Artificial; identical to SEQ ID NO: 216656
  Synthetic oligonucleotide

SEQ ID NO: 648926 - DNA, 53 bp, Artificial; identical to SEQ ID NO: 149391
  Synthetic oligonucleotide

SEQ ID NO: 648927 - DNA, 60 bp, Artificial; identical to SEQ ID NO: 216882
  Synthetic oligonucleotide

SEQ ID NO: 648928 - DNA, 60 bp, Artificial; identical to SEQ ID NO: 151008
  Synthetic oligonucleotide

SEQ ID NO: 648929 - DNA, 55 bp, Artificial; identical to SEQ ID NO: 234277
  Synthetic oligonucleotide

SEQ ID NO: 648930 - DNA, 55 bp, Artificial; identical to SEQ ID NO: 235126
  Synthetic oligonucleotide

SEQ ID NO: 648931 - DNA, 54 bp, Artificial; identical to SEQ ID NO: 185079
  Synthetic oligonucleotide

SEQ ID NO: 648932 - DNA, 55 bp, Artificial; identical to SEQ ID NO: 191096
  Synthetic oligonucleotide

SEQ ID NO: 648933 - DNA, 50 bp, Artificial; identical to SEQ ID NO: 142652
  Synthetic oligonucleotide

SEQ ID NO: 648934 - DNA, 55 bp, Artificial; identical to SEQ ID NO: 191932
  Synthetic oligonucleotide

SEQ ID NO: 648935 - DNA, 55 bp, Artificial; identical to SEQ ID NO: 252972
  Synthetic oligonucleotide

SEQ ID NO: 648936 - DNA, 54 bp, Artificial; identical to SEQ ID NO: 151986
  Synthetic oligonucleotide

SEQ ID NO: 648937 - DNA, 58 bp, Artificial; identical to SEQ ID NO: 171013
  Synthetic oligonucleotide

SEQ ID NO: 648938 - DNA, 52 bp, Artificial; identical to SEQ ID NO: 149610
  Synthetic oligonucleotide

SEQ ID NO: 648939 - DNA, 55 bp, Artificial; identical to SEQ ID NO: 256302
  Synthetic oligonucleotide

SEQ ID NO: 648940 - DNA, 60 bp, Artificial; identical to SEQ ID NO: 152983
  Synthetic oligonucleotide

SEQ ID NO: 648941 - DNA, 57 bp, Artificial; identical to SEQ ID NO: 175202
  Synthetic oligonucleotide

SEQ ID NO: 648942 - DNA, 54 bp, Artificial; identical to SEQ ID NO: 200636
  Synthetic oligonucleotide

SEQ ID NO: 648943 - DNA, 60 bp, Artificial; identical to SEQ ID NO: 216871
  Synthetic oligonucleotide

SEQ ID NO: 648944 - DNA, 55 bp, Artificial; identical to SEQ ID NO: 252973
  Synthetic oligonucleotide

SEQ ID NO: 648945 - DNA, 55 bp, Artificial; identical to SEQ ID NO: 234278
  Synthetic oligonucleotide

SEQ ID NO: 648946 - DNA, 51 bp, Artificial; identical to SEQ ID NO: 160931
  Synthetic oligonucleotide

SEQ ID NO: 648947 - DNA, 55 bp, Artificial; identical to SEQ ID NO: 173577
  Synthetic oligonucleotide

SEQ ID NO: 648948 - DNA, 58 bp, Artificial; identical to SEQ ID NO: 152110
  Synthetic oligonucleotide

SEQ ID NO: 648949 - DNA, 52 bp, Artificial; identical to SEQ ID NO: 211608
  Synthetic oligonucleotide

SEQ ID NO: 648950 - DNA, 53 bp, Artificial; identical to SEQ ID NO: 247881
  Synthetic oligonucleotide

SEQ ID NO: 648951 - DNA, 55 bp, Artificial; identical to SEQ ID NO: 239795
  Synthetic oligonucleotide

SEQ ID NO: 648952 - DNA, 55 bp, Artificial; identical to SEQ ID NO: 224896
  Synthetic oligonucleotide

SEQ ID NO: 648953 - DNA, 60 bp, Artificial; identical to SEQ ID NO: 187176
  Synthetic oligonucleotide

SEQ ID NO: 648954 - DNA, 50 bp, Artificial; identical to SEQ ID NO: 221896
  Synthetic oligonucleotide

SEQ ID NO: 648955 - DNA, 53 bp, Artificial; identical to SEQ ID NO: 192085
  Synthetic oligonucleotide

SEQ ID NO: 648956 - DNA, 55 bp, Artificial; identical to SEQ ID NO: 166749
  Synthetic oligonucleotide

SEQ ID NO: 648957 - DNA, 55 bp, Artificial; identical to SEQ ID NO: 182051
  Synthetic oligonucleotide

SEQ ID NO: 648958 - DNA, 53 bp, Artificial; identical to SEQ ID NO: 205643
  Synthetic oligonucleotide

SEQ ID NO: 648959 - DNA, 55 bp, Artificial; identical to SEQ ID NO: 166748
  Synthetic oligonucleotide

SEQ ID NO: 648960 - DNA, 60 bp, Artificial; identical to SEQ ID NO: 178423
  Synthetic oligonucleotide

SEQ ID NO: 648961 - DNA, 56 bp, Artificial; identical to SEQ ID NO: 200635
  Synthetic oligonucleotide

SEQ ID NO: 648962 - DNA, 55 bp, Artificial; identical to SEQ ID NO: 197196
  Synthetic oligonucleotide

SEQ ID NO: 648963 - DNA, 51 bp, Artificial; identical to SEQ ID NO: 248064
  Synthetic oligonucleotide

SEQ ID NO: 648964 - DNA, 51 bp, Artificial; identical to SEQ ID NO: 167621
  Synthetic oligonucleotide

SEQ ID NO: 648965 - DNA, 57 bp, Artificial; identical to SEQ ID NO: 243507
  Synthetic oligonucleotide

SEQ ID NO: 648966 - DNA, 53 bp, Artificial; identical to SEQ ID NO: 236987
  Synthetic oligonucleotide

SEQ ID NO: 648967 - DNA, 57 bp, Artificial; identical to SEQ ID NO: 147243
  Synthetic oligonucleotide

SEQ ID NO: 648968 - DNA, 60 bp, Artificial; identical to SEQ ID NO: 162427
  Synthetic oligonucleotide

SEQ ID NO: 648969 - DNA, 51 bp, Artificial; identical to SEQ ID NO: 167622
  Synthetic oligonucleotide

SEQ ID NO: 648970 - DNA, 59 bp, Artificial; identical to SEQ ID NO: 167603
  Synthetic oligonucleotide

SEQ ID NO: 648971 - DNA, 60 bp, Artificial; identical to SEQ ID NO: 206870
  Synthetic oligonucleotide

SEQ ID NO: 648972 - DNA, 55 bp, Artificial; identical to SEQ ID NO: 156387
  Synthetic oligonucleotide

SEQ ID NO: 648973 - DNA, 55 bp, Artificial; identical to SEQ ID NO: 203786
  Synthetic oligonucleotide

SEQ ID NO: 648974 - DNA, 52 bp, Artificial; identical to SEQ ID NO: 186030
  Synthetic oligonucleotide

SEQ ID NO: 648975 - DNA, 55 bp, Artificial; identical to SEQ ID NO: 153394
  Synthetic oligonucleotide

SEQ ID NO: 648976 - DNA, 60 bp, Artificial; identical to SEQ ID NO: 174946
  Synthetic oligonucleotide

SEQ ID NO: 648977 - DNA, 55 bp, Artificial; identical to SEQ ID NO: 224894
  Synthetic oligonucleotide

SEQ ID NO: 648978 - DNA, 51 bp, Artificial; identical to SEQ ID NO: 204028
  Synthetic oligonucleotide

SEQ ID NO: 648979 - DNA, 55 bp, Artificial; identical to SEQ ID NO: 254040
  Synthetic oligonucleotide

SEQ ID NO: 648980 - DNA, 51 bp, Artificial; identical to SEQ ID NO: 211666
  Synthetic oligonucleotide

SEQ ID NO: 648981 - DNA, 59 bp, Artificial; identical to SEQ ID NO: 150961
  Synthetic oligonucleotide

SEQ ID NO: 648982 - DNA, 60 bp, Artificial; identical to SEQ ID NO: 242391
  Synthetic oligonucleotide

SEQ ID NO: 648983 - DNA, 52 bp, Artificial; identical to SEQ ID NO: 192110
  Synthetic oligonucleotide

SEQ ID NO: 648984 - DNA, 60 bp, Artificial; identical to SEQ ID NO: 192252
  Synthetic oligonucleotide

SEQ ID NO: 648985 - DNA, 55 bp, Artificial; identical to SEQ ID NO: 146309
  Synthetic oligonucleotide

SEQ ID NO: 648986 - DNA, 57 bp, Artificial; identical to SEQ ID NO: 171721
  Synthetic oligonucleotide

SEQ ID NO: 648987 - DNA, 51 bp, Artificial; identical to SEQ ID NO: 253718
  Synthetic oligonucleotide

SEQ ID NO: 648988 - DNA, 51 bp, Artificial; identical to SEQ ID NO: 216814
  Synthetic oligonucleotide

SEQ ID NO: 648989 - DNA, 55 bp, Artificial; identical to SEQ ID NO: 174655
  Synthetic oligonucleotide

SEQ ID NO: 648990 - DNA, 55 bp, Artificial; identical to SEQ ID NO: 205484
  Synthetic oligonucleotide

SEQ ID NO: 648991 - DNA, 50 bp, Artificial; identical to SEQ ID NO: 165654
  Synthetic oligonucleotide

SEQ ID NO: 648992 - DNA, 54 bp, Artificial; identical to SEQ ID NO: 247233
  Synthetic oligonucleotide

SEQ ID NO: 648993 - DNA, 55 bp, Artificial; identical to SEQ ID NO: 242395
  Synthetic oligonucleotide

SEQ ID NO: 648994 - DNA, 60 bp, Artificial; identical to SEQ ID NO: 247235
  Synthetic oligonucleotide

SEQ ID NO: 648995 - DNA, 51 bp, Artificial; identical to SEQ ID NO: 223740
  Synthetic oligonucleotide

SEQ ID NO: 648996 - DNA, 58 bp, Artificial; identical to SEQ ID NO: 242401
  Synthetic oligonucleotide

SEQ ID NO: 648997 - DNA, 60 bp, Artificial; identical to SEQ ID NO: 242403
  Synthetic oligonucleotide

SEQ ID NO: 648998 - DNA, 53 bp, Artificial; identical to SEQ ID NO: 149399
  Synthetic oligonucleotide

SEQ ID NO: 648999 - DNA, 59 bp, Artificial; identical to SEQ ID NO: 174304
  Synthetic oligonucleotide

SEQ ID NO: 649000 - DNA, 58 bp, Artificial; identical to SEQ ID NO: 188149
  Synthetic oligonucleotide

SEQ ID NO: 649001 - DNA, 51 bp, Artificial; identical to SEQ ID NO: 174959
  Synthetic oligonucleotide

SEQ ID NO: 649002 - DNA, 55 bp, Artificial; identical to SEQ ID NO: 211366
  Synthetic oligonucleotide

SEQ ID NO: 649003 - DNA, 55 bp, Artificial; identical to SEQ ID NO: 178417
  Synthetic oligonucleotide

SEQ ID NO: 649004 - DNA, 60 bp, Artificial; identical to SEQ ID NO: 247237
  Synthetic oligonucleotide

SEQ ID NO: 649005 - DNA, 52 bp, Artificial; identical to SEQ ID NO: 154622
  Synthetic oligonucleotide

SEQ ID NO: 649006 - DNA, 55 bp, Artificial; identical to SEQ ID NO: 257911
  Synthetic oligonucleotide

SEQ ID NO: 649007 - DNA, 55 bp, Artificial; identical to SEQ ID NO: 150953
  Synthetic oligonucleotide

SEQ ID NO: 649008 - DNA, 55 bp, Artificial; identical to SEQ ID NO: 165512
  Synthetic oligonucleotide

SEQ ID NO: 649009 - DNA, 55 bp, Artificial; identical to SEQ ID NO: 221461
  Synthetic oligonucleotide

SEQ ID NO: 649010 - DNA, 51 bp, Artificial; identical to SEQ ID NO: 258207
  Synthetic oligonucleotide

SEQ ID NO: 649011 - DNA, 58 bp, Artificial; identical to SEQ ID NO: 179586
  Synthetic oligonucleotide

SEQ ID NO: 649012 - DNA, 51 bp, Artificial; identical to SEQ ID NO: 248507
  Synthetic oligonucleotide

SEQ ID NO: 649013 - DNA, 55 bp, Artificial; identical to SEQ ID NO: 174660
  Synthetic oligonucleotide

SEQ ID NO: 649014 - DNA, 53 bp, Artificial; identical to SEQ ID NO: 255376
  Synthetic oligonucleotide

SEQ ID NO: 649015 - DNA, 55 bp, Artificial; identical to SEQ ID NO: 198424
  Synthetic oligonucleotide

SEQ ID NO: 649016 - DNA, 56 bp, Artificial; identical to SEQ ID NO: 267320
  Synthetic oligonucleotide

SEQ ID NO: 649017 - DNA, 55 bp, Artificial; identical to SEQ ID NO: 194516
  Synthetic oligonucleotide

SEQ ID NO: 649018 - DNA, 55 bp, Artificial; identical to SEQ ID NO: 166747
  Synthetic oligonucleotide

SEQ ID NO: 649019 - DNA, 51 bp, Artificial; identical to SEQ ID NO: 160549
  Synthetic oligonucleotide

SEQ ID NO: 649020 - DNA, 54 bp, Artificial; identical to SEQ ID NO: 185051
  Synthetic oligonucleotide

SEQ ID NO: 649021 - DNA, 60 bp, Artificial; identical to SEQ ID NO: 243509
  Synthetic oligonucleotide

SEQ ID NO: 649022 - DNA, 55 bp, Artificial; identical to SEQ ID NO: 202851
  Synthetic oligonucleotide

SEQ ID NO: 649023 - DNA, 54 bp, Artificial; identical to SEQ ID NO: 211521
  Synthetic oligonucleotide

SEQ ID NO: 649024 - DNA, 60 bp, Artificial; identical to SEQ ID NO: 242404
  Synthetic oligonucleotide

SEQ ID NO: 649025 - DNA, 59 bp, Artificial; identical to SEQ ID NO: 247239
  Synthetic oligonucleotide

SEQ ID NO: 649026 - DNA, 54 bp, Artificial; identical to SEQ ID NO: 185052
  Synthetic oligonucleotide

SEQ ID NO: 649027 - DNA, 54 bp, Artificial; identical to SEQ ID NO: 243005
  Synthetic oligonucleotide

SEQ ID NO: 649028 - DNA, 48 bp, Artificial; identical to SEQ ID NO: 200634
  Synthetic oligonucleotide

SEQ ID NO: 649029 - DNA, 55 bp, Artificial; identical to SEQ ID NO: 266421
  Synthetic oligonucleotide

SEQ ID NO: 649030 - DNA, 60 bp, Artificial; identical to SEQ ID NO: 222844
  Synthetic oligonucleotide

SEQ ID NO: 649031 - DNA, 59 bp, Artificial; identical to SEQ ID NO: 242406
  Synthetic oligonucleotide

SEQ ID NO: 649032 - DNA, 55 bp, Artificial; identical to SEQ ID NO: 142516
  Synthetic oligonucleotide

SEQ ID NO: 649033 - DNA, 55 bp, Artificial; identical to SEQ ID NO: 200633
  Synthetic oligonucleotide

SEQ ID NO: 649034 - DNA, 55 bp, Artificial; identical to SEQ ID NO: 211364
  Synthetic oligonucleotide

SEQ ID NO: 649035 - DNA, 59 bp, Artificial; identical to SEQ ID NO: 242360
  Synthetic oligonucleotide

SEQ ID NO: 649036 - DNA, 51 bp, Artificial; identical to SEQ ID NO: 167549
  Synthetic oligonucleotide

SEQ ID NO: 649037 - DNA, 54 bp, Artificial; identical to SEQ ID NO: 217040
  Synthetic oligonucleotide

SEQ ID NO: 649038 - DNA, 55 bp, Artificial; identical to SEQ ID NO: 187807
  Synthetic oligonucleotide

SEQ ID NO: 649039 - DNA, 55 bp, Artificial; identical to SEQ ID NO: 244259
  Synthetic oligonucleotide

SEQ ID NO: 649040 - DNA, 60 bp, Artificial; identical to SEQ ID NO: 247240
  Synthetic oligonucleotide

SEQ ID NO: 649041 - DNA, 60 bp, Artificial; identical to SEQ ID NO: 243511
  Synthetic oligonucleotide

SEQ ID NO: 649042 - DNA, 54 bp, Artificial; identical to SEQ ID NO: 239563
  Synthetic oligonucleotide

SEQ ID NO: 649043 - DNA, 50 bp, Artificial; identical to SEQ ID NO: 262693
  Synthetic oligonucleotide

SEQ ID NO: 649044 - DNA, 55 bp, Artificial; identical to SEQ ID NO: 198422
  Synthetic oligonucleotide

SEQ ID NO: 649045 - DNA, 54 bp, Artificial; identical to SEQ ID NO: 200632
  Synthetic oligonucleotide

SEQ ID NO: 649046 - DNA, 51 bp, Artificial; identical to SEQ ID NO: 178410
  Synthetic oligonucleotide

SEQ ID NO: 649047 - DNA, 57 bp, Artificial; identical to SEQ ID NO: 243512
  Synthetic oligonucleotide

SEQ ID NO: 649048 - DNA, 55 bp, Artificial; identical to SEQ ID NO: 233482
  Synthetic oligonucleotide

SEQ ID NO: 649049 - DNA, 53 bp, Artificial; identical to SEQ ID NO: 240804
  Synthetic oligonucleotide

SEQ ID NO: 649050 - DNA, 56 bp, Artificial; identical to SEQ ID NO: 224156
  Synthetic oligonucleotide

SEQ ID NO: 649051 - DNA, 53 bp, Artificial; identical to SEQ ID NO: 188065
  Synthetic oligonucleotide

SEQ ID NO: 649052 - DNA, 55 bp, Artificial; identical to SEQ ID NO: 182001
  Synthetic oligonucleotide

SEQ ID NO: 649053 - DNA, 59 bp, Artificial; identical to SEQ ID NO: 243571
  Synthetic oligonucleotide

SEQ ID NO: 649054 - DNA, 51 bp, Artificial; identical to SEQ ID NO: 186676
  Synthetic oligonucleotide

SEQ ID NO: 649055 - DNA, 55 bp, Artificial; identical to SEQ ID NO: 155402
  Synthetic oligonucleotide

SEQ ID NO: 649056 - DNA, 55 bp, Artificial; identical to SEQ ID NO: 187803
  Synthetic oligonucleotide

SEQ ID NO: 649057 - DNA, 60 bp, Artificial; identical to SEQ ID NO: 178408
  Synthetic oligonucleotide

SEQ ID NO: 649058 - DNA, 60 bp, Artificial; identical to SEQ ID NO: 200631
  Synthetic oligonucleotide

SEQ ID NO: 649059 - DNA, 55 bp, Artificial; identical to SEQ ID NO: 181999
  Synthetic oligonucleotide

SEQ ID NO: 649060 - DNA, 54 bp, Artificial; identical to SEQ ID NO: 171124
  Synthetic oligonucleotide

SEQ ID NO: 649061 - DNA, 54 bp, Artificial; identical to SEQ ID NO: 218308
  Synthetic oligonucleotide

SEQ ID NO: 649062 - DNA, 55 bp, Artificial; identical to SEQ ID NO: 181998
  Synthetic oligonucleotide

SEQ ID NO: 649063 - DNA, 51 bp, Artificial; identical to SEQ ID NO: 216842
  Synthetic oligonucleotide

SEQ ID NO: 649064 - DNA, 54 bp, Artificial; identical to SEQ ID NO: 185054
  Synthetic oligonucleotide

SEQ ID NO: 649065 - DNA, 54 bp, Artificial; identical to SEQ ID NO: 191147
  Synthetic oligonucleotide

SEQ ID NO: 649066 - DNA, 55 bp, Artificial; identical to SEQ ID NO: 181997
  Synthetic oligonucleotide

SEQ ID NO: 649067 - DNA, 55 bp, Artificial; identical to SEQ ID NO: 243572
  Synthetic oligonucleotide

SEQ ID NO: 649068 - DNA, 53 bp, Artificial; identical to SEQ ID NO: 142673
  Synthetic oligonucleotide

SEQ ID NO: 649069 - DNA, 57 bp, Artificial; identical to SEQ ID NO: 242526
  Synthetic oligonucleotide

SEQ ID NO: 649070 - DNA, 53 bp, Artificial; identical to SEQ ID NO: 169355
  Synthetic oligonucleotide

SEQ ID NO: 649071 - DNA, 56 bp, Artificial; identical to SEQ ID NO: 247244
  Synthetic oligonucleotide

SEQ ID NO: 649072 - DNA, 51 bp, Artificial; identical to SEQ ID NO: 246642
  Synthetic oligonucleotide

SEQ ID NO: 649073 - DNA, 55 bp, Artificial; identical to SEQ ID NO: 242363
  Synthetic oligonucleotide

SEQ ID NO: 649074 - DNA, 60 bp, Artificial; identical to SEQ ID NO: 206830
  Synthetic oligonucleotide

SEQ ID NO: 649075 - DNA, 50 bp, Artificial; identical to SEQ ID NO: 160606
  Synthetic oligonucleotide

SEQ ID NO: 649076 - DNA, 60 bp, Artificial; identical to SEQ ID NO: 247213
  Synthetic oligonucleotide

SEQ ID NO: 649077 - DNA, 60 bp, Artificial; identical to SEQ ID NO: 200630
  Synthetic oligonucleotide

SEQ ID NO: 649078 - DNA, 50 bp, Artificial; identical to SEQ ID NO: 146526
  Synthetic oligonucleotide

SEQ ID NO: 649079 - DNA, 53 bp, Artificial; identical to SEQ ID NO: 167073
  Synthetic oligonucleotide

SEQ ID NO: 649080 - DNA, 55 bp, Artificial; identical to SEQ ID NO: 211362
  Synthetic oligonucleotide

SEQ ID NO: 649081 - DNA, 55 bp, Artificial; identical to SEQ ID NO: 207168
  Synthetic oligonucleotide

SEQ ID NO: 649082 - DNA, 54 bp, Artificial; identical to SEQ ID NO: 243031
  Synthetic oligonucleotide

SEQ ID NO: 649083 - DNA, 53 bp, Artificial; identical to SEQ ID NO: 185727
  Synthetic oligonucleotide

SEQ ID NO: 649084 - DNA, 51 bp, Artificial; identical to SEQ ID NO: 170240
  Synthetic oligonucleotide

SEQ ID NO: 649085 - DNA, 52 bp, Artificial; identical to SEQ ID NO: 186022
  Synthetic oligonucleotide

SEQ ID NO: 649086 - DNA, 60 bp, Artificial; identical to SEQ ID NO: 256406
  Synthetic oligonucleotide

SEQ ID NO: 649087 - DNA, 55 bp, Artificial; identical to SEQ ID NO: 154068
  Synthetic oligonucleotide

SEQ ID NO: 649088 - DNA, 60 bp, Artificial; identical to SEQ ID NO: 242367
  Synthetic oligonucleotide

SEQ ID NO: 649089 - DNA, 60 bp, Artificial; identical to SEQ ID NO: 248506
  Synthetic oligonucleotide

SEQ ID NO: 649090 - DNA, 55 bp, Artificial; identical to SEQ ID NO: 166126
  Synthetic oligonucleotide

SEQ ID NO: 649091 - DNA, 55 bp, Artificial; identical to SEQ ID NO: 147361
  Synthetic oligonucleotide

SEQ ID NO: 649092 - DNA, 56 bp, Artificial; identical to SEQ ID NO: 206832
  Synthetic oligonucleotide

SEQ ID NO: 649093 - DNA, 58 bp, Artificial; identical to SEQ ID NO: 142735
  Synthetic oligonucleotide

SEQ ID NO: 649094 - DNA, 54 bp, Artificial; identical to SEQ ID NO: 178568
  Synthetic oligonucleotide

SEQ ID NO: 649095 - DNA, 55 bp, Artificial; identical to SEQ ID NO: 254036
  Synthetic oligonucleotide

SEQ ID NO: 649096 - DNA, 55 bp, Artificial; identical to SEQ ID NO: 239984
  Synthetic oligonucleotide

SEQ ID NO: 649097 - DNA, 58 bp, Artificial; identical to SEQ ID NO: 243574
  Synthetic oligonucleotide

SEQ ID NO: 649098 - DNA, 53 bp, Artificial; identical to SEQ ID NO: 224892
  Synthetic oligonucleotide

SEQ ID NO: 649099 - DNA, 53 bp, Artificial; identical to SEQ ID NO: 246311
  Synthetic oligonucleotide

SEQ ID NO: 649100 - DNA, 51 bp, Artificial; identical to SEQ ID NO: 188830
  Synthetic oligonucleotide

SEQ ID NO: 649101 - DNA, 55 bp, Artificial; identical to SEQ ID NO: 142153
  Synthetic oligonucleotide

SEQ ID NO: 649102 - DNA, 60 bp, Artificial; identical to SEQ ID NO: 200629
  Synthetic oligonucleotide

SEQ ID NO: 649103 - DNA, 52 bp, Artificial; identical to SEQ ID NO: 199939
  Synthetic oligonucleotide

SEQ ID NO: 649104 - DNA, 55 bp, Artificial; identical to SEQ ID NO: 181992
  Synthetic oligonucleotide

SEQ ID NO: 649105 - DNA, 59 bp, Artificial; identical to SEQ ID NO: 209842
  Synthetic oligonucleotide

SEQ ID NO: 649106 - DNA, 55 bp, Artificial; identical to SEQ ID NO: 190298
  Synthetic oligonucleotide

SEQ ID NO: 649107 - DNA, 51 bp, Artificial; identical to SEQ ID NO: 200068
  Synthetic oligonucleotide

SEQ ID NO: 649108 - DNA, 59 bp, Artificial; identical to SEQ ID NO: 242495
  Synthetic oligonucleotide

SEQ ID NO: 649109 - DNA, 51 bp, Artificial; identical to SEQ ID NO: 165163
  Synthetic oligonucleotide

SEQ ID NO: 649110 - DNA, 50 bp, Artificial; identical to SEQ ID NO: 150158
  Synthetic oligonucleotide

SEQ ID NO: 649111 - DNA, 55 bp, Artificial; identical to SEQ ID NO: 220639
  Synthetic oligonucleotide

SEQ ID NO: 649112 - DNA, 55 bp, Artificial; identical to SEQ ID NO: 239952
  Synthetic oligonucleotide

SEQ ID NO: 649113 - DNA, 55 bp, Artificial; identical to SEQ ID NO: 254087
  Synthetic oligonucleotide

SEQ ID NO: 649114 - DNA, 60 bp, Artificial; identical to SEQ ID NO: 197481
  Synthetic oligonucleotide

SEQ ID NO: 649115 - DNA, 50 bp, Artificial; identical to SEQ ID NO: 200231
  Synthetic oligonucleotide

SEQ ID NO: 649116 - DNA, 55 bp, Artificial; identical to SEQ ID NO: 242371
  Synthetic oligonucleotide

SEQ ID NO: 649117 - DNA, 55 bp, Artificial; identical to SEQ ID NO: 218221
  Synthetic oligonucleotide

SEQ ID NO: 649118 - DNA, 53 bp, Artificial; identical to SEQ ID NO: 199779
  Synthetic oligonucleotide

SEQ ID NO: 649119 - DNA, 54 bp, Artificial; identical to SEQ ID NO: 185114
  Synthetic oligonucleotide

SEQ ID NO: 649120 - DNA, 60 bp, Artificial; identical to SEQ ID NO: 200628
  Synthetic oligonucleotide

SEQ ID NO: 649121 - DNA, 54 bp, Artificial; identical to SEQ ID NO: 170009
  Synthetic oligonucleotide

SEQ ID NO: 649122 - DNA, 60 bp, Artificial; identical to SEQ ID NO: 210713
  Synthetic oligonucleotide

SEQ ID NO: 649123 - DNA, 54 bp, Artificial; identical to SEQ ID NO: 243995
  Synthetic oligonucleotide

SEQ ID NO: 649124 - DNA, 52 bp, Artificial; identical to SEQ ID NO: 178566
  Synthetic oligonucleotide

SEQ ID NO: 649125 - DNA, 53 bp, Artificial; identical to SEQ ID NO: 249437
  Synthetic oligonucleotide

SEQ ID NO: 649126 - DNA, 55 bp, Artificial; identical to SEQ ID NO: 160991
  Synthetic oligonucleotide

SEQ ID NO: 649127 - DNA, 56 bp, Artificial; identical to SEQ ID NO: 142672
  Synthetic oligonucleotide

SEQ ID NO: 649128 - DNA, 55 bp, Artificial; identical to SEQ ID NO: 198419
  Synthetic oligonucleotide

SEQ ID NO: 649129 - DNA, 54 bp, Artificial; identical to SEQ ID NO: 242377
  Synthetic oligonucleotide

SEQ ID NO: 649130 - DNA, 56 bp, Artificial; identical to SEQ ID NO: 242378
  Synthetic oligonucleotide

SEQ ID NO: 649131 - DNA, 54 bp, Artificial; identical to SEQ ID NO: 192015
  Synthetic oligonucleotide

SEQ ID NO: 649132 - DNA, 53 bp, Artificial; identical to SEQ ID NO: 218335
  Synthetic oligonucleotide

SEQ ID NO: 649133 - DNA, 54 bp, Artificial; identical to SEQ ID NO: 188000
  Synthetic oligonucleotide

SEQ ID NO: 649134 - DNA, 59 bp, Artificial; identical to SEQ ID NO: 178565
  Synthetic oligonucleotide

SEQ ID NO: 649135 - DNA, 50 bp, Artificial; identical to SEQ ID NO: 176176
  Synthetic oligonucleotide

SEQ ID NO: 649136 - DNA, 55 bp, Artificial; identical to SEQ ID NO: 198418
  Synthetic oligonucleotide

SEQ ID NO: 649137 - DNA, 58 bp, Artificial; identical to SEQ ID NO: 167144
  Synthetic oligonucleotide

SEQ ID NO: 649138 - DNA, 56 bp, Artificial; identical to SEQ ID NO: 190720
  Synthetic oligonucleotide

SEQ ID NO: 649139 - DNA, 51 bp, Artificial; identical to SEQ ID NO: 186630
  Synthetic oligonucleotide

SEQ ID NO: 649140 - DNA, 51 bp, Artificial; identical to SEQ ID NO: 149800
  Synthetic oligonucleotide

SEQ ID NO: 649141 - DNA, 57 bp, Artificial; identical to SEQ ID NO: 217041
  Synthetic oligonucleotide

SEQ ID NO: 649142 - DNA, 57 bp, Artificial; identical to SEQ ID NO: 178564
  Synthetic oligonucleotide

SEQ ID NO: 649143 - DNA, 54 bp, Artificial; identical to SEQ ID NO: 244316
  Synthetic oligonucleotide

SEQ ID NO: 649144 - DNA, 57 bp, Artificial; identical to SEQ ID NO: 178562
  Synthetic oligonucleotide

SEQ ID NO: 649145 - DNA, 55 bp, Artificial; identical to SEQ ID NO: 200626
  Synthetic oligonucleotide

SEQ ID NO: 649146 - DNA, 58 bp, Artificial; identical to SEQ ID NO: 243578
  Synthetic oligonucleotide

SEQ ID NO: 649147 - DNA, 53 bp, Artificial; identical to SEQ ID NO: 160414
  Synthetic oligonucleotide

SEQ ID NO: 649148 - DNA, 58 bp, Artificial; identical to SEQ ID NO: 242379
  Synthetic oligonucleotide

SEQ ID NO: 649149 - DNA, 55 bp, Artificial; identical to SEQ ID NO: 155933
  Synthetic oligonucleotide

SEQ ID NO: 649150 - DNA, 60 bp, Artificial; identical to SEQ ID NO: 200624
  Synthetic oligonucleotide

SEQ ID NO: 649151 - DNA, 57 bp, Artificial; identical to SEQ ID NO: 179792
  Synthetic oligonucleotide

SEQ ID NO: 649152 - DNA, 53 bp, Artificial; identical to SEQ ID NO: 240790
  Synthetic oligonucleotide

SEQ ID NO: 649153 - DNA, 56 bp, Artificial; identical to SEQ ID NO: 200623
  Synthetic oligonucleotide

SEQ ID NO: 649154 - DNA, 60 bp, Artificial; identical to SEQ ID NO: 144314
  Synthetic oligonucleotide

SEQ ID NO: 649155 - DNA, 50 bp, Artificial; identical to SEQ ID NO: 241196
  Synthetic oligonucleotide

SEQ ID NO: 649156 - DNA, 55 bp, Artificial; identical to SEQ ID NO: 202289
  Synthetic oligonucleotide

SEQ ID NO: 649157 - DNA, 52 bp, Artificial; identical to SEQ ID NO: 243579
  Synthetic oligonucleotide

SEQ ID NO: 649158 - DNA, 52 bp, Artificial; identical to SEQ ID NO: 247562
  Synthetic oligonucleotide

SEQ ID NO: 649159 - DNA, 54 bp, Artificial; identical to SEQ ID NO: 198416
  Synthetic oligonucleotide

SEQ ID NO: 649160 - DNA, 59 bp, Artificial; identical to SEQ ID NO: 201870
  Synthetic oligonucleotide

SEQ ID NO: 649161 - DNA, 54 bp, Artificial; identical to SEQ ID NO: 203474
  Synthetic oligonucleotide

SEQ ID NO: 649162 - DNA, 51 bp, Artificial; identical to SEQ ID NO: 170233
  Synthetic oligonucleotide

SEQ ID NO: 649163 - DNA, 55 bp, Artificial; identical to SEQ ID NO: 155935
  Synthetic oligonucleotide

SEQ ID NO: 649164 - DNA, 52 bp, Artificial; identical to SEQ ID NO: 154619
  Synthetic oligonucleotide

SEQ ID NO: 649165 - DNA, 60 bp, Artificial; identical to SEQ ID NO: 178557
  Synthetic oligonucleotide

SEQ ID NO: 649166 - DNA, 55 bp, Artificial; identical to SEQ ID NO: 225118
  Synthetic oligonucleotide

SEQ ID NO: 649167 - DNA, 55 bp, Artificial; identical to SEQ ID NO: 188251
  Synthetic oligonucleotide

SEQ ID NO: 649168 - DNA, 55 bp, Artificial; identical to SEQ ID NO: 155936
  Synthetic oligonucleotide

SEQ ID NO: 649169 - DNA, 54 bp, Artificial; identical to SEQ ID NO: 187175
  Synthetic oligonucleotide

SEQ ID NO: 649170 - DNA, 55 bp, Artificial; identical to SEQ ID NO: 161181
  Synthetic oligonucleotide

SEQ ID NO: 649171 - DNA, 55 bp, Artificial; identical to SEQ ID NO: 155937
  Synthetic oligonucleotide

SEQ ID NO: 649172 - DNA, 55 bp, Artificial; identical to SEQ ID NO: 219695
  Synthetic oligonucleotide

SEQ ID NO: 649173 - DNA, 55 bp, Artificial; identical to SEQ ID NO: 233481
  Synthetic oligonucleotide

SEQ ID NO: 649174 - DNA, 56 bp, Artificial; identical to SEQ ID NO: 242382
  Synthetic oligonucleotide

SEQ ID NO: 649175 - DNA, 56 bp, Artificial; identical to SEQ ID NO: 171009
  Synthetic oligonucleotide

SEQ ID NO: 649176 - DNA, 52 bp, Artificial; identical to SEQ ID NO: 167130
  Synthetic oligonucleotide

SEQ ID NO: 649177 - DNA, 55 bp, Artificial; identical to SEQ ID NO: 166746
  Synthetic oligonucleotide

SEQ ID NO: 649178 - DNA, 56 bp, Artificial; identical to SEQ ID NO: 224388
  Synthetic oligonucleotide

SEQ ID NO: 649179 - DNA, 55 bp, Artificial; identical to SEQ ID NO: 240007
  Synthetic oligonucleotide

SEQ ID NO: 649180 - DNA, 55 bp, Artificial; identical to SEQ ID NO: 142671
  Synthetic oligonucleotide

SEQ ID NO: 649181 - DNA, 55 bp, Artificial; identical to SEQ ID NO: 154387
  Synthetic oligonucleotide

SEQ ID NO: 649182 - DNA, 60 bp, Artificial; identical to SEQ ID NO: 165600
  Synthetic oligonucleotide

SEQ ID NO: 649183 - DNA, 52 bp, Artificial; identical to SEQ ID NO: 144296
  Synthetic oligonucleotide

SEQ ID NO: 649184 - DNA, 51 bp, Artificial; identical to SEQ ID NO: 246139
  Synthetic oligonucleotide

SEQ ID NO: 649185 - DNA, 57 bp, Artificial; identical to SEQ ID NO: 200666
  Synthetic oligonucleotide

SEQ ID NO: 649186 - DNA, 53 bp, Artificial; identical to SEQ ID NO: 149405
  Synthetic oligonucleotide

SEQ ID NO: 649187 - DNA, 55 bp, Artificial; identical to SEQ ID NO: 245053
  Synthetic oligonucleotide

SEQ ID NO: 649188 - DNA, 55 bp, Artificial; identical to SEQ ID NO: 217584
  Synthetic oligonucleotide

SEQ ID NO: 649189 - DNA, 51 bp, Artificial; identical to SEQ ID NO: 241046
  Synthetic oligonucleotide

SEQ ID NO: 649190 - DNA, 55 bp, Artificial; identical to SEQ ID NO: 252712
  Synthetic oligonucleotide

SEQ ID NO: 649191 - DNA, 55 bp, Artificial; identical to SEQ ID NO: 160234
  Synthetic oligonucleotide

SEQ ID NO: 649192 - DNA, 52 bp, Artificial; identical to SEQ ID NO: 186043
  Synthetic oligonucleotide

SEQ ID NO: 649193 - DNA, 50 bp, Artificial; identical to SEQ ID NO: 176135
  Synthetic oligonucleotide

SEQ ID NO: 649194 - DNA, 55 bp, Artificial; identical to SEQ ID NO: 151737
  Synthetic oligonucleotide

SEQ ID NO: 649195 - DNA, 53 bp, Artificial; identical to SEQ ID NO: 181984
  Synthetic oligonucleotide

SEQ ID NO: 649196 - DNA, 57 bp, Artificial; identical to SEQ ID NO: 147196
  Synthetic oligonucleotide

SEQ ID NO: 649197 - DNA, 55 bp, Artificial; identical to SEQ ID NO: 200665
  Synthetic oligonucleotide

SEQ ID NO: 649198 - DNA, 57 bp, Artificial; identical to SEQ ID NO: 200664
  Synthetic oligonucleotide

SEQ ID NO: 649199 - DNA, 58 bp, Artificial; identical to SEQ ID NO: 200663
  Synthetic oligonucleotide

SEQ ID NO: 649200 - DNA, 55 bp, Artificial; identical to SEQ ID NO: 238850
  Synthetic oligonucleotide

SEQ ID NO: 649201 - DNA, 55 bp, Artificial; identical to SEQ ID NO: 233970
  Synthetic oligonucleotide

SEQ ID NO: 649202 - DNA, 55 bp, Artificial; identical to SEQ ID NO: 142154
  Synthetic oligonucleotide

SEQ ID NO: 649203 - DNA, 51 bp, Artificial; identical to SEQ ID NO: 186636
  Synthetic oligonucleotide

SEQ ID NO: 649204 - DNA, 50 bp, Artificial; identical to SEQ ID NO: 206656
  Synthetic oligonucleotide

SEQ ID NO: 649205 - DNA, 55 bp, Artificial; identical to SEQ ID NO: 198412
  Synthetic oligonucleotide

SEQ ID NO: 649206 - DNA, 55 bp, Artificial; identical to SEQ ID NO: 201513
  Synthetic oligonucleotide

SEQ ID NO: 649207 - DNA, 55 bp, Artificial; identical to SEQ ID NO: 151084
  Synthetic oligonucleotide

SEQ ID NO: 649208 - DNA, 58 bp, Artificial; identical to SEQ ID NO: 239290
  Synthetic oligonucleotide

SEQ ID NO: 649209 - DNA, 53 bp, Artificial; identical to SEQ ID NO: 192076
  Synthetic oligonucleotide

SEQ ID NO: 649210 - DNA, 60 bp, Artificial; identical to SEQ ID NO: 238851
  Synthetic oligonucleotide

SEQ ID NO: 649211 - DNA, 55 bp, Artificial; identical to SEQ ID NO: 201868
  Synthetic oligonucleotide

SEQ ID NO: 649212 - DNA, 60 bp, Artificial; identical to SEQ ID NO: 256397
  Synthetic oligonucleotide

SEQ ID NO: 649213 - DNA, 56 bp, Artificial; identical to SEQ ID NO: 171086
  Synthetic oligonucleotide

SEQ ID NO: 649214 - DNA, 53 bp, Artificial; identical to SEQ ID NO: 246308
  Synthetic oligonucleotide

SEQ ID NO: 649215 - DNA, 58 bp, Artificial; identical to SEQ ID NO: 224166
  Synthetic oligonucleotide

SEQ ID NO: 649216 - DNA, 60 bp, Artificial; identical to SEQ ID NO: 225517
  Synthetic oligonucleotide

SEQ ID NO: 649217 - DNA, 60 bp, Artificial; identical to SEQ ID NO: 217043
  Synthetic oligonucleotide

SEQ ID NO: 649218 - DNA, 55 bp, Artificial; identical to SEQ ID NO: 198411
  Synthetic oligonucleotide

SEQ ID NO: 649219 - DNA, 58 bp, Artificial; identical to SEQ ID NO: 238854
  Synthetic oligonucleotide

SEQ ID NO: 649220 - DNA, 55 bp, Artificial; identical to SEQ ID NO: 244240
  Synthetic oligonucleotide

SEQ ID NO: 649221 - DNA, 60 bp, Artificial; identical to SEQ ID NO: 200662
  Synthetic oligonucleotide

SEQ ID NO: 649222 - DNA, 51 bp, Artificial; identical to SEQ ID NO: 170235
  Synthetic oligonucleotide

SEQ ID NO: 649223 - DNA, 59 bp, Artificial; identical to SEQ ID NO: 159823
  Synthetic oligonucleotide

SEQ ID NO: 649224 - DNA, 55 bp, Artificial; identical to SEQ ID NO: 205485
  Synthetic oligonucleotide

SEQ ID NO: 649225 - DNA, 52 bp, Artificial; identical to SEQ ID NO: 243245
  Synthetic oligonucleotide

SEQ ID NO: 649226 - DNA, 57 bp, Artificial; identical to SEQ ID NO: 238858
  Synthetic oligonucleotide

SEQ ID NO: 649227 - DNA, 58 bp, Artificial; identical to SEQ ID NO: 256396
  Synthetic oligonucleotide

SEQ ID NO: 649228 - DNA, 53 bp, Artificial; identical to SEQ ID NO: 245057
  Synthetic oligonucleotide

SEQ ID NO: 649229 - DNA, 52 bp, Artificial; identical to SEQ ID NO: 255466
  Synthetic oligonucleotide

SEQ ID NO: 649230 - DNA, 54 bp, Artificial; identical to SEQ ID NO: 203862
  Synthetic oligonucleotide

SEQ ID NO: 649231 - DNA, 52 bp, Artificial; identical to SEQ ID NO: 149618
  Synthetic oligonucleotide

SEQ ID NO: 649232 - DNA, 55 bp, Artificial; identical to SEQ ID NO: 152366
  Synthetic oligonucleotide

SEQ ID NO: 649233 - DNA, 54 bp, Artificial; identical to SEQ ID NO: 240649
  Synthetic oligonucleotide

SEQ ID NO: 649234 - DNA, 55 bp, Artificial; identical to SEQ ID NO: 233480
  Synthetic oligonucleotide

SEQ ID NO: 649235 - DNA, 55 bp, Artificial; identical to SEQ ID NO: 252974
  Synthetic oligonucleotide

SEQ ID NO: 649236 - DNA, 58 bp, Artificial; identical to SEQ ID NO: 224341
  Synthetic oligonucleotide

SEQ ID NO: 649237 - DNA, 55 bp, Artificial; identical to SEQ ID NO: 182028
  Synthetic oligonucleotide

SEQ ID NO: 649238 - DNA, 54 bp, Artificial; identical to SEQ ID NO: 247226
  Synthetic oligonucleotide

SEQ ID NO: 649239 - DNA, 54 bp, Artificial; identical to SEQ ID NO: 199646
  Synthetic oligonucleotide

SEQ ID NO: 649240 - DNA, 55 bp, Artificial; identical to SEQ ID NO: 217586
  Synthetic oligonucleotide

SEQ ID NO: 649241 - DNA, 57 bp, Artificial; identical to SEQ ID NO: 207054
  Synthetic oligonucleotide

SEQ ID NO: 649242 - DNA, 55 bp, Artificial; identical to SEQ ID NO: 153404
  Synthetic oligonucleotide

SEQ ID NO: 649243 - DNA, 60 bp, Artificial; identical to SEQ ID NO: 217044
  Synthetic oligonucleotide

SEQ ID NO: 649244 - DNA, 51 bp, Artificial; identical to SEQ ID NO: 170201
  Synthetic oligonucleotide

SEQ ID NO: 649245 - DNA, 55 bp, Artificial; identical to SEQ ID NO: 147629
  Synthetic oligonucleotide

SEQ ID NO: 649246 - DNA, 55 bp, Artificial; identical to SEQ ID NO: 209344
  Synthetic oligonucleotide

SEQ ID NO: 649247 - DNA, 60 bp, Artificial; identical to SEQ ID NO: 161275
  Synthetic oligonucleotide

SEQ ID NO: 649248 - DNA, 60 bp, Artificial; identical to SEQ ID NO: 159819
  Synthetic oligonucleotide

SEQ ID NO: 649249 - DNA, 54 bp, Artificial; identical to SEQ ID NO: 240608
  Synthetic oligonucleotide

SEQ ID NO: 649250 - DNA, 54 bp, Artificial; identical to SEQ ID NO: 219477
  Synthetic oligonucleotide

SEQ ID NO: 649251 - DNA, 56 bp, Artificial; identical to SEQ ID NO: 200658
  Synthetic oligonucleotide

SEQ ID NO: 649252 - DNA, 55 bp, Artificial; identical to SEQ ID NO: 245100
  Synthetic oligonucleotide

SEQ ID NO: 649253 - DNA, 55 bp, Artificial; identical to SEQ ID NO: 198409
  Synthetic oligonucleotide

SEQ ID NO: 649254 - DNA, 55 bp, Artificial; identical to SEQ ID NO: 208186
  Synthetic oligonucleotide

SEQ ID NO: 649255 - DNA, 55 bp, Artificial; identical to SEQ ID NO: 171344
  Synthetic oligonucleotide

SEQ ID NO: 649256 - DNA, 51 bp, Artificial; identical to SEQ ID NO: 241031
  Synthetic oligonucleotide

SEQ ID NO: 649257 - DNA, 50 bp, Artificial; identical to SEQ ID NO: 160654
  Synthetic oligonucleotide

SEQ ID NO: 649258 - DNA, 55 bp, Artificial; identical to SEQ ID NO: 245101
  Synthetic oligonucleotide

SEQ ID NO: 649259 - DNA, 55 bp, Artificial; identical to SEQ ID NO: 168386
  Synthetic oligonucleotide

SEQ ID NO: 649260 - DNA, 51 bp, Artificial; identical to SEQ ID NO: 149802
  Synthetic oligonucleotide

SEQ ID NO: 649261 - DNA, 54 bp, Artificial; identical to SEQ ID NO: 151985
  Synthetic oligonucleotide

SEQ ID NO: 649262 - DNA, 55 bp, Artificial; identical to SEQ ID NO: 260194
  Synthetic oligonucleotide

SEQ ID NO: 649263 - DNA, 55 bp, Artificial; identical to SEQ ID NO: 245105
  Synthetic oligonucleotide

SEQ ID NO: 649264 - DNA, 55 bp, Artificial; identical to SEQ ID NO: 155941
  Synthetic oligonucleotide

SEQ ID NO: 649265 - DNA, 59 bp, Artificial; identical to SEQ ID NO: 224168
  Synthetic oligonucleotide

SEQ ID NO: 649266 - DNA, 55 bp, Artificial; identical to SEQ ID NO: 238356
  Synthetic oligonucleotide

SEQ ID NO: 649267 - DNA, 58 bp, Artificial; identical to SEQ ID NO: 208951
  Synthetic oligonucleotide

SEQ ID NO: 649268 - DNA, 58 bp, Artificial; identical to SEQ ID NO: 200657
  Synthetic oligonucleotide

SEQ ID NO: 649269 - DNA, 60 bp, Artificial; identical to SEQ ID NO: 165634
  Synthetic oligonucleotide

SEQ ID NO: 649270 - DNA, 51 bp, Artificial; identical to SEQ ID NO: 203016
  Synthetic oligonucleotide

SEQ ID NO: 649271 - DNA, 60 bp, Artificial; identical to SEQ ID NO: 200656
  Synthetic oligonucleotide

SEQ ID NO: 649272 - DNA, 53 bp, Artificial; identical to SEQ ID NO: 253294
  Synthetic oligonucleotide

SEQ ID NO: 649273 - DNA, 55 bp, Artificial; identical to SEQ ID NO: 238355
  Synthetic oligonucleotide

SEQ ID NO: 649274 - DNA, 55 bp, Artificial; identical to SEQ ID NO: 244269
  Synthetic oligonucleotide

SEQ ID NO: 649275 - DNA, 55 bp, Artificial; identical to SEQ ID NO: 233478
  Synthetic oligonucleotide

SEQ ID NO: 649276 - DNA, 50 bp, Artificial; identical to SEQ ID NO: 261988
  Synthetic oligonucleotide

SEQ ID NO: 649277 - DNA, 51 bp, Artificial; identical to SEQ ID NO: 239444
  Synthetic oligonucleotide

SEQ ID NO: 649278 - DNA, 50 bp, Artificial; identical to SEQ ID NO: 165671
  Synthetic oligonucleotide

SEQ ID NO: 649279 - DNA, 55 bp, Artificial; identical to SEQ ID NO: 254091
  Synthetic oligonucleotide

SEQ ID NO: 649280 - DNA, 59 bp, Artificial; identical to SEQ ID NO: 191687
  Synthetic oligonucleotide

SEQ ID NO: 649281 - DNA, 57 bp, Artificial; identical to SEQ ID NO: 201978
  Synthetic oligonucleotide

SEQ ID NO: 649282 - DNA, 59 bp, Artificial; identical to SEQ ID NO: 178592
  Synthetic oligonucleotide

SEQ ID NO: 649283 - DNA, 55 bp, Artificial; identical to SEQ ID NO: 155944
  Synthetic oligonucleotide

SEQ ID NO: 649284 - DNA, 55 bp, Artificial; identical to SEQ ID NO: 187796
  Synthetic oligonucleotide

SEQ ID NO: 649285 - DNA, 55 bp, Artificial; identical to SEQ ID NO: 211357
  Synthetic oligonucleotide

SEQ ID NO: 649286 - DNA, 58 bp, Artificial; identical to SEQ ID NO: 243583
  Synthetic oligonucleotide

SEQ ID NO: 649287 - DNA, 54 bp, Artificial; identical to SEQ ID NO: 217046
  Synthetic oligonucleotide

SEQ ID NO: 649288 - DNA, 56 bp, Artificial; identical to SEQ ID NO: 151069
  Synthetic oligonucleotide

SEQ ID NO: 649289 - DNA, 53 bp, Artificial; identical to SEQ ID NO: 152552
  Synthetic oligonucleotide

SEQ ID NO: 649290 - DNA, 57 bp, Artificial; identical to SEQ ID NO: 147235
  Synthetic oligonucleotide

SEQ ID NO: 649291 - DNA, 55 bp, Artificial; identical to SEQ ID NO: 147673
  Synthetic oligonucleotide

SEQ ID NO: 649292 - DNA, 60 bp, Artificial; identical to SEQ ID NO: 200655
  Synthetic oligonucleotide

SEQ ID NO: 649293 - DNA, 55 bp, Artificial; identical to SEQ ID NO: 144238
  Synthetic oligonucleotide

SEQ ID NO: 649294 - DNA, 54 bp, Artificial; identical to SEQ ID NO: 191161
  Synthetic oligonucleotide

SEQ ID NO: 649295 - DNA, 58 bp, Artificial; identical to SEQ ID NO: 200654
  Synthetic oligonucleotide

SEQ ID NO: 649296 - DNA, 55 bp, Artificial; identical to SEQ ID NO: 198408
  Synthetic oligonucleotide

SEQ ID NO: 649297 - DNA, 53 bp, Artificial; identical to SEQ ID NO: 192074
  Synthetic oligonucleotide

SEQ ID NO: 649298 - DNA, 60 bp, Artificial; identical to SEQ ID NO: 256394
  Synthetic oligonucleotide

SEQ ID NO: 649299 - DNA, 55 bp, Artificial; identical to SEQ ID NO: 147674
  Synthetic oligonucleotide

SEQ ID NO: 649300 - DNA, 53 bp, Artificial; identical to SEQ ID NO: 203887
  Synthetic oligonucleotide

SEQ ID NO: 649301 - DNA, 50 bp, Artificial; identical to SEQ ID NO: 176220
  Synthetic oligonucleotide

SEQ ID NO: 649302 - DNA, 59 bp, Artificial; identical to SEQ ID NO: 217248
  Synthetic oligonucleotide

SEQ ID NO: 649303 - DNA, 55 bp, Artificial; identical to SEQ ID NO: 171353
  Synthetic oligonucleotide

SEQ ID NO: 649304 - DNA, 58 bp, Artificial; identical to SEQ ID NO: 247229
  Synthetic oligonucleotide

SEQ ID NO: 649305 - DNA, 53 bp, Artificial; identical to SEQ ID NO: 164941
  Synthetic oligonucleotide

SEQ ID NO: 649306 - DNA, 60 bp, Artificial; identical to SEQ ID NO: 194123
  Synthetic oligonucleotide

SEQ ID NO: 649307 - DNA, 53 bp, Artificial; identical to SEQ ID NO: 160434
  Synthetic oligonucleotide

SEQ ID NO: 649308 - DNA, 55 bp, Artificial; identical to SEQ ID NO: 265628
  Synthetic oligonucleotide

SEQ ID NO: 649309 - DNA, 54 bp, Artificial; identical to SEQ ID NO: 185089
  Synthetic oligonucleotide

SEQ ID NO: 649310 - DNA, 55 bp, Artificial; identical to SEQ ID NO: 175302
  Synthetic oligonucleotide

SEQ ID NO: 649311 - DNA, 59 bp, Artificial; identical to SEQ ID NO: 165656
  Synthetic oligonucleotide

SEQ ID NO: 649312 - DNA, 55 bp, Artificial; identical to SEQ ID NO: 162028
  Synthetic oligonucleotide

SEQ ID NO: 649313 - DNA, 57 bp, Artificial; identical to SEQ ID NO: 256392
  Synthetic oligonucleotide

SEQ ID NO: 649314 - DNA, 54 bp, Artificial; identical to SEQ ID NO: 209575
  Synthetic oligonucleotide

SEQ ID NO: 649315 - DNA, 55 bp, Artificial; identical to SEQ ID NO: 163842
  Synthetic oligonucleotide

SEQ ID NO: 649316 - DNA, 55 bp, Artificial; identical to SEQ ID NO: 217589
  Synthetic oligonucleotide

SEQ ID NO: 649317 - DNA, 57 bp, Artificial; identical to SEQ ID NO: 247113
  Synthetic oligonucleotide

SEQ ID NO: 649318 - DNA, 53 bp, Artificial; identical to SEQ ID NO: 202231
  Synthetic oligonucleotide

SEQ ID NO: 649319 - DNA, 55 bp, Artificial; identical to SEQ ID NO: 263179
  Synthetic oligonucleotide

SEQ ID NO: 649320 - DNA, 58 bp, Artificial; identical to SEQ ID NO: 197781
  Synthetic oligonucleotide

SEQ ID NO: 649321 - DNA, 59 bp, Artificial; identical to SEQ ID NO: 142670
  Synthetic oligonucleotide

SEQ ID NO: 649322 - DNA, 60 bp, Artificial; identical to SEQ ID NO: 247114
  Synthetic oligonucleotide

SEQ ID NO: 649323 - DNA, 60 bp, Artificial; identical to SEQ ID NO: 151097
  Synthetic oligonucleotide

SEQ ID NO: 649324 - DNA, 58 bp, Artificial; identical to SEQ ID NO: 151095
  Synthetic oligonucleotide

SEQ ID NO: 649325 - DNA, 60 bp, Artificial; identical to SEQ ID NO: 238814
  Synthetic oligonucleotide

SEQ ID NO: 649326 - DNA, 51 bp, Artificial; identical to SEQ ID NO: 141676
  Synthetic oligonucleotide

SEQ ID NO: 649327 - DNA, 60 bp, Artificial; identical to SEQ ID NO: 144721
  Synthetic oligonucleotide

SEQ ID NO: 649328 - DNA, 56 bp, Artificial; identical to SEQ ID NO: 151091
  Synthetic oligonucleotide

SEQ ID NO: 649329 - DNA, 57 bp, Artificial; identical to SEQ ID NO: 151089
  Synthetic oligonucleotide

SEQ ID NO: 649330 - DNA, 53 bp, Artificial; identical to SEQ ID NO: 185696
  Synthetic oligonucleotide

SEQ ID NO: 649331 - DNA, 54 bp, Artificial; identical to SEQ ID NO: 238816
  Synthetic oligonucleotide

SEQ ID NO: 649332 - DNA, 58 bp, Artificial; identical to SEQ ID NO: 191704
  Synthetic oligonucleotide

SEQ ID NO: 649333 - DNA, 60 bp, Artificial; identical to SEQ ID NO: 238817
  Synthetic oligonucleotide

SEQ ID NO: 649334 - DNA, 50 bp, Artificial; identical to SEQ ID NO: 170950
  Synthetic oligonucleotide

SEQ ID NO: 649335 - DNA, 56 bp, Artificial; identical to SEQ ID NO: 256390
  Synthetic oligonucleotide

SEQ ID NO: 649336 - DNA, 60 bp, Artificial; identical to SEQ ID NO: 237720
  Synthetic oligonucleotide

SEQ ID NO: 649337 - DNA, 53 bp, Artificial; identical to SEQ ID NO: 243980
  Synthetic oligonucleotide

SEQ ID NO: 649338 - DNA, 50 bp, Artificial; identical to SEQ ID NO: 187143
  Synthetic oligonucleotide

SEQ ID NO: 649339 - DNA, 50 bp, Artificial; identical to SEQ ID NO: 161481
  Synthetic oligonucleotide

SEQ ID NO: 649340 - DNA, 52 bp, Artificial; identical to SEQ ID NO: 237066
  Synthetic oligonucleotide

SEQ ID NO: 649341 - DNA, 60 bp, Artificial; identical to SEQ ID NO: 237721
  Synthetic oligonucleotide

SEQ ID NO: 649342 - DNA, 56 bp, Artificial; identical to SEQ ID NO: 238818
  Synthetic oligonucleotide

SEQ ID NO: 649343 - DNA, 57 bp, Artificial; identical to SEQ ID NO: 243587
  Synthetic oligonucleotide

SEQ ID NO: 649344 - DNA, 56 bp, Artificial; identical to SEQ ID NO: 180050
  Synthetic oligonucleotide

SEQ ID NO: 649345 - DNA, 60 bp, Artificial; identical to SEQ ID NO: 200652
  Synthetic oligonucleotide

SEQ ID NO: 649346 - DNA, 59 bp, Artificial; identical to SEQ ID NO: 239236
  Synthetic oligonucleotide

SEQ ID NO: 649347 - DNA, 60 bp, Artificial; identical to SEQ ID NO: 178588
  Synthetic oligonucleotide

SEQ ID NO: 649348 - DNA, 51 bp, Artificial; identical to SEQ ID NO: 202555
  Synthetic oligonucleotide

SEQ ID NO: 649349 - DNA, 54 bp, Artificial; identical to SEQ ID NO: 223483
  Synthetic oligonucleotide

SEQ ID NO: 649350 - DNA, 55 bp, Artificial; identical to SEQ ID NO: 194520
  Synthetic oligonucleotide

SEQ ID NO: 649351 - DNA, 55 bp, Artificial; identical to SEQ ID NO: 146304
  Synthetic oligonucleotide

SEQ ID NO: 649352 - DNA, 56 bp, Artificial; identical to SEQ ID NO: 159817
  Synthetic oligonucleotide

SEQ ID NO: 649353 - DNA, 51 bp, Artificial; identical to SEQ ID NO: 157735
  Synthetic oligonucleotide

SEQ ID NO: 649354 - DNA, 57 bp, Artificial; identical to SEQ ID NO: 203342
  Synthetic oligonucleotide

SEQ ID NO: 649355 - DNA, 54 bp, Artificial; identical to SEQ ID NO: 153535
  Synthetic oligonucleotide

SEQ ID NO: 649356 - DNA, 55 bp, Artificial; identical to SEQ ID NO: 244956
  Synthetic oligonucleotide

SEQ ID NO: 649357 - DNA, 60 bp, Artificial; identical to SEQ ID NO: 247117
  Synthetic oligonucleotide

SEQ ID NO: 649358 - DNA, 55 bp, Artificial; identical to SEQ ID NO: 182024
  Synthetic oligonucleotide

SEQ ID NO: 649359 - DNA, 59 bp, Artificial; identical to SEQ ID NO: 234420
  Synthetic oligonucleotide

SEQ ID NO: 649360 - DNA, 55 bp, Artificial; identical to SEQ ID NO: 182022
  Synthetic oligonucleotide

SEQ ID NO: 649361 - DNA, 51 bp, Artificial; identical to SEQ ID NO: 200041
  Synthetic oligonucleotide

SEQ ID NO: 649362 - DNA, 50 bp, Artificial; identical to SEQ ID NO: 210529
  Synthetic oligonucleotide

SEQ ID NO: 649363 - DNA, 57 bp, Artificial; identical to SEQ ID NO: 141678
  Synthetic oligonucleotide

SEQ ID NO: 649364 - DNA, 51 bp, Artificial; identical to SEQ ID NO: 193808
  Synthetic oligonucleotide

SEQ ID NO: 649365 - DNA, 53 bp, Artificial; identical to SEQ ID NO: 202468
  Synthetic oligonucleotide

SEQ ID NO: 649366 - DNA, 56 bp, Artificial; identical to SEQ ID NO: 178585
  Synthetic oligonucleotide

SEQ ID NO: 649367 - DNA, 55 bp, Artificial; identical to SEQ ID NO: 155945
  Synthetic oligonucleotide

SEQ ID NO: 649368 - DNA, 55 bp, Artificial; identical to SEQ ID NO: 261861
  Synthetic oligonucleotide

SEQ ID NO: 649369 - DNA, 54 bp, Artificial; identical to SEQ ID NO: 147517
  Synthetic oligonucleotide

SEQ ID NO: 649370 - DNA, 57 bp, Artificial; identical to SEQ ID NO: 165856
  Synthetic oligonucleotide

SEQ ID NO: 649371 - DNA, 60 bp, Artificial; identical to SEQ ID NO: 178584
  Synthetic oligonucleotide

SEQ ID NO: 649372 - DNA, 59 bp, Artificial; identical to SEQ ID NO: 238824
  Synthetic oligonucleotide

SEQ ID NO: 649373 - DNA, 55 bp, Artificial; identical to SEQ ID NO: 221458
  Synthetic oligonucleotide

SEQ ID NO: 649374 - DNA, 60 bp, Artificial; identical to SEQ ID NO: 200651
  Synthetic oligonucleotide

SEQ ID NO: 649375 - DNA, 60 bp, Artificial; identical to SEQ ID NO: 178582
  Synthetic oligonucleotide

SEQ ID NO: 649376 - DNA, 60 bp, Artificial; identical to SEQ ID NO: 156754
  Synthetic oligonucleotide

SEQ ID NO: 649377 - DNA, 53 bp, Artificial; identical to SEQ ID NO: 149491
  Synthetic oligonucleotide

SEQ ID NO: 649378 - DNA, 59 bp, Artificial; identical to SEQ ID NO: 247434
  Synthetic oligonucleotide

SEQ ID NO: 649379 - DNA, 60 bp, Artificial; identical to SEQ ID NO: 178581
  Synthetic oligonucleotide

SEQ ID NO: 649380 - DNA, 52 bp, Artificial; identical to SEQ ID NO: 258181
  Synthetic oligonucleotide

SEQ ID NO: 649381 - DNA, 59 bp, Artificial; identical to SEQ ID NO: 147085
  Synthetic oligonucleotide

SEQ ID NO: 649382 - DNA, 55 bp, Artificial; identical to SEQ ID NO: 154389
  Synthetic oligonucleotide

SEQ ID NO: 649383 - DNA, 60 bp, Artificial; identical to SEQ ID NO: 151057
  Synthetic oligonucleotide

SEQ ID NO: 649384 - DNA, 55 bp, Artificial; identical to SEQ ID NO: 207164
  Synthetic oligonucleotide

SEQ ID NO: 649385 - DNA, 57 bp, Artificial; identical to SEQ ID NO: 152221
  Synthetic oligonucleotide

SEQ ID NO: 649386 - DNA, 59 bp, Artificial; identical to SEQ ID NO: 206841
  Synthetic oligonucleotide

SEQ ID NO: 649387 - DNA, 60 bp, Artificial; identical to SEQ ID NO: 257412
  Synthetic oligonucleotide

SEQ ID NO: 649388 - DNA, 55 bp, Artificial; identical to SEQ ID NO: 198406
  Synthetic oligonucleotide

SEQ ID NO: 649389 - DNA, 51 bp, Artificial; identical to SEQ ID NO: 258200
  Synthetic oligonucleotide

SEQ ID NO: 649390 - DNA, 55 bp, Artificial; identical to SEQ ID NO: 151736
  Synthetic oligonucleotide

SEQ ID NO: 649391 - DNA, 54 bp, Artificial; identical to SEQ ID NO: 166144
  Synthetic oligonucleotide

SEQ ID NO: 649392 - DNA, 54 bp, Artificial; identical to SEQ ID NO: 166080
  Synthetic oligonucleotide

SEQ ID NO: 649393 - DNA, 60 bp, Artificial; identical to SEQ ID NO: 257410
  Synthetic oligonucleotide

SEQ ID NO: 649394 - DNA, 51 bp, Artificial; identical to SEQ ID NO: 243295
  Synthetic oligonucleotide

SEQ ID NO: 649395 - DNA, 55 bp, Artificial; identical to SEQ ID NO: 178579
  Synthetic oligonucleotide

SEQ ID NO: 649396 - DNA, 51 bp, Artificial; identical to SEQ ID NO: 165165
  Synthetic oligonucleotide

SEQ ID NO: 649397 - DNA, 59 bp, Artificial; identical to SEQ ID NO: 243924
  Synthetic oligonucleotide

SEQ ID NO: 649398 - DNA, 55 bp, Artificial; identical to SEQ ID NO: 238828
  Synthetic oligonucleotide

SEQ ID NO: 649399 - DNA, 60 bp, Artificial; identical to SEQ ID NO: 178578
  Synthetic oligonucleotide

SEQ ID NO: 649400 - DNA, 51 bp, Artificial; identical to SEQ ID NO: 186708
  Synthetic oligonucleotide

SEQ ID NO: 649401 - DNA, 52 bp, Artificial; identical to SEQ ID NO: 223671
  Synthetic oligonucleotide

SEQ ID NO: 649402 - DNA, 55 bp, Artificial; identical to SEQ ID NO: 221457
  Synthetic oligonucleotide

SEQ ID NO: 649403 - DNA, 55 bp, Artificial; identical to SEQ ID NO: 188249
  Synthetic oligonucleotide

SEQ ID NO: 649404 - DNA, 55 bp, Artificial; identical to SEQ ID NO: 260193
  Synthetic oligonucleotide

SEQ ID NO: 649405 - DNA, 60 bp, Artificial; identical to SEQ ID NO: 165834
  Synthetic oligonucleotide

SEQ ID NO: 649406 - DNA, 52 bp, Artificial; identical to SEQ ID NO: 165044
  Synthetic oligonucleotide

SEQ ID NO: 649407 - DNA, 52 bp, Artificial; identical to SEQ ID NO: 233842
  Synthetic oligonucleotide

SEQ ID NO: 649408 - DNA, 55 bp, Artificial; identical to SEQ ID NO: 160989
  Synthetic oligonucleotide

SEQ ID NO: 649409 - DNA, 53 bp, Artificial; identical to SEQ ID NO: 199815
  Synthetic oligonucleotide

SEQ ID NO: 649410 - DNA, 57 bp, Artificial; identical to SEQ ID NO: 150849
  Synthetic oligonucleotide

SEQ ID NO: 649411 - DNA, 60 bp, Artificial; identical to SEQ ID NO: 238829
  Synthetic oligonucleotide

SEQ ID NO: 649412 - DNA, 55 bp, Artificial; identical to SEQ ID NO: 247481
  Synthetic oligonucleotide

SEQ ID NO: 649413 - DNA, 50 bp, Artificial; identical to SEQ ID NO: 243392
  Synthetic oligonucleotide

SEQ ID NO: 649414 - DNA, 52 bp, Artificial; identical to SEQ ID NO: 157556
  Synthetic oligonucleotide

SEQ ID NO: 649415 - DNA, 55 bp, Artificial; identical to SEQ ID NO: 197202
  Synthetic oligonucleotide

SEQ ID NO: 649416 - DNA, 57 bp, Artificial; identical to SEQ ID NO: 243590
  Synthetic oligonucleotide

SEQ ID NO: 649417 - DNA, 60 bp, Artificial; identical to SEQ ID NO: 178574
  Synthetic oligonucleotide

SEQ ID NO: 649418 - DNA, 55 bp, Artificial; identical to SEQ ID NO: 182015
  Synthetic oligonucleotide

SEQ ID NO: 649419 - DNA, 51 bp, Artificial; identical to SEQ ID NO: 189687
  Synthetic oligonucleotide

SEQ ID NO: 649420 - DNA, 55 bp, Artificial; identical to SEQ ID NO: 188248
  Synthetic oligonucleotide

SEQ ID NO: 649421 - DNA, 54 bp, Artificial; identical to SEQ ID NO: 194125
  Synthetic oligonucleotide

SEQ ID NO: 649422 - DNA, 56 bp, Artificial; identical to SEQ ID NO: 201862
  Synthetic oligonucleotide

SEQ ID NO: 649423 - DNA, 60 bp, Artificial; identical to SEQ ID NO: 206842
  Synthetic oligonucleotide

SEQ ID NO: 649424 - DNA, 55 bp, Artificial; identical to SEQ ID NO: 208203
  Synthetic oligonucleotide

SEQ ID NO: 649425 - DNA, 51 bp, Artificial; identical to SEQ ID NO: 186709
  Synthetic oligonucleotide

SEQ ID NO: 649426 - DNA, 56 bp, Artificial; identical to SEQ ID NO: 179548
  Synthetic oligonucleotide

SEQ ID NO: 649427 - DNA, 51 bp, Artificial; identical to SEQ ID NO: 186710
  Synthetic oligonucleotide

SEQ ID NO: 649428 - DNA, 54 bp, Artificial; identical to SEQ ID NO: 256422
  Synthetic oligonucleotide

SEQ ID NO: 649429 - DNA, 55 bp, Artificial; identical to SEQ ID NO: 197205
  Synthetic oligonucleotide

SEQ ID NO: 649430 - DNA, 50 bp, Artificial; identical to SEQ ID NO: 153015
  Synthetic oligonucleotide

SEQ ID NO: 649431 - DNA, 57 bp, Artificial; identical to SEQ ID NO: 165800
  Synthetic oligonucleotide

SEQ ID NO: 649432 - DNA, 55 bp, Artificial; identical to SEQ ID NO: 198405
  Synthetic oligonucleotide

SEQ ID NO: 649433 - DNA, 51 bp, Artificial; identical to SEQ ID NO: 187036
  Synthetic oligonucleotide

SEQ ID NO: 649434 - DNA, 57 bp, Artificial; identical to SEQ ID NO: 238830
  Synthetic oligonucleotide

SEQ ID NO: 649435 - DNA, 55 bp, Artificial; identical to SEQ ID NO: 155946
  Synthetic oligonucleotide

SEQ ID NO: 649436 - DNA, 58 bp, Artificial; identical to SEQ ID NO: 165789
  Synthetic oligonucleotide

SEQ ID NO: 649437 - DNA, 60 bp, Artificial; identical to SEQ ID NO: 200650
  Synthetic oligonucleotide

SEQ ID NO: 649438 - DNA, 57 bp, Artificial; identical to SEQ ID NO: 239462
  Synthetic oligonucleotide

SEQ ID NO: 649439 - DNA, 55 bp, Artificial; identical to SEQ ID NO: 194522
  Synthetic oligonucleotide

SEQ ID NO: 649440 - DNA, 57 bp, Artificial; identical to SEQ ID NO: 247469
  Synthetic oligonucleotide

SEQ ID NO: 649441 - DNA, 57 bp, Artificial; identical to SEQ ID NO: 178573
  Synthetic oligonucleotide

SEQ ID NO: 649442 - DNA, 59 bp, Artificial; identical to SEQ ID NO: 174735
  Synthetic oligonucleotide

SEQ ID NO: 649443 - DNA, 53 bp, Artificial; identical to SEQ ID NO: 236995
  Synthetic oligonucleotide

SEQ ID NO: 649444 - DNA, 57 bp, Artificial; identical to SEQ ID NO: 200648
  Synthetic oligonucleotide

SEQ ID NO: 649445 - DNA, 54 bp, Artificial; identical to SEQ ID NO: 246157
  Synthetic oligonucleotide

SEQ ID NO: 649446 - DNA, 55 bp, Artificial; identical to SEQ ID NO: 182012
  Synthetic oligonucleotide

SEQ ID NO: 649447 - DNA, 57 bp, Artificial; identical to SEQ ID NO: 238833
  Synthetic oligonucleotide

SEQ ID NO: 649448 - DNA, 53 bp, Artificial; identical to SEQ ID NO: 157474
  Synthetic oligonucleotide

SEQ ID NO: 649449 - DNA, 55 bp, Artificial; identical to SEQ ID NO: 191027
  Synthetic oligonucleotide

SEQ ID NO: 649450 - DNA, 55 bp, Artificial; identical to SEQ ID NO: 234285
  Synthetic oligonucleotide

SEQ ID NO: 649451 - DNA, 60 bp, Artificial; identical to SEQ ID NO: 222843
  Synthetic oligonucleotide

SEQ ID NO: 649452 - DNA, 50 bp, Artificial; identical to SEQ ID NO: 200219
  Synthetic oligonucleotide

SEQ ID NO: 649453 - DNA, 55 bp, Artificial; identical to SEQ ID NO: 171359
  Synthetic oligonucleotide

SEQ ID NO: 649454 - DNA, 55 bp, Artificial; identical to SEQ ID NO: 197259
  Synthetic oligonucleotide

SEQ ID NO: 649455 - DNA, 51 bp, Artificial; identical to SEQ ID NO: 221790
  Synthetic oligonucleotide

SEQ ID NO: 649456 - DNA, 57 bp, Artificial; identical to SEQ ID NO: 247097
  Synthetic oligonucleotide

SEQ ID NO: 649457 - DNA, 60 bp, Artificial; identical to SEQ ID NO: 178571
  Synthetic oligonucleotide

SEQ ID NO: 649458 - DNA, 52 bp, Artificial; identical to SEQ ID NO: 166114
  Synthetic oligonucleotide

SEQ ID NO: 649459 - DNA, 54 bp, Artificial; identical to SEQ ID NO: 255196
  Synthetic oligonucleotide

SEQ ID NO: 649460 - DNA, 53 bp, Artificial; identical to SEQ ID NO: 254095
  Synthetic oligonucleotide

SEQ ID NO: 649461 - DNA, 55 bp, Artificial; identical to SEQ ID NO: 160248
  Synthetic oligonucleotide

SEQ ID NO: 649462 - DNA, 55 bp, Artificial; identical to SEQ ID NO: 242633
  Synthetic oligonucleotide

SEQ ID NO: 649463 - DNA, 55 bp, Artificial; identical to SEQ ID NO: 171325
  Synthetic oligonucleotide

SEQ ID NO: 649464 - DNA, 58 bp, Artificial; identical to SEQ ID NO: 141926
  Synthetic oligonucleotide

SEQ ID NO: 649465 - DNA, 60 bp, Artificial; identical to SEQ ID NO: 224173
  Synthetic oligonucleotide

SEQ ID NO: 649466 - DNA, 55 bp, Artificial; identical to SEQ ID NO: 225117
  Synthetic oligonucleotide

SEQ ID NO: 649467 - DNA, 55 bp, Artificial; identical to SEQ ID NO: 168416
  Synthetic oligonucleotide

SEQ ID NO: 649468 - DNA, 59 bp, Artificial; identical to SEQ ID NO: 238836
  Synthetic oligonucleotide

SEQ ID NO: 649469 - DNA, 55 bp, Artificial; identical to SEQ ID NO: 198402
  Synthetic oligonucleotide

SEQ ID NO: 649470 - DNA, 55 bp, Artificial; identical to SEQ ID NO: 182010
  Synthetic oligonucleotide

SEQ ID NO: 649471 - DNA, 59 bp, Artificial; identical to SEQ ID NO: 156742
  Synthetic oligonucleotide

SEQ ID NO: 649472 - DNA, 52 bp, Artificial; identical to SEQ ID NO: 203927
  Synthetic oligonucleotide

SEQ ID NO: 649473 - DNA, 55 bp, Artificial; identical to SEQ ID NO: 166978
  Synthetic oligonucleotide

SEQ ID NO: 649474 - DNA, 52 bp, Artificial; identical to SEQ ID NO: 160482
  Synthetic oligonucleotide

SEQ ID NO: 649475 - DNA, 55 bp, Artificial; identical to SEQ ID NO: 239911
  Synthetic oligonucleotide

SEQ ID NO: 649476 - DNA, 55 bp, Artificial; identical to SEQ ID NO: 190363
  Synthetic oligonucleotide

SEQ ID NO: 649477 - DNA, 55 bp, Artificial; identical to SEQ ID NO: 205489
  Synthetic oligonucleotide

SEQ ID NO: 649478 - DNA, 60 bp, Artificial; identical to SEQ ID NO: 224174
  Synthetic oligonucleotide

SEQ ID NO: 649479 - DNA, 50 bp, Artificial; identical to SEQ ID NO: 167727
  Synthetic oligonucleotide

SEQ ID NO: 649480 - DNA, 60 bp, Artificial; identical to SEQ ID NO: 238842
  Synthetic oligonucleotide

SEQ ID NO: 649481 - DNA, 54 bp, Artificial; identical to SEQ ID NO: 185055
  Synthetic oligonucleotide

SEQ ID NO: 649482 - DNA, 58 bp, Artificial; identical to SEQ ID NO: 141680
  Synthetic oligonucleotide

SEQ ID NO: 649483 - DNA, 55 bp, Artificial; identical to SEQ ID NO: 182009
  Synthetic oligonucleotide

SEQ ID NO: 649484 - DNA, 52 bp, Artificial; identical to SEQ ID NO: 211634
  Synthetic oligonucleotide

SEQ ID NO: 649485 - DNA, 53 bp, Artificial; identical to SEQ ID NO: 235139
  Synthetic oligonucleotide

SEQ ID NO: 649486 - DNA, 55 bp, Artificial; identical to SEQ ID NO: 155947
  Synthetic oligonucleotide

SEQ ID NO: 649487 - DNA, 50 bp, Artificial; identical to SEQ ID NO: 249702
  Synthetic oligonucleotide

SEQ ID NO: 649488 - DNA, 58 bp, Artificial; identical to SEQ ID NO: 217051
  Synthetic oligonucleotide

SEQ ID NO: 649489 - DNA, 51 bp, Artificial; identical to SEQ ID NO: 157804
  Synthetic oligonucleotide

SEQ ID NO: 649490 - DNA, 51 bp, Artificial; identical to SEQ ID NO: 141337
  Synthetic oligonucleotide

SEQ ID NO: 649491 - DNA, 55 bp, Artificial; identical to SEQ ID NO: 163845
  Synthetic oligonucleotide

SEQ ID NO: 649492 - DNA, 52 bp, Artificial; identical to SEQ ID NO: 153624
  Synthetic oligonucleotide

SEQ ID NO: 649493 - DNA, 60 bp, Artificial; identical to SEQ ID NO: 248511
  Synthetic oligonucleotide

SEQ ID NO: 649494 - DNA, 55 bp, Artificial; identical to SEQ ID NO: 161180
  Synthetic oligonucleotide

SEQ ID NO: 649495 - DNA, 60 bp, Artificial; identical to SEQ ID NO: 144713
  Synthetic oligonucleotide

SEQ ID NO: 649496 - DNA, 60 bp, Artificial; identical to SEQ ID NO: 262751
  Synthetic oligonucleotide

SEQ ID NO: 649497 - DNA, 55 bp, Artificial; identical to SEQ ID NO: 198401
  Synthetic oligonucleotide

SEQ ID NO: 649498 - DNA, 59 bp, Artificial; identical to SEQ ID NO: 224320
  Synthetic oligonucleotide

SEQ ID NO: 649499 - DNA, 59 bp, Artificial; identical to SEQ ID NO: 147048
  Synthetic oligonucleotide

SEQ ID NO: 649500 - DNA, 52 bp, Artificial; identical to SEQ ID NO: 223668
  Synthetic oligonucleotide

SEQ ID NO: 649501 - DNA, 54 bp, Artificial; identical to SEQ ID NO: 255194
  Synthetic oligonucleotide

SEQ ID NO: 649502 - DNA, 55 bp, Artificial; identical to SEQ ID NO: 219659
  Synthetic oligonucleotide

SEQ ID NO: 649503 - DNA, 55 bp, Artificial; identical to SEQ ID NO: 252978
  Synthetic oligonucleotide

SEQ ID NO: 649504 - DNA, 50 bp, Artificial; identical to SEQ ID NO: 241356
  Synthetic oligonucleotide

SEQ ID NO: 649505 - DNA, 51 bp, Artificial; identical to SEQ ID NO: 149774
  Synthetic oligonucleotide

SEQ ID NO: 649506 - DNA, 60 bp, Artificial; identical to SEQ ID NO: 178504
  Synthetic oligonucleotide

SEQ ID NO: 649507 - DNA, 57 bp, Artificial; identical to SEQ ID NO: 247100
  Synthetic oligonucleotide

SEQ ID NO: 649508 - DNA, 57 bp, Artificial; identical to SEQ ID NO: 256596
  Synthetic oligonucleotide

SEQ ID NO: 649509 - DNA, 55 bp, Artificial; identical to SEQ ID NO: 171750
  Synthetic oligonucleotide

SEQ ID NO: 649510 - DNA, 54 bp, Artificial; identical to SEQ ID NO: 157135
  Synthetic oligonucleotide

SEQ ID NO: 649511 - DNA, 60 bp, Artificial; identical to SEQ ID NO: 238900
  Synthetic oligonucleotide

SEQ ID NO: 649512 - DNA, 51 bp, Artificial; identical to SEQ ID NO: 157805
  Synthetic oligonucleotide

SEQ ID NO: 649513 - DNA, 51 bp, Artificial; identical to SEQ ID NO: 149776
  Synthetic oligonucleotide

SEQ ID NO: 649514 - DNA, 55 bp, Artificial; identical to SEQ ID NO: 207161
  Synthetic oligonucleotide

SEQ ID NO: 649515 - DNA, 55 bp, Artificial; identical to SEQ ID NO: 198399
  Synthetic oligonucleotide

SEQ ID NO: 649516 - DNA, 55 bp, Artificial; identical to SEQ ID NO: 181776
  Synthetic oligonucleotide

SEQ ID NO: 649517 - DNA, 60 bp, Artificial; identical to SEQ ID NO: 156676
  Synthetic oligonucleotide

SEQ ID NO: 649518 - DNA, 55 bp, Artificial; identical to SEQ ID NO: 146303
  Synthetic oligonucleotide

SEQ ID NO: 649519 - DNA, 53 bp, Artificial; identical to SEQ ID NO: 152431
  Synthetic oligonucleotide

SEQ ID NO: 649520 - DNA, 55 bp, Artificial; identical to SEQ ID NO: 257825
  Synthetic oligonucleotide

SEQ ID NO: 649521 - DNA, 52 bp, Artificial; identical to SEQ ID NO: 209662
  Synthetic oligonucleotide

SEQ ID NO: 649522 - DNA, 53 bp, Artificial; identical to SEQ ID NO: 255392
  Synthetic oligonucleotide

SEQ ID NO: 649523 - DNA, 56 bp, Artificial; identical to SEQ ID NO: 244039
  Synthetic oligonucleotide

SEQ ID NO: 649524 - DNA, 51 bp, Artificial; identical to SEQ ID NO: 167628
  Synthetic oligonucleotide

SEQ ID NO: 649525 - DNA, 57 bp, Artificial; identical to SEQ ID NO: 179707
  Synthetic oligonucleotide

SEQ ID NO: 649526 - DNA, 55 bp, Artificial; identical to SEQ ID NO: 147469
  Synthetic oligonucleotide

SEQ ID NO: 649527 - DNA, 55 bp, Artificial; identical to SEQ ID NO: 181769
  Synthetic oligonucleotide

SEQ ID NO: 649528 - DNA, 55 bp, Artificial; identical to SEQ ID NO: 217539
  Synthetic oligonucleotide

SEQ ID NO: 649529 - DNA, 52 bp, Artificial; identical to SEQ ID NO: 190833
  Synthetic oligonucleotide

SEQ ID NO: 649530 - DNA, 57 bp, Artificial; identical to SEQ ID NO: 247102
  Synthetic oligonucleotide

SEQ ID NO: 649531 - DNA, 52 bp, Artificial; identical to SEQ ID NO: 157564
  Synthetic oligonucleotide

SEQ ID NO: 649532 - DNA, 52 bp, Artificial; identical to SEQ ID NO: 219488
  Synthetic oligonucleotide

SEQ ID NO: 649533 - DNA, 60 bp, Artificial; identical to SEQ ID NO: 224130
  Synthetic oligonucleotide

SEQ ID NO: 649534 - DNA, 60 bp, Artificial; identical to SEQ ID NO: 257125
  Synthetic oligonucleotide

SEQ ID NO: 649535 - DNA, 58 bp, Artificial; identical to SEQ ID NO: 147120
  Synthetic oligonucleotide

SEQ ID NO: 649536 - DNA, 55 bp, Artificial; identical to SEQ ID NO: 166973
  Synthetic oligonucleotide

SEQ ID NO: 649537 - DNA, 55 bp, Artificial; identical to SEQ ID NO: 168415
  Synthetic oligonucleotide

SEQ ID NO: 649538 - DNA, 59 bp, Artificial; identical to SEQ ID NO: 206846
  Synthetic oligonucleotide

SEQ ID NO: 649539 - DNA, 55 bp, Artificial; identical to SEQ ID NO: 181768
  Synthetic oligonucleotide

SEQ ID NO: 649540 - DNA, 50 bp, Artificial; identical to SEQ ID NO: 165529
  Synthetic oligonucleotide

SEQ ID NO: 649541 - DNA, 60 bp, Artificial; identical to SEQ ID NO: 237722
  Synthetic oligonucleotide

SEQ ID NO: 649542 - DNA, 50 bp, Artificial; identical to SEQ ID NO: 223952
  Synthetic oligonucleotide

SEQ ID NO: 649543 - DNA, 55 bp, Artificial; identical to SEQ ID NO: 197206
  Synthetic oligonucleotide

SEQ ID NO: 649544 - DNA, 51 bp, Artificial; identical to SEQ ID NO: 213046
  Synthetic oligonucleotide

SEQ ID NO: 649545 - DNA, 54 bp, Artificial; identical to SEQ ID NO: 181765
  Synthetic oligonucleotide

SEQ ID NO: 649546 - DNA, 56 bp, Artificial; identical to SEQ ID NO: 239566
  Synthetic oligonucleotide

SEQ ID NO: 649547 - DNA, 52 bp, Artificial; identical to SEQ ID NO: 186196
  Synthetic oligonucleotide

SEQ ID NO: 649548 - DNA, 60 bp, Artificial; identical to SEQ ID NO: 238910
  Synthetic oligonucleotide

SEQ ID NO: 649549 - DNA, 55 bp, Artificial; identical to SEQ ID NO: 245010
  Synthetic oligonucleotide

SEQ ID NO: 649550 - DNA, 52 bp, Artificial; identical to SEQ ID NO: 190826
  Synthetic oligonucleotide

SEQ ID NO: 649551 - DNA, 52 bp, Artificial; identical to SEQ ID NO: 187023
  Synthetic oligonucleotide

SEQ ID NO: 649552 - DNA, 55 bp, Artificial; identical to SEQ ID NO: 174262
  Synthetic oligonucleotide

SEQ ID NO: 649553 - DNA, 53 bp, Artificial; identical to SEQ ID NO: 172793
  Synthetic oligonucleotide

SEQ ID NO: 649554 - DNA, 60 bp, Artificial; identical to SEQ ID NO: 224132
  Synthetic oligonucleotide

SEQ ID NO: 649555 - DNA, 52 bp, Artificial; identical to SEQ ID NO: 186195
  Synthetic oligonucleotide

SEQ ID NO: 649556 - DNA, 55 bp, Artificial; identical to SEQ ID NO: 197208
  Synthetic oligonucleotide

SEQ ID NO: 649557 - DNA, 50 bp, Artificial; identical to SEQ ID NO: 170448
  Synthetic oligonucleotide

SEQ ID NO: 649558 - DNA, 55 bp, Artificial; identical to SEQ ID NO: 144237
  Synthetic oligonucleotide

SEQ ID NO: 649559 - DNA, 54 bp, Artificial; identical to SEQ ID NO: 164785
  Synthetic oligonucleotide

SEQ ID NO: 649560 - DNA, 53 bp, Artificial; identical to SEQ ID NO: 170050
  Synthetic oligonucleotide

SEQ ID NO: 649561 - DNA, 52 bp, Artificial; identical to SEQ ID NO: 141297
  Synthetic oligonucleotide

SEQ ID NO: 649562 - DNA, 58 bp, Artificial; identical to SEQ ID NO: 167110
  Synthetic oligonucleotide

SEQ ID NO: 649563 - DNA, 54 bp, Artificial; identical to SEQ ID NO: 253245
  Synthetic oligonucleotide

SEQ ID NO: 649564 - DNA, 51 bp, Artificial; identical to SEQ ID NO: 149778
  Synthetic oligonucleotide

SEQ ID NO: 649565 - DNA, 54 bp, Artificial; identical to SEQ ID NO: 265711
  Synthetic oligonucleotide

SEQ ID NO: 649566 - DNA, 59 bp, Artificial; identical to SEQ ID NO: 169066
  Synthetic oligonucleotide

SEQ ID NO: 649567 - DNA, 58 bp, Artificial; identical to SEQ ID NO: 178488
  Synthetic oligonucleotide

SEQ ID NO: 649568 - DNA, 52 bp, Artificial; identical to SEQ ID NO: 187174
  Synthetic oligonucleotide

SEQ ID NO: 649569 - DNA, 60 bp, Artificial; identical to SEQ ID NO: 178487
  Synthetic oligonucleotide

SEQ ID NO: 649570 - DNA, 58 bp, Artificial; identical to SEQ ID NO: 141681
  Synthetic oligonucleotide

SEQ ID NO: 649571 - DNA, 51 bp, Artificial; identical to SEQ ID NO: 221792
  Synthetic oligonucleotide

SEQ ID NO: 649572 - DNA, 55 bp, Artificial; identical to SEQ ID NO: 181762
  Synthetic oligonucleotide

SEQ ID NO: 649573 - DNA, 56 bp, Artificial; identical to SEQ ID NO: 141984
  Synthetic oligonucleotide

SEQ ID NO: 649574 - DNA, 60 bp, Artificial; identical to SEQ ID NO: 150872
  Synthetic oligonucleotide

SEQ ID NO: 649575 - DNA, 55 bp, Artificial; identical to SEQ ID NO: 153379
  Synthetic oligonucleotide

SEQ ID NO: 649576 - DNA, 52 bp, Artificial; identical to SEQ ID NO: 211631
  Synthetic oligonucleotide

SEQ ID NO: 649577 - DNA, 60 bp, Artificial; identical to SEQ ID NO: 174769
  Synthetic oligonucleotide

SEQ ID NO: 649578 - DNA, 55 bp, Artificial; identical to SEQ ID NO: 238351
  Synthetic oligonucleotide

SEQ ID NO: 649579 - DNA, 52 bp, Artificial; identical to SEQ ID NO: 247905
  Synthetic oligonucleotide

SEQ ID NO: 649580 - DNA, 55 bp, Artificial; identical to SEQ ID NO: 144454
  Synthetic oligonucleotide

SEQ ID NO: 649581 - DNA, 55 bp, Artificial; identical to SEQ ID NO: 181761
  Synthetic oligonucleotide

SEQ ID NO: 649582 - DNA, 52 bp, Artificial; identical to SEQ ID NO: 209659
  Synthetic oligonucleotide

SEQ ID NO: 649583 - DNA, 57 bp, Artificial; identical to SEQ ID NO: 201640
  Synthetic oligonucleotide

SEQ ID NO: 649584 - DNA, 53 bp, Artificial; identical to SEQ ID NO: 247879
  Synthetic oligonucleotide

SEQ ID NO: 649585 - DNA, 55 bp, Artificial; identical to SEQ ID NO: 155406
  Synthetic oligonucleotide

SEQ ID NO: 649586 - DNA, 55 bp, Artificial; identical to SEQ ID NO: 181758
  Synthetic oligonucleotide

SEQ ID NO: 649587 - DNA, 59 bp, Artificial; identical to SEQ ID NO: 152210
  Synthetic oligonucleotide

SEQ ID NO: 649588 - DNA, 50 bp, Artificial; identical to SEQ ID NO: 204114
  Synthetic oligonucleotide

SEQ ID NO: 649589 - DNA, 58 bp, Artificial; identical to SEQ ID NO: 178486
  Synthetic oligonucleotide

SEQ ID NO: 649590 - DNA, 51 bp, Artificial; identical to SEQ ID NO: 178536
  Synthetic oligonucleotide

SEQ ID NO: 649591 - DNA, 55 bp, Artificial; identical to SEQ ID NO: 153374
  Synthetic oligonucleotide

SEQ ID NO: 649592 - DNA, 55 bp, Artificial; identical to SEQ ID NO: 207159
  Synthetic oligonucleotide

SEQ ID NO: 649593 - DNA, 55 bp, Artificial; identical to SEQ ID NO: 156006
  Synthetic oligonucleotide

SEQ ID NO: 649594 - DNA, 55 bp, Artificial; identical to SEQ ID NO: 239934
  Synthetic oligonucleotide

SEQ ID NO: 649595 - DNA, 55 bp, Artificial; identical to SEQ ID NO: 206851
  Synthetic oligonucleotide

SEQ ID NO: 649596 - DNA, 52 bp, Artificial; identical to SEQ ID NO: 255463
  Synthetic oligonucleotide

SEQ ID NO: 649597 - DNA, 55 bp, Artificial; identical to SEQ ID NO: 209343
  Synthetic oligonucleotide

SEQ ID NO: 649598 - DNA, 60 bp, Artificial; identical to SEQ ID NO: 169055
  Synthetic oligonucleotide

SEQ ID NO: 649599 - DNA, 57 bp, Artificial; identical to SEQ ID NO: 248624
  Synthetic oligonucleotide

SEQ ID NO: 649600 - DNA, 56 bp, Artificial; identical to SEQ ID NO: 165767
  Synthetic oligonucleotide

SEQ ID NO: 649601 - DNA, 53 bp, Artificial; identical to SEQ ID NO: 238913
  Synthetic oligonucleotide

SEQ ID NO: 649602 - DNA, 52 bp, Artificial; identical to SEQ ID NO: 202848
  Synthetic oligonucleotide

SEQ ID NO: 649603 - DNA, 60 bp, Artificial; identical to SEQ ID NO: 165756
  Synthetic oligonucleotide

SEQ ID NO: 649604 - DNA, 58 bp, Artificial; identical to SEQ ID NO: 243915
  Synthetic oligonucleotide

SEQ ID NO: 649605 - DNA, 58 bp, Artificial; identical to SEQ ID NO: 248520
  Synthetic oligonucleotide

SEQ ID NO: 649606 - DNA, 51 bp, Artificial; identical to SEQ ID NO: 241001
  Synthetic oligonucleotide

SEQ ID NO: 649607 - DNA, 52 bp, Artificial; identical to SEQ ID NO: 144113
  Synthetic oligonucleotide

SEQ ID NO: 649608 - DNA, 55 bp, Artificial; identical to SEQ ID NO: 152361
  Synthetic oligonucleotide

SEQ ID NO: 649609 - DNA, 53 bp, Artificial; identical to SEQ ID NO: 255394
  Synthetic oligonucleotide

SEQ ID NO: 649610 - DNA, 55 bp, Artificial; identical to SEQ ID NO: 156007
  Synthetic oligonucleotide

SEQ ID NO: 649611 - DNA, 50 bp, Artificial; identical to SEQ ID NO: 220922
  Synthetic oligonucleotide

SEQ ID NO: 649612 - DNA, 50 bp, Artificial; identical to SEQ ID NO: 213179
  Synthetic oligonucleotide

SEQ ID NO: 649613 - DNA, 60 bp, Artificial; identical to SEQ ID NO: 150870
  Synthetic oligonucleotide

SEQ ID NO: 649614 - DNA, 55 bp, Artificial; identical to SEQ ID NO: 203416
  Synthetic oligonucleotide

SEQ ID NO: 649615 - DNA, 60 bp, Artificial; identical to SEQ ID NO: 170930
  Synthetic oligonucleotide

SEQ ID NO: 649616 - DNA, 51 bp, Artificial; identical to SEQ ID NO: 243319
  Synthetic oligonucleotide

SEQ ID NO: 649617 - DNA, 53 bp, Artificial; identical to SEQ ID NO: 149463
  Synthetic oligonucleotide

SEQ ID NO: 649618 - DNA, 56 bp, Artificial; identical to SEQ ID NO: 141682
  Synthetic oligonucleotide

SEQ ID NO: 649619 - DNA, 53 bp, Artificial; identical to SEQ ID NO: 178532
  Synthetic oligonucleotide

SEQ ID NO: 649620 - DNA, 55 bp, Artificial; identical to SEQ ID NO: 248753
  Synthetic oligonucleotide

SEQ ID NO: 649621 - DNA, 54 bp, Artificial; identical to SEQ ID NO: 157138
  Synthetic oligonucleotide

SEQ ID NO: 649622 - DNA, 51 bp, Artificial; identical to SEQ ID NO: 167151
  Synthetic oligonucleotide

SEQ ID NO: 649623 - DNA, 60 bp, Artificial; identical to SEQ ID NO: 170927
  Synthetic oligonucleotide

SEQ ID NO: 649624 - DNA, 55 bp, Artificial; identical to SEQ ID NO: 154393
  Synthetic oligonucleotide

SEQ ID NO: 649625 - DNA, 55 bp, Artificial; identical to SEQ ID NO: 168408
  Synthetic oligonucleotide

SEQ ID NO: 649626 - DNA, 55 bp, Artificial; identical to SEQ ID NO: 257878
  Synthetic oligonucleotide

SEQ ID NO: 649627 - DNA, 56 bp, Artificial; identical to SEQ ID NO: 180087
  Synthetic oligonucleotide

SEQ ID NO: 649628 - DNA, 53 bp, Artificial; identical to SEQ ID NO: 246262
  Synthetic oligonucleotide

SEQ ID NO: 649629 - DNA, 57 bp, Artificial; identical to SEQ ID NO: 238914
  Synthetic oligonucleotide

SEQ ID NO: 649630 - DNA, 55 bp, Artificial; identical to SEQ ID NO: 156011
  Synthetic oligonucleotide

SEQ ID NO: 649631 - DNA, 55 bp, Artificial; identical to SEQ ID NO: 156012
  Synthetic oligonucleotide

SEQ ID NO: 649632 - DNA, 54 bp, Artificial; identical to SEQ ID NO: 188162
  Synthetic oligonucleotide

SEQ ID NO: 649633 - DNA, 56 bp, Artificial; identical to SEQ ID NO: 256529
  Synthetic oligonucleotide

SEQ ID NO: 649634 - DNA, 55 bp, Artificial; identical to SEQ ID NO: 212615
  Synthetic oligonucleotide

SEQ ID NO: 649635 - DNA, 54 bp, Artificial; identical to SEQ ID NO: 257407
  Synthetic oligonucleotide

SEQ ID NO: 649636 - DNA, 60 bp, Artificial; identical to SEQ ID NO: 174282
  Synthetic oligonucleotide

SEQ ID NO: 649637 - DNA, 55 bp, Artificial; identical to SEQ ID NO: 242590
  Synthetic oligonucleotide

SEQ ID NO: 649638 - DNA, 55 bp, Artificial; identical to SEQ ID NO: 191902
  Synthetic oligonucleotide

SEQ ID NO: 649639 - DNA, 59 bp, Artificial; identical to SEQ ID NO: 142669
  Synthetic oligonucleotide

SEQ ID NO: 649640 - DNA, 56 bp, Artificial; identical to SEQ ID NO: 147295
  Synthetic oligonucleotide

SEQ ID NO: 649641 - DNA, 58 bp, Artificial; identical to SEQ ID NO: 154581
  Synthetic oligonucleotide

SEQ ID NO: 649642 - DNA, 59 bp, Artificial; identical to SEQ ID NO: 217053
  Synthetic oligonucleotide

SEQ ID NO: 649643 - DNA, 55 bp, Artificial; identical to SEQ ID NO: 262775
  Synthetic oligonucleotide

SEQ ID NO: 649644 - DNA, 55 bp, Artificial; identical to SEQ ID NO: 257870
  Synthetic oligonucleotide

SEQ ID NO: 649645 - DNA, 58 bp, Artificial; identical to SEQ ID NO: 201861
  Synthetic oligonucleotide

SEQ ID NO: 649646 - DNA, 57 bp, Artificial; identical to SEQ ID NO: 243593
  Synthetic oligonucleotide

SEQ ID NO: 649647 - DNA, 59 bp, Artificial; identical to SEQ ID NO: 256538
  Synthetic oligonucleotide

SEQ ID NO: 649648 - DNA, 51 bp, Artificial; identical to SEQ ID NO: 200031
  Synthetic oligonucleotide

SEQ ID NO: 649649 - DNA, 55 bp, Artificial; identical to SEQ ID NO: 147500
  Synthetic oligonucleotide

SEQ ID NO: 649650 - DNA, 55 bp, Artificial; identical to SEQ ID NO: 190361
  Synthetic oligonucleotide

SEQ ID NO: 649651 - DNA, 60 bp, Artificial; identical to SEQ ID NO: 152055
  Synthetic oligonucleotide

SEQ ID NO: 649652 - DNA, 55 bp, Artificial; identical to SEQ ID NO: 153423
  Synthetic oligonucleotide

SEQ ID NO: 649653 - DNA, 54 bp, Artificial; identical to SEQ ID NO: 216558
  Synthetic oligonucleotide

SEQ ID NO: 649654 - DNA, 55 bp, Artificial; identical to SEQ ID NO: 181799
  Synthetic oligonucleotide

SEQ ID NO: 649655 - DNA, 54 bp, Artificial; identical to SEQ ID NO: 175670
  Synthetic oligonucleotide

SEQ ID NO: 649656 - DNA, 54 bp, Artificial; identical to SEQ ID NO: 157139
  Synthetic oligonucleotide

SEQ ID NO: 649657 - DNA, 55 bp, Artificial; identical to SEQ ID NO: 248524
  Synthetic oligonucleotide

SEQ ID NO: 649658 - DNA, 53 bp, Artificial; identical to SEQ ID NO: 192096
  Synthetic oligonucleotide

SEQ ID NO: 649659 - DNA, 55 bp, Artificial; identical to SEQ ID NO: 166969
  Synthetic oligonucleotide

SEQ ID NO: 649660 - DNA, 60 bp, Artificial; identical to SEQ ID NO: 150853
  Synthetic oligonucleotide

SEQ ID NO: 649661 - DNA, 55 bp, Artificial; identical to SEQ ID NO: 154394
  Synthetic oligonucleotide

SEQ ID NO: 649662 - DNA, 55 bp, Artificial; identical to SEQ ID NO: 266236
  Synthetic oligonucleotide

SEQ ID NO: 649663 - DNA, 60 bp, Artificial; identical to SEQ ID NO: 248525
  Synthetic oligonucleotide

SEQ ID NO: 649664 - DNA, 57 bp, Artificial; identical to SEQ ID NO: 256562
  Synthetic oligonucleotide

SEQ ID NO: 649665 - DNA, 55 bp, Artificial; identical to SEQ ID NO: 156013
  Synthetic oligonucleotide

SEQ ID NO: 649666 - DNA, 52 bp, Artificial; identical to SEQ ID NO: 211627
  Synthetic oligonucleotide

SEQ ID NO: 649667 - DNA, 53 bp, Artificial; identical to SEQ ID NO: 242506
  Synthetic oligonucleotide

SEQ ID NO: 649668 - DNA, 55 bp, Artificial; identical to SEQ ID NO: 265703
  Synthetic oligonucleotide

SEQ ID NO: 649669 - DNA, 54 bp, Artificial; identical to SEQ ID NO: 234411
  Synthetic oligonucleotide

SEQ ID NO: 649670 - DNA, 57 bp, Artificial; identical to SEQ ID NO: 239449
  Synthetic oligonucleotide

SEQ ID NO: 649671 - DNA, 55 bp, Artificial; identical to SEQ ID NO: 144106
  Synthetic oligonucleotide

SEQ ID NO: 649672 - DNA, 55 bp, Artificial; identical to SEQ ID NO: 245026
  Synthetic oligonucleotide

SEQ ID NO: 649673 - DNA, 55 bp, Artificial; identical to SEQ ID NO: 197210
  Synthetic oligonucleotide

SEQ ID NO: 649674 - DNA, 53 bp, Artificial; identical to SEQ ID NO: 144514
  Synthetic oligonucleotide

SEQ ID NO: 649675 - DNA, 60 bp, Artificial; identical to SEQ ID NO: 144931
  Synthetic oligonucleotide

SEQ ID NO: 649676 - DNA, 55 bp, Artificial; identical to SEQ ID NO: 156014
  Synthetic oligonucleotide

SEQ ID NO: 649677 - DNA, 55 bp, Artificial; identical to SEQ ID NO: 207198
  Synthetic oligonucleotide

SEQ ID NO: 649678 - DNA, 52 bp, Artificial; identical to SEQ ID NO: 198396
  Synthetic oligonucleotide

SEQ ID NO: 649679 - DNA, 56 bp, Artificial; identical to SEQ ID NO: 253297
  Synthetic oligonucleotide

SEQ ID NO: 649680 - DNA, 55 bp, Artificial; identical to SEQ ID NO: 144869
  Synthetic oligonucleotide

SEQ ID NO: 649681 - DNA, 57 bp, Artificial; identical to SEQ ID NO: 206910
  Synthetic oligonucleotide

SEQ ID NO: 649682 - DNA, 55 bp, Artificial; identical to SEQ ID NO: 245035
  Synthetic oligonucleotide

SEQ ID NO: 649683 - DNA, 55 bp, Artificial; identical to SEQ ID NO: 244077
  Synthetic oligonucleotide

SEQ ID NO: 649684 - DNA, 53 bp, Artificial; identical to SEQ ID NO: 240700
  Synthetic oligonucleotide

SEQ ID NO: 649685 - DNA, 60 bp, Artificial; identical to SEQ ID NO: 217055
  Synthetic oligonucleotide

SEQ ID NO: 649686 - DNA, 55 bp, Artificial; identical to SEQ ID NO: 147530
  Synthetic oligonucleotide

SEQ ID NO: 649687 - DNA, 60 bp, Artificial; identical to SEQ ID NO: 203306
  Synthetic oligonucleotide

SEQ ID NO: 649688 - DNA, 55 bp, Artificial; identical to SEQ ID NO: 156016
  Synthetic oligonucleotide

SEQ ID NO: 649689 - DNA, 54 bp, Artificial; identical to SEQ ID NO: 220640
  Synthetic oligonucleotide

SEQ ID NO: 649690 - DNA, 54 bp, Artificial; identical to SEQ ID NO: 211507
  Synthetic oligonucleotide

SEQ ID NO: 649691 - DNA, 59 bp, Artificial; identical to SEQ ID NO: 203367
  Synthetic oligonucleotide

SEQ ID NO: 649692 - DNA, 60 bp, Artificial; identical to SEQ ID NO: 238917
  Synthetic oligonucleotide

SEQ ID NO: 649693 - DNA, 53 bp, Artificial; identical to SEQ ID NO: 153585
  Synthetic oligonucleotide

SEQ ID NO: 649694 - DNA, 60 bp, Artificial; identical to SEQ ID NO: 212461
  Synthetic oligonucleotide

SEQ ID NO: 649695 - DNA, 55 bp, Artificial; identical to SEQ ID NO: 168325
  Synthetic oligonucleotide

SEQ ID NO: 649696 - DNA, 51 bp, Artificial; identical to SEQ ID NO: 243327
  Synthetic oligonucleotide

SEQ ID NO: 649697 - DNA, 50 bp, Artificial; identical to SEQ ID NO: 246802
  Synthetic oligonucleotide

SEQ ID NO: 649698 - DNA, 58 bp, Artificial; identical to SEQ ID NO: 147065
  Synthetic oligonucleotide

SEQ ID NO: 649699 - DNA, 54 bp, Artificial; identical to SEQ ID NO: 168316
  Synthetic oligonucleotide

SEQ ID NO: 649700 - DNA, 51 bp, Artificial; identical to SEQ ID NO: 261977
  Synthetic oligonucleotide

SEQ ID NO: 649701 - DNA, 60 bp, Artificial; identical to SEQ ID NO: 167936
  Synthetic oligonucleotide

SEQ ID NO: 649702 - DNA, 60 bp, Artificial; identical to SEQ ID NO: 170926
  Synthetic oligonucleotide

SEQ ID NO: 649703 - DNA, 55 bp, Artificial; identical to SEQ ID NO: 244140
  Synthetic oligonucleotide

SEQ ID NO: 649704 - DNA, 55 bp, Artificial; identical to SEQ ID NO: 147677
  Synthetic oligonucleotide

SEQ ID NO: 649705 - DNA, 53 bp, Artificial; identical to SEQ ID NO: 152056
  Synthetic oligonucleotide

SEQ ID NO: 649706 - DNA, 55 bp, Artificial; identical to SEQ ID NO: 254101
  Synthetic oligonucleotide

SEQ ID NO: 649707 - DNA, 53 bp, Artificial; identical to SEQ ID NO: 216684
  Synthetic oligonucleotide

SEQ ID NO: 649708 - DNA, 60 bp, Artificial; identical to SEQ ID NO: 266420
  Synthetic oligonucleotide

SEQ ID NO: 649709 - DNA, 53 bp, Artificial; identical to SEQ ID NO: 248809
  Synthetic oligonucleotide

SEQ ID NO: 649710 - DNA, 51 bp, Artificial; identical to SEQ ID NO: 240986
  Synthetic oligonucleotide

SEQ ID NO: 649711 - DNA, 55 bp, Artificial; identical to SEQ ID NO: 208403
  Synthetic oligonucleotide

SEQ ID NO: 649712 - DNA, 55 bp, Artificial; identical to SEQ ID NO: 201945
  Synthetic oligonucleotide

SEQ ID NO: 649713 - DNA, 55 bp, Artificial; identical to SEQ ID NO: 181789
  Synthetic oligonucleotide

SEQ ID NO: 649714 - DNA, 53 bp, Artificial; identical to SEQ ID NO: 208732
  Synthetic oligonucleotide

SEQ ID NO: 649715 - DNA, 55 bp, Artificial; identical to SEQ ID NO: 151731
  Synthetic oligonucleotide

SEQ ID NO: 649716 - DNA, 51 bp, Artificial; identical to SEQ ID NO: 189664
  Synthetic oligonucleotide

SEQ ID NO: 649717 - DNA, 60 bp, Artificial; identical to SEQ ID NO: 141684
  Synthetic oligonucleotide

SEQ ID NO: 649718 - DNA, 55 bp, Artificial; identical to SEQ ID NO: 191071
  Synthetic oligonucleotide

SEQ ID NO: 649719 - DNA, 52 bp, Artificial; identical to SEQ ID NO: 142625
  Synthetic oligonucleotide

SEQ ID NO: 649720 - DNA, 55 bp, Artificial; identical to SEQ ID NO: 154395
  Synthetic oligonucleotide

SEQ ID NO: 649721 - DNA, 56 bp, Artificial; identical to SEQ ID NO: 194134
  Synthetic oligonucleotide

SEQ ID NO: 649722 - DNA, 52 bp, Artificial; identical to SEQ ID NO: 240936
  Synthetic oligonucleotide

SEQ ID NO: 649723 - DNA, 60 bp, Artificial; identical to SEQ ID NO: 266418
  Synthetic oligonucleotide

SEQ ID NO: 649724 - DNA, 53 bp, Artificial; identical to SEQ ID NO: 144985
  Synthetic oligonucleotide

SEQ ID NO: 649725 - DNA, 53 bp, Artificial; identical to SEQ ID NO: 157449
  Synthetic oligonucleotide

SEQ ID NO: 649726 - DNA, 60 bp, Artificial; identical to SEQ ID NO: 165711
  Synthetic oligonucleotide

SEQ ID NO: 649727 - DNA, 60 bp, Artificial; identical to SEQ ID NO: 141639
  Synthetic oligonucleotide

SEQ ID NO: 649728 - DNA, 55 bp, Artificial; identical to SEQ ID NO: 245004
  Synthetic oligonucleotide

SEQ ID NO: 649729 - DNA, 55 bp, Artificial; identical to SEQ ID NO: 254102
  Synthetic oligonucleotide

SEQ ID NO: 649730 - DNA, 50 bp, Artificial; identical to SEQ ID NO: 201738
  Synthetic oligonucleotide

SEQ ID NO: 649731 - DNA, 54 bp, Artificial; identical to SEQ ID NO: 199585
  Synthetic oligonucleotide

SEQ ID NO: 649732 - DNA, 55 bp, Artificial; identical to SEQ ID NO: 239916
  Synthetic oligonucleotide

SEQ ID NO: 649733 - DNA, 55 bp, Artificial; identical to SEQ ID NO: 247156
  Synthetic oligonucleotide

SEQ ID NO: 649734 - DNA, 52 bp, Artificial; identical to SEQ ID NO: 199858
  Synthetic oligonucleotide

SEQ ID NO: 649735 - DNA, 55 bp, Artificial; identical to SEQ ID NO: 163849
  Synthetic oligonucleotide

SEQ ID NO: 649736 - DNA, 54 bp, Artificial; identical to SEQ ID NO: 185170
  Synthetic oligonucleotide

SEQ ID NO: 649737 - DNA, 55 bp, Artificial; identical to SEQ ID NO: 155988
  Synthetic oligonucleotide

SEQ ID NO: 649738 - DNA, 54 bp, Artificial; identical to SEQ ID NO: 203621
  Synthetic oligonucleotide

SEQ ID NO: 649739 - DNA, 57 bp, Artificial; identical to SEQ ID NO: 178230
  Synthetic oligonucleotide

SEQ ID NO: 649740 - DNA, 58 bp, Artificial; identical to SEQ ID NO: 200596
  Synthetic oligonucleotide

SEQ ID NO: 649741 - DNA, 50 bp, Artificial; identical to SEQ ID NO: 200302
  Synthetic oligonucleotide

SEQ ID NO: 649742 - DNA, 57 bp, Artificial; identical to SEQ ID NO: 247157
  Synthetic oligonucleotide

SEQ ID NO: 649743 - DNA, 51 bp, Artificial; identical to SEQ ID NO: 243293
  Synthetic oligonucleotide

SEQ ID NO: 649744 - DNA, 55 bp, Artificial; identical to SEQ ID NO: 207197
  Synthetic oligonucleotide

SEQ ID NO: 649745 - DNA, 57 bp, Artificial; identical to SEQ ID NO: 244007
  Synthetic oligonucleotide

SEQ ID NO: 649746 - DNA, 54 bp, Artificial; identical to SEQ ID NO: 247830
  Synthetic oligonucleotide

SEQ ID NO: 649747 - DNA, 53 bp, Artificial; identical to SEQ ID NO: 246268
  Synthetic oligonucleotide

SEQ ID NO: 649748 - DNA, 55 bp, Artificial; identical to SEQ ID NO: 142512
  Synthetic oligonucleotide

SEQ ID NO: 649749 - DNA, 50 bp, Artificial; identical to SEQ ID NO: 203041
  Synthetic oligonucleotide

SEQ ID NO: 649750 - DNA, 55 bp, Artificial; identical to SEQ ID NO: 152352
  Synthetic oligonucleotide

SEQ ID NO: 649751 - DNA, 60 bp, Artificial; identical to SEQ ID NO: 243595
  Synthetic oligonucleotide

SEQ ID NO: 649752 - DNA, 55 bp, Artificial; identical to SEQ ID NO: 238384
  Synthetic oligonucleotide

SEQ ID NO: 649753 - DNA, 55 bp, Artificial; identical to SEQ ID NO: 247669
  Synthetic oligonucleotide

SEQ ID NO: 649754 - DNA, 60 bp, Artificial; identical to SEQ ID NO: 170924
  Synthetic oligonucleotide

SEQ ID NO: 649755 - DNA, 53 bp, Artificial; identical to SEQ ID NO: 240694
  Synthetic oligonucleotide

SEQ ID NO: 649756 - DNA, 55 bp, Artificial; identical to SEQ ID NO: 197212
  Synthetic oligonucleotide

SEQ ID NO: 649757 - DNA, 54 bp, Artificial; identical to SEQ ID NO: 185166
  Synthetic oligonucleotide

SEQ ID NO: 649758 - DNA, 60 bp, Artificial; identical to SEQ ID NO: 234486
  Synthetic oligonucleotide

SEQ ID NO: 649759 - DNA, 60 bp, Artificial; identical to SEQ ID NO: 151281
  Synthetic oligonucleotide

SEQ ID NO: 649760 - DNA, 57 bp, Artificial; identical to SEQ ID NO: 238874
  Synthetic oligonucleotide

SEQ ID NO: 649761 - DNA, 58 bp, Artificial; identical to SEQ ID NO: 210711
  Synthetic oligonucleotide

SEQ ID NO: 649762 - DNA, 60 bp, Artificial; identical to SEQ ID NO: 152925
  Synthetic oligonucleotide

SEQ ID NO: 649763 - DNA, 52 bp, Artificial; identical to SEQ ID NO: 165062
  Synthetic oligonucleotide

SEQ ID NO: 649764 - DNA, 53 bp, Artificial; identical to SEQ ID NO: 144516
  Synthetic oligonucleotide

SEQ ID NO: 649765 - DNA, 50 bp, Artificial; identical to SEQ ID NO: 243411
  Synthetic oligonucleotide

SEQ ID NO: 649766 - DNA, 51 bp, Artificial; identical to SEQ ID NO: 186700
  Synthetic oligonucleotide

SEQ ID NO: 649767 - DNA, 51 bp, Artificial; identical to SEQ ID NO: 209753
  Synthetic oligonucleotide

SEQ ID NO: 649768 - DNA, 59 bp, Artificial; identical to SEQ ID NO: 154547
  Synthetic oligonucleotide

SEQ ID NO: 649769 - DNA, 51 bp, Artificial; identical to SEQ ID NO: 186702
  Synthetic oligonucleotide

SEQ ID NO: 649770 - DNA, 56 bp, Artificial; identical to SEQ ID NO: 203399
  Synthetic oligonucleotide

SEQ ID NO: 649771 - DNA, 56 bp, Artificial; identical to SEQ ID NO: 209839
  Synthetic oligonucleotide

SEQ ID NO: 649772 - DNA, 53 bp, Artificial; identical to SEQ ID NO: 185819
  Synthetic oligonucleotide

SEQ ID NO: 649773 - DNA, 55 bp, Artificial; identical to SEQ ID NO: 224932
  Synthetic oligonucleotide

SEQ ID NO: 649774 - DNA, 55 bp, Artificial; identical to SEQ ID NO: 190401
  Synthetic oligonucleotide

SEQ ID NO: 649775 - DNA, 60 bp, Artificial; identical to SEQ ID NO: 178220
  Synthetic oligonucleotide

SEQ ID NO: 649776 - DNA, 55 bp, Artificial; identical to SEQ ID NO: 224931
  Synthetic oligonucleotide

SEQ ID NO: 649777 - DNA, 60 bp, Artificial; identical to SEQ ID NO: 256363
  Synthetic oligonucleotide

SEQ ID NO: 649778 - DNA, 57 bp, Artificial; identical to SEQ ID NO: 197603
  Synthetic oligonucleotide

SEQ ID NO: 649779 - DNA, 50 bp, Artificial; identical to SEQ ID NO: 189212
  Synthetic oligonucleotide

SEQ ID NO: 649780 - DNA, 51 bp, Artificial; identical to SEQ ID NO: 205766
  Synthetic oligonucleotide

SEQ ID NO: 649781 - DNA, 55 bp, Artificial; identical to SEQ ID NO: 254103
  Synthetic oligonucleotide

SEQ ID NO: 649782 - DNA, 60 bp, Artificial; identical to SEQ ID NO: 141640
  Synthetic oligonucleotide

SEQ ID NO: 649783 - DNA, 55 bp, Artificial; identical to SEQ ID NO: 238383
  Synthetic oligonucleotide

SEQ ID NO: 649784 - DNA, 60 bp, Artificial; identical to SEQ ID NO: 200593
  Synthetic oligonucleotide

SEQ ID NO: 649785 - DNA, 55 bp, Artificial; identical to SEQ ID NO: 239924
  Synthetic oligonucleotide

SEQ ID NO: 649786 - DNA, 50 bp, Artificial; identical to SEQ ID NO: 176419
  Synthetic oligonucleotide

SEQ ID NO: 649787 - DNA, 55 bp, Artificial; identical to SEQ ID NO: 248811
  Synthetic oligonucleotide

SEQ ID NO: 649788 - DNA, 55 bp, Artificial; identical to SEQ ID NO: 242508
  Synthetic oligonucleotide

SEQ ID NO: 649789 - DNA, 55 bp, Artificial; identical to SEQ ID NO: 142826
  Synthetic oligonucleotide

SEQ ID NO: 649790 - DNA, 54 bp, Artificial; identical to SEQ ID NO: 194135
  Synthetic oligonucleotide

SEQ ID NO: 649791 - DNA, 54 bp, Artificial; identical to SEQ ID NO: 261960
  Synthetic oligonucleotide

SEQ ID NO: 649792 - DNA, 50 bp, Artificial; identical to SEQ ID NO: 206617
  Synthetic oligonucleotide

SEQ ID NO: 649793 - DNA, 55 bp, Artificial; identical to SEQ ID NO: 151764
  Synthetic oligonucleotide

SEQ ID NO: 649794 - DNA, 55 bp, Artificial; identical to SEQ ID NO: 198395
  Synthetic oligonucleotide

SEQ ID NO: 649795 - DNA, 60 bp, Artificial; identical to SEQ ID NO: 256360
  Synthetic oligonucleotide

SEQ ID NO: 649796 - DNA, 55 bp, Artificial; identical to SEQ ID NO: 181732
  Synthetic oligonucleotide

SEQ ID NO: 649797 - DNA, 55 bp, Artificial; identical to SEQ ID NO: 147606
  Synthetic oligonucleotide

SEQ ID NO: 649798 - DNA, 55 bp, Artificial; identical to SEQ ID NO: 162047
  Synthetic oligonucleotide

SEQ ID NO: 649799 - DNA, 56 bp, Artificial; identical to SEQ ID NO: 205886
  Synthetic oligonucleotide

SEQ ID NO: 649800 - DNA, 55 bp, Artificial; identical to SEQ ID NO: 181731
  Synthetic oligonucleotide

SEQ ID NO: 649801 - DNA, 56 bp, Artificial; identical to SEQ ID NO: 205897
  Synthetic oligonucleotide

SEQ ID NO: 649802 - DNA, 54 bp, Artificial; identical to SEQ ID NO: 149288
  Synthetic oligonucleotide

SEQ ID NO: 649803 - DNA, 53 bp, Artificial; identical to SEQ ID NO: 265771
  Synthetic oligonucleotide

SEQ ID NO: 649804 - DNA, 52 bp, Artificial; identical to SEQ ID NO: 197877
  Synthetic oligonucleotide

SEQ ID NO: 649805 - DNA, 57 bp, Artificial; identical to SEQ ID NO: 200591
  Synthetic oligonucleotide

SEQ ID NO: 649806 - DNA, 52 bp, Artificial; identical to SEQ ID NO: 186112
  Synthetic oligonucleotide

SEQ ID NO: 649807 - DNA, 60 bp, Artificial; identical to SEQ ID NO: 159861
  Synthetic oligonucleotide

SEQ ID NO: 649808 - DNA, 55 bp, Artificial; identical to SEQ ID NO: 217295
  Synthetic oligonucleotide

SEQ ID NO: 649809 - DNA, 55 bp, Artificial; identical to SEQ ID NO: 202857
  Synthetic oligonucleotide

SEQ ID NO: 649810 - DNA, 59 bp, Artificial; identical to SEQ ID NO: 187172
  Synthetic oligonucleotide

SEQ ID NO: 649811 - DNA, 55 bp, Artificial; identical to SEQ ID NO: 257861
  Synthetic oligonucleotide

SEQ ID NO: 649812 - DNA, 52 bp, Artificial; identical to SEQ ID NO: 238878
  Synthetic oligonucleotide

SEQ ID NO: 649813 - DNA, 60 bp, Artificial; identical to SEQ ID NO: 233745
  Synthetic oligonucleotide

SEQ ID NO: 649814 - DNA, 51 bp, Artificial; identical to SEQ ID NO: 205776
  Synthetic oligonucleotide

SEQ ID NO: 649815 - DNA, 54 bp, Artificial; identical to SEQ ID NO: 142611
  Synthetic oligonucleotide

SEQ ID NO: 649816 - DNA, 60 bp, Artificial; identical to SEQ ID NO: 243597
  Synthetic oligonucleotide

SEQ ID NO: 649817 - DNA, 53 bp, Artificial; identical to SEQ ID NO: 161306
  Synthetic oligonucleotide

SEQ ID NO: 649818 - DNA, 55 bp, Artificial; identical to SEQ ID NO: 156018
  Synthetic oligonucleotide

SEQ ID NO: 649819 - DNA, 57 bp, Artificial; identical to SEQ ID NO: 190731
  Synthetic oligonucleotide

SEQ ID NO: 649820 - DNA, 55 bp, Artificial; identical to SEQ ID NO: 202239
  Synthetic oligonucleotide

SEQ ID NO: 649821 - DNA, 54 bp, Artificial; identical to SEQ ID NO: 187408
  Synthetic oligonucleotide

SEQ ID NO: 649822 - DNA, 58 bp, Artificial; identical to SEQ ID NO: 247167
  Synthetic oligonucleotide

SEQ ID NO: 649823 - DNA, 54 bp, Artificial; identical to SEQ ID NO: 201791
  Synthetic oligonucleotide

SEQ ID NO: 649824 - DNA, 56 bp, Artificial; identical to SEQ ID NO: 165689
  Synthetic oligonucleotide

SEQ ID NO: 649825 - DNA, 56 bp, Artificial; identical to SEQ ID NO: 238879
  Synthetic oligonucleotide

SEQ ID NO: 649826 - DNA, 55 bp, Artificial; identical to SEQ ID NO: 249507
  Synthetic oligonucleotide

SEQ ID NO: 649827 - DNA, 55 bp, Artificial; identical to SEQ ID NO: 187815
  Synthetic oligonucleotide

SEQ ID NO: 649828 - DNA, 55 bp, Artificial; identical to SEQ ID NO: 244412
  Synthetic oligonucleotide

SEQ ID NO: 649829 - DNA, 54 bp, Artificial; identical to SEQ ID NO: 157155
  Synthetic oligonucleotide

SEQ ID NO: 649830 - DNA, 50 bp, Artificial; identical to SEQ ID NO: 141446
  Synthetic oligonucleotide

SEQ ID NO: 649831 - DNA, 55 bp, Artificial; identical to SEQ ID NO: 181726
  Synthetic oligonucleotide

SEQ ID NO: 649832 - DNA, 55 bp, Artificial; identical to SEQ ID NO: 207195
  Synthetic oligonucleotide

SEQ ID NO: 649833 - DNA, 56 bp, Artificial; identical to SEQ ID NO: 187171
  Synthetic oligonucleotide

SEQ ID NO: 649834 - DNA, 58 bp, Artificial; identical to SEQ ID NO: 243598
  Synthetic oligonucleotide

SEQ ID NO: 649835 - DNA, 55 bp, Artificial; identical to SEQ ID NO: 238382
  Synthetic oligonucleotide

SEQ ID NO: 649836 - DNA, 60 bp, Artificial; identical to SEQ ID NO: 141644
  Synthetic oligonucleotide

SEQ ID NO: 649837 - DNA, 52 bp, Artificial; identical to SEQ ID NO: 218358
  Synthetic oligonucleotide

SEQ ID NO: 649838 - DNA, 56 bp, Artificial; identical to SEQ ID NO: 238891
  Synthetic oligonucleotide

SEQ ID NO: 649839 - DNA, 55 bp, Artificial; identical to SEQ ID NO: 244097
  Synthetic oligonucleotide

SEQ ID NO: 649840 - DNA, 55 bp, Artificial; identical to SEQ ID NO: 181725
  Synthetic oligonucleotide

SEQ ID NO: 649841 - DNA, 56 bp, Artificial; identical to SEQ ID NO: 178259
  Synthetic oligonucleotide

SEQ ID NO: 649842 - DNA, 58 bp, Artificial; identical to SEQ ID NO: 221222
  Synthetic oligonucleotide

SEQ ID NO: 649843 - DNA, 51 bp, Artificial; identical to SEQ ID NO: 165157
  Synthetic oligonucleotide

SEQ ID NO: 649844 - DNA, 56 bp, Artificial; identical to SEQ ID NO: 238892
  Synthetic oligonucleotide

SEQ ID NO: 649845 - DNA, 55 bp, Artificial; identical to SEQ ID NO: 207190
  Synthetic oligonucleotide

SEQ ID NO: 649846 - DNA, 55 bp, Artificial; identical to SEQ ID NO: 191677
  Synthetic oligonucleotide

SEQ ID NO: 649847 - DNA, 55 bp, Artificial; identical to SEQ ID NO: 244385
  Synthetic oligonucleotide

SEQ ID NO: 649848 - DNA, 55 bp, Artificial; identical to SEQ ID NO: 156020
  Synthetic oligonucleotide

SEQ ID NO: 649849 - DNA, 55 bp, Artificial; identical to SEQ ID NO: 239616
  Synthetic oligonucleotide

SEQ ID NO: 649850 - DNA, 58 bp, Artificial; identical to SEQ ID NO: 155910
  Synthetic oligonucleotide

SEQ ID NO: 649851 - DNA, 56 bp, Artificial; identical to SEQ ID NO: 217056
  Synthetic oligonucleotide

SEQ ID NO: 649852 - DNA, 50 bp, Artificial; identical to SEQ ID NO: 192191
  Synthetic oligonucleotide

SEQ ID NO: 649853 - DNA, 53 bp, Artificial; identical to SEQ ID NO: 149474
  Synthetic oligonucleotide

SEQ ID NO: 649854 - DNA, 55 bp, Artificial; identical to SEQ ID NO: 162091
  Synthetic oligonucleotide

SEQ ID NO: 649855 - DNA, 60 bp, Artificial; identical to SEQ ID NO: 167924
  Synthetic oligonucleotide

SEQ ID NO: 649856 - DNA, 54 bp, Artificial; identical to SEQ ID NO: 164809
  Synthetic oligonucleotide

SEQ ID NO: 649857 - DNA, 51 bp, Artificial; identical to SEQ ID NO: 243301
  Synthetic oligonucleotide

SEQ ID NO: 649858 - DNA, 55 bp, Artificial; identical to SEQ ID NO: 197227
  Synthetic oligonucleotide

SEQ ID NO: 649859 - DNA, 59 bp, Artificial; identical to SEQ ID NO: 154059
  Synthetic oligonucleotide

SEQ ID NO: 649860 - DNA, 56 bp, Artificial; identical to SEQ ID NO: 200590
  Synthetic oligonucleotide

SEQ ID NO: 649861 - DNA, 58 bp, Artificial; identical to SEQ ID NO: 171032
  Synthetic oligonucleotide

SEQ ID NO: 649862 - DNA, 52 bp, Artificial; identical to SEQ ID NO: 167294
  Synthetic oligonucleotide

SEQ ID NO: 649863 - DNA, 52 bp, Artificial; identical to SEQ ID NO: 238896
  Synthetic oligonucleotide

SEQ ID NO: 649864 - DNA, 54 bp, Artificial; identical to SEQ ID NO: 254104
  Synthetic oligonucleotide

SEQ ID NO: 649865 - DNA, 55 bp, Artificial; identical to SEQ ID NO: 256534
  Synthetic oligonucleotide

SEQ ID NO: 649866 - DNA, 60 bp, Artificial; identical to SEQ ID NO: 266417
  Synthetic oligonucleotide

SEQ ID NO: 649867 - DNA, 55 bp, Artificial; identical to SEQ ID NO: 225114
  Synthetic oligonucleotide

SEQ ID NO: 649868 - DNA, 55 bp, Artificial; identical to SEQ ID NO: 218219
  Synthetic oligonucleotide

SEQ ID NO: 649869 - DNA, 59 bp, Artificial; identical to SEQ ID NO: 201092
  Synthetic oligonucleotide

SEQ ID NO: 649870 - DNA, 51 bp, Artificial; identical to SEQ ID NO: 167149
  Synthetic oligonucleotide

SEQ ID NO: 649871 - DNA, 55 bp, Artificial; identical to SEQ ID NO: 198454
  Synthetic oligonucleotide

SEQ ID NO: 649872 - DNA, 60 bp, Artificial; identical to SEQ ID NO: 243541
  Synthetic oligonucleotide

SEQ ID NO: 649873 - DNA, 52 bp, Artificial; identical to SEQ ID NO: 172810
  Synthetic oligonucleotide

SEQ ID NO: 649874 - DNA, 55 bp, Artificial; identical to SEQ ID NO: 207183
  Synthetic oligonucleotide

SEQ ID NO: 649875 - DNA, 52 bp, Artificial; identical to SEQ ID NO: 155576
  Synthetic oligonucleotide

SEQ ID NO: 649876 - DNA, 55 bp, Artificial; identical to SEQ ID NO: 218216
  Synthetic oligonucleotide

SEQ ID NO: 649877 - DNA, 55 bp, Artificial; identical to SEQ ID NO: 156022
  Synthetic oligonucleotide

SEQ ID NO: 649878 - DNA, 53 bp, Artificial; identical to SEQ ID NO: 247878
  Synthetic oligonucleotide

SEQ ID NO: 649879 - DNA, 58 bp, Artificial; identical to SEQ ID NO: 200589
  Synthetic oligonucleotide

SEQ ID NO: 649880 - DNA, 55 bp, Artificial; identical to SEQ ID NO: 243542
  Synthetic oligonucleotide

SEQ ID NO: 649881 - DNA, 56 bp, Artificial; identical to SEQ ID NO: 141976
  Synthetic oligonucleotide

SEQ ID NO: 649882 - DNA, 51 bp, Artificial; identical to SEQ ID NO: 149784
  Synthetic oligonucleotide

SEQ ID NO: 649883 - DNA, 57 bp, Artificial; identical to SEQ ID NO: 238897
  Synthetic oligonucleotide

SEQ ID NO: 649884 - DNA, 60 bp, Artificial; identical to SEQ ID NO: 224151
  Synthetic oligonucleotide

SEQ ID NO: 649885 - DNA, 51 bp, Artificial; identical to SEQ ID NO: 223743
  Synthetic oligonucleotide

SEQ ID NO: 649886 - DNA, 54 bp, Artificial; identical to SEQ ID NO: 149252
  Synthetic oligonucleotide

SEQ ID NO: 649887 - DNA, 55 bp, Artificial; identical to SEQ ID NO: 217544
  Synthetic oligonucleotide

SEQ ID NO: 649888 - DNA, 55 bp, Artificial; identical to SEQ ID NO: 236437
  Synthetic oligonucleotide

SEQ ID NO: 649889 - DNA, 60 bp, Artificial; identical to SEQ ID NO: 152522
  Synthetic oligonucleotide

SEQ ID NO: 649890 - DNA, 56 bp, Artificial; identical to SEQ ID NO: 178254
  Synthetic oligonucleotide

SEQ ID NO: 649891 - DNA, 51 bp, Artificial; identical to SEQ ID NO: 200015
  Synthetic oligonucleotide

SEQ ID NO: 649892 - DNA, 51 bp, Artificial; identical to SEQ ID NO: 186542
  Synthetic oligonucleotide

SEQ ID NO: 649893 - DNA, 53 bp, Artificial; identical to SEQ ID NO: 185779
  Synthetic oligonucleotide

SEQ ID NO: 649894 - DNA, 55 bp, Artificial; identical to SEQ ID NO: 163851
  Synthetic oligonucleotide

SEQ ID NO: 649895 - DNA, 60 bp, Artificial; identical to SEQ ID NO: 178253
  Synthetic oligonucleotide

SEQ ID NO: 649896 - DNA, 55 bp, Artificial; identical to SEQ ID NO: 147413
  Synthetic oligonucleotide

SEQ ID NO: 649897 - DNA, 50 bp, Artificial; identical to SEQ ID NO: 144613
  Synthetic oligonucleotide

SEQ ID NO: 649898 - DNA, 52 bp, Artificial; identical to SEQ ID NO: 186142
  Synthetic oligonucleotide

SEQ ID NO: 649899 - DNA, 60 bp, Artificial; identical to SEQ ID NO: 238898
  Synthetic oligonucleotide

SEQ ID NO: 649900 - DNA, 58 bp, Artificial; identical to SEQ ID NO: 150824
  Synthetic oligonucleotide

SEQ ID NO: 649901 - DNA, 55 bp, Artificial; identical to SEQ ID NO: 244381
  Synthetic oligonucleotide

SEQ ID NO: 649902 - DNA, 51 bp, Artificial; identical to SEQ ID NO: 255754
  Synthetic oligonucleotide

SEQ ID NO: 649903 - DNA, 50 bp, Artificial; identical to SEQ ID NO: 150132
  Synthetic oligonucleotide

SEQ ID NO: 649904 - DNA, 53 bp, Artificial; identical to SEQ ID NO: 195024
  Synthetic oligonucleotide

SEQ ID NO: 649905 - DNA, 55 bp, Artificial; identical to SEQ ID NO: 169266
  Synthetic oligonucleotide

SEQ ID NO: 649906 - DNA, 55 bp, Artificial; identical to SEQ ID NO: 258035
  Synthetic oligonucleotide

SEQ ID NO: 649907 - DNA, 54 bp, Artificial; identical to SEQ ID NO: 246162
  Synthetic oligonucleotide

SEQ ID NO: 649908 - DNA, 57 bp, Artificial; identical to SEQ ID NO: 224201
  Synthetic oligonucleotide

SEQ ID NO: 649909 - DNA, 60 bp, Artificial; identical to SEQ ID NO: 238731
  Synthetic oligonucleotide

SEQ ID NO: 649910 - DNA, 55 bp, Artificial; identical to SEQ ID NO: 152349
  Synthetic oligonucleotide

SEQ ID NO: 649911 - DNA, 55 bp, Artificial; identical to SEQ ID NO: 247650
  Synthetic oligonucleotide

SEQ ID NO: 649912 - DNA, 60 bp, Artificial; identical to SEQ ID NO: 217057
  Synthetic oligonucleotide

SEQ ID NO: 649913 - DNA, 55 bp, Artificial; identical to SEQ ID NO: 247662
  Synthetic oligonucleotide

SEQ ID NO: 649914 - DNA, 56 bp, Artificial; identical to SEQ ID NO: 178245
  Synthetic oligonucleotide

SEQ ID NO: 649915 - DNA, 57 bp, Artificial; identical to SEQ ID NO: 239195
  Synthetic oligonucleotide

SEQ ID NO: 649916 - DNA, 55 bp, Artificial; identical to SEQ ID NO: 187812
  Synthetic oligonucleotide

SEQ ID NO: 649917 - DNA, 51 bp, Artificial; identical to SEQ ID NO: 255752
  Synthetic oligonucleotide

SEQ ID NO: 649918 - DNA, 55 bp, Artificial; identical to SEQ ID NO: 181717
  Synthetic oligonucleotide

SEQ ID NO: 649919 - DNA, 59 bp, Artificial; identical to SEQ ID NO: 170931
  Synthetic oligonucleotide

SEQ ID NO: 649920 - DNA, 60 bp, Artificial; identical to SEQ ID NO: 212466
  Synthetic oligonucleotide

SEQ ID NO: 649921 - DNA, 55 bp, Artificial; identical to SEQ ID NO: 247633
  Synthetic oligonucleotide

SEQ ID NO: 649922 - DNA, 52 bp, Artificial; identical to SEQ ID NO: 243281
  Synthetic oligonucleotide

SEQ ID NO: 649923 - DNA, 59 bp, Artificial; identical to SEQ ID NO: 247340
  Synthetic oligonucleotide

SEQ ID NO: 649924 - DNA, 52 bp, Artificial; identical to SEQ ID NO: 255454
  Synthetic oligonucleotide

SEQ ID NO: 649925 - DNA, 55 bp, Artificial; identical to SEQ ID NO: 190331
  Synthetic oligonucleotide

SEQ ID NO: 649926 - DNA, 55 bp, Artificial; identical to SEQ ID NO: 187811
  Synthetic oligonucleotide

SEQ ID NO: 649927 - DNA, 50 bp, Artificial; identical to SEQ ID NO: 170418
  Synthetic oligonucleotide

SEQ ID NO: 649928 - DNA, 56 bp, Artificial; identical to SEQ ID NO: 179991
  Synthetic oligonucleotide

SEQ ID NO: 649929 - DNA, 55 bp, Artificial; identical to SEQ ID NO: 188245
  Synthetic oligonucleotide

SEQ ID NO: 649930 - DNA, 57 bp, Artificial; identical to SEQ ID NO: 154481
  Synthetic oligonucleotide

SEQ ID NO: 649931 - DNA, 55 bp, Artificial; identical to SEQ ID NO: 224929
  Synthetic oligonucleotide

SEQ ID NO: 649932 - DNA, 53 bp, Artificial; identical to SEQ ID NO: 162101
  Synthetic oligonucleotide

SEQ ID NO: 649933 - DNA, 55 bp, Artificial; identical to SEQ ID NO: 156025
  Synthetic oligonucleotide

SEQ ID NO: 649934 - DNA, 55 bp, Artificial; identical to SEQ ID NO: 162443
  Synthetic oligonucleotide

SEQ ID NO: 649935 - DNA, 54 bp, Artificial; identical to SEQ ID NO: 162445
  Synthetic oligonucleotide

SEQ ID NO: 649936 - DNA, 59 bp, Artificial; identical to SEQ ID NO: 171003
  Synthetic oligonucleotide

SEQ ID NO: 649937 - DNA, 57 bp, Artificial; identical to SEQ ID NO: 150822
  Synthetic oligonucleotide

SEQ ID NO: 649938 - DNA, 50 bp, Artificial; identical to SEQ ID NO: 238734
  Synthetic oligonucleotide

SEQ ID NO: 649939 - DNA, 55 bp, Artificial; identical to SEQ ID NO: 203604
  Synthetic oligonucleotide

SEQ ID NO: 649940 - DNA, 55 bp, Artificial; identical to SEQ ID NO: 190397
  Synthetic oligonucleotide

SEQ ID NO: 649941 - DNA, 55 bp, Artificial; identical to SEQ ID NO: 181714
  Synthetic oligonucleotide

SEQ ID NO: 649942 - DNA, 55 bp, Artificial; identical to SEQ ID NO: 181713
  Synthetic oligonucleotide

SEQ ID NO: 649943 - DNA, 58 bp, Artificial; identical to SEQ ID NO: 178244
  Synthetic oligonucleotide

SEQ ID NO: 649944 - DNA, 51 bp, Artificial; identical to SEQ ID NO: 150815
  Synthetic oligonucleotide

SEQ ID NO: 649945 - DNA, 50 bp, Artificial; identical to SEQ ID NO: 152511
  Synthetic oligonucleotide

SEQ ID NO: 649946 - DNA, 55 bp, Artificial; identical to SEQ ID NO: 147369
  Synthetic oligonucleotide

SEQ ID NO: 649947 - DNA, 58 bp, Artificial; identical to SEQ ID NO: 238735
  Synthetic oligonucleotide

SEQ ID NO: 649948 - DNA, 57 bp, Artificial; identical to SEQ ID NO: 144353
  Synthetic oligonucleotide

SEQ ID NO: 649949 - DNA, 60 bp, Artificial; identical to SEQ ID NO: 238736
  Synthetic oligonucleotide

SEQ ID NO: 649950 - DNA, 55 bp, Artificial; identical to SEQ ID NO: 142520
  Synthetic oligonucleotide

SEQ ID NO: 649951 - DNA, 55 bp, Artificial; identical to SEQ ID NO: 187768
  Synthetic oligonucleotide

SEQ ID NO: 649952 - DNA, 54 bp, Artificial; identical to SEQ ID NO: 185135
  Synthetic oligonucleotide

SEQ ID NO: 649953 - DNA, 55 bp, Artificial; identical to SEQ ID NO: 156028
  Synthetic oligonucleotide

SEQ ID NO: 649954 - DNA, 55 bp, Artificial; identical to SEQ ID NO: 190395
  Synthetic oligonucleotide

SEQ ID NO: 649955 - DNA, 60 bp, Artificial; identical to SEQ ID NO: 248483
  Synthetic oligonucleotide

SEQ ID NO: 649956 - DNA, 60 bp, Artificial; identical to SEQ ID NO: 171716
  Synthetic oligonucleotide

SEQ ID NO: 649957 - DNA, 53 bp, Artificial; identical to SEQ ID NO: 205637
  Synthetic oligonucleotide

SEQ ID NO: 649958 - DNA, 55 bp, Artificial; identical to SEQ ID NO: 244095
  Synthetic oligonucleotide

SEQ ID NO: 649959 - DNA, 59 bp, Artificial; identical to SEQ ID NO: 150813
  Synthetic oligonucleotide

SEQ ID NO: 649960 - DNA, 52 bp, Artificial; identical to SEQ ID NO: 190825
  Synthetic oligonucleotide

SEQ ID NO: 649961 - DNA, 58 bp, Artificial; identical to SEQ ID NO: 238737
  Synthetic oligonucleotide

SEQ ID NO: 649962 - DNA, 60 bp, Artificial; identical to SEQ ID NO: 238739
  Synthetic oligonucleotide

SEQ ID NO: 649963 - DNA, 52 bp, Artificial; identical to SEQ ID NO: 157584
  Synthetic oligonucleotide

SEQ ID NO: 649964 - DNA, 55 bp, Artificial; identical to SEQ ID NO: 161178
  Synthetic oligonucleotide

SEQ ID NO: 649965 - DNA, 60 bp, Artificial; identical to SEQ ID NO: 210704
  Synthetic oligonucleotide

SEQ ID NO: 649966 - DNA, 53 bp, Artificial; identical to SEQ ID NO: 201369
  Synthetic oligonucleotide

SEQ ID NO: 649967 - DNA, 59 bp, Artificial; identical to SEQ ID NO: 144320
  Synthetic oligonucleotide

SEQ ID NO: 649968 - DNA, 55 bp, Artificial; identical to SEQ ID NO: 142825
  Synthetic oligonucleotide

SEQ ID NO: 649969 - DNA, 60 bp, Artificial; identical to SEQ ID NO: 150917
  Synthetic oligonucleotide

SEQ ID NO: 649970 - DNA, 54 bp, Artificial; identical to SEQ ID NO: 192010
  Synthetic oligonucleotide

SEQ ID NO: 649971 - DNA, 58 bp, Artificial; identical to SEQ ID NO: 238741
  Synthetic oligonucleotide

SEQ ID NO: 649972 - DNA, 55 bp, Artificial; identical to SEQ ID NO: 239693
  Synthetic oligonucleotide

SEQ ID NO: 649973 - DNA, 55 bp, Artificial; identical to SEQ ID NO: 188244
  Synthetic oligonucleotide

SEQ ID NO: 649974 - DNA, 60 bp, Artificial; identical to SEQ ID NO: 200587
  Synthetic oligonucleotide

SEQ ID NO: 649975 - DNA, 50 bp, Artificial; identical to SEQ ID NO: 195262
  Synthetic oligonucleotide

SEQ ID NO: 649976 - DNA, 55 bp, Artificial; identical to SEQ ID NO: 215580
  Synthetic oligonucleotide

SEQ ID NO: 649977 - DNA, 50 bp, Artificial; identical to SEQ ID NO: 150122
  Synthetic oligonucleotide

SEQ ID NO: 649978 - DNA, 55 bp, Artificial; identical to SEQ ID NO: 210693
  Synthetic oligonucleotide

SEQ ID NO: 649979 - DNA, 51 bp, Artificial; identical to SEQ ID NO: 203012
  Synthetic oligonucleotide

SEQ ID NO: 649980 - DNA, 55 bp, Artificial; identical to SEQ ID NO: 212597
  Synthetic oligonucleotide

SEQ ID NO: 649981 - DNA, 56 bp, Artificial; identical to SEQ ID NO: 165223
  Synthetic oligonucleotide

SEQ ID NO: 649982 - DNA, 56 bp, Artificial; identical to SEQ ID NO: 253703
  Synthetic oligonucleotide

SEQ ID NO: 649983 - DNA, 58 bp, Artificial; identical to SEQ ID NO: 171038
  Synthetic oligonucleotide

SEQ ID NO: 649984 - DNA, 58 bp, Artificial; identical to SEQ ID NO: 171026
  Synthetic oligonucleotide

SEQ ID NO: 649985 - DNA, 55 bp, Artificial; identical to SEQ ID NO: 168368
  Synthetic oligonucleotide

SEQ ID NO: 649986 - DNA, 55 bp, Artificial; identical to SEQ ID NO: 147373
  Synthetic oligonucleotide

SEQ ID NO: 649987 - DNA, 57 bp, Artificial; identical to SEQ ID NO: 171001
  Synthetic oligonucleotide

SEQ ID NO: 649988 - DNA, 54 bp, Artificial; identical to SEQ ID NO: 188816
  Synthetic oligonucleotide

SEQ ID NO: 649989 - DNA, 55 bp, Artificial; identical to SEQ ID NO: 190391
  Synthetic oligonucleotide

SEQ ID NO: 649990 - DNA, 52 bp, Artificial; identical to SEQ ID NO: 185920
  Synthetic oligonucleotide

SEQ ID NO: 649991 - DNA, 54 bp, Artificial; identical to SEQ ID NO: 219704
  Synthetic oligonucleotide

SEQ ID NO: 649992 - DNA, 53 bp, Artificial; identical to SEQ ID NO: 188106
  Synthetic oligonucleotide

SEQ ID NO: 649993 - DNA, 55 bp, Artificial; identical to SEQ ID NO: 211299
  Synthetic oligonucleotide

SEQ ID NO: 649994 - DNA, 55 bp, Artificial; identical to SEQ ID NO: 238378
  Synthetic oligonucleotide

SEQ ID NO: 649995 - DNA, 60 bp, Artificial; identical to SEQ ID NO: 178173
  Synthetic oligonucleotide

SEQ ID NO: 649996 - DNA, 60 bp, Artificial; identical to SEQ ID NO: 248489
  Synthetic oligonucleotide

SEQ ID NO: 649997 - DNA, 60 bp, Artificial; identical to SEQ ID NO: 248493
  Synthetic oligonucleotide

SEQ ID NO: 649998 - DNA, 55 bp, Artificial; identical to SEQ ID NO: 155978
  Synthetic oligonucleotide

SEQ ID NO: 649999 - DNA, 58 bp, Artificial; identical to SEQ ID NO: 238743
  Synthetic oligonucleotide

SEQ ID NO: 650000 - DNA, 55 bp, Artificial; identical to SEQ ID NO: 248561
  Synthetic oligonucleotide

SEQ ID NO: 650001 - DNA, 53 bp, Artificial; identical to SEQ ID NO: 190801
  Synthetic oligonucleotide

SEQ ID NO: 650002 - DNA, 52 bp, Artificial; identical to SEQ ID NO: 203001
  Synthetic oligonucleotide

SEQ ID NO: 650003 - DNA, 56 bp, Artificial; identical to SEQ ID NO: 239490
  Synthetic oligonucleotide

SEQ ID NO: 650004 - DNA, 55 bp, Artificial; identical to SEQ ID NO: 200585
  Synthetic oligonucleotide

SEQ ID NO: 650005 - DNA, 55 bp, Artificial; identical to SEQ ID NO: 203523
  Synthetic oligonucleotide

SEQ ID NO: 650006 - DNA, 55 bp, Artificial; identical to SEQ ID NO: 198449
  Synthetic oligonucleotide

SEQ ID NO: 650007 - DNA, 58 bp, Artificial; identical to SEQ ID NO: 247392
  Synthetic oligonucleotide

SEQ ID NO: 650008 - DNA, 51 bp, Artificial; identical to SEQ ID NO: 209759
  Synthetic oligonucleotide

SEQ ID NO: 650009 - DNA, 55 bp, Artificial; identical to SEQ ID NO: 147378
  Synthetic oligonucleotide

SEQ ID NO: 650010 - DNA, 55 bp, Artificial; identical to SEQ ID NO: 217548
  Synthetic oligonucleotide

SEQ ID NO: 650011 - DNA, 60 bp, Artificial; identical to SEQ ID NO: 225521
  Synthetic oligonucleotide

SEQ ID NO: 650012 - DNA, 60 bp, Artificial; identical to SEQ ID NO: 238745
  Synthetic oligonucleotide

SEQ ID NO: 650013 - DNA, 55 bp, Artificial; identical to SEQ ID NO: 247666
  Synthetic oligonucleotide

SEQ ID NO: 650014 - DNA, 57 bp, Artificial; identical to SEQ ID NO: 200584
  Synthetic oligonucleotide

SEQ ID NO: 650015 - DNA, 58 bp, Artificial; identical to SEQ ID NO: 155641
  Synthetic oligonucleotide

SEQ ID NO: 650016 - DNA, 60 bp, Artificial; identical to SEQ ID NO: 190975
  Synthetic oligonucleotide

SEQ ID NO: 650017 - DNA, 53 bp, Artificial; identical to SEQ ID NO: 190390
  Synthetic oligonucleotide

SEQ ID NO: 650018 - DNA, 55 bp, Artificial; identical to SEQ ID NO: 198447
  Synthetic oligonucleotide

SEQ ID NO: 650019 - DNA, 54 bp, Artificial; identical to SEQ ID NO: 239682
  Synthetic oligonucleotide

SEQ ID NO: 650020 - DNA, 53 bp, Artificial; identical to SEQ ID NO: 185783
  Synthetic oligonucleotide

SEQ ID NO: 650021 - DNA, 55 bp, Artificial; identical to SEQ ID NO: 203519
  Synthetic oligonucleotide

SEQ ID NO: 650022 - DNA, 55 bp, Artificial; identical to SEQ ID NO: 244586
  Synthetic oligonucleotide

SEQ ID NO: 650023 - DNA, 60 bp, Artificial; identical to SEQ ID NO: 207825
  Synthetic oligonucleotide

SEQ ID NO: 650024 - DNA, 50 bp, Artificial; identical to SEQ ID NO: 210467
  Synthetic oligonucleotide

SEQ ID NO: 650025 - DNA, 52 bp, Artificial; identical to SEQ ID NO: 185933
  Synthetic oligonucleotide

SEQ ID NO: 650026 - DNA, 53 bp, Artificial; identical to SEQ ID NO: 149320
  Synthetic oligonucleotide

SEQ ID NO: 650027 - DNA, 56 bp, Artificial; identical to SEQ ID NO: 224413
  Synthetic oligonucleotide

SEQ ID NO: 650028 - DNA, 53 bp, Artificial; identical to SEQ ID NO: 170052
  Synthetic oligonucleotide

SEQ ID NO: 650029 - DNA, 53 bp, Artificial; identical to SEQ ID NO: 247876
  Synthetic oligonucleotide

SEQ ID NO: 650030 - DNA, 54 bp, Artificial; identical to SEQ ID NO: 160825
  Synthetic oligonucleotide

SEQ ID NO: 650031 - DNA, 55 bp, Artificial; identical to SEQ ID NO: 181745
  Synthetic oligonucleotide

SEQ ID NO: 650032 - DNA, 55 bp, Artificial; identical to SEQ ID NO: 187766
  Synthetic oligonucleotide

SEQ ID NO: 650033 - DNA, 59 bp, Artificial; identical to SEQ ID NO: 238750
  Synthetic oligonucleotide

SEQ ID NO: 650034 - DNA, 60 bp, Artificial; identical to SEQ ID NO: 238751
  Synthetic oligonucleotide

SEQ ID NO: 650035 - DNA, 55 bp, Artificial; identical to SEQ ID NO: 221453
  Synthetic oligonucleotide

SEQ ID NO: 650036 - DNA, 56 bp, Artificial; identical to SEQ ID NO: 178158
  Synthetic oligonucleotide

SEQ ID NO: 650037 - DNA, 55 bp, Artificial; identical to SEQ ID NO: 187765
  Synthetic oligonucleotide

SEQ ID NO: 650038 - DNA, 60 bp, Artificial; identical to SEQ ID NO: 162448
  Synthetic oligonucleotide

SEQ ID NO: 650039 - DNA, 60 bp, Artificial; identical to SEQ ID NO: 201902
  Synthetic oligonucleotide

SEQ ID NO: 650040 - DNA, 55 bp, Artificial; identical to SEQ ID NO: 150880
  Synthetic oligonucleotide

SEQ ID NO: 650041 - DNA, 55 bp, Artificial; identical to SEQ ID NO: 198446
  Synthetic oligonucleotide

SEQ ID NO: 650042 - DNA, 55 bp, Artificial; identical to SEQ ID NO: 191916
  Synthetic oligonucleotide

SEQ ID NO: 650043 - DNA, 55 bp, Artificial; identical to SEQ ID NO: 244589
  Synthetic oligonucleotide

SEQ ID NO: 650044 - DNA, 55 bp, Artificial; identical to SEQ ID NO: 248694
  Synthetic oligonucleotide

SEQ ID NO: 650045 - DNA, 54 bp, Artificial; identical to SEQ ID NO: 174793
  Synthetic oligonucleotide

SEQ ID NO: 650046 - DNA, 56 bp, Artificial; identical to SEQ ID NO: 161946
  Synthetic oligonucleotide

SEQ ID NO: 650047 - DNA, 52 bp, Artificial; identical to SEQ ID NO: 144553
  Synthetic oligonucleotide

SEQ ID NO: 650048 - DNA, 55 bp, Artificial; identical to SEQ ID NO: 244594
  Synthetic oligonucleotide

SEQ ID NO: 650049 - DNA, 54 bp, Artificial; identical to SEQ ID NO: 197409
  Synthetic oligonucleotide

SEQ ID NO: 650050 - DNA, 60 bp, Artificial; identical to SEQ ID NO: 233801
  Synthetic oligonucleotide

SEQ ID NO: 650051 - DNA, 55 bp, Artificial; identical to SEQ ID NO: 211298
  Synthetic oligonucleotide

SEQ ID NO: 650052 - DNA, 57 bp, Artificial; identical to SEQ ID NO: 144333
  Synthetic oligonucleotide

SEQ ID NO: 650053 - DNA, 57 bp, Artificial; identical to SEQ ID NO: 190342
  Synthetic oligonucleotide

SEQ ID NO: 650054 - DNA, 59 bp, Artificial; identical to SEQ ID NO: 156287
  Synthetic oligonucleotide

SEQ ID NO: 650055 - DNA, 50 bp, Artificial; identical to SEQ ID NO: 160667
  Synthetic oligonucleotide

SEQ ID NO: 650056 - DNA, 50 bp, Artificial; identical to SEQ ID NO: 246855
  Synthetic oligonucleotide

SEQ ID NO: 650057 - DNA, 55 bp, Artificial; identical to SEQ ID NO: 181743
  Synthetic oligonucleotide

SEQ ID NO: 650058 - DNA, 55 bp, Artificial; identical to SEQ ID NO: 197219
  Synthetic oligonucleotide

SEQ ID NO: 650059 - DNA, 55 bp, Artificial; identical to SEQ ID NO: 166964
  Synthetic oligonucleotide

SEQ ID NO: 650060 - DNA, 55 bp, Artificial; identical to SEQ ID NO: 244596
  Synthetic oligonucleotide

SEQ ID NO: 650061 - DNA, 55 bp, Artificial; identical to SEQ ID NO: 167519
  Synthetic oligonucleotide

SEQ ID NO: 650062 - DNA, 50 bp, Artificial; identical to SEQ ID NO: 237224
  Synthetic oligonucleotide

SEQ ID NO: 650063 - DNA, 60 bp, Artificial; identical to SEQ ID NO: 150878
  Synthetic oligonucleotide

SEQ ID NO: 650064 - DNA, 53 bp, Artificial; identical to SEQ ID NO: 255359
  Synthetic oligonucleotide

SEQ ID NO: 650065 - DNA, 55 bp, Artificial; identical to SEQ ID NO: 211297
  Synthetic oligonucleotide

SEQ ID NO: 650066 - DNA, 58 bp, Artificial; identical to SEQ ID NO: 147113
  Synthetic oligonucleotide

SEQ ID NO: 650067 - DNA, 54 bp, Artificial; identical to SEQ ID NO: 244598
  Synthetic oligonucleotide

SEQ ID NO: 650068 - DNA, 58 bp, Artificial; identical to SEQ ID NO: 205930
  Synthetic oligonucleotide

SEQ ID NO: 650069 - DNA, 55 bp, Artificial; identical to SEQ ID NO: 202860
  Synthetic oligonucleotide

SEQ ID NO: 650070 - DNA, 58 bp, Artificial; identical to SEQ ID NO: 247269
  Synthetic oligonucleotide

SEQ ID NO: 650071 - DNA, 60 bp, Artificial; identical to SEQ ID NO: 205952
  Synthetic oligonucleotide

SEQ ID NO: 650072 - DNA, 54 bp, Artificial; identical to SEQ ID NO: 222855
  Synthetic oligonucleotide

SEQ ID NO: 650073 - DNA, 59 bp, Artificial; identical to SEQ ID NO: 141647
  Synthetic oligonucleotide

SEQ ID NO: 650074 - DNA, 53 bp, Artificial; identical to SEQ ID NO: 223586
  Synthetic oligonucleotide

SEQ ID NO: 650075 - DNA, 55 bp, Artificial; identical to SEQ ID NO: 147572
  Synthetic oligonucleotide

SEQ ID NO: 650076 - DNA, 60 bp, Artificial; identical to SEQ ID NO: 238756
  Synthetic oligonucleotide

SEQ ID NO: 650077 - DNA, 55 bp, Artificial; identical to SEQ ID NO: 244071
  Synthetic oligonucleotide

SEQ ID NO: 650078 - DNA, 55 bp, Artificial; identical to SEQ ID NO: 207179
  Synthetic oligonucleotide

SEQ ID NO: 650079 - DNA, 60 bp, Artificial; identical to SEQ ID NO: 257404
  Synthetic oligonucleotide

SEQ ID NO: 650080 - DNA, 57 bp, Artificial; identical to SEQ ID NO: 257510
  Synthetic oligonucleotide

SEQ ID NO: 650081 - DNA, 55 bp, Artificial; identical to SEQ ID NO: 202863
  Synthetic oligonucleotide

SEQ ID NO: 650082 - DNA, 60 bp, Artificial; identical to SEQ ID NO: 237724
  Synthetic oligonucleotide

SEQ ID NO: 650083 - DNA, 55 bp, Artificial; identical to SEQ ID NO: 233474
  Synthetic oligonucleotide

SEQ ID NO: 650084 - DNA, 55 bp, Artificial; identical to SEQ ID NO: 221452
  Synthetic oligonucleotide

SEQ ID NO: 650085 - DNA, 54 bp, Artificial; identical to SEQ ID NO: 193239
  Synthetic oligonucleotide

SEQ ID NO: 650086 - DNA, 51 bp, Artificial; identical to SEQ ID NO: 193825
  Synthetic oligonucleotide

SEQ ID NO: 650087 - DNA, 52 bp, Artificial; identical to SEQ ID NO: 141296
  Synthetic oligonucleotide

SEQ ID NO: 650088 - DNA, 55 bp, Artificial; identical to SEQ ID NO: 194528
  Synthetic oligonucleotide

SEQ ID NO: 650089 - DNA, 58 bp, Artificial; identical to SEQ ID NO: 150875
  Synthetic oligonucleotide

SEQ ID NO: 650090 - DNA, 60 bp, Artificial; identical to SEQ ID NO: 167858
  Synthetic oligonucleotide

SEQ ID NO: 650091 - DNA, 55 bp, Artificial; identical to SEQ ID NO: 215581
  Synthetic oligonucleotide

SEQ ID NO: 650092 - DNA, 59 bp, Artificial; identical to SEQ ID NO: 205204
  Synthetic oligonucleotide

SEQ ID NO: 650093 - DNA, 60 bp, Artificial; identical to SEQ ID NO: 178156
  Synthetic oligonucleotide

SEQ ID NO: 650094 - DNA, 54 bp, Artificial; identical to SEQ ID NO: 199610
  Synthetic oligonucleotide

SEQ ID NO: 650095 - DNA, 56 bp, Artificial; identical to SEQ ID NO: 150874
  Synthetic oligonucleotide

SEQ ID NO: 650096 - DNA, 50 bp, Artificial; identical to SEQ ID NO: 160668
  Synthetic oligonucleotide

SEQ ID NO: 650097 - DNA, 50 bp, Artificial; identical to SEQ ID NO: 195261
  Synthetic oligonucleotide

SEQ ID NO: 650098 - DNA, 55 bp, Artificial; identical to SEQ ID NO: 198442
  Synthetic oligonucleotide

SEQ ID NO: 650099 - DNA, 60 bp, Artificial; identical to SEQ ID NO: 152919
  Synthetic oligonucleotide

SEQ ID NO: 650100 - DNA, 60 bp, Artificial; identical to SEQ ID NO: 187168
  Synthetic oligonucleotide

SEQ ID NO: 650101 - DNA, 60 bp, Artificial; identical to SEQ ID NO: 257403
  Synthetic oligonucleotide

SEQ ID NO: 650102 - DNA, 54 bp, Artificial; identical to SEQ ID NO: 238703
  Synthetic oligonucleotide

SEQ ID NO: 650103 - DNA, 59 bp, Artificial; identical to SEQ ID NO: 155652
  Synthetic oligonucleotide

SEQ ID NO: 650104 - DNA, 58 bp, Artificial; identical to SEQ ID NO: 162446
  Synthetic oligonucleotide

SEQ ID NO: 650105 - DNA, 52 bp, Artificial; identical to SEQ ID NO: 160927
  Synthetic oligonucleotide

SEQ ID NO: 650106 - DNA, 60 bp, Artificial; identical to SEQ ID NO: 247266
  Synthetic oligonucleotide

SEQ ID NO: 650107 - DNA, 53 bp, Artificial; identical to SEQ ID NO: 247874
  Synthetic oligonucleotide

SEQ ID NO: 650108 - DNA, 57 bp, Artificial; identical to SEQ ID NO: 179862
  Synthetic oligonucleotide

SEQ ID NO: 650109 - DNA, 54 bp, Artificial; identical to SEQ ID NO: 244558
  Synthetic oligonucleotide

SEQ ID NO: 650110 - DNA, 59 bp, Artificial; identical to SEQ ID NO: 190353
  Synthetic oligonucleotide

SEQ ID NO: 650111 - DNA, 55 bp, Artificial; identical to SEQ ID NO: 181739
  Synthetic oligonucleotide

SEQ ID NO: 650112 - DNA, 52 bp, Artificial; identical to SEQ ID NO: 141649
  Synthetic oligonucleotide

SEQ ID NO: 650113 - DNA, 55 bp, Artificial; identical to SEQ ID NO: 217549
  Synthetic oligonucleotide

SEQ ID NO: 650114 - DNA, 55 bp, Artificial; identical to SEQ ID NO: 257983
  Synthetic oligonucleotide

SEQ ID NO: 650115 - DNA, 57 bp, Artificial; identical to SEQ ID NO: 178155
  Synthetic oligonucleotide

SEQ ID NO: 650116 - DNA, 60 bp, Artificial; identical to SEQ ID NO: 141650
  Synthetic oligonucleotide

SEQ ID NO: 650117 - DNA, 55 bp, Artificial; identical to SEQ ID NO: 265826
  Synthetic oligonucleotide

SEQ ID NO: 650118 - DNA, 55 bp, Artificial; identical to SEQ ID NO: 247441
  Synthetic oligonucleotide

SEQ ID NO: 650119 - DNA, 54 bp, Artificial; identical to SEQ ID NO: 244569
  Synthetic oligonucleotide

SEQ ID NO: 650120 - DNA, 54 bp, Artificial; identical to SEQ ID NO: 210671
  Synthetic oligonucleotide

SEQ ID NO: 650121 - DNA, 50 bp, Artificial; identical to SEQ ID NO: 209776
  Synthetic oligonucleotide

SEQ ID NO: 650122 - DNA, 54 bp, Artificial; identical to SEQ ID NO: 146375
  Synthetic oligonucleotide

SEQ ID NO: 650123 - DNA, 54 bp, Artificial; identical to SEQ ID NO: 199605
  Synthetic oligonucleotide

SEQ ID NO: 650124 - DNA, 57 bp, Artificial; identical to SEQ ID NO: 248571
  Synthetic oligonucleotide

SEQ ID NO: 650125 - DNA, 54 bp, Artificial; identical to SEQ ID NO: 168853
  Synthetic oligonucleotide

SEQ ID NO: 650126 - DNA, 55 bp, Artificial; identical to SEQ ID NO: 260191
  Synthetic oligonucleotide

SEQ ID NO: 650127 - DNA, 55 bp, Artificial; identical to SEQ ID NO: 209342
  Synthetic oligonucleotide

SEQ ID NO: 650128 - DNA, 55 bp, Artificial; identical to SEQ ID NO: 238705
  Synthetic oligonucleotide

SEQ ID NO: 650129 - DNA, 55 bp, Artificial; identical to SEQ ID NO: 189061
  Synthetic oligonucleotide

SEQ ID NO: 650130 - DNA, 55 bp, Artificial; identical to SEQ ID NO: 193173
  Synthetic oligonucleotide

SEQ ID NO: 650131 - DNA, 57 bp, Artificial; identical to SEQ ID NO: 256351
  Synthetic oligonucleotide

SEQ ID NO: 650132 - DNA, 53 bp, Artificial; identical to SEQ ID NO: 187167
  Synthetic oligonucleotide

SEQ ID NO: 650133 - DNA, 53 bp, Artificial; identical to SEQ ID NO: 141651
  Synthetic oligonucleotide

SEQ ID NO: 650134 - DNA, 54 bp, Artificial; identical to SEQ ID NO: 205986
  Synthetic oligonucleotide

SEQ ID NO: 650135 - DNA, 54 bp, Artificial; identical to SEQ ID NO: 168854
  Synthetic oligonucleotide

SEQ ID NO: 650136 - DNA, 60 bp, Artificial; identical to SEQ ID NO: 257402
  Synthetic oligonucleotide

SEQ ID NO: 650137 - DNA, 55 bp, Artificial; identical to SEQ ID NO: 254082
  Synthetic oligonucleotide

SEQ ID NO: 650138 - DNA, 53 bp, Artificial; identical to SEQ ID NO: 200580
  Synthetic oligonucleotide

SEQ ID NO: 650139 - DNA, 55 bp, Artificial; identical to SEQ ID NO: 254081
  Synthetic oligonucleotide

SEQ ID NO: 650140 - DNA, 53 bp, Artificial; identical to SEQ ID NO: 165279
  Synthetic oligonucleotide

SEQ ID NO: 650141 - DNA, 54 bp, Artificial; identical to SEQ ID NO: 188003
  Synthetic oligonucleotide

SEQ ID NO: 650142 - DNA, 53 bp, Artificial; identical to SEQ ID NO: 152051
  Synthetic oligonucleotide

SEQ ID NO: 650143 - DNA, 55 bp, Artificial; identical to SEQ ID NO: 257974
  Synthetic oligonucleotide

SEQ ID NO: 650144 - DNA, 54 bp, Artificial; identical to SEQ ID NO: 190608
  Synthetic oligonucleotide

SEQ ID NO: 650145 - DNA, 55 bp, Artificial; identical to SEQ ID NO: 181737
  Synthetic oligonucleotide

SEQ ID NO: 650146 - DNA, 57 bp, Artificial; identical to SEQ ID NO: 224219
  Synthetic oligonucleotide

SEQ ID NO: 650147 - DNA, 57 bp, Artificial; identical to SEQ ID NO: 202759
  Synthetic oligonucleotide

SEQ ID NO: 650148 - DNA, 60 bp, Artificial; identical to SEQ ID NO: 238709
  Synthetic oligonucleotide

SEQ ID NO: 650149 - DNA, 55 bp, Artificial; identical to SEQ ID NO: 187757
  Synthetic oligonucleotide

SEQ ID NO: 650150 - DNA, 55 bp, Artificial; identical to SEQ ID NO: 239716
  Synthetic oligonucleotide

SEQ ID NO: 650151 - DNA, 56 bp, Artificial; identical to SEQ ID NO: 171094
  Synthetic oligonucleotide

SEQ ID NO: 650152 - DNA, 60 bp, Artificial; identical to SEQ ID NO: 217022
  Synthetic oligonucleotide

SEQ ID NO: 650153 - DNA, 54 bp, Artificial; identical to SEQ ID NO: 188004
  Synthetic oligonucleotide

SEQ ID NO: 650154 - DNA, 53 bp, Artificial; identical to SEQ ID NO: 171893
  Synthetic oligonucleotide

SEQ ID NO: 650155 - DNA, 50 bp, Artificial; identical to SEQ ID NO: 200318
  Synthetic oligonucleotide

SEQ ID NO: 650156 - DNA, 59 bp, Artificial; identical to SEQ ID NO: 257401
  Synthetic oligonucleotide

SEQ ID NO: 650157 - DNA, 55 bp, Artificial; identical to SEQ ID NO: 181736
  Synthetic oligonucleotide

SEQ ID NO: 650158 - DNA, 57 bp, Artificial; identical to SEQ ID NO: 210837
  Synthetic oligonucleotide

SEQ ID NO: 650159 - DNA, 47 bp, Artificial; identical to SEQ ID NO: 142613
  Synthetic oligonucleotide

SEQ ID NO: 650160 - DNA, 58 bp, Artificial; identical to SEQ ID NO: 243546
  Synthetic oligonucleotide

SEQ ID NO: 650161 - DNA, 55 bp, Artificial; identical to SEQ ID NO: 238713
  Synthetic oligonucleotide

SEQ ID NO: 650162 - DNA, 54 bp, Artificial; identical to SEQ ID NO: 202252
  Synthetic oligonucleotide

SEQ ID NO: 650163 - DNA, 50 bp, Artificial; identical to SEQ ID NO: 241277
  Synthetic oligonucleotide

SEQ ID NO: 650164 - DNA, 58 bp, Artificial; identical to SEQ ID NO: 150907
  Synthetic oligonucleotide

SEQ ID NO: 650165 - DNA, 53 bp, Artificial; identical to SEQ ID NO: 160436
  Synthetic oligonucleotide

SEQ ID NO: 650166 - DNA, 55 bp, Artificial; identical to SEQ ID NO: 146288
  Synthetic oligonucleotide

SEQ ID NO: 650167 - DNA, 60 bp, Artificial; identical to SEQ ID NO: 178200
  Synthetic oligonucleotide

SEQ ID NO: 650168 - DNA, 53 bp, Artificial; identical to SEQ ID NO: 164820
  Synthetic oligonucleotide

SEQ ID NO: 650169 - DNA, 52 bp, Artificial; identical to SEQ ID NO: 199898
  Synthetic oligonucleotide

SEQ ID NO: 650170 - DNA, 55 bp, Artificial; identical to SEQ ID NO: 147591
  Synthetic oligonucleotide

SEQ ID NO: 650171 - DNA, 55 bp, Artificial; identical to SEQ ID NO: 208282
  Synthetic oligonucleotide

SEQ ID NO: 650172 - DNA, 55 bp, Artificial; identical to SEQ ID NO: 191917
  Synthetic oligonucleotide

SEQ ID NO: 650173 - DNA, 55 bp, Artificial; identical to SEQ ID NO: 197218
  Synthetic oligonucleotide

SEQ ID NO: 650174 - DNA, 59 bp, Artificial; identical to SEQ ID NO: 205997
  Synthetic oligonucleotide

SEQ ID NO: 650175 - DNA, 55 bp, Artificial; identical to SEQ ID NO: 168365
  Synthetic oligonucleotide

SEQ ID NO: 650176 - DNA, 55 bp, Artificial; identical to SEQ ID NO: 181869
  Synthetic oligonucleotide

SEQ ID NO: 650177 - DNA, 53 bp, Artificial; identical to SEQ ID NO: 209647
  Synthetic oligonucleotide

SEQ ID NO: 650178 - DNA, 59 bp, Artificial; identical to SEQ ID NO: 256388
  Synthetic oligonucleotide

SEQ ID NO: 650179 - DNA, 60 bp, Artificial; identical to SEQ ID NO: 150893
  Synthetic oligonucleotide

SEQ ID NO: 650180 - DNA, 60 bp, Artificial; identical to SEQ ID NO: 178193
  Synthetic oligonucleotide

SEQ ID NO: 650181 - DNA, 55 bp, Artificial; identical to SEQ ID NO: 211331
  Synthetic oligonucleotide

SEQ ID NO: 650182 - DNA, 55 bp, Artificial; identical to SEQ ID NO: 191918
  Synthetic oligonucleotide

SEQ ID NO: 650183 - DNA, 50 bp, Artificial; identical to SEQ ID NO: 241279
  Synthetic oligonucleotide

SEQ ID NO: 650184 - DNA, 60 bp, Artificial; identical to SEQ ID NO: 247305
  Synthetic oligonucleotide

SEQ ID NO: 650185 - DNA, 55 bp, Artificial; identical to SEQ ID NO: 144097
  Synthetic oligonucleotide

SEQ ID NO: 650186 - DNA, 60 bp, Artificial; identical to SEQ ID NO: 150891
  Synthetic oligonucleotide

SEQ ID NO: 650187 - DNA, 55 bp, Artificial; identical to SEQ ID NO: 254079
  Synthetic oligonucleotide

SEQ ID NO: 650188 - DNA, 60 bp, Artificial; identical to SEQ ID NO: 178190
  Synthetic oligonucleotide

SEQ ID NO: 650189 - DNA, 53 bp, Artificial; identical to SEQ ID NO: 235143
  Synthetic oligonucleotide

SEQ ID NO: 650190 - DNA, 57 bp, Artificial; identical to SEQ ID NO: 247304
  Synthetic oligonucleotide

SEQ ID NO: 650191 - DNA, 55 bp, Artificial; identical to SEQ ID NO: 222609
  Synthetic oligonucleotide

SEQ ID NO: 650192 - DNA, 58 bp, Artificial; identical to SEQ ID NO: 159848
  Synthetic oligonucleotide

SEQ ID NO: 650193 - DNA, 55 bp, Artificial; identical to SEQ ID NO: 163858
  Synthetic oligonucleotide

SEQ ID NO: 650194 - DNA, 51 bp, Artificial; identical to SEQ ID NO: 193122
  Synthetic oligonucleotide

SEQ ID NO: 650195 - DNA, 55 bp, Artificial; identical to SEQ ID NO: 257973
  Synthetic oligonucleotide

SEQ ID NO: 650196 - DNA, 57 bp, Artificial; identical to SEQ ID NO: 200622
  Synthetic oligonucleotide

SEQ ID NO: 650197 - DNA, 54 bp, Artificial; identical to SEQ ID NO: 149179
  Synthetic oligonucleotide

SEQ ID NO: 650198 - DNA, 55 bp, Artificial; identical to SEQ ID NO: 208283
  Synthetic oligonucleotide

SEQ ID NO: 650199 - DNA, 55 bp, Artificial; identical to SEQ ID NO: 253719
  Synthetic oligonucleotide

SEQ ID NO: 650200 - DNA, 55 bp, Artificial; identical to SEQ ID NO: 168358
  Synthetic oligonucleotide

SEQ ID NO: 650201 - DNA, 55 bp, Artificial; identical to SEQ ID NO: 208244
  Synthetic oligonucleotide

SEQ ID NO: 650202 - DNA, 51 bp, Artificial; identical to SEQ ID NO: 200049
  Synthetic oligonucleotide

SEQ ID NO: 650203 - DNA, 55 bp, Artificial; identical to SEQ ID NO: 191051
  Synthetic oligonucleotide

SEQ ID NO: 650204 - DNA, 60 bp, Artificial; identical to SEQ ID NO: 238714
  Synthetic oligonucleotide

SEQ ID NO: 650205 - DNA, 52 bp, Artificial; identical to SEQ ID NO: 207858
  Synthetic oligonucleotide

SEQ ID NO: 650206 - DNA, 55 bp, Artificial; identical to SEQ ID NO: 212602
  Synthetic oligonucleotide

SEQ ID NO: 650207 - DNA, 52 bp, Artificial; identical to SEQ ID NO: 186001
  Synthetic oligonucleotide

SEQ ID NO: 650208 - DNA, 53 bp, Artificial; identical to SEQ ID NO: 217023
  Synthetic oligonucleotide

SEQ ID NO: 650209 - DNA, 51 bp, Artificial; identical to SEQ ID NO: 149705
  Synthetic oligonucleotide

SEQ ID NO: 650210 - DNA, 60 bp, Artificial; identical to SEQ ID NO: 206887
  Synthetic oligonucleotide

SEQ ID NO: 650211 - DNA, 52 bp, Artificial; identical to SEQ ID NO: 149617
  Synthetic oligonucleotide

SEQ ID NO: 650212 - DNA, 57 bp, Artificial; identical to SEQ ID NO: 187360
  Synthetic oligonucleotide

SEQ ID NO: 650213 - DNA, 58 bp, Artificial; identical to SEQ ID NO: 256384
  Synthetic oligonucleotide

SEQ ID NO: 650214 - DNA, 55 bp, Artificial; identical to SEQ ID NO: 202253
  Synthetic oligonucleotide

SEQ ID NO: 650215 - DNA, 55 bp, Artificial; identical to SEQ ID NO: 239710
  Synthetic oligonucleotide

SEQ ID NO: 650216 - DNA, 60 bp, Artificial; identical to SEQ ID NO: 212469
  Synthetic oligonucleotide

SEQ ID NO: 650217 - DNA, 53 bp, Artificial; identical to SEQ ID NO: 240775
  Synthetic oligonucleotide

SEQ ID NO: 650218 - DNA, 60 bp, Artificial; identical to SEQ ID NO: 194192
  Synthetic oligonucleotide

SEQ ID NO: 650219 - DNA, 55 bp, Artificial; identical to SEQ ID NO: 155983
  Synthetic oligonucleotide

SEQ ID NO: 650220 - DNA, 54 bp, Artificial; identical to SEQ ID NO: 212949
  Synthetic oligonucleotide

SEQ ID NO: 650221 - DNA, 54 bp, Artificial; identical to SEQ ID NO: 151982
  Synthetic oligonucleotide

SEQ ID NO: 650222 - DNA, 50 bp, Artificial; identical to SEQ ID NO: 150135
  Synthetic oligonucleotide

SEQ ID NO: 650223 - DNA, 60 bp, Artificial; identical to SEQ ID NO: 201895
  Synthetic oligonucleotide

SEQ ID NO: 650224 - DNA, 52 bp, Artificial; identical to SEQ ID NO: 167113
  Synthetic oligonucleotide

SEQ ID NO: 650225 - DNA, 60 bp, Artificial; identical to SEQ ID NO: 187165
  Synthetic oligonucleotide

SEQ ID NO: 650226 - DNA, 53 bp, Artificial; identical to SEQ ID NO: 212971
  Synthetic oligonucleotide

SEQ ID NO: 650227 - DNA, 55 bp, Artificial; identical to SEQ ID NO: 217024
  Synthetic oligonucleotide

SEQ ID NO: 650228 - DNA, 53 bp, Artificial; identical to SEQ ID NO: 160432
  Synthetic oligonucleotide

SEQ ID NO: 650229 - DNA, 59 bp, Artificial; identical to SEQ ID NO: 152918
  Synthetic oligonucleotide

SEQ ID NO: 650230 - DNA, 59 bp, Artificial; identical to SEQ ID NO: 243549
  Synthetic oligonucleotide

SEQ ID NO: 650231 - DNA, 50 bp, Artificial; identical to SEQ ID NO: 233897
  Synthetic oligonucleotide

SEQ ID NO: 650232 - DNA, 54 bp, Artificial; identical to SEQ ID NO: 181863
  Synthetic oligonucleotide

SEQ ID NO: 650233 - DNA, 54 bp, Artificial; identical to SEQ ID NO: 244667
  Synthetic oligonucleotide

SEQ ID NO: 650234 - DNA, 55 bp, Artificial; identical to SEQ ID NO: 190385
  Synthetic oligonucleotide

SEQ ID NO: 650235 - DNA, 55 bp, Artificial; identical to SEQ ID NO: 225112
  Synthetic oligonucleotide

SEQ ID NO: 650236 - DNA, 54 bp, Artificial; identical to SEQ ID NO: 170913
  Synthetic oligonucleotide

SEQ ID NO: 650237 - DNA, 60 bp, Artificial; identical to SEQ ID NO: 147022
  Synthetic oligonucleotide

SEQ ID NO: 650238 - DNA, 60 bp, Artificial; identical to SEQ ID NO: 178182
  Synthetic oligonucleotide

SEQ ID NO: 650239 - DNA, 55 bp, Artificial; identical to SEQ ID NO: 211329
  Synthetic oligonucleotide

SEQ ID NO: 650240 - DNA, 54 bp, Artificial; identical to SEQ ID NO: 184965
  Synthetic oligonucleotide

SEQ ID NO: 650241 - DNA, 54 bp, Artificial; identical to SEQ ID NO: 243550
  Synthetic oligonucleotide

SEQ ID NO: 650242 - DNA, 60 bp, Artificial; identical to SEQ ID NO: 217026
  Synthetic oligonucleotide

SEQ ID NO: 650243 - DNA, 56 bp, Artificial; identical to SEQ ID NO: 152066
  Synthetic oligonucleotide

SEQ ID NO: 650244 - DNA, 53 bp, Artificial; identical to SEQ ID NO: 243551
  Synthetic oligonucleotide

SEQ ID NO: 650245 - DNA, 50 bp, Artificial; identical to SEQ ID NO: 160633
  Synthetic oligonucleotide

SEQ ID NO: 650246 - DNA, 50 bp, Artificial; identical to SEQ ID NO: 193944
  Synthetic oligonucleotide

SEQ ID NO: 650247 - DNA, 54 bp, Artificial; identical to SEQ ID NO: 147025
  Synthetic oligonucleotide

SEQ ID NO: 650248 - DNA, 53 bp, Artificial; identical to SEQ ID NO: 246270
  Synthetic oligonucleotide

SEQ ID NO: 650249 - DNA, 55 bp, Artificial; identical to SEQ ID NO: 181859
  Synthetic oligonucleotide

SEQ ID NO: 650250 - DNA, 57 bp, Artificial; identical to SEQ ID NO: 187163
  Synthetic oligonucleotide

SEQ ID NO: 650251 - DNA, 57 bp, Artificial; identical to SEQ ID NO: 238725
  Synthetic oligonucleotide

SEQ ID NO: 650252 - DNA, 55 bp, Artificial; identical to SEQ ID NO: 171224
  Synthetic oligonucleotide

SEQ ID NO: 650253 - DNA, 60 bp, Artificial; identical to SEQ ID NO: 178342
  Synthetic oligonucleotide

SEQ ID NO: 650254 - DNA, 52 bp, Artificial; identical to SEQ ID NO: 246533
  Synthetic oligonucleotide

SEQ ID NO: 650255 - DNA, 47 bp, Artificial; identical to SEQ ID NO: 209340
  Synthetic oligonucleotide

SEQ ID NO: 650256 - DNA, 55 bp, Artificial; identical to SEQ ID NO: 254077
  Synthetic oligonucleotide

SEQ ID NO: 650257 - DNA, 60 bp, Artificial; identical to SEQ ID NO: 266416
  Synthetic oligonucleotide

SEQ ID NO: 650258 - DNA, 58 bp, Artificial; identical to SEQ ID NO: 147020
  Synthetic oligonucleotide

SEQ ID NO: 650259 - DNA, 60 bp, Artificial; identical to SEQ ID NO: 266415
  Synthetic oligonucleotide

SEQ ID NO: 650260 - DNA, 55 bp, Artificial; identical to SEQ ID NO: 234320
  Synthetic oligonucleotide

SEQ ID NO: 650261 - DNA, 60 bp, Artificial; identical to SEQ ID NO: 262752
  Synthetic oligonucleotide

SEQ ID NO: 650262 - DNA, 54 bp, Artificial; identical to SEQ ID NO: 215178
  Synthetic oligonucleotide

SEQ ID NO: 650263 - DNA, 55 bp, Artificial; identical to SEQ ID NO: 181858
  Synthetic oligonucleotide

SEQ ID NO: 650264 - DNA, 55 bp, Artificial; identical to SEQ ID NO: 181856
  Synthetic oligonucleotide

SEQ ID NO: 650265 - DNA, 55 bp, Artificial; identical to SEQ ID NO: 157953
  Synthetic oligonucleotide

SEQ ID NO: 650266 - DNA, 51 bp, Artificial; identical to SEQ ID NO: 169417
  Synthetic oligonucleotide

SEQ ID NO: 650267 - DNA, 54 bp, Artificial; identical to SEQ ID NO: 246224
  Synthetic oligonucleotide

SEQ ID NO: 650268 - DNA, 57 bp, Artificial; identical to SEQ ID NO: 217290
  Synthetic oligonucleotide

SEQ ID NO: 650269 - DNA, 52 bp, Artificial; identical to SEQ ID NO: 178337
  Synthetic oligonucleotide

SEQ ID NO: 650270 - DNA, 52 bp, Artificial; identical to SEQ ID NO: 185989
  Synthetic oligonucleotide

SEQ ID NO: 650271 - DNA, 56 bp, Artificial; identical to SEQ ID NO: 151343
  Synthetic oligonucleotide

SEQ ID NO: 650272 - DNA, 60 bp, Artificial; identical to SEQ ID NO: 262754
  Synthetic oligonucleotide

SEQ ID NO: 650273 - DNA, 53 bp, Artificial; identical to SEQ ID NO: 154590
  Synthetic oligonucleotide

SEQ ID NO: 650274 - DNA, 60 bp, Artificial; identical to SEQ ID NO: 194195
  Synthetic oligonucleotide

SEQ ID NO: 650275 - DNA, 53 bp, Artificial; identical to SEQ ID NO: 188081
  Synthetic oligonucleotide

SEQ ID NO: 650276 - DNA, 60 bp, Artificial; identical to SEQ ID NO: 178332
  Synthetic oligonucleotide

SEQ ID NO: 650277 - DNA, 53 bp, Artificial; identical to SEQ ID NO: 234309
  Synthetic oligonucleotide

SEQ ID NO: 650278 - DNA, 50 bp, Artificial; identical to SEQ ID NO: 167760
  Synthetic oligonucleotide

SEQ ID NO: 650279 - DNA, 60 bp, Artificial; identical to SEQ ID NO: 192245
  Synthetic oligonucleotide

SEQ ID NO: 650280 - DNA, 56 bp, Artificial; identical to SEQ ID NO: 247295
  Synthetic oligonucleotide

SEQ ID NO: 650281 - DNA, 53 bp, Artificial; identical to SEQ ID NO: 185792
  Synthetic oligonucleotide

SEQ ID NO: 650282 - DNA, 53 bp, Artificial; identical to SEQ ID NO: 200621
  Synthetic oligonucleotide

SEQ ID NO: 650283 - DNA, 53 bp, Artificial; identical to SEQ ID NO: 207020
  Synthetic oligonucleotide

SEQ ID NO: 650284 - DNA, 52 bp, Artificial; identical to SEQ ID NO: 144557
  Synthetic oligonucleotide

SEQ ID NO: 650285 - DNA, 51 bp, Artificial; identical to SEQ ID NO: 152973
  Synthetic oligonucleotide

SEQ ID NO: 650286 - DNA, 53 bp, Artificial; identical to SEQ ID NO: 194198
  Synthetic oligonucleotide

SEQ ID NO: 650287 - DNA, 55 bp, Artificial; identical to SEQ ID NO: 189023
  Synthetic oligonucleotide

SEQ ID NO: 650288 - DNA, 53 bp, Artificial; identical to SEQ ID NO: 170910
  Synthetic oligonucleotide

SEQ ID NO: 650289 - DNA, 55 bp, Artificial; identical to SEQ ID NO: 147648
  Synthetic oligonucleotide

SEQ ID NO: 650290 - DNA, 57 bp, Artificial; identical to SEQ ID NO: 161950
  Synthetic oligonucleotide

SEQ ID NO: 650291 - DNA, 60 bp, Artificial; identical to SEQ ID NO: 238728
  Synthetic oligonucleotide

SEQ ID NO: 650292 - DNA, 51 bp, Artificial; identical to SEQ ID NO: 160550
  Synthetic oligonucleotide

SEQ ID NO: 650293 - DNA, 57 bp, Artificial; identical to SEQ ID NO: 238729
  Synthetic oligonucleotide

SEQ ID NO: 650294 - DNA, 53 bp, Artificial; identical to SEQ ID NO: 199761
  Synthetic oligonucleotide

SEQ ID NO: 650295 - DNA, 55 bp, Artificial; identical to SEQ ID NO: 143713
  Synthetic oligonucleotide

SEQ ID NO: 650296 - DNA, 53 bp, Artificial; identical to SEQ ID NO: 195011
  Synthetic oligonucleotide

SEQ ID NO: 650297 - DNA, 58 bp, Artificial; identical to SEQ ID NO: 238787
  Synthetic oligonucleotide

SEQ ID NO: 650298 - DNA, 55 bp, Artificial; identical to SEQ ID NO: 144447
  Synthetic oligonucleotide

SEQ ID NO: 650299 - DNA, 55 bp, Artificial; identical to SEQ ID NO: 254076
  Synthetic oligonucleotide

SEQ ID NO: 650300 - DNA, 57 bp, Artificial; identical to SEQ ID NO: 201183
  Synthetic oligonucleotide

SEQ ID NO: 650301 - DNA, 51 bp, Artificial; identical to SEQ ID NO: 208834
  Synthetic oligonucleotide

SEQ ID NO: 650302 - DNA, 58 bp, Artificial; identical to SEQ ID NO: 247448
  Synthetic oligonucleotide

SEQ ID NO: 650303 - DNA, 60 bp, Artificial; identical to SEQ ID NO: 238795
  Synthetic oligonucleotide

SEQ ID NO: 650304 - DNA, 52 bp, Artificial; identical to SEQ ID NO: 149607
  Synthetic oligonucleotide

SEQ ID NO: 650305 - DNA, 58 bp, Artificial; identical to SEQ ID NO: 210660
  Synthetic oligonucleotide

SEQ ID NO: 650306 - DNA, 51 bp, Artificial; identical to SEQ ID NO: 181852
  Synthetic oligonucleotide

SEQ ID NO: 650307 - DNA, 50 bp, Artificial; identical to SEQ ID NO: 201735
  Synthetic oligonucleotide

SEQ ID NO: 650308 - DNA, 53 bp, Artificial; identical to SEQ ID NO: 221450
  Synthetic oligonucleotide

SEQ ID NO: 650309 - DNA, 54 bp, Artificial; identical to SEQ ID NO: 243553
  Synthetic oligonucleotide

SEQ ID NO: 650310 - DNA, 54 bp, Artificial; identical to SEQ ID NO: 253249
  Synthetic oligonucleotide

SEQ ID NO: 650311 - DNA, 54 bp, Artificial; identical to SEQ ID NO: 243087
  Synthetic oligonucleotide

SEQ ID NO: 650312 - DNA, 55 bp, Artificial; identical to SEQ ID NO: 163841
  Synthetic oligonucleotide

SEQ ID NO: 650313 - DNA, 54 bp, Artificial; identical to SEQ ID NO: 246249
  Synthetic oligonucleotide

SEQ ID NO: 650314 - DNA, 55 bp, Artificial; identical to SEQ ID NO: 202256
  Synthetic oligonucleotide

SEQ ID NO: 650315 - DNA, 57 bp, Artificial; identical to SEQ ID NO: 179523
  Synthetic oligonucleotide

SEQ ID NO: 650316 - DNA, 52 bp, Artificial; identical to SEQ ID NO: 170160
  Synthetic oligonucleotide

SEQ ID NO: 650317 - DNA, 60 bp, Artificial; identical to SEQ ID NO: 165434
  Synthetic oligonucleotide

SEQ ID NO: 650318 - DNA, 51 bp, Artificial; identical to SEQ ID NO: 165169
  Synthetic oligonucleotide

SEQ ID NO: 650319 - DNA, 55 bp, Artificial; identical to SEQ ID NO: 191061
  Synthetic oligonucleotide

SEQ ID NO: 650320 - DNA, 54 bp, Artificial; identical to SEQ ID NO: 199589
  Synthetic oligonucleotide

SEQ ID NO: 650321 - DNA, 56 bp, Artificial; identical to SEQ ID NO: 212474
  Synthetic oligonucleotide

SEQ ID NO: 650322 - DNA, 51 bp, Artificial; identical to SEQ ID NO: 162009
  Synthetic oligonucleotide

SEQ ID NO: 650323 - DNA, 53 bp, Artificial; identical to SEQ ID NO: 170034
  Synthetic oligonucleotide

SEQ ID NO: 650324 - DNA, 52 bp, Artificial; identical to SEQ ID NO: 170915
  Synthetic oligonucleotide

SEQ ID NO: 650325 - DNA, 54 bp, Artificial; identical to SEQ ID NO: 178322
  Synthetic oligonucleotide

SEQ ID NO: 650326 - DNA, 55 bp, Artificial; identical to SEQ ID NO: 169267
  Synthetic oligonucleotide

SEQ ID NO: 650327 - DNA, 58 bp, Artificial; identical to SEQ ID NO: 207016
  Synthetic oligonucleotide

SEQ ID NO: 650328 - DNA, 52 bp, Artificial; identical to SEQ ID NO: 193764
  Synthetic oligonucleotide

SEQ ID NO: 650329 - DNA, 54 bp, Artificial; identical to SEQ ID NO: 221652
  Synthetic oligonucleotide

SEQ ID NO: 650330 - DNA, 60 bp, Artificial; identical to SEQ ID NO: 170917
  Synthetic oligonucleotide

SEQ ID NO: 650331 - DNA, 53 bp, Artificial; identical to SEQ ID NO: 178321
  Synthetic oligonucleotide

SEQ ID NO: 650332 - DNA, 52 bp, Artificial; identical to SEQ ID NO: 160478
  Synthetic oligonucleotide

SEQ ID NO: 650333 - DNA, 53 bp, Artificial; identical to SEQ ID NO: 208692
  Synthetic oligonucleotide

SEQ ID NO: 650334 - DNA, 52 bp, Artificial; identical to SEQ ID NO: 185966
  Synthetic oligonucleotide

SEQ ID NO: 650335 - DNA, 55 bp, Artificial; identical to SEQ ID NO: 217554
  Synthetic oligonucleotide

SEQ ID NO: 650336 - DNA, 55 bp, Artificial; identical to SEQ ID NO: 238375
  Synthetic oligonucleotide

SEQ ID NO: 650337 - DNA, 53 bp, Artificial; identical to SEQ ID NO: 224182
  Synthetic oligonucleotide

SEQ ID NO: 650338 - DNA, 55 bp, Artificial; identical to SEQ ID NO: 181895
  Synthetic oligonucleotide

SEQ ID NO: 650339 - DNA, 57 bp, Artificial; identical to SEQ ID NO: 200618
  Synthetic oligonucleotide

SEQ ID NO: 650340 - DNA, 58 bp, Artificial; identical to SEQ ID NO: 200617
  Synthetic oligonucleotide

SEQ ID NO: 650341 - DNA, 58 bp, Artificial; identical to SEQ ID NO: 170923
  Synthetic oligonucleotide

SEQ ID NO: 650342 - DNA, 51 bp, Artificial; identical to SEQ ID NO: 210337
  Synthetic oligonucleotide

SEQ ID NO: 650343 - DNA, 55 bp, Artificial; identical to SEQ ID NO: 237728
  Synthetic oligonucleotide

SEQ ID NO: 650344 - DNA, 50 bp, Artificial; identical to SEQ ID NO: 192255
  Synthetic oligonucleotide

SEQ ID NO: 650345 - DNA, 57 bp, Artificial; identical to SEQ ID NO: 244014
  Synthetic oligonucleotide

SEQ ID NO: 650346 - DNA, 60 bp, Artificial; identical to SEQ ID NO: 194157
  Synthetic oligonucleotide

SEQ ID NO: 650347 - DNA, 55 bp, Artificial; identical to SEQ ID NO: 155986
  Synthetic oligonucleotide

SEQ ID NO: 650348 - DNA, 51 bp, Artificial; identical to SEQ ID NO: 149702
  Synthetic oligonucleotide

SEQ ID NO: 650349 - DNA, 58 bp, Artificial; identical to SEQ ID NO: 243555
  Synthetic oligonucleotide

SEQ ID NO: 650350 - DNA, 55 bp, Artificial; identical to SEQ ID NO: 211328
  Synthetic oligonucleotide

SEQ ID NO: 650351 - DNA, 57 bp, Artificial; identical to SEQ ID NO: 237729
  Synthetic oligonucleotide

SEQ ID NO: 650352 - DNA, 51 bp, Artificial; identical to SEQ ID NO: 243297
  Synthetic oligonucleotide

SEQ ID NO: 650353 - DNA, 54 bp, Artificial; identical to SEQ ID NO: 170012
  Synthetic oligonucleotide

SEQ ID NO: 650354 - DNA, 51 bp, Artificial; identical to SEQ ID NO: 153661
  Synthetic oligonucleotide

SEQ ID NO: 650355 - DNA, 60 bp, Artificial; identical to SEQ ID NO: 194160
  Synthetic oligonucleotide

SEQ ID NO: 650356 - DNA, 55 bp, Artificial; identical to SEQ ID NO: 188801
  Synthetic oligonucleotide

SEQ ID NO: 650357 - DNA, 51 bp, Artificial; identical to SEQ ID NO: 216812
  Synthetic oligonucleotide

SEQ ID NO: 650358 - DNA, 58 bp, Artificial; identical to SEQ ID NO: 171036
  Synthetic oligonucleotide

SEQ ID NO: 650359 - DNA, 55 bp, Artificial; identical to SEQ ID NO: 141654
  Synthetic oligonucleotide

SEQ ID NO: 650360 - DNA, 54 bp, Artificial; identical to SEQ ID NO: 246251
  Synthetic oligonucleotide

SEQ ID NO: 650361 - DNA, 53 bp, Artificial; identical to SEQ ID NO: 191173
  Synthetic oligonucleotide

SEQ ID NO: 650362 - DNA, 50 bp, Artificial; identical to SEQ ID NO: 167763
  Synthetic oligonucleotide

SEQ ID NO: 650363 - DNA, 58 bp, Artificial; identical to SEQ ID NO: 206030
  Synthetic oligonucleotide

SEQ ID NO: 650364 - DNA, 50 bp, Artificial; identical to SEQ ID NO: 200258
  Synthetic oligonucleotide

SEQ ID NO: 650365 - DNA, 53 bp, Artificial; identical to SEQ ID NO: 243556
  Synthetic oligonucleotide

SEQ ID NO: 650366 - DNA, 60 bp, Artificial; identical to SEQ ID NO: 238802
  Synthetic oligonucleotide

SEQ ID NO: 650367 - DNA, 54 bp, Artificial; identical to SEQ ID NO: 188006
  Synthetic oligonucleotide

SEQ ID NO: 650368 - DNA, 53 bp, Artificial; identical to SEQ ID NO: 149359
  Synthetic oligonucleotide

SEQ ID NO: 650369 - DNA, 48 bp, Artificial; identical to SEQ ID NO: 217238
  Synthetic oligonucleotide

SEQ ID NO: 650370 - DNA, 57 bp, Artificial; identical to SEQ ID NO: 215571
  Synthetic oligonucleotide

SEQ ID NO: 650371 - DNA, 56 bp, Artificial; identical to SEQ ID NO: 165412
  Synthetic oligonucleotide

SEQ ID NO: 650372 - DNA, 59 bp, Artificial; identical to SEQ ID NO: 247430
  Synthetic oligonucleotide

SEQ ID NO: 650373 - DNA, 53 bp, Artificial; identical to SEQ ID NO: 240722
  Synthetic oligonucleotide

SEQ ID NO: 650374 - DNA, 58 bp, Artificial; identical to SEQ ID NO: 247292
  Synthetic oligonucleotide

SEQ ID NO: 650375 - DNA, 51 bp, Artificial; identical to SEQ ID NO: 186531
  Synthetic oligonucleotide

SEQ ID NO: 650376 - DNA, 55 bp, Artificial; identical to SEQ ID NO: 239635
  Synthetic oligonucleotide

SEQ ID NO: 650377 - DNA, 53 bp, Artificial; identical to SEQ ID NO: 198439
  Synthetic oligonucleotide

SEQ ID NO: 650378 - DNA, 60 bp, Artificial; identical to SEQ ID NO: 243557
  Synthetic oligonucleotide

SEQ ID NO: 650379 - DNA, 53 bp, Artificial; identical to SEQ ID NO: 178364
  Synthetic oligonucleotide

SEQ ID NO: 650380 - DNA, 57 bp, Artificial; identical to SEQ ID NO: 178362
  Synthetic oligonucleotide

SEQ ID NO: 650381 - DNA, 52 bp, Artificial; identical to SEQ ID NO: 249667
  Synthetic oligonucleotide

SEQ ID NO: 650382 - DNA, 55 bp, Artificial; identical to SEQ ID NO: 155989
  Synthetic oligonucleotide

SEQ ID NO: 650383 - DNA, 60 bp, Artificial; identical to SEQ ID NO: 178360
  Synthetic oligonucleotide

SEQ ID NO: 650384 - DNA, 54 bp, Artificial; identical to SEQ ID NO: 149222
  Synthetic oligonucleotide

SEQ ID NO: 650385 - DNA, 55 bp, Artificial; identical to SEQ ID NO: 211326
  Synthetic oligonucleotide

SEQ ID NO: 650386 - DNA, 55 bp, Artificial; identical to SEQ ID NO: 181889
  Synthetic oligonucleotide

SEQ ID NO: 650387 - DNA, 55 bp, Artificial; identical to SEQ ID NO: 220645
  Synthetic oligonucleotide

SEQ ID NO: 650388 - DNA, 59 bp, Artificial; identical to SEQ ID NO: 179286
  Synthetic oligonucleotide

SEQ ID NO: 650389 - DNA, 54 bp, Artificial; identical to SEQ ID NO: 199600
  Synthetic oligonucleotide

SEQ ID NO: 650390 - DNA, 55 bp, Artificial; identical to SEQ ID NO: 146284
  Synthetic oligonucleotide

SEQ ID NO: 650391 - DNA, 57 bp, Artificial; identical to SEQ ID NO: 147015
  Synthetic oligonucleotide

SEQ ID NO: 650392 - DNA, 55 bp, Artificial; identical to SEQ ID NO: 181887
  Synthetic oligonucleotide

SEQ ID NO: 650393 - DNA, 55 bp, Artificial; identical to SEQ ID NO: 181886
  Synthetic oligonucleotide

SEQ ID NO: 650394 - DNA, 55 bp, Artificial; identical to SEQ ID NO: 163839
  Synthetic oligonucleotide

SEQ ID NO: 650395 - DNA, 54 bp, Artificial; identical to SEQ ID NO: 164799
  Synthetic oligonucleotide

SEQ ID NO: 650396 - DNA, 55 bp, Artificial; identical to SEQ ID NO: 181885
  Synthetic oligonucleotide

SEQ ID NO: 650397 - DNA, 55 bp, Artificial; identical to SEQ ID NO: 202864
  Synthetic oligonucleotide

SEQ ID NO: 650398 - DNA, 60 bp, Artificial; identical to SEQ ID NO: 200615
  Synthetic oligonucleotide

SEQ ID NO: 650399 - DNA, 54 bp, Artificial; identical to SEQ ID NO: 152527
  Synthetic oligonucleotide

SEQ ID NO: 650400 - DNA, 56 bp, Artificial; identical to SEQ ID NO: 142668
  Synthetic oligonucleotide

SEQ ID NO: 650401 - DNA, 53 bp, Artificial; identical to SEQ ID NO: 143799
  Synthetic oligonucleotide

SEQ ID NO: 650402 - DNA, 56 bp, Artificial; identical to SEQ ID NO: 200614
  Synthetic oligonucleotide

SEQ ID NO: 650403 - DNA, 55 bp, Artificial; identical to SEQ ID NO: 193562
  Synthetic oligonucleotide

SEQ ID NO: 650404 - DNA, 55 bp, Artificial; identical to SEQ ID NO: 147359
  Synthetic oligonucleotide

SEQ ID NO: 650405 - DNA, 55 bp, Artificial; identical to SEQ ID NO: 208286
  Synthetic oligonucleotide

SEQ ID NO: 650406 - DNA, 55 bp, Artificial; identical to SEQ ID NO: 187781
  Synthetic oligonucleotide

SEQ ID NO: 650407 - DNA, 54 bp, Artificial; identical to SEQ ID NO: 165390
  Synthetic oligonucleotide

SEQ ID NO: 650408 - DNA, 51 bp, Artificial; identical to SEQ ID NO: 186534
  Synthetic oligonucleotide

SEQ ID NO: 650409 - DNA, 55 bp, Artificial; identical to SEQ ID NO: 163838
  Synthetic oligonucleotide

SEQ ID NO: 650410 - DNA, 60 bp, Artificial; identical to SEQ ID NO: 247308
  Synthetic oligonucleotide

SEQ ID NO: 650411 - DNA, 53 bp, Artificial; identical to SEQ ID NO: 255438
  Synthetic oligonucleotide

SEQ ID NO: 650412 - DNA, 55 bp, Artificial; identical to SEQ ID NO: 205495
  Synthetic oligonucleotide

SEQ ID NO: 650413 - DNA, 47 bp, Artificial; identical to SEQ ID NO: 217027
  Synthetic oligonucleotide

SEQ ID NO: 650414 - DNA, 60 bp, Artificial; identical to SEQ ID NO: 203320
  Synthetic oligonucleotide

SEQ ID NO: 650415 - DNA, 55 bp, Artificial; identical to SEQ ID NO: 181884
  Synthetic oligonucleotide

SEQ ID NO: 650416 - DNA, 54 bp, Artificial; identical to SEQ ID NO: 185018
  Synthetic oligonucleotide

SEQ ID NO: 650417 - DNA, 54 bp, Artificial; identical to SEQ ID NO: 257399
  Synthetic oligonucleotide

SEQ ID NO: 650418 - DNA, 60 bp, Artificial; identical to SEQ ID NO: 253442
  Synthetic oligonucleotide

SEQ ID NO: 650419 - DNA, 53 bp, Artificial; identical to SEQ ID NO: 262666
  Synthetic oligonucleotide

SEQ ID NO: 650420 - DNA, 58 bp, Artificial; identical to SEQ ID NO: 167276
  Synthetic oligonucleotide

SEQ ID NO: 650421 - DNA, 54 bp, Artificial; identical to SEQ ID NO: 164801
  Synthetic oligonucleotide

SEQ ID NO: 650422 - DNA, 60 bp, Artificial; identical to SEQ ID NO: 178357
  Synthetic oligonucleotide

SEQ ID NO: 650423 - DNA, 54 bp, Artificial; identical to SEQ ID NO: 141194
  Synthetic oligonucleotide

SEQ ID NO: 650424 - DNA, 55 bp, Artificial; identical to SEQ ID NO: 260033
  Synthetic oligonucleotide

SEQ ID NO: 650425 - DNA, 51 bp, Artificial; identical to SEQ ID NO: 237213
  Synthetic oligonucleotide

SEQ ID NO: 650426 - DNA, 55 bp, Artificial; identical to SEQ ID NO: 143711
  Synthetic oligonucleotide

SEQ ID NO: 650427 - DNA, 52 bp, Artificial; identical to SEQ ID NO: 208929
  Synthetic oligonucleotide

SEQ ID NO: 650428 - DNA, 52 bp, Artificial; identical to SEQ ID NO: 199865
  Synthetic oligonucleotide

SEQ ID NO: 650429 - DNA, 56 bp, Artificial; identical to SEQ ID NO: 170891
  Synthetic oligonucleotide

SEQ ID NO: 650430 - DNA, 52 bp, Artificial; identical to SEQ ID NO: 185980
  Synthetic oligonucleotide

SEQ ID NO: 650431 - DNA, 53 bp, Artificial; identical to SEQ ID NO: 163837
  Synthetic oligonucleotide

SEQ ID NO: 650432 - DNA, 53 bp, Artificial; identical to SEQ ID NO: 247872
  Synthetic oligonucleotide

SEQ ID NO: 650433 - DNA, 52 bp, Artificial; identical to SEQ ID NO: 191273
  Synthetic oligonucleotide

SEQ ID NO: 650434 - DNA, 52 bp, Artificial; identical to SEQ ID NO: 188498
  Synthetic oligonucleotide

SEQ ID NO: 650435 - DNA, 55 bp, Artificial; identical to SEQ ID NO: 225111
  Synthetic oligonucleotide

SEQ ID NO: 650436 - DNA, 55 bp, Artificial; identical to SEQ ID NO: 220646
  Synthetic oligonucleotide

SEQ ID NO: 650437 - DNA, 55 bp, Artificial; identical to SEQ ID NO: 174357
  Synthetic oligonucleotide

SEQ ID NO: 650438 - DNA, 55 bp, Artificial; identical to SEQ ID NO: 178355
  Synthetic oligonucleotide

SEQ ID NO: 650439 - DNA, 55 bp, Artificial; identical to SEQ ID NO: 171315
  Synthetic oligonucleotide

SEQ ID NO: 650440 - DNA, 58 bp, Artificial; identical to SEQ ID NO: 209838
  Synthetic oligonucleotide

SEQ ID NO: 650441 - DNA, 51 bp, Artificial; identical to SEQ ID NO: 165170
  Synthetic oligonucleotide

SEQ ID NO: 650442 - DNA, 50 bp, Artificial; identical to SEQ ID NO: 158284
  Synthetic oligonucleotide

SEQ ID NO: 650443 - DNA, 55 bp, Artificial; identical to SEQ ID NO: 155992
  Synthetic oligonucleotide

SEQ ID NO: 650444 - DNA, 59 bp, Artificial; identical to SEQ ID NO: 215151
  Synthetic oligonucleotide

SEQ ID NO: 650445 - DNA, 50 bp, Artificial; identical to SEQ ID NO: 196564
  Synthetic oligonucleotide

SEQ ID NO: 650446 - DNA, 54 bp, Artificial; identical to SEQ ID NO: 188430
  Synthetic oligonucleotide

SEQ ID NO: 650447 - DNA, 55 bp, Artificial; identical to SEQ ID NO: 171316
  Synthetic oligonucleotide

SEQ ID NO: 650448 - DNA, 60 bp, Artificial; identical to SEQ ID NO: 208940
  Synthetic oligonucleotide

SEQ ID NO: 650449 - DNA, 57 bp, Artificial; identical to SEQ ID NO: 253431
  Synthetic oligonucleotide

SEQ ID NO: 650450 - DNA, 57 bp, Artificial; identical to SEQ ID NO: 168193
  Synthetic oligonucleotide

SEQ ID NO: 650451 - DNA, 51 bp, Artificial; identical to SEQ ID NO: 186598
  Synthetic oligonucleotide

SEQ ID NO: 650452 - DNA, 55 bp, Artificial; identical to SEQ ID NO: 144872
  Synthetic oligonucleotide

SEQ ID NO: 650453 - DNA, 53 bp, Artificial; identical to SEQ ID NO: 144988
  Synthetic oligonucleotide

SEQ ID NO: 650454 - DNA, 58 bp, Artificial; identical to SEQ ID NO: 141655
  Synthetic oligonucleotide

SEQ ID NO: 650455 - DNA, 55 bp, Artificial; identical to SEQ ID NO: 163836
  Synthetic oligonucleotide

SEQ ID NO: 650456 - DNA, 55 bp, Artificial; identical to SEQ ID NO: 181824
  Synthetic oligonucleotide

SEQ ID NO: 650457 - DNA, 51 bp, Artificial; identical to SEQ ID NO: 149364
  Synthetic oligonucleotide

SEQ ID NO: 650458 - DNA, 52 bp, Artificial; identical to SEQ ID NO: 191193
  Synthetic oligonucleotide

SEQ ID NO: 650459 - DNA, 54 bp, Artificial; identical to SEQ ID NO: 184975
  Synthetic oligonucleotide

SEQ ID NO: 650460 - DNA, 51 bp, Artificial; identical to SEQ ID NO: 186601
  Synthetic oligonucleotide

SEQ ID NO: 650461 - DNA, 55 bp, Artificial; identical to SEQ ID NO: 238374
  Synthetic oligonucleotide

SEQ ID NO: 650462 - DNA, 53 bp, Artificial; identical to SEQ ID NO: 212476
  Synthetic oligonucleotide

SEQ ID NO: 650463 - DNA, 49 bp, Artificial; identical to SEQ ID NO: 178351
  Synthetic oligonucleotide

SEQ ID NO: 650464 - DNA, 50 bp, Artificial; identical to SEQ ID NO: 176335
  Synthetic oligonucleotide

SEQ ID NO: 650465 - DNA, 54 bp, Artificial; identical to SEQ ID NO: 216581
  Synthetic oligonucleotide

SEQ ID NO: 650466 - DNA, 60 bp, Artificial; identical to SEQ ID NO: 243558
  Synthetic oligonucleotide

SEQ ID NO: 650467 - DNA, 58 bp, Artificial; identical to SEQ ID NO: 219652
  Synthetic oligonucleotide

SEQ ID NO: 650468 - DNA, 60 bp, Artificial; identical to SEQ ID NO: 238809
  Synthetic oligonucleotide

SEQ ID NO: 650469 - DNA, 60 bp, Artificial; identical to SEQ ID NO: 217028
  Synthetic oligonucleotide

SEQ ID NO: 650470 - DNA, 54 bp, Artificial; identical to SEQ ID NO: 184977
  Synthetic oligonucleotide

SEQ ID NO: 650471 - DNA, 60 bp, Artificial; identical to SEQ ID NO: 206894
  Synthetic oligonucleotide

SEQ ID NO: 650472 - DNA, 55 bp, Artificial; identical to SEQ ID NO: 166787
  Synthetic oligonucleotide

SEQ ID NO: 650473 - DNA, 56 bp, Artificial; identical to SEQ ID NO: 180033
  Synthetic oligonucleotide

SEQ ID NO: 650474 - DNA, 55 bp, Artificial; identical to SEQ ID NO: 155994
  Synthetic oligonucleotide

SEQ ID NO: 650475 - DNA, 55 bp, Artificial; identical to SEQ ID NO: 144445
  Synthetic oligonucleotide

SEQ ID NO: 650476 - DNA, 55 bp, Artificial; identical to SEQ ID NO: 162002
  Synthetic oligonucleotide

SEQ ID NO: 650477 - DNA, 55 bp, Artificial; identical to SEQ ID NO: 202866
  Synthetic oligonucleotide

SEQ ID NO: 650478 - DNA, 53 bp, Artificial; identical to SEQ ID NO: 236985
  Synthetic oligonucleotide

SEQ ID NO: 650479 - DNA, 60 bp, Artificial; identical to SEQ ID NO: 190365
  Synthetic oligonucleotide

SEQ ID NO: 650480 - DNA, 55 bp, Artificial; identical to SEQ ID NO: 144444
  Synthetic oligonucleotide

SEQ ID NO: 650481 - DNA, 53 bp, Artificial; identical to SEQ ID NO: 195218
  Synthetic oligonucleotide

SEQ ID NO: 650482 - DNA, 54 bp, Artificial; identical to SEQ ID NO: 184979
  Synthetic oligonucleotide

SEQ ID NO: 650483 - DNA, 53 bp, Artificial; identical to SEQ ID NO: 166786
  Synthetic oligonucleotide

SEQ ID NO: 650484 - DNA, 55 bp, Artificial; identical to SEQ ID NO: 160255
  Synthetic oligonucleotide

SEQ ID NO: 650485 - DNA, 60 bp, Artificial; identical to SEQ ID NO: 178346
  Synthetic oligonucleotide

SEQ ID NO: 650486 - DNA, 55 bp, Artificial; identical to SEQ ID NO: 244498
  Synthetic oligonucleotide

SEQ ID NO: 650487 - DNA, 53 bp, Artificial; identical to SEQ ID NO: 141263
  Synthetic oligonucleotide

SEQ ID NO: 650488 - DNA, 52 bp, Artificial; identical to SEQ ID NO: 185970
  Synthetic oligonucleotide

SEQ ID NO: 650489 - DNA, 58 bp, Artificial; identical to SEQ ID NO: 174858
  Synthetic oligonucleotide

SEQ ID NO: 650490 - DNA, 53 bp, Artificial; identical to SEQ ID NO: 142620
  Synthetic oligonucleotide

SEQ ID NO: 650491 - DNA, 54 bp, Artificial; identical to SEQ ID NO: 160370
  Synthetic oligonucleotide

SEQ ID NO: 650492 - DNA, 58 bp, Artificial; identical to SEQ ID NO: 178288
  Synthetic oligonucleotide

SEQ ID NO: 650493 - DNA, 58 bp, Artificial; identical to SEQ ID NO: 194163
  Synthetic oligonucleotide

SEQ ID NO: 650494 - DNA, 50 bp, Artificial; identical to SEQ ID NO: 206633
  Synthetic oligonucleotide

SEQ ID NO: 650495 - DNA, 58 bp, Artificial; identical to SEQ ID NO: 224186
  Synthetic oligonucleotide

SEQ ID NO: 650496 - DNA, 55 bp, Artificial; identical to SEQ ID NO: 166020
  Synthetic oligonucleotide

SEQ ID NO: 650497 - DNA, 50 bp, Artificial; identical to SEQ ID NO: 259030
  Synthetic oligonucleotide

SEQ ID NO: 650498 - DNA, 53 bp, Artificial; identical to SEQ ID NO: 147270
  Synthetic oligonucleotide

SEQ ID NO: 650499 - DNA, 60 bp, Artificial; identical to SEQ ID NO: 238810
  Synthetic oligonucleotide

SEQ ID NO: 650500 - DNA, 57 bp, Artificial; identical to SEQ ID NO: 159969
  Synthetic oligonucleotide

SEQ ID NO: 650501 - DNA, 55 bp, Artificial; identical to SEQ ID NO: 254073
  Synthetic oligonucleotide

SEQ ID NO: 650502 - DNA, 52 bp, Artificial; identical to SEQ ID NO: 239203
  Synthetic oligonucleotide

SEQ ID NO: 650503 - DNA, 56 bp, Artificial; identical to SEQ ID NO: 210648
  Synthetic oligonucleotide

SEQ ID NO: 650504 - DNA, 54 bp, Artificial; identical to SEQ ID NO: 157130
  Synthetic oligonucleotide

SEQ ID NO: 650505 - DNA, 55 bp, Artificial; identical to SEQ ID NO: 166785
  Synthetic oligonucleotide

SEQ ID NO: 650506 - DNA, 53 bp, Artificial; identical to SEQ ID NO: 207736
  Synthetic oligonucleotide

SEQ ID NO: 650507 - DNA, 54 bp, Artificial; identical to SEQ ID NO: 149175
  Synthetic oligonucleotide

SEQ ID NO: 650508 - DNA, 55 bp, Artificial; identical to SEQ ID NO: 142168
  Synthetic oligonucleotide

SEQ ID NO: 650509 - DNA, 55 bp, Artificial; identical to SEQ ID NO: 173579
  Synthetic oligonucleotide

SEQ ID NO: 650510 - DNA, 55 bp, Artificial; identical to SEQ ID NO: 181821
  Synthetic oligonucleotide

SEQ ID NO: 650511 - DNA, 58 bp, Artificial; identical to SEQ ID NO: 205197
  Synthetic oligonucleotide

SEQ ID NO: 650512 - DNA, 55 bp, Artificial; identical to SEQ ID NO: 244450
  Synthetic oligonucleotide

SEQ ID NO: 650513 - DNA, 54 bp, Artificial; identical to SEQ ID NO: 184981
  Synthetic oligonucleotide

SEQ ID NO: 650514 - DNA, 60 bp, Artificial; identical to SEQ ID NO: 203324
  Synthetic oligonucleotide

SEQ ID NO: 650515 - DNA, 53 bp, Artificial; identical to SEQ ID NO: 247871
  Synthetic oligonucleotide

SEQ ID NO: 650516 - DNA, 56 bp, Artificial; identical to SEQ ID NO: 238813
  Synthetic oligonucleotide

SEQ ID NO: 650517 - DNA, 54 bp, Artificial; identical to SEQ ID NO: 211325
  Synthetic oligonucleotide

SEQ ID NO: 650518 - DNA, 50 bp, Artificial; identical to SEQ ID NO: 199868
  Synthetic oligonucleotide

SEQ ID NO: 650519 - DNA, 60 bp, Artificial; identical to SEQ ID NO: 178285
  Synthetic oligonucleotide

SEQ ID NO: 650520 - DNA, 58 bp, Artificial; identical to SEQ ID NO: 165889
  Synthetic oligonucleotide

SEQ ID NO: 650521 - DNA, 51 bp, Artificial; identical to SEQ ID NO: 142639
  Synthetic oligonucleotide

SEQ ID NO: 650522 - DNA, 51 bp, Artificial; identical to SEQ ID NO: 186610
  Synthetic oligonucleotide

SEQ ID NO: 650523 - DNA, 55 bp, Artificial; identical to SEQ ID NO: 224910
  Synthetic oligonucleotide

SEQ ID NO: 650524 - DNA, 58 bp, Artificial; identical to SEQ ID NO: 266412
  Synthetic oligonucleotide

SEQ ID NO: 650525 - DNA, 60 bp, Artificial; identical to SEQ ID NO: 238757
  Synthetic oligonucleotide

SEQ ID NO: 650526 - DNA, 57 bp, Artificial; identical to SEQ ID NO: 238758
  Synthetic oligonucleotide

SEQ ID NO: 650527 - DNA, 55 bp, Artificial; identical to SEQ ID NO: 166784
  Synthetic oligonucleotide

SEQ ID NO: 650528 - DNA, 50 bp, Artificial; identical to SEQ ID NO: 247261
  Synthetic oligonucleotide

SEQ ID NO: 650529 - DNA, 55 bp, Artificial; identical to SEQ ID NO: 244460
  Synthetic oligonucleotide

SEQ ID NO: 650530 - DNA, 56 bp, Artificial; identical to SEQ ID NO: 200612
  Synthetic oligonucleotide

SEQ ID NO: 650531 - DNA, 52 bp, Artificial; identical to SEQ ID NO: 203952
  Synthetic oligonucleotide

SEQ ID NO: 650532 - DNA, 55 bp, Artificial; identical to SEQ ID NO: 222611
  Synthetic oligonucleotide

SEQ ID NO: 650533 - DNA, 50 bp, Artificial; identical to SEQ ID NO: 146517
  Synthetic oligonucleotide

SEQ ID NO: 650534 - DNA, 55 bp, Artificial; identical to SEQ ID NO: 147662
  Synthetic oligonucleotide

SEQ ID NO: 650535 - DNA, 52 bp, Artificial; identical to SEQ ID NO: 149669
  Synthetic oligonucleotide

SEQ ID NO: 650536 - DNA, 55 bp, Artificial; identical to SEQ ID NO: 162008
  Synthetic oligonucleotide

SEQ ID NO: 650537 - DNA, 52 bp, Artificial; identical to SEQ ID NO: 190817
  Synthetic oligonucleotide

SEQ ID NO: 650538 - DNA, 53 bp, Artificial; identical to SEQ ID NO: 181817
  Synthetic oligonucleotide

SEQ ID NO: 650539 - DNA, 58 bp, Artificial; identical to SEQ ID NO: 194272
  Synthetic oligonucleotide

SEQ ID NO: 650540 - DNA, 52 bp, Artificial; identical to SEQ ID NO: 193765
  Synthetic oligonucleotide

SEQ ID NO: 650541 - DNA, 51 bp, Artificial; identical to SEQ ID NO: 178282
  Synthetic oligonucleotide

SEQ ID NO: 650542 - DNA, 59 bp, Artificial; identical to SEQ ID NO: 178277
  Synthetic oligonucleotide

SEQ ID NO: 650543 - DNA, 60 bp, Artificial; identical to SEQ ID NO: 200611
  Synthetic oligonucleotide

SEQ ID NO: 650544 - DNA, 60 bp, Artificial; identical to SEQ ID NO: 151150
  Synthetic oligonucleotide

SEQ ID NO: 650545 - DNA, 55 bp, Artificial; identical to SEQ ID NO: 257993
  Synthetic oligonucleotide

SEQ ID NO: 650546 - DNA, 56 bp, Artificial; identical to SEQ ID NO: 142667
  Synthetic oligonucleotide

SEQ ID NO: 650547 - DNA, 56 bp, Artificial; identical to SEQ ID NO: 178275
  Synthetic oligonucleotide

SEQ ID NO: 650548 - DNA, 60 bp, Artificial; identical to SEQ ID NO: 266411
  Synthetic oligonucleotide

SEQ ID NO: 650549 - DNA, 58 bp, Artificial; identical to SEQ ID NO: 151152
  Synthetic oligonucleotide

SEQ ID NO: 650550 - DNA, 51 bp, Artificial; identical to SEQ ID NO: 237210
  Synthetic oligonucleotide

SEQ ID NO: 650551 - DNA, 60 bp, Artificial; identical to SEQ ID NO: 194164
  Synthetic oligonucleotide

SEQ ID NO: 650552 - DNA, 60 bp, Artificial; identical to SEQ ID NO: 238759
  Synthetic oligonucleotide

SEQ ID NO: 650553 - DNA, 53 bp, Artificial; identical to SEQ ID NO: 164897
  Synthetic oligonucleotide

SEQ ID NO: 650554 - DNA, 55 bp, Artificial; identical to SEQ ID NO: 238371
  Synthetic oligonucleotide

SEQ ID NO: 650555 - DNA, 52 bp, Artificial; identical to SEQ ID NO: 185959
  Synthetic oligonucleotide

SEQ ID NO: 650556 - DNA, 55 bp, Artificial; identical to SEQ ID NO: 142522
  Synthetic oligonucleotide

SEQ ID NO: 650557 - DNA, 54 bp, Artificial; identical to SEQ ID NO: 240627
  Synthetic oligonucleotide

SEQ ID NO: 650558 - DNA, 55 bp, Artificial; identical to SEQ ID NO: 198431
  Synthetic oligonucleotide

SEQ ID NO: 650559 - DNA, 50 bp, Artificial; identical to SEQ ID NO: 176289
  Synthetic oligonucleotide

SEQ ID NO: 650560 - DNA, 60 bp, Artificial; identical to SEQ ID NO: 178273
  Synthetic oligonucleotide

SEQ ID NO: 650561 - DNA, 60 bp, Artificial; identical to SEQ ID NO: 141657
  Synthetic oligonucleotide

SEQ ID NO: 650562 - DNA, 55 bp, Artificial; identical to SEQ ID NO: 254072
  Synthetic oligonucleotide

SEQ ID NO: 650563 - DNA, 60 bp, Artificial; identical to SEQ ID NO: 178271
  Synthetic oligonucleotide

SEQ ID NO: 650564 - DNA, 53 bp, Artificial; identical to SEQ ID NO: 259533
  Synthetic oligonucleotide

SEQ ID NO: 650565 - DNA, 53 bp, Artificial; identical to SEQ ID NO: 238762
  Synthetic oligonucleotide

SEQ ID NO: 650566 - DNA, 55 bp, Artificial; identical to SEQ ID NO: 181809
  Synthetic oligonucleotide

SEQ ID NO: 650567 - DNA, 55 bp, Artificial; identical to SEQ ID NO: 224909
  Synthetic oligonucleotide

SEQ ID NO: 650568 - DNA, 55 bp, Artificial; identical to SEQ ID NO: 147541
  Synthetic oligonucleotide

SEQ ID NO: 650569 - DNA, 50 bp, Artificial; identical to SEQ ID NO: 248145
  Synthetic oligonucleotide

SEQ ID NO: 650570 - DNA, 60 bp, Artificial; identical to SEQ ID NO: 201890
  Synthetic oligonucleotide

SEQ ID NO: 650571 - DNA, 55 bp, Artificial; identical to SEQ ID NO: 244462
  Synthetic oligonucleotide

SEQ ID NO: 650572 - DNA, 55 bp, Artificial; identical to SEQ ID NO: 155998
  Synthetic oligonucleotide

SEQ ID NO: 650573 - DNA, 55 bp, Artificial; identical to SEQ ID NO: 212569
  Synthetic oligonucleotide

SEQ ID NO: 650574 - DNA, 54 bp, Artificial; identical to SEQ ID NO: 147586
  Synthetic oligonucleotide

SEQ ID NO: 650575 - DNA, 51 bp, Artificial; identical to SEQ ID NO: 192160
  Synthetic oligonucleotide

SEQ ID NO: 650576 - DNA, 59 bp, Artificial; identical to SEQ ID NO: 247353
  Synthetic oligonucleotide

SEQ ID NO: 650577 - DNA, 51 bp, Artificial; identical to SEQ ID NO: 193802
  Synthetic oligonucleotide

SEQ ID NO: 650578 - DNA, 55 bp, Artificial; identical to SEQ ID NO: 244533
  Synthetic oligonucleotide

SEQ ID NO: 650579 - DNA, 50 bp, Artificial; identical to SEQ ID NO: 176452
  Synthetic oligonucleotide

SEQ ID NO: 650580 - DNA, 60 bp, Artificial; identical to SEQ ID NO: 217032
  Synthetic oligonucleotide

SEQ ID NO: 650581 - DNA, 60 bp, Artificial; identical to SEQ ID NO: 266410
  Synthetic oligonucleotide

SEQ ID NO: 650582 - DNA, 56 bp, Artificial; identical to SEQ ID NO: 147342
  Synthetic oligonucleotide

SEQ ID NO: 650583 - DNA, 54 bp, Artificial; identical to SEQ ID NO: 238764
  Synthetic oligonucleotide

SEQ ID NO: 650584 - DNA, 60 bp, Artificial; identical to SEQ ID NO: 152965
  Synthetic oligonucleotide

SEQ ID NO: 650585 - DNA, 55 bp, Artificial; identical to SEQ ID NO: 194531
  Synthetic oligonucleotide

SEQ ID NO: 650586 - DNA, 53 bp, Artificial; identical to SEQ ID NO: 209649
  Synthetic oligonucleotide

SEQ ID NO: 650587 - DNA, 56 bp, Artificial; identical to SEQ ID NO: 159988
  Synthetic oligonucleotide

SEQ ID NO: 650588 - DNA, 53 bp, Artificial; identical to SEQ ID NO: 243121
  Synthetic oligonucleotide

SEQ ID NO: 650589 - DNA, 55 bp, Artificial; identical to SEQ ID NO: 156001
  Synthetic oligonucleotide

SEQ ID NO: 650590 - DNA, 55 bp, Artificial; identical to SEQ ID NO: 224908
  Synthetic oligonucleotide

SEQ ID NO: 650591 - DNA, 50 bp, Artificial; identical to SEQ ID NO: 176446
  Synthetic oligonucleotide

SEQ ID NO: 650592 - DNA, 52 bp, Artificial; identical to SEQ ID NO: 208761
  Synthetic oligonucleotide

SEQ ID NO: 650593 - DNA, 50 bp, Artificial; identical to SEQ ID NO: 149999
  Synthetic oligonucleotide

SEQ ID NO: 650594 - DNA, 53 bp, Artificial; identical to SEQ ID NO: 244162
  Synthetic oligonucleotide

SEQ ID NO: 650595 - DNA, 55 bp, Artificial; identical to SEQ ID NO: 209337
  Synthetic oligonucleotide

SEQ ID NO: 650596 - DNA, 55 bp, Artificial; identical to SEQ ID NO: 243561
  Synthetic oligonucleotide

SEQ ID NO: 650597 - DNA, 59 bp, Artificial; identical to SEQ ID NO: 201889
  Synthetic oligonucleotide

SEQ ID NO: 650598 - DNA, 52 bp, Artificial; identical to SEQ ID NO: 151287
  Synthetic oligonucleotide

SEQ ID NO: 650599 - DNA, 51 bp, Artificial; identical to SEQ ID NO: 244157
  Synthetic oligonucleotide

SEQ ID NO: 650600 - DNA, 53 bp, Artificial; identical to SEQ ID NO: 147556
  Synthetic oligonucleotide

SEQ ID NO: 650601 - DNA, 55 bp, Artificial; identical to SEQ ID NO: 168349
  Synthetic oligonucleotide

SEQ ID NO: 650602 - DNA, 55 bp, Artificial; identical to SEQ ID NO: 244152
  Synthetic oligonucleotide

SEQ ID NO: 650603 - DNA, 55 bp, Artificial; identical to SEQ ID NO: 156002
  Synthetic oligonucleotide

SEQ ID NO: 650604 - DNA, 55 bp, Artificial; identical to SEQ ID NO: 142530
  Synthetic oligonucleotide

SEQ ID NO: 650605 - DNA, 55 bp, Artificial; identical to SEQ ID NO: 154064
  Synthetic oligonucleotide

SEQ ID NO: 650606 - DNA, 51 bp, Artificial; identical to SEQ ID NO: 162365
  Synthetic oligonucleotide

SEQ ID NO: 650607 - DNA, 55 bp, Artificial; identical to SEQ ID NO: 181804
  Synthetic oligonucleotide

SEQ ID NO: 650608 - DNA, 57 bp, Artificial; identical to SEQ ID NO: 210615
  Synthetic oligonucleotide

SEQ ID NO: 650609 - DNA, 50 bp, Artificial; identical to SEQ ID NO: 210604
  Synthetic oligonucleotide

SEQ ID NO: 650610 - DNA, 50 bp, Artificial; identical to SEQ ID NO: 193908
  Synthetic oligonucleotide

SEQ ID NO: 650611 - DNA, 54 bp, Artificial; identical to SEQ ID NO: 199580
  Synthetic oligonucleotide

SEQ ID NO: 650612 - DNA, 55 bp, Artificial; identical to SEQ ID NO: 254071
  Synthetic oligonucleotide

SEQ ID NO: 650613 - DNA, 51 bp, Artificial; identical to SEQ ID NO: 243317
  Synthetic oligonucleotide

SEQ ID NO: 650614 - DNA, 57 bp, Artificial; identical to SEQ ID NO: 167066
  Synthetic oligonucleotide

SEQ ID NO: 650615 - DNA, 55 bp, Artificial; identical to SEQ ID NO: 161176
  Synthetic oligonucleotide

SEQ ID NO: 650616 - DNA, 55 bp, Artificial; identical to SEQ ID NO: 174358
  Synthetic oligonucleotide

SEQ ID NO: 650617 - DNA, 54 bp, Artificial; identical to SEQ ID NO: 211514
  Synthetic oligonucleotide

SEQ ID NO: 650618 - DNA, 59 bp, Artificial; identical to SEQ ID NO: 210593
  Synthetic oligonucleotide

SEQ ID NO: 650619 - DNA, 55 bp, Artificial; identical to SEQ ID NO: 156003
  Synthetic oligonucleotide

SEQ ID NO: 650620 - DNA, 55 bp, Artificial; identical to SEQ ID NO: 147418
  Synthetic oligonucleotide

SEQ ID NO: 650621 - DNA, 53 bp, Artificial; identical to SEQ ID NO: 149331
  Synthetic oligonucleotide

SEQ ID NO: 650622 - DNA, 55 bp, Artificial; identical to SEQ ID NO: 147558
  Synthetic oligonucleotide

SEQ ID NO: 650623 - DNA, 54 bp, Artificial; identical to SEQ ID NO: 200607
  Synthetic oligonucleotide

SEQ ID NO: 650624 - DNA, 55 bp, Artificial; identical to SEQ ID NO: 201887
  Synthetic oligonucleotide

SEQ ID NO: 650625 - DNA, 60 bp, Artificial; identical to SEQ ID NO: 238766
  Synthetic oligonucleotide

SEQ ID NO: 650626 - DNA, 55 bp, Artificial; identical to SEQ ID NO: 239668
  Synthetic oligonucleotide

SEQ ID NO: 650627 - DNA, 54 bp, Artificial; identical to SEQ ID NO: 153574
  Synthetic oligonucleotide

SEQ ID NO: 650628 - DNA, 55 bp, Artificial; identical to SEQ ID NO: 197213
  Synthetic oligonucleotide

SEQ ID NO: 650629 - DNA, 51 bp, Artificial; identical to SEQ ID NO: 187028
  Synthetic oligonucleotide

SEQ ID NO: 650630 - DNA, 52 bp, Artificial; identical to SEQ ID NO: 255459
  Synthetic oligonucleotide

SEQ ID NO: 650631 - DNA, 51 bp, Artificial; identical to SEQ ID NO: 243328
  Synthetic oligonucleotide

SEQ ID NO: 650632 - DNA, 50 bp, Artificial; identical to SEQ ID NO: 202583
  Synthetic oligonucleotide

SEQ ID NO: 650633 - DNA, 50 bp, Artificial; identical to SEQ ID NO: 176392
  Synthetic oligonucleotide

SEQ ID NO: 650634 - DNA, 55 bp, Artificial; identical to SEQ ID NO: 252983
  Synthetic oligonucleotide

SEQ ID NO: 650635 - DNA, 51 bp, Artificial; identical to SEQ ID NO: 201664
  Synthetic oligonucleotide

SEQ ID NO: 650636 - DNA, 52 bp, Artificial; identical to SEQ ID NO: 188146
  Synthetic oligonucleotide

SEQ ID NO: 650637 - DNA, 60 bp, Artificial; identical to SEQ ID NO: 197448
  Synthetic oligonucleotide

SEQ ID NO: 650638 - DNA, 50 bp, Artificial; identical to SEQ ID NO: 201886
  Synthetic oligonucleotide

SEQ ID NO: 650639 - DNA, 51 bp, Artificial; identical to SEQ ID NO: 206547
  Synthetic oligonucleotide

SEQ ID NO: 650640 - DNA, 56 bp, Artificial; identical to SEQ ID NO: 256654
  Synthetic oligonucleotide

SEQ ID NO: 650641 - DNA, 57 bp, Artificial; identical to SEQ ID NO: 191680
  Synthetic oligonucleotide

SEQ ID NO: 650642 - DNA, 51 bp, Artificial; identical to SEQ ID NO: 244503
  Synthetic oligonucleotide

SEQ ID NO: 650643 - DNA, 50 bp, Artificial; identical to SEQ ID NO: 176443
  Synthetic oligonucleotide

SEQ ID NO: 650644 - DNA, 51 bp, Artificial; identical to SEQ ID NO: 184980
  Synthetic oligonucleotide

SEQ ID NO: 650645 - DNA, 54 bp, Artificial; identical to SEQ ID NO: 178262
  Synthetic oligonucleotide

SEQ ID NO: 650646 - DNA, 52 bp, Artificial; identical to SEQ ID NO: 201801
  Synthetic oligonucleotide

SEQ ID NO: 650647 - DNA, 54 bp, Artificial; identical to SEQ ID NO: 255228
  Synthetic oligonucleotide

SEQ ID NO: 650648 - DNA, 54 bp, Artificial; identical to SEQ ID NO: 174798
  Synthetic oligonucleotide

SEQ ID NO: 650649 - DNA, 54 bp, Artificial; identical to SEQ ID NO: 201884
  Synthetic oligonucleotide

SEQ ID NO: 650650 - DNA, 50 bp, Artificial; identical to SEQ ID NO: 150045
  Synthetic oligonucleotide

SEQ ID NO: 650651 - DNA, 57 bp, Artificial; identical to SEQ ID NO: 159880
  Synthetic oligonucleotide

SEQ ID NO: 650652 - DNA, 57 bp, Artificial; identical to SEQ ID NO: 217033
  Synthetic oligonucleotide

SEQ ID NO: 650653 - DNA, 55 bp, Artificial; identical to SEQ ID NO: 256370
  Synthetic oligonucleotide

SEQ ID NO: 650654 - DNA, 51 bp, Artificial; identical to SEQ ID NO: 238767
  Synthetic oligonucleotide

SEQ ID NO: 650655 - DNA, 60 bp, Artificial; identical to SEQ ID NO: 194176
  Synthetic oligonucleotide

SEQ ID NO: 650656 - DNA, 55 bp, Artificial; identical to SEQ ID NO: 217564
  Synthetic oligonucleotide

SEQ ID NO: 650657 - DNA, 56 bp, Artificial; identical to SEQ ID NO: 243563
  Synthetic oligonucleotide

SEQ ID NO: 650658 - DNA, 53 bp, Artificial; identical to SEQ ID NO: 151127
  Synthetic oligonucleotide

SEQ ID NO: 650659 - DNA, 53 bp, Artificial; identical to SEQ ID NO: 185865
  Synthetic oligonucleotide

SEQ ID NO: 650660 - DNA, 50 bp, Artificial; identical to SEQ ID NO: 200284
  Synthetic oligonucleotide

SEQ ID NO: 650661 - DNA, 50 bp, Artificial; identical to SEQ ID NO: 241320
  Synthetic oligonucleotide

SEQ ID NO: 650662 - DNA, 54 bp, Artificial; identical to SEQ ID NO: 207720
  Synthetic oligonucleotide

SEQ ID NO: 650663 - DNA, 52 bp, Artificial; identical to SEQ ID NO: 240867
  Synthetic oligonucleotide

SEQ ID NO: 650664 - DNA, 59 bp, Artificial; identical to SEQ ID NO: 178313
  Synthetic oligonucleotide

SEQ ID NO: 650665 - DNA, 59 bp, Artificial; identical to SEQ ID NO: 210582
  Synthetic oligonucleotide

SEQ ID NO: 650666 - DNA, 59 bp, Artificial; identical to SEQ ID NO: 147063
  Synthetic oligonucleotide

SEQ ID NO: 650667 - DNA, 56 bp, Artificial; identical to SEQ ID NO: 217034
  Synthetic oligonucleotide

SEQ ID NO: 650668 - DNA, 54 bp, Artificial; identical to SEQ ID NO: 246188
  Synthetic oligonucleotide

SEQ ID NO: 650669 - DNA, 53 bp, Artificial; identical to SEQ ID NO: 157455
  Synthetic oligonucleotide

SEQ ID NO: 650670 - DNA, 53 bp, Artificial; identical to SEQ ID NO: 185856
  Synthetic oligonucleotide

SEQ ID NO: 650671 - DNA, 60 bp, Artificial; identical to SEQ ID NO: 256369
  Synthetic oligonucleotide

SEQ ID NO: 650672 - DNA, 53 bp, Artificial; identical to SEQ ID NO: 211552
  Synthetic oligonucleotide

SEQ ID NO: 650673 - DNA, 54 bp, Artificial; identical to SEQ ID NO: 164783
  Synthetic oligonucleotide

SEQ ID NO: 650674 - DNA, 51 bp, Artificial; identical to SEQ ID NO: 206551
  Synthetic oligonucleotide

SEQ ID NO: 650675 - DNA, 52 bp, Artificial; identical to SEQ ID NO: 259059
  Synthetic oligonucleotide

SEQ ID NO: 650676 - DNA, 59 bp, Artificial; identical to SEQ ID NO: 200606
  Synthetic oligonucleotide

SEQ ID NO: 650677 - DNA, 57 bp, Artificial; identical to SEQ ID NO: 178311
  Synthetic oligonucleotide

SEQ ID NO: 650678 - DNA, 54 bp, Artificial; identical to SEQ ID NO: 187985
  Synthetic oligonucleotide

SEQ ID NO: 650679 - DNA, 56 bp, Artificial; identical to SEQ ID NO: 237732
  Synthetic oligonucleotide

SEQ ID NO: 650680 - DNA, 53 bp, Artificial; identical to SEQ ID NO: 200604
  Synthetic oligonucleotide

SEQ ID NO: 650681 - DNA, 53 bp, Artificial; identical to SEQ ID NO: 185849
  Synthetic oligonucleotide

SEQ ID NO: 650682 - DNA, 50 bp, Artificial; identical to SEQ ID NO: 223910
  Synthetic oligonucleotide

SEQ ID NO: 650683 - DNA, 55 bp, Artificial; identical to SEQ ID NO: 209335
  Synthetic oligonucleotide

SEQ ID NO: 650684 - DNA, 54 bp, Artificial; identical to SEQ ID NO: 192011
  Synthetic oligonucleotide

SEQ ID NO: 650685 - DNA, 52 bp, Artificial; identical to SEQ ID NO: 168973
  Synthetic oligonucleotide

SEQ ID NO: 650686 - DNA, 51 bp, Artificial; identical to SEQ ID NO: 149714
  Synthetic oligonucleotide

SEQ ID NO: 650687 - DNA, 54 bp, Artificial; identical to SEQ ID NO: 205627
  Synthetic oligonucleotide

SEQ ID NO: 650688 - DNA, 59 bp, Artificial; identical to SEQ ID NO: 166065
  Synthetic oligonucleotide

SEQ ID NO: 650689 - DNA, 51 bp, Artificial; identical to SEQ ID NO: 149720
  Synthetic oligonucleotide

SEQ ID NO: 650690 - DNA, 53 bp, Artificial; identical to SEQ ID NO: 181837
  Synthetic oligonucleotide

SEQ ID NO: 650691 - DNA, 52 bp, Artificial; identical to SEQ ID NO: 253333
  Synthetic oligonucleotide

SEQ ID NO: 650692 - DNA, 51 bp, Artificial; identical to SEQ ID NO: 237201
  Synthetic oligonucleotide

SEQ ID NO: 650693 - DNA, 57 bp, Artificial; identical to SEQ ID NO: 224193
  Synthetic oligonucleotide

SEQ ID NO: 650694 - DNA, 54 bp, Artificial; identical to SEQ ID NO: 220748
  Synthetic oligonucleotide

SEQ ID NO: 650695 - DNA, 50 bp, Artificial; identical to SEQ ID NO: 215241
  Synthetic oligonucleotide

SEQ ID NO: 650696 - DNA, 56 bp, Artificial; identical to SEQ ID NO: 207021
  Synthetic oligonucleotide

SEQ ID NO: 650697 - DNA, 53 bp, Artificial; identical to SEQ ID NO: 223558
  Synthetic oligonucleotide

SEQ ID NO: 650698 - DNA, 50 bp, Artificial; identical to SEQ ID NO: 154699
  Synthetic oligonucleotide

SEQ ID NO: 650699 - DNA, 54 bp, Artificial; identical to SEQ ID NO: 149243
  Synthetic oligonucleotide

SEQ ID NO: 650700 - DNA, 53 bp, Artificial; identical to SEQ ID NO: 168927
  Synthetic oligonucleotide

SEQ ID NO: 650701 - DNA, 56 bp, Artificial; identical to SEQ ID NO: 187161
  Synthetic oligonucleotide

SEQ ID NO: 650702 - DNA, 51 bp, Artificial; identical to SEQ ID NO: 174905
  Synthetic oligonucleotide

SEQ ID NO: 650703 - DNA, 58 bp, Artificial; identical to SEQ ID NO: 178308
  Synthetic oligonucleotide

SEQ ID NO: 650704 - DNA, 54 bp, Artificial; identical to SEQ ID NO: 243111
  Synthetic oligonucleotide

SEQ ID NO: 650705 - DNA, 54 bp, Artificial; identical to SEQ ID NO: 151980
  Synthetic oligonucleotide

SEQ ID NO: 650706 - DNA, 53 bp, Artificial; identical to SEQ ID NO: 243157
  Synthetic oligonucleotide

SEQ ID NO: 650707 - DNA, 52 bp, Artificial; identical to SEQ ID NO: 185935
  Synthetic oligonucleotide

SEQ ID NO: 650708 - DNA, 50 bp, Artificial; identical to SEQ ID NO: 186932
  Synthetic oligonucleotide

SEQ ID NO: 650709 - DNA, 53 bp, Artificial; identical to SEQ ID NO: 199809
  Synthetic oligonucleotide

SEQ ID NO: 650710 - DNA, 60 bp, Artificial; identical to SEQ ID NO: 203354
  Synthetic oligonucleotide

SEQ ID NO: 650711 - DNA, 52 bp, Artificial; identical to SEQ ID NO: 253335
  Synthetic oligonucleotide

SEQ ID NO: 650712 - DNA, 50 bp, Artificial; identical to SEQ ID NO: 150060
  Synthetic oligonucleotide

SEQ ID NO: 650713 - DNA, 57 bp, Artificial; identical to SEQ ID NO: 207059
  Synthetic oligonucleotide

SEQ ID NO: 650714 - DNA, 54 bp, Artificial; identical to SEQ ID NO: 255225
  Synthetic oligonucleotide

SEQ ID NO: 650715 - DNA, 51 bp, Artificial; identical to SEQ ID NO: 160542
  Synthetic oligonucleotide

SEQ ID NO: 650716 - DNA, 53 bp, Artificial; identical to SEQ ID NO: 255416
  Synthetic oligonucleotide

SEQ ID NO: 650717 - DNA, 55 bp, Artificial; identical to SEQ ID NO: 201803
  Synthetic oligonucleotide

SEQ ID NO: 650718 - DNA, 57 bp, Artificial; identical to SEQ ID NO: 238775
  Synthetic oligonucleotide

SEQ ID NO: 650719 - DNA, 50 bp, Artificial; identical to SEQ ID NO: 200277
  Synthetic oligonucleotide

SEQ ID NO: 650720 - DNA, 53 bp, Artificial; identical to SEQ ID NO: 247314
  Synthetic oligonucleotide

SEQ ID NO: 650721 - DNA, 60 bp, Artificial; identical to SEQ ID NO: 257103
  Synthetic oligonucleotide

SEQ ID NO: 650722 - DNA, 55 bp, Artificial; identical to SEQ ID NO: 257128
  Synthetic oligonucleotide

SEQ ID NO: 650723 - DNA, 52 bp, Artificial; identical to SEQ ID NO: 199878
  Synthetic oligonucleotide

SEQ ID NO: 650724 - DNA, 50 bp, Artificial; identical to SEQ ID NO: 189723
  Synthetic oligonucleotide

SEQ ID NO: 650725 - DNA, 52 bp, Artificial; identical to SEQ ID NO: 218346
  Synthetic oligonucleotide

SEQ ID NO: 650726 - DNA, 52 bp, Artificial; identical to SEQ ID NO: 152452
  Synthetic oligonucleotide

SEQ ID NO: 650727 - DNA, 53 bp, Artificial; identical to SEQ ID NO: 243154
  Synthetic oligonucleotide

SEQ ID NO: 650728 - DNA, 53 bp, Artificial; identical to SEQ ID NO: 246179
  Synthetic oligonucleotide

SEQ ID NO: 650729 - DNA, 54 bp, Artificial; identical to SEQ ID NO: 164804
  Synthetic oligonucleotide

SEQ ID NO: 650730 - DNA, 55 bp, Artificial; identical to SEQ ID NO: 161174
  Synthetic oligonucleotide

SEQ ID NO: 650731 - DNA, 54 bp, Artificial; identical to SEQ ID NO: 178304
  Synthetic oligonucleotide

SEQ ID NO: 650732 - DNA, 55 bp, Artificial; identical to SEQ ID NO: 198427
  Synthetic oligonucleotide

SEQ ID NO: 650733 - DNA, 55 bp, Artificial; identical to SEQ ID NO: 181830
  Synthetic oligonucleotide

SEQ ID NO: 650734 - DNA, 54 bp, Artificial; identical to SEQ ID NO: 157117
  Synthetic oligonucleotide

SEQ ID NO: 650735 - DNA, 58 bp, Artificial; identical to SEQ ID NO: 201883
  Synthetic oligonucleotide

SEQ ID NO: 650736 - DNA, 54 bp, Artificial; identical to SEQ ID NO: 157116
  Synthetic oligonucleotide

SEQ ID NO: 650737 - DNA, 51 bp, Artificial; identical to SEQ ID NO: 146471
  Synthetic oligonucleotide

SEQ ID NO: 650738 - DNA, 57 bp, Artificial; identical to SEQ ID NO: 174241
  Synthetic oligonucleotide

SEQ ID NO: 650739 - DNA, 50 bp, Artificial; identical to SEQ ID NO: 210474
  Synthetic oligonucleotide

SEQ ID NO: 650740 - DNA, 50 bp, Artificial; identical to SEQ ID NO: 202578
  Synthetic oligonucleotide

SEQ ID NO: 650741 - DNA, 51 bp, Artificial; identical to SEQ ID NO: 186581
  Synthetic oligonucleotide

SEQ ID NO: 650742 - DNA, 55 bp, Artificial; identical to SEQ ID NO: 180018
  Synthetic oligonucleotide

SEQ ID NO: 650743 - DNA, 53 bp, Artificial; identical to SEQ ID NO: 149342
  Synthetic oligonucleotide

SEQ ID NO: 650744 - DNA, 51 bp, Artificial; identical to SEQ ID NO: 165162
  Synthetic oligonucleotide

SEQ ID NO: 650745 - DNA, 55 bp, Artificial; identical to SEQ ID NO: 178300
  Synthetic oligonucleotide

SEQ ID NO: 650746 - DNA, 54 bp, Artificial; identical to SEQ ID NO: 255220
  Synthetic oligonucleotide

SEQ ID NO: 650747 - DNA, 54 bp, Artificial; identical to SEQ ID NO: 246206
  Synthetic oligonucleotide

SEQ ID NO: 650748 - DNA, 54 bp, Artificial; identical to SEQ ID NO: 198425
  Synthetic oligonucleotide

SEQ ID NO: 650749 - DNA, 60 bp, Artificial; identical to SEQ ID NO: 178299
  Synthetic oligonucleotide

SEQ ID NO: 650750 - DNA, 55 bp, Artificial; identical to SEQ ID NO: 166779
  Synthetic oligonucleotide

SEQ ID NO: 650751 - DNA, 55 bp, Artificial; identical to SEQ ID NO: 244175
  Synthetic oligonucleotide

SEQ ID NO: 650752 - DNA, 53 bp, Artificial; identical to SEQ ID NO: 170039
  Synthetic oligonucleotide

SEQ ID NO: 650753 - DNA, 55 bp, Artificial; identical to SEQ ID NO: 162006
  Synthetic oligonucleotide

SEQ ID NO: 650754 - DNA, 55 bp, Artificial; identical to SEQ ID NO: 194532
  Synthetic oligonucleotide

SEQ ID NO: 650755 - DNA, 52 bp, Artificial; identical to SEQ ID NO: 257153
  Synthetic oligonucleotide

SEQ ID NO: 650756 - DNA, 52 bp, Artificial; identical to SEQ ID NO: 246514
  Synthetic oligonucleotide

SEQ ID NO: 650757 - DNA, 55 bp, Artificial; identical to SEQ ID NO: 244515
  Synthetic oligonucleotide

SEQ ID NO: 650758 - DNA, 54 bp, Artificial; identical to SEQ ID NO: 149270
  Synthetic oligonucleotide

SEQ ID NO: 650759 - DNA, 56 bp, Artificial; identical to SEQ ID NO: 243568
  Synthetic oligonucleotide

SEQ ID NO: 650760 - DNA, 55 bp, Artificial; identical to SEQ ID NO: 178297
  Synthetic oligonucleotide

SEQ ID NO: 650761 - DNA, 51 bp, Artificial; identical to SEQ ID NO: 255773
  Synthetic oligonucleotide

SEQ ID NO: 650762 - DNA, 57 bp, Artificial; identical to SEQ ID NO: 200602
  Synthetic oligonucleotide

SEQ ID NO: 650763 - DNA, 55 bp, Artificial; identical to SEQ ID NO: 147234
  Synthetic oligonucleotide

SEQ ID NO: 650764 - DNA, 55 bp, Artificial; identical to SEQ ID NO: 257388
  Synthetic oligonucleotide

SEQ ID NO: 650765 - DNA, 58 bp, Artificial; identical to SEQ ID NO: 170968
  Synthetic oligonucleotide

SEQ ID NO: 650766 - DNA, 54 bp, Artificial; identical to SEQ ID NO: 146989
  Synthetic oligonucleotide

SEQ ID NO: 650767 - DNA, 54 bp, Artificial; identical to SEQ ID NO: 142665
  Synthetic oligonucleotide

SEQ ID NO: 650768 - DNA, 51 bp, Artificial; identical to SEQ ID NO: 186589
  Synthetic oligonucleotide

SEQ ID NO: 650769 - DNA, 56 bp, Artificial; identical to SEQ ID NO: 141659
  Synthetic oligonucleotide

SEQ ID NO: 650770 - DNA, 56 bp, Artificial; identical to SEQ ID NO: 141660
  Synthetic oligonucleotide

SEQ ID NO: 650771 - DNA, 56 bp, Artificial; identical to SEQ ID NO: 141661
  Synthetic oligonucleotide

SEQ ID NO: 650772 - DNA, 54 bp, Artificial; identical to SEQ ID NO: 187160
  Synthetic oligonucleotide

SEQ ID NO: 650773 - DNA, 55 bp, Artificial; identical to SEQ ID NO: 237734
  Synthetic oligonucleotide

SEQ ID NO: 650774 - DNA, 50 bp, Artificial; identical to SEQ ID NO: 255449
  Synthetic oligonucleotide

SEQ ID NO: 650775 - DNA, 51 bp, Artificial; identical to SEQ ID NO: 178291
  Synthetic oligonucleotide

SEQ ID NO: 650776 - DNA, 52 bp, Artificial; identical to SEQ ID NO: 159874
  Synthetic oligonucleotide

SEQ ID NO: 650777 - DNA, 57 bp, Artificial; identical to SEQ ID NO: 243570
  Synthetic oligonucleotide

SEQ ID NO: 650778 - DNA, 54 bp, Artificial; identical to SEQ ID NO: 217038
  Synthetic oligonucleotide

SEQ ID NO: 650779 - DNA, 56 bp, Artificial; identical to SEQ ID NO: 237735
  Synthetic oligonucleotide

SEQ ID NO: 650780 - DNA, 50 bp, Artificial; identical to SEQ ID NO: 190376
  Synthetic oligonucleotide

SEQ ID NO: 650781 - DNA, 53 bp, Artificial; identical to SEQ ID NO: 238784
  Synthetic oligonucleotide

SEQ ID NO: 650782 - DNA, 52 bp, Artificial; identical to SEQ ID NO: 134649
  Synthetic oligonucleotide

SEQ ID NO: 650783 - DNA, 55 bp, Artificial; identical to SEQ ID NO: 137123
  Synthetic oligonucleotide

SEQ ID NO: 650784 - DNA, 54 bp, Artificial; identical to SEQ ID NO: 135954
  Synthetic oligonucleotide

SEQ ID NO: 650785 - DNA, 50 bp, Artificial; identical to SEQ ID NO: 139800
  Synthetic oligonucleotide

SEQ ID NO: 650786 - DNA, 54 bp, Artificial; identical to SEQ ID NO: 139566
  Synthetic oligonucleotide

SEQ ID NO: 650787 - DNA, 53 bp, Artificial; identical to SEQ ID NO: 139466
  Synthetic oligonucleotide

SEQ ID NO: 650788 - DNA, 55 bp, Artificial; identical to SEQ ID NO: 138953
  Synthetic oligonucleotide

SEQ ID NO: 650789 - DNA, 54 bp, Artificial; identical to SEQ ID NO: 139019
  Synthetic oligonucleotide

SEQ ID NO: 650790 - DNA, 51 bp, Artificial; identical to SEQ ID NO: 139707
  Synthetic oligonucleotide

SEQ ID NO: 650791 - DNA, 53 bp, Artificial; identical to SEQ ID NO: 141001
  Synthetic oligonucleotide

SEQ ID NO: 650792 - DNA, 51 bp, Artificial; identical to SEQ ID NO: 139702
  Synthetic oligonucleotide

SEQ ID NO: 650793 - DNA, 51 bp, Artificial; identical to SEQ ID NO: 140175
  Synthetic oligonucleotide

SEQ ID NO: 650794 - DNA, 59 bp, Artificial; identical to SEQ ID NO: 138551
  Synthetic oligonucleotide

SEQ ID NO: 650795 - DNA, 52 bp, Artificial; identical to SEQ ID NO: 133423
  Synthetic oligonucleotide

SEQ ID NO: 650796 - DNA, 55 bp, Artificial; identical to SEQ ID NO: 138956
  Synthetic oligonucleotide

SEQ ID NO: 650797 - DNA, 60 bp, Artificial; identical to SEQ ID NO: 135586
  Synthetic oligonucleotide

SEQ ID NO: 650798 - DNA, 55 bp, Artificial; identical to SEQ ID NO: 140782
  Synthetic oligonucleotide

SEQ ID NO: 650799 - DNA, 51 bp, Artificial; identical to SEQ ID NO: 139691
  Synthetic oligonucleotide

SEQ ID NO: 650800 - DNA, 60 bp, Artificial; identical to SEQ ID NO: 137191
  Synthetic oligonucleotide

SEQ ID NO: 650801 - DNA, 55 bp, Artificial; identical to SEQ ID NO: 135587
  Synthetic oligonucleotide

SEQ ID NO: 650802 - DNA, 55 bp, Artificial; identical to SEQ ID NO: 138958
  Synthetic oligonucleotide

SEQ ID NO: 650803 - DNA, 48 bp, Artificial; identical to SEQ ID NO: 136979
  Synthetic oligonucleotide

SEQ ID NO: 650804 - DNA, 52 bp, Artificial; identical to SEQ ID NO: 140362
  Synthetic oligonucleotide

SEQ ID NO: 650805 - DNA, 55 bp, Artificial; identical to SEQ ID NO: 138959
  Synthetic oligonucleotide

SEQ ID NO: 650806 - DNA, 55 bp, Artificial; identical to SEQ ID NO: 136084
  Synthetic oligonucleotide

SEQ ID NO: 650807 - DNA, 55 bp, Artificial; identical to SEQ ID NO: 136137
  Synthetic oligonucleotide

SEQ ID NO: 650808 - DNA, 59 bp, Artificial; identical to SEQ ID NO: 138576
  Synthetic oligonucleotide

SEQ ID NO: 650809 - DNA, 53 bp, Artificial; identical to SEQ ID NO: 140355
  Synthetic oligonucleotide

SEQ ID NO: 650810 - DNA, 57 bp, Artificial; identical to SEQ ID NO: 138575
  Synthetic oligonucleotide

SEQ ID NO: 650811 - DNA, 52 bp, Artificial; identical to SEQ ID NO: 138571
  Synthetic oligonucleotide

SEQ ID NO: 650812 - DNA, 59 bp, Artificial; identical to SEQ ID NO: 138569
  Synthetic oligonucleotide

SEQ ID NO: 650813 - DNA, 57 bp, Artificial; identical to SEQ ID NO: 135592
  Synthetic oligonucleotide

SEQ ID NO: 650814 - DNA, 59 bp, Artificial; identical to SEQ ID NO: 137709
  Synthetic oligonucleotide

SEQ ID NO: 650815 - DNA, 53 bp, Artificial; identical to SEQ ID NO: 137183
  Synthetic oligonucleotide

SEQ ID NO: 650816 - DNA, 50 bp, Artificial; identical to SEQ ID NO: 139167
  Synthetic oligonucleotide

SEQ ID NO: 650817 - DNA, 55 bp, Artificial; identical to SEQ ID NO: 138243
  Synthetic oligonucleotide

SEQ ID NO: 650818 - DNA, 55 bp, Artificial; identical to SEQ ID NO: 136119
  Synthetic oligonucleotide

SEQ ID NO: 650819 - DNA, 60 bp, Artificial; identical to SEQ ID NO: 136978
  Synthetic oligonucleotide

SEQ ID NO: 650820 - DNA, 55 bp, Artificial; identical to SEQ ID NO: 136020
  Synthetic oligonucleotide

SEQ ID NO: 650821 - DNA, 52 bp, Artificial; identical to SEQ ID NO: 134653
  Synthetic oligonucleotide

SEQ ID NO: 650822 - DNA, 51 bp, Artificial; identical to SEQ ID NO: 140972
  Synthetic oligonucleotide

SEQ ID NO: 650823 - DNA, 50 bp, Artificial; identical to SEQ ID NO: 139788
  Synthetic oligonucleotide

SEQ ID NO: 650824 - DNA, 50 bp, Artificial; identical to SEQ ID NO: 134948
  Synthetic oligonucleotide

SEQ ID NO: 650825 - DNA, 54 bp, Artificial; identical to SEQ ID NO: 135593
  Synthetic oligonucleotide

SEQ ID NO: 650826 - DNA, 54 bp, Artificial; identical to SEQ ID NO: 136538
  Synthetic oligonucleotide

SEQ ID NO: 650827 - DNA, 59 bp, Artificial; identical to SEQ ID NO: 135625
  Synthetic oligonucleotide

SEQ ID NO: 650828 - DNA, 52 bp, Artificial; identical to SEQ ID NO: 135598
  Synthetic oligonucleotide

SEQ ID NO: 650829 - DNA, 52 bp, Artificial; identical to SEQ ID NO: 133375
  Synthetic oligonucleotide

SEQ ID NO: 650830 - DNA, 53 bp, Artificial; identical to SEQ ID NO: 140320
  Synthetic oligonucleotide

SEQ ID NO: 650831 - DNA, 56 bp, Artificial; identical to SEQ ID NO: 135615
  Synthetic oligonucleotide

SEQ ID NO: 650832 - DNA, 55 bp, Artificial; identical to SEQ ID NO: 135771
  Synthetic oligonucleotide

SEQ ID NO: 650833 - DNA, 59 bp, Artificial; identical to SEQ ID NO: 140113
  Synthetic oligonucleotide

SEQ ID NO: 650834 - DNA, 55 bp, Artificial; identical to SEQ ID NO: 135759
  Synthetic oligonucleotide

SEQ ID NO: 650835 - DNA, 51 bp, Artificial; identical to SEQ ID NO: 136919
  Synthetic oligonucleotide

SEQ ID NO: 650836 - DNA, 53 bp, Artificial; identical to SEQ ID NO: 139612
  Synthetic oligonucleotide

SEQ ID NO: 650837 - DNA, 53 bp, Artificial; identical to SEQ ID NO: 138518
  Synthetic oligonucleotide

SEQ ID NO: 650838 - DNA, 50 bp, Artificial; identical to SEQ ID NO: 138264
  Synthetic oligonucleotide

SEQ ID NO: 650839 - DNA, 60 bp, Artificial; identical to SEQ ID NO: 139998
  Synthetic oligonucleotide

SEQ ID NO: 650840 - DNA, 60 bp, Artificial; identical to SEQ ID NO: 139997
  Synthetic oligonucleotide

SEQ ID NO: 650841 - DNA, 55 bp, Artificial; identical to SEQ ID NO: 135911
  Synthetic oligonucleotide

SEQ ID NO: 650842 - DNA, 55 bp, Artificial; identical to SEQ ID NO: 136975
  Synthetic oligonucleotide

SEQ ID NO: 650843 - DNA, 55 bp, Artificial; identical to SEQ ID NO: 138509
  Synthetic oligonucleotide

SEQ ID NO: 650844 - DNA, 54 bp, Artificial; identical to SEQ ID NO: 135606
  Synthetic oligonucleotide

SEQ ID NO: 650845 - DNA, 57 bp, Artificial; identical to SEQ ID NO: 138615
  Synthetic oligonucleotide

SEQ ID NO: 650846 - DNA, 55 bp, Artificial; identical to SEQ ID NO: 134293
  Synthetic oligonucleotide

SEQ ID NO: 650847 - DNA, 52 bp, Artificial; identical to SEQ ID NO: 139585
  Synthetic oligonucleotide

SEQ ID NO: 650848 - DNA, 50 bp, Artificial; identical to SEQ ID NO: 137230
  Synthetic oligonucleotide

SEQ ID NO: 650849 - DNA, 55 bp, Artificial; identical to SEQ ID NO: 136973
  Synthetic oligonucleotide

SEQ ID NO: 650850 - DNA, 56 bp, Artificial; identical to SEQ ID NO: 138656
  Synthetic oligonucleotide

SEQ ID NO: 650851 - DNA, 50 bp, Artificial; identical to SEQ ID NO: 137232
  Synthetic oligonucleotide

SEQ ID NO: 650852 - DNA, 55 bp, Artificial; identical to SEQ ID NO: 136801
  Synthetic oligonucleotide

SEQ ID NO: 650853 - DNA, 60 bp, Artificial; identical to SEQ ID NO: 138515
  Synthetic oligonucleotide

SEQ ID NO: 650854 - DNA, 52 bp, Artificial; identical to SEQ ID NO: 133398
  Synthetic oligonucleotide

SEQ ID NO: 650855 - DNA, 50 bp, Artificial; identical to SEQ ID NO: 135602
  Synthetic oligonucleotide

SEQ ID NO: 650856 - DNA, 55 bp, Artificial; identical to SEQ ID NO: 138973
  Synthetic oligonucleotide

SEQ ID NO: 650857 - DNA, 53 bp, Artificial; identical to SEQ ID NO: 136877
  Synthetic oligonucleotide

SEQ ID NO: 650858 - DNA, 56 bp, Artificial; identical to SEQ ID NO: 138519
  Synthetic oligonucleotide

SEQ ID NO: 650859 - DNA, 52 bp, Artificial; identical to SEQ ID NO: 137046
  Synthetic oligonucleotide

SEQ ID NO: 650860 - DNA, 52 bp, Artificial; identical to SEQ ID NO: 140363
  Synthetic oligonucleotide

SEQ ID NO: 650861 - DNA, 51 bp, Artificial; identical to SEQ ID NO: 134710
  Synthetic oligonucleotide

SEQ ID NO: 650862 - DNA, 52 bp, Artificial; identical to SEQ ID NO: 134655
  Synthetic oligonucleotide

SEQ ID NO: 650863 - DNA, 60 bp, Artificial; identical to SEQ ID NO: 139238
  Synthetic oligonucleotide

SEQ ID NO: 650864 - DNA, 55 bp, Artificial; identical to SEQ ID NO: 134391
  Synthetic oligonucleotide

SEQ ID NO: 650865 - DNA, 55 bp, Artificial; identical to SEQ ID NO: 134387
  Synthetic oligonucleotide

SEQ ID NO: 650866 - DNA, 52 bp, Artificial; identical to SEQ ID NO: 138323
  Synthetic oligonucleotide

SEQ ID NO: 650867 - DNA, 52 bp, Artificial; identical to SEQ ID NO: 138522
  Synthetic oligonucleotide

SEQ ID NO: 650868 - DNA, 50 bp, Artificial; identical to SEQ ID NO: 135019
  Synthetic oligonucleotide

SEQ ID NO: 650869 - DNA, 53 bp, Artificial; identical to SEQ ID NO: 138523
  Synthetic oligonucleotide

SEQ ID NO: 650870 - DNA, 57 bp, Artificial; identical to SEQ ID NO: 138524
  Synthetic oligonucleotide

SEQ ID NO: 650871 - DNA, 55 bp, Artificial; identical to SEQ ID NO: 136509
  Synthetic oligonucleotide

SEQ ID NO: 650872 - DNA, 54 bp, Artificial; identical to SEQ ID NO: 134461
  Synthetic oligonucleotide

SEQ ID NO: 650873 - DNA, 54 bp, Artificial; identical to SEQ ID NO: 137124
  Synthetic oligonucleotide

SEQ ID NO: 650874 - DNA, 60 bp, Artificial; identical to SEQ ID NO: 139638
  Synthetic oligonucleotide

SEQ ID NO: 650875 - DNA, 52 bp, Artificial; identical to SEQ ID NO: 136894
  Synthetic oligonucleotide

SEQ ID NO: 650876 - DNA, 54 bp, Artificial; identical to SEQ ID NO: 137276
  Synthetic oligonucleotide

SEQ ID NO: 650877 - DNA, 60 bp, Artificial; identical to SEQ ID NO: 140051
  Synthetic oligonucleotide

SEQ ID NO: 650878 - DNA, 55 bp, Artificial; identical to SEQ ID NO: 140992
  Synthetic oligonucleotide

SEQ ID NO: 650879 - DNA, 55 bp, Artificial; identical to SEQ ID NO: 137126
  Synthetic oligonucleotide

SEQ ID NO: 650880 - DNA, 59 bp, Artificial; identical to SEQ ID NO: 135558
  Synthetic oligonucleotide

SEQ ID NO: 650881 - DNA, 57 bp, Artificial; identical to SEQ ID NO: 135680
  Synthetic oligonucleotide

SEQ ID NO: 650882 - DNA, 55 bp, Artificial; identical to SEQ ID NO: 135559
  Synthetic oligonucleotide

SEQ ID NO: 650883 - DNA, 55 bp, Artificial; identical to SEQ ID NO: 137497
  Synthetic oligonucleotide

SEQ ID NO: 650884 - DNA, 50 bp, Artificial; identical to SEQ ID NO: 139248
  Synthetic oligonucleotide

SEQ ID NO: 650885 - DNA, 55 bp, Artificial; identical to SEQ ID NO: 138298
  Synthetic oligonucleotide

SEQ ID NO: 650886 - DNA, 57 bp, Artificial; identical to SEQ ID NO: 138525
  Synthetic oligonucleotide

SEQ ID NO: 650887 - DNA, 56 bp, Artificial; identical to SEQ ID NO: 140114
  Synthetic oligonucleotide

SEQ ID NO: 650888 - DNA, 55 bp, Artificial; identical to SEQ ID NO: 138974
  Synthetic oligonucleotide

SEQ ID NO: 650889 - DNA, 55 bp, Artificial; identical to SEQ ID NO: 137790
  Synthetic oligonucleotide

SEQ ID NO: 650890 - DNA, 58 bp, Artificial; identical to SEQ ID NO: 137214
  Synthetic oligonucleotide

SEQ ID NO: 650891 - DNA, 51 bp, Artificial; identical to SEQ ID NO: 136595
  Synthetic oligonucleotide

SEQ ID NO: 650892 - DNA, 55 bp, Artificial; identical to SEQ ID NO: 136314
  Synthetic oligonucleotide

SEQ ID NO: 650893 - DNA, 52 bp, Artificial; identical to SEQ ID NO: 133723
  Synthetic oligonucleotide

SEQ ID NO: 650894 - DNA, 53 bp, Artificial; identical to SEQ ID NO: 136874
  Synthetic oligonucleotide

SEQ ID NO: 650895 - DNA, 57 bp, Artificial; identical to SEQ ID NO: 140984
  Synthetic oligonucleotide

SEQ ID NO: 650896 - DNA, 56 bp, Artificial; identical to SEQ ID NO: 138531
  Synthetic oligonucleotide

SEQ ID NO: 650897 - DNA, 54 bp, Artificial; identical to SEQ ID NO: 140157
  Synthetic oligonucleotide

SEQ ID NO: 650898 - DNA, 55 bp, Artificial; identical to SEQ ID NO: 133371
  Synthetic oligonucleotide

SEQ ID NO: 650899 - DNA, 56 bp, Artificial; identical to SEQ ID NO: 138532
  Synthetic oligonucleotide

SEQ ID NO: 650900 - DNA, 55 bp, Artificial; identical to SEQ ID NO: 136291
  Synthetic oligonucleotide

SEQ ID NO: 650901 - DNA, 52 bp, Artificial; identical to SEQ ID NO: 137128
  Synthetic oligonucleotide

SEQ ID NO: 650902 - DNA, 50 bp, Artificial; identical to SEQ ID NO: 136952
  Synthetic oligonucleotide

SEQ ID NO: 650903 - DNA, 57 bp, Artificial; identical to SEQ ID NO: 138277
  Synthetic oligonucleotide

SEQ ID NO: 650904 - DNA, 60 bp, Artificial; identical to SEQ ID NO: 135580
  Synthetic oligonucleotide

SEQ ID NO: 650905 - DNA, 57 bp, Artificial; identical to SEQ ID NO: 136965
  Synthetic oligonucleotide

SEQ ID NO: 650906 - DNA, 55 bp, Artificial; identical to SEQ ID NO: 136350
  Synthetic oligonucleotide

SEQ ID NO: 650907 - DNA, 55 bp, Artificial; identical to SEQ ID NO: 133604
  Synthetic oligonucleotide

SEQ ID NO: 650908 - DNA, 57 bp, Artificial; identical to SEQ ID NO: 135578
  Synthetic oligonucleotide

SEQ ID NO: 650909 - DNA, 55 bp, Artificial; identical to SEQ ID NO: 136360
  Synthetic oligonucleotide

SEQ ID NO: 650910 - DNA, 54 bp, Artificial; identical to SEQ ID NO: 136535
  Synthetic oligonucleotide

SEQ ID NO: 650911 - DNA, 54 bp, Artificial; identical to SEQ ID NO: 140323
  Synthetic oligonucleotide

SEQ ID NO: 650912 - DNA, 55 bp, Artificial; identical to SEQ ID NO: 138095
  Synthetic oligonucleotide

SEQ ID NO: 650913 - DNA, 52 bp, Artificial; identical to SEQ ID NO: 140372
  Synthetic oligonucleotide

SEQ ID NO: 650914 - DNA, 58 bp, Artificial; identical to SEQ ID NO: 136964
  Synthetic oligonucleotide

SEQ ID NO: 650915 - DNA, 54 bp, Artificial; identical to SEQ ID NO: 137182
  Synthetic oligonucleotide

SEQ ID NO: 650916 - DNA, 59 bp, Artificial; identical to SEQ ID NO: 140160
  Synthetic oligonucleotide

SEQ ID NO: 650917 - DNA, 58 bp, Artificial; identical to SEQ ID NO: 139246
  Synthetic oligonucleotide

SEQ ID NO: 650918 - DNA, 54 bp, Artificial; identical to SEQ ID NO: 135575
  Synthetic oligonucleotide

SEQ ID NO: 650919 - DNA, 53 bp, Artificial; identical to SEQ ID NO: 136863
  Synthetic oligonucleotide

SEQ ID NO: 650920 - DNA, 58 bp, Artificial; identical to SEQ ID NO: 136645
  Synthetic oligonucleotide

SEQ ID NO: 650921 - DNA, 55 bp, Artificial; identical to SEQ ID NO: 139412
  Synthetic oligonucleotide

SEQ ID NO: 650922 - DNA, 56 bp, Artificial; identical to SEQ ID NO: 135573
  Synthetic oligonucleotide

SEQ ID NO: 650923 - DNA, 50 bp, Artificial; identical to SEQ ID NO: 134973
  Synthetic oligonucleotide

SEQ ID NO: 650924 - DNA, 52 bp, Artificial; identical to SEQ ID NO: 141110
  Synthetic oligonucleotide

SEQ ID NO: 650925 - DNA, 52 bp, Artificial; identical to SEQ ID NO: 136574
  Synthetic oligonucleotide

SEQ ID NO: 650926 - DNA, 53 bp, Artificial; identical to SEQ ID NO: 140997
  Synthetic oligonucleotide

SEQ ID NO: 650927 - DNA, 55 bp, Artificial; identical to SEQ ID NO: 134104
  Synthetic oligonucleotide

SEQ ID NO: 650928 - DNA, 52 bp, Artificial; identical to SEQ ID NO: 134658
  Synthetic oligonucleotide

SEQ ID NO: 650929 - DNA, 60 bp, Artificial; identical to SEQ ID NO: 139427
  Synthetic oligonucleotide

SEQ ID NO: 650930 - DNA, 50 bp, Artificial; identical to SEQ ID NO: 135119
  Synthetic oligonucleotide

SEQ ID NO: 650931 - DNA, 55 bp, Artificial; identical to SEQ ID NO: 137721
  Synthetic oligonucleotide

SEQ ID NO: 650932 - DNA, 59 bp, Artificial; identical to SEQ ID NO: 138537
  Synthetic oligonucleotide

SEQ ID NO: 650933 - DNA, 53 bp, Artificial; identical to SEQ ID NO: 136880
  Synthetic oligonucleotide

SEQ ID NO: 650934 - DNA, 60 bp, Artificial; identical to SEQ ID NO: 138333
  Synthetic oligonucleotide

SEQ ID NO: 650935 - DNA, 55 bp, Artificial; identical to SEQ ID NO: 134118
  Synthetic oligonucleotide

SEQ ID NO: 650936 - DNA, 59 bp, Artificial; identical to SEQ ID NO: 139472
  Synthetic oligonucleotide

SEQ ID NO: 650937 - DNA, 51 bp, Artificial; identical to SEQ ID NO: 139679
  Synthetic oligonucleotide

SEQ ID NO: 650938 - DNA, 53 bp, Artificial; identical to SEQ ID NO: 139609
  Synthetic oligonucleotide

SEQ ID NO: 650939 - DNA, 52 bp, Artificial; identical to SEQ ID NO: 139100
  Synthetic oligonucleotide

SEQ ID NO: 650940 - DNA, 55 bp, Artificial; identical to SEQ ID NO: 140325
  Synthetic oligonucleotide

SEQ ID NO: 650941 - DNA, 56 bp, Artificial; identical to SEQ ID NO: 138483
  Synthetic oligonucleotide

SEQ ID NO: 650942 - DNA, 50 bp, Artificial; identical to SEQ ID NO: 137461
  Synthetic oligonucleotide

SEQ ID NO: 650943 - DNA, 55 bp, Artificial; identical to SEQ ID NO: 136208
  Synthetic oligonucleotide

SEQ ID NO: 650944 - DNA, 57 bp, Artificial; identical to SEQ ID NO: 138488
  Synthetic oligonucleotide

SEQ ID NO: 650945 - DNA, 51 bp, Artificial; identical to SEQ ID NO: 134699
  Synthetic oligonucleotide

SEQ ID NO: 650946 - DNA, 57 bp, Artificial; identical to SEQ ID NO: 136279
  Synthetic oligonucleotide

SEQ ID NO: 650947 - DNA, 50 bp, Artificial; identical to SEQ ID NO: 136256
  Synthetic oligonucleotide

SEQ ID NO: 650948 - DNA, 55 bp, Artificial; identical to SEQ ID NO: 136802
  Synthetic oligonucleotide

SEQ ID NO: 650949 - DNA, 53 bp, Artificial; identical to SEQ ID NO: 134517
  Synthetic oligonucleotide

SEQ ID NO: 650950 - DNA, 55 bp, Artificial; identical to SEQ ID NO: 136044
  Synthetic oligonucleotide

SEQ ID NO: 650951 - DNA, 55 bp, Artificial; identical to SEQ ID NO: 136157
  Synthetic oligonucleotide

SEQ ID NO: 650952 - DNA, 58 bp, Artificial; identical to SEQ ID NO: 138080
  Synthetic oligonucleotide

SEQ ID NO: 650953 - DNA, 52 bp, Artificial; identical to SEQ ID NO: 134661
  Synthetic oligonucleotide

SEQ ID NO: 650954 - DNA, 55 bp, Artificial; identical to SEQ ID NO: 138361
  Synthetic oligonucleotide

SEQ ID NO: 650955 - DNA, 53 bp, Artificial; identical to SEQ ID NO: 136190
  Synthetic oligonucleotide

SEQ ID NO: 650956 - DNA, 51 bp, Artificial; identical to SEQ ID NO: 134772
  Synthetic oligonucleotide

SEQ ID NO: 650957 - DNA, 52 bp, Artificial; identical to SEQ ID NO: 134663
  Synthetic oligonucleotide

SEQ ID NO: 650958 - DNA, 55 bp, Artificial; identical to SEQ ID NO: 136504
  Synthetic oligonucleotide

SEQ ID NO: 650959 - DNA, 52 bp, Artificial; identical to SEQ ID NO: 138491
  Synthetic oligonucleotide

SEQ ID NO: 650960 - DNA, 51 bp, Artificial; identical to SEQ ID NO: 134775
  Synthetic oligonucleotide

SEQ ID NO: 650961 - DNA, 53 bp, Artificial; identical to SEQ ID NO: 136568
  Synthetic oligonucleotide

SEQ ID NO: 650962 - DNA, 51 bp, Artificial; identical to SEQ ID NO: 134777
  Synthetic oligonucleotide

SEQ ID NO: 650963 - DNA, 55 bp, Artificial; identical to SEQ ID NO: 138335
  Synthetic oligonucleotide

SEQ ID NO: 650964 - DNA, 55 bp, Artificial; identical to SEQ ID NO: 133653
  Synthetic oligonucleotide

SEQ ID NO: 650965 - DNA, 55 bp, Artificial; identical to SEQ ID NO: 140734
  Synthetic oligonucleotide

SEQ ID NO: 650966 - DNA, 59 bp, Artificial; identical to SEQ ID NO: 136641
  Synthetic oligonucleotide

SEQ ID NO: 650967 - DNA, 55 bp, Artificial; identical to SEQ ID NO: 133599
  Synthetic oligonucleotide

SEQ ID NO: 650968 - DNA, 56 bp, Artificial; identical to SEQ ID NO: 136068
  Synthetic oligonucleotide

SEQ ID NO: 650969 - DNA, 55 bp, Artificial; identical to SEQ ID NO: 137073
  Synthetic oligonucleotide

SEQ ID NO: 650970 - DNA, 55 bp, Artificial; identical to SEQ ID NO: 134119
  Synthetic oligonucleotide

SEQ ID NO: 650971 - DNA, 57 bp, Artificial; identical to SEQ ID NO: 139252
  Synthetic oligonucleotide

SEQ ID NO: 650972 - DNA, 55 bp, Artificial; identical to SEQ ID NO: 141100
  Synthetic oligonucleotide

SEQ ID NO: 650973 - DNA, 55 bp, Artificial; identical to SEQ ID NO: 139350
  Synthetic oligonucleotide

SEQ ID NO: 650974 - DNA, 50 bp, Artificial; identical to SEQ ID NO: 134876
  Synthetic oligonucleotide

SEQ ID NO: 650975 - DNA, 60 bp, Artificial; identical to SEQ ID NO: 136639
  Synthetic oligonucleotide

SEQ ID NO: 650976 - DNA, 51 bp, Artificial; identical to SEQ ID NO: 136608
  Synthetic oligonucleotide

SEQ ID NO: 650977 - DNA, 60 bp, Artificial; identical to SEQ ID NO: 138496
  Synthetic oligonucleotide

SEQ ID NO: 650978 - DNA, 60 bp, Artificial; identical to SEQ ID NO: 138497
  Synthetic oligonucleotide

SEQ ID NO: 650979 - DNA, 54 bp, Artificial; identical to SEQ ID NO: 133313
  Synthetic oligonucleotide

SEQ ID NO: 650980 - DNA, 54 bp, Artificial; identical to SEQ ID NO: 140324
  Synthetic oligonucleotide

SEQ ID NO: 650981 - DNA, 59 bp, Artificial; identical to SEQ ID NO: 136023
  Synthetic oligonucleotide

SEQ ID NO: 650982 - DNA, 51 bp, Artificial; identical to SEQ ID NO: 140384
  Synthetic oligonucleotide

SEQ ID NO: 650983 - DNA, 55 bp, Artificial; identical to SEQ ID NO: 140321
  Synthetic oligonucleotide

SEQ ID NO: 650984 - DNA, 55 bp, Artificial; identical to SEQ ID NO: 140035
  Synthetic oligonucleotide

SEQ ID NO: 650985 - DNA, 52 bp, Artificial; identical to SEQ ID NO: 134665
  Synthetic oligonucleotide

SEQ ID NO: 650986 - DNA, 54 bp, Artificial; identical to SEQ ID NO: 138278
  Synthetic oligonucleotide

SEQ ID NO: 650987 - DNA, 55 bp, Artificial; identical to SEQ ID NO: 134128
  Synthetic oligonucleotide

SEQ ID NO: 650988 - DNA, 55 bp, Artificial; identical to SEQ ID NO: 134144
  Synthetic oligonucleotide

SEQ ID NO: 650989 - DNA, 54 bp, Artificial; identical to SEQ ID NO: 134143
  Synthetic oligonucleotide

SEQ ID NO: 650990 - DNA, 52 bp, Artificial; identical to SEQ ID NO: 137513
  Synthetic oligonucleotide

SEQ ID NO: 650991 - DNA, 60 bp, Artificial; identical to SEQ ID NO: 134168
  Synthetic oligonucleotide

SEQ ID NO: 650992 - DNA, 60 bp, Artificial; identical to SEQ ID NO: 134157
  Synthetic oligonucleotide

SEQ ID NO: 650993 - DNA, 52 bp, Artificial; identical to SEQ ID NO: 134083
  Synthetic oligonucleotide

SEQ ID NO: 650994 - DNA, 54 bp, Artificial; identical to SEQ ID NO: 140330
  Synthetic oligonucleotide

SEQ ID NO: 650995 - DNA, 60 bp, Artificial; identical to SEQ ID NO: 140002
  Synthetic oligonucleotide

SEQ ID NO: 650996 - DNA, 57 bp, Artificial; identical to SEQ ID NO: 134134
  Synthetic oligonucleotide

SEQ ID NO: 650997 - DNA, 57 bp, Artificial; identical to SEQ ID NO: 138501
  Synthetic oligonucleotide

SEQ ID NO: 650998 - DNA, 55 bp, Artificial; identical to SEQ ID NO: 137132
  Synthetic oligonucleotide

SEQ ID NO: 650999 - DNA, 51 bp, Artificial; identical to SEQ ID NO: 138935
  Synthetic oligonucleotide

SEQ ID NO: 651000 - DNA, 54 bp, Artificial; identical to SEQ ID NO: 137740
  Synthetic oligonucleotide

SEQ ID NO: 651001 - DNA, 53 bp, Artificial; identical to SEQ ID NO: 134101
  Synthetic oligonucleotide

SEQ ID NO: 651002 - DNA, 55 bp, Artificial; identical to SEQ ID NO: 134109
  Synthetic oligonucleotide

SEQ ID NO: 651003 - DNA, 51 bp, Artificial; identical to SEQ ID NO: 136907
  Synthetic oligonucleotide

SEQ ID NO: 651004 - DNA, 59 bp, Artificial; identical to SEQ ID NO: 135637
  Synthetic oligonucleotide

SEQ ID NO: 651005 - DNA, 55 bp, Artificial; identical to SEQ ID NO: 134106
  Synthetic oligonucleotide

SEQ ID NO: 651006 - DNA, 59 bp, Artificial; identical to SEQ ID NO: 138504
  Synthetic oligonucleotide

SEQ ID NO: 651007 - DNA, 57 bp, Artificial; identical to SEQ ID NO: 136673
  Synthetic oligonucleotide

SEQ ID NO: 651008 - DNA, 50 bp, Artificial; identical to SEQ ID NO: 134885
  Synthetic oligonucleotide

SEQ ID NO: 651009 - DNA, 57 bp, Artificial; identical to SEQ ID NO: 138091
  Synthetic oligonucleotide

SEQ ID NO: 651010 - DNA, 51 bp, Artificial; identical to SEQ ID NO: 139112
  Synthetic oligonucleotide

SEQ ID NO: 651011 - DNA, 56 bp, Artificial; identical to SEQ ID NO: 138572
  Synthetic oligonucleotide

SEQ ID NO: 651012 - DNA, 53 bp, Artificial; identical to SEQ ID NO: 140030
  Synthetic oligonucleotide

SEQ ID NO: 651013 - DNA, 52 bp, Artificial; identical to SEQ ID NO: 134666
  Synthetic oligonucleotide

SEQ ID NO: 651014 - DNA, 52 bp, Artificial; identical to SEQ ID NO: 139084
  Synthetic oligonucleotide

SEQ ID NO: 651015 - DNA, 60 bp, Artificial; identical to SEQ ID NO: 138577
  Synthetic oligonucleotide

SEQ ID NO: 651016 - DNA, 55 bp, Artificial; identical to SEQ ID NO: 141073
  Synthetic oligonucleotide

SEQ ID NO: 651017 - DNA, 57 bp, Artificial; identical to SEQ ID NO: 138640
  Synthetic oligonucleotide

SEQ ID NO: 651018 - DNA, 55 bp, Artificial; identical to SEQ ID NO: 140015
  Synthetic oligonucleotide

SEQ ID NO: 651019 - DNA, 55 bp, Artificial; identical to SEQ ID NO: 139426
  Synthetic oligonucleotide

SEQ ID NO: 651020 - DNA, 60 bp, Artificial; identical to SEQ ID NO: 138579
  Synthetic oligonucleotide

SEQ ID NO: 651021 - DNA, 55 bp, Artificial; identical to SEQ ID NO: 136804
  Synthetic oligonucleotide

SEQ ID NO: 651022 - DNA, 52 bp, Artificial; identical to SEQ ID NO: 134668
  Synthetic oligonucleotide

SEQ ID NO: 651023 - DNA, 58 bp, Artificial; identical to SEQ ID NO: 134035
  Synthetic oligonucleotide

SEQ ID NO: 651024 - DNA, 58 bp, Artificial; identical to SEQ ID NO: 138581
  Synthetic oligonucleotide

SEQ ID NO: 651025 - DNA, 52 bp, Artificial; identical to SEQ ID NO: 139052
  Synthetic oligonucleotide

SEQ ID NO: 651026 - DNA, 57 bp, Artificial; identical to SEQ ID NO: 136378
  Synthetic oligonucleotide

SEQ ID NO: 651027 - DNA, 51 bp, Artificial; identical to SEQ ID NO: 134760
  Synthetic oligonucleotide

SEQ ID NO: 651028 - DNA, 55 bp, Artificial; identical to SEQ ID NO: 134196
  Synthetic oligonucleotide

SEQ ID NO: 651029 - DNA, 60 bp, Artificial; identical to SEQ ID NO: 136989
  Synthetic oligonucleotide

SEQ ID NO: 651030 - DNA, 55 bp, Artificial; identical to SEQ ID NO: 140037
  Synthetic oligonucleotide

SEQ ID NO: 651031 - DNA, 50 bp, Artificial; identical to SEQ ID NO: 138056
  Synthetic oligonucleotide

SEQ ID NO: 651032 - DNA, 52 bp, Artificial; identical to SEQ ID NO: 137044
  Synthetic oligonucleotide

SEQ ID NO: 651033 - DNA, 55 bp, Artificial; identical to SEQ ID NO: 134217
  Synthetic oligonucleotide

SEQ ID NO: 651034 - DNA, 52 bp, Artificial; identical to SEQ ID NO: 136576
  Synthetic oligonucleotide

SEQ ID NO: 651035 - DNA, 52 bp, Artificial; identical to SEQ ID NO: 134669
  Synthetic oligonucleotide

SEQ ID NO: 651036 - DNA, 52 bp, Artificial; identical to SEQ ID NO: 137266
  Synthetic oligonucleotide

SEQ ID NO: 651037 - DNA, 56 bp, Artificial; identical to SEQ ID NO: 139243
  Synthetic oligonucleotide

SEQ ID NO: 651038 - DNA, 55 bp, Artificial; identical to SEQ ID NO: 134213
  Synthetic oligonucleotide

SEQ ID NO: 651039 - DNA, 55 bp, Artificial; identical to SEQ ID NO: 140830
  Synthetic oligonucleotide

SEQ ID NO: 651040 - DNA, 51 bp, Artificial; identical to SEQ ID NO: 139656
  Synthetic oligonucleotide

SEQ ID NO: 651041 - DNA, 55 bp, Artificial; identical to SEQ ID NO: 137744
  Synthetic oligonucleotide

SEQ ID NO: 651042 - DNA, 53 bp, Artificial; identical to SEQ ID NO: 133696
  Synthetic oligonucleotide

SEQ ID NO: 651043 - DNA, 58 bp, Artificial; identical to SEQ ID NO: 136367
  Synthetic oligonucleotide

SEQ ID NO: 651044 - DNA, 50 bp, Artificial; identical to SEQ ID NO: 138587
  Synthetic oligonucleotide

SEQ ID NO: 651045 - DNA, 55 bp, Artificial; identical to SEQ ID NO: 138588
  Synthetic oligonucleotide

SEQ ID NO: 651046 - DNA, 51 bp, Artificial; identical to SEQ ID NO: 134758
  Synthetic oligonucleotide

SEQ ID NO: 651047 - DNA, 56 bp, Artificial; identical to SEQ ID NO: 133580
  Synthetic oligonucleotide

SEQ ID NO: 651048 - DNA, 55 bp, Artificial; identical to SEQ ID NO: 133934
  Synthetic oligonucleotide

SEQ ID NO: 651049 - DNA, 50 bp, Artificial; identical to SEQ ID NO: 139930
  Synthetic oligonucleotide

SEQ ID NO: 651050 - DNA, 55 bp, Artificial; identical to SEQ ID NO: 137462
  Synthetic oligonucleotide

SEQ ID NO: 651051 - DNA, 53 bp, Artificial; identical to SEQ ID NO: 138949
  Synthetic oligonucleotide

SEQ ID NO: 651052 - DNA, 55 bp, Artificial; identical to SEQ ID NO: 134202
  Synthetic oligonucleotide

SEQ ID NO: 651053 - DNA, 52 bp, Artificial; identical to SEQ ID NO: 134670
  Synthetic oligonucleotide

SEQ ID NO: 651054 - DNA, 55 bp, Artificial; identical to SEQ ID NO: 134151
  Synthetic oligonucleotide

SEQ ID NO: 651055 - DNA, 54 bp, Artificial; identical to SEQ ID NO: 133676
  Synthetic oligonucleotide

SEQ ID NO: 651056 - DNA, 54 bp, Artificial; identical to SEQ ID NO: 134486
  Synthetic oligonucleotide

SEQ ID NO: 651057 - DNA, 54 bp, Artificial; identical to SEQ ID NO: 139018
  Synthetic oligonucleotide

SEQ ID NO: 651058 - DNA, 55 bp, Artificial; identical to SEQ ID NO: 137134
  Synthetic oligonucleotide

SEQ ID NO: 651059 - DNA, 52 bp, Artificial; identical to SEQ ID NO: 138596
  Synthetic oligonucleotide

SEQ ID NO: 651060 - DNA, 55 bp, Artificial; identical to SEQ ID NO: 134158
  Synthetic oligonucleotide

SEQ ID NO: 651061 - DNA, 55 bp, Artificial; identical to SEQ ID NO: 139544
  Synthetic oligonucleotide

SEQ ID NO: 651062 - DNA, 55 bp, Artificial; identical to SEQ ID NO: 140893
  Synthetic oligonucleotide

SEQ ID NO: 651063 - DNA, 53 bp, Artificial; identical to SEQ ID NO: 139541
  Synthetic oligonucleotide

SEQ ID NO: 651064 - DNA, 59 bp, Artificial; identical to SEQ ID NO: 138605
  Synthetic oligonucleotide

SEQ ID NO: 651065 - DNA, 54 bp, Artificial; identical to SEQ ID NO: 140334
  Synthetic oligonucleotide

SEQ ID NO: 651066 - DNA, 60 bp, Artificial; identical to SEQ ID NO: 136312
  Synthetic oligonucleotide

SEQ ID NO: 651067 - DNA, 51 bp, Artificial; identical to SEQ ID NO: 134753
  Synthetic oligonucleotide

SEQ ID NO: 651068 - DNA, 55 bp, Artificial; identical to SEQ ID NO: 139001
  Synthetic oligonucleotide

SEQ ID NO: 651069 - DNA, 55 bp, Artificial; identical to SEQ ID NO: 139007
  Synthetic oligonucleotide

SEQ ID NO: 651070 - DNA, 55 bp, Artificial; identical to SEQ ID NO: 140736
  Synthetic oligonucleotide

SEQ ID NO: 651071 - DNA, 52 bp, Artificial; identical to SEQ ID NO: 139272
  Synthetic oligonucleotide

SEQ ID NO: 651072 - DNA, 55 bp, Artificial; identical to SEQ ID NO: 134183
  Synthetic oligonucleotide

SEQ ID NO: 651073 - DNA, 60 bp, Artificial; identical to SEQ ID NO: 138545
  Synthetic oligonucleotide

SEQ ID NO: 651074 - DNA, 55 bp, Artificial; identical to SEQ ID NO: 137135
  Synthetic oligonucleotide

SEQ ID NO: 651075 - DNA, 53 bp, Artificial; identical to SEQ ID NO: 136301
  Synthetic oligonucleotide

SEQ ID NO: 651076 - DNA, 54 bp, Artificial; identical to SEQ ID NO: 133314
  Synthetic oligonucleotide

SEQ ID NO: 651077 - DNA, 51 bp, Artificial; identical to SEQ ID NO: 136606
  Synthetic oligonucleotide

SEQ ID NO: 651078 - DNA, 55 bp, Artificial; identical to SEQ ID NO: 133941
  Synthetic oligonucleotide

SEQ ID NO: 651079 - DNA, 50 bp, Artificial; identical to SEQ ID NO: 133918
  Synthetic oligonucleotide

SEQ ID NO: 651080 - DNA, 50 bp, Artificial; identical to SEQ ID NO: 135433
  Synthetic oligonucleotide

SEQ ID NO: 651081 - DNA, 52 bp, Artificial; identical to SEQ ID NO: 136326
  Synthetic oligonucleotide

SEQ ID NO: 651082 - DNA, 55 bp, Artificial; identical to SEQ ID NO: 140691
  Synthetic oligonucleotide

SEQ ID NO: 651083 - DNA, 60 bp, Artificial; identical to SEQ ID NO: 135568
  Synthetic oligonucleotide

SEQ ID NO: 651084 - DNA, 50 bp, Artificial; identical to SEQ ID NO: 136943
  Synthetic oligonucleotide

SEQ ID NO: 651085 - DNA, 55 bp, Artificial; identical to SEQ ID NO: 139008
  Synthetic oligonucleotide

SEQ ID NO: 651086 - DNA, 54 bp, Artificial; identical to SEQ ID NO: 133955
  Synthetic oligonucleotide

SEQ ID NO: 651087 - DNA, 51 bp, Artificial; identical to SEQ ID NO: 134743
  Synthetic oligonucleotide

SEQ ID NO: 651088 - DNA, 52 bp, Artificial; identical to SEQ ID NO: 138378
  Synthetic oligonucleotide

SEQ ID NO: 651089 - DNA, 55 bp, Artificial; identical to SEQ ID NO: 136335
  Synthetic oligonucleotide

SEQ ID NO: 651090 - DNA, 55 bp, Artificial; identical to SEQ ID NO: 136337
  Synthetic oligonucleotide

SEQ ID NO: 651091 - DNA, 55 bp, Artificial; identical to SEQ ID NO: 141018
  Synthetic oligonucleotide

SEQ ID NO: 651092 - DNA, 58 bp, Artificial; identical to SEQ ID NO: 140062
  Synthetic oligonucleotide

SEQ ID NO: 651093 - DNA, 55 bp, Artificial; identical to SEQ ID NO: 139500
  Synthetic oligonucleotide

SEQ ID NO: 651094 - DNA, 60 bp, Artificial; identical to SEQ ID NO: 138554
  Synthetic oligonucleotide

SEQ ID NO: 651095 - DNA, 60 bp, Artificial; identical to SEQ ID NO: 139294
  Synthetic oligonucleotide

SEQ ID NO: 651096 - DNA, 50 bp, Artificial; identical to SEQ ID NO: 139966
  Synthetic oligonucleotide

SEQ ID NO: 651097 - DNA, 54 bp, Artificial; identical to SEQ ID NO: 133679
  Synthetic oligonucleotide

SEQ ID NO: 651098 - DNA, 50 bp, Artificial; identical to SEQ ID NO: 139972
  Synthetic oligonucleotide

SEQ ID NO: 651099 - DNA, 60 bp, Artificial; identical to SEQ ID NO: 138559
  Synthetic oligonucleotide

SEQ ID NO: 651100 - DNA, 50 bp, Artificial; identical to SEQ ID NO: 136953
  Synthetic oligonucleotide

SEQ ID NO: 651101 - DNA, 55 bp, Artificial; identical to SEQ ID NO: 136349
  Synthetic oligonucleotide

SEQ ID NO: 651102 - DNA, 53 bp, Artificial; identical to SEQ ID NO: 139081
  Synthetic oligonucleotide

SEQ ID NO: 651103 - DNA, 51 bp, Artificial; identical to SEQ ID NO: 138381
  Synthetic oligonucleotide

SEQ ID NO: 651104 - DNA, 57 bp, Artificial; identical to SEQ ID NO: 139253
  Synthetic oligonucleotide

SEQ ID NO: 651105 - DNA, 54 bp, Artificial; identical to SEQ ID NO: 140335
  Synthetic oligonucleotide

SEQ ID NO: 651106 - DNA, 55 bp, Artificial; identical to SEQ ID NO: 139517
  Synthetic oligonucleotide

SEQ ID NO: 651107 - DNA, 55 bp, Artificial; identical to SEQ ID NO: 140038
  Synthetic oligonucleotide

SEQ ID NO: 651108 - DNA, 53 bp, Artificial; identical to SEQ ID NO: 136553
  Synthetic oligonucleotide

SEQ ID NO: 651109 - DNA, 59 bp, Artificial; identical to SEQ ID NO: 138739
  Synthetic oligonucleotide

SEQ ID NO: 651110 - DNA, 51 bp, Artificial; identical to SEQ ID NO: 138380
  Synthetic oligonucleotide

SEQ ID NO: 651111 - DNA, 50 bp, Artificial; identical to SEQ ID NO: 133323
  Synthetic oligonucleotide

SEQ ID NO: 651112 - DNA, 50 bp, Artificial; identical to SEQ ID NO: 139277
  Synthetic oligonucleotide

SEQ ID NO: 651113 - DNA, 52 bp, Artificial; identical to SEQ ID NO: 134673
  Synthetic oligonucleotide

SEQ ID NO: 651114 - DNA, 51 bp, Artificial; identical to SEQ ID NO: 134788
  Synthetic oligonucleotide

SEQ ID NO: 651115 - DNA, 55 bp, Artificial; identical to SEQ ID NO: 140985
  Synthetic oligonucleotide

SEQ ID NO: 651116 - DNA, 55 bp, Artificial; identical to SEQ ID NO: 136525
  Synthetic oligonucleotide

SEQ ID NO: 651117 - DNA, 60 bp, Artificial; identical to SEQ ID NO: 134145
  Synthetic oligonucleotide

SEQ ID NO: 651118 - DNA, 54 bp, Artificial; identical to SEQ ID NO: 137345
  Synthetic oligonucleotide

SEQ ID NO: 651119 - DNA, 57 bp, Artificial; identical to SEQ ID NO: 134034
  Synthetic oligonucleotide

SEQ ID NO: 651120 - DNA, 52 bp, Artificial; identical to SEQ ID NO: 136887
  Synthetic oligonucleotide

SEQ ID NO: 651121 - DNA, 52 bp, Artificial; identical to SEQ ID NO: 139705
  Synthetic oligonucleotide

SEQ ID NO: 651122 - DNA, 55 bp, Artificial; identical to SEQ ID NO: 140690
  Synthetic oligonucleotide

SEQ ID NO: 651123 - DNA, 55 bp, Artificial; identical to SEQ ID NO: 136324
  Synthetic oligonucleotide

SEQ ID NO: 651124 - DNA, 55 bp, Artificial; identical to SEQ ID NO: 136321
  Synthetic oligonucleotide

SEQ ID NO: 651125 - DNA, 55 bp, Artificial; identical to SEQ ID NO: 136320
  Synthetic oligonucleotide

SEQ ID NO: 651126 - DNA, 50 bp, Artificial; identical to SEQ ID NO: 136614
  Synthetic oligonucleotide

SEQ ID NO: 651127 - DNA, 55 bp, Artificial; identical to SEQ ID NO: 136167
  Synthetic oligonucleotide

SEQ ID NO: 651128 - DNA, 55 bp, Artificial; identical to SEQ ID NO: 138975
  Synthetic oligonucleotide

SEQ ID NO: 651129 - DNA, 55 bp, Artificial; identical to SEQ ID NO: 138977
  Synthetic oligonucleotide

SEQ ID NO: 651130 - DNA, 53 bp, Artificial; identical to SEQ ID NO: 136555
  Synthetic oligonucleotide

SEQ ID NO: 651131 - DNA, 60 bp, Artificial; identical to SEQ ID NO: 136056
  Synthetic oligonucleotide

SEQ ID NO: 651132 - DNA, 52 bp, Artificial; identical to SEQ ID NO: 134675
  Synthetic oligonucleotide

SEQ ID NO: 651133 - DNA, 60 bp, Artificial; identical to SEQ ID NO: 135834
  Synthetic oligonucleotide

SEQ ID NO: 651134 - DNA, 54 bp, Artificial; identical to SEQ ID NO: 138157
  Synthetic oligonucleotide

SEQ ID NO: 651135 - DNA, 55 bp, Artificial; identical to SEQ ID NO: 136310
  Synthetic oligonucleotide

SEQ ID NO: 651136 - DNA, 52 bp, Artificial; identical to SEQ ID NO: 137048
  Synthetic oligonucleotide

SEQ ID NO: 651137 - DNA, 52 bp, Artificial; identical to SEQ ID NO: 140366
  Synthetic oligonucleotide

SEQ ID NO: 651138 - DNA, 56 bp, Artificial; identical to SEQ ID NO: 141127
  Synthetic oligonucleotide

SEQ ID NO: 651139 - DNA, 59 bp, Artificial; identical to SEQ ID NO: 141138
  Synthetic oligonucleotide

SEQ ID NO: 651140 - DNA, 55 bp, Artificial; identical to SEQ ID NO: 133691
  Synthetic oligonucleotide

SEQ ID NO: 651141 - DNA, 60 bp, Artificial; identical to SEQ ID NO: 136467
  Synthetic oligonucleotide

SEQ ID NO: 651142 - DNA, 55 bp, Artificial; identical to SEQ ID NO: 134050
  Synthetic oligonucleotide

SEQ ID NO: 651143 - DNA, 54 bp, Artificial; identical to SEQ ID NO: 138828
  Synthetic oligonucleotide

SEQ ID NO: 651144 - DNA, 55 bp, Artificial; identical to SEQ ID NO: 138839
  Synthetic oligonucleotide

SEQ ID NO: 651145 - DNA, 60 bp, Artificial; identical to SEQ ID NO: 138850
  Synthetic oligonucleotide

SEQ ID NO: 651146 - DNA, 51 bp, Artificial; identical to SEQ ID NO: 136933
  Synthetic oligonucleotide

SEQ ID NO: 651147 - DNA, 60 bp, Artificial; identical to SEQ ID NO: 135144
  Synthetic oligonucleotide

SEQ ID NO: 651148 - DNA, 52 bp, Artificial; identical to SEQ ID NO: 134023
  Synthetic oligonucleotide

SEQ ID NO: 651149 - DNA, 52 bp, Artificial; identical to SEQ ID NO: 137701
  Synthetic oligonucleotide

SEQ ID NO: 651150 - DNA, 55 bp, Artificial; identical to SEQ ID NO: 134060
  Synthetic oligonucleotide

SEQ ID NO: 651151 - DNA, 51 bp, Artificial; identical to SEQ ID NO: 134783
  Synthetic oligonucleotide

SEQ ID NO: 651152 - DNA, 53 bp, Artificial; identical to SEQ ID NO: 138883
  Synthetic oligonucleotide

SEQ ID NO: 651153 - DNA, 51 bp, Artificial; identical to SEQ ID NO: 138895
  Synthetic oligonucleotide

SEQ ID NO: 651154 - DNA, 57 bp, Artificial; identical to SEQ ID NO: 137020
  Synthetic oligonucleotide

SEQ ID NO: 651155 - DNA, 51 bp, Artificial; identical to SEQ ID NO: 139141
  Synthetic oligonucleotide

SEQ ID NO: 651156 - DNA, 55 bp, Artificial; identical to SEQ ID NO: 138996
  Synthetic oligonucleotide

SEQ ID NO: 651157 - DNA, 54 bp, Artificial; identical to SEQ ID NO: 137091
  Synthetic oligonucleotide

SEQ ID NO: 651158 - DNA, 58 bp, Artificial; identical to SEQ ID NO: 138928
  Synthetic oligonucleotide

SEQ ID NO: 651159 - DNA, 58 bp, Artificial; identical to SEQ ID NO: 138621
  Synthetic oligonucleotide

SEQ ID NO: 651160 - DNA, 57 bp, Artificial; identical to SEQ ID NO: 134033
  Synthetic oligonucleotide

SEQ ID NO: 651161 - DNA, 55 bp, Artificial; identical to SEQ ID NO: 136806
  Synthetic oligonucleotide

SEQ ID NO: 651162 - DNA, 54 bp, Artificial; identical to SEQ ID NO: 135946
  Synthetic oligonucleotide

SEQ ID NO: 651163 - DNA, 60 bp, Artificial; identical to SEQ ID NO: 135934
  Synthetic oligonucleotide

SEQ ID NO: 651164 - DNA, 60 bp, Artificial; identical to SEQ ID NO: 135923
  Synthetic oligonucleotide

SEQ ID NO: 651165 - DNA, 59 bp, Artificial; identical to SEQ ID NO: 135912
  Synthetic oligonucleotide

SEQ ID NO: 651166 - DNA, 53 bp, Artificial; identical to SEQ ID NO: 134070
  Synthetic oligonucleotide

SEQ ID NO: 651167 - DNA, 60 bp, Artificial; identical to SEQ ID NO: 135901
  Synthetic oligonucleotide

SEQ ID NO: 651168 - DNA, 55 bp, Artificial; identical to SEQ ID NO: 135890
  Synthetic oligonucleotide

SEQ ID NO: 651169 - DNA, 55 bp, Artificial; identical to SEQ ID NO: 136519
  Synthetic oligonucleotide

SEQ ID NO: 651170 - DNA, 57 bp, Artificial; identical to SEQ ID NO: 135879
  Synthetic oligonucleotide

SEQ ID NO: 651171 - DNA, 55 bp, Artificial; identical to SEQ ID NO: 134065
  Synthetic oligonucleotide

SEQ ID NO: 651172 - DNA, 60 bp, Artificial; identical to SEQ ID NO: 135868
  Synthetic oligonucleotide

SEQ ID NO: 651173 - DNA, 55 bp, Artificial; identical to SEQ ID NO: 136469
  Synthetic oligonucleotide

SEQ ID NO: 651174 - DNA, 58 bp, Artificial; identical to SEQ ID NO: 135857
  Synthetic oligonucleotide

SEQ ID NO: 651175 - DNA, 60 bp, Artificial; identical to SEQ ID NO: 136715
  Synthetic oligonucleotide

SEQ ID NO: 651176 - DNA, 56 bp, Artificial; identical to SEQ ID NO: 138950
  Synthetic oligonucleotide

SEQ ID NO: 651177 - DNA, 57 bp, Artificial; identical to SEQ ID NO: 135846
  Synthetic oligonucleotide

SEQ ID NO: 651178 - DNA, 54 bp, Artificial; identical to SEQ ID NO: 140688
  Synthetic oligonucleotide

SEQ ID NO: 651179 - DNA, 58 bp, Artificial; identical to SEQ ID NO: 138623
  Synthetic oligonucleotide

SEQ ID NO: 651180 - DNA, 55 bp, Artificial; identical to SEQ ID NO: 133597
  Synthetic oligonucleotide

SEQ ID NO: 651181 - DNA, 58 bp, Artificial; identical to SEQ ID NO: 138972
  Synthetic oligonucleotide

SEQ ID NO: 651182 - DNA, 58 bp, Artificial; identical to SEQ ID NO: 137887
  Synthetic oligonucleotide

SEQ ID NO: 651183 - DNA, 53 bp, Artificial; identical to SEQ ID NO: 139058
  Synthetic oligonucleotide

SEQ ID NO: 651184 - DNA, 55 bp, Artificial; identical to SEQ ID NO: 137699
  Synthetic oligonucleotide

SEQ ID NO: 651185 - DNA, 52 bp, Artificial; identical to SEQ ID NO: 139086
  Synthetic oligonucleotide

SEQ ID NO: 651186 - DNA, 51 bp, Artificial; identical to SEQ ID NO: 134781
  Synthetic oligonucleotide

SEQ ID NO: 651187 - DNA, 50 bp, Artificial; identical to SEQ ID NO: 135515
  Synthetic oligonucleotide

SEQ ID NO: 651188 - DNA, 55 bp, Artificial; identical to SEQ ID NO: 133736
  Synthetic oligonucleotide

SEQ ID NO: 651189 - DNA, 55 bp, Artificial; identical to SEQ ID NO: 134061
  Synthetic oligonucleotide

SEQ ID NO: 651190 - DNA, 51 bp, Artificial; identical to SEQ ID NO: 134780
  Synthetic oligonucleotide

SEQ ID NO: 651191 - DNA, 55 bp, Artificial; identical to SEQ ID NO: 140686
  Synthetic oligonucleotide

SEQ ID NO: 651192 - DNA, 55 bp, Artificial; identical to SEQ ID NO: 139307
  Synthetic oligonucleotide

SEQ ID NO: 651193 - DNA, 56 bp, Artificial; identical to SEQ ID NO: 135835
  Synthetic oligonucleotide

SEQ ID NO: 651194 - DNA, 60 bp, Artificial; identical to SEQ ID NO: 139017
  Synthetic oligonucleotide

SEQ ID NO: 651195 - DNA, 55 bp, Artificial; identical to SEQ ID NO: 140685
  Synthetic oligonucleotide

SEQ ID NO: 651196 - DNA, 56 bp, Artificial; identical to SEQ ID NO: 135823
  Synthetic oligonucleotide

SEQ ID NO: 651197 - DNA, 54 bp, Artificial; identical to SEQ ID NO: 136845
  Synthetic oligonucleotide

SEQ ID NO: 651198 - DNA, 55 bp, Artificial; identical to SEQ ID NO: 136466
  Synthetic oligonucleotide

SEQ ID NO: 651199 - DNA, 55 bp, Artificial; identical to SEQ ID NO: 138871
  Synthetic oligonucleotide

SEQ ID NO: 651200 - DNA, 59 bp, Artificial; identical to SEQ ID NO: 138783
  Synthetic oligonucleotide

SEQ ID NO: 651201 - DNA, 55 bp, Artificial; identical to SEQ ID NO: 136372
  Synthetic oligonucleotide

SEQ ID NO: 651202 - DNA, 55 bp, Artificial; identical to SEQ ID NO: 140148
  Synthetic oligonucleotide

SEQ ID NO: 651203 - DNA, 52 bp, Artificial; identical to SEQ ID NO: 134624
  Synthetic oligonucleotide

SEQ ID NO: 651204 - DNA, 52 bp, Artificial; identical to SEQ ID NO: 134625
  Synthetic oligonucleotide

SEQ ID NO: 651205 - DNA, 58 bp, Artificial; identical to SEQ ID NO: 138894
  Synthetic oligonucleotide

SEQ ID NO: 651206 - DNA, 56 bp, Artificial; identical to SEQ ID NO: 139571
  Synthetic oligonucleotide

SEQ ID NO: 651207 - DNA, 50 bp, Artificial; identical to SEQ ID NO: 136627
  Synthetic oligonucleotide

SEQ ID NO: 651208 - DNA, 51 bp, Artificial; identical to SEQ ID NO: 140912
  Synthetic oligonucleotide

SEQ ID NO: 651209 - DNA, 55 bp, Artificial; identical to SEQ ID NO: 134042
  Synthetic oligonucleotide

SEQ ID NO: 651210 - DNA, 56 bp, Artificial; identical to SEQ ID NO: 137024
  Synthetic oligonucleotide

SEQ ID NO: 651211 - DNA, 58 bp, Artificial; identical to SEQ ID NO: 137842
  Synthetic oligonucleotide

SEQ ID NO: 651212 - DNA, 60 bp, Artificial; identical to SEQ ID NO: 139349
  Synthetic oligonucleotide

SEQ ID NO: 651213 - DNA, 52 bp, Artificial; identical to SEQ ID NO: 139635
  Synthetic oligonucleotide

SEQ ID NO: 651214 - DNA, 55 bp, Artificial; identical to SEQ ID NO: 137835
  Synthetic oligonucleotide

SEQ ID NO: 651215 - DNA, 57 bp, Artificial; identical to SEQ ID NO: 139116
  Synthetic oligonucleotide

SEQ ID NO: 651216 - DNA, 52 bp, Artificial; identical to SEQ ID NO: 139104
  Synthetic oligonucleotide

SEQ ID NO: 651217 - DNA, 55 bp, Artificial; identical to SEQ ID NO: 137832
  Synthetic oligonucleotide

SEQ ID NO: 651218 - DNA, 55 bp, Artificial; identical to SEQ ID NO: 134037
  Synthetic oligonucleotide

SEQ ID NO: 651219 - DNA, 54 bp, Artificial; identical to SEQ ID NO: 137925
  Synthetic oligonucleotide

SEQ ID NO: 651220 - DNA, 55 bp, Artificial; identical to SEQ ID NO: 134036
  Synthetic oligonucleotide

SEQ ID NO: 651221 - DNA, 53 bp, Artificial; identical to SEQ ID NO: 139060
  Synthetic oligonucleotide

SEQ ID NO: 651222 - DNA, 55 bp, Artificial; identical to SEQ ID NO: 133369
  Synthetic oligonucleotide

SEQ ID NO: 651223 - DNA, 54 bp, Artificial; identical to SEQ ID NO: 134473
  Synthetic oligonucleotide

SEQ ID NO: 651224 - DNA, 58 bp, Artificial; identical to SEQ ID NO: 135659
  Synthetic oligonucleotide

SEQ ID NO: 651225 - DNA, 51 bp, Artificial; identical to SEQ ID NO: 140787
  Synthetic oligonucleotide

SEQ ID NO: 651226 - DNA, 55 bp, Artificial; identical to SEQ ID NO: 136388
  Synthetic oligonucleotide

SEQ ID NO: 651227 - DNA, 51 bp, Artificial; identical to SEQ ID NO: 137208
  Synthetic oligonucleotide

SEQ ID NO: 651228 - DNA, 55 bp, Artificial; identical to SEQ ID NO: 137837
  Synthetic oligonucleotide

SEQ ID NO: 651229 - DNA, 57 bp, Artificial; identical to SEQ ID NO: 135757
  Synthetic oligonucleotide

SEQ ID NO: 651230 - DNA, 55 bp, Artificial; identical to SEQ ID NO: 138297
  Synthetic oligonucleotide

SEQ ID NO: 651231 - DNA, 54 bp, Artificial; identical to SEQ ID NO: 136536
  Synthetic oligonucleotide

SEQ ID NO: 651232 - DNA, 52 bp, Artificial; identical to SEQ ID NO: 135746
  Synthetic oligonucleotide

SEQ ID NO: 651233 - DNA, 51 bp, Artificial; identical to SEQ ID NO: 139134
  Synthetic oligonucleotide

SEQ ID NO: 651234 - DNA, 55 bp, Artificial; identical to SEQ ID NO: 137138
  Synthetic oligonucleotide

SEQ ID NO: 651235 - DNA, 55 bp, Artificial; identical to SEQ ID NO: 136383
  Synthetic oligonucleotide

SEQ ID NO: 651236 - DNA, 54 bp, Artificial; identical to SEQ ID NO: 135724
  Synthetic oligonucleotide

SEQ ID NO: 651237 - DNA, 56 bp, Artificial; identical to SEQ ID NO: 133434
  Synthetic oligonucleotide

SEQ ID NO: 651238 - DNA, 55 bp, Artificial; identical to SEQ ID NO: 136380
  Synthetic oligonucleotide

SEQ ID NO: 651239 - DNA, 59 bp, Artificial; identical to SEQ ID NO: 135712
  Synthetic oligonucleotide

SEQ ID NO: 651240 - DNA, 60 bp, Artificial; identical to SEQ ID NO: 137092
  Synthetic oligonucleotide

SEQ ID NO: 651241 - DNA, 60 bp, Artificial; identical to SEQ ID NO: 135701
  Synthetic oligonucleotide

SEQ ID NO: 651242 - DNA, 55 bp, Artificial; identical to SEQ ID NO: 138836
  Synthetic oligonucleotide

SEQ ID NO: 651243 - DNA, 50 bp, Artificial; identical to SEQ ID NO: 136622
  Synthetic oligonucleotide

SEQ ID NO: 651244 - DNA, 56 bp, Artificial; identical to SEQ ID NO: 135690
  Synthetic oligonucleotide

SEQ ID NO: 651245 - DNA, 54 bp, Artificial; identical to SEQ ID NO: 138627
  Synthetic oligonucleotide

SEQ ID NO: 651246 - DNA, 58 bp, Artificial; identical to SEQ ID NO: 138495
  Synthetic oligonucleotide

SEQ ID NO: 651247 - DNA, 55 bp, Artificial; identical to SEQ ID NO: 134008
  Synthetic oligonucleotide

SEQ ID NO: 651248 - DNA, 55 bp, Artificial; identical to SEQ ID NO: 139289
  Synthetic oligonucleotide

SEQ ID NO: 651249 - DNA, 53 bp, Artificial; identical to SEQ ID NO: 140846
  Synthetic oligonucleotide

SEQ ID NO: 651250 - DNA, 55 bp, Artificial; identical to SEQ ID NO: 137841
  Synthetic oligonucleotide

SEQ ID NO: 651251 - DNA, 57 bp, Artificial; identical to SEQ ID NO: 138326
  Synthetic oligonucleotide

SEQ ID NO: 651252 - DNA, 53 bp, Artificial; identical to SEQ ID NO: 139604
  Synthetic oligonucleotide

SEQ ID NO: 651253 - DNA, 58 bp, Artificial; identical to SEQ ID NO: 138629
  Synthetic oligonucleotide

SEQ ID NO: 651254 - DNA, 60 bp, Artificial; identical to SEQ ID NO: 138506
  Synthetic oligonucleotide

SEQ ID NO: 651255 - DNA, 58 bp, Artificial; identical to SEQ ID NO: 138517
  Synthetic oligonucleotide

SEQ ID NO: 651256 - DNA, 54 bp, Artificial; identical to SEQ ID NO: 137012
  Synthetic oligonucleotide

SEQ ID NO: 651257 - DNA, 60 bp, Artificial; identical to SEQ ID NO: 138539
  Synthetic oligonucleotide

SEQ ID NO: 651258 - DNA, 49 bp, Artificial; identical to SEQ ID NO: 139594
  Synthetic oligonucleotide

SEQ ID NO: 651259 - DNA, 51 bp, Artificial; identical to SEQ ID NO: 140788
  Synthetic oligonucleotide

SEQ ID NO: 651260 - DNA, 55 bp, Artificial; identical to SEQ ID NO: 136956
  Synthetic oligonucleotide

SEQ ID NO: 651261 - DNA, 55 bp, Artificial; identical to SEQ ID NO: 134385
  Synthetic oligonucleotide

SEQ ID NO: 651262 - DNA, 55 bp, Artificial; identical to SEQ ID NO: 139292
  Synthetic oligonucleotide

SEQ ID NO: 651263 - DNA, 51 bp, Artificial; identical to SEQ ID NO: 138263
  Synthetic oligonucleotide

SEQ ID NO: 651264 - DNA, 52 bp, Artificial; identical to SEQ ID NO: 137257
  Synthetic oligonucleotide

SEQ ID NO: 651265 - DNA, 60 bp, Artificial; identical to SEQ ID NO: 138550
  Synthetic oligonucleotide

SEQ ID NO: 651266 - DNA, 55 bp, Artificial; identical to SEQ ID NO: 133372
  Synthetic oligonucleotide

SEQ ID NO: 651267 - DNA, 53 bp, Artificial; identical to SEQ ID NO: 135646
  Synthetic oligonucleotide

SEQ ID NO: 651268 - DNA, 59 bp, Artificial; identical to SEQ ID NO: 138609
  Synthetic oligonucleotide

SEQ ID NO: 651269 - DNA, 60 bp, Artificial; identical to SEQ ID NO: 139327
  Synthetic oligonucleotide

SEQ ID NO: 651270 - DNA, 55 bp, Artificial; identical to SEQ ID NO: 138573
  Synthetic oligonucleotide

SEQ ID NO: 651271 - DNA, 55 bp, Artificial; identical to SEQ ID NO: 136948
  Synthetic oligonucleotide

SEQ ID NO: 651272 - DNA, 52 bp, Artificial; identical to SEQ ID NO: 134627
  Synthetic oligonucleotide

SEQ ID NO: 651273 - DNA, 55 bp, Artificial; identical to SEQ ID NO: 134395
  Synthetic oligonucleotide

SEQ ID NO: 651274 - DNA, 53 bp, Artificial; identical to SEQ ID NO: 140351
  Synthetic oligonucleotide

SEQ ID NO: 651275 - DNA, 55 bp, Artificial; identical to SEQ ID NO: 134397
  Synthetic oligonucleotide

SEQ ID NO: 651276 - DNA, 53 bp, Artificial; identical to SEQ ID NO: 139053
  Synthetic oligonucleotide

SEQ ID NO: 651277 - DNA, 54 bp, Artificial; identical to SEQ ID NO: 134399
  Synthetic oligonucleotide

SEQ ID NO: 651278 - DNA, 55 bp, Artificial; identical to SEQ ID NO: 139262
  Synthetic oligonucleotide

SEQ ID NO: 651279 - DNA, 53 bp, Artificial; identical to SEQ ID NO: 138255
  Synthetic oligonucleotide

SEQ ID NO: 651280 - DNA, 55 bp, Artificial; identical to SEQ ID NO: 138299
  Synthetic oligonucleotide

SEQ ID NO: 651281 - DNA, 55 bp, Artificial; identical to SEQ ID NO: 133373
  Synthetic oligonucleotide

SEQ ID NO: 651282 - DNA, 53 bp, Artificial; identical to SEQ ID NO: 138617
  Synthetic oligonucleotide

SEQ ID NO: 651283 - DNA, 57 bp, Artificial; identical to SEQ ID NO: 138628
  Synthetic oligonucleotide

SEQ ID NO: 651284 - DNA, 55 bp, Artificial; identical to SEQ ID NO: 140996
  Synthetic oligonucleotide

SEQ ID NO: 651285 - DNA, 55 bp, Artificial; identical to SEQ ID NO: 134403
  Synthetic oligonucleotide

SEQ ID NO: 651286 - DNA, 55 bp, Artificial; identical to SEQ ID NO: 136465
  Synthetic oligonucleotide

SEQ ID NO: 651287 - DNA, 60 bp, Artificial; identical to SEQ ID NO: 138133
  Synthetic oligonucleotide

SEQ ID NO: 651288 - DNA, 58 bp, Artificial; identical to SEQ ID NO: 135624
  Synthetic oligonucleotide

SEQ ID NO: 651289 - DNA, 55 bp, Artificial; identical to SEQ ID NO: 134355
  Synthetic oligonucleotide

SEQ ID NO: 651290 - DNA, 55 bp, Artificial; identical to SEQ ID NO: 139269
  Synthetic oligonucleotide

SEQ ID NO: 651291 - DNA, 55 bp, Artificial; identical to SEQ ID NO: 136681
  Synthetic oligonucleotide

SEQ ID NO: 651292 - DNA, 55 bp, Artificial; identical to SEQ ID NO: 138845
  Synthetic oligonucleotide

SEQ ID NO: 651293 - DNA, 55 bp, Artificial; identical to SEQ ID NO: 137698
  Synthetic oligonucleotide

SEQ ID NO: 651294 - DNA, 55 bp, Artificial; identical to SEQ ID NO: 141007
  Synthetic oligonucleotide

SEQ ID NO: 651295 - DNA, 55 bp, Artificial; identical to SEQ ID NO: 138848
  Synthetic oligonucleotide

SEQ ID NO: 651296 - DNA, 54 bp, Artificial; identical to SEQ ID NO: 134499
  Synthetic oligonucleotide

SEQ ID NO: 651297 - DNA, 55 bp, Artificial; identical to SEQ ID NO: 133973
  Synthetic oligonucleotide

SEQ ID NO: 651298 - DNA, 55 bp, Artificial; identical to SEQ ID NO: 138854
  Synthetic oligonucleotide

SEQ ID NO: 651299 - DNA, 55 bp, Artificial; identical to SEQ ID NO: 139276
  Synthetic oligonucleotide

SEQ ID NO: 651300 - DNA, 55 bp, Artificial; identical to SEQ ID NO: 140961
  Synthetic oligonucleotide

SEQ ID NO: 651301 - DNA, 53 bp, Artificial; identical to SEQ ID NO: 136659
  Synthetic oligonucleotide

SEQ ID NO: 651302 - DNA, 53 bp, Artificial; identical to SEQ ID NO: 139378
  Synthetic oligonucleotide

SEQ ID NO: 651303 - DNA, 51 bp, Artificial; identical to SEQ ID NO: 136927
  Synthetic oligonucleotide

SEQ ID NO: 651304 - DNA, 55 bp, Artificial; identical to SEQ ID NO: 139376
  Synthetic oligonucleotide

SEQ ID NO: 651305 - DNA, 55 bp, Artificial; identical to SEQ ID NO: 137141
  Synthetic oligonucleotide

SEQ ID NO: 651306 - DNA, 56 bp, Artificial; identical to SEQ ID NO: 138646
  Synthetic oligonucleotide

SEQ ID NO: 651307 - DNA, 55 bp, Artificial; identical to SEQ ID NO: 134361
  Synthetic oligonucleotide

SEQ ID NO: 651308 - DNA, 55 bp, Artificial; identical to SEQ ID NO: 139375
  Synthetic oligonucleotide

SEQ ID NO: 651309 - DNA, 60 bp, Artificial; identical to SEQ ID NO: 135190
  Synthetic oligonucleotide

SEQ ID NO: 651310 - DNA, 55 bp, Artificial; identical to SEQ ID NO: 140151
  Synthetic oligonucleotide

SEQ ID NO: 651311 - DNA, 55 bp, Artificial; identical to SEQ ID NO: 137854
  Synthetic oligonucleotide

SEQ ID NO: 651312 - DNA, 50 bp, Artificial; identical to SEQ ID NO: 134026
  Synthetic oligonucleotide

SEQ ID NO: 651313 - DNA, 60 bp, Artificial; identical to SEQ ID NO: 135179
  Synthetic oligonucleotide

SEQ ID NO: 651314 - DNA, 60 bp, Artificial; identical to SEQ ID NO: 139234
  Synthetic oligonucleotide

SEQ ID NO: 651315 - DNA, 59 bp, Artificial; identical to SEQ ID NO: 139235
  Synthetic oligonucleotide

SEQ ID NO: 651316 - DNA, 55 bp, Artificial; identical to SEQ ID NO: 136813
  Synthetic oligonucleotide

SEQ ID NO: 651317 - DNA, 51 bp, Artificial; identical to SEQ ID NO: 134682
  Synthetic oligonucleotide

SEQ ID NO: 651318 - DNA, 55 bp, Artificial; identical to SEQ ID NO: 140681
  Synthetic oligonucleotide

SEQ ID NO: 651319 - DNA, 51 bp, Artificial; identical to SEQ ID NO: 134371
  Synthetic oligonucleotide

SEQ ID NO: 651320 - DNA, 60 bp, Artificial; identical to SEQ ID NO: 140009
  Synthetic oligonucleotide

SEQ ID NO: 651321 - DNA, 54 bp, Artificial; identical to SEQ ID NO: 139237
  Synthetic oligonucleotide

SEQ ID NO: 651322 - DNA, 55 bp, Artificial; identical to SEQ ID NO: 140680
  Synthetic oligonucleotide

SEQ ID NO: 651323 - DNA, 55 bp, Artificial; identical to SEQ ID NO: 137385
  Synthetic oligonucleotide

SEQ ID NO: 651324 - DNA, 55 bp, Artificial; identical to SEQ ID NO: 138177
  Synthetic oligonucleotide

SEQ ID NO: 651325 - DNA, 54 bp, Artificial; identical to SEQ ID NO: 134375
  Synthetic oligonucleotide

SEQ ID NO: 651326 - DNA, 55 bp, Artificial; identical to SEQ ID NO: 134376
  Synthetic oligonucleotide

SEQ ID NO: 651327 - DNA, 54 bp, Artificial; identical to SEQ ID NO: 135168
  Synthetic oligonucleotide

SEQ ID NO: 651328 - DNA, 55 bp, Artificial; identical to SEQ ID NO: 134377
  Synthetic oligonucleotide

SEQ ID NO: 651329 - DNA, 55 bp, Artificial; identical to SEQ ID NO: 134427
  Synthetic oligonucleotide

SEQ ID NO: 651330 - DNA, 55 bp, Artificial; identical to SEQ ID NO: 138245
  Synthetic oligonucleotide

SEQ ID NO: 651331 - DNA, 57 bp, Artificial; identical to SEQ ID NO: 135671
  Synthetic oligonucleotide

SEQ ID NO: 651332 - DNA, 56 bp, Artificial; identical to SEQ ID NO: 138455
  Synthetic oligonucleotide

SEQ ID NO: 651333 - DNA, 57 bp, Artificial; identical to SEQ ID NO: 138456
  Synthetic oligonucleotide

SEQ ID NO: 651334 - DNA, 55 bp, Artificial; identical to SEQ ID NO: 133974
  Synthetic oligonucleotide

SEQ ID NO: 651335 - DNA, 54 bp, Artificial; identical to SEQ ID NO: 134405
  Synthetic oligonucleotide

SEQ ID NO: 651336 - DNA, 58 bp, Artificial; identical to SEQ ID NO: 140003
  Synthetic oligonucleotide

SEQ ID NO: 651337 - DNA, 55 bp, Artificial; identical to SEQ ID NO: 134406
  Synthetic oligonucleotide

SEQ ID NO: 651338 - DNA, 51 bp, Artificial; identical to SEQ ID NO: 136585
  Synthetic oligonucleotide

SEQ ID NO: 651339 - DNA, 55 bp, Artificial; identical to SEQ ID NO: 133975
  Synthetic oligonucleotide

SEQ ID NO: 651340 - DNA, 56 bp, Artificial; identical to SEQ ID NO: 139255
  Synthetic oligonucleotide

SEQ ID NO: 651341 - DNA, 53 bp, Artificial; identical to SEQ ID NO: 134563
  Synthetic oligonucleotide

SEQ ID NO: 651342 - DNA, 54 bp, Artificial; identical to SEQ ID NO: 136453
  Synthetic oligonucleotide

SEQ ID NO: 651343 - DNA, 56 bp, Artificial; identical to SEQ ID NO: 138459
  Synthetic oligonucleotide

SEQ ID NO: 651344 - DNA, 55 bp, Artificial; identical to SEQ ID NO: 134421
  Synthetic oligonucleotide

SEQ ID NO: 651345 - DNA, 55 bp, Artificial; identical to SEQ ID NO: 137856
  Synthetic oligonucleotide

SEQ ID NO: 651346 - DNA, 55 bp, Artificial; identical to SEQ ID NO: 138925
  Synthetic oligonucleotide

SEQ ID NO: 651347 - DNA, 51 bp, Artificial; identical to SEQ ID NO: 134705
  Synthetic oligonucleotide

SEQ ID NO: 651348 - DNA, 55 bp, Artificial; identical to SEQ ID NO: 138246
  Synthetic oligonucleotide

SEQ ID NO: 651349 - DNA, 55 bp, Artificial; identical to SEQ ID NO: 133378
  Synthetic oligonucleotide

SEQ ID NO: 651350 - DNA, 55 bp, Artificial; identical to SEQ ID NO: 137859
  Synthetic oligonucleotide

SEQ ID NO: 651351 - DNA, 58 bp, Artificial; identical to SEQ ID NO: 136848
  Synthetic oligonucleotide

SEQ ID NO: 651352 - DNA, 55 bp, Artificial; identical to SEQ ID NO: 140679
  Synthetic oligonucleotide

SEQ ID NO: 651353 - DNA, 56 bp, Artificial; identical to SEQ ID NO: 135100
  Synthetic oligonucleotide

SEQ ID NO: 651354 - DNA, 55 bp, Artificial; identical to SEQ ID NO: 133976
  Synthetic oligonucleotide

SEQ ID NO: 651355 - DNA, 54 bp, Artificial; identical to SEQ ID NO: 137175
  Synthetic oligonucleotide

SEQ ID NO: 651356 - DNA, 51 bp, Artificial; identical to SEQ ID NO: 137350
  Synthetic oligonucleotide

SEQ ID NO: 651357 - DNA, 55 bp, Artificial; identical to SEQ ID NO: 134009
  Synthetic oligonucleotide

SEQ ID NO: 651358 - DNA, 52 bp, Artificial; identical to SEQ ID NO: 134629
  Synthetic oligonucleotide

SEQ ID NO: 651359 - DNA, 52 bp, Artificial; identical to SEQ ID NO: 134630
  Synthetic oligonucleotide

SEQ ID NO: 651360 - DNA, 53 bp, Artificial; identical to SEQ ID NO: 138642
  Synthetic oligonucleotide

SEQ ID NO: 651361 - DNA, 55 bp, Artificial; identical to SEQ ID NO: 134263
  Synthetic oligonucleotide

SEQ ID NO: 651362 - DNA, 55 bp, Artificial; identical to SEQ ID NO: 137812
  Synthetic oligonucleotide

SEQ ID NO: 651363 - DNA, 55 bp, Artificial; identical to SEQ ID NO: 138927
  Synthetic oligonucleotide

SEQ ID NO: 651364 - DNA, 55 bp, Artificial; identical to SEQ ID NO: 140851
  Synthetic oligonucleotide

SEQ ID NO: 651365 - DNA, 55 bp, Artificial; identical to SEQ ID NO: 140678
  Synthetic oligonucleotide

SEQ ID NO: 651366 - DNA, 55 bp, Artificial; identical to SEQ ID NO: 134266
  Synthetic oligonucleotide

SEQ ID NO: 651367 - DNA, 54 bp, Artificial; identical to SEQ ID NO: 136826
  Synthetic oligonucleotide

SEQ ID NO: 651368 - DNA, 55 bp, Artificial; identical to SEQ ID NO: 139366
  Synthetic oligonucleotide

SEQ ID NO: 651369 - DNA, 55 bp, Artificial; identical to SEQ ID NO: 139365
  Synthetic oligonucleotide

SEQ ID NO: 651370 - DNA, 55 bp, Artificial; identical to SEQ ID NO: 140155
  Synthetic oligonucleotide

SEQ ID NO: 651371 - DNA, 50 bp, Artificial; identical to SEQ ID NO: 138049
  Synthetic oligonucleotide

SEQ ID NO: 651372 - DNA, 55 bp, Artificial; identical to SEQ ID NO: 136448
  Synthetic oligonucleotide

SEQ ID NO: 651373 - DNA, 55 bp, Artificial; identical to SEQ ID NO: 134270
  Synthetic oligonucleotide

SEQ ID NO: 651374 - DNA, 52 bp, Artificial; identical to SEQ ID NO: 140675
  Synthetic oligonucleotide

SEQ ID NO: 651375 - DNA, 55 bp, Artificial; identical to SEQ ID NO: 134273
  Synthetic oligonucleotide

SEQ ID NO: 651376 - DNA, 55 bp, Artificial; identical to SEQ ID NO: 134275
  Synthetic oligonucleotide

SEQ ID NO: 651377 - DNA, 55 bp, Artificial; identical to SEQ ID NO: 134276
  Synthetic oligonucleotide

SEQ ID NO: 651378 - DNA, 50 bp, Artificial; identical to SEQ ID NO: 139885
  Synthetic oligonucleotide

SEQ ID NO: 651379 - DNA, 55 bp, Artificial; identical to SEQ ID NO: 133377
  Synthetic oligonucleotide

SEQ ID NO: 651380 - DNA, 55 bp, Artificial; identical to SEQ ID NO: 134280
  Synthetic oligonucleotide

SEQ ID NO: 651381 - DNA, 55 bp, Artificial; identical to SEQ ID NO: 136491
  Synthetic oligonucleotide

SEQ ID NO: 651382 - DNA, 55 bp, Artificial; identical to SEQ ID NO: 137814
  Synthetic oligonucleotide

SEQ ID NO: 651383 - DNA, 55 bp, Artificial; identical to SEQ ID NO: 139401
  Synthetic oligonucleotide

SEQ ID NO: 651384 - DNA, 60 bp, Artificial; identical to SEQ ID NO: 136389
  Synthetic oligonucleotide

SEQ ID NO: 651385 - DNA, 52 bp, Artificial; identical to SEQ ID NO: 134631
  Synthetic oligonucleotide

SEQ ID NO: 651386 - DNA, 55 bp, Artificial; identical to SEQ ID NO: 138300
  Synthetic oligonucleotide

SEQ ID NO: 651387 - DNA, 58 bp, Artificial; identical to SEQ ID NO: 141094
  Synthetic oligonucleotide

SEQ ID NO: 651388 - DNA, 55 bp, Artificial; identical to SEQ ID NO: 138880
  Synthetic oligonucleotide

SEQ ID NO: 651389 - DNA, 55 bp, Artificial; identical to SEQ ID NO: 134284
  Synthetic oligonucleotide

SEQ ID NO: 651390 - DNA, 52 bp, Artificial; identical to SEQ ID NO: 137757
  Synthetic oligonucleotide

SEQ ID NO: 651391 - DNA, 55 bp, Artificial; identical to SEQ ID NO: 134286
  Synthetic oligonucleotide

SEQ ID NO: 651392 - DNA, 55 bp, Artificial; identical to SEQ ID NO: 134218
  Synthetic oligonucleotide

SEQ ID NO: 651393 - DNA, 55 bp, Artificial; identical to SEQ ID NO: 138882
  Synthetic oligonucleotide

SEQ ID NO: 651394 - DNA, 55 bp, Artificial; identical to SEQ ID NO: 141075
  Synthetic oligonucleotide

SEQ ID NO: 651395 - DNA, 55 bp, Artificial; identical to SEQ ID NO: 138885
  Synthetic oligonucleotide

SEQ ID NO: 651396 - DNA, 55 bp, Artificial; identical to SEQ ID NO: 141076
  Synthetic oligonucleotide

SEQ ID NO: 651397 - DNA, 55 bp, Artificial; identical to SEQ ID NO: 138886
  Synthetic oligonucleotide

SEQ ID NO: 651398 - DNA, 59 bp, Artificial; identical to SEQ ID NO: 135089
  Synthetic oligonucleotide

SEQ ID NO: 651399 - DNA, 55 bp, Artificial; identical to SEQ ID NO: 137506
  Synthetic oligonucleotide

SEQ ID NO: 651400 - DNA, 51 bp, Artificial; identical to SEQ ID NO: 134694
  Synthetic oligonucleotide

SEQ ID NO: 651401 - DNA, 55 bp, Artificial; identical to SEQ ID NO: 134222
  Synthetic oligonucleotide

SEQ ID NO: 651402 - DNA, 54 bp, Artificial; identical to SEQ ID NO: 139024
  Synthetic oligonucleotide

SEQ ID NO: 651403 - DNA, 55 bp, Artificial; identical to SEQ ID NO: 137819
  Synthetic oligonucleotide

SEQ ID NO: 651404 - DNA, 58 bp, Artificial; identical to SEQ ID NO: 139241
  Synthetic oligonucleotide

SEQ ID NO: 651405 - DNA, 55 bp, Artificial; identical to SEQ ID NO: 133981
  Synthetic oligonucleotide

SEQ ID NO: 651406 - DNA, 55 bp, Artificial; identical to SEQ ID NO: 139400
  Synthetic oligonucleotide

SEQ ID NO: 651407 - DNA, 57 bp, Artificial; identical to SEQ ID NO: 138472
  Synthetic oligonucleotide

SEQ ID NO: 651408 - DNA, 55 bp, Artificial; identical to SEQ ID NO: 133601
  Synthetic oligonucleotide

SEQ ID NO: 651409 - DNA, 55 bp, Artificial; identical to SEQ ID NO: 134226
  Synthetic oligonucleotide

SEQ ID NO: 651410 - DNA, 55 bp, Artificial; identical to SEQ ID NO: 138897
  Synthetic oligonucleotide

SEQ ID NO: 651411 - DNA, 55 bp, Artificial; identical to SEQ ID NO: 137689
  Synthetic oligonucleotide

SEQ ID NO: 651412 - DNA, 54 bp, Artificial; identical to SEQ ID NO: 138252
  Synthetic oligonucleotide

SEQ ID NO: 651413 - DNA, 55 bp, Artificial; identical to SEQ ID NO: 134228
  Synthetic oligonucleotide

SEQ ID NO: 651414 - DNA, 55 bp, Artificial; identical to SEQ ID NO: 133595
  Synthetic oligonucleotide

SEQ ID NO: 651415 - DNA, 55 bp, Artificial; identical to SEQ ID NO: 138898
  Synthetic oligonucleotide

SEQ ID NO: 651416 - DNA, 55 bp, Artificial; identical to SEQ ID NO: 134229
  Synthetic oligonucleotide

SEQ ID NO: 651417 - DNA, 55 bp, Artificial; identical to SEQ ID NO: 137040
  Synthetic oligonucleotide

SEQ ID NO: 651418 - DNA, 51 bp, Artificial; identical to SEQ ID NO: 139695
  Synthetic oligonucleotide

SEQ ID NO: 651419 - DNA, 52 bp, Artificial; identical to SEQ ID NO: 139398
  Synthetic oligonucleotide

SEQ ID NO: 651420 - DNA, 58 bp, Artificial; identical to SEQ ID NO: 136632
  Synthetic oligonucleotide

SEQ ID NO: 651421 - DNA, 55 bp, Artificial; identical to SEQ ID NO: 133983
  Synthetic oligonucleotide

SEQ ID NO: 651422 - DNA, 55 bp, Artificial; identical to SEQ ID NO: 137402
  Synthetic oligonucleotide

SEQ ID NO: 651423 - DNA, 55 bp, Artificial; identical to SEQ ID NO: 133984
  Synthetic oligonucleotide

SEQ ID NO: 651424 - DNA, 55 bp, Artificial; identical to SEQ ID NO: 139397
  Synthetic oligonucleotide

SEQ ID NO: 651425 - DNA, 53 bp, Artificial; identical to SEQ ID NO: 133720
  Synthetic oligonucleotide

SEQ ID NO: 651426 - DNA, 55 bp, Artificial; identical to SEQ ID NO: 136818
  Synthetic oligonucleotide

SEQ ID NO: 651427 - DNA, 55 bp, Artificial; identical to SEQ ID NO: 139396
  Synthetic oligonucleotide

SEQ ID NO: 651428 - DNA, 55 bp, Artificial; identical to SEQ ID NO: 137690
  Synthetic oligonucleotide

SEQ ID NO: 651429 - DNA, 54 bp, Artificial; identical to SEQ ID NO: 137823
  Synthetic oligonucleotide

SEQ ID NO: 651430 - DNA, 55 bp, Artificial; identical to SEQ ID NO: 134233
  Synthetic oligonucleotide

SEQ ID NO: 651431 - DNA, 55 bp, Artificial; identical to SEQ ID NO: 140674
  Synthetic oligonucleotide

SEQ ID NO: 651432 - DNA, 55 bp, Artificial; identical to SEQ ID NO: 134237
  Synthetic oligonucleotide

SEQ ID NO: 651433 - DNA, 60 bp, Artificial; identical to SEQ ID NO: 135067
  Synthetic oligonucleotide

SEQ ID NO: 651434 - DNA, 53 bp, Artificial; identical to SEQ ID NO: 137039
  Synthetic oligonucleotide

SEQ ID NO: 651435 - DNA, 55 bp, Artificial; identical to SEQ ID NO: 140778
  Synthetic oligonucleotide

SEQ ID NO: 651436 - DNA, 55 bp, Artificial; identical to SEQ ID NO: 136474
  Synthetic oligonucleotide

SEQ ID NO: 651437 - DNA, 54 bp, Artificial; identical to SEQ ID NO: 136846
  Synthetic oligonucleotide

SEQ ID NO: 651438 - DNA, 53 bp, Artificial; identical to SEQ ID NO: 140342
  Synthetic oligonucleotide

SEQ ID NO: 651439 - DNA, 55 bp, Artificial; identical to SEQ ID NO: 136472
  Synthetic oligonucleotide

SEQ ID NO: 651440 - DNA, 55 bp, Artificial; identical to SEQ ID NO: 139393
  Synthetic oligonucleotide

SEQ ID NO: 651441 - DNA, 55 bp, Artificial; identical to SEQ ID NO: 139391
  Synthetic oligonucleotide

SEQ ID NO: 651442 - DNA, 52 bp, Artificial; identical to SEQ ID NO: 134633
  Synthetic oligonucleotide

SEQ ID NO: 651443 - DNA, 55 bp, Artificial; identical to SEQ ID NO: 137825
  Synthetic oligonucleotide

SEQ ID NO: 651444 - DNA, 55 bp, Artificial; identical to SEQ ID NO: 133365
  Synthetic oligonucleotide

SEQ ID NO: 651445 - DNA, 58 bp, Artificial; identical to SEQ ID NO: 136665
  Synthetic oligonucleotide

SEQ ID NO: 651446 - DNA, 60 bp, Artificial; identical to SEQ ID NO: 135056
  Synthetic oligonucleotide

SEQ ID NO: 651447 - DNA, 55 bp, Artificial; identical to SEQ ID NO: 137104
  Synthetic oligonucleotide

SEQ ID NO: 651448 - DNA, 52 bp, Artificial; identical to SEQ ID NO: 139090
  Synthetic oligonucleotide

SEQ ID NO: 651449 - DNA, 55 bp, Artificial; identical to SEQ ID NO: 137826
  Synthetic oligonucleotide

SEQ ID NO: 651450 - DNA, 55 bp, Artificial; identical to SEQ ID NO: 137105
  Synthetic oligonucleotide

SEQ ID NO: 651451 - DNA, 51 bp, Artificial; identical to SEQ ID NO: 139061
  Synthetic oligonucleotide

SEQ ID NO: 651452 - DNA, 55 bp, Artificial; identical to SEQ ID NO: 136819
  Synthetic oligonucleotide

SEQ ID NO: 651453 - DNA, 55 bp, Artificial; identical to SEQ ID NO: 137106
  Synthetic oligonucleotide

SEQ ID NO: 651454 - DNA, 54 bp, Artificial; identical to SEQ ID NO: 138303
  Synthetic oligonucleotide

SEQ ID NO: 651455 - DNA, 55 bp, Artificial; identical to SEQ ID NO: 140672
  Synthetic oligonucleotide

SEQ ID NO: 651456 - DNA, 55 bp, Artificial; identical to SEQ ID NO: 138904
  Synthetic oligonucleotide

SEQ ID NO: 651457 - DNA, 51 bp, Artificial; identical to SEQ ID NO: 134688
  Synthetic oligonucleotide

SEQ ID NO: 651458 - DNA, 52 bp, Artificial; identical to SEQ ID NO: 139644
  Synthetic oligonucleotide

SEQ ID NO: 651459 - DNA, 53 bp, Artificial; identical to SEQ ID NO: 139055
  Synthetic oligonucleotide

SEQ ID NO: 651460 - DNA, 55 bp, Artificial; identical to SEQ ID NO: 134319
  Synthetic oligonucleotide

SEQ ID NO: 651461 - DNA, 55 bp, Artificial; identical to SEQ ID NO: 138901
  Synthetic oligonucleotide

SEQ ID NO: 651462 - DNA, 58 bp, Artificial; identical to SEQ ID NO: 135011
  Synthetic oligonucleotide

SEQ ID NO: 651463 - DNA, 55 bp, Artificial; identical to SEQ ID NO: 137109
  Synthetic oligonucleotide

SEQ ID NO: 651464 - DNA, 55 bp, Artificial; identical to SEQ ID NO: 134324
  Synthetic oligonucleotide

SEQ ID NO: 651465 - DNA, 55 bp, Artificial; identical to SEQ ID NO: 139389
  Synthetic oligonucleotide

SEQ ID NO: 651466 - DNA, 55 bp, Artificial; identical to SEQ ID NO: 138384
  Synthetic oligonucleotide

SEQ ID NO: 651467 - DNA, 50 bp, Artificial; identical to SEQ ID NO: 136951
  Synthetic oligonucleotide

SEQ ID NO: 651468 - DNA, 56 bp, Artificial; identical to SEQ ID NO: 136623
  Synthetic oligonucleotide

SEQ ID NO: 651469 - DNA, 53 bp, Artificial; identical to SEQ ID NO: 134331
  Synthetic oligonucleotide

SEQ ID NO: 651470 - DNA, 60 bp, Artificial; identical to SEQ ID NO: 139128
  Synthetic oligonucleotide

SEQ ID NO: 651471 - DNA, 55 bp, Artificial; identical to SEQ ID NO: 134338
  Synthetic oligonucleotide

SEQ ID NO: 651472 - DNA, 51 bp, Artificial; identical to SEQ ID NO: 137828
  Synthetic oligonucleotide

SEQ ID NO: 651473 - DNA, 55 bp, Artificial; identical to SEQ ID NO: 133989
  Synthetic oligonucleotide

SEQ ID NO: 651474 - DNA, 55 bp, Artificial; identical to SEQ ID NO: 139387
  Synthetic oligonucleotide

SEQ ID NO: 651475 - DNA, 55 bp, Artificial; identical to SEQ ID NO: 134339
  Synthetic oligonucleotide

SEQ ID NO: 651476 - DNA, 60 bp, Artificial; identical to SEQ ID NO: 134989
  Synthetic oligonucleotide

SEQ ID NO: 651477 - DNA, 57 bp, Artificial; identical to SEQ ID NO: 134978
  Synthetic oligonucleotide

SEQ ID NO: 651478 - DNA, 58 bp, Artificial; identical to SEQ ID NO: 139150
  Synthetic oligonucleotide

SEQ ID NO: 651479 - DNA, 55 bp, Artificial; identical to SEQ ID NO: 137829
  Synthetic oligonucleotide

SEQ ID NO: 651480 - DNA, 55 bp, Artificial; identical to SEQ ID NO: 137033
  Synthetic oligonucleotide

SEQ ID NO: 651481 - DNA, 55 bp, Artificial; identical to SEQ ID NO: 134011
  Synthetic oligonucleotide

SEQ ID NO: 651482 - DNA, 55 bp, Artificial; identical to SEQ ID NO: 138891
  Synthetic oligonucleotide

SEQ ID NO: 651483 - DNA, 55 bp, Artificial; identical to SEQ ID NO: 134341
  Synthetic oligonucleotide

SEQ ID NO: 651484 - DNA, 55 bp, Artificial; identical to SEQ ID NO: 134342
  Synthetic oligonucleotide

SEQ ID NO: 651485 - DNA, 55 bp, Artificial; identical to SEQ ID NO: 139386
  Synthetic oligonucleotide

SEQ ID NO: 651486 - DNA, 55 bp, Artificial; identical to SEQ ID NO: 134343
  Synthetic oligonucleotide

SEQ ID NO: 651487 - DNA, 55 bp, Artificial; identical to SEQ ID NO: 134344
  Synthetic oligonucleotide

SEQ ID NO: 651488 - DNA, 53 bp, Artificial; identical to SEQ ID NO: 140340
  Synthetic oligonucleotide

SEQ ID NO: 651489 - DNA, 52 bp, Artificial; identical to SEQ ID NO: 140365
  Synthetic oligonucleotide

SEQ ID NO: 651490 - DNA, 55 bp, Artificial; identical to SEQ ID NO: 140669
  Synthetic oligonucleotide

SEQ ID NO: 651491 - DNA, 55 bp, Artificial; identical to SEQ ID NO: 140152
  Synthetic oligonucleotide

SEQ ID NO: 651492 - DNA, 54 bp, Artificial; identical to SEQ ID NO: 134347
  Synthetic oligonucleotide

SEQ ID NO: 651493 - DNA, 54 bp, Artificial; identical to SEQ ID NO: 140862
  Synthetic oligonucleotide

SEQ ID NO: 651494 - DNA, 55 bp, Artificial; identical to SEQ ID NO: 139218
  Synthetic oligonucleotide

SEQ ID NO: 651495 - DNA, 54 bp, Artificial; identical to SEQ ID NO: 139587
  Synthetic oligonucleotide

SEQ ID NO: 651496 - DNA, 55 bp, Artificial; identical to SEQ ID NO: 133370
  Synthetic oligonucleotide

SEQ ID NO: 651497 - DNA, 55 bp, Artificial; identical to SEQ ID NO: 138144
  Synthetic oligonucleotide

SEQ ID NO: 651498 - DNA, 53 bp, Artificial; identical to SEQ ID NO: 138888
  Synthetic oligonucleotide

SEQ ID NO: 651499 - DNA, 55 bp, Artificial; identical to SEQ ID NO: 136473
  Synthetic oligonucleotide

SEQ ID NO: 651500 - DNA, 50 bp, Artificial; identical to SEQ ID NO: 133882
  Synthetic oligonucleotide

SEQ ID NO: 651501 - DNA, 60 bp, Artificial; identical to SEQ ID NO: 138089
  Synthetic oligonucleotide

SEQ ID NO: 651502 - DNA, 55 bp, Artificial; identical to SEQ ID NO: 136475
  Synthetic oligonucleotide

SEQ ID NO: 651503 - DNA, 55 bp, Artificial; identical to SEQ ID NO: 136476
  Synthetic oligonucleotide

SEQ ID NO: 651504 - DNA, 60 bp, Artificial; identical to SEQ ID NO: 136589
  Synthetic oligonucleotide

SEQ ID NO: 651505 - DNA, 52 bp, Artificial; identical to SEQ ID NO: 139642
  Synthetic oligonucleotide

SEQ ID NO: 651506 - DNA, 55 bp, Artificial; identical to SEQ ID NO: 136477
  Synthetic oligonucleotide

SEQ ID NO: 651507 - DNA, 55 bp, Artificial; identical to SEQ ID NO: 137111
  Synthetic oligonucleotide

SEQ ID NO: 651508 - DNA, 55 bp, Artificial; identical to SEQ ID NO: 139385
  Synthetic oligonucleotide

SEQ ID NO: 651509 - DNA, 56 bp, Artificial; identical to SEQ ID NO: 134021
  Synthetic oligonucleotide

SEQ ID NO: 651510 - DNA, 55 bp, Artificial; identical to SEQ ID NO: 136776
  Synthetic oligonucleotide

SEQ ID NO: 651511 - DNA, 52 bp, Artificial; identical to SEQ ID NO: 137001
  Synthetic oligonucleotide

SEQ ID NO: 651512 - DNA, 55 bp, Artificial; identical to SEQ ID NO: 137112
  Synthetic oligonucleotide

SEQ ID NO: 651513 - DNA, 55 bp, Artificial; identical to SEQ ID NO: 140737
  Synthetic oligonucleotide

SEQ ID NO: 651514 - DNA, 51 bp, Artificial; identical to SEQ ID NO: 140976
  Synthetic oligonucleotide

SEQ ID NO: 651515 - DNA, 55 bp, Artificial; identical to SEQ ID NO: 136480
  Synthetic oligonucleotide

SEQ ID NO: 651516 - DNA, 51 bp, Artificial; identical to SEQ ID NO: 140070
  Synthetic oligonucleotide

SEQ ID NO: 651517 - DNA, 55 bp, Artificial; identical to SEQ ID NO: 140660
  Synthetic oligonucleotide

SEQ ID NO: 651518 - DNA, 55 bp, Artificial; identical to SEQ ID NO: 134300
  Synthetic oligonucleotide

SEQ ID NO: 651519 - DNA, 55 bp, Artificial; identical to SEQ ID NO: 140129
  Synthetic oligonucleotide

SEQ ID NO: 651520 - DNA, 55 bp, Artificial; identical to SEQ ID NO: 137834
  Synthetic oligonucleotide

SEQ ID NO: 651521 - DNA, 55 bp, Artificial; identical to SEQ ID NO: 136482
  Synthetic oligonucleotide

SEQ ID NO: 651522 - DNA, 55 bp, Artificial; identical to SEQ ID NO: 136484
  Synthetic oligonucleotide

SEQ ID NO: 651523 - DNA, 54 bp, Artificial; identical to SEQ ID NO: 139043
  Synthetic oligonucleotide

SEQ ID NO: 651524 - DNA, 55 bp, Artificial; identical to SEQ ID NO: 134303
  Synthetic oligonucleotide

SEQ ID NO: 651525 - DNA, 55 bp, Artificial; identical to SEQ ID NO: 137692
  Synthetic oligonucleotide

SEQ ID NO: 651526 - DNA, 58 bp, Artificial; identical to SEQ ID NO: 139228
  Synthetic oligonucleotide

SEQ ID NO: 651527 - DNA, 53 bp, Artificial; identical to SEQ ID NO: 133367
  Synthetic oligonucleotide

SEQ ID NO: 651528 - DNA, 55 bp, Artificial; identical to SEQ ID NO: 134304
  Synthetic oligonucleotide

SEQ ID NO: 651529 - DNA, 55 bp, Artificial; identical to SEQ ID NO: 137528
  Synthetic oligonucleotide

SEQ ID NO: 651530 - DNA, 55 bp, Artificial; identical to SEQ ID NO: 134307
  Synthetic oligonucleotide

SEQ ID NO: 651531 - DNA, 55 bp, Artificial; identical to SEQ ID NO: 137694
  Synthetic oligonucleotide

SEQ ID NO: 651532 - DNA, 51 bp, Artificial; identical to SEQ ID NO: 140715
  Synthetic oligonucleotide

SEQ ID NO: 651533 - DNA, 53 bp, Artificial; identical to SEQ ID NO: 134529
  Synthetic oligonucleotide

SEQ ID NO: 651534 - DNA, 54 bp, Artificial; identical to SEQ ID NO: 139381
  Synthetic oligonucleotide

SEQ ID NO: 651535 - DNA, 55 bp, Artificial; identical to SEQ ID NO: 137836
  Synthetic oligonucleotide

SEQ ID NO: 651536 - DNA, 53 bp, Artificial; identical to SEQ ID NO: 133703
  Synthetic oligonucleotide

SEQ ID NO: 651537 - DNA, 55 bp, Artificial; identical to SEQ ID NO: 138166
  Synthetic oligonucleotide

SEQ ID NO: 651538 - DNA, 55 bp, Artificial; identical to SEQ ID NO: 138923
  Synthetic oligonucleotide

SEQ ID NO: 651539 - DNA, 55 bp, Artificial; identical to SEQ ID NO: 138922
  Synthetic oligonucleotide

SEQ ID NO: 651540 - DNA, 60 bp, Artificial; identical to SEQ ID NO: 139671
  Synthetic oligonucleotide

SEQ ID NO: 651541 - DNA, 53 bp, Artificial; identical to SEQ ID NO: 133704
  Synthetic oligonucleotide

SEQ ID NO: 651542 - DNA, 55 bp, Artificial; identical to SEQ ID NO: 137891
  Synthetic oligonucleotide

SEQ ID NO: 651543 - DNA, 55 bp, Artificial; identical to SEQ ID NO: 138920
  Synthetic oligonucleotide

SEQ ID NO: 651544 - DNA, 55 bp, Artificial; identical to SEQ ID NO: 133531
  Synthetic oligonucleotide

SEQ ID NO: 651545 - DNA, 55 bp, Artificial; identical to SEQ ID NO: 139333
  Synthetic oligonucleotide

SEQ ID NO: 651546 - DNA, 54 bp, Artificial; identical to SEQ ID NO: 134314
  Synthetic oligonucleotide

SEQ ID NO: 651547 - DNA, 55 bp, Artificial; identical to SEQ ID NO: 134316
  Synthetic oligonucleotide

SEQ ID NO: 651548 - DNA, 55 bp, Artificial; identical to SEQ ID NO: 140873
  Synthetic oligonucleotide

SEQ ID NO: 651549 - DNA, 54 bp, Artificial; identical to SEQ ID NO: 137539
  Synthetic oligonucleotide

SEQ ID NO: 651550 - DNA, 55 bp, Artificial; identical to SEQ ID NO: 139332
  Synthetic oligonucleotide

SEQ ID NO: 651551 - DNA, 55 bp, Artificial; identical to SEQ ID NO: 133949
  Synthetic oligonucleotide

SEQ ID NO: 651552 - DNA, 55 bp, Artificial; identical to SEQ ID NO: 141080
  Synthetic oligonucleotide

SEQ ID NO: 651553 - DNA, 55 bp, Artificial; identical to SEQ ID NO: 141078
  Synthetic oligonucleotide

SEQ ID NO: 651554 - DNA, 55 bp, Artificial; identical to SEQ ID NO: 135900
  Synthetic oligonucleotide

SEQ ID NO: 651555 - DNA, 55 bp, Artificial; identical to SEQ ID NO: 135899
  Synthetic oligonucleotide

SEQ ID NO: 651556 - DNA, 51 bp, Artificial; identical to SEQ ID NO: 135898
  Synthetic oligonucleotide

SEQ ID NO: 651557 - DNA, 55 bp, Artificial; identical to SEQ ID NO: 137696
  Synthetic oligonucleotide

SEQ ID NO: 651558 - DNA, 55 bp, Artificial; identical to SEQ ID NO: 138918
  Synthetic oligonucleotide

SEQ ID NO: 651559 - DNA, 53 bp, Artificial; identical to SEQ ID NO: 140789
  Synthetic oligonucleotide

SEQ ID NO: 651560 - DNA, 53 bp, Artificial; identical to SEQ ID NO: 138916
  Synthetic oligonucleotide

SEQ ID NO: 651561 - DNA, 52 bp, Artificial; identical to SEQ ID NO: 138915
  Synthetic oligonucleotide

SEQ ID NO: 651562 - DNA, 55 bp, Artificial; identical to SEQ ID NO: 141082
  Synthetic oligonucleotide

SEQ ID NO: 651563 - DNA, 50 bp, Artificial; identical to SEQ ID NO: 133452
  Synthetic oligonucleotide

SEQ ID NO: 651564 - DNA, 58 bp, Artificial; identical to SEQ ID NO: 134911
  Synthetic oligonucleotide

SEQ ID NO: 651565 - DNA, 55 bp, Artificial; identical to SEQ ID NO: 136486
  Synthetic oligonucleotide

SEQ ID NO: 651566 - DNA, 52 bp, Artificial; identical to SEQ ID NO: 134639
  Synthetic oligonucleotide

SEQ ID NO: 651567 - DNA, 53 bp, Artificial; identical to SEQ ID NO: 137422
  Synthetic oligonucleotide

SEQ ID NO: 651568 - DNA, 55 bp, Artificial; identical to SEQ ID NO: 137901
  Synthetic oligonucleotide

SEQ ID NO: 651569 - DNA, 55 bp, Artificial; identical to SEQ ID NO: 135886
  Synthetic oligonucleotide

SEQ ID NO: 651570 - DNA, 55 bp, Artificial; identical to SEQ ID NO: 135921
  Synthetic oligonucleotide

SEQ ID NO: 651571 - DNA, 55 bp, Artificial; identical to SEQ ID NO: 137902
  Synthetic oligonucleotide

SEQ ID NO: 651572 - DNA, 55 bp, Artificial; identical to SEQ ID NO: 135920
  Synthetic oligonucleotide

SEQ ID NO: 651573 - DNA, 55 bp, Artificial; identical to SEQ ID NO: 136779
  Synthetic oligonucleotide

SEQ ID NO: 651574 - DNA, 55 bp, Artificial; identical to SEQ ID NO: 138188
  Synthetic oligonucleotide

SEQ ID NO: 651575 - DNA, 55 bp, Artificial; identical to SEQ ID NO: 138249
  Synthetic oligonucleotide

SEQ ID NO: 651576 - DNA, 54 bp, Artificial; identical to SEQ ID NO: 137119
  Synthetic oligonucleotide

SEQ ID NO: 651577 - DNA, 52 bp, Artificial; identical to SEQ ID NO: 136487
  Synthetic oligonucleotide

SEQ ID NO: 651578 - DNA, 50 bp, Artificial; identical to SEQ ID NO: 136523
  Synthetic oligonucleotide

SEQ ID NO: 651579 - DNA, 55 bp, Artificial; identical to SEQ ID NO: 135914
  Synthetic oligonucleotide

SEQ ID NO: 651580 - DNA, 54 bp, Artificial; identical to SEQ ID NO: 135544
  Synthetic oligonucleotide

SEQ ID NO: 651581 - DNA, 55 bp, Artificial; identical to SEQ ID NO: 137344
  Synthetic oligonucleotide

SEQ ID NO: 651582 - DNA, 55 bp, Artificial; identical to SEQ ID NO: 135909
  Synthetic oligonucleotide

SEQ ID NO: 651583 - DNA, 55 bp, Artificial; identical to SEQ ID NO: 139324
  Synthetic oligonucleotide

SEQ ID NO: 651584 - DNA, 55 bp, Artificial; identical to SEQ ID NO: 135906
  Synthetic oligonucleotide

SEQ ID NO: 651585 - DNA, 55 bp, Artificial; identical to SEQ ID NO: 133950
  Synthetic oligonucleotide

SEQ ID NO: 651586 - DNA, 55 bp, Artificial; identical to SEQ ID NO: 135904
  Synthetic oligonucleotide

SEQ ID NO: 651587 - DNA, 55 bp, Artificial; identical to SEQ ID NO: 138909
  Synthetic oligonucleotide

SEQ ID NO: 651588 - DNA, 55 bp, Artificial; identical to SEQ ID NO: 135850
  Synthetic oligonucleotide

SEQ ID NO: 651589 - DNA, 56 bp, Artificial; identical to SEQ ID NO: 135534
  Synthetic oligonucleotide

SEQ ID NO: 651590 - DNA, 55 bp, Artificial; identical to SEQ ID NO: 137904
  Synthetic oligonucleotide

SEQ ID NO: 651591 - DNA, 55 bp, Artificial; identical to SEQ ID NO: 135856
  Synthetic oligonucleotide

SEQ ID NO: 651592 - DNA, 54 bp, Artificial; identical to SEQ ID NO: 135859
  Synthetic oligonucleotide

SEQ ID NO: 651593 - DNA, 55 bp, Artificial; identical to SEQ ID NO: 136780
  Synthetic oligonucleotide

SEQ ID NO: 651594 - DNA, 53 bp, Artificial; identical to SEQ ID NO: 136878
  Synthetic oligonucleotide

SEQ ID NO: 651595 - DNA, 55 bp, Artificial; identical to SEQ ID NO: 138908
  Synthetic oligonucleotide

SEQ ID NO: 651596 - DNA, 51 bp, Artificial; identical to SEQ ID NO: 140380
  Synthetic oligonucleotide

SEQ ID NO: 651597 - DNA, 59 bp, Artificial; identical to SEQ ID NO: 135523
  Synthetic oligonucleotide

SEQ ID NO: 651598 - DNA, 54 bp, Artificial; identical to SEQ ID NO: 138907
  Synthetic oligonucleotide

SEQ ID NO: 651599 - DNA, 55 bp, Artificial; identical to SEQ ID NO: 137908
  Synthetic oligonucleotide

SEQ ID NO: 651600 - DNA, 55 bp, Artificial; identical to SEQ ID NO: 135885
  Synthetic oligonucleotide

SEQ ID NO: 651601 - DNA, 54 bp, Artificial; identical to SEQ ID NO: 135883
  Synthetic oligonucleotide

SEQ ID NO: 651602 - DNA, 55 bp, Artificial; identical to SEQ ID NO: 138242
  Synthetic oligonucleotide

SEQ ID NO: 651603 - DNA, 55 bp, Artificial; identical to SEQ ID NO: 135878
  Synthetic oligonucleotide

SEQ ID NO: 651604 - DNA, 55 bp, Artificial; identical to SEQ ID NO: 135876
  Synthetic oligonucleotide

SEQ ID NO: 651605 - DNA, 51 bp, Artificial; identical to SEQ ID NO: 135875
  Synthetic oligonucleotide

SEQ ID NO: 651606 - DNA, 55 bp, Artificial; identical to SEQ ID NO: 138856
  Synthetic oligonucleotide

SEQ ID NO: 651607 - DNA, 55 bp, Artificial; identical to SEQ ID NO: 135872
  Synthetic oligonucleotide

SEQ ID NO: 651608 - DNA, 54 bp, Artificial; identical to SEQ ID NO: 135870
  Synthetic oligonucleotide

SEQ ID NO: 651609 - DNA, 55 bp, Artificial; identical to SEQ ID NO: 135869
  Synthetic oligonucleotide

SEQ ID NO: 651610 - DNA, 55 bp, Artificial; identical to SEQ ID NO: 135867
  Synthetic oligonucleotide

SEQ ID NO: 651611 - DNA, 50 bp, Artificial; identical to SEQ ID NO: 136628
  Synthetic oligonucleotide

SEQ ID NO: 651612 - DNA, 55 bp, Artificial; identical to SEQ ID NO: 138855
  Synthetic oligonucleotide

SEQ ID NO: 651613 - DNA, 55 bp, Artificial; identical to SEQ ID NO: 135976
  Synthetic oligonucleotide

SEQ ID NO: 651614 - DNA, 55 bp, Artificial; identical to SEQ ID NO: 136782
  Synthetic oligonucleotide

SEQ ID NO: 651615 - DNA, 53 bp, Artificial; identical to SEQ ID NO: 135974
  Synthetic oligonucleotide

SEQ ID NO: 651616 - DNA, 55 bp, Artificial; identical to SEQ ID NO: 135972
  Synthetic oligonucleotide

SEQ ID NO: 651617 - DNA, 51 bp, Artificial; identical to SEQ ID NO: 135970
  Synthetic oligonucleotide

SEQ ID NO: 651618 - DNA, 52 bp, Artificial; identical to SEQ ID NO: 138377
  Synthetic oligonucleotide

SEQ ID NO: 651619 - DNA, 55 bp, Artificial; identical to SEQ ID NO: 138853
  Synthetic oligonucleotide

SEQ ID NO: 651620 - DNA, 55 bp, Artificial; identical to SEQ ID NO: 138852
  Synthetic oligonucleotide

SEQ ID NO: 651621 - DNA, 55 bp, Artificial; identical to SEQ ID NO: 135964
  Synthetic oligonucleotide

SEQ ID NO: 651622 - DNA, 55 bp, Artificial; identical to SEQ ID NO: 137339
  Synthetic oligonucleotide

SEQ ID NO: 651623 - DNA, 55 bp, Artificial; identical to SEQ ID NO: 137170
  Synthetic oligonucleotide

SEQ ID NO: 651624 - DNA, 55 bp, Artificial; identical to SEQ ID NO: 135994
  Synthetic oligonucleotide

SEQ ID NO: 651625 - DNA, 55 bp, Artificial; identical to SEQ ID NO: 135993
  Synthetic oligonucleotide

SEQ ID NO: 651626 - DNA, 55 bp, Artificial; identical to SEQ ID NO: 135992
  Synthetic oligonucleotide

SEQ ID NO: 651627 - DNA, 57 bp, Artificial; identical to SEQ ID NO: 135678
  Synthetic oligonucleotide

SEQ ID NO: 651628 - DNA, 51 bp, Artificial; identical to SEQ ID NO: 138164
  Synthetic oligonucleotide

SEQ ID NO: 651629 - DNA, 55 bp, Artificial; identical to SEQ ID NO: 137865
  Synthetic oligonucleotide

SEQ ID NO: 651630 - DNA, 53 bp, Artificial; identical to SEQ ID NO: 138199
  Synthetic oligonucleotide

SEQ ID NO: 651631 - DNA, 53 bp, Artificial; identical to SEQ ID NO: 135984
  Synthetic oligonucleotide

SEQ ID NO: 651632 - DNA, 55 bp, Artificial; identical to SEQ ID NO: 141040
  Synthetic oligonucleotide

SEQ ID NO: 651633 - DNA, 52 bp, Artificial; identical to SEQ ID NO: 134010
  Synthetic oligonucleotide

SEQ ID NO: 651634 - DNA, 51 bp, Artificial; identical to SEQ ID NO: 134714
  Synthetic oligonucleotide

SEQ ID NO: 651635 - DNA, 53 bp, Artificial; identical to SEQ ID NO: 138851
  Synthetic oligonucleotide

SEQ ID NO: 651636 - DNA, 55 bp, Artificial; identical to SEQ ID NO: 133954
  Synthetic oligonucleotide

SEQ ID NO: 651637 - DNA, 55 bp, Artificial; identical to SEQ ID NO: 136449
  Synthetic oligonucleotide

SEQ ID NO: 651638 - DNA, 55 bp, Artificial; identical to SEQ ID NO: 140924
  Synthetic oligonucleotide

SEQ ID NO: 651639 - DNA, 55 bp, Artificial; identical to SEQ ID NO: 138847
  Synthetic oligonucleotide

SEQ ID NO: 651640 - DNA, 54 bp, Artificial; identical to SEQ ID NO: 135445
  Synthetic oligonucleotide

SEQ ID NO: 651641 - DNA, 54 bp, Artificial; identical to SEQ ID NO: 133534
  Synthetic oligonucleotide

SEQ ID NO: 651642 - DNA, 55 bp, Artificial; identical to SEQ ID NO: 140935
  Synthetic oligonucleotide

SEQ ID NO: 651643 - DNA, 55 bp, Artificial; identical to SEQ ID NO: 135937
  Synthetic oligonucleotide

SEQ ID NO: 651644 - DNA, 55 bp, Artificial; identical to SEQ ID NO: 137167
  Synthetic oligonucleotide

SEQ ID NO: 651645 - DNA, 55 bp, Artificial; identical to SEQ ID NO: 138846
  Synthetic oligonucleotide

SEQ ID NO: 651646 - DNA, 55 bp, Artificial; identical to SEQ ID NO: 138844
  Synthetic oligonucleotide

SEQ ID NO: 651647 - DNA, 60 bp, Artificial; identical to SEQ ID NO: 135434
  Synthetic oligonucleotide

SEQ ID NO: 651648 - DNA, 55 bp, Artificial; identical to SEQ ID NO: 140710
  Synthetic oligonucleotide

SEQ ID NO: 651649 - DNA, 50 bp, Artificial; identical to SEQ ID NO: 138226
  Synthetic oligonucleotide

SEQ ID NO: 651650 - DNA, 54 bp, Artificial; identical to SEQ ID NO: 133956
  Synthetic oligonucleotide

SEQ ID NO: 651651 - DNA, 55 bp, Artificial; identical to SEQ ID NO: 136450
  Synthetic oligonucleotide

SEQ ID NO: 651652 - DNA, 60 bp, Artificial; identical to SEQ ID NO: 135423
  Synthetic oligonucleotide

SEQ ID NO: 651653 - DNA, 55 bp, Artificial; identical to SEQ ID NO: 135924
  Synthetic oligonucleotide

SEQ ID NO: 651654 - DNA, 58 bp, Artificial; identical to SEQ ID NO: 136959
  Synthetic oligonucleotide

SEQ ID NO: 651655 - DNA, 55 bp, Artificial; identical to SEQ ID NO: 140034
  Synthetic oligonucleotide

SEQ ID NO: 651656 - DNA, 52 bp, Artificial; identical to SEQ ID NO: 139101
  Synthetic oligonucleotide

SEQ ID NO: 651657 - DNA, 55 bp, Artificial; identical to SEQ ID NO: 138840
  Synthetic oligonucleotide

SEQ ID NO: 651658 - DNA, 55 bp, Artificial; identical to SEQ ID NO: 136787
  Synthetic oligonucleotide

SEQ ID NO: 651659 - DNA, 55 bp, Artificial; identical to SEQ ID NO: 135960
  Synthetic oligonucleotide

SEQ ID NO: 651660 - DNA, 55 bp, Artificial; identical to SEQ ID NO: 137871
  Synthetic oligonucleotide

SEQ ID NO: 651661 - DNA, 55 bp, Artificial; identical to SEQ ID NO: 140946
  Synthetic oligonucleotide

SEQ ID NO: 651662 - DNA, 54 bp, Artificial; identical to SEQ ID NO: 140706
  Synthetic oligonucleotide

SEQ ID NO: 651663 - DNA, 55 bp, Artificial; identical to SEQ ID NO: 137550
  Synthetic oligonucleotide

SEQ ID NO: 651664 - DNA, 55 bp, Artificial; identical to SEQ ID NO: 140705
  Synthetic oligonucleotide

SEQ ID NO: 651665 - DNA, 51 bp, Artificial; identical to SEQ ID NO: 134808
  Synthetic oligonucleotide

SEQ ID NO: 651666 - DNA, 53 bp, Artificial; identical to SEQ ID NO: 139586
  Synthetic oligonucleotide

SEQ ID NO: 651667 - DNA, 55 bp, Artificial; identical to SEQ ID NO: 135955
  Synthetic oligonucleotide

SEQ ID NO: 651668 - DNA, 55 bp, Artificial; identical to SEQ ID NO: 136788
  Synthetic oligonucleotide

SEQ ID NO: 651669 - DNA, 55 bp, Artificial; identical to SEQ ID NO: 135952
  Synthetic oligonucleotide

SEQ ID NO: 651670 - DNA, 55 bp, Artificial; identical to SEQ ID NO: 135948
  Synthetic oligonucleotide

SEQ ID NO: 651671 - DNA, 55 bp, Artificial; identical to SEQ ID NO: 135947
  Synthetic oligonucleotide

SEQ ID NO: 651672 - DNA, 57 bp, Artificial; identical to SEQ ID NO: 135401
  Synthetic oligonucleotide

SEQ ID NO: 651673 - DNA, 55 bp, Artificial; identical to SEQ ID NO: 139317
  Synthetic oligonucleotide

SEQ ID NO: 651674 - DNA, 55 bp, Artificial; identical to SEQ ID NO: 140704
  Synthetic oligonucleotide

SEQ ID NO: 651675 - DNA, 55 bp, Artificial; identical to SEQ ID NO: 135941
  Synthetic oligonucleotide

SEQ ID NO: 651676 - DNA, 51 bp, Artificial; identical to SEQ ID NO: 139708
  Synthetic oligonucleotide

SEQ ID NO: 651677 - DNA, 55 bp, Artificial; identical to SEQ ID NO: 139312
  Synthetic oligonucleotide

SEQ ID NO: 651678 - DNA, 53 bp, Artificial; identical to SEQ ID NO: 140811
  Synthetic oligonucleotide

SEQ ID NO: 651679 - DNA, 55 bp, Artificial; identical to SEQ ID NO: 138838
  Synthetic oligonucleotide

SEQ ID NO: 651680 - DNA, 51 bp, Artificial; identical to SEQ ID NO: 139140
  Synthetic oligonucleotide

SEQ ID NO: 651681 - DNA, 55 bp, Artificial; identical to SEQ ID NO: 135754
  Synthetic oligonucleotide

SEQ ID NO: 651682 - DNA, 55 bp, Artificial; identical to SEQ ID NO: 133537
  Synthetic oligonucleotide

SEQ ID NO: 651683 - DNA, 60 bp, Artificial; identical to SEQ ID NO: 135345
  Synthetic oligonucleotide

SEQ ID NO: 651684 - DNA, 55 bp, Artificial; identical to SEQ ID NO: 137877
  Synthetic oligonucleotide

SEQ ID NO: 651685 - DNA, 55 bp, Artificial; identical to SEQ ID NO: 137878
  Synthetic oligonucleotide

SEQ ID NO: 651686 - DNA, 55 bp, Artificial; identical to SEQ ID NO: 137363
  Synthetic oligonucleotide

SEQ ID NO: 651687 - DNA, 55 bp, Artificial; identical to SEQ ID NO: 139354
  Synthetic oligonucleotide

SEQ ID NO: 651688 - DNA, 55 bp, Artificial; identical to SEQ ID NO: 133961
  Synthetic oligonucleotide

SEQ ID NO: 651689 - DNA, 60 bp, Artificial; identical to SEQ ID NO: 135323
  Synthetic oligonucleotide

SEQ ID NO: 651690 - DNA, 49 bp, Artificial; identical to SEQ ID NO: 141077
  Synthetic oligonucleotide

SEQ ID NO: 651691 - DNA, 52 bp, Artificial; identical to SEQ ID NO: 140910
  Synthetic oligonucleotide

SEQ ID NO: 651692 - DNA, 56 bp, Artificial; identical to SEQ ID NO: 138655
  Synthetic oligonucleotide

SEQ ID NO: 651693 - DNA, 55 bp, Artificial; identical to SEQ ID NO: 137026
  Synthetic oligonucleotide

SEQ ID NO: 651694 - DNA, 55 bp, Artificial; identical to SEQ ID NO: 140701
  Synthetic oligonucleotide

SEQ ID NO: 651695 - DNA, 55 bp, Artificial; identical to SEQ ID NO: 135764
  Synthetic oligonucleotide

SEQ ID NO: 651696 - DNA, 55 bp, Artificial; identical to SEQ ID NO: 139346
  Synthetic oligonucleotide

SEQ ID NO: 651697 - DNA, 55 bp, Artificial; identical to SEQ ID NO: 139345
  Synthetic oligonucleotide

SEQ ID NO: 651698 - DNA, 58 bp, Artificial; identical to SEQ ID NO: 139738
  Synthetic oligonucleotide

SEQ ID NO: 651699 - DNA, 54 bp, Artificial; identical to SEQ ID NO: 138878
  Synthetic oligonucleotide

SEQ ID NO: 651700 - DNA, 47 bp, Artificial; identical to SEQ ID NO: 138877
  Synthetic oligonucleotide

SEQ ID NO: 651701 - DNA, 55 bp, Artificial; identical to SEQ ID NO: 140032
  Synthetic oligonucleotide

SEQ ID NO: 651702 - DNA, 53 bp, Artificial; identical to SEQ ID NO: 139344
  Synthetic oligonucleotide

SEQ ID NO: 651703 - DNA, 55 bp, Artificial; identical to SEQ ID NO: 138876
  Synthetic oligonucleotide

SEQ ID NO: 651704 - DNA, 60 bp, Artificial; identical to SEQ ID NO: 135301
  Synthetic oligonucleotide

SEQ ID NO: 651705 - DNA, 51 bp, Artificial; identical to SEQ ID NO: 139709
  Synthetic oligonucleotide

SEQ ID NO: 651706 - DNA, 59 bp, Artificial; identical to SEQ ID NO: 135290
  Synthetic oligonucleotide

SEQ ID NO: 651707 - DNA, 55 bp, Artificial; identical to SEQ ID NO: 135772
  Synthetic oligonucleotide

SEQ ID NO: 651708 - DNA, 53 bp, Artificial; identical to SEQ ID NO: 137163
  Synthetic oligonucleotide

SEQ ID NO: 651709 - DNA, 55 bp, Artificial; identical to SEQ ID NO: 141066
  Synthetic oligonucleotide

SEQ ID NO: 651710 - DNA, 55 bp, Artificial; identical to SEQ ID NO: 139341
  Synthetic oligonucleotide

SEQ ID NO: 651711 - DNA, 55 bp, Artificial; identical to SEQ ID NO: 135778
  Synthetic oligonucleotide

SEQ ID NO: 651712 - DNA, 55 bp, Artificial; identical to SEQ ID NO: 137884
  Synthetic oligonucleotide

SEQ ID NO: 651713 - DNA, 55 bp, Artificial; identical to SEQ ID NO: 135719
  Synthetic oligonucleotide

SEQ ID NO: 651714 - DNA, 55 bp, Artificial; identical to SEQ ID NO: 137557
  Synthetic oligonucleotide

SEQ ID NO: 651715 - DNA, 55 bp, Artificial; identical to SEQ ID NO: 140126
  Synthetic oligonucleotide

SEQ ID NO: 651716 - DNA, 55 bp, Artificial; identical to SEQ ID NO: 138874
  Synthetic oligonucleotide

SEQ ID NO: 651717 - DNA, 55 bp, Artificial; identical to SEQ ID NO: 135721
  Synthetic oligonucleotide

SEQ ID NO: 651718 - DNA, 55 bp, Artificial; identical to SEQ ID NO: 133964
  Synthetic oligonucleotide

SEQ ID NO: 651719 - DNA, 55 bp, Artificial; identical to SEQ ID NO: 140888
  Synthetic oligonucleotide

SEQ ID NO: 651720 - DNA, 55 bp, Artificial; identical to SEQ ID NO: 136464
  Synthetic oligonucleotide

SEQ ID NO: 651721 - DNA, 55 bp, Artificial; identical to SEQ ID NO: 135729
  Synthetic oligonucleotide

SEQ ID NO: 651722 - DNA, 54 bp, Artificial; identical to SEQ ID NO: 139568
  Synthetic oligonucleotide

SEQ ID NO: 651723 - DNA, 55 bp, Artificial; identical to SEQ ID NO: 135730
  Synthetic oligonucleotide

SEQ ID NO: 651724 - DNA, 60 bp, Artificial; identical to SEQ ID NO: 140106
  Synthetic oligonucleotide

SEQ ID NO: 651725 - DNA, 55 bp, Artificial; identical to SEQ ID NO: 135738
  Synthetic oligonucleotide

SEQ ID NO: 651726 - DNA, 55 bp, Artificial; identical to SEQ ID NO: 135740
  Synthetic oligonucleotide

SEQ ID NO: 651727 - DNA, 55 bp, Artificial; identical to SEQ ID NO: 135741
  Synthetic oligonucleotide

SEQ ID NO: 651728 - DNA, 55 bp, Artificial; identical to SEQ ID NO: 135742
  Synthetic oligonucleotide

SEQ ID NO: 651729 - DNA, 55 bp, Artificial; identical to SEQ ID NO: 135743
  Synthetic oligonucleotide

SEQ ID NO: 651730 - DNA, 55 bp, Artificial; identical to SEQ ID NO: 135745
  Synthetic oligonucleotide

SEQ ID NO: 651731 - DNA, 55 bp, Artificial; identical to SEQ ID NO: 135747
  Synthetic oligonucleotide

SEQ ID NO: 651732 - DNA, 53 bp, Artificial; identical to SEQ ID NO: 134525
  Synthetic oligonucleotide

SEQ ID NO: 651733 - DNA, 55 bp, Artificial; identical to SEQ ID NO: 133539
  Synthetic oligonucleotide

SEQ ID NO: 651734 - DNA, 55 bp, Artificial; identical to SEQ ID NO: 133540
  Synthetic oligonucleotide

SEQ ID NO: 651735 - DNA, 55 bp, Artificial; identical to SEQ ID NO: 135817
  Synthetic oligonucleotide

SEQ ID NO: 651736 - DNA, 60 bp, Artificial; identical to SEQ ID NO: 135268
  Synthetic oligonucleotide

SEQ ID NO: 651737 - DNA, 55 bp, Artificial; identical to SEQ ID NO: 133541
  Synthetic oligonucleotide

SEQ ID NO: 651738 - DNA, 55 bp, Artificial; identical to SEQ ID NO: 135826
  Synthetic oligonucleotide

SEQ ID NO: 651739 - DNA, 58 bp, Artificial; identical to SEQ ID NO: 135245
  Synthetic oligonucleotide

SEQ ID NO: 651740 - DNA, 55 bp, Artificial; identical to SEQ ID NO: 137886
  Synthetic oligonucleotide

SEQ ID NO: 651741 - DNA, 60 bp, Artificial; identical to SEQ ID NO: 139028
  Synthetic oligonucleotide

SEQ ID NO: 651742 - DNA, 55 bp, Artificial; identical to SEQ ID NO: 133967
  Synthetic oligonucleotide

SEQ ID NO: 651743 - DNA, 55 bp, Artificial; identical to SEQ ID NO: 135833
  Synthetic oligonucleotide

SEQ ID NO: 651744 - DNA, 56 bp, Artificial; identical to SEQ ID NO: 138092
  Synthetic oligonucleotide

SEQ ID NO: 651745 - DNA, 55 bp, Artificial; identical to SEQ ID NO: 135841
  Synthetic oligonucleotide

SEQ ID NO: 651746 - DNA, 55 bp, Artificial; identical to SEQ ID NO: 135842
  Synthetic oligonucleotide

SEQ ID NO: 651747 - DNA, 55 bp, Artificial; identical to SEQ ID NO: 135843
  Synthetic oligonucleotide

SEQ ID NO: 651748 - DNA, 55 bp, Artificial; identical to SEQ ID NO: 133543
  Synthetic oligonucleotide

SEQ ID NO: 651749 - DNA, 55 bp, Artificial; identical to SEQ ID NO: 138406
  Synthetic oligonucleotide

SEQ ID NO: 651750 - DNA, 52 bp, Artificial; identical to SEQ ID NO: 137278
  Synthetic oligonucleotide

SEQ ID NO: 651751 - DNA, 55 bp, Artificial; identical to SEQ ID NO: 135785
  Synthetic oligonucleotide

SEQ ID NO: 651752 - DNA, 55 bp, Artificial; identical to SEQ ID NO: 133300
  Synthetic oligonucleotide

SEQ ID NO: 651753 - DNA, 55 bp, Artificial; identical to SEQ ID NO: 135788
  Synthetic oligonucleotide

SEQ ID NO: 651754 - DNA, 55 bp, Artificial; identical to SEQ ID NO: 135789
  Synthetic oligonucleotide

SEQ ID NO: 651755 - DNA, 54 bp, Artificial; identical to SEQ ID NO: 140332
  Synthetic oligonucleotide

SEQ ID NO: 651756 - DNA, 55 bp, Artificial; identical to SEQ ID NO: 141064
  Synthetic oligonucleotide

SEQ ID NO: 651757 - DNA, 55 bp, Artificial; identical to SEQ ID NO: 140695
  Synthetic oligonucleotide

SEQ ID NO: 651758 - DNA, 55 bp, Artificial; identical to SEQ ID NO: 133544
  Synthetic oligonucleotide

SEQ ID NO: 651759 - DNA, 55 bp, Artificial; identical to SEQ ID NO: 135805
  Synthetic oligonucleotide

SEQ ID NO: 651760 - DNA, 55 bp, Artificial; identical to SEQ ID NO: 135806
  Synthetic oligonucleotide

SEQ ID NO: 651761 - DNA, 54 bp, Artificial; identical to SEQ ID NO: 137930
  Synthetic oligonucleotide

SEQ ID NO: 651762 - DNA, 55 bp, Artificial; identical to SEQ ID NO: 135808
  Synthetic oligonucleotide

SEQ ID NO: 651763 - DNA, 55 bp, Artificial; identical to SEQ ID NO: 135809
  Synthetic oligonucleotide

SEQ ID NO: 651764 - DNA, 55 bp, Artificial; identical to SEQ ID NO: 139335
  Synthetic oligonucleotide

SEQ ID NO: 651765 - DNA, 55 bp, Artificial; identical to SEQ ID NO: 134015
  Synthetic oligonucleotide

SEQ ID NO: 651766 - DNA, 55 bp, Artificial; identical to SEQ ID NO: 135814
  Synthetic oligonucleotide

SEQ ID NO: 651767 - DNA, 55 bp, Artificial; identical to SEQ ID NO: 135810
  Synthetic oligonucleotide

SEQ ID NO: 651768 - DNA, 55 bp, Artificial; identical to SEQ ID NO: 135800
  Synthetic oligonucleotide

SEQ ID NO: 651769 - DNA, 55 bp, Artificial; identical to SEQ ID NO: 139334
  Synthetic oligonucleotide

SEQ ID NO: 651770 - DNA, 55 bp, Artificial; identical to SEQ ID NO: 138120
  Synthetic oligonucleotide

SEQ ID NO: 651771 - DNA, 55 bp, Artificial; identical to SEQ ID NO: 133970
  Synthetic oligonucleotide

SEQ ID NO: 651772 - DNA, 52 bp, Artificial; identical to SEQ ID NO: 137755
  Synthetic oligonucleotide

SEQ ID NO: 651773 - DNA, 55 bp, Artificial; identical to SEQ ID NO: 140693
  Synthetic oligonucleotide

SEQ ID NO: 651774 - DNA, 55 bp, Artificial; identical to SEQ ID NO: 137159
  Synthetic oligonucleotide

SEQ ID NO: 651775 - DNA, 55 bp, Artificial; identical to SEQ ID NO: 140692
  Synthetic oligonucleotide

SEQ ID NO: 651776 - DNA, 54 bp, Artificial; identical to SEQ ID NO: 134460
  Synthetic oligonucleotide

SEQ ID NO: 651777 - DNA, 55 bp, Artificial; identical to SEQ ID NO: 141067
  Synthetic oligonucleotide

SEQ ID NO: 651778 - DNA, 55 bp, Artificial; identical to SEQ ID NO: 138121
  Synthetic oligonucleotide

SEQ ID NO: 651779 - DNA, 55 bp, Artificial; identical to SEQ ID NO: 135827
  Synthetic oligonucleotide

SEQ ID NO: 651780 - DNA, 55 bp, Artificial; identical to SEQ ID NO: 135744
  Synthetic oligonucleotide

SEQ ID NO: 651781 - DNA, 53 bp, Artificial; identical to SEQ ID NO: 135782
  Synthetic oligonucleotide

SEQ ID NO: 651782 - DNA, 55 bp, Artificial; identical to SEQ ID NO: 135777
  Synthetic oligonucleotide

SEQ ID NO: 651783 - DNA, 55 bp, Artificial; identical to SEQ ID NO: 140889
  Synthetic oligonucleotide

SEQ ID NO: 651784 - DNA, 55 bp, Artificial; identical to SEQ ID NO: 138869
  Synthetic oligonucleotide

SEQ ID NO: 651785 - DNA, 55 bp, Artificial; identical to SEQ ID NO: 140956
  Synthetic oligonucleotide

SEQ ID NO: 651786 - DNA, 55 bp, Artificial; identical to SEQ ID NO: 136200
  Synthetic oligonucleotide

SEQ ID NO: 651787 - DNA, 55 bp, Artificial; identical to SEQ ID NO: 136198
  Synthetic oligonucleotide

SEQ ID NO: 651788 - DNA, 55 bp, Artificial; identical to SEQ ID NO: 138124
  Synthetic oligonucleotide

SEQ ID NO: 651789 - DNA, 55 bp, Artificial; identical to SEQ ID NO: 138125
  Synthetic oligonucleotide

SEQ ID NO: 651790 - DNA, 55 bp, Artificial; identical to SEQ ID NO: 136195
  Synthetic oligonucleotide

SEQ ID NO: 651791 - DNA, 55 bp, Artificial; identical to SEQ ID NO: 136192
  Synthetic oligonucleotide

SEQ ID NO: 651792 - DNA, 55 bp, Artificial; identical to SEQ ID NO: 140382
  Synthetic oligonucleotide

SEQ ID NO: 651793 - DNA, 55 bp, Artificial; identical to SEQ ID NO: 137029
  Synthetic oligonucleotide

SEQ ID NO: 651794 - DNA, 54 bp, Artificial; identical to SEQ ID NO: 134436
  Synthetic oligonucleotide

SEQ ID NO: 651795 - DNA, 55 bp, Artificial; identical to SEQ ID NO: 136516
  Synthetic oligonucleotide

SEQ ID NO: 651796 - DNA, 55 bp, Artificial; identical to SEQ ID NO: 136184
  Synthetic oligonucleotide

SEQ ID NO: 651797 - DNA, 55 bp, Artificial; identical to SEQ ID NO: 133953
  Synthetic oligonucleotide

SEQ ID NO: 651798 - DNA, 55 bp, Artificial; identical to SEQ ID NO: 136215
  Synthetic oligonucleotide

SEQ ID NO: 651799 - DNA, 55 bp, Artificial; identical to SEQ ID NO: 136213
  Synthetic oligonucleotide

SEQ ID NO: 651800 - DNA, 52 bp, Artificial; identical to SEQ ID NO: 134643
  Synthetic oligonucleotide

SEQ ID NO: 651801 - DNA, 51 bp, Artificial; identical to SEQ ID NO: 137220
  Synthetic oligonucleotide

SEQ ID NO: 651802 - DNA, 55 bp, Artificial; identical to SEQ ID NO: 139343
  Synthetic oligonucleotide

SEQ ID NO: 651803 - DNA, 55 bp, Artificial; identical to SEQ ID NO: 140125
  Synthetic oligonucleotide

SEQ ID NO: 651804 - DNA, 55 bp, Artificial; identical to SEQ ID NO: 136205
  Synthetic oligonucleotide

SEQ ID NO: 651805 - DNA, 55 bp, Artificial; identical to SEQ ID NO: 136146
  Synthetic oligonucleotide

SEQ ID NO: 651806 - DNA, 55 bp, Artificial; identical to SEQ ID NO: 138865
  Synthetic oligonucleotide

SEQ ID NO: 651807 - DNA, 55 bp, Artificial; identical to SEQ ID NO: 136147
  Synthetic oligonucleotide

SEQ ID NO: 651808 - DNA, 52 bp, Artificial; identical to SEQ ID NO: 139352
  Synthetic oligonucleotide

SEQ ID NO: 651809 - DNA, 51 bp, Artificial; identical to SEQ ID NO: 140001
  Synthetic oligonucleotide

SEQ ID NO: 651810 - DNA, 58 bp, Artificial; identical to SEQ ID NO: 133478
  Synthetic oligonucleotide

SEQ ID NO: 651811 - DNA, 55 bp, Artificial; identical to SEQ ID NO: 133945
  Synthetic oligonucleotide

SEQ ID NO: 651812 - DNA, 52 bp, Artificial; identical to SEQ ID NO: 136151
  Synthetic oligonucleotide

SEQ ID NO: 651813 - DNA, 47 bp, Artificial; identical to SEQ ID NO: 138467
  Synthetic oligonucleotide

SEQ ID NO: 651814 - DNA, 55 bp, Artificial; identical to SEQ ID NO: 136153
  Synthetic oligonucleotide

SEQ ID NO: 651815 - DNA, 53 bp, Artificial; identical to SEQ ID NO: 137270
  Synthetic oligonucleotide

SEQ ID NO: 651816 - DNA, 55 bp, Artificial; identical to SEQ ID NO: 136158
  Synthetic oligonucleotide

SEQ ID NO: 651817 - DNA, 55 bp, Artificial; identical to SEQ ID NO: 136159
  Synthetic oligonucleotide

SEQ ID NO: 651818 - DNA, 55 bp, Artificial; identical to SEQ ID NO: 138863
  Synthetic oligonucleotide

SEQ ID NO: 651819 - DNA, 51 bp, Artificial; identical to SEQ ID NO: 137391
  Synthetic oligonucleotide

SEQ ID NO: 651820 - DNA, 55 bp, Artificial; identical to SEQ ID NO: 136182
  Synthetic oligonucleotide

SEQ ID NO: 651821 - DNA, 55 bp, Artificial; identical to SEQ ID NO: 136794
  Synthetic oligonucleotide

SEQ ID NO: 651822 - DNA, 53 bp, Artificial; identical to SEQ ID NO: 139595
  Synthetic oligonucleotide

SEQ ID NO: 651823 - DNA, 53 bp, Artificial; identical to SEQ ID NO: 138860
  Synthetic oligonucleotide

SEQ ID NO: 651824 - DNA, 55 bp, Artificial; identical to SEQ ID NO: 136178
  Synthetic oligonucleotide

SEQ ID NO: 651825 - DNA, 55 bp, Artificial; identical to SEQ ID NO: 139326
  Synthetic oligonucleotide

SEQ ID NO: 651826 - DNA, 55 bp, Artificial; identical to SEQ ID NO: 136175
  Synthetic oligonucleotide

SEQ ID NO: 651827 - DNA, 50 bp, Artificial; identical to SEQ ID NO: 134445
  Synthetic oligonucleotide

SEQ ID NO: 651828 - DNA, 51 bp, Artificial; identical to SEQ ID NO: 136604
  Synthetic oligonucleotide

SEQ ID NO: 651829 - DNA, 55 bp, Artificial; identical to SEQ ID NO: 138859
  Synthetic oligonucleotide

SEQ ID NO: 651830 - DNA, 55 bp, Artificial; identical to SEQ ID NO: 138428
  Synthetic oligonucleotide

SEQ ID NO: 651831 - DNA, 55 bp, Artificial; identical to SEQ ID NO: 136171
  Synthetic oligonucleotide

SEQ ID NO: 651832 - DNA, 55 bp, Artificial; identical to SEQ ID NO: 133997
  Synthetic oligonucleotide

SEQ ID NO: 651833 - DNA, 55 bp, Artificial; identical to SEQ ID NO: 136170
  Synthetic oligonucleotide

SEQ ID NO: 651834 - DNA, 55 bp, Artificial; identical to SEQ ID NO: 140304
  Synthetic oligonucleotide

SEQ ID NO: 651835 - DNA, 60 bp, Artificial; identical to SEQ ID NO: 140193
  Synthetic oligonucleotide

SEQ ID NO: 651836 - DNA, 55 bp, Artificial; identical to SEQ ID NO: 140122
  Synthetic oligonucleotide

SEQ ID NO: 651837 - DNA, 55 bp, Artificial; identical to SEQ ID NO: 136169
  Synthetic oligonucleotide

SEQ ID NO: 651838 - DNA, 59 bp, Artificial; identical to SEQ ID NO: 138465
  Synthetic oligonucleotide

SEQ ID NO: 651839 - DNA, 55 bp, Artificial; identical to SEQ ID NO: 138858
  Synthetic oligonucleotide

SEQ ID NO: 651840 - DNA, 53 bp, Artificial; identical to SEQ ID NO: 136795
  Synthetic oligonucleotide

SEQ ID NO: 651841 - DNA, 55 bp, Artificial; identical to SEQ ID NO: 140293
  Synthetic oligonucleotide

SEQ ID NO: 651842 - DNA, 53 bp, Artificial; identical to SEQ ID NO: 140960
  Synthetic oligonucleotide

SEQ ID NO: 651843 - DNA, 55 bp, Artificial; identical to SEQ ID NO: 140121
  Synthetic oligonucleotide

SEQ ID NO: 651844 - DNA, 55 bp, Artificial; identical to SEQ ID NO: 140271
  Synthetic oligonucleotide

SEQ ID NO: 651845 - DNA, 55 bp, Artificial; identical to SEQ ID NO: 136164
  Synthetic oligonucleotide

SEQ ID NO: 651846 - DNA, 58 bp, Artificial; identical to SEQ ID NO: 134434
  Synthetic oligonucleotide

SEQ ID NO: 651847 - DNA, 55 bp, Artificial; identical to SEQ ID NO: 136269
  Synthetic oligonucleotide

SEQ ID NO: 651848 - DNA, 50 bp, Artificial; identical to SEQ ID NO: 137223
  Synthetic oligonucleotide

SEQ ID NO: 651849 - DNA, 55 bp, Artificial; identical to SEQ ID NO: 136268
  Synthetic oligonucleotide

SEQ ID NO: 651850 - DNA, 55 bp, Artificial; identical to SEQ ID NO: 137484
  Synthetic oligonucleotide

SEQ ID NO: 651851 - DNA, 52 bp, Artificial; identical to SEQ ID NO: 134647
  Synthetic oligonucleotide

SEQ ID NO: 651852 - DNA, 55 bp, Artificial; identical to SEQ ID NO: 140260
  Synthetic oligonucleotide

SEQ ID NO: 651853 - DNA, 55 bp, Artificial; identical to SEQ ID NO: 140249
  Synthetic oligonucleotide

SEQ ID NO: 651854 - DNA, 55 bp, Artificial; identical to SEQ ID NO: 136258
  Synthetic oligonucleotide

SEQ ID NO: 651855 - DNA, 60 bp, Artificial; identical to SEQ ID NO: 134423
  Synthetic oligonucleotide

SEQ ID NO: 651856 - DNA, 55 bp, Artificial; identical to SEQ ID NO: 136254
  Synthetic oligonucleotide

SEQ ID NO: 651857 - DNA, 55 bp, Artificial; identical to SEQ ID NO: 133996
  Synthetic oligonucleotide

SEQ ID NO: 651858 - DNA, 55 bp, Artificial; identical to SEQ ID NO: 136284
  Synthetic oligonucleotide

SEQ ID NO: 651859 - DNA, 55 bp, Artificial; identical to SEQ ID NO: 136283
  Synthetic oligonucleotide

SEQ ID NO: 651860 - DNA, 55 bp, Artificial; identical to SEQ ID NO: 133549
  Synthetic oligonucleotide

SEQ ID NO: 651861 - DNA, 55 bp, Artificial; identical to SEQ ID NO: 140822
  Synthetic oligonucleotide

SEQ ID NO: 651862 - DNA, 55 bp, Artificial; identical to SEQ ID NO: 136277
  Synthetic oligonucleotide

SEQ ID NO: 651863 - DNA, 54 bp, Artificial; identical to SEQ ID NO: 136276
  Synthetic oligonucleotide

SEQ ID NO: 651864 - DNA, 55 bp, Artificial; identical to SEQ ID NO: 138857
  Synthetic oligonucleotide

SEQ ID NO: 651865 - DNA, 50 bp, Artificial; identical to SEQ ID NO: 137156
  Synthetic oligonucleotide

SEQ ID NO: 651866 - DNA, 51 bp, Artificial; identical to SEQ ID NO: 136274
  Synthetic oligonucleotide

SEQ ID NO: 651867 - DNA, 53 bp, Artificial; identical to SEQ ID NO: 137700
  Synthetic oligonucleotide

SEQ ID NO: 651868 - DNA, 55 bp, Artificial; identical to SEQ ID NO: 136273
  Synthetic oligonucleotide

SEQ ID NO: 651869 - DNA, 55 bp, Artificial; identical to SEQ ID NO: 137155
  Synthetic oligonucleotide

SEQ ID NO: 651870 - DNA, 54 bp, Artificial; identical to SEQ ID NO: 138997
  Synthetic oligonucleotide

SEQ ID NO: 651871 - DNA, 56 bp, Artificial; identical to SEQ ID NO: 136630
  Synthetic oligonucleotide

SEQ ID NO: 651872 - DNA, 55 bp, Artificial; identical to SEQ ID NO: 137702
  Synthetic oligonucleotide

SEQ ID NO: 651873 - DNA, 55 bp, Artificial; identical to SEQ ID NO: 136233
  Synthetic oligonucleotide

SEQ ID NO: 651874 - DNA, 55 bp, Artificial; identical to SEQ ID NO: 139572
  Synthetic oligonucleotide

SEQ ID NO: 651875 - DNA, 55 bp, Artificial; identical to SEQ ID NO: 138132
  Synthetic oligonucleotide

SEQ ID NO: 651876 - DNA, 56 bp, Artificial; identical to SEQ ID NO: 135709
  Synthetic oligonucleotide

SEQ ID NO: 651877 - DNA, 55 bp, Artificial; identical to SEQ ID NO: 136520
  Synthetic oligonucleotide

SEQ ID NO: 651878 - DNA, 55 bp, Artificial; identical to SEQ ID NO: 136796
  Synthetic oligonucleotide

SEQ ID NO: 651879 - DNA, 55 bp, Artificial; identical to SEQ ID NO: 140120
  Synthetic oligonucleotide

SEQ ID NO: 651880 - DNA, 55 bp, Artificial; identical to SEQ ID NO: 133986
  Synthetic oligonucleotide

SEQ ID NO: 651881 - DNA, 55 bp, Artificial; identical to SEQ ID NO: 139538
  Synthetic oligonucleotide

SEQ ID NO: 651882 - DNA, 55 bp, Artificial; identical to SEQ ID NO: 138207
  Synthetic oligonucleotide

SEQ ID NO: 651883 - DNA, 51 bp, Artificial; identical to SEQ ID NO: 139699
  Synthetic oligonucleotide

SEQ ID NO: 651884 - DNA, 55 bp, Artificial; identical to SEQ ID NO: 139494
  Synthetic oligonucleotide

SEQ ID NO: 651885 - DNA, 60 bp, Artificial; identical to SEQ ID NO: 140182
  Synthetic oligonucleotide

SEQ ID NO: 651886 - DNA, 55 bp, Artificial; identical to SEQ ID NO: 136225
  Synthetic oligonucleotide

SEQ ID NO: 651887 - DNA, 55 bp, Artificial; identical to SEQ ID NO: 136224
  Synthetic oligonucleotide

SEQ ID NO: 651888 - DNA, 55 bp, Artificial; identical to SEQ ID NO: 136221
  Synthetic oligonucleotide

SEQ ID NO: 651889 - DNA, 55 bp, Artificial; identical to SEQ ID NO: 136218
  Synthetic oligonucleotide

SEQ ID NO: 651890 - DNA, 52 bp, Artificial; identical to SEQ ID NO: 138993
  Synthetic oligonucleotide

SEQ ID NO: 651891 - DNA, 55 bp, Artificial; identical to SEQ ID NO: 136247
  Synthetic oligonucleotide

SEQ ID NO: 651892 - DNA, 54 bp, Artificial; identical to SEQ ID NO: 136798
  Synthetic oligonucleotide

SEQ ID NO: 651893 - DNA, 51 bp, Artificial; identical to SEQ ID NO: 134368
  Synthetic oligonucleotide

SEQ ID NO: 651894 - DNA, 53 bp, Artificial; identical to SEQ ID NO: 136246
  Synthetic oligonucleotide

SEQ ID NO: 651895 - DNA, 55 bp, Artificial; identical to SEQ ID NO: 133551
  Synthetic oligonucleotide

SEQ ID NO: 651896 - DNA, 55 bp, Artificial; identical to SEQ ID NO: 138991
  Synthetic oligonucleotide

SEQ ID NO: 651897 - DNA, 55 bp, Artificial; identical to SEQ ID NO: 136241
  Synthetic oligonucleotide

SEQ ID NO: 651898 - DNA, 55 bp, Artificial; identical to SEQ ID NO: 138990
  Synthetic oligonucleotide

SEQ ID NO: 651899 - DNA, 53 bp, Artificial; identical to SEQ ID NO: 134503
  Synthetic oligonucleotide

SEQ ID NO: 651900 - DNA, 55 bp, Artificial; identical to SEQ ID NO: 136238
  Synthetic oligonucleotide

SEQ ID NO: 651901 - DNA, 55 bp, Artificial; identical to SEQ ID NO: 138661
  Synthetic oligonucleotide

SEQ ID NO: 651902 - DNA, 55 bp, Artificial; identical to SEQ ID NO: 133467
  Synthetic oligonucleotide

SEQ ID NO: 651903 - DNA, 55 bp, Artificial; identical to SEQ ID NO: 136237
  Synthetic oligonucleotide

SEQ ID NO: 651904 - DNA, 55 bp, Artificial; identical to SEQ ID NO: 137153
  Synthetic oligonucleotide

SEQ ID NO: 651905 - DNA, 51 bp, Artificial; identical to SEQ ID NO: 140676
  Synthetic oligonucleotide

SEQ ID NO: 651906 - DNA, 55 bp, Artificial; identical to SEQ ID NO: 139399
  Synthetic oligonucleotide

SEQ ID NO: 651907 - DNA, 55 bp, Artificial; identical to SEQ ID NO: 137272
  Synthetic oligonucleotide

SEQ ID NO: 651908 - DNA, 55 bp, Artificial; identical to SEQ ID NO: 136043
  Synthetic oligonucleotide

SEQ ID NO: 651909 - DNA, 55 bp, Artificial; identical to SEQ ID NO: 137473
  Synthetic oligonucleotide

SEQ ID NO: 651910 - DNA, 50 bp, Artificial; identical to SEQ ID NO: 135269
  Synthetic oligonucleotide

SEQ ID NO: 651911 - DNA, 52 bp, Artificial; identical to SEQ ID NO: 134680
  Synthetic oligonucleotide

SEQ ID NO: 651912 - DNA, 52 bp, Artificial; identical to SEQ ID NO: 134679
  Synthetic oligonucleotide

SEQ ID NO: 651913 - DNA, 55 bp, Artificial; identical to SEQ ID NO: 136069
  Synthetic oligonucleotide

SEQ ID NO: 651914 - DNA, 55 bp, Artificial; identical to SEQ ID NO: 140637
  Synthetic oligonucleotide

SEQ ID NO: 651915 - DNA, 55 bp, Artificial; identical to SEQ ID NO: 136062
  Synthetic oligonucleotide

SEQ ID NO: 651916 - DNA, 54 bp, Artificial; identical to SEQ ID NO: 139360
  Synthetic oligonucleotide

SEQ ID NO: 651917 - DNA, 55 bp, Artificial; identical to SEQ ID NO: 140056
  Synthetic oligonucleotide

SEQ ID NO: 651918 - DNA, 58 bp, Artificial; identical to SEQ ID NO: 136996
  Synthetic oligonucleotide

SEQ ID NO: 651919 - DNA, 54 bp, Artificial; identical to SEQ ID NO: 140626
  Synthetic oligonucleotide

SEQ ID NO: 651920 - DNA, 55 bp, Artificial; identical to SEQ ID NO: 136058
  Synthetic oligonucleotide

SEQ ID NO: 651921 - DNA, 59 bp, Artificial; identical to SEQ ID NO: 136500
  Synthetic oligonucleotide

SEQ ID NO: 651922 - DNA, 55 bp, Artificial; identical to SEQ ID NO: 136055
  Synthetic oligonucleotide

SEQ ID NO: 651923 - DNA, 55 bp, Artificial; identical to SEQ ID NO: 133333
  Synthetic oligonucleotide

SEQ ID NO: 651924 - DNA, 54 bp, Artificial; identical to SEQ ID NO: 133978
  Synthetic oligonucleotide

SEQ ID NO: 651925 - DNA, 55 bp, Artificial; identical to SEQ ID NO: 136051
  Synthetic oligonucleotide

SEQ ID NO: 651926 - DNA, 55 bp, Artificial; identical to SEQ ID NO: 135997
  Synthetic oligonucleotide

SEQ ID NO: 651927 - DNA, 55 bp, Artificial; identical to SEQ ID NO: 135999
  Synthetic oligonucleotide

SEQ ID NO: 651928 - DNA, 59 bp, Artificial; identical to SEQ ID NO: 134301
  Synthetic oligonucleotide

SEQ ID NO: 651929 - DNA, 55 bp, Artificial; identical to SEQ ID NO: 138986
  Synthetic oligonucleotide

SEQ ID NO: 651930 - DNA, 55 bp, Artificial; identical to SEQ ID NO: 139367
  Synthetic oligonucleotide

SEQ ID NO: 651931 - DNA, 54 bp, Artificial; identical to SEQ ID NO: 136005
  Synthetic oligonucleotide

SEQ ID NO: 651932 - DNA, 50 bp, Artificial; identical to SEQ ID NO: 138331
  Synthetic oligonucleotide

SEQ ID NO: 651933 - DNA, 55 bp, Artificial; identical to SEQ ID NO: 137148
  Synthetic oligonucleotide

SEQ ID NO: 651934 - DNA, 55 bp, Artificial; identical to SEQ ID NO: 140741
  Synthetic oligonucleotide

SEQ ID NO: 651935 - DNA, 55 bp, Artificial; identical to SEQ ID NO: 138279
  Synthetic oligonucleotide

SEQ ID NO: 651936 - DNA, 55 bp, Artificial; identical to SEQ ID NO: 136008
  Synthetic oligonucleotide

SEQ ID NO: 651937 - DNA, 55 bp, Artificial; identical to SEQ ID NO: 136013
  Synthetic oligonucleotide

SEQ ID NO: 651938 - DNA, 55 bp, Artificial; identical to SEQ ID NO: 140745
  Synthetic oligonucleotide

SEQ ID NO: 651939 - DNA, 53 bp, Artificial; identical to SEQ ID NO: 138561
  Synthetic oligonucleotide

SEQ ID NO: 651940 - DNA, 55 bp, Artificial; identical to SEQ ID NO: 133344
  Synthetic oligonucleotide

SEQ ID NO: 651941 - DNA, 55 bp, Artificial; identical to SEQ ID NO: 140593
  Synthetic oligonucleotide

SEQ ID NO: 651942 - DNA, 55 bp, Artificial; identical to SEQ ID NO: 136029
  Synthetic oligonucleotide

SEQ ID NO: 651943 - DNA, 54 bp, Artificial; identical to SEQ ID NO: 134488
  Synthetic oligonucleotide

SEQ ID NO: 651944 - DNA, 55 bp, Artificial; identical to SEQ ID NO: 136028
  Synthetic oligonucleotide

SEQ ID NO: 651945 - DNA, 57 bp, Artificial; identical to SEQ ID NO: 136737
  Synthetic oligonucleotide

SEQ ID NO: 651946 - DNA, 53 bp, Artificial; identical to SEQ ID NO: 137933
  Synthetic oligonucleotide

SEQ ID NO: 651947 - DNA, 60 bp, Artificial; identical to SEQ ID NO: 134257
  Synthetic oligonucleotide

SEQ ID NO: 651948 - DNA, 55 bp, Artificial; identical to SEQ ID NO: 136842
  Synthetic oligonucleotide

SEQ ID NO: 651949 - DNA, 55 bp, Artificial; identical to SEQ ID NO: 136025
  Synthetic oligonucleotide

SEQ ID NO: 651950 - DNA, 55 bp, Artificial; identical to SEQ ID NO: 136024
  Synthetic oligonucleotide

SEQ ID NO: 651951 - DNA, 60 bp, Artificial; identical to SEQ ID NO: 133602
  Synthetic oligonucleotide

SEQ ID NO: 651952 - DNA, 55 bp, Artificial; identical to SEQ ID NO: 138980
  Synthetic oligonucleotide

SEQ ID NO: 651953 - DNA, 51 bp, Artificial; identical to SEQ ID NO: 136920
  Synthetic oligonucleotide

SEQ ID NO: 651954 - DNA, 50 bp, Artificial; identical to SEQ ID NO: 140101
  Synthetic oligonucleotide

SEQ ID NO: 651955 - DNA, 55 bp, Artificial; identical to SEQ ID NO: 139369
  Synthetic oligonucleotide

SEQ ID NO: 651956 - DNA, 55 bp, Artificial; identical to SEQ ID NO: 139370
  Synthetic oligonucleotide

SEQ ID NO: 651957 - DNA, 55 bp, Artificial; identical to SEQ ID NO: 136843
  Synthetic oligonucleotide

SEQ ID NO: 651958 - DNA, 55 bp, Artificial; identical to SEQ ID NO: 139373
  Synthetic oligonucleotide

SEQ ID NO: 651959 - DNA, 53 bp, Artificial; identical to SEQ ID NO: 136557
  Synthetic oligonucleotide

SEQ ID NO: 651960 - DNA, 59 bp, Artificial; identical to SEQ ID NO: 136692
  Synthetic oligonucleotide

SEQ ID NO: 651961 - DNA, 55 bp, Artificial; identical to SEQ ID NO: 137706
  Synthetic oligonucleotide

SEQ ID NO: 651962 - DNA, 58 bp, Artificial; identical to SEQ ID NO: 134889
  Synthetic oligonucleotide

SEQ ID NO: 651963 - DNA, 57 bp, Artificial; identical to SEQ ID NO: 138632
  Synthetic oligonucleotide

SEQ ID NO: 651964 - DNA, 55 bp, Artificial; identical to SEQ ID NO: 136016
  Synthetic oligonucleotide

SEQ ID NO: 651965 - DNA, 57 bp, Artificial; identical to SEQ ID NO: 139760
  Synthetic oligonucleotide

SEQ ID NO: 651966 - DNA, 54 bp, Artificial; identical to SEQ ID NO: 136835
  Synthetic oligonucleotide

SEQ ID NO: 651967 - DNA, 55 bp, Artificial; identical to SEQ ID NO: 136126
  Synthetic oligonucleotide

SEQ ID NO: 651968 - DNA, 57 bp, Artificial; identical to SEQ ID NO: 136748
  Synthetic oligonucleotide

SEQ ID NO: 651969 - DNA, 55 bp, Artificial; identical to SEQ ID NO: 136125
  Synthetic oligonucleotide

SEQ ID NO: 651970 - DNA, 53 bp, Artificial; identical to SEQ ID NO: 137347
  Synthetic oligonucleotide

SEQ ID NO: 651971 - DNA, 59 bp, Artificial; identical to SEQ ID NO: 134878
  Synthetic oligonucleotide

SEQ ID NO: 651972 - DNA, 55 bp, Artificial; identical to SEQ ID NO: 138976
  Synthetic oligonucleotide

SEQ ID NO: 651973 - DNA, 55 bp, Artificial; identical to SEQ ID NO: 136834
  Synthetic oligonucleotide

SEQ ID NO: 651974 - DNA, 60 bp, Artificial; identical to SEQ ID NO: 141116
  Synthetic oligonucleotide

SEQ ID NO: 651975 - DNA, 56 bp, Artificial; identical to SEQ ID NO: 138652
  Synthetic oligonucleotide

SEQ ID NO: 651976 - DNA, 55 bp, Artificial; identical to SEQ ID NO: 138208
  Synthetic oligonucleotide

SEQ ID NO: 651977 - DNA, 53 bp, Artificial; identical to SEQ ID NO: 134504
  Synthetic oligonucleotide

SEQ ID NO: 651978 - DNA, 51 bp, Artificial; identical to SEQ ID NO: 139689
  Synthetic oligonucleotide

SEQ ID NO: 651979 - DNA, 55 bp, Artificial; identical to SEQ ID NO: 140828
  Synthetic oligonucleotide

SEQ ID NO: 651980 - DNA, 57 bp, Artificial; identical to SEQ ID NO: 136675
  Synthetic oligonucleotide

SEQ ID NO: 651981 - DNA, 51 bp, Artificial; identical to SEQ ID NO: 138001
  Synthetic oligonucleotide

SEQ ID NO: 651982 - DNA, 55 bp, Artificial; identical to SEQ ID NO: 136832
  Synthetic oligonucleotide

SEQ ID NO: 651983 - DNA, 50 bp, Artificial; identical to SEQ ID NO: 139211
  Synthetic oligonucleotide

SEQ ID NO: 651984 - DNA, 54 bp, Artificial; identical to SEQ ID NO: 139280
  Synthetic oligonucleotide

SEQ ID NO: 651985 - DNA, 52 bp, Artificial; identical to SEQ ID NO: 138219
  Synthetic oligonucleotide

SEQ ID NO: 651986 - DNA, 59 bp, Artificial; identical to SEQ ID NO: 134856
  Synthetic oligonucleotide

SEQ ID NO: 651987 - DNA, 56 bp, Artificial; identical to SEQ ID NO: 138075
  Synthetic oligonucleotide

SEQ ID NO: 651988 - DNA, 51 bp, Artificial; identical to SEQ ID NO: 134782
  Synthetic oligonucleotide

SEQ ID NO: 651989 - DNA, 55 bp, Artificial; identical to SEQ ID NO: 134017
  Synthetic oligonucleotide

SEQ ID NO: 651990 - DNA, 58 bp, Artificial; identical to SEQ ID NO: 134845
  Synthetic oligonucleotide

SEQ ID NO: 651991 - DNA, 55 bp, Artificial; identical to SEQ ID NO: 137302
  Synthetic oligonucleotide

SEQ ID NO: 651992 - DNA, 54 bp, Artificial; identical to SEQ ID NO: 134447
  Synthetic oligonucleotide

SEQ ID NO: 651993 - DNA, 60 bp, Artificial; identical to SEQ ID NO: 134812
  Synthetic oligonucleotide

SEQ ID NO: 651994 - DNA, 53 bp, Artificial; identical to SEQ ID NO: 134532
  Synthetic oligonucleotide

SEQ ID NO: 651995 - DNA, 55 bp, Artificial; identical to SEQ ID NO: 140537
  Synthetic oligonucleotide

SEQ ID NO: 651996 - DNA, 55 bp, Artificial; identical to SEQ ID NO: 136109
  Synthetic oligonucleotide

SEQ ID NO: 651997 - DNA, 55 bp, Artificial; identical to SEQ ID NO: 138649
  Synthetic oligonucleotide

SEQ ID NO: 651998 - DNA, 60 bp, Artificial; identical to SEQ ID NO: 138053
  Synthetic oligonucleotide

SEQ ID NO: 651999 - DNA, 55 bp, Artificial; identical to SEQ ID NO: 136143
  Synthetic oligonucleotide

SEQ ID NO: 652000 - DNA, 55 bp, Artificial; identical to SEQ ID NO: 136831
  Synthetic oligonucleotide

SEQ ID NO: 652001 - DNA, 55 bp, Artificial; identical to SEQ ID NO: 136142
  Synthetic oligonucleotide

SEQ ID NO: 652002 - DNA, 52 bp, Artificial; identical to SEQ ID NO: 137301
  Synthetic oligonucleotide

SEQ ID NO: 652003 - DNA, 55 bp, Artificial; identical to SEQ ID NO: 140768
  Synthetic oligonucleotide

SEQ ID NO: 652004 - DNA, 55 bp, Artificial; identical to SEQ ID NO: 133521
  Synthetic oligonucleotide

SEQ ID NO: 652005 - DNA, 55 bp, Artificial; identical to SEQ ID NO: 138307
  Synthetic oligonucleotide

SEQ ID NO: 652006 - DNA, 52 bp, Artificial; identical to SEQ ID NO: 136573
  Synthetic oligonucleotide

SEQ ID NO: 652007 - DNA, 55 bp, Artificial; identical to SEQ ID NO: 138097
  Synthetic oligonucleotide

SEQ ID NO: 652008 - DNA, 52 bp, Artificial; identical to SEQ ID NO: 137451
  Synthetic oligonucleotide

SEQ ID NO: 652009 - DNA, 54 bp, Artificial; identical to SEQ ID NO: 138251
  Synthetic oligonucleotide

SEQ ID NO: 652010 - DNA, 55 bp, Artificial; identical to SEQ ID NO: 139011
  Synthetic oligonucleotide

SEQ ID NO: 652011 - DNA, 58 bp, Artificial; identical to SEQ ID NO: 138568
  Synthetic oligonucleotide

SEQ ID NO: 652012 - DNA, 55 bp, Artificial; identical to SEQ ID NO: 139303
  Synthetic oligonucleotide

SEQ ID NO: 652013 - DNA, 51 bp, Artificial; identical to SEQ ID NO: 134737
  Synthetic oligonucleotide

SEQ ID NO: 652014 - DNA, 55 bp, Artificial; identical to SEQ ID NO: 140526
  Synthetic oligonucleotide

SEQ ID NO: 652015 - DNA, 52 bp, Artificial; identical to SEQ ID NO: 137950
  Synthetic oligonucleotide

SEQ ID NO: 652016 - DNA, 52 bp, Artificial; identical to SEQ ID NO: 139300
  Synthetic oligonucleotide

SEQ ID NO: 652017 - DNA, 55 bp, Artificial; identical to SEQ ID NO: 139297
  Synthetic oligonucleotide

SEQ ID NO: 652018 - DNA, 55 bp, Artificial; identical to SEQ ID NO: 139290
  Synthetic oligonucleotide

SEQ ID NO: 652019 - DNA, 55 bp, Artificial; identical to SEQ ID NO: 136135
  Synthetic oligonucleotide

SEQ ID NO: 652020 - DNA, 55 bp, Artificial; identical to SEQ ID NO: 136132
  Synthetic oligonucleotide

SEQ ID NO: 652021 - DNA, 55 bp, Artificial; identical to SEQ ID NO: 136131
  Synthetic oligonucleotide

SEQ ID NO: 652022 - DNA, 51 bp, Artificial; identical to SEQ ID NO: 136909
  Synthetic oligonucleotide

SEQ ID NO: 652023 - DNA, 54 bp, Artificial; identical to SEQ ID NO: 140908
  Synthetic oligonucleotide

SEQ ID NO: 652024 - DNA, 55 bp, Artificial; identical to SEQ ID NO: 136129
  Synthetic oligonucleotide

SEQ ID NO: 652025 - DNA, 56 bp, Artificial; identical to SEQ ID NO: 134778
  Synthetic oligonucleotide

SEQ ID NO: 652026 - DNA, 55 bp, Artificial; identical to SEQ ID NO: 136529
  Synthetic oligonucleotide

SEQ ID NO: 652027 - DNA, 55 bp, Artificial; identical to SEQ ID NO: 138211
  Synthetic oligonucleotide

SEQ ID NO: 652028 - DNA, 55 bp, Artificial; identical to SEQ ID NO: 136127
  Synthetic oligonucleotide

SEQ ID NO: 652029 - DNA, 57 bp, Artificial; identical to SEQ ID NO: 138220
  Synthetic oligonucleotide

SEQ ID NO: 652030 - DNA, 55 bp, Artificial; identical to SEQ ID NO: 137440
  Synthetic oligonucleotide

SEQ ID NO: 652031 - DNA, 55 bp, Artificial; identical to SEQ ID NO: 136087
  Synthetic oligonucleotide

SEQ ID NO: 652032 - DNA, 55 bp, Artificial; identical to SEQ ID NO: 134018
  Synthetic oligonucleotide

SEQ ID NO: 652033 - DNA, 50 bp, Artificial; identical to SEQ ID NO: 138005
  Synthetic oligonucleotide

SEQ ID NO: 652034 - DNA, 55 bp, Artificial; identical to SEQ ID NO: 140515
  Synthetic oligonucleotide

SEQ ID NO: 652035 - DNA, 55 bp, Artificial; identical to SEQ ID NO: 138145
  Synthetic oligonucleotide

SEQ ID NO: 652036 - DNA, 55 bp, Artificial; identical to SEQ ID NO: 136085
  Synthetic oligonucleotide

SEQ ID NO: 652037 - DNA, 50 bp, Artificial; identical to SEQ ID NO: 140760
  Synthetic oligonucleotide

SEQ ID NO: 652038 - DNA, 55 bp, Artificial; identical to SEQ ID NO: 136494
  Synthetic oligonucleotide

SEQ ID NO: 652039 - DNA, 53 bp, Artificial; identical to SEQ ID NO: 134547
  Synthetic oligonucleotide

SEQ ID NO: 652040 - DNA, 55 bp, Artificial; identical to SEQ ID NO: 136830
  Synthetic oligonucleotide

SEQ ID NO: 652041 - DNA, 55 bp, Artificial; identical to SEQ ID NO: 138101
  Synthetic oligonucleotide

SEQ ID NO: 652042 - DNA, 55 bp, Artificial; identical to SEQ ID NO: 138102
  Synthetic oligonucleotide

SEQ ID NO: 652043 - DNA, 54 bp, Artificial; identical to SEQ ID NO: 139046
  Synthetic oligonucleotide

SEQ ID NO: 652044 - DNA, 55 bp, Artificial; identical to SEQ ID NO: 138564
  Synthetic oligonucleotide

SEQ ID NO: 652045 - DNA, 60 bp, Artificial; identical to SEQ ID NO: 134734
  Synthetic oligonucleotide

SEQ ID NO: 652046 - DNA, 54 bp, Artificial; identical to SEQ ID NO: 136855
  Synthetic oligonucleotide

SEQ ID NO: 652047 - DNA, 51 bp, Artificial; identical to SEQ ID NO: 134755
  Synthetic oligonucleotide

SEQ ID NO: 652048 - DNA, 55 bp, Artificial; identical to SEQ ID NO: 136080
  Synthetic oligonucleotide

SEQ ID NO: 652049 - DNA, 55 bp, Artificial; identical to SEQ ID NO: 133355
  Synthetic oligonucleotide

SEQ ID NO: 652050 - DNA, 53 bp, Artificial; identical to SEQ ID NO: 137187
  Synthetic oligonucleotide

SEQ ID NO: 652051 - DNA, 55 bp, Artificial; identical to SEQ ID NO: 133658
  Synthetic oligonucleotide

SEQ ID NO: 652052 - DNA, 59 bp, Artificial; identical to SEQ ID NO: 138563
  Synthetic oligonucleotide

SEQ ID NO: 652053 - DNA, 52 bp, Artificial; identical to SEQ ID NO: 139088
  Synthetic oligonucleotide

SEQ ID NO: 652054 - DNA, 50 bp, Artificial; identical to SEQ ID NO: 136624
  Synthetic oligonucleotide

SEQ ID NO: 652055 - DNA, 55 bp, Artificial; identical to SEQ ID NO: 139286
  Synthetic oligonucleotide

SEQ ID NO: 652056 - DNA, 55 bp, Artificial; identical to SEQ ID NO: 140986
  Synthetic oligonucleotide

SEQ ID NO: 652057 - DNA, 53 bp, Artificial; identical to SEQ ID NO: 136549
  Synthetic oligonucleotide

SEQ ID NO: 652058 - DNA, 55 bp, Artificial; identical to SEQ ID NO: 139285
  Synthetic oligonucleotide

SEQ ID NO: 652059 - DNA, 54 bp, Artificial; identical to SEQ ID NO: 136539
  Synthetic oligonucleotide

SEQ ID NO: 652060 - DNA, 50 bp, Artificial; identical to SEQ ID NO: 134846
  Synthetic oligonucleotide

SEQ ID NO: 652061 - DNA, 60 bp, Artificial; identical to SEQ ID NO: 134723
  Synthetic oligonucleotide

SEQ ID NO: 652062 - DNA, 55 bp, Artificial; identical to SEQ ID NO: 139284
  Synthetic oligonucleotide

SEQ ID NO: 652063 - DNA, 55 bp, Artificial; identical to SEQ ID NO: 139004
  Synthetic oligonucleotide

SEQ ID NO: 652064 - DNA, 55 bp, Artificial; identical to SEQ ID NO: 136075
  Synthetic oligonucleotide

SEQ ID NO: 652065 - DNA, 55 bp, Artificial; identical to SEQ ID NO: 136074
  Synthetic oligonucleotide

SEQ ID NO: 652066 - DNA, 55 bp, Artificial; identical to SEQ ID NO: 138210
  Synthetic oligonucleotide

SEQ ID NO: 652067 - DNA, 58 bp, Artificial; identical to SEQ ID NO: 136638
  Synthetic oligonucleotide

SEQ ID NO: 652068 - DNA, 57 bp, Artificial; identical to SEQ ID NO: 138088
  Synthetic oligonucleotide

SEQ ID NO: 652069 - DNA, 57 bp, Artificial; identical to SEQ ID NO: 135674
  Synthetic oligonucleotide

SEQ ID NO: 652070 - DNA, 55 bp, Artificial; identical to SEQ ID NO: 136071
  Synthetic oligonucleotide

SEQ ID NO: 652071 - DNA, 55 bp, Artificial; identical to SEQ ID NO: 139003
  Synthetic oligonucleotide

SEQ ID NO: 652072 - DNA, 55 bp, Artificial; identical to SEQ ID NO: 138146
  Synthetic oligonucleotide

SEQ ID NO: 652073 - DNA, 55 bp, Artificial; identical to SEQ ID NO: 136107
  Synthetic oligonucleotide

SEQ ID NO: 652074 - DNA, 55 bp, Artificial; identical to SEQ ID NO: 140769
  Synthetic oligonucleotide

SEQ ID NO: 652075 - DNA, 55 bp, Artificial; identical to SEQ ID NO: 139002
  Synthetic oligonucleotide

SEQ ID NO: 652076 - DNA, 55 bp, Artificial; identical to SEQ ID NO: 136105
  Synthetic oligonucleotide

SEQ ID NO: 652077 - DNA, 54 bp, Artificial; identical to SEQ ID NO: 139044
  Synthetic oligonucleotide

SEQ ID NO: 652078 - DNA, 56 bp, Artificial; identical to SEQ ID NO: 134712
  Synthetic oligonucleotide

SEQ ID NO: 652079 - DNA, 51 bp, Artificial; identical to SEQ ID NO: 136587
  Synthetic oligonucleotide

SEQ ID NO: 652080 - DNA, 55 bp, Artificial; identical to SEQ ID NO: 133528
  Synthetic oligonucleotide

SEQ ID NO: 652081 - DNA, 55 bp, Artificial; identical to SEQ ID NO: 136099
  Synthetic oligonucleotide

SEQ ID NO: 652082 - DNA, 55 bp, Artificial; identical to SEQ ID NO: 136827
  Synthetic oligonucleotide

SEQ ID NO: 652083 - DNA, 50 bp, Artificial; identical to SEQ ID NO: 135716
  Synthetic oligonucleotide

SEQ ID NO: 652084 - DNA, 55 bp, Artificial; identical to SEQ ID NO: 133529
  Synthetic oligonucleotide

SEQ ID NO: 652085 - DNA, 54 bp, Artificial; identical to SEQ ID NO: 137921
  Synthetic oligonucleotide

SEQ ID NO: 652086 - DNA, 58 bp, Artificial; identical to SEQ ID NO: 136984
  Synthetic oligonucleotide

SEQ ID NO: 652087 - DNA, 55 bp, Artificial; identical to SEQ ID NO: 136098
  Synthetic oligonucleotide

SEQ ID NO: 652088 - DNA, 55 bp, Artificial; identical to SEQ ID NO: 136097
  Synthetic oligonucleotide

SEQ ID NO: 652089 - DNA, 55 bp, Artificial; identical to SEQ ID NO: 134019
  Synthetic oligonucleotide

SEQ ID NO: 652090 - DNA, 55 bp, Artificial; identical to SEQ ID NO: 138108
  Synthetic oligonucleotide

SEQ ID NO: 652091 - DNA, 55 bp, Artificial; identical to SEQ ID NO: 138109
  Synthetic oligonucleotide

SEQ ID NO: 652092 - DNA, 55 bp, Artificial; identical to SEQ ID NO: 140831
  Synthetic oligonucleotide

SEQ ID NO: 652093 - DNA, 55 bp, Artificial; identical to SEQ ID NO: 138999
  Synthetic oligonucleotide

SEQ ID NO: 652094 - DNA, 51 bp, Artificial; identical to SEQ ID NO: 137216
  Synthetic oligonucleotide

SEQ ID NO: 652095 - DNA, 55 bp, Artificial; identical to SEQ ID NO: 139288
  Synthetic oligonucleotide

SEQ ID NO: 652096 - DNA, 55 bp, Artificial; identical to SEQ ID NO: 133614
  Synthetic oligonucleotide

SEQ ID NO: 652097 - DNA, 55 bp, Artificial; identical to SEQ ID NO: 136089
  Synthetic oligonucleotide

SEQ ID NO: 652098 - DNA, 55 bp, Artificial; identical to SEQ ID NO: 138112
  Synthetic oligonucleotide

SEQ ID NO: 652099 - DNA, 55 bp, Artificial; identical to SEQ ID NO: 136096
  Synthetic oligonucleotide

SEQ ID NO: 652100 - DNA, 58 bp, Artificial; identical to SEQ ID NO: 138086
  Synthetic oligonucleotide

SEQ ID NO: 652101 - DNA, 50 bp, Artificial; identical to SEQ ID NO: 141053
  Synthetic oligonucleotide

SEQ ID NO: 652102 - DNA, 55 bp, Artificial; identical to SEQ ID NO: 138238
  Synthetic oligonucleotide

SEQ ID NO: 652103 - DNA, 54 bp, Artificial; identical to SEQ ID NO: 138115
  Synthetic oligonucleotide

SEQ ID NO: 652104 - DNA, 58 bp, Artificial; identical to SEQ ID NO: 138586
  Synthetic oligonucleotide

SEQ ID NO: 652105 - DNA, 51 bp, Artificial; identical to SEQ ID NO: 137992
  Synthetic oligonucleotide

SEQ ID NO: 652106 - DNA, 57 bp, Artificial; identical to SEQ ID NO: 133713
  Synthetic oligonucleotide

SEQ ID NO: 652107 - DNA, 53 bp, Artificial; identical to SEQ ID NO: 139649
  Synthetic oligonucleotide

SEQ ID NO: 652108 - DNA, 55 bp, Artificial; identical to SEQ ID NO: 138951
  Synthetic oligonucleotide

SEQ ID NO: 652109 - DNA, 55 bp, Artificial; identical to SEQ ID NO: 133490
  Synthetic oligonucleotide

SEQ ID NO: 652110 - DNA, 55 bp, Artificial; identical to SEQ ID NO: 134006
  Synthetic oligonucleotide

SEQ ID NO: 652111 - DNA, 55 bp, Artificial; identical to SEQ ID NO: 138624
  Synthetic oligonucleotide

SEQ ID NO: 652112 - DNA, 55 bp, Artificial; identical to SEQ ID NO: 133977
  Synthetic oligonucleotide

SEQ ID NO: 652113 - DNA, 55 bp, Artificial; identical to SEQ ID NO: 136073
  Synthetic oligonucleotide

SEQ ID NO: 652114 - DNA, 55 bp, Artificial; identical to SEQ ID NO: 136076
  Synthetic oligonucleotide

SEQ ID NO: 652115 - DNA, 55 bp, Artificial; identical to SEQ ID NO: 140983
  Synthetic oligonucleotide

SEQ ID NO: 652116 - DNA, 51 bp, Artificial; identical to SEQ ID NO: 139715
  Synthetic oligonucleotide

SEQ ID NO: 652117 - DNA, 60 bp, Artificial; identical to SEQ ID NO: 138582
  Synthetic oligonucleotide

SEQ ID NO: 652118 - DNA, 55 bp, Artificial; identical to SEQ ID NO: 138948
  Synthetic oligonucleotide

SEQ ID NO: 652119 - DNA, 54 bp, Artificial; identical to SEQ ID NO: 139293
  Synthetic oligonucleotide

SEQ ID NO: 652120 - DNA, 55 bp, Artificial; identical to SEQ ID NO: 136824
  Synthetic oligonucleotide

SEQ ID NO: 652121 - DNA, 55 bp, Artificial; identical to SEQ ID NO: 136031
  Synthetic oligonucleotide

SEQ ID NO: 652122 - DNA, 55 bp, Artificial; identical to SEQ ID NO: 137786
  Synthetic oligonucleotide

SEQ ID NO: 652123 - DNA, 55 bp, Artificial; identical to SEQ ID NO: 136993
  Synthetic oligonucleotide

SEQ ID NO: 652124 - DNA, 55 bp, Artificial; identical to SEQ ID NO: 136011
  Synthetic oligonucleotide

SEQ ID NO: 652125 - DNA, 55 bp, Artificial; identical to SEQ ID NO: 140460
  Synthetic oligonucleotide

SEQ ID NO: 652126 - DNA, 55 bp, Artificial; identical to SEQ ID NO: 136059
  Synthetic oligonucleotide

SEQ ID NO: 652127 - DNA, 51 bp, Artificial; identical to SEQ ID NO: 139122
  Synthetic oligonucleotide

SEQ ID NO: 652128 - DNA, 54 bp, Artificial; identical to SEQ ID NO: 136852
  Synthetic oligonucleotide

SEQ ID NO: 652129 - DNA, 55 bp, Artificial; identical to SEQ ID NO: 138946
  Synthetic oligonucleotide

SEQ ID NO: 652130 - DNA, 56 bp, Artificial; identical to SEQ ID NO: 135651
  Synthetic oligonucleotide

SEQ ID NO: 652131 - DNA, 55 bp, Artificial; identical to SEQ ID NO: 137299
  Synthetic oligonucleotide

SEQ ID NO: 652132 - DNA, 55 bp, Artificial; identical to SEQ ID NO: 140130
  Synthetic oligonucleotide

SEQ ID NO: 652133 - DNA, 60 bp, Artificial; identical to SEQ ID NO: 134667
  Synthetic oligonucleotide

SEQ ID NO: 652134 - DNA, 57 bp, Artificial; identical to SEQ ID NO: 138502
  Synthetic oligonucleotide

SEQ ID NO: 652135 - DNA, 55 bp, Artificial; identical to SEQ ID NO: 136250
  Synthetic oligonucleotide

SEQ ID NO: 652136 - DNA, 54 bp, Artificial; identical to SEQ ID NO: 134476
  Synthetic oligonucleotide

SEQ ID NO: 652137 - DNA, 58 bp, Artificial; identical to SEQ ID NO: 135647
  Synthetic oligonucleotide

SEQ ID NO: 652138 - DNA, 58 bp, Artificial; identical to SEQ ID NO: 139996
  Synthetic oligonucleotide

SEQ ID NO: 652139 - DNA, 54 bp, Artificial; identical to SEQ ID NO: 139576
  Synthetic oligonucleotide

SEQ ID NO: 652140 - DNA, 55 bp, Artificial; identical to SEQ ID NO: 140438
  Synthetic oligonucleotide

SEQ ID NO: 652141 - DNA, 57 bp, Artificial; identical to SEQ ID NO: 134656
  Synthetic oligonucleotide

SEQ ID NO: 652142 - DNA, 50 bp, Artificial; identical to SEQ ID NO: 138013
  Synthetic oligonucleotide

SEQ ID NO: 652143 - DNA, 50 bp, Artificial; identical to SEQ ID NO: 137792
  Synthetic oligonucleotide

SEQ ID NO: 652144 - DNA, 55 bp, Artificial; identical to SEQ ID NO: 139298
  Synthetic oligonucleotide

SEQ ID NO: 652145 - DNA, 56 bp, Artificial; identical to SEQ ID NO: 138009
  Synthetic oligonucleotide

SEQ ID NO: 652146 - DNA, 57 bp, Artificial; identical to SEQ ID NO: 138493
  Synthetic oligonucleotide

SEQ ID NO: 652147 - DNA, 55 bp, Artificial; identical to SEQ ID NO: 137374
  Synthetic oligonucleotide

SEQ ID NO: 652148 - DNA, 51 bp, Artificial; identical to SEQ ID NO: 139713
  Synthetic oligonucleotide

SEQ ID NO: 652149 - DNA, 55 bp, Artificial; identical to SEQ ID NO: 138944
  Synthetic oligonucleotide

SEQ ID NO: 652150 - DNA, 55 bp, Artificial; identical to SEQ ID NO: 136280
  Synthetic oligonucleotide

SEQ ID NO: 652151 - DNA, 55 bp, Artificial; identical to SEQ ID NO: 136289
  Synthetic oligonucleotide

SEQ ID NO: 652152 - DNA, 54 bp, Artificial; identical to SEQ ID NO: 139579
  Synthetic oligonucleotide

SEQ ID NO: 652153 - DNA, 60 bp, Artificial; identical to SEQ ID NO: 133547
  Synthetic oligonucleotide

SEQ ID NO: 652154 - DNA, 55 bp, Artificial; identical to SEQ ID NO: 139299
  Synthetic oligonucleotide

SEQ ID NO: 652155 - DNA, 55 bp, Artificial; identical to SEQ ID NO: 136271
  Synthetic oligonucleotide

SEQ ID NO: 652156 - DNA, 55 bp, Artificial; identical to SEQ ID NO: 136161
  Synthetic oligonucleotide

SEQ ID NO: 652157 - DNA, 55 bp, Artificial; identical to SEQ ID NO: 136207
  Synthetic oligonucleotide

SEQ ID NO: 652158 - DNA, 54 bp, Artificial; identical to SEQ ID NO: 140118
  Synthetic oligonucleotide

SEQ ID NO: 652159 - DNA, 55 bp, Artificial; identical to SEQ ID NO: 136187
  Synthetic oligonucleotide

SEQ ID NO: 652160 - DNA, 54 bp, Artificial; identical to SEQ ID NO: 140426
  Synthetic oligonucleotide

SEQ ID NO: 652161 - DNA, 55 bp, Artificial; identical to SEQ ID NO: 136189
  Synthetic oligonucleotide

SEQ ID NO: 652162 - DNA, 54 bp, Artificial; identical to SEQ ID NO: 139302
  Synthetic oligonucleotide

SEQ ID NO: 652163 - DNA, 52 bp, Artificial; identical to SEQ ID NO: 136968
  Synthetic oligonucleotide

SEQ ID NO: 652164 - DNA, 54 bp, Artificial; identical to SEQ ID NO: 134469
  Synthetic oligonucleotide

SEQ ID NO: 652165 - DNA, 55 bp, Artificial; identical to SEQ ID NO: 137429
  Synthetic oligonucleotide

SEQ ID NO: 652166 - DNA, 55 bp, Artificial; identical to SEQ ID NO: 136199
  Synthetic oligonucleotide

SEQ ID NO: 652167 - DNA, 55 bp, Artificial; identical to SEQ ID NO: 135773
  Synthetic oligonucleotide

SEQ ID NO: 652168 - DNA, 55 bp, Artificial; identical to SEQ ID NO: 135717
  Synthetic oligonucleotide

SEQ ID NO: 652169 - DNA, 51 bp, Artificial; identical to SEQ ID NO: 136908
  Synthetic oligonucleotide

SEQ ID NO: 652170 - DNA, 55 bp, Artificial; identical to SEQ ID NO: 135811
  Synthetic oligonucleotide

SEQ ID NO: 652171 - DNA, 60 bp, Artificial; identical to SEQ ID NO: 134612
  Synthetic oligonucleotide

SEQ ID NO: 652172 - DNA, 55 bp, Artificial; identical to SEQ ID NO: 135832
  Synthetic oligonucleotide

SEQ ID NO: 652173 - DNA, 55 bp, Artificial; identical to SEQ ID NO: 136680
  Synthetic oligonucleotide

SEQ ID NO: 652174 - DNA, 58 bp, Artificial; identical to SEQ ID NO: 137260
  Synthetic oligonucleotide

SEQ ID NO: 652175 - DNA, 55 bp, Artificial; identical to SEQ ID NO: 138237
  Synthetic oligonucleotide

SEQ ID NO: 652176 - DNA, 55 bp, Artificial; identical to SEQ ID NO: 135829
  Synthetic oligonucleotide

SEQ ID NO: 652177 - DNA, 52 bp, Artificial; identical to SEQ ID NO: 134677
  Synthetic oligonucleotide

SEQ ID NO: 652178 - DNA, 52 bp, Artificial; identical to SEQ ID NO: 136890
  Synthetic oligonucleotide

SEQ ID NO: 652179 - DNA, 55 bp, Artificial; identical to SEQ ID NO: 135821
  Synthetic oligonucleotide

SEQ ID NO: 652180 - DNA, 57 bp, Artificial; identical to SEQ ID NO: 138512
  Synthetic oligonucleotide

SEQ ID NO: 652181 - DNA, 59 bp, Artificial; identical to SEQ ID NO: 137987
  Synthetic oligonucleotide

SEQ ID NO: 652182 - DNA, 55 bp, Artificial; identical to SEQ ID NO: 139306
  Synthetic oligonucleotide

SEQ ID NO: 652183 - DNA, 52 bp, Artificial; identical to SEQ ID NO: 139102
  Synthetic oligonucleotide

SEQ ID NO: 652184 - DNA, 54 bp, Artificial; identical to SEQ ID NO: 134459
  Synthetic oligonucleotide

SEQ ID NO: 652185 - DNA, 53 bp, Artificial; identical to SEQ ID NO: 137125
  Synthetic oligonucleotide

SEQ ID NO: 652186 - DNA, 55 bp, Artificial; identical to SEQ ID NO: 137796
  Synthetic oligonucleotide

SEQ ID NO: 652187 - DNA, 52 bp, Artificial; identical to SEQ ID NO: 137204
  Synthetic oligonucleotide

SEQ ID NO: 652188 - DNA, 57 bp, Artificial; identical to SEQ ID NO: 134590
  Synthetic oligonucleotide

SEQ ID NO: 652189 - DNA, 60 bp, Artificial; identical to SEQ ID NO: 138510
  Synthetic oligonucleotide

SEQ ID NO: 652190 - DNA, 55 bp, Artificial; identical to SEQ ID NO: 136840
  Synthetic oligonucleotide

SEQ ID NO: 652191 - DNA, 55 bp, Artificial; identical to SEQ ID NO: 133364
  Synthetic oligonucleotide

SEQ ID NO: 652192 - DNA, 55 bp, Artificial; identical to SEQ ID NO: 137799
  Synthetic oligonucleotide

SEQ ID NO: 652193 - DNA, 58 bp, Artificial; identical to SEQ ID NO: 138511
  Synthetic oligonucleotide

SEQ ID NO: 652194 - DNA, 55 bp, Artificial; identical to SEQ ID NO: 140404
  Synthetic oligonucleotide

SEQ ID NO: 652195 - DNA, 54 bp, Artificial; identical to SEQ ID NO: 134455
  Synthetic oligonucleotide

SEQ ID NO: 652196 - DNA, 55 bp, Artificial; identical to SEQ ID NO: 135936
  Synthetic oligonucleotide

SEQ ID NO: 652197 - DNA, 52 bp, Artificial; identical to SEQ ID NO: 139103
  Synthetic oligonucleotide

SEQ ID NO: 652198 - DNA, 55 bp, Artificial; identical to SEQ ID NO: 135991
  Synthetic oligonucleotide

SEQ ID NO: 652199 - DNA, 55 bp, Artificial; identical to SEQ ID NO: 135961
  Synthetic oligonucleotide

SEQ ID NO: 652200 - DNA, 55 bp, Artificial; identical to SEQ ID NO: 137712
  Synthetic oligonucleotide

SEQ ID NO: 652201 - DNA, 55 bp, Artificial; identical to SEQ ID NO: 137295
  Synthetic oligonucleotide

SEQ ID NO: 652202 - DNA, 54 bp, Artificial; identical to SEQ ID NO: 139584
  Synthetic oligonucleotide

SEQ ID NO: 652203 - DNA, 51 bp, Artificial; identical to SEQ ID NO: 136594
  Synthetic oligonucleotide

SEQ ID NO: 652204 - DNA, 55 bp, Artificial; identical to SEQ ID NO: 138934
  Synthetic oligonucleotide

SEQ ID NO: 652205 - DNA, 55 bp, Artificial; identical to SEQ ID NO: 136838
  Synthetic oligonucleotide

SEQ ID NO: 652206 - DNA, 55 bp, Artificial; identical to SEQ ID NO: 138933
  Synthetic oligonucleotide

SEQ ID NO: 652207 - DNA, 53 bp, Artificial; identical to SEQ ID NO: 140909
  Synthetic oligonucleotide

SEQ ID NO: 652208 - DNA, 57 bp, Artificial; identical to SEQ ID NO: 138280
  Synthetic oligonucleotide

SEQ ID NO: 652209 - DNA, 59 bp, Artificial; identical to SEQ ID NO: 139383
  Synthetic oligonucleotide

SEQ ID NO: 652210 - DNA, 56 bp, Artificial; identical to SEQ ID NO: 137975
  Synthetic oligonucleotide

SEQ ID NO: 652211 - DNA, 55 bp, Artificial; identical to SEQ ID NO: 133575
  Synthetic oligonucleotide

SEQ ID NO: 652212 - DNA, 55 bp, Artificial; identical to SEQ ID NO: 135880
  Synthetic oligonucleotide

SEQ ID NO: 652213 - DNA, 55 bp, Artificial; identical to SEQ ID NO: 137638
  Synthetic oligonucleotide

SEQ ID NO: 652214 - DNA, 55 bp, Artificial; identical to SEQ ID NO: 135865
  Synthetic oligonucleotide

SEQ ID NO: 652215 - DNA, 55 bp, Artificial; identical to SEQ ID NO: 135888
  Synthetic oligonucleotide

SEQ ID NO: 652216 - DNA, 54 bp, Artificial; identical to SEQ ID NO: 137319
  Synthetic oligonucleotide

SEQ ID NO: 652217 - DNA, 60 bp, Artificial; identical to SEQ ID NO: 138526
  Synthetic oligonucleotide

SEQ ID NO: 652218 - DNA, 53 bp, Artificial; identical to SEQ ID NO: 139598
  Synthetic oligonucleotide

SEQ ID NO: 652219 - DNA, 52 bp, Artificial; identical to SEQ ID NO: 133728
  Synthetic oligonucleotide

SEQ ID NO: 652220 - DNA, 55 bp, Artificial; identical to SEQ ID NO: 137800
  Synthetic oligonucleotide

SEQ ID NO: 652221 - DNA, 54 bp, Artificial; identical to SEQ ID NO: 134567
  Synthetic oligonucleotide

SEQ ID NO: 652222 - DNA, 54 bp, Artificial; identical to SEQ ID NO: 139031
  Synthetic oligonucleotide

SEQ ID NO: 652223 - DNA, 55 bp, Artificial; identical to SEQ ID NO: 140052
  Synthetic oligonucleotide

SEQ ID NO: 652224 - DNA, 52 bp, Artificial; identical to SEQ ID NO: 134587
  Synthetic oligonucleotide

SEQ ID NO: 652225 - DNA, 50 bp, Artificial; identical to SEQ ID NO: 134914
  Synthetic oligonucleotide

SEQ ID NO: 652226 - DNA, 55 bp, Artificial; identical to SEQ ID NO: 135762
  Synthetic oligonucleotide

SEQ ID NO: 652227 - DNA, 55 bp, Artificial; identical to SEQ ID NO: 135828
  Synthetic oligonucleotide

SEQ ID NO: 652228 - DNA, 60 bp, Artificial; identical to SEQ ID NO: 138580
  Synthetic oligonucleotide

SEQ ID NO: 652229 - DNA, 53 bp, Artificial; identical to SEQ ID NO: 141149
  Synthetic oligonucleotide

SEQ ID NO: 652230 - DNA, 55 bp, Artificial; identical to SEQ ID NO: 138969
  Synthetic oligonucleotide

SEQ ID NO: 652231 - DNA, 55 bp, Artificial; identical to SEQ ID NO: 136048
  Synthetic oligonucleotide

SEQ ID NO: 652232 - DNA, 55 bp, Artificial; identical to SEQ ID NO: 137627
  Synthetic oligonucleotide

SEQ ID NO: 652233 - DNA, 55 bp, Artificial; identical to SEQ ID NO: 137605
  Synthetic oligonucleotide

SEQ ID NO: 652234 - DNA, 55 bp, Artificial; identical to SEQ ID NO: 138965
  Synthetic oligonucleotide

SEQ ID NO: 652235 - DNA, 59 bp, Artificial; identical to SEQ ID NO: 134701
  Synthetic oligonucleotide

SEQ ID NO: 652236 - DNA, 55 bp, Artificial; identical to SEQ ID NO: 136104
  Synthetic oligonucleotide

SEQ ID NO: 652237 - DNA, 55 bp, Artificial; identical to SEQ ID NO: 138964
  Synthetic oligonucleotide

SEQ ID NO: 652238 - DNA, 51 bp, Artificial; identical to SEQ ID NO: 134759
  Synthetic oligonucleotide

SEQ ID NO: 652239 - DNA, 55 bp, Artificial; identical to SEQ ID NO: 137803
  Synthetic oligonucleotide

SEQ ID NO: 652240 - DNA, 54 bp, Artificial; identical to SEQ ID NO: 136128
  Synthetic oligonucleotide

SEQ ID NO: 652241 - DNA, 55 bp, Artificial; identical to SEQ ID NO: 133576
  Synthetic oligonucleotide

SEQ ID NO: 652242 - DNA, 55 bp, Artificial; identical to SEQ ID NO: 136133
  Synthetic oligonucleotide

SEQ ID NO: 652243 - DNA, 54 bp, Artificial; identical to SEQ ID NO: 134446
  Synthetic oligonucleotide

SEQ ID NO: 652244 - DNA, 53 bp, Artificial; identical to SEQ ID NO: 134800
  Synthetic oligonucleotide

SEQ ID NO: 652245 - DNA, 55 bp, Artificial; identical to SEQ ID NO: 140292
  Synthetic oligonucleotide

SEQ ID NO: 652246 - DNA, 60 bp, Artificial; identical to SEQ ID NO: 134834
  Synthetic oligonucleotide

SEQ ID NO: 652247 - DNA, 53 bp, Artificial; identical to SEQ ID NO: 134520
  Synthetic oligonucleotide

SEQ ID NO: 652248 - DNA, 55 bp, Artificial; identical to SEQ ID NO: 140770
  Synthetic oligonucleotide

SEQ ID NO: 652249 - DNA, 55 bp, Artificial; identical to SEQ ID NO: 137805
  Synthetic oligonucleotide

SEQ ID NO: 652250 - DNA, 50 bp, Artificial; identical to SEQ ID NO: 139171
  Synthetic oligonucleotide

SEQ ID NO: 652251 - DNA, 52 bp, Artificial; identical to SEQ ID NO: 140359
  Synthetic oligonucleotide

SEQ ID NO: 652252 - DNA, 55 bp, Artificial; identical to SEQ ID NO: 136019
  Synthetic oligonucleotide

SEQ ID NO: 652253 - DNA, 55 bp, Artificial; identical to SEQ ID NO: 133943
  Synthetic oligonucleotide

SEQ ID NO: 652254 - DNA, 55 bp, Artificial; identical to SEQ ID NO: 136006
  Synthetic oligonucleotide

SEQ ID NO: 652255 - DNA, 55 bp, Artificial; identical to SEQ ID NO: 136004
  Synthetic oligonucleotide

SEQ ID NO: 652256 - DNA, 55 bp, Artificial; identical to SEQ ID NO: 138540
  Synthetic oligonucleotide

SEQ ID NO: 652257 - DNA, 54 bp, Artificial; identical to SEQ ID NO: 139588
  Synthetic oligonucleotide

SEQ ID NO: 652258 - DNA, 55 bp, Artificial; identical to SEQ ID NO: 137964
  Synthetic oligonucleotide

SEQ ID NO: 652259 - DNA, 55 bp, Artificial; identical to SEQ ID NO: 137810
  Synthetic oligonucleotide

SEQ ID NO: 652260 - DNA, 55 bp, Artificial; identical to SEQ ID NO: 133940
  Synthetic oligonucleotide

SEQ ID NO: 652261 - DNA, 55 bp, Artificial; identical to SEQ ID NO: 133577
  Synthetic oligonucleotide

SEQ ID NO: 652262 - DNA, 55 bp, Artificial; identical to SEQ ID NO: 133578
  Synthetic oligonucleotide

SEQ ID NO: 652263 - DNA, 55 bp, Artificial; identical to SEQ ID NO: 137293
  Synthetic oligonucleotide

SEQ ID NO: 652264 - DNA, 55 bp, Artificial; identical to SEQ ID NO: 140291
  Synthetic oligonucleotide

SEQ ID NO: 652265 - DNA, 53 bp, Artificial; identical to SEQ ID NO: 134519
  Synthetic oligonucleotide

SEQ ID NO: 652266 - DNA, 54 bp, Artificial; identical to SEQ ID NO: 134498
  Synthetic oligonucleotide

SEQ ID NO: 652267 - DNA, 55 bp, Artificial; identical to SEQ ID NO: 136063
  Synthetic oligonucleotide

SEQ ID NO: 652268 - DNA, 55 bp, Artificial; identical to SEQ ID NO: 138960
  Synthetic oligonucleotide

SEQ ID NO: 652269 - DNA, 55 bp, Artificial; identical to SEQ ID NO: 136065
  Synthetic oligonucleotide

SEQ ID NO: 652270 - DNA, 55 bp, Artificial; identical to SEQ ID NO: 140290
  Synthetic oligonucleotide

SEQ ID NO: 652271 - DNA, 55 bp, Artificial; identical to SEQ ID NO: 136067
  Synthetic oligonucleotide

SEQ ID NO: 652272 - DNA, 60 bp, Artificial; identical to SEQ ID NO: 134323
  Synthetic oligonucleotide

SEQ ID NO: 652273 - DNA, 55 bp, Artificial; identical to SEQ ID NO: 136036
  Synthetic oligonucleotide

SEQ ID NO: 652274 - DNA, 55 bp, Artificial; identical to SEQ ID NO: 138957
  Synthetic oligonucleotide

SEQ ID NO: 652275 - DNA, 55 bp, Artificial; identical to SEQ ID NO: 139260
  Synthetic oligonucleotide

SEQ ID NO: 652276 - DNA, 52 bp, Artificial; identical to SEQ ID NO: 134607
  Synthetic oligonucleotide

SEQ ID NO: 652277 - DNA, 60 bp, Artificial; identical to SEQ ID NO: 134334
  Synthetic oligonucleotide

SEQ ID NO: 652278 - DNA, 55 bp, Artificial; identical to SEQ ID NO: 136039
  Synthetic oligonucleotide

SEQ ID NO: 652279 - DNA, 55 bp, Artificial; identical to SEQ ID NO: 136040
  Synthetic oligonucleotide

SEQ ID NO: 652280 - DNA, 55 bp, Artificial; identical to SEQ ID NO: 136041
  Synthetic oligonucleotide

SEQ ID NO: 652281 - DNA, 55 bp, Artificial; identical to SEQ ID NO: 136719
  Synthetic oligonucleotide

SEQ ID NO: 652282 - DNA, 51 bp, Artificial; identical to SEQ ID NO: 134806
  Synthetic oligonucleotide

SEQ ID NO: 652283 - DNA, 55 bp, Artificial; identical to SEQ ID NO: 136248
  Synthetic oligonucleotide

SEQ ID NO: 652284 - DNA, 59 bp, Artificial; identical to SEQ ID NO: 134379
  Synthetic oligonucleotide

SEQ ID NO: 652285 - DNA, 55 bp, Artificial; identical to SEQ ID NO: 140832
  Synthetic oligonucleotide

SEQ ID NO: 652286 - DNA, 54 bp, Artificial; identical to SEQ ID NO: 140289
  Synthetic oligonucleotide

SEQ ID NO: 652287 - DNA, 55 bp, Artificial; identical to SEQ ID NO: 136232
  Synthetic oligonucleotide

SEQ ID NO: 652288 - DNA, 58 bp, Artificial; identical to SEQ ID NO: 140008
  Synthetic oligonucleotide

SEQ ID NO: 652289 - DNA, 55 bp, Artificial; identical to SEQ ID NO: 139271
  Synthetic oligonucleotide

SEQ ID NO: 652290 - DNA, 50 bp, Artificial; identical to SEQ ID NO: 140422
  Synthetic oligonucleotide

SEQ ID NO: 652291 - DNA, 59 bp, Artificial; identical to SEQ ID NO: 135627
  Synthetic oligonucleotide

SEQ ID NO: 652292 - DNA, 60 bp, Artificial; identical to SEQ ID NO: 137308
  Synthetic oligonucleotide

SEQ ID NO: 652293 - DNA, 55 bp, Artificial; identical to SEQ ID NO: 136275
  Synthetic oligonucleotide

SEQ ID NO: 652294 - DNA, 55 bp, Artificial; identical to SEQ ID NO: 138955
  Synthetic oligonucleotide

SEQ ID NO: 652295 - DNA, 55 bp, Artificial; identical to SEQ ID NO: 136685
  Synthetic oligonucleotide

SEQ ID NO: 652296 - DNA, 50 bp, Artificial; identical to SEQ ID NO: 137241
  Synthetic oligonucleotide

SEQ ID NO: 652297 - DNA, 56 bp, Artificial; identical to SEQ ID NO: 135644
  Synthetic oligonucleotide

SEQ ID NO: 652298 - DNA, 55 bp, Artificial; identical to SEQ ID NO: 138309
  Synthetic oligonucleotide

SEQ ID NO: 652299 - DNA, 55 bp, Artificial; identical to SEQ ID NO: 133939
  Synthetic oligonucleotide

SEQ ID NO: 652300 - DNA, 55 bp, Artificial; identical to SEQ ID NO: 138954
  Synthetic oligonucleotide

SEQ ID NO: 652301 - DNA, 55 bp, Artificial; identical to SEQ ID NO: 139274
  Synthetic oligonucleotide

SEQ ID NO: 652302 - DNA, 56 bp, Artificial; identical to SEQ ID NO: 134401
  Synthetic oligonucleotide

SEQ ID NO: 652303 - DNA, 55 bp, Artificial; identical to SEQ ID NO: 136721
  Synthetic oligonucleotide

SEQ ID NO: 652304 - DNA, 55 bp, Artificial; identical to SEQ ID NO: 133924
  Synthetic oligonucleotide

SEQ ID NO: 652305 - DNA, 52 bp, Artificial; identical to SEQ ID NO: 140167
  Synthetic oligonucleotide

SEQ ID NO: 652306 - DNA, 55 bp, Artificial; identical to SEQ ID NO: 136253
  Synthetic oligonucleotide

SEQ ID NO: 652307 - DNA, 55 bp, Artificial; identical to SEQ ID NO: 133913
  Synthetic oligonucleotide

SEQ ID NO: 652308 - DNA, 53 bp, Artificial; identical to SEQ ID NO: 134570
  Synthetic oligonucleotide

SEQ ID NO: 652309 - DNA, 55 bp, Artificial; identical to SEQ ID NO: 133583
  Synthetic oligonucleotide

SEQ ID NO: 652310 - DNA, 55 bp, Artificial; identical to SEQ ID NO: 136690
  Synthetic oligonucleotide

SEQ ID NO: 652311 - DNA, 55 bp, Artificial; identical to SEQ ID NO: 138952
  Synthetic oligonucleotide

SEQ ID NO: 652312 - DNA, 51 bp, Artificial; identical to SEQ ID NO: 138271
  Synthetic oligonucleotide

SEQ ID NO: 652313 - DNA, 55 bp, Artificial; identical to SEQ ID NO: 136392
  Synthetic oligonucleotide

SEQ ID NO: 652314 - DNA, 55 bp, Artificial; identical to SEQ ID NO: 140892
  Synthetic oligonucleotide

SEQ ID NO: 652315 - DNA, 55 bp, Artificial; identical to SEQ ID NO: 140286
  Synthetic oligonucleotide

SEQ ID NO: 652316 - DNA, 55 bp, Artificial; identical to SEQ ID NO: 137766
  Synthetic oligonucleotide

SEQ ID NO: 652317 - DNA, 55 bp, Artificial; identical to SEQ ID NO: 137583
  Synthetic oligonucleotide

SEQ ID NO: 652318 - DNA, 55 bp, Artificial; identical to SEQ ID NO: 136687
  Synthetic oligonucleotide

SEQ ID NO: 652319 - DNA, 55 bp, Artificial; identical to SEQ ID NO: 136181
  Synthetic oligonucleotide

SEQ ID NO: 652320 - DNA, 55 bp, Artificial; identical to SEQ ID NO: 140743
  Synthetic oligonucleotide

SEQ ID NO: 652321 - DNA, 55 bp, Artificial; identical to SEQ ID NO: 136162
  Synthetic oligonucleotide

SEQ ID NO: 652322 - DNA, 54 bp, Artificial; identical to SEQ ID NO: 136546
  Synthetic oligonucleotide

SEQ ID NO: 652323 - DNA, 57 bp, Artificial; identical to SEQ ID NO: 134467
  Synthetic oligonucleotide

SEQ ID NO: 652324 - DNA, 55 bp, Artificial; identical to SEQ ID NO: 137594
  Synthetic oligonucleotide

SEQ ID NO: 652325 - DNA, 60 bp, Artificial; identical to SEQ ID NO: 138567
  Synthetic oligonucleotide

SEQ ID NO: 652326 - DNA, 60 bp, Artificial; identical to SEQ ID NO: 134501
  Synthetic oligonucleotide

SEQ ID NO: 652327 - DNA, 57 bp, Artificial; identical to SEQ ID NO: 134512
  Synthetic oligonucleotide

SEQ ID NO: 652328 - DNA, 55 bp, Artificial; identical to SEQ ID NO: 136204
  Synthetic oligonucleotide

SEQ ID NO: 652329 - DNA, 54 bp, Artificial; identical to SEQ ID NO: 137747
  Synthetic oligonucleotide

SEQ ID NO: 652330 - DNA, 59 bp, Artificial; identical to SEQ ID NO: 139871
  Synthetic oligonucleotide

SEQ ID NO: 652331 - DNA, 55 bp, Artificial; identical to SEQ ID NO: 138668
  Synthetic oligonucleotide

SEQ ID NO: 652332 - DNA, 55 bp, Artificial; identical to SEQ ID NO: 136210
  Synthetic oligonucleotide

SEQ ID NO: 652333 - DNA, 52 bp, Artificial; identical to SEQ ID NO: 134604
  Synthetic oligonucleotide

SEQ ID NO: 652334 - DNA, 55 bp, Artificial; identical to SEQ ID NO: 137769
  Synthetic oligonucleotide

SEQ ID NO: 652335 - DNA, 55 bp, Artificial; identical to SEQ ID NO: 140285
  Synthetic oligonucleotide

SEQ ID NO: 652336 - DNA, 51 bp, Artificial; identical to SEQ ID NO: 139109
  Synthetic oligonucleotide

SEQ ID NO: 652337 - DNA, 55 bp, Artificial; identical to SEQ ID NO: 137418
  Synthetic oligonucleotide

SEQ ID NO: 652338 - DNA, 60 bp, Artificial; identical to SEQ ID NO: 139882
  Synthetic oligonucleotide

SEQ ID NO: 652339 - DNA, 52 bp, Artificial; identical to SEQ ID NO: 139093
  Synthetic oligonucleotide

SEQ ID NO: 652340 - DNA, 55 bp, Artificial; identical to SEQ ID NO: 140050
  Synthetic oligonucleotide

SEQ ID NO: 652341 - DNA, 55 bp, Artificial; identical to SEQ ID NO: 136216
  Synthetic oligonucleotide

SEQ ID NO: 652342 - DNA, 50 bp, Artificial; identical to SEQ ID NO: 139168
  Synthetic oligonucleotide

SEQ ID NO: 652343 - DNA, 55 bp, Artificial; identical to SEQ ID NO: 136723
  Synthetic oligonucleotide

SEQ ID NO: 652344 - DNA, 57 bp, Artificial; identical to SEQ ID NO: 138616
  Synthetic oligonucleotide

SEQ ID NO: 652345 - DNA, 55 bp, Artificial; identical to SEQ ID NO: 138725
  Synthetic oligonucleotide

SEQ ID NO: 652346 - DNA, 51 bp, Artificial; identical to SEQ ID NO: 134796
  Synthetic oligonucleotide

SEQ ID NO: 652347 - DNA, 52 bp, Artificial; identical to SEQ ID NO: 136882
  Synthetic oligonucleotide

SEQ ID NO: 652348 - DNA, 58 bp, Artificial; identical to SEQ ID NO: 138594
  Synthetic oligonucleotide

SEQ ID NO: 652349 - DNA, 55 bp, Artificial; identical to SEQ ID NO: 138701
  Synthetic oligonucleotide

SEQ ID NO: 652350 - DNA, 55 bp, Artificial; identical to SEQ ID NO: 138283
  Synthetic oligonucleotide

SEQ ID NO: 652351 - DNA, 55 bp, Artificial; identical to SEQ ID NO: 136185
  Synthetic oligonucleotide

SEQ ID NO: 652352 - DNA, 55 bp, Artificial; identical to SEQ ID NO: 136186
  Synthetic oligonucleotide

SEQ ID NO: 652353 - DNA, 58 bp, Artificial; identical to SEQ ID NO: 135663
  Synthetic oligonucleotide

SEQ ID NO: 652354 - DNA, 55 bp, Artificial; identical to SEQ ID NO: 138719
  Synthetic oligonucleotide

SEQ ID NO: 652355 - DNA, 51 bp, Artificial; identical to SEQ ID NO: 134805
  Synthetic oligonucleotide

SEQ ID NO: 652356 - DNA, 56 bp, Artificial; identical to SEQ ID NO: 138282
  Synthetic oligonucleotide

SEQ ID NO: 652357 - DNA, 57 bp, Artificial; identical to SEQ ID NO: 136998
  Synthetic oligonucleotide

SEQ ID NO: 652358 - DNA, 55 bp, Artificial; identical to SEQ ID NO: 138715
  Synthetic oligonucleotide

SEQ ID NO: 652359 - DNA, 53 bp, Artificial; identical to SEQ ID NO: 134511
  Synthetic oligonucleotide

SEQ ID NO: 652360 - DNA, 50 bp, Artificial; identical to SEQ ID NO: 135262
  Synthetic oligonucleotide

SEQ ID NO: 652361 - DNA, 51 bp, Artificial; identical to SEQ ID NO: 136923
  Synthetic oligonucleotide

SEQ ID NO: 652362 - DNA, 50 bp, Artificial; identical to SEQ ID NO: 136944
  Synthetic oligonucleotide

SEQ ID NO: 652363 - DNA, 59 bp, Artificial; identical to SEQ ID NO: 137247
  Synthetic oligonucleotide

SEQ ID NO: 652364 - DNA, 55 bp, Artificial; identical to SEQ ID NO: 139278
  Synthetic oligonucleotide

SEQ ID NO: 652365 - DNA, 55 bp, Artificial; identical to SEQ ID NO: 137390
  Synthetic oligonucleotide

SEQ ID NO: 652366 - DNA, 55 bp, Artificial; identical to SEQ ID NO: 136986
  Synthetic oligonucleotide

SEQ ID NO: 652367 - DNA, 55 bp, Artificial; identical to SEQ ID NO: 133891
  Synthetic oligonucleotide

SEQ ID NO: 652368 - DNA, 50 bp, Artificial; identical to SEQ ID NO: 137227
  Synthetic oligonucleotide

SEQ ID NO: 652369 - DNA, 56 bp, Artificial; identical to SEQ ID NO: 135715
  Synthetic oligonucleotide

SEQ ID NO: 652370 - DNA, 55 bp, Artificial; identical to SEQ ID NO: 138354
  Synthetic oligonucleotide

SEQ ID NO: 652371 - DNA, 55 bp, Artificial; identical to SEQ ID NO: 133584
  Synthetic oligonucleotide

SEQ ID NO: 652372 - DNA, 55 bp, Artificial; identical to SEQ ID NO: 133585
  Synthetic oligonucleotide

SEQ ID NO: 652373 - DNA, 54 bp, Artificial; identical to SEQ ID NO: 136851
  Synthetic oligonucleotide

SEQ ID NO: 652374 - DNA, 55 bp, Artificial; identical to SEQ ID NO: 139279
  Synthetic oligonucleotide

SEQ ID NO: 652375 - DNA, 55 bp, Artificial; identical to SEQ ID NO: 135836
  Synthetic oligonucleotide

SEQ ID NO: 652376 - DNA, 49 bp, Artificial; identical to SEQ ID NO: 139037
  Synthetic oligonucleotide

SEQ ID NO: 652377 - DNA, 51 bp, Artificial; identical to SEQ ID NO: 139121
  Synthetic oligonucleotide

SEQ ID NO: 652378 - DNA, 58 bp, Artificial; identical to SEQ ID NO: 141051
  Synthetic oligonucleotide

SEQ ID NO: 652379 - DNA, 56 bp, Artificial; identical to SEQ ID NO: 136981
  Synthetic oligonucleotide

SEQ ID NO: 652380 - DNA, 54 bp, Artificial; identical to SEQ ID NO: 136854
  Synthetic oligonucleotide

SEQ ID NO: 652381 - DNA, 50 bp, Artificial; identical to SEQ ID NO: 138023
  Synthetic oligonucleotide

SEQ ID NO: 652382 - DNA, 59 bp, Artificial; identical to SEQ ID NO: 137251
  Synthetic oligonucleotide

SEQ ID NO: 652383 - DNA, 54 bp, Artificial; identical to SEQ ID NO: 133880
  Synthetic oligonucleotide

SEQ ID NO: 652384 - DNA, 60 bp, Artificial; identical to SEQ ID NO: 136456
  Synthetic oligonucleotide

SEQ ID NO: 652385 - DNA, 54 bp, Artificial; identical to SEQ ID NO: 139512
  Synthetic oligonucleotide

SEQ ID NO: 652386 - DNA, 55 bp, Artificial; identical to SEQ ID NO: 139513
  Synthetic oligonucleotide

SEQ ID NO: 652387 - DNA, 51 bp, Artificial; identical to SEQ ID NO: 139114
  Synthetic oligonucleotide

SEQ ID NO: 652388 - DNA, 55 bp, Artificial; identical to SEQ ID NO: 138236
  Synthetic oligonucleotide

SEQ ID NO: 652389 - DNA, 58 bp, Artificial; identical to SEQ ID NO: 140204
  Synthetic oligonucleotide

SEQ ID NO: 652390 - DNA, 55 bp, Artificial; identical to SEQ ID NO: 135804
  Synthetic oligonucleotide

SEQ ID NO: 652391 - DNA, 55 bp, Artificial; identical to SEQ ID NO: 137649
  Synthetic oligonucleotide

SEQ ID NO: 652392 - DNA, 55 bp, Artificial; identical to SEQ ID NO: 138710
  Synthetic oligonucleotide

SEQ ID NO: 652393 - DNA, 51 bp, Artificial; identical to SEQ ID NO: 138262
  Synthetic oligonucleotide

SEQ ID NO: 652394 - DNA, 51 bp, Artificial; identical to SEQ ID NO: 140183
  Synthetic oligonucleotide

SEQ ID NO: 652395 - DNA, 55 bp, Artificial; identical to SEQ ID NO: 140283
  Synthetic oligonucleotide

SEQ ID NO: 652396 - DNA, 55 bp, Artificial; identical to SEQ ID NO: 136697
  Synthetic oligonucleotide

SEQ ID NO: 652397 - DNA, 55 bp, Artificial; identical to SEQ ID NO: 137388
  Synthetic oligonucleotide

SEQ ID NO: 652398 - DNA, 55 bp, Artificial; identical to SEQ ID NO: 140281
  Synthetic oligonucleotide

SEQ ID NO: 652399 - DNA, 55 bp, Artificial; identical to SEQ ID NO: 135840
  Synthetic oligonucleotide

SEQ ID NO: 652400 - DNA, 55 bp, Artificial; identical to SEQ ID NO: 134005
  Synthetic oligonucleotide

SEQ ID NO: 652401 - DNA, 55 bp, Artificial; identical to SEQ ID NO: 141101
  Synthetic oligonucleotide

SEQ ID NO: 652402 - DNA, 52 bp, Artificial; identical to SEQ ID NO: 134576
  Synthetic oligonucleotide

SEQ ID NO: 652403 - DNA, 60 bp, Artificial; identical to SEQ ID NO: 139838
  Synthetic oligonucleotide

SEQ ID NO: 652404 - DNA, 55 bp, Artificial; identical to SEQ ID NO: 140280
  Synthetic oligonucleotide

SEQ ID NO: 652405 - DNA, 55 bp, Artificial; identical to SEQ ID NO: 136733
  Synthetic oligonucleotide

SEQ ID NO: 652406 - DNA, 53 bp, Artificial; identical to SEQ ID NO: 133317
  Synthetic oligonucleotide

SEQ ID NO: 652407 - DNA, 55 bp, Artificial; identical to SEQ ID NO: 140990
  Synthetic oligonucleotide

SEQ ID NO: 652408 - DNA, 51 bp, Artificial; identical to SEQ ID NO: 136412
  Synthetic oligonucleotide

SEQ ID NO: 652409 - DNA, 55 bp, Artificial; identical to SEQ ID NO: 137410
  Synthetic oligonucleotide

SEQ ID NO: 652410 - DNA, 58 bp, Artificial; identical to SEQ ID NO: 135660
  Synthetic oligonucleotide

SEQ ID NO: 652411 - DNA, 55 bp, Artificial; identical to SEQ ID NO: 139519
  Synthetic oligonucleotide

SEQ ID NO: 652412 - DNA, 55 bp, Artificial; identical to SEQ ID NO: 136734
  Synthetic oligonucleotide

SEQ ID NO: 652413 - DNA, 57 bp, Artificial; identical to SEQ ID NO: 137014
  Synthetic oligonucleotide

SEQ ID NO: 652414 - DNA, 55 bp, Artificial; identical to SEQ ID NO: 135739
  Synthetic oligonucleotide

SEQ ID NO: 652415 - DNA, 54 bp, Artificial; identical to SEQ ID NO: 136540
  Synthetic oligonucleotide

SEQ ID NO: 652416 - DNA, 55 bp, Artificial; identical to SEQ ID NO: 137289
  Synthetic oligonucleotide

SEQ ID NO: 652417 - DNA, 55 bp, Artificial; identical to SEQ ID NO: 139521
  Synthetic oligonucleotide

SEQ ID NO: 652418 - DNA, 60 bp, Artificial; identical to SEQ ID NO: 135279
  Synthetic oligonucleotide

SEQ ID NO: 652419 - DNA, 55 bp, Artificial; identical to SEQ ID NO: 140131
  Synthetic oligonucleotide

SEQ ID NO: 652420 - DNA, 52 bp, Artificial; identical to SEQ ID NO: 137426
  Synthetic oligonucleotide

SEQ ID NO: 652421 - DNA, 55 bp, Artificial; identical to SEQ ID NO: 136710
  Synthetic oligonucleotide

SEQ ID NO: 652422 - DNA, 60 bp, Artificial; identical to SEQ ID NO: 138516
  Synthetic oligonucleotide

SEQ ID NO: 652423 - DNA, 55 bp, Artificial; identical to SEQ ID NO: 137288
  Synthetic oligonucleotide

SEQ ID NO: 652424 - DNA, 55 bp, Artificial; identical to SEQ ID NO: 137279
  Synthetic oligonucleotide

SEQ ID NO: 652425 - DNA, 55 bp, Artificial; identical to SEQ ID NO: 135775
  Synthetic oligonucleotide

SEQ ID NO: 652426 - DNA, 55 bp, Artificial; identical to SEQ ID NO: 137389
  Synthetic oligonucleotide

SEQ ID NO: 652427 - DNA, 55 bp, Artificial; identical to SEQ ID NO: 138738
  Synthetic oligonucleotide

SEQ ID NO: 652428 - DNA, 55 bp, Artificial; identical to SEQ ID NO: 139524
  Synthetic oligonucleotide

SEQ ID NO: 652429 - DNA, 55 bp, Artificial; identical to SEQ ID NO: 138736
  Synthetic oligonucleotide

SEQ ID NO: 652430 - DNA, 52 bp, Artificial; identical to SEQ ID NO: 140067
  Synthetic oligonucleotide

SEQ ID NO: 652431 - DNA, 54 bp, Artificial; identical to SEQ ID NO: 139030
  Synthetic oligonucleotide

SEQ ID NO: 652432 - DNA, 57 bp, Artificial; identical to SEQ ID NO: 140013
  Synthetic oligonucleotide

SEQ ID NO: 652433 - DNA, 54 bp, Artificial; identical to SEQ ID NO: 134472
  Synthetic oligonucleotide

SEQ ID NO: 652434 - DNA, 55 bp, Artificial; identical to SEQ ID NO: 139525
  Synthetic oligonucleotide

SEQ ID NO: 652435 - DNA, 55 bp, Artificial; identical to SEQ ID NO: 140959
  Synthetic oligonucleotide

SEQ ID NO: 652436 - DNA, 55 bp, Artificial; identical to SEQ ID NO: 135774
  Synthetic oligonucleotide

SEQ ID NO: 652437 - DNA, 60 bp, Artificial; identical to SEQ ID NO: 135312
  Synthetic oligonucleotide

SEQ ID NO: 652438 - DNA, 55 bp, Artificial; identical to SEQ ID NO: 140772
  Synthetic oligonucleotide

SEQ ID NO: 652439 - DNA, 57 bp, Artificial; identical to SEQ ID NO: 136781
  Synthetic oligonucleotide

SEQ ID NO: 652440 - DNA, 55 bp, Artificial; identical to SEQ ID NO: 133836
  Synthetic oligonucleotide

SEQ ID NO: 652441 - DNA, 55 bp, Artificial; identical to SEQ ID NO: 139528
  Synthetic oligonucleotide

SEQ ID NO: 652442 - DNA, 55 bp, Artificial; identical to SEQ ID NO: 133825
  Synthetic oligonucleotide

SEQ ID NO: 652443 - DNA, 55 bp, Artificial; identical to SEQ ID NO: 137280
  Synthetic oligonucleotide

SEQ ID NO: 652444 - DNA, 55 bp, Artificial; identical to SEQ ID NO: 137678
  Synthetic oligonucleotide

SEQ ID NO: 652445 - DNA, 52 bp, Artificial; identical to SEQ ID NO: 135756
  Synthetic oligonucleotide

SEQ ID NO: 652446 - DNA, 54 bp, Artificial; identical to SEQ ID NO: 135356
  Synthetic oligonucleotide

SEQ ID NO: 652447 - DNA, 55 bp, Artificial; identical to SEQ ID NO: 135753
  Synthetic oligonucleotide

SEQ ID NO: 652448 - DNA, 51 bp, Artificial; identical to SEQ ID NO: 139123
  Synthetic oligonucleotide

SEQ ID NO: 652449 - DNA, 56 bp, Artificial; identical to SEQ ID NO: 138636
  Synthetic oligonucleotide

SEQ ID NO: 652450 - DNA, 55 bp, Artificial; identical to SEQ ID NO: 137782
  Synthetic oligonucleotide

SEQ ID NO: 652451 - DNA, 55 bp, Artificial; identical to SEQ ID NO: 136700
  Synthetic oligonucleotide

SEQ ID NO: 652452 - DNA, 50 bp, Artificial; identical to SEQ ID NO: 138016
  Synthetic oligonucleotide

SEQ ID NO: 652453 - DNA, 50 bp, Artificial; identical to SEQ ID NO: 139858
  Synthetic oligonucleotide

SEQ ID NO: 652454 - DNA, 55 bp, Artificial; identical to SEQ ID NO: 137282
  Synthetic oligonucleotide

SEQ ID NO: 652455 - DNA, 55 bp, Artificial; identical to SEQ ID NO: 138267
  Synthetic oligonucleotide

SEQ ID NO: 652456 - DNA, 55 bp, Artificial; identical to SEQ ID NO: 133791
  Synthetic oligonucleotide

SEQ ID NO: 652457 - DNA, 55 bp, Artificial; identical to SEQ ID NO: 138724
  Synthetic oligonucleotide

SEQ ID NO: 652458 - DNA, 55 bp, Artificial; identical to SEQ ID NO: 140276
  Synthetic oligonucleotide

SEQ ID NO: 652459 - DNA, 55 bp, Artificial; identical to SEQ ID NO: 140991
  Synthetic oligonucleotide

SEQ ID NO: 652460 - DNA, 55 bp, Artificial; identical to SEQ ID NO: 137679
  Synthetic oligonucleotide

SEQ ID NO: 652461 - DNA, 55 bp, Artificial; identical to SEQ ID NO: 138723
  Synthetic oligonucleotide

SEQ ID NO: 652462 - DNA, 55 bp, Artificial; identical to SEQ ID NO: 133780
  Synthetic oligonucleotide

SEQ ID NO: 652463 - DNA, 56 bp, Artificial; identical to SEQ ID NO: 135713
  Synthetic oligonucleotide

SEQ ID NO: 652464 - DNA, 55 bp, Artificial; identical to SEQ ID NO: 135956
  Synthetic oligonucleotide

SEQ ID NO: 652465 - DNA, 55 bp, Artificial; identical to SEQ ID NO: 133588
  Synthetic oligonucleotide

SEQ ID NO: 652466 - DNA, 54 bp, Artificial; identical to SEQ ID NO: 138676
  Synthetic oligonucleotide

SEQ ID NO: 652467 - DNA, 55 bp, Artificial; identical to SEQ ID NO: 140275
  Synthetic oligonucleotide

SEQ ID NO: 652468 - DNA, 55 bp, Artificial; identical to SEQ ID NO: 135922
  Synthetic oligonucleotide

SEQ ID NO: 652469 - DNA, 55 bp, Artificial; identical to SEQ ID NO: 135927
  Synthetic oligonucleotide

SEQ ID NO: 652470 - DNA, 55 bp, Artificial; identical to SEQ ID NO: 137284
  Synthetic oligonucleotide

SEQ ID NO: 652471 - DNA, 55 bp, Artificial; identical to SEQ ID NO: 140274
  Synthetic oligonucleotide

SEQ ID NO: 652472 - DNA, 58 bp, Artificial; identical to SEQ ID NO: 139245
  Synthetic oligonucleotide

SEQ ID NO: 652473 - DNA, 50 bp, Artificial; identical to SEQ ID NO: 137050
  Synthetic oligonucleotide

SEQ ID NO: 652474 - DNA, 55 bp, Artificial; identical to SEQ ID NO: 139531
  Synthetic oligonucleotide

SEQ ID NO: 652475 - DNA, 55 bp, Artificial; identical to SEQ ID NO: 139489
  Synthetic oligonucleotide

SEQ ID NO: 652476 - DNA, 55 bp, Artificial; identical to SEQ ID NO: 138285
  Synthetic oligonucleotide

SEQ ID NO: 652477 - DNA, 55 bp, Artificial; identical to SEQ ID NO: 136393
  Synthetic oligonucleotide

SEQ ID NO: 652478 - DNA, 55 bp, Artificial; identical to SEQ ID NO: 136702
  Synthetic oligonucleotide

SEQ ID NO: 652479 - DNA, 55 bp, Artificial; identical to SEQ ID NO: 133769
  Synthetic oligonucleotide

SEQ ID NO: 652480 - DNA, 55 bp, Artificial; identical to SEQ ID NO: 136712
  Synthetic oligonucleotide

SEQ ID NO: 652481 - DNA, 54 bp, Artificial; identical to SEQ ID NO: 137331
  Synthetic oligonucleotide

SEQ ID NO: 652482 - DNA, 55 bp, Artificial; identical to SEQ ID NO: 133672
  Synthetic oligonucleotide

SEQ ID NO: 652483 - DNA, 55 bp, Artificial; identical to SEQ ID NO: 140765
  Synthetic oligonucleotide

SEQ ID NO: 652484 - DNA, 54 bp, Artificial; identical to SEQ ID NO: 139042
  Synthetic oligonucleotide

SEQ ID NO: 652485 - DNA, 51 bp, Artificial; identical to SEQ ID NO: 139684
  Synthetic oligonucleotide

SEQ ID NO: 652486 - DNA, 54 bp, Artificial; identical to SEQ ID NO: 140273
  Synthetic oligonucleotide

SEQ ID NO: 652487 - DNA, 54 bp, Artificial; identical to SEQ ID NO: 134496
  Synthetic oligonucleotide

SEQ ID NO: 652488 - DNA, 58 bp, Artificial; identical to SEQ ID NO: 138618
  Synthetic oligonucleotide

SEQ ID NO: 652489 - DNA, 55 bp, Artificial; identical to SEQ ID NO: 133590
  Synthetic oligonucleotide

SEQ ID NO: 652490 - DNA, 55 bp, Artificial; identical to SEQ ID NO: 140049
  Synthetic oligonucleotide

SEQ ID NO: 652491 - DNA, 55 bp, Artificial; identical to SEQ ID NO: 140272
  Synthetic oligonucleotide

SEQ ID NO: 652492 - DNA, 58 bp, Artificial; identical to SEQ ID NO: 138552
  Synthetic oligonucleotide

SEQ ID NO: 652493 - DNA, 55 bp, Artificial; identical to SEQ ID NO: 133668
  Synthetic oligonucleotide

SEQ ID NO: 652494 - DNA, 55 bp, Artificial; identical to SEQ ID NO: 135978
  Synthetic oligonucleotide

SEQ ID NO: 652495 - DNA, 55 bp, Artificial; identical to SEQ ID NO: 141099
  Synthetic oligonucleotide

SEQ ID NO: 652496 - DNA, 55 bp, Artificial; identical to SEQ ID NO: 137783
  Synthetic oligonucleotide

SEQ ID NO: 652497 - DNA, 55 bp, Artificial; identical to SEQ ID NO: 138287
  Synthetic oligonucleotide

SEQ ID NO: 652498 - DNA, 55 bp, Artificial; identical to SEQ ID NO: 135981
  Synthetic oligonucleotide

SEQ ID NO: 652499 - DNA, 55 bp, Artificial; identical to SEQ ID NO: 135982
  Synthetic oligonucleotide

SEQ ID NO: 652500 - DNA, 55 bp, Artificial; identical to SEQ ID NO: 135983
  Synthetic oligonucleotide

SEQ ID NO: 652501 - DNA, 55 bp, Artificial; identical to SEQ ID NO: 140775
  Synthetic oligonucleotide

SEQ ID NO: 652502 - DNA, 55 bp, Artificial; identical to SEQ ID NO: 135986
  Synthetic oligonucleotide

SEQ ID NO: 652503 - DNA, 53 bp, Artificial; identical to SEQ ID NO: 140998
  Synthetic oligonucleotide

SEQ ID NO: 652504 - DNA, 55 bp, Artificial; identical to SEQ ID NO: 140047
  Synthetic oligonucleotide

SEQ ID NO: 652505 - DNA, 55 bp, Artificial; identical to SEQ ID NO: 140766
  Synthetic oligonucleotide

SEQ ID NO: 652506 - DNA, 57 bp, Artificial; identical to SEQ ID NO: 135467
  Synthetic oligonucleotide

SEQ ID NO: 652507 - DNA, 55 bp, Artificial; identical to SEQ ID NO: 139495
  Synthetic oligonucleotide

SEQ ID NO: 652508 - DNA, 58 bp, Artificial; identical to SEQ ID NO: 135479
  Synthetic oligonucleotide

SEQ ID NO: 652509 - DNA, 55 bp, Artificial; identical to SEQ ID NO: 137285
  Synthetic oligonucleotide

SEQ ID NO: 652510 - DNA, 52 bp, Artificial; identical to SEQ ID NO: 140370
  Synthetic oligonucleotide

SEQ ID NO: 652511 - DNA, 55 bp, Artificial; identical to SEQ ID NO: 133594
  Synthetic oligonucleotide

SEQ ID NO: 652512 - DNA, 55 bp, Artificial; identical to SEQ ID NO: 135971
  Synthetic oligonucleotide

SEQ ID NO: 652513 - DNA, 58 bp, Artificial; identical to SEQ ID NO: 135501
  Synthetic oligonucleotide

SEQ ID NO: 652514 - DNA, 54 bp, Artificial; identical to SEQ ID NO: 140270
  Synthetic oligonucleotide

SEQ ID NO: 652515 - DNA, 51 bp, Artificial; identical to SEQ ID NO: 134721
  Synthetic oligonucleotide

SEQ ID NO: 652516 - DNA, 55 bp, Artificial; identical to SEQ ID NO: 135874
  Synthetic oligonucleotide

SEQ ID NO: 652517 - DNA, 55 bp, Artificial; identical to SEQ ID NO: 139496
  Synthetic oligonucleotide

SEQ ID NO: 652518 - DNA, 55 bp, Artificial; identical to SEQ ID NO: 135882
  Synthetic oligonucleotide

SEQ ID NO: 652519 - DNA, 55 bp, Artificial; identical to SEQ ID NO: 135866
  Synthetic oligonucleotide

SEQ ID NO: 652520 - DNA, 58 bp, Artificial; identical to SEQ ID NO: 135638
  Synthetic oligonucleotide

SEQ ID NO: 652521 - DNA, 55 bp, Artificial; identical to SEQ ID NO: 139497
  Synthetic oligonucleotide

SEQ ID NO: 652522 - DNA, 55 bp, Artificial; identical to SEQ ID NO: 135862
  Synthetic oligonucleotide

SEQ ID NO: 652523 - DNA, 55 bp, Artificial; identical to SEQ ID NO: 135861
  Synthetic oligonucleotide

SEQ ID NO: 652524 - DNA, 55 bp, Artificial; identical to SEQ ID NO: 140053
  Synthetic oligonucleotide

SEQ ID NO: 652525 - DNA, 54 bp, Artificial; identical to SEQ ID NO: 138566
  Synthetic oligonucleotide

SEQ ID NO: 652526 - DNA, 52 bp, Artificial; identical to SEQ ID NO: 139578
  Synthetic oligonucleotide

SEQ ID NO: 652527 - DNA, 55 bp, Artificial; identical to SEQ ID NO: 141097
  Synthetic oligonucleotide

SEQ ID NO: 652528 - DNA, 55 bp, Artificial; identical to SEQ ID NO: 138662
  Synthetic oligonucleotide

SEQ ID NO: 652529 - DNA, 55 bp, Artificial; identical to SEQ ID NO: 138356
  Synthetic oligonucleotide

SEQ ID NO: 652530 - DNA, 55 bp, Artificial; identical to SEQ ID NO: 135855
  Synthetic oligonucleotide

SEQ ID NO: 652531 - DNA, 55 bp, Artificial; identical to SEQ ID NO: 140318
  Synthetic oligonucleotide

SEQ ID NO: 652532 - DNA, 55 bp, Artificial; identical to SEQ ID NO: 140906
  Synthetic oligonucleotide

SEQ ID NO: 652533 - DNA, 55 bp, Artificial; identical to SEQ ID NO: 135853
  Synthetic oligonucleotide

SEQ ID NO: 652534 - DNA, 56 bp, Artificial; identical to SEQ ID NO: 135543
  Synthetic oligonucleotide

SEQ ID NO: 652535 - DNA, 51 bp, Artificial; identical to SEQ ID NO: 137516
  Synthetic oligonucleotide

SEQ ID NO: 652536 - DNA, 55 bp, Artificial; identical to SEQ ID NO: 139499
  Synthetic oligonucleotide

SEQ ID NO: 652537 - DNA, 55 bp, Artificial; identical to SEQ ID NO: 135919
  Synthetic oligonucleotide

SEQ ID NO: 652538 - DNA, 55 bp, Artificial; identical to SEQ ID NO: 138698
  Synthetic oligonucleotide

SEQ ID NO: 652539 - DNA, 55 bp, Artificial; identical to SEQ ID NO: 138697
  Synthetic oligonucleotide

SEQ ID NO: 652540 - DNA, 52 bp, Artificial; identical to SEQ ID NO: 134611
  Synthetic oligonucleotide

SEQ ID NO: 652541 - DNA, 55 bp, Artificial; identical to SEQ ID NO: 140721
  Synthetic oligonucleotide

SEQ ID NO: 652542 - DNA, 51 bp, Artificial; identical to SEQ ID NO: 137210
  Synthetic oligonucleotide

SEQ ID NO: 652543 - DNA, 55 bp, Artificial; identical to SEQ ID NO: 135891
  Synthetic oligonucleotide

SEQ ID NO: 652544 - DNA, 50 bp, Artificial; identical to SEQ ID NO: 139189
  Synthetic oligonucleotide

SEQ ID NO: 652545 - DNA, 59 bp, Artificial; identical to SEQ ID NO: 135545
  Synthetic oligonucleotide

SEQ ID NO: 652546 - DNA, 54 bp, Artificial; identical to SEQ ID NO: 134465
  Synthetic oligonucleotide

SEQ ID NO: 652547 - DNA, 51 bp, Artificial; identical to SEQ ID NO: 139127
  Synthetic oligonucleotide

SEQ ID NO: 652548 - DNA, 50 bp, Artificial; identical to SEQ ID NO: 135227
  Synthetic oligonucleotide

SEQ ID NO: 652549 - DNA, 55 bp, Artificial; identical to SEQ ID NO: 138693
  Synthetic oligonucleotide

SEQ ID NO: 652550 - DNA, 55 bp, Artificial; identical to SEQ ID NO: 136698
  Synthetic oligonucleotide

SEQ ID NO: 652551 - DNA, 55 bp, Artificial; identical to SEQ ID NO: 138692
  Synthetic oligonucleotide

SEQ ID NO: 652552 - DNA, 55 bp, Artificial; identical to SEQ ID NO: 141095
  Synthetic oligonucleotide

SEQ ID NO: 652553 - DNA, 55 bp, Artificial; identical to SEQ ID NO: 135893
  Synthetic oligonucleotide

SEQ ID NO: 652554 - DNA, 55 bp, Artificial; identical to SEQ ID NO: 139503
  Synthetic oligonucleotide

SEQ ID NO: 652555 - DNA, 59 bp, Artificial; identical to SEQ ID NO: 134923
  Synthetic oligonucleotide

SEQ ID NO: 652556 - DNA, 51 bp, Artificial; identical to SEQ ID NO: 137211
  Synthetic oligonucleotide

SEQ ID NO: 652557 - DNA, 55 bp, Artificial; identical to SEQ ID NO: 133665
  Synthetic oligonucleotide

SEQ ID NO: 652558 - DNA, 55 bp, Artificial; identical to SEQ ID NO: 135902
  Synthetic oligonucleotide

SEQ ID NO: 652559 - DNA, 60 bp, Artificial; identical to SEQ ID NO: 136600
  Synthetic oligonucleotide

SEQ ID NO: 652560 - DNA, 55 bp, Artificial; identical to SEQ ID NO: 133302
  Synthetic oligonucleotide

SEQ ID NO: 652561 - DNA, 59 bp, Artificial; identical to SEQ ID NO: 140024
  Synthetic oligonucleotide

SEQ ID NO: 652562 - DNA, 55 bp, Artificial; identical to SEQ ID NO: 139507
  Synthetic oligonucleotide

SEQ ID NO: 652563 - DNA, 54 bp, Artificial; identical to SEQ ID NO: 139509
  Synthetic oligonucleotide

SEQ ID NO: 652564 - DNA, 55 bp, Artificial; identical to SEQ ID NO: 134317
  Synthetic oligonucleotide

SEQ ID NO: 652565 - DNA, 54 bp, Artificial; identical to SEQ ID NO: 136547
  Synthetic oligonucleotide

SEQ ID NO: 652566 - DNA, 51 bp, Artificial; identical to SEQ ID NO: 134728
  Synthetic oligonucleotide

SEQ ID NO: 652567 - DNA, 54 bp, Artificial; identical to SEQ ID NO: 139552
  Synthetic oligonucleotide

SEQ ID NO: 652568 - DNA, 55 bp, Artificial; identical to SEQ ID NO: 134309
  Synthetic oligonucleotide

SEQ ID NO: 652569 - DNA, 55 bp, Artificial; identical to SEQ ID NO: 138685
  Synthetic oligonucleotide

SEQ ID NO: 652570 - DNA, 56 bp, Artificial; identical to SEQ ID NO: 135658
  Synthetic oligonucleotide

SEQ ID NO: 652571 - DNA, 51 bp, Artificial; identical to SEQ ID NO: 139130
  Synthetic oligonucleotide

SEQ ID NO: 652572 - DNA, 58 bp, Artificial; identical to SEQ ID NO: 137114
  Synthetic oligonucleotide

SEQ ID NO: 652573 - DNA, 55 bp, Artificial; identical to SEQ ID NO: 139554
  Synthetic oligonucleotide

SEQ ID NO: 652574 - DNA, 55 bp, Artificial; identical to SEQ ID NO: 136693
  Synthetic oligonucleotide

SEQ ID NO: 652575 - DNA, 55 bp, Artificial; identical to SEQ ID NO: 140900
  Synthetic oligonucleotide

SEQ ID NO: 652576 - DNA, 60 bp, Artificial; identical to SEQ ID NO: 134934
  Synthetic oligonucleotide

SEQ ID NO: 652577 - DNA, 52 bp, Artificial; identical to SEQ ID NO: 134614
  Synthetic oligonucleotide

SEQ ID NO: 652578 - DNA, 58 bp, Artificial; identical to SEQ ID NO: 137920
  Synthetic oligonucleotide

SEQ ID NO: 652579 - DNA, 51 bp, Artificial; identical to SEQ ID NO: 139665
  Synthetic oligonucleotide

SEQ ID NO: 652580 - DNA, 55 bp, Artificial; identical to SEQ ID NO: 138358
  Synthetic oligonucleotide

SEQ ID NO: 652581 - DNA, 57 bp, Artificial; identical to SEQ ID NO: 138631
  Synthetic oligonucleotide

SEQ ID NO: 652582 - DNA, 55 bp, Artificial; identical to SEQ ID NO: 137686
  Synthetic oligonucleotide

SEQ ID NO: 652583 - DNA, 55 bp, Artificial; identical to SEQ ID NO: 137771
  Synthetic oligonucleotide

SEQ ID NO: 652584 - DNA, 53 bp, Artificial; identical to SEQ ID NO: 140161
  Synthetic oligonucleotide

SEQ ID NO: 652585 - DNA, 56 bp, Artificial; identical to SEQ ID NO: 138983
  Synthetic oligonucleotide

SEQ ID NO: 652586 - DNA, 55 bp, Artificial; identical to SEQ ID NO: 133659
  Synthetic oligonucleotide

SEQ ID NO: 652587 - DNA, 55 bp, Artificial; identical to SEQ ID NO: 139561
  Synthetic oligonucleotide

SEQ ID NO: 652588 - DNA, 55 bp, Artificial; identical to SEQ ID NO: 137768
  Synthetic oligonucleotide

SEQ ID NO: 652589 - DNA, 54 bp, Artificial; identical to SEQ ID NO: 133554
  Synthetic oligonucleotide

SEQ ID NO: 652590 - DNA, 55 bp, Artificial; identical to SEQ ID NO: 134297
  Synthetic oligonucleotide

SEQ ID NO: 652591 - DNA, 52 bp, Artificial; identical to SEQ ID NO: 140066
  Synthetic oligonucleotide

SEQ ID NO: 652592 - DNA, 55 bp, Artificial; identical to SEQ ID NO: 134296
  Synthetic oligonucleotide

SEQ ID NO: 652593 - DNA, 53 bp, Artificial; identical to SEQ ID NO: 134513
  Synthetic oligonucleotide

SEQ ID NO: 652594 - DNA, 55 bp, Artificial; identical to SEQ ID NO: 139565
  Synthetic oligonucleotide

SEQ ID NO: 652595 - DNA, 55 bp, Artificial; identical to SEQ ID NO: 138290
  Synthetic oligonucleotide

SEQ ID NO: 652596 - DNA, 55 bp, Artificial; identical to SEQ ID NO: 134294
  Synthetic oligonucleotide

SEQ ID NO: 652597 - DNA, 55 bp, Artificial; identical to SEQ ID NO: 137283
  Synthetic oligonucleotide

SEQ ID NO: 652598 - DNA, 55 bp, Artificial; identical to SEQ ID NO: 139559
  Synthetic oligonucleotide

SEQ ID NO: 652599 - DNA, 52 bp, Artificial; identical to SEQ ID NO: 137957
  Synthetic oligonucleotide

SEQ ID NO: 652600 - DNA, 55 bp, Artificial; identical to SEQ ID NO: 134288
  Synthetic oligonucleotide

SEQ ID NO: 652601 - DNA, 55 bp, Artificial; identical to SEQ ID NO: 136688
  Synthetic oligonucleotide

SEQ ID NO: 652602 - DNA, 55 bp, Artificial; identical to SEQ ID NO: 137281
  Synthetic oligonucleotide

SEQ ID NO: 652603 - DNA, 50 bp, Artificial; identical to SEQ ID NO: 136619
  Synthetic oligonucleotide

SEQ ID NO: 652604 - DNA, 60 bp, Artificial; identical to SEQ ID NO: 139006
  Synthetic oligonucleotide

SEQ ID NO: 652605 - DNA, 55 bp, Artificial; identical to SEQ ID NO: 138142
  Synthetic oligonucleotide

SEQ ID NO: 652606 - DNA, 56 bp, Artificial; identical to SEQ ID NO: 140982
  Synthetic oligonucleotide

SEQ ID NO: 652607 - DNA, 55 bp, Artificial; identical to SEQ ID NO: 134351
  Synthetic oligonucleotide

SEQ ID NO: 652608 - DNA, 55 bp, Artificial; identical to SEQ ID NO: 134346
  Synthetic oligonucleotide

SEQ ID NO: 652609 - DNA, 60 bp, Artificial; identical to SEQ ID NO: 137953
  Synthetic oligonucleotide

SEQ ID NO: 652610 - DNA, 55 bp, Artificial; identical to SEQ ID NO: 137804
  Synthetic oligonucleotide

SEQ ID NO: 652611 - DNA, 58 bp, Artificial; identical to SEQ ID NO: 139005
  Synthetic oligonucleotide

SEQ ID NO: 652612 - DNA, 55 bp, Artificial; identical to SEQ ID NO: 134335
  Synthetic oligonucleotide

SEQ ID NO: 652613 - DNA, 60 bp, Artificial; identical to SEQ ID NO: 135000
  Synthetic oligonucleotide

SEQ ID NO: 652614 - DNA, 56 bp, Artificial; identical to SEQ ID NO: 140981
  Synthetic oligonucleotide

SEQ ID NO: 652615 - DNA, 55 bp, Artificial; identical to SEQ ID NO: 134330
  Synthetic oligonucleotide

SEQ ID NO: 652616 - DNA, 55 bp, Artificial; identical to SEQ ID NO: 134328
  Synthetic oligonucleotide

SEQ ID NO: 652617 - DNA, 55 bp, Artificial; identical to SEQ ID NO: 134327
  Synthetic oligonucleotide

SEQ ID NO: 652618 - DNA, 52 bp, Artificial; identical to SEQ ID NO: 138462
  Synthetic oligonucleotide

SEQ ID NO: 652619 - DNA, 55 bp, Artificial; identical to SEQ ID NO: 134325
  Synthetic oligonucleotide

SEQ ID NO: 652620 - DNA, 55 bp, Artificial; identical to SEQ ID NO: 138528
  Synthetic oligonucleotide

SEQ ID NO: 652621 - DNA, 53 bp, Artificial; identical to SEQ ID NO: 140999
  Synthetic oligonucleotide

SEQ ID NO: 652622 - DNA, 50 bp, Artificial; identical to SEQ ID NO: 133445
  Synthetic oligonucleotide

SEQ ID NO: 652623 - DNA, 51 bp, Artificial; identical to SEQ ID NO: 136921
  Synthetic oligonucleotide

SEQ ID NO: 652624 - DNA, 55 bp, Artificial; identical to SEQ ID NO: 138798
  Synthetic oligonucleotide

SEQ ID NO: 652625 - DNA, 54 bp, Artificial; identical to SEQ ID NO: 140313
  Synthetic oligonucleotide

SEQ ID NO: 652626 - DNA, 55 bp, Artificial; identical to SEQ ID NO: 138796
  Synthetic oligonucleotide

SEQ ID NO: 652627 - DNA, 55 bp, Artificial; identical to SEQ ID NO: 133649
  Synthetic oligonucleotide

SEQ ID NO: 652628 - DNA, 51 bp, Artificial; identical to SEQ ID NO: 134687
  Synthetic oligonucleotide

SEQ ID NO: 652629 - DNA, 56 bp, Artificial; identical to SEQ ID NO: 139232
  Synthetic oligonucleotide

SEQ ID NO: 652630 - DNA, 55 bp, Artificial; identical to SEQ ID NO: 140899
  Synthetic oligonucleotide

SEQ ID NO: 652631 - DNA, 55 bp, Artificial; identical to SEQ ID NO: 138793
  Synthetic oligonucleotide

SEQ ID NO: 652632 - DNA, 55 bp, Artificial; identical to SEQ ID NO: 138265
  Synthetic oligonucleotide

SEQ ID NO: 652633 - DNA, 55 bp, Artificial; identical to SEQ ID NO: 138792
  Synthetic oligonucleotide

SEQ ID NO: 652634 - DNA, 55 bp, Artificial; identical to SEQ ID NO: 140312
  Synthetic oligonucleotide

SEQ ID NO: 652635 - DNA, 55 bp, Artificial; identical to SEQ ID NO: 139532
  Synthetic oligonucleotide

SEQ ID NO: 652636 - DNA, 55 bp, Artificial; identical to SEQ ID NO: 140311
  Synthetic oligonucleotide

SEQ ID NO: 652637 - DNA, 55 bp, Artificial; identical to SEQ ID NO: 138788
  Synthetic oligonucleotide

SEQ ID NO: 652638 - DNA, 55 bp, Artificial; identical to SEQ ID NO: 140310
  Synthetic oligonucleotide

SEQ ID NO: 652639 - DNA, 55 bp, Artificial; identical to SEQ ID NO: 140309
  Synthetic oligonucleotide

SEQ ID NO: 652640 - DNA, 55 bp, Artificial; identical to SEQ ID NO: 138787
  Synthetic oligonucleotide

SEQ ID NO: 652641 - DNA, 55 bp, Artificial; identical to SEQ ID NO: 139537
  Synthetic oligonucleotide

SEQ ID NO: 652642 - DNA, 52 bp, Artificial; identical to SEQ ID NO: 137500
  Synthetic oligonucleotide

SEQ ID NO: 652643 - DNA, 55 bp, Artificial; identical to SEQ ID NO: 133651
  Synthetic oligonucleotide

SEQ ID NO: 652644 - DNA, 50 bp, Artificial; identical to SEQ ID NO: 138012
  Synthetic oligonucleotide

SEQ ID NO: 652645 - DNA, 55 bp, Artificial; identical to SEQ ID NO: 138829
  Synthetic oligonucleotide

SEQ ID NO: 652646 - DNA, 55 bp, Artificial; identical to SEQ ID NO: 141092
  Synthetic oligonucleotide

SEQ ID NO: 652647 - DNA, 55 bp, Artificial; identical to SEQ ID NO: 138827
  Synthetic oligonucleotide

SEQ ID NO: 652648 - DNA, 54 bp, Artificial; identical to SEQ ID NO: 137028
  Synthetic oligonucleotide

SEQ ID NO: 652649 - DNA, 54 bp, Artificial; identical to SEQ ID NO: 138042
  Synthetic oligonucleotide

SEQ ID NO: 652650 - DNA, 55 bp, Artificial; identical to SEQ ID NO: 136762
  Synthetic oligonucleotide

SEQ ID NO: 652651 - DNA, 55 bp, Artificial; identical to SEQ ID NO: 139545
  Synthetic oligonucleotide

SEQ ID NO: 652652 - DNA, 55 bp, Artificial; identical to SEQ ID NO: 136763
  Synthetic oligonucleotide

SEQ ID NO: 652653 - DNA, 55 bp, Artificial; identical to SEQ ID NO: 136764
  Synthetic oligonucleotide

SEQ ID NO: 652654 - DNA, 54 bp, Artificial; identical to SEQ ID NO: 134232
  Synthetic oligonucleotide

SEQ ID NO: 652655 - DNA, 60 bp, Artificial; identical to SEQ ID NO: 135078
  Synthetic oligonucleotide

SEQ ID NO: 652656 - DNA, 55 bp, Artificial; identical to SEQ ID NO: 138826
  Synthetic oligonucleotide

SEQ ID NO: 652657 - DNA, 56 bp, Artificial; identical to SEQ ID NO: 137158
  Synthetic oligonucleotide

SEQ ID NO: 652658 - DNA, 54 bp, Artificial; identical to SEQ ID NO: 139546
  Synthetic oligonucleotide

SEQ ID NO: 652659 - DNA, 51 bp, Artificial; identical to SEQ ID NO: 138293
  Synthetic oligonucleotide

SEQ ID NO: 652660 - DNA, 55 bp, Artificial; identical to SEQ ID NO: 138304
  Synthetic oligonucleotide

SEQ ID NO: 652661 - DNA, 55 bp, Artificial; identical to SEQ ID NO: 138824
  Synthetic oligonucleotide

SEQ ID NO: 652662 - DNA, 55 bp, Artificial; identical to SEQ ID NO: 138823
  Synthetic oligonucleotide

SEQ ID NO: 652663 - DNA, 53 bp, Artificial; identical to SEQ ID NO: 137750
  Synthetic oligonucleotide

SEQ ID NO: 652664 - DNA, 55 bp, Artificial; identical to SEQ ID NO: 139551
  Synthetic oligonucleotide

SEQ ID NO: 652665 - DNA, 55 bp, Artificial; identical to SEQ ID NO: 134001
  Synthetic oligonucleotide

SEQ ID NO: 652666 - DNA, 55 bp, Artificial; identical to SEQ ID NO: 137733
  Synthetic oligonucleotide

SEQ ID NO: 652667 - DNA, 55 bp, Artificial; identical to SEQ ID NO: 138116
  Synthetic oligonucleotide

SEQ ID NO: 652668 - DNA, 55 bp, Artificial; identical to SEQ ID NO: 137734
  Synthetic oligonucleotide

SEQ ID NO: 652669 - DNA, 55 bp, Artificial; identical to SEQ ID NO: 138114
  Synthetic oligonucleotide

SEQ ID NO: 652670 - DNA, 53 bp, Artificial; identical to SEQ ID NO: 134561
  Synthetic oligonucleotide

SEQ ID NO: 652671 - DNA, 54 bp, Artificial; identical to SEQ ID NO: 134431
  Synthetic oligonucleotide

SEQ ID NO: 652672 - DNA, 55 bp, Artificial; identical to SEQ ID NO: 137735
  Synthetic oligonucleotide

SEQ ID NO: 652673 - DNA, 55 bp, Artificial; identical to SEQ ID NO: 134265
  Synthetic oligonucleotide

SEQ ID NO: 652674 - DNA, 52 bp, Artificial; identical to SEQ ID NO: 138324
  Synthetic oligonucleotide

SEQ ID NO: 652675 - DNA, 54 bp, Artificial; identical to SEQ ID NO: 134438
  Synthetic oligonucleotide

SEQ ID NO: 652676 - DNA, 58 bp, Artificial; identical to SEQ ID NO: 139999
  Synthetic oligonucleotide

SEQ ID NO: 652677 - DNA, 54 bp, Artificial; identical to SEQ ID NO: 138315
  Synthetic oligonucleotide

SEQ ID NO: 652678 - DNA, 55 bp, Artificial; identical to SEQ ID NO: 134260
  Synthetic oligonucleotide

SEQ ID NO: 652679 - DNA, 55 bp, Artificial; identical to SEQ ID NO: 134258
  Synthetic oligonucleotide

SEQ ID NO: 652680 - DNA, 55 bp, Artificial; identical to SEQ ID NO: 138110
  Synthetic oligonucleotide

SEQ ID NO: 652681 - DNA, 58 bp, Artificial; identical to SEQ ID NO: 135111
  Synthetic oligonucleotide

SEQ ID NO: 652682 - DNA, 55 bp, Artificial; identical to SEQ ID NO: 133656
  Synthetic oligonucleotide

SEQ ID NO: 652683 - DNA, 55 bp, Artificial; identical to SEQ ID NO: 138261
  Synthetic oligonucleotide

SEQ ID NO: 652684 - DNA, 55 bp, Artificial; identical to SEQ ID NO: 140836
  Synthetic oligonucleotide

SEQ ID NO: 652685 - DNA, 55 bp, Artificial; identical to SEQ ID NO: 133304
  Synthetic oligonucleotide

SEQ ID NO: 652686 - DNA, 50 bp, Artificial; identical to SEQ ID NO: 137569
  Synthetic oligonucleotide

SEQ ID NO: 652687 - DNA, 55 bp, Artificial; identical to SEQ ID NO: 134418
  Synthetic oligonucleotide

SEQ ID NO: 652688 - DNA, 59 bp, Artificial; identical to SEQ ID NO: 138470
  Synthetic oligonucleotide

SEQ ID NO: 652689 - DNA, 55 bp, Artificial; identical to SEQ ID NO: 134413
  Synthetic oligonucleotide

SEQ ID NO: 652690 - DNA, 55 bp, Artificial; identical to SEQ ID NO: 134411
  Synthetic oligonucleotide

SEQ ID NO: 652691 - DNA, 55 bp, Artificial; identical to SEQ ID NO: 136684
  Synthetic oligonucleotide

SEQ ID NO: 652692 - DNA, 52 bp, Artificial; identical to SEQ ID NO: 138372
  Synthetic oligonucleotide

SEQ ID NO: 652693 - DNA, 54 bp, Artificial; identical to SEQ ID NO: 137915
  Synthetic oligonucleotide

SEQ ID NO: 652694 - DNA, 55 bp, Artificial; identical to SEQ ID NO: 135146
  Synthetic oligonucleotide

SEQ ID NO: 652695 - DNA, 55 bp, Artificial; identical to SEQ ID NO: 134408
  Synthetic oligonucleotide

SEQ ID NO: 652696 - DNA, 55 bp, Artificial; identical to SEQ ID NO: 140301
  Synthetic oligonucleotide

SEQ ID NO: 652697 - DNA, 56 bp, Artificial; identical to SEQ ID NO: 136985
  Synthetic oligonucleotide

SEQ ID NO: 652698 - DNA, 55 bp, Artificial; identical to SEQ ID NO: 134407
  Synthetic oligonucleotide

SEQ ID NO: 652699 - DNA, 52 bp, Artificial; identical to SEQ ID NO: 140378
  Synthetic oligonucleotide

SEQ ID NO: 652700 - DNA, 54 bp, Artificial; identical to SEQ ID NO: 140135
  Synthetic oligonucleotide

SEQ ID NO: 652701 - DNA, 55 bp, Artificial; identical to SEQ ID NO: 134426
  Synthetic oligonucleotide

SEQ ID NO: 652702 - DNA, 55 bp, Artificial; identical to SEQ ID NO: 137736
  Synthetic oligonucleotide

SEQ ID NO: 652703 - DNA, 55 bp, Artificial; identical to SEQ ID NO: 140299
  Synthetic oligonucleotide

SEQ ID NO: 652704 - DNA, 55 bp, Artificial; identical to SEQ ID NO: 138813
  Synthetic oligonucleotide

SEQ ID NO: 652705 - DNA, 57 bp, Artificial; identical to SEQ ID NO: 135672
  Synthetic oligonucleotide

SEQ ID NO: 652706 - DNA, 55 bp, Artificial; identical to SEQ ID NO: 138812
  Synthetic oligonucleotide

SEQ ID NO: 652707 - DNA, 55 bp, Artificial; identical to SEQ ID NO: 134360
  Synthetic oligonucleotide

SEQ ID NO: 652708 - DNA, 55 bp, Artificial; identical to SEQ ID NO: 139543
  Synthetic oligonucleotide

SEQ ID NO: 652709 - DNA, 55 bp, Artificial; identical to SEQ ID NO: 138098
  Synthetic oligonucleotide

SEQ ID NO: 652710 - DNA, 54 bp, Artificial; identical to SEQ ID NO: 136963
  Synthetic oligonucleotide

SEQ ID NO: 652711 - DNA, 55 bp, Artificial; identical to SEQ ID NO: 138094
  Synthetic oligonucleotide

SEQ ID NO: 652712 - DNA, 55 bp, Artificial; identical to SEQ ID NO: 139542
  Synthetic oligonucleotide

SEQ ID NO: 652713 - DNA, 55 bp, Artificial; identical to SEQ ID NO: 133560
  Synthetic oligonucleotide

SEQ ID NO: 652714 - DNA, 55 bp, Artificial; identical to SEQ ID NO: 138762
  Synthetic oligonucleotide

SEQ ID NO: 652715 - DNA, 51 bp, Artificial; identical to SEQ ID NO: 134024
  Synthetic oligonucleotide

SEQ ID NO: 652716 - DNA, 55 bp, Artificial; identical to SEQ ID NO: 138759
  Synthetic oligonucleotide

SEQ ID NO: 652717 - DNA, 55 bp, Artificial; identical to SEQ ID NO: 137501
  Synthetic oligonucleotide

SEQ ID NO: 652718 - DNA, 55 bp, Artificial; identical to SEQ ID NO: 138140
  Synthetic oligonucleotide

SEQ ID NO: 652719 - DNA, 55 bp, Artificial; identical to SEQ ID NO: 134398
  Synthetic oligonucleotide

SEQ ID NO: 652720 - DNA, 54 bp, Artificial; identical to SEQ ID NO: 136543
  Synthetic oligonucleotide

SEQ ID NO: 652721 - DNA, 53 bp, Artificial; identical to SEQ ID NO: 140297
  Synthetic oligonucleotide

SEQ ID NO: 652722 - DNA, 52 bp, Artificial; identical to SEQ ID NO: 136683
  Synthetic oligonucleotide

SEQ ID NO: 652723 - DNA, 57 bp, Artificial; identical to SEQ ID NO: 135664
  Synthetic oligonucleotide

SEQ ID NO: 652724 - DNA, 56 bp, Artificial; identical to SEQ ID NO: 135657
  Synthetic oligonucleotide

SEQ ID NO: 652725 - DNA, 55 bp, Artificial; identical to SEQ ID NO: 137414
  Synthetic oligonucleotide

SEQ ID NO: 652726 - DNA, 54 bp, Artificial; identical to SEQ ID NO: 141091
  Synthetic oligonucleotide

SEQ ID NO: 652727 - DNA, 59 bp, Artificial; identical to SEQ ID NO: 135668
  Synthetic oligonucleotide

SEQ ID NO: 652728 - DNA, 55 bp, Artificial; identical to SEQ ID NO: 134386
  Synthetic oligonucleotide

SEQ ID NO: 652729 - DNA, 53 bp, Artificial; identical to SEQ ID NO: 133662
  Synthetic oligonucleotide

SEQ ID NO: 652730 - DNA, 57 bp, Artificial; identical to SEQ ID NO: 135679
  Synthetic oligonucleotide

SEQ ID NO: 652731 - DNA, 55 bp, Artificial; identical to SEQ ID NO: 139540
  Synthetic oligonucleotide

SEQ ID NO: 652732 - DNA, 54 bp, Artificial; identical to SEQ ID NO: 134022
  Synthetic oligonucleotide

SEQ ID NO: 652733 - DNA, 55 bp, Artificial; identical to SEQ ID NO: 138131
  Synthetic oligonucleotide

SEQ ID NO: 652734 - DNA, 50 bp, Artificial; identical to SEQ ID NO: 136947
  Synthetic oligonucleotide

SEQ ID NO: 652735 - DNA, 52 bp, Artificial; identical to SEQ ID NO: 137197
  Synthetic oligonucleotide

SEQ ID NO: 652736 - DNA, 55 bp, Artificial; identical to SEQ ID NO: 140897
  Synthetic oligonucleotide

SEQ ID NO: 652737 - DNA, 50 bp, Artificial; identical to SEQ ID NO: 133462
  Synthetic oligonucleotide

SEQ ID NO: 652738 - DNA, 51 bp, Artificial; identical to SEQ ID NO: 137737
  Synthetic oligonucleotide

SEQ ID NO: 652739 - DNA, 50 bp, Artificial; identical to SEQ ID NO: 139925
  Synthetic oligonucleotide

SEQ ID NO: 652740 - DNA, 55 bp, Artificial; identical to SEQ ID NO: 140295
  Synthetic oligonucleotide

SEQ ID NO: 652741 - DNA, 55 bp, Artificial; identical to SEQ ID NO: 133999
  Synthetic oligonucleotide

SEQ ID NO: 652742 - DNA, 55 bp, Artificial; identical to SEQ ID NO: 138755
  Synthetic oligonucleotide

SEQ ID NO: 652743 - DNA, 55 bp, Artificial; identical to SEQ ID NO: 138367
  Synthetic oligonucleotide

SEQ ID NO: 652744 - DNA, 54 bp, Artificial; identical to SEQ ID NO: 133670
  Synthetic oligonucleotide

SEQ ID NO: 652745 - DNA, 55 bp, Artificial; identical to SEQ ID NO: 136387
  Synthetic oligonucleotide

SEQ ID NO: 652746 - DNA, 55 bp, Artificial; identical to SEQ ID NO: 139072
  Synthetic oligonucleotide

SEQ ID NO: 652747 - DNA, 55 bp, Artificial; identical to SEQ ID NO: 137326
  Synthetic oligonucleotide

SEQ ID NO: 652748 - DNA, 55 bp, Artificial; identical to SEQ ID NO: 140294
  Synthetic oligonucleotide

SEQ ID NO: 652749 - DNA, 60 bp, Artificial; identical to SEQ ID NO: 135768
  Synthetic oligonucleotide

SEQ ID NO: 652750 - DNA, 55 bp, Artificial; identical to SEQ ID NO: 139536
  Synthetic oligonucleotide

SEQ ID NO: 652751 - DNA, 55 bp, Artificial; identical to SEQ ID NO: 140240
  Synthetic oligonucleotide

SEQ ID NO: 652752 - DNA, 55 bp, Artificial; identical to SEQ ID NO: 138295
  Synthetic oligonucleotide

SEQ ID NO: 652753 - DNA, 60 bp, Artificial; identical to SEQ ID NO: 137720
  Synthetic oligonucleotide

SEQ ID NO: 652754 - DNA, 50 bp, Artificial; identical to SEQ ID NO: 140508
  Synthetic oligonucleotide

SEQ ID NO: 652755 - DNA, 50 bp, Artificial; identical to SEQ ID NO: 135499
  Synthetic oligonucleotide

SEQ ID NO: 652756 - DNA, 58 bp, Artificial; identical to SEQ ID NO: 138622
  Synthetic oligonucleotide

SEQ ID NO: 652757 - DNA, 59 bp, Artificial; identical to SEQ ID NO: 139916
  Synthetic oligonucleotide

SEQ ID NO: 652758 - DNA, 55 bp, Artificial; identical to SEQ ID NO: 139553
  Synthetic oligonucleotide

SEQ ID NO: 652759 - DNA, 52 bp, Artificial; identical to SEQ ID NO: 140911
  Synthetic oligonucleotide

SEQ ID NO: 652760 - DNA, 57 bp, Artificial; identical to SEQ ID NO: 138635
  Synthetic oligonucleotide

SEQ ID NO: 652761 - DNA, 55 bp, Artificial; identical to SEQ ID NO: 133623
  Synthetic oligonucleotide

SEQ ID NO: 652762 - DNA, 55 bp, Artificial; identical to SEQ ID NO: 133622
  Synthetic oligonucleotide

SEQ ID NO: 652763 - DNA, 55 bp, Artificial; identical to SEQ ID NO: 134000
  Synthetic oligonucleotide

SEQ ID NO: 652764 - DNA, 55 bp, Artificial; identical to SEQ ID NO: 140237
  Synthetic oligonucleotide

SEQ ID NO: 652765 - DNA, 58 bp, Artificial; identical to SEQ ID NO: 139117
  Synthetic oligonucleotide

SEQ ID NO: 652766 - DNA, 55 bp, Artificial; identical to SEQ ID NO: 136424
  Synthetic oligonucleotide

SEQ ID NO: 652767 - DNA, 55 bp, Artificial; identical to SEQ ID NO: 136773
  Synthetic oligonucleotide

SEQ ID NO: 652768 - DNA, 54 bp, Artificial; identical to SEQ ID NO: 137502
  Synthetic oligonucleotide

SEQ ID NO: 652769 - DNA, 55 bp, Artificial; identical to SEQ ID NO: 133563
  Synthetic oligonucleotide

SEQ ID NO: 652770 - DNA, 59 bp, Artificial; identical to SEQ ID NO: 139194
  Synthetic oligonucleotide

SEQ ID NO: 652771 - DNA, 52 bp, Artificial; identical to SEQ ID NO: 136879
  Synthetic oligonucleotide

SEQ ID NO: 652772 - DNA, 55 bp, Artificial; identical to SEQ ID NO: 136425
  Synthetic oligonucleotide

SEQ ID NO: 652773 - DNA, 55 bp, Artificial; identical to SEQ ID NO: 139564
  Synthetic oligonucleotide

SEQ ID NO: 652774 - DNA, 55 bp, Artificial; identical to SEQ ID NO: 140235
  Synthetic oligonucleotide

SEQ ID NO: 652775 - DNA, 55 bp, Artificial; identical to SEQ ID NO: 138129
  Synthetic oligonucleotide

SEQ ID NO: 652776 - DNA, 54 bp, Artificial; identical to SEQ ID NO: 137035
  Synthetic oligonucleotide

SEQ ID NO: 652777 - DNA, 56 bp, Artificial; identical to SEQ ID NO: 139256
  Synthetic oligonucleotide

SEQ ID NO: 652778 - DNA, 50 bp, Artificial; identical to SEQ ID NO: 137571
  Synthetic oligonucleotide

SEQ ID NO: 652779 - DNA, 55 bp, Artificial; identical to SEQ ID NO: 136370
  Synthetic oligonucleotide

SEQ ID NO: 652780 - DNA, 51 bp, Artificial; identical to SEQ ID NO: 138740
  Synthetic oligonucleotide

SEQ ID NO: 652781 - DNA, 53 bp, Artificial; identical to SEQ ID NO: 134555
  Synthetic oligonucleotide

SEQ ID NO: 652782 - DNA, 55 bp, Artificial; identical to SEQ ID NO: 140234
  Synthetic oligonucleotide

SEQ ID NO: 652783 - DNA, 55 bp, Artificial; identical to SEQ ID NO: 137327
  Synthetic oligonucleotide

SEQ ID NO: 652784 - DNA, 51 bp, Artificial; identical to SEQ ID NO: 137995
  Synthetic oligonucleotide

SEQ ID NO: 652785 - DNA, 56 bp, Artificial; identical to SEQ ID NO: 139771
  Synthetic oligonucleotide

SEQ ID NO: 652786 - DNA, 55 bp, Artificial; identical to SEQ ID NO: 136362
  Synthetic oligonucleotide

SEQ ID NO: 652787 - DNA, 54 bp, Artificial; identical to SEQ ID NO: 133381
  Synthetic oligonucleotide

SEQ ID NO: 652788 - DNA, 55 bp, Artificial; identical to SEQ ID NO: 138128
  Synthetic oligonucleotide

SEQ ID NO: 652789 - DNA, 55 bp, Artificial; identical to SEQ ID NO: 137713
  Synthetic oligonucleotide

SEQ ID NO: 652790 - DNA, 55 bp, Artificial; identical to SEQ ID NO: 133618
  Synthetic oligonucleotide

SEQ ID NO: 652791 - DNA, 55 bp, Artificial; identical to SEQ ID NO: 140232
  Synthetic oligonucleotide

SEQ ID NO: 652792 - DNA, 56 bp, Artificial; identical to SEQ ID NO: 135693
  Synthetic oligonucleotide

SEQ ID NO: 652793 - DNA, 55 bp, Artificial; identical to SEQ ID NO: 136774
  Synthetic oligonucleotide

SEQ ID NO: 652794 - DNA, 55 bp, Artificial; identical to SEQ ID NO: 139563
  Synthetic oligonucleotide

SEQ ID NO: 652795 - DNA, 55 bp, Artificial; identical to SEQ ID NO: 141090
  Synthetic oligonucleotide

SEQ ID NO: 652796 - DNA, 55 bp, Artificial; identical to SEQ ID NO: 133617
  Synthetic oligonucleotide

SEQ ID NO: 652797 - DNA, 55 bp, Artificial; identical to SEQ ID NO: 134076
  Synthetic oligonucleotide

SEQ ID NO: 652798 - DNA, 52 bp, Artificial; identical to SEQ ID NO: 133616
  Synthetic oligonucleotide

SEQ ID NO: 652799 - DNA, 55 bp, Artificial; identical to SEQ ID NO: 138296
  Synthetic oligonucleotide

SEQ ID NO: 652800 - DNA, 57 bp, Artificial; identical to SEQ ID NO: 140022
  Synthetic oligonucleotide

SEQ ID NO: 652801 - DNA, 50 bp, Artificial; identical to SEQ ID NO: 138779
  Synthetic oligonucleotide

SEQ ID NO: 652802 - DNA, 53 bp, Artificial; identical to SEQ ID NO: 136564
  Synthetic oligonucleotide

SEQ ID NO: 652803 - DNA, 59 bp, Artificial; identical to SEQ ID NO: 136545
  Synthetic oligonucleotide

SEQ ID NO: 652804 - DNA, 52 bp, Artificial; identical to SEQ ID NO: 137944
  Synthetic oligonucleotide

SEQ ID NO: 652805 - DNA, 53 bp, Artificial; identical to SEQ ID NO: 140344
  Synthetic oligonucleotide

SEQ ID NO: 652806 - DNA, 55 bp, Artificial; identical to SEQ ID NO: 134058
  Synthetic oligonucleotide

SEQ ID NO: 652807 - DNA, 53 bp, Artificial; identical to SEQ ID NO: 136562
  Synthetic oligonucleotide

SEQ ID NO: 652808 - DNA, 55 bp, Artificial; identical to SEQ ID NO: 134056
  Synthetic oligonucleotide

SEQ ID NO: 652809 - DNA, 55 bp, Artificial; identical to SEQ ID NO: 134055
  Synthetic oligonucleotide

SEQ ID NO: 652810 - DNA, 55 bp, Artificial; identical to SEQ ID NO: 136775
  Synthetic oligonucleotide

SEQ ID NO: 652811 - DNA, 55 bp, Artificial; identical to SEQ ID NO: 138127
  Synthetic oligonucleotide

SEQ ID NO: 652812 - DNA, 55 bp, Artificial; identical to SEQ ID NO: 134053
  Synthetic oligonucleotide

SEQ ID NO: 652813 - DNA, 55 bp, Artificial; identical to SEQ ID NO: 138777
  Synthetic oligonucleotide

SEQ ID NO: 652814 - DNA, 55 bp, Artificial; identical to SEQ ID NO: 140231
  Synthetic oligonucleotide

SEQ ID NO: 652815 - DNA, 55 bp, Artificial; identical to SEQ ID NO: 137328
  Synthetic oligonucleotide

SEQ ID NO: 652816 - DNA, 60 bp, Artificial; identical to SEQ ID NO: 135612
  Synthetic oligonucleotide

SEQ ID NO: 652817 - DNA, 56 bp, Artificial; identical to SEQ ID NO: 135723
  Synthetic oligonucleotide

SEQ ID NO: 652818 - DNA, 55 bp, Artificial; identical to SEQ ID NO: 134044
  Synthetic oligonucleotide

SEQ ID NO: 652819 - DNA, 55 bp, Artificial; identical to SEQ ID NO: 140229
  Synthetic oligonucleotide

SEQ ID NO: 652820 - DNA, 51 bp, Artificial; identical to SEQ ID NO: 141112
  Synthetic oligonucleotide

SEQ ID NO: 652821 - DNA, 57 bp, Artificial; identical to SEQ ID NO: 135688
  Synthetic oligonucleotide

SEQ ID NO: 652822 - DNA, 55 bp, Artificial; identical to SEQ ID NO: 136309
  Synthetic oligonucleotide

SEQ ID NO: 652823 - DNA, 56 bp, Artificial; identical to SEQ ID NO: 135945
  Synthetic oligonucleotide

SEQ ID NO: 652824 - DNA, 53 bp, Artificial; identical to SEQ ID NO: 140064
  Synthetic oligonucleotide

SEQ ID NO: 652825 - DNA, 53 bp, Artificial; identical to SEQ ID NO: 136317
  Synthetic oligonucleotide

SEQ ID NO: 652826 - DNA, 55 bp, Artificial; identical to SEQ ID NO: 140228
  Synthetic oligonucleotide

SEQ ID NO: 652827 - DNA, 55 bp, Artificial; identical to SEQ ID NO: 139424
  Synthetic oligonucleotide

SEQ ID NO: 652828 - DNA, 55 bp, Artificial; identical to SEQ ID NO: 136325
  Synthetic oligonucleotide

SEQ ID NO: 652829 - DNA, 55 bp, Artificial; identical to SEQ ID NO: 136304
  Synthetic oligonucleotide

SEQ ID NO: 652830 - DNA, 60 bp, Artificial; identical to SEQ ID NO: 140012
  Synthetic oligonucleotide

SEQ ID NO: 652831 - DNA, 55 bp, Artificial; identical to SEQ ID NO: 140226
  Synthetic oligonucleotide

SEQ ID NO: 652832 - DNA, 51 bp, Artificial; identical to SEQ ID NO: 137215
  Synthetic oligonucleotide

SEQ ID NO: 652833 - DNA, 55 bp, Artificial; identical to SEQ ID NO: 138234
  Synthetic oligonucleotide

SEQ ID NO: 652834 - DNA, 55 bp, Artificial; identical to SEQ ID NO: 136299
  Synthetic oligonucleotide

SEQ ID NO: 652835 - DNA, 55 bp, Artificial; identical to SEQ ID NO: 137093
  Synthetic oligonucleotide

SEQ ID NO: 652836 - DNA, 55 bp, Artificial; identical to SEQ ID NO: 136298
  Synthetic oligonucleotide

SEQ ID NO: 652837 - DNA, 55 bp, Artificial; identical to SEQ ID NO: 140841
  Synthetic oligonucleotide

SEQ ID NO: 652838 - DNA, 55 bp, Artificial; identical to SEQ ID NO: 138365
  Synthetic oligonucleotide

SEQ ID NO: 652839 - DNA, 55 bp, Artificial; identical to SEQ ID NO: 136736
  Synthetic oligonucleotide

SEQ ID NO: 652840 - DNA, 55 bp, Artificial; identical to SEQ ID NO: 139254
  Synthetic oligonucleotide

SEQ ID NO: 652841 - DNA, 55 bp, Artificial; identical to SEQ ID NO: 139429
  Synthetic oligonucleotide

SEQ ID NO: 652842 - DNA, 50 bp, Artificial; identical to SEQ ID NO: 135344
  Synthetic oligonucleotide

SEQ ID NO: 652843 - DNA, 57 bp, Artificial; identical to SEQ ID NO: 137013
  Synthetic oligonucleotide

SEQ ID NO: 652844 - DNA, 52 bp, Artificial; identical to SEQ ID NO: 138774
  Synthetic oligonucleotide

SEQ ID NO: 652845 - DNA, 55 bp, Artificial; identical to SEQ ID NO: 139430
  Synthetic oligonucleotide

SEQ ID NO: 652846 - DNA, 55 bp, Artificial; identical to SEQ ID NO: 136432
  Synthetic oligonucleotide

SEQ ID NO: 652847 - DNA, 54 bp, Artificial; identical to SEQ ID NO: 140995
  Synthetic oligonucleotide

SEQ ID NO: 652848 - DNA, 56 bp, Artificial; identical to SEQ ID NO: 134700
  Synthetic oligonucleotide

SEQ ID NO: 652849 - DNA, 55 bp, Artificial; identical to SEQ ID NO: 136344
  Synthetic oligonucleotide

SEQ ID NO: 652850 - DNA, 53 bp, Artificial; identical to SEQ ID NO: 137193
  Synthetic oligonucleotide

SEQ ID NO: 652851 - DNA, 55 bp, Artificial; identical to SEQ ID NO: 137716
  Synthetic oligonucleotide

SEQ ID NO: 652852 - DNA, 58 bp, Artificial; identical to SEQ ID NO: 139993
  Synthetic oligonucleotide

SEQ ID NO: 652853 - DNA, 60 bp, Artificial; identical to SEQ ID NO: 134811
  Synthetic oligonucleotide

SEQ ID NO: 652854 - DNA, 50 bp, Artificial; identical to SEQ ID NO: 138660
  Synthetic oligonucleotide

SEQ ID NO: 652855 - DNA, 55 bp, Artificial; identical to SEQ ID NO: 136346
  Synthetic oligonucleotide

SEQ ID NO: 652856 - DNA, 55 bp, Artificial; identical to SEQ ID NO: 137717
  Synthetic oligonucleotide

SEQ ID NO: 652857 - DNA, 57 bp, Artificial; identical to SEQ ID NO: 138620
  Synthetic oligonucleotide

SEQ ID NO: 652858 - DNA, 55 bp, Artificial; identical to SEQ ID NO: 140225
  Synthetic oligonucleotide

SEQ ID NO: 652859 - DNA, 53 bp, Artificial; identical to SEQ ID NO: 136869
  Synthetic oligonucleotide

SEQ ID NO: 652860 - DNA, 55 bp, Artificial; identical to SEQ ID NO: 139431
  Synthetic oligonucleotide

SEQ ID NO: 652861 - DNA, 55 bp, Artificial; identical to SEQ ID NO: 137875
  Synthetic oligonucleotide

SEQ ID NO: 652862 - DNA, 54 bp, Artificial; identical to SEQ ID NO: 136347
  Synthetic oligonucleotide

SEQ ID NO: 652863 - DNA, 54 bp, Artificial; identical to SEQ ID NO: 133613
  Synthetic oligonucleotide

SEQ ID NO: 652864 - DNA, 52 bp, Artificial; identical to SEQ ID NO: 136348
  Synthetic oligonucleotide

SEQ ID NO: 652865 - DNA, 55 bp, Artificial; identical to SEQ ID NO: 140725
  Synthetic oligonucleotide

SEQ ID NO: 652866 - DNA, 55 bp, Artificial; identical to SEQ ID NO: 138233
  Synthetic oligonucleotide

SEQ ID NO: 652867 - DNA, 55 bp, Artificial; identical to SEQ ID NO: 136351
  Synthetic oligonucleotide

SEQ ID NO: 652868 - DNA, 59 bp, Artificial; identical to SEQ ID NO: 135628
  Synthetic oligonucleotide

SEQ ID NO: 652869 - DNA, 55 bp, Artificial; identical to SEQ ID NO: 136352
  Synthetic oligonucleotide

SEQ ID NO: 652870 - DNA, 55 bp, Artificial; identical to SEQ ID NO: 139432
  Synthetic oligonucleotide

SEQ ID NO: 652871 - DNA, 55 bp, Artificial; identical to SEQ ID NO: 137874
  Synthetic oligonucleotide

SEQ ID NO: 652872 - DNA, 54 bp, Artificial; identical to SEQ ID NO: 137416
  Synthetic oligonucleotide

SEQ ID NO: 652873 - DNA, 58 bp, Artificial; identical to SEQ ID NO: 139223
  Synthetic oligonucleotide

SEQ ID NO: 652874 - DNA, 55 bp, Artificial; identical to SEQ ID NO: 136341
  Synthetic oligonucleotide

SEQ ID NO: 652875 - DNA, 55 bp, Artificial; identical to SEQ ID NO: 136340
  Synthetic oligonucleotide

SEQ ID NO: 652876 - DNA, 56 bp, Artificial; identical to SEQ ID NO: 139257
  Synthetic oligonucleotide

SEQ ID NO: 652877 - DNA, 55 bp, Artificial; identical to SEQ ID NO: 136338
  Synthetic oligonucleotide

SEQ ID NO: 652878 - DNA, 56 bp, Artificial; identical to SEQ ID NO: 135557
  Synthetic oligonucleotide

SEQ ID NO: 652879 - DNA, 55 bp, Artificial; identical to SEQ ID NO: 136330
  Synthetic oligonucleotide

SEQ ID NO: 652880 - DNA, 53 bp, Artificial; identical to SEQ ID NO: 136873
  Synthetic oligonucleotide

SEQ ID NO: 652881 - DNA, 58 bp, Artificial; identical to SEQ ID NO: 139225
  Synthetic oligonucleotide

SEQ ID NO: 652882 - DNA, 55 bp, Artificial; identical to SEQ ID NO: 133611
  Synthetic oligonucleotide

SEQ ID NO: 652883 - DNA, 50 bp, Artificial; identical to SEQ ID NO: 137240
  Synthetic oligonucleotide

SEQ ID NO: 652884 - DNA, 60 bp, Artificial; identical to SEQ ID NO: 136960
  Synthetic oligonucleotide

SEQ ID NO: 652885 - DNA, 54 bp, Artificial; identical to SEQ ID NO: 138763
  Synthetic oligonucleotide

SEQ ID NO: 652886 - DNA, 55 bp, Artificial; identical to SEQ ID NO: 138766
  Synthetic oligonucleotide

SEQ ID NO: 652887 - DNA, 55 bp, Artificial; identical to SEQ ID NO: 140726
  Synthetic oligonucleotide

SEQ ID NO: 652888 - DNA, 55 bp, Artificial; identical to SEQ ID NO: 137873
  Synthetic oligonucleotide

SEQ ID NO: 652889 - DNA, 55 bp, Artificial; identical to SEQ ID NO: 137868
  Synthetic oligonucleotide

SEQ ID NO: 652890 - DNA, 51 bp, Artificial; identical to SEQ ID NO: 134746
  Synthetic oligonucleotide

SEQ ID NO: 652891 - DNA, 54 bp, Artificial; identical to SEQ ID NO: 133689
  Synthetic oligonucleotide

SEQ ID NO: 652892 - DNA, 52 bp, Artificial; identical to SEQ ID NO: 139095
  Synthetic oligonucleotide

SEQ ID NO: 652893 - DNA, 55 bp, Artificial; identical to SEQ ID NO: 136327
  Synthetic oligonucleotide

SEQ ID NO: 652894 - DNA, 55 bp, Artificial; identical to SEQ ID NO: 134169
  Synthetic oligonucleotide

SEQ ID NO: 652895 - DNA, 57 bp, Artificial; identical to SEQ ID NO: 140019
  Synthetic oligonucleotide

SEQ ID NO: 652896 - DNA, 55 bp, Artificial; identical to SEQ ID NO: 134171
  Synthetic oligonucleotide

SEQ ID NO: 652897 - DNA, 55 bp, Artificial; identical to SEQ ID NO: 134172
  Synthetic oligonucleotide

SEQ ID NO: 652898 - DNA, 55 bp, Artificial; identical to SEQ ID NO: 138090
  Synthetic oligonucleotide

SEQ ID NO: 652899 - DNA, 60 bp, Artificial; identical to SEQ ID NO: 139222
  Synthetic oligonucleotide

SEQ ID NO: 652900 - DNA, 60 bp, Artificial; identical to SEQ ID NO: 135579
  Synthetic oligonucleotide

SEQ ID NO: 652901 - DNA, 59 bp, Artificial; identical to SEQ ID NO: 139221
  Synthetic oligonucleotide

SEQ ID NO: 652902 - DNA, 60 bp, Artificial; identical to SEQ ID NO: 135590
  Synthetic oligonucleotide

SEQ ID NO: 652903 - DNA, 55 bp, Artificial; identical to SEQ ID NO: 134173
  Synthetic oligonucleotide

SEQ ID NO: 652904 - DNA, 55 bp, Artificial; identical to SEQ ID NO: 134175
  Synthetic oligonucleotide

SEQ ID NO: 652905 - DNA, 60 bp, Artificial; identical to SEQ ID NO: 136290
  Synthetic oligonucleotide

SEQ ID NO: 652906 - DNA, 52 bp, Artificial; identical to SEQ ID NO: 139639
  Synthetic oligonucleotide

SEQ ID NO: 652907 - DNA, 55 bp, Artificial; identical to SEQ ID NO: 134181
  Synthetic oligonucleotide

SEQ ID NO: 652908 - DNA, 59 bp, Artificial; identical to SEQ ID NO: 139220
  Synthetic oligonucleotide

SEQ ID NO: 652909 - DNA, 51 bp, Artificial; identical to SEQ ID NO: 137221
  Synthetic oligonucleotide

SEQ ID NO: 652910 - DNA, 55 bp, Artificial; identical to SEQ ID NO: 137862
  Synthetic oligonucleotide

SEQ ID NO: 652911 - DNA, 60 bp, Artificial; identical to SEQ ID NO: 139305
  Synthetic oligonucleotide

SEQ ID NO: 652912 - DNA, 55 bp, Artificial; identical to SEQ ID NO: 138771
  Synthetic oligonucleotide

SEQ ID NO: 652913 - DNA, 55 bp, Artificial; identical to SEQ ID NO: 137906
  Synthetic oligonucleotide

SEQ ID NO: 652914 - DNA, 55 bp, Artificial; identical to SEQ ID NO: 139437
  Synthetic oligonucleotide

SEQ ID NO: 652915 - DNA, 55 bp, Artificial; identical to SEQ ID NO: 137905
  Synthetic oligonucleotide

SEQ ID NO: 652916 - DNA, 55 bp, Artificial; identical to SEQ ID NO: 138786
  Synthetic oligonucleotide

SEQ ID NO: 652917 - DNA, 51 bp, Artificial; identical to SEQ ID NO: 134750
  Synthetic oligonucleotide

SEQ ID NO: 652918 - DNA, 53 bp, Artificial; identical to SEQ ID NO: 137096
  Synthetic oligonucleotide

SEQ ID NO: 652919 - DNA, 55 bp, Artificial; identical to SEQ ID NO: 138743
  Synthetic oligonucleotide

SEQ ID NO: 652920 - DNA, 55 bp, Artificial; identical to SEQ ID NO: 140219
  Synthetic oligonucleotide

SEQ ID NO: 652921 - DNA, 55 bp, Artificial; identical to SEQ ID NO: 139439
  Synthetic oligonucleotide

SEQ ID NO: 652922 - DNA, 55 bp, Artificial; identical to SEQ ID NO: 138745
  Synthetic oligonucleotide

SEQ ID NO: 652923 - DNA, 55 bp, Artificial; identical to SEQ ID NO: 134166
  Synthetic oligonucleotide

SEQ ID NO: 652924 - DNA, 53 bp, Artificial; identical to SEQ ID NO: 134165
  Synthetic oligonucleotide

SEQ ID NO: 652925 - DNA, 55 bp, Artificial; identical to SEQ ID NO: 137900
  Synthetic oligonucleotide

SEQ ID NO: 652926 - DNA, 55 bp, Artificial; identical to SEQ ID NO: 140218
  Synthetic oligonucleotide

SEQ ID NO: 652927 - DNA, 51 bp, Artificial; identical to SEQ ID NO: 134752
  Synthetic oligonucleotide

SEQ ID NO: 652928 - DNA, 55 bp, Artificial; identical to SEQ ID NO: 134163
  Synthetic oligonucleotide

SEQ ID NO: 652929 - DNA, 59 bp, Artificial; identical to SEQ ID NO: 139261
  Synthetic oligonucleotide

SEQ ID NO: 652930 - DNA, 55 bp, Artificial; identical to SEQ ID NO: 134160
  Synthetic oligonucleotide

SEQ ID NO: 652931 - DNA, 55 bp, Artificial; identical to SEQ ID NO: 137896
  Synthetic oligonucleotide

SEQ ID NO: 652932 - DNA, 55 bp, Artificial; identical to SEQ ID NO: 139161
  Synthetic oligonucleotide

SEQ ID NO: 652933 - DNA, 55 bp, Artificial; identical to SEQ ID NO: 140217
  Synthetic oligonucleotide

SEQ ID NO: 652934 - DNA, 56 bp, Artificial; identical to SEQ ID NO: 136345
  Synthetic oligonucleotide

SEQ ID NO: 652935 - DNA, 55 bp, Artificial; identical to SEQ ID NO: 134152
  Synthetic oligonucleotide

SEQ ID NO: 652936 - DNA, 53 bp, Artificial; identical to SEQ ID NO: 139076
  Synthetic oligonucleotide

SEQ ID NO: 652937 - DNA, 54 bp, Artificial; identical to SEQ ID NO: 134483
  Synthetic oligonucleotide

SEQ ID NO: 652938 - DNA, 55 bp, Artificial; identical to SEQ ID NO: 134205
  Synthetic oligonucleotide

SEQ ID NO: 652939 - DNA, 55 bp, Artificial; identical to SEQ ID NO: 133566
  Synthetic oligonucleotide

SEQ ID NO: 652940 - DNA, 53 bp, Artificial; identical to SEQ ID NO: 133609
  Synthetic oligonucleotide

SEQ ID NO: 652941 - DNA, 54 bp, Artificial; identical to SEQ ID NO: 136858
  Synthetic oligonucleotide

SEQ ID NO: 652942 - DNA, 54 bp, Artificial; identical to SEQ ID NO: 137507
  Synthetic oligonucleotide

SEQ ID NO: 652943 - DNA, 54 bp, Artificial; identical to SEQ ID NO: 139105
  Synthetic oligonucleotide

SEQ ID NO: 652944 - DNA, 53 bp, Artificial; identical to SEQ ID NO: 139049
  Synthetic oligonucleotide

SEQ ID NO: 652945 - DNA, 55 bp, Artificial; identical to SEQ ID NO: 134211
  Synthetic oligonucleotide

SEQ ID NO: 652946 - DNA, 55 bp, Artificial; identical to SEQ ID NO: 137718
  Synthetic oligonucleotide

SEQ ID NO: 652947 - DNA, 51 bp, Artificial; identical to SEQ ID NO: 134761
  Synthetic oligonucleotide

SEQ ID NO: 652948 - DNA, 55 bp, Artificial; identical to SEQ ID NO: 140059
  Synthetic oligonucleotide

SEQ ID NO: 652949 - DNA, 55 bp, Artificial; identical to SEQ ID NO: 137894
  Synthetic oligonucleotide

SEQ ID NO: 652950 - DNA, 55 bp, Artificial; identical to SEQ ID NO: 138752
  Synthetic oligonucleotide

SEQ ID NO: 652951 - DNA, 55 bp, Artificial; identical to SEQ ID NO: 137101
  Synthetic oligonucleotide

SEQ ID NO: 652952 - DNA, 55 bp, Artificial; identical to SEQ ID NO: 138753
  Synthetic oligonucleotide

SEQ ID NO: 652953 - DNA, 55 bp, Artificial; identical to SEQ ID NO: 140843
  Synthetic oligonucleotide

SEQ ID NO: 652954 - DNA, 55 bp, Artificial; identical to SEQ ID NO: 140718
  Synthetic oligonucleotide

SEQ ID NO: 652955 - DNA, 60 bp, Artificial; identical to SEQ ID NO: 136629
  Synthetic oligonucleotide

SEQ ID NO: 652956 - DNA, 55 bp, Artificial; identical to SEQ ID NO: 136441
  Synthetic oligonucleotide

SEQ ID NO: 652957 - DNA, 60 bp, Artificial; identical to SEQ ID NO: 134046
  Synthetic oligonucleotide

SEQ ID NO: 652958 - DNA, 55 bp, Artificial; identical to SEQ ID NO: 140141
  Synthetic oligonucleotide

SEQ ID NO: 652959 - DNA, 55 bp, Artificial; identical to SEQ ID NO: 137336
  Synthetic oligonucleotide

SEQ ID NO: 652960 - DNA, 55 bp, Artificial; identical to SEQ ID NO: 134189
  Synthetic oligonucleotide

SEQ ID NO: 652961 - DNA, 55 bp, Artificial; identical to SEQ ID NO: 134187
  Synthetic oligonucleotide

SEQ ID NO: 652962 - DNA, 55 bp, Artificial; identical to SEQ ID NO: 138760
  Synthetic oligonucleotide

SEQ ID NO: 652963 - DNA, 55 bp, Artificial; identical to SEQ ID NO: 136442
  Synthetic oligonucleotide

SEQ ID NO: 652964 - DNA, 55 bp, Artificial; identical to SEQ ID NO: 136443
  Synthetic oligonucleotide

SEQ ID NO: 652965 - DNA, 55 bp, Artificial; identical to SEQ ID NO: 137821
  Synthetic oligonucleotide

SEQ ID NO: 652966 - DNA, 50 bp, Artificial; identical to SEQ ID NO: 139155
  Synthetic oligonucleotide

SEQ ID NO: 652967 - DNA, 55 bp, Artificial; identical to SEQ ID NO: 134184
  Synthetic oligonucleotide

SEQ ID NO: 652968 - DNA, 58 bp, Artificial; identical to SEQ ID NO: 134079
  Synthetic oligonucleotide

SEQ ID NO: 652969 - DNA, 56 bp, Artificial; identical to SEQ ID NO: 139251
  Synthetic oligonucleotide

SEQ ID NO: 652970 - DNA, 53 bp, Artificial; identical to SEQ ID NO: 134546
  Synthetic oligonucleotide

SEQ ID NO: 652971 - DNA, 55 bp, Artificial; identical to SEQ ID NO: 137816
  Synthetic oligonucleotide

SEQ ID NO: 652972 - DNA, 51 bp, Artificial; identical to SEQ ID NO: 137218
  Synthetic oligonucleotide

SEQ ID NO: 652973 - DNA, 55 bp, Artificial; identical to SEQ ID NO: 138810
  Synthetic oligonucleotide

SEQ ID NO: 652974 - DNA, 55 bp, Artificial; identical to SEQ ID NO: 134097
  Synthetic oligonucleotide

SEQ ID NO: 652975 - DNA, 55 bp, Artificial; identical to SEQ ID NO: 134099
  Synthetic oligonucleotide

SEQ ID NO: 652976 - DNA, 51 bp, Artificial; identical to SEQ ID NO: 140388
  Synthetic oligonucleotide

SEQ ID NO: 652977 - DNA, 60 bp, Artificial; identical to SEQ ID NO: 134090
  Synthetic oligonucleotide

SEQ ID NO: 652978 - DNA, 55 bp, Artificial; identical to SEQ ID NO: 134107
  Synthetic oligonucleotide

SEQ ID NO: 652979 - DNA, 51 bp, Artificial; identical to SEQ ID NO: 136912
  Synthetic oligonucleotide

SEQ ID NO: 652980 - DNA, 55 bp, Artificial; identical to SEQ ID NO: 138811
  Synthetic oligonucleotide

SEQ ID NO: 652981 - DNA, 55 bp, Artificial; identical to SEQ ID NO: 133567
  Synthetic oligonucleotide

SEQ ID NO: 652982 - DNA, 60 bp, Artificial; identical to SEQ ID NO: 139660
  Synthetic oligonucleotide

SEQ ID NO: 652983 - DNA, 55 bp, Artificial; identical to SEQ ID NO: 138475
  Synthetic oligonucleotide

SEQ ID NO: 652984 - DNA, 58 bp, Artificial; identical to SEQ ID NO: 134112
  Synthetic oligonucleotide

SEQ ID NO: 652985 - DNA, 55 bp, Artificial; identical to SEQ ID NO: 136631
  Synthetic oligonucleotide

SEQ ID NO: 652986 - DNA, 57 bp, Artificial; identical to SEQ ID NO: 136677
  Synthetic oligonucleotide

SEQ ID NO: 652987 - DNA, 55 bp, Artificial; identical to SEQ ID NO: 137858
  Synthetic oligonucleotide

SEQ ID NO: 652988 - DNA, 55 bp, Artificial; identical to SEQ ID NO: 136741
  Synthetic oligonucleotide

SEQ ID NO: 652989 - DNA, 60 bp, Artificial; identical to SEQ ID NO: 136633
  Synthetic oligonucleotide

SEQ ID NO: 652990 - DNA, 55 bp, Artificial; identical to SEQ ID NO: 138815
  Synthetic oligonucleotide

SEQ ID NO: 652991 - DNA, 54 bp, Artificial; identical to SEQ ID NO: 139581
  Synthetic oligonucleotide

SEQ ID NO: 652992 - DNA, 55 bp, Artificial; identical to SEQ ID NO: 133648
  Synthetic oligonucleotide

SEQ ID NO: 652993 - DNA, 55 bp, Artificial; identical to SEQ ID NO: 138816
  Synthetic oligonucleotide

SEQ ID NO: 652994 - DNA, 55 bp, Artificial; identical to SEQ ID NO: 140263
  Synthetic oligonucleotide

SEQ ID NO: 652995 - DNA, 55 bp, Artificial; identical to SEQ ID NO: 140262
  Synthetic oligonucleotide

SEQ ID NO: 652996 - DNA, 54 bp, Artificial; identical to SEQ ID NO: 136926
  Synthetic oligonucleotide

SEQ ID NO: 652997 - DNA, 55 bp, Artificial; identical to SEQ ID NO: 136914
  Synthetic oligonucleotide

SEQ ID NO: 652998 - DNA, 54 bp, Artificial; identical to SEQ ID NO: 136744
  Synthetic oligonucleotide

SEQ ID NO: 652999 - DNA, 53 bp, Artificial; identical to SEQ ID NO: 137194
  Synthetic oligonucleotide

SEQ ID NO: 653000 - DNA, 55 bp, Artificial; identical to SEQ ID NO: 133307
  Synthetic oligonucleotide

SEQ ID NO: 653001 - DNA, 56 bp, Artificial; identical to SEQ ID NO: 138469
  Synthetic oligonucleotide

SEQ ID NO: 653002 - DNA, 55 bp, Artificial; identical to SEQ ID NO: 136747
  Synthetic oligonucleotide

SEQ ID NO: 653003 - DNA, 55 bp, Artificial; identical to SEQ ID NO: 138820
  Synthetic oligonucleotide

SEQ ID NO: 653004 - DNA, 55 bp, Artificial; identical to SEQ ID NO: 133646
  Synthetic oligonucleotide

SEQ ID NO: 653005 - DNA, 55 bp, Artificial; identical to SEQ ID NO: 140261
  Synthetic oligonucleotide

SEQ ID NO: 653006 - DNA, 53 bp, Artificial; identical to SEQ ID NO: 136881
  Synthetic oligonucleotide

SEQ ID NO: 653007 - DNA, 55 bp, Artificial; identical to SEQ ID NO: 134091
  Synthetic oligonucleotide

SEQ ID NO: 653008 - DNA, 54 bp, Artificial; identical to SEQ ID NO: 137171
  Synthetic oligonucleotide

SEQ ID NO: 653009 - DNA, 52 bp, Artificial; identical to SEQ ID NO: 139092
  Synthetic oligonucleotide

SEQ ID NO: 653010 - DNA, 52 bp, Artificial; identical to SEQ ID NO: 136896
  Synthetic oligonucleotide

SEQ ID NO: 653011 - DNA, 50 bp, Artificial; identical to SEQ ID NO: 136940
  Synthetic oligonucleotide

SEQ ID NO: 653012 - DNA, 50 bp, Artificial; identical to SEQ ID NO: 138229
  Synthetic oligonucleotide

SEQ ID NO: 653013 - DNA, 55 bp, Artificial; identical to SEQ ID NO: 138821
  Synthetic oligonucleotide

SEQ ID NO: 653014 - DNA, 53 bp, Artificial; identical to SEQ ID NO: 136635
  Synthetic oligonucleotide

SEQ ID NO: 653015 - DNA, 55 bp, Artificial; identical to SEQ ID NO: 134089
  Synthetic oligonucleotide

SEQ ID NO: 653016 - DNA, 55 bp, Artificial; identical to SEQ ID NO: 136444
  Synthetic oligonucleotide

SEQ ID NO: 653017 - DNA, 55 bp, Artificial; identical to SEQ ID NO: 138294
  Synthetic oligonucleotide

SEQ ID NO: 653018 - DNA, 52 bp, Artificial; identical to SEQ ID NO: 138466
  Synthetic oligonucleotide

SEQ ID NO: 653019 - DNA, 55 bp, Artificial; identical to SEQ ID NO: 138830
  Synthetic oligonucleotide

SEQ ID NO: 653020 - DNA, 55 bp, Artificial; identical to SEQ ID NO: 140259
  Synthetic oligonucleotide

SEQ ID NO: 653021 - DNA, 60 bp, Artificial; identical to SEQ ID NO: 139527
  Synthetic oligonucleotide

SEQ ID NO: 653022 - DNA, 50 bp, Artificial; identical to SEQ ID NO: 134953
  Synthetic oligonucleotide

SEQ ID NO: 653023 - DNA, 55 bp, Artificial; identical to SEQ ID NO: 134087
  Synthetic oligonucleotide

SEQ ID NO: 653024 - DNA, 54 bp, Artificial; identical to SEQ ID NO: 137034
  Synthetic oligonucleotide

SEQ ID NO: 653025 - DNA, 53 bp, Artificial; identical to SEQ ID NO: 134518
  Synthetic oligonucleotide

SEQ ID NO: 653026 - DNA, 60 bp, Artificial; identical to SEQ ID NO: 138463
  Synthetic oligonucleotide

SEQ ID NO: 653027 - DNA, 54 bp, Artificial; identical to SEQ ID NO: 137172
  Synthetic oligonucleotide

SEQ ID NO: 653028 - DNA, 52 bp, Artificial; identical to SEQ ID NO: 139404
  Synthetic oligonucleotide

SEQ ID NO: 653029 - DNA, 58 bp, Artificial; identical to SEQ ID NO: 137765
  Synthetic oligonucleotide

SEQ ID NO: 653030 - DNA, 57 bp, Artificial; identical to SEQ ID NO: 138458
  Synthetic oligonucleotide

SEQ ID NO: 653031 - DNA, 54 bp, Artificial; identical to SEQ ID NO: 139015
  Synthetic oligonucleotide

SEQ ID NO: 653032 - DNA, 55 bp, Artificial; identical to SEQ ID NO: 138832
  Synthetic oligonucleotide

SEQ ID NO: 653033 - DNA, 55 bp, Artificial; identical to SEQ ID NO: 137303
  Synthetic oligonucleotide

SEQ ID NO: 653034 - DNA, 50 bp, Artificial; identical to SEQ ID NO: 139735
  Synthetic oligonucleotide

SEQ ID NO: 653035 - DNA, 60 bp, Artificial; identical to SEQ ID NO: 139483
  Synthetic oligonucleotide

SEQ ID NO: 653036 - DNA, 55 bp, Artificial; identical to SEQ ID NO: 139406
  Synthetic oligonucleotide

SEQ ID NO: 653037 - DNA, 55 bp, Artificial; identical to SEQ ID NO: 139407
  Synthetic oligonucleotide

SEQ ID NO: 653038 - DNA, 55 bp, Artificial; identical to SEQ ID NO: 140258
  Synthetic oligonucleotide

SEQ ID NO: 653039 - DNA, 53 bp, Artificial; identical to SEQ ID NO: 136637
  Synthetic oligonucleotide

SEQ ID NO: 653040 - DNA, 57 bp, Artificial; identical to SEQ ID NO: 138454
  Synthetic oligonucleotide

SEQ ID NO: 653041 - DNA, 59 bp, Artificial; identical to SEQ ID NO: 137002
  Synthetic oligonucleotide

SEQ ID NO: 653042 - DNA, 50 bp, Artificial; identical to SEQ ID NO: 136945
  Synthetic oligonucleotide

SEQ ID NO: 653043 - DNA, 56 bp, Artificial; identical to SEQ ID NO: 138453
  Synthetic oligonucleotide

SEQ ID NO: 653044 - DNA, 60 bp, Artificial; identical to SEQ ID NO: 134179
  Synthetic oligonucleotide

SEQ ID NO: 653045 - DNA, 55 bp, Artificial; identical to SEQ ID NO: 138791
  Synthetic oligonucleotide

SEQ ID NO: 653046 - DNA, 52 bp, Artificial; identical to SEQ ID NO: 134603
  Synthetic oligonucleotide

SEQ ID NO: 653047 - DNA, 55 bp, Artificial; identical to SEQ ID NO: 133645
  Synthetic oligonucleotide

SEQ ID NO: 653048 - DNA, 55 bp, Artificial; identical to SEQ ID NO: 134132
  Synthetic oligonucleotide

SEQ ID NO: 653049 - DNA, 54 bp, Artificial; identical to SEQ ID NO: 139020
  Synthetic oligonucleotide

SEQ ID NO: 653050 - DNA, 50 bp, Artificial; identical to SEQ ID NO: 138230
  Synthetic oligonucleotide

SEQ ID NO: 653051 - DNA, 58 bp, Artificial; identical to SEQ ID NO: 134201
  Synthetic oligonucleotide

SEQ ID NO: 653052 - DNA, 55 bp, Artificial; identical to SEQ ID NO: 133644
  Synthetic oligonucleotide

SEQ ID NO: 653053 - DNA, 55 bp, Artificial; identical to SEQ ID NO: 134135
  Synthetic oligonucleotide

SEQ ID NO: 653054 - DNA, 50 bp, Artificial; identical to SEQ ID NO: 137229
  Synthetic oligonucleotide

SEQ ID NO: 653055 - DNA, 55 bp, Artificial; identical to SEQ ID NO: 140142
  Synthetic oligonucleotide

SEQ ID NO: 653056 - DNA, 57 bp, Artificial; identical to SEQ ID NO: 136667
  Synthetic oligonucleotide

SEQ ID NO: 653057 - DNA, 51 bp, Artificial; identical to SEQ ID NO: 138797
  Synthetic oligonucleotide

SEQ ID NO: 653058 - DNA, 55 bp, Artificial; identical to SEQ ID NO: 138799
  Synthetic oligonucleotide

SEQ ID NO: 653059 - DNA, 55 bp, Artificial; identical to SEQ ID NO: 137839
  Synthetic oligonucleotide

SEQ ID NO: 653060 - DNA, 55 bp, Artificial; identical to SEQ ID NO: 139408
  Synthetic oligonucleotide

SEQ ID NO: 653061 - DNA, 55 bp, Artificial; identical to SEQ ID NO: 140257
  Synthetic oligonucleotide

SEQ ID NO: 653062 - DNA, 52 bp, Artificial; identical to SEQ ID NO: 136850
  Synthetic oligonucleotide

SEQ ID NO: 653063 - DNA, 51 bp, Artificial; identical to SEQ ID NO: 137562
  Synthetic oligonucleotide

SEQ ID NO: 653064 - DNA, 60 bp, Artificial; identical to SEQ ID NO: 134212
  Synthetic oligonucleotide

SEQ ID NO: 653065 - DNA, 51 bp, Artificial; identical to SEQ ID NO: 136610
  Synthetic oligonucleotide

SEQ ID NO: 653066 - DNA, 52 bp, Artificial; identical to SEQ ID NO: 134600
  Synthetic oligonucleotide

SEQ ID NO: 653067 - DNA, 50 bp, Artificial; identical to SEQ ID NO: 140505
  Synthetic oligonucleotide

SEQ ID NO: 653068 - DNA, 53 bp, Artificial; identical to SEQ ID NO: 137937
  Synthetic oligonucleotide

SEQ ID NO: 653069 - DNA, 53 bp, Artificial; identical to SEQ ID NO: 139048
  Synthetic oligonucleotide

SEQ ID NO: 653070 - DNA, 54 bp, Artificial; identical to SEQ ID NO: 137022
  Synthetic oligonucleotide

SEQ ID NO: 653071 - DNA, 53 bp, Artificial; identical to SEQ ID NO: 139590
  Synthetic oligonucleotide

SEQ ID NO: 653072 - DNA, 51 bp, Artificial; identical to SEQ ID NO: 134739
  Synthetic oligonucleotide

SEQ ID NO: 653073 - DNA, 55 bp, Artificial; identical to SEQ ID NO: 139410
  Synthetic oligonucleotide

SEQ ID NO: 653074 - DNA, 55 bp, Artificial; identical to SEQ ID NO: 137847
  Synthetic oligonucleotide

SEQ ID NO: 653075 - DNA, 52 bp, Artificial; identical to SEQ ID NO: 136901
  Synthetic oligonucleotide

SEQ ID NO: 653076 - DNA, 52 bp, Artificial; identical to SEQ ID NO: 139099
  Synthetic oligonucleotide

SEQ ID NO: 653077 - DNA, 50 bp, Artificial; identical to SEQ ID NO: 139153
  Synthetic oligonucleotide

SEQ ID NO: 653078 - DNA, 55 bp, Artificial; identical to SEQ ID NO: 133641
  Synthetic oligonucleotide

SEQ ID NO: 653079 - DNA, 55 bp, Artificial; identical to SEQ ID NO: 136447
  Synthetic oligonucleotide

SEQ ID NO: 653080 - DNA, 51 bp, Artificial; identical to SEQ ID NO: 137514
  Synthetic oligonucleotide

SEQ ID NO: 653081 - DNA, 50 bp, Artificial; identical to SEQ ID NO: 138035
  Synthetic oligonucleotide

SEQ ID NO: 653082 - DNA, 55 bp, Artificial; identical to SEQ ID NO: 139411
  Synthetic oligonucleotide

SEQ ID NO: 653083 - DNA, 55 bp, Artificial; identical to SEQ ID NO: 138606
  Synthetic oligonucleotide

SEQ ID NO: 653084 - DNA, 55 bp, Artificial; identical to SEQ ID NO: 137304
  Synthetic oligonucleotide

SEQ ID NO: 653085 - DNA, 50 bp, Artificial; identical to SEQ ID NO: 140850
  Synthetic oligonucleotide

SEQ ID NO: 653086 - DNA, 53 bp, Artificial; identical to SEQ ID NO: 139054
  Synthetic oligonucleotide

SEQ ID NO: 653087 - DNA, 60 bp, Artificial; identical to SEQ ID NO: 138584
  Synthetic oligonucleotide

SEQ ID NO: 653088 - DNA, 55 bp, Artificial; identical to SEQ ID NO: 137305
  Synthetic oligonucleotide

SEQ ID NO: 653089 - DNA, 59 bp, Artificial; identical to SEQ ID NO: 140017
  Synthetic oligonucleotide

SEQ ID NO: 653090 - DNA, 57 bp, Artificial; identical to SEQ ID NO: 138484
  Synthetic oligonucleotide

SEQ ID NO: 653091 - DNA, 50 bp, Artificial; identical to SEQ ID NO: 137244
  Synthetic oligonucleotide

SEQ ID NO: 653092 - DNA, 60 bp, Artificial; identical to SEQ ID NO: 136390
  Synthetic oligonucleotide

SEQ ID NO: 653093 - DNA, 55 bp, Artificial; identical to SEQ ID NO: 139413
  Synthetic oligonucleotide

SEQ ID NO: 653094 - DNA, 54 bp, Artificial; identical to SEQ ID NO: 140964
  Synthetic oligonucleotide

SEQ ID NO: 653095 - DNA, 50 bp, Artificial; identical to SEQ ID NO: 140758
  Synthetic oligonucleotide

SEQ ID NO: 653096 - DNA, 55 bp, Artificial; identical to SEQ ID NO: 139414
  Synthetic oligonucleotide

SEQ ID NO: 653097 - DNA, 53 bp, Artificial; identical to SEQ ID NO: 134502
  Synthetic oligonucleotide

SEQ ID NO: 653098 - DNA, 60 bp, Artificial; identical to SEQ ID NO: 134223
  Synthetic oligonucleotide

SEQ ID NO: 653099 - DNA, 55 bp, Artificial; identical to SEQ ID NO: 136398
  Synthetic oligonucleotide

SEQ ID NO: 653100 - DNA, 55 bp, Artificial; identical to SEQ ID NO: 136399
  Synthetic oligonucleotide

SEQ ID NO: 653101 - DNA, 53 bp, Artificial; identical to SEQ ID NO: 134139
  Synthetic oligonucleotide

SEQ ID NO: 653102 - DNA, 52 bp, Artificial; identical to SEQ ID NO: 136584
  Synthetic oligonucleotide

SEQ ID NO: 653103 - DNA, 55 bp, Artificial; identical to SEQ ID NO: 137306
  Synthetic oligonucleotide

SEQ ID NO: 653104 - DNA, 53 bp, Artificial; identical to SEQ ID NO: 140752
  Synthetic oligonucleotide

SEQ ID NO: 653105 - DNA, 55 bp, Artificial; identical to SEQ ID NO: 139415
  Synthetic oligonucleotide

SEQ ID NO: 653106 - DNA, 55 bp, Artificial; identical to SEQ ID NO: 138149
  Synthetic oligonucleotide

SEQ ID NO: 653107 - DNA, 54 bp, Artificial; identical to SEQ ID NO: 137036
  Synthetic oligonucleotide

SEQ ID NO: 653108 - DNA, 55 bp, Artificial; identical to SEQ ID NO: 139549
  Synthetic oligonucleotide

SEQ ID NO: 653109 - DNA, 50 bp, Artificial; identical to SEQ ID NO: 133752
  Synthetic oligonucleotide

SEQ ID NO: 653110 - DNA, 53 bp, Artificial; identical to SEQ ID NO: 133695
  Synthetic oligonucleotide

SEQ ID NO: 653111 - DNA, 54 bp, Artificial; identical to SEQ ID NO: 138625
  Synthetic oligonucleotide

SEQ ID NO: 653112 - DNA, 60 bp, Artificial; identical to SEQ ID NO: 140149
  Synthetic oligonucleotide

SEQ ID NO: 653113 - DNA, 55 bp, Artificial; identical to SEQ ID NO: 137511
  Synthetic oligonucleotide

SEQ ID NO: 653114 - DNA, 55 bp, Artificial; identical to SEQ ID NO: 140143
  Synthetic oligonucleotide

SEQ ID NO: 653115 - DNA, 52 bp, Artificial; identical to SEQ ID NO: 133395
  Synthetic oligonucleotide

SEQ ID NO: 653116 - DNA, 55 bp, Artificial; identical to SEQ ID NO: 136753
  Synthetic oligonucleotide

SEQ ID NO: 653117 - DNA, 51 bp, Artificial; identical to SEQ ID NO: 134787
  Synthetic oligonucleotide

SEQ ID NO: 653118 - DNA, 51 bp, Artificial; identical to SEQ ID NO: 137185
  Synthetic oligonucleotide

SEQ ID NO: 653119 - DNA, 55 bp, Artificial; identical to SEQ ID NO: 135957
  Synthetic oligonucleotide

SEQ ID NO: 653120 - DNA, 60 bp, Artificial; identical to SEQ ID NO: 135968
  Synthetic oligonucleotide

SEQ ID NO: 653121 - DNA, 55 bp, Artificial; identical to SEQ ID NO: 134147
  Synthetic oligonucleotide

SEQ ID NO: 653122 - DNA, 55 bp, Artificial; identical to SEQ ID NO: 134148
  Synthetic oligonucleotide

SEQ ID NO: 653123 - DNA, 52 bp, Artificial; identical to SEQ ID NO: 136583
  Synthetic oligonucleotide

SEQ ID NO: 653124 - DNA, 55 bp, Artificial; identical to SEQ ID NO: 138803
  Synthetic oligonucleotide

SEQ ID NO: 653125 - DNA, 53 bp, Artificial; identical to SEQ ID NO: 138159
  Synthetic oligonucleotide

SEQ ID NO: 653126 - DNA, 54 bp, Artificial; identical to SEQ ID NO: 134129
  Synthetic oligonucleotide

SEQ ID NO: 653127 - DNA, 55 bp, Artificial; identical to SEQ ID NO: 134127
  Synthetic oligonucleotide

SEQ ID NO: 653128 - DNA, 55 bp, Artificial; identical to SEQ ID NO: 136400
  Synthetic oligonucleotide

SEQ ID NO: 653129 - DNA, 51 bp, Artificial; identical to SEQ ID NO: 139670
  Synthetic oligonucleotide

SEQ ID NO: 653130 - DNA, 56 bp, Artificial; identical to SEQ ID NO: 137264
  Synthetic oligonucleotide

SEQ ID NO: 653131 - DNA, 60 bp, Artificial; identical to SEQ ID NO: 135979
  Synthetic oligonucleotide

SEQ ID NO: 653132 - DNA, 55 bp, Artificial; identical to SEQ ID NO: 136859
  Synthetic oligonucleotide

SEQ ID NO: 653133 - DNA, 55 bp, Artificial; identical to SEQ ID NO: 138804
  Synthetic oligonucleotide

SEQ ID NO: 653134 - DNA, 60 bp, Artificial; identical to SEQ ID NO: 135990
  Synthetic oligonucleotide

SEQ ID NO: 653135 - DNA, 57 bp, Artificial; identical to SEQ ID NO: 138672
  Synthetic oligonucleotide

SEQ ID NO: 653136 - DNA, 55 bp, Artificial; identical to SEQ ID NO: 137785
  Synthetic oligonucleotide

SEQ ID NO: 653137 - DNA, 57 bp, Artificial; identical to SEQ ID NO: 135689
  Synthetic oligonucleotide

SEQ ID NO: 653138 - DNA, 51 bp, Artificial; identical to SEQ ID NO: 137563
  Synthetic oligonucleotide

SEQ ID NO: 653139 - DNA, 55 bp, Artificial; identical to SEQ ID NO: 137510
  Synthetic oligonucleotide

SEQ ID NO: 653140 - DNA, 55 bp, Artificial; identical to SEQ ID NO: 139419
  Synthetic oligonucleotide

SEQ ID NO: 653141 - DNA, 55 bp, Artificial; identical to SEQ ID NO: 140255
  Synthetic oligonucleotide

SEQ ID NO: 653142 - DNA, 56 bp, Artificial; identical to SEQ ID NO: 136870
  Synthetic oligonucleotide

SEQ ID NO: 653143 - DNA, 51 bp, Artificial; identical to SEQ ID NO: 139129
  Synthetic oligonucleotide

SEQ ID NO: 653144 - DNA, 57 bp, Artificial; identical to SEQ ID NO: 140028
  Synthetic oligonucleotide

SEQ ID NO: 653145 - DNA, 60 bp, Artificial; identical to SEQ ID NO: 133368
  Synthetic oligonucleotide

SEQ ID NO: 653146 - DNA, 54 bp, Artificial; identical to SEQ ID NO: 137917
  Synthetic oligonucleotide

SEQ ID NO: 653147 - DNA, 55 bp, Artificial; identical to SEQ ID NO: 139422
  Synthetic oligonucleotide

SEQ ID NO: 653148 - DNA, 55 bp, Artificial; identical to SEQ ID NO: 133571
  Synthetic oligonucleotide

SEQ ID NO: 653149 - DNA, 55 bp, Artificial; identical to SEQ ID NO: 135641
  Synthetic oligonucleotide

SEQ ID NO: 653150 - DNA, 59 bp, Artificial; identical to SEQ ID NO: 135640
  Synthetic oligonucleotide

SEQ ID NO: 653151 - DNA, 53 bp, Artificial; identical to SEQ ID NO: 140968
  Synthetic oligonucleotide

SEQ ID NO: 653152 - DNA, 59 bp, Artificial; identical to SEQ ID NO: 138994
  Synthetic oligonucleotide

SEQ ID NO: 653153 - DNA, 53 bp, Artificial; identical to SEQ ID NO: 139059
  Synthetic oligonucleotide

SEQ ID NO: 653154 - DNA, 54 bp, Artificial; identical to SEQ ID NO: 140063
  Synthetic oligonucleotide

SEQ ID NO: 653155 - DNA, 54 bp, Artificial; identical to SEQ ID NO: 140333
  Synthetic oligonucleotide

SEQ ID NO: 653156 - DNA, 55 bp, Artificial; identical to SEQ ID NO: 138681
  Synthetic oligonucleotide

SEQ ID NO: 653157 - DNA, 55 bp, Artificial; identical to SEQ ID NO: 134138
  Synthetic oligonucleotide

SEQ ID NO: 653158 - DNA, 55 bp, Artificial; identical to SEQ ID NO: 137307
  Synthetic oligonucleotide

SEQ ID NO: 653159 - DNA, 55 bp, Artificial; identical to SEQ ID NO: 137420
  Synthetic oligonucleotide

SEQ ID NO: 653160 - DNA, 56 bp, Artificial; identical to SEQ ID NO: 139460
  Synthetic oligonucleotide

SEQ ID NO: 653161 - DNA, 54 bp, Artificial; identical to SEQ ID NO: 134477
  Synthetic oligonucleotide

SEQ ID NO: 653162 - DNA, 55 bp, Artificial; identical to SEQ ID NO: 136749
  Synthetic oligonucleotide

SEQ ID NO: 653163 - DNA, 55 bp, Artificial; identical to SEQ ID NO: 137561
  Synthetic oligonucleotide

SEQ ID NO: 653164 - DNA, 51 bp, Artificial; identical to SEQ ID NO: 133425
  Synthetic oligonucleotide

SEQ ID NO: 653165 - DNA, 59 bp, Artificial; identical to SEQ ID NO: 138607
  Synthetic oligonucleotide

SEQ ID NO: 653166 - DNA, 55 bp, Artificial; identical to SEQ ID NO: 136743
  Synthetic oligonucleotide

SEQ ID NO: 653167 - DNA, 60 bp, Artificial; identical to SEQ ID NO: 138961
  Synthetic oligonucleotide

SEQ ID NO: 653168 - DNA, 52 bp, Artificial; identical to SEQ ID NO: 137349
  Synthetic oligonucleotide

SEQ ID NO: 653169 - DNA, 60 bp, Artificial; identical to SEQ ID NO: 136101
  Synthetic oligonucleotide

SEQ ID NO: 653170 - DNA, 55 bp, Artificial; identical to SEQ ID NO: 139468
  Synthetic oligonucleotide

SEQ ID NO: 653171 - DNA, 51 bp, Artificial; identical to SEQ ID NO: 136603
  Synthetic oligonucleotide

SEQ ID NO: 653172 - DNA, 53 bp, Artificial; identical to SEQ ID NO: 136123
  Synthetic oligonucleotide

SEQ ID NO: 653173 - DNA, 55 bp, Artificial; identical to SEQ ID NO: 140957
  Synthetic oligonucleotide

SEQ ID NO: 653174 - DNA, 55 bp, Artificial; identical to SEQ ID NO: 136315
  Synthetic oligonucleotide

SEQ ID NO: 653175 - DNA, 59 bp, Artificial; identical to SEQ ID NO: 140127
  Synthetic oligonucleotide

SEQ ID NO: 653176 - DNA, 52 bp, Artificial; identical to SEQ ID NO: 134059
  Synthetic oligonucleotide

SEQ ID NO: 653177 - DNA, 50 bp, Artificial; identical to SEQ ID NO: 134858
  Synthetic oligonucleotide

SEQ ID NO: 653178 - DNA, 55 bp, Artificial; identical to SEQ ID NO: 134073
  Synthetic oligonucleotide

SEQ ID NO: 653179 - DNA, 54 bp, Artificial; identical to SEQ ID NO: 140158
  Synthetic oligonucleotide

SEQ ID NO: 653180 - DNA, 56 bp, Artificial; identical to SEQ ID NO: 138917
  Synthetic oligonucleotide

SEQ ID NO: 653181 - DNA, 56 bp, Artificial; identical to SEQ ID NO: 139682
  Synthetic oligonucleotide

SEQ ID NO: 653182 - DNA, 53 bp, Artificial; identical to SEQ ID NO: 137935
  Synthetic oligonucleotide

SEQ ID NO: 653183 - DNA, 55 bp, Artificial; identical to SEQ ID NO: 136404
  Synthetic oligonucleotide

SEQ ID NO: 653184 - DNA, 50 bp, Artificial; identical to SEQ ID NO: 136616
  Synthetic oligonucleotide

SEQ ID NO: 653185 - DNA, 60 bp, Artificial; identical to SEQ ID NO: 136134
  Synthetic oligonucleotide

SEQ ID NO: 653186 - DNA, 55 bp, Artificial; identical to SEQ ID NO: 136405
  Synthetic oligonucleotide

SEQ ID NO: 653187 - DNA, 55 bp, Artificial; identical to SEQ ID NO: 136739
  Synthetic oligonucleotide

SEQ ID NO: 653188 - DNA, 51 bp, Artificial; identical to SEQ ID NO: 139675
  Synthetic oligonucleotide

SEQ ID NO: 653189 - DNA, 52 bp, Artificial; identical to SEQ ID NO: 136885
  Synthetic oligonucleotide

SEQ ID NO: 653190 - DNA, 55 bp, Artificial; identical to SEQ ID NO: 136738
  Synthetic oligonucleotide

SEQ ID NO: 653191 - DNA, 52 bp, Artificial; identical to SEQ ID NO: 140069
  Synthetic oligonucleotide

SEQ ID NO: 653192 - DNA, 52 bp, Artificial; identical to SEQ ID NO: 140969
  Synthetic oligonucleotide

SEQ ID NO: 653193 - DNA, 60 bp, Artificial; identical to SEQ ID NO: 136156
  Synthetic oligonucleotide

SEQ ID NO: 653194 - DNA, 55 bp, Artificial; identical to SEQ ID NO: 138687
  Synthetic oligonucleotide

SEQ ID NO: 653195 - DNA, 54 bp, Artificial; identical to SEQ ID NO: 139793
  Synthetic oligonucleotide

SEQ ID NO: 653196 - DNA, 54 bp, Artificial; identical to SEQ ID NO: 138311
  Synthetic oligonucleotide

SEQ ID NO: 653197 - DNA, 55 bp, Artificial; identical to SEQ ID NO: 138688
  Synthetic oligonucleotide

SEQ ID NO: 653198 - DNA, 55 bp, Artificial; identical to SEQ ID NO: 139470
  Synthetic oligonucleotide

SEQ ID NO: 653199 - DNA, 60 bp, Artificial; identical to SEQ ID NO: 136168
  Synthetic oligonucleotide

SEQ ID NO: 653200 - DNA, 55 bp, Artificial; identical to SEQ ID NO: 137843
  Synthetic oligonucleotide

SEQ ID NO: 653201 - DNA, 55 bp, Artificial; identical to SEQ ID NO: 136406
  Synthetic oligonucleotide

SEQ ID NO: 653202 - DNA, 50 bp, Artificial; identical to SEQ ID NO: 139212
  Synthetic oligonucleotide

SEQ ID NO: 653203 - DNA, 52 bp, Artificial; identical to SEQ ID NO: 134617
  Synthetic oligonucleotide

SEQ ID NO: 653204 - DNA, 55 bp, Artificial; identical to SEQ ID NO: 134363
  Synthetic oligonucleotide

SEQ ID NO: 653205 - DNA, 60 bp, Artificial; identical to SEQ ID NO: 138772
  Synthetic oligonucleotide

SEQ ID NO: 653206 - DNA, 50 bp, Artificial; identical to SEQ ID NO: 139177
  Synthetic oligonucleotide

SEQ ID NO: 653207 - DNA, 55 bp, Artificial; identical to SEQ ID NO: 134251
  Synthetic oligonucleotide

SEQ ID NO: 653208 - DNA, 55 bp, Artificial; identical to SEQ ID NO: 135897
  Synthetic oligonucleotide

SEQ ID NO: 653209 - DNA, 55 bp, Artificial; identical to SEQ ID NO: 135895
  Synthetic oligonucleotide

SEQ ID NO: 653210 - DNA, 53 bp, Artificial; identical to SEQ ID NO: 139068
  Synthetic oligonucleotide

SEQ ID NO: 653211 - DNA, 56 bp, Artificial; identical to SEQ ID NO: 138750
  Synthetic oligonucleotide

SEQ ID NO: 653212 - DNA, 59 bp, Artificial; identical to SEQ ID NO: 136212
  Synthetic oligonucleotide

SEQ ID NO: 653213 - DNA, 55 bp, Artificial; identical to SEQ ID NO: 135963
  Synthetic oligonucleotide

SEQ ID NO: 653214 - DNA, 54 bp, Artificial; identical to SEQ ID NO: 138253
  Synthetic oligonucleotide

SEQ ID NO: 653215 - DNA, 55 bp, Artificial; identical to SEQ ID NO: 140781
  Synthetic oligonucleotide

SEQ ID NO: 653216 - DNA, 60 bp, Artificial; identical to SEQ ID NO: 136223
  Synthetic oligonucleotide

SEQ ID NO: 653217 - DNA, 55 bp, Artificial; identical to SEQ ID NO: 137844
  Synthetic oligonucleotide

SEQ ID NO: 653218 - DNA, 52 bp, Artificial; identical to SEQ ID NO: 140368
  Synthetic oligonucleotide

SEQ ID NO: 653219 - DNA, 54 bp, Artificial; identical to SEQ ID NO: 136814
  Synthetic oligonucleotide

SEQ ID NO: 653220 - DNA, 53 bp, Artificial; identical to SEQ ID NO: 137749
  Synthetic oligonucleotide

SEQ ID NO: 653221 - DNA, 56 bp, Artificial; identical to SEQ ID NO: 136925
  Synthetic oligonucleotide

SEQ ID NO: 653222 - DNA, 60 bp, Artificial; identical to SEQ ID NO: 138728
  Synthetic oligonucleotide

SEQ ID NO: 653223 - DNA, 55 bp, Artificial; identical to SEQ ID NO: 136407
  Synthetic oligonucleotide

SEQ ID NO: 653224 - DNA, 55 bp, Artificial; identical to SEQ ID NO: 138689
  Synthetic oligonucleotide

SEQ ID NO: 653225 - DNA, 55 bp, Artificial; identical to SEQ ID NO: 137725
  Synthetic oligonucleotide

SEQ ID NO: 653226 - DNA, 55 bp, Artificial; identical to SEQ ID NO: 137310
  Synthetic oligonucleotide

SEQ ID NO: 653227 - DNA, 55 bp, Artificial; identical to SEQ ID NO: 138360
  Synthetic oligonucleotide

SEQ ID NO: 653228 - DNA, 55 bp, Artificial; identical to SEQ ID NO: 136235
  Synthetic oligonucleotide

SEQ ID NO: 653229 - DNA, 59 bp, Artificial; identical to SEQ ID NO: 138706
  Synthetic oligonucleotide

SEQ ID NO: 653230 - DNA, 55 bp, Artificial; identical to SEQ ID NO: 138696
  Synthetic oligonucleotide

SEQ ID NO: 653231 - DNA, 60 bp, Artificial; identical to SEQ ID NO: 138695
  Synthetic oligonucleotide

SEQ ID NO: 653232 - DNA, 55 bp, Artificial; identical to SEQ ID NO: 140895
  Synthetic oligonucleotide

SEQ ID NO: 653233 - DNA, 55 bp, Artificial; identical to SEQ ID NO: 136408
  Synthetic oligonucleotide

SEQ ID NO: 653234 - DNA, 53 bp, Artificial; identical to SEQ ID NO: 133701
  Synthetic oligonucleotide

SEQ ID NO: 653235 - DNA, 55 bp, Artificial; identical to SEQ ID NO: 136410
  Synthetic oligonucleotide

SEQ ID NO: 653236 - DNA, 54 bp, Artificial; identical to SEQ ID NO: 139474
  Synthetic oligonucleotide

SEQ ID NO: 653237 - DNA, 51 bp, Artificial; identical to SEQ ID NO: 134704
  Synthetic oligonucleotide

SEQ ID NO: 653238 - DNA, 50 bp, Artificial; identical to SEQ ID NO: 139475
  Synthetic oligonucleotide

SEQ ID NO: 653239 - DNA, 53 bp, Artificial; identical to SEQ ID NO: 141106
  Synthetic oligonucleotide

SEQ ID NO: 653240 - DNA, 55 bp, Artificial; identical to SEQ ID NO: 138664
  Synthetic oligonucleotide

SEQ ID NO: 653241 - DNA, 50 bp, Artificial; identical to SEQ ID NO: 135066
  Synthetic oligonucleotide

SEQ ID NO: 653242 - DNA, 53 bp, Artificial; identical to SEQ ID NO: 136862
  Synthetic oligonucleotide

SEQ ID NO: 653243 - DNA, 52 bp, Artificial; identical to SEQ ID NO: 133396
  Synthetic oligonucleotide

SEQ ID NO: 653244 - DNA, 56 bp, Artificial; identical to SEQ ID NO: 135710
  Synthetic oligonucleotide

SEQ ID NO: 653245 - DNA, 50 bp, Artificial; identical to SEQ ID NO: 135072
  Synthetic oligonucleotide

SEQ ID NO: 653246 - DNA, 55 bp, Artificial; identical to SEQ ID NO: 135802
  Synthetic oligonucleotide

SEQ ID NO: 653247 - DNA, 51 bp, Artificial; identical to SEQ ID NO: 134697
  Synthetic oligonucleotide

SEQ ID NO: 653248 - DNA, 53 bp, Artificial; identical to SEQ ID NO: 140785
  Synthetic oligonucleotide

SEQ ID NO: 653249 - DNA, 60 bp, Artificial; identical to SEQ ID NO: 135618
  Synthetic oligonucleotide

SEQ ID NO: 653250 - DNA, 55 bp, Artificial; identical to SEQ ID NO: 136122
  Synthetic oligonucleotide

SEQ ID NO: 653251 - DNA, 51 bp, Artificial; identical to SEQ ID NO: 134693
  Synthetic oligonucleotide

SEQ ID NO: 653252 - DNA, 55 bp, Artificial; identical to SEQ ID NO: 137340
  Synthetic oligonucleotide

SEQ ID NO: 653253 - DNA, 51 bp, Artificial; identical to SEQ ID NO: 133740
  Synthetic oligonucleotide

SEQ ID NO: 653254 - DNA, 59 bp, Artificial; identical to SEQ ID NO: 139283
  Synthetic oligonucleotide

SEQ ID NO: 653255 - DNA, 54 bp, Artificial; identical to SEQ ID NO: 139029
  Synthetic oligonucleotide

SEQ ID NO: 653256 - DNA, 54 bp, Artificial; identical to SEQ ID NO: 133572
  Synthetic oligonucleotide

SEQ ID NO: 653257 - DNA, 55 bp, Artificial; identical to SEQ ID NO: 139476
  Synthetic oligonucleotide

SEQ ID NO: 653258 - DNA, 55 bp, Artificial; identical to SEQ ID NO: 138643
  Synthetic oligonucleotide

SEQ ID NO: 653259 - DNA, 54 bp, Artificial; identical to SEQ ID NO: 141104
  Synthetic oligonucleotide

SEQ ID NO: 653260 - DNA, 55 bp, Artificial; identical to SEQ ID NO: 134383
  Synthetic oligonucleotide

SEQ ID NO: 653261 - DNA, 52 bp, Artificial; identical to SEQ ID NO: 136570
  Synthetic oligonucleotide

SEQ ID NO: 653262 - DNA, 55 bp, Artificial; identical to SEQ ID NO: 137313
  Synthetic oligonucleotide

SEQ ID NO: 653263 - DNA, 54 bp, Artificial; identical to SEQ ID NO: 134463
  Synthetic oligonucleotide

SEQ ID NO: 653264 - DNA, 51 bp, Artificial; identical to SEQ ID NO: 140389
  Synthetic oligonucleotide

SEQ ID NO: 653265 - DNA, 59 bp, Artificial; identical to SEQ ID NO: 138085
  Synthetic oligonucleotide

SEQ ID NO: 653266 - DNA, 55 bp, Artificial; identical to SEQ ID NO: 136343
  Synthetic oligonucleotide

SEQ ID NO: 653267 - DNA, 55 bp, Artificial; identical to SEQ ID NO: 136354
  Synthetic oligonucleotide

SEQ ID NO: 653268 - DNA, 59 bp, Artificial; identical to SEQ ID NO: 135630
  Synthetic oligonucleotide

SEQ ID NO: 653269 - DNA, 52 bp, Artificial; identical to SEQ ID NO: 134606
  Synthetic oligonucleotide

SEQ ID NO: 653270 - DNA, 54 bp, Artificial; identical to SEQ ID NO: 139477
  Synthetic oligonucleotide

SEQ ID NO: 653271 - DNA, 52 bp, Artificial; identical to SEQ ID NO: 139087
  Synthetic oligonucleotide

SEQ ID NO: 653272 - DNA, 55 bp, Artificial; identical to SEQ ID NO: 134117
  Synthetic oligonucleotide

SEQ ID NO: 653273 - DNA, 55 bp, Artificial; identical to SEQ ID NO: 134121
  Synthetic oligonucleotide

SEQ ID NO: 653274 - DNA, 50 bp, Artificial; identical to SEQ ID NO: 139185
  Synthetic oligonucleotide

SEQ ID NO: 653275 - DNA, 55 bp, Artificial; identical to SEQ ID NO: 134122
  Synthetic oligonucleotide

SEQ ID NO: 653276 - DNA, 58 bp, Artificial; identical to SEQ ID NO: 135662
  Synthetic oligonucleotide

SEQ ID NO: 653277 - DNA, 53 bp, Artificial; identical to SEQ ID NO: 134500
  Synthetic oligonucleotide

SEQ ID NO: 653278 - DNA, 55 bp, Artificial; identical to SEQ ID NO: 137342
  Synthetic oligonucleotide

SEQ ID NO: 653279 - DNA, 51 bp, Artificial; identical to SEQ ID NO: 134683
  Synthetic oligonucleotide

SEQ ID NO: 653280 - DNA, 55 bp, Artificial; identical to SEQ ID NO: 139479
  Synthetic oligonucleotide

SEQ ID NO: 653281 - DNA, 51 bp, Artificial; identical to SEQ ID NO: 137974
  Synthetic oligonucleotide

SEQ ID NO: 653282 - DNA, 55 bp, Artificial; identical to SEQ ID NO: 140245
  Synthetic oligonucleotide

SEQ ID NO: 653283 - DNA, 56 bp, Artificial; identical to SEQ ID NO: 135569
  Synthetic oligonucleotide

SEQ ID NO: 653284 - DNA, 50 bp, Artificial; identical to SEQ ID NO: 137568
  Synthetic oligonucleotide

SEQ ID NO: 653285 - DNA, 52 bp, Artificial; identical to SEQ ID NO: 137759
  Synthetic oligonucleotide

SEQ ID NO: 653286 - DNA, 55 bp, Artificial; identical to SEQ ID NO: 134131
  Synthetic oligonucleotide

SEQ ID NO: 653287 - DNA, 55 bp, Artificial; identical to SEQ ID NO: 137314
  Synthetic oligonucleotide

SEQ ID NO: 653288 - DNA, 55 bp, Artificial; identical to SEQ ID NO: 138648
  Synthetic oligonucleotide

SEQ ID NO: 653289 - DNA, 55 bp, Artificial; identical to SEQ ID NO: 134191
  Synthetic oligonucleotide

SEQ ID NO: 653290 - DNA, 55 bp, Artificial; identical to SEQ ID NO: 137822
  Synthetic oligonucleotide

SEQ ID NO: 653291 - DNA, 55 bp, Artificial; identical to SEQ ID NO: 134192
  Synthetic oligonucleotide

SEQ ID NO: 653292 - DNA, 55 bp, Artificial; identical to SEQ ID NO: 140994
  Synthetic oligonucleotide

SEQ ID NO: 653293 - DNA, 55 bp, Artificial; identical to SEQ ID NO: 134155
  Synthetic oligonucleotide

SEQ ID NO: 653294 - DNA, 55 bp, Artificial; identical to SEQ ID NO: 134159
  Synthetic oligonucleotide

SEQ ID NO: 653295 - DNA, 50 bp, Artificial; identical to SEQ ID NO: 134974
  Synthetic oligonucleotide

SEQ ID NO: 653296 - DNA, 59 bp, Artificial; identical to SEQ ID NO: 135574
  Synthetic oligonucleotide

SEQ ID NO: 653297 - DNA, 55 bp, Artificial; identical to SEQ ID NO: 134178
  Synthetic oligonucleotide

SEQ ID NO: 653298 - DNA, 59 bp, Artificial; identical to SEQ ID NO: 139372
  Synthetic oligonucleotide

SEQ ID NO: 653299 - DNA, 55 bp, Artificial; identical to SEQ ID NO: 133635
  Synthetic oligonucleotide

SEQ ID NO: 653300 - DNA, 55 bp, Artificial; identical to SEQ ID NO: 134177
  Synthetic oligonucleotide

SEQ ID NO: 653301 - DNA, 57 bp, Artificial; identical to SEQ ID NO: 139249
  Synthetic oligonucleotide

SEQ ID NO: 653302 - DNA, 51 bp, Artificial; identical to SEQ ID NO: 139111
  Synthetic oligonucleotide

SEQ ID NO: 653303 - DNA, 52 bp, Artificial; identical to SEQ ID NO: 133730
  Synthetic oligonucleotide

SEQ ID NO: 653304 - DNA, 51 bp, Artificial; identical to SEQ ID NO: 137761
  Synthetic oligonucleotide

SEQ ID NO: 653305 - DNA, 55 bp, Artificial; identical to SEQ ID NO: 137727
  Synthetic oligonucleotide

SEQ ID NO: 653306 - DNA, 53 bp, Artificial; identical to SEQ ID NO: 137190
  Synthetic oligonucleotide

SEQ ID NO: 653307 - DNA, 55 bp, Artificial; identical to SEQ ID NO: 138677
  Synthetic oligonucleotide

SEQ ID NO: 653308 - DNA, 60 bp, Artificial; identical to SEQ ID NO: 135577
  Synthetic oligonucleotide

SEQ ID NO: 653309 - DNA, 52 bp, Artificial; identical to SEQ ID NO: 133729
  Synthetic oligonucleotide

SEQ ID NO: 653310 - DNA, 50 bp, Artificial; identical to SEQ ID NO: 139832
  Synthetic oligonucleotide

SEQ ID NO: 653311 - DNA, 57 bp, Artificial; identical to SEQ ID NO: 137015
  Synthetic oligonucleotide

SEQ ID NO: 653312 - DNA, 52 bp, Artificial; identical to SEQ ID NO: 137965
  Synthetic oligonucleotide

SEQ ID NO: 653313 - DNA, 53 bp, Artificial; identical to SEQ ID NO: 134514
  Synthetic oligonucleotide

SEQ ID NO: 653314 - DNA, 57 bp, Artificial; identical to SEQ ID NO: 136982
  Synthetic oligonucleotide

SEQ ID NO: 653315 - DNA, 54 bp, Artificial; identical to SEQ ID NO: 134481
  Synthetic oligonucleotide

SEQ ID NO: 653316 - DNA, 52 bp, Artificial; identical to SEQ ID NO: 134575
  Synthetic oligonucleotide

SEQ ID NO: 653317 - DNA, 55 bp, Artificial; identical to SEQ ID NO: 137728
  Synthetic oligonucleotide

SEQ ID NO: 653318 - DNA, 58 bp, Artificial; identical to SEQ ID NO: 135582
  Synthetic oligonucleotide

SEQ ID NO: 653319 - DNA, 55 bp, Artificial; identical to SEQ ID NO: 134048
  Synthetic oligonucleotide

SEQ ID NO: 653320 - DNA, 60 bp, Artificial; identical to SEQ ID NO: 135561
  Synthetic oligonucleotide

SEQ ID NO: 653321 - DNA, 55 bp, Artificial; identical to SEQ ID NO: 137833
  Synthetic oligonucleotide

SEQ ID NO: 653322 - DNA, 59 bp, Artificial; identical to SEQ ID NO: 135623
  Synthetic oligonucleotide

SEQ ID NO: 653323 - DNA, 52 bp, Artificial; identical to SEQ ID NO: 134616
  Synthetic oligonucleotide

SEQ ID NO: 653324 - DNA, 55 bp, Artificial; identical to SEQ ID NO: 139485
  Synthetic oligonucleotide

SEQ ID NO: 653325 - DNA, 59 bp, Artificial; identical to SEQ ID NO: 137259
  Synthetic oligonucleotide

SEQ ID NO: 653326 - DNA, 51 bp, Artificial; identical to SEQ ID NO: 138382
  Synthetic oligonucleotide

SEQ ID NO: 653327 - DNA, 50 bp, Artificial; identical to SEQ ID NO: 136626
  Synthetic oligonucleotide

SEQ ID NO: 653328 - DNA, 52 bp, Artificial; identical to SEQ ID NO: 136572
  Synthetic oligonucleotide

SEQ ID NO: 653329 - DNA, 54 bp, Artificial; identical to SEQ ID NO: 135694
  Synthetic oligonucleotide

SEQ ID NO: 653330 - DNA, 50 bp, Artificial; identical to SEQ ID NO: 137238
  Synthetic oligonucleotide

SEQ ID NO: 653331 - DNA, 54 bp, Artificial; identical to SEQ ID NO: 138651
  Synthetic oligonucleotide

SEQ ID NO: 653332 - DNA, 51 bp, Artificial; identical to SEQ ID NO: 138720
  Synthetic oligonucleotide

SEQ ID NO: 653333 - DNA, 60 bp, Artificial; identical to SEQ ID NO: 138082
  Synthetic oligonucleotide

SEQ ID NO: 653334 - DNA, 55 bp, Artificial; identical to SEQ ID NO: 136366
  Synthetic oligonucleotide

SEQ ID NO: 653335 - DNA, 55 bp, Artificial; identical to SEQ ID NO: 133634
  Synthetic oligonucleotide

SEQ ID NO: 653336 - DNA, 54 bp, Artificial; identical to SEQ ID NO: 134429
  Synthetic oligonucleotide

SEQ ID NO: 653337 - DNA, 55 bp, Artificial; identical to SEQ ID NO: 136413
  Synthetic oligonucleotide

SEQ ID NO: 653338 - DNA, 55 bp, Artificial; identical to SEQ ID NO: 139487
  Synthetic oligonucleotide

SEQ ID NO: 653339 - DNA, 55 bp, Artificial; identical to SEQ ID NO: 137315
  Synthetic oligonucleotide

SEQ ID NO: 653340 - DNA, 55 bp, Artificial; identical to SEQ ID NO: 138359
  Synthetic oligonucleotide

SEQ ID NO: 653341 - DNA, 60 bp, Artificial; identical to SEQ ID NO: 136636
  Synthetic oligonucleotide

SEQ ID NO: 653342 - DNA, 51 bp, Artificial; identical to SEQ ID NO: 134718
  Synthetic oligonucleotide

SEQ ID NO: 653343 - DNA, 53 bp, Artificial; identical to SEQ ID NO: 137203
  Synthetic oligonucleotide

SEQ ID NO: 653344 - DNA, 55 bp, Artificial; identical to SEQ ID NO: 138721
  Synthetic oligonucleotide

SEQ ID NO: 653345 - DNA, 55 bp, Artificial; identical to SEQ ID NO: 139445
  Synthetic oligonucleotide

SEQ ID NO: 653346 - DNA, 55 bp, Artificial; identical to SEQ ID NO: 139446
  Synthetic oligonucleotide

SEQ ID NO: 653347 - DNA, 55 bp, Artificial; identical to SEQ ID NO: 136414
  Synthetic oligonucleotide

SEQ ID NO: 653348 - DNA, 60 bp, Artificial; identical to SEQ ID NO: 138574
  Synthetic oligonucleotide

SEQ ID NO: 653349 - DNA, 55 bp, Artificial; identical to SEQ ID NO: 138726
  Synthetic oligonucleotide

SEQ ID NO: 653350 - DNA, 59 bp, Artificial; identical to SEQ ID NO: 133379
  Synthetic oligonucleotide

SEQ ID NO: 653351 - DNA, 56 bp, Artificial; identical to SEQ ID NO: 135556
  Synthetic oligonucleotide

SEQ ID NO: 653352 - DNA, 58 bp, Artificial; identical to SEQ ID NO: 138630
  Synthetic oligonucleotide

SEQ ID NO: 653353 - DNA, 53 bp, Artificial; identical to SEQ ID NO: 139064
  Synthetic oligonucleotide

SEQ ID NO: 653354 - DNA, 60 bp, Artificial; identical to SEQ ID NO: 135555
  Synthetic oligonucleotide

SEQ ID NO: 653355 - DNA, 54 bp, Artificial; identical to SEQ ID NO: 134452
  Synthetic oligonucleotide

SEQ ID NO: 653356 - DNA, 55 bp, Artificial; identical to SEQ ID NO: 139447
  Synthetic oligonucleotide

SEQ ID NO: 653357 - DNA, 51 bp, Artificial; identical to SEQ ID NO: 138225
  Synthetic oligonucleotide

SEQ ID NO: 653358 - DNA, 58 bp, Artificial; identical to SEQ ID NO: 135554
  Synthetic oligonucleotide

SEQ ID NO: 653359 - DNA, 54 bp, Artificial; identical to SEQ ID NO: 140159
  Synthetic oligonucleotide

SEQ ID NO: 653360 - DNA, 60 bp, Artificial; identical to SEQ ID NO: 140016
  Synthetic oligonucleotide

SEQ ID NO: 653361 - DNA, 50 bp, Artificial; identical to SEQ ID NO: 139769
  Synthetic oligonucleotide

SEQ ID NO: 653362 - DNA, 54 bp, Artificial; identical to SEQ ID NO: 133688
  Synthetic oligonucleotide

SEQ ID NO: 653363 - DNA, 60 bp, Artificial; identical to SEQ ID NO: 136643
  Synthetic oligonucleotide

SEQ ID NO: 653364 - DNA, 51 bp, Artificial; identical to SEQ ID NO: 136935
  Synthetic oligonucleotide

SEQ ID NO: 653365 - DNA, 54 bp, Artificial; identical to SEQ ID NO: 134454
  Synthetic oligonucleotide

SEQ ID NO: 653366 - DNA, 60 bp, Artificial; identical to SEQ ID NO: 135553
  Synthetic oligonucleotide

SEQ ID NO: 653367 - DNA, 60 bp, Artificial; identical to SEQ ID NO: 135552
  Synthetic oligonucleotide

SEQ ID NO: 653368 - DNA, 55 bp, Artificial; identical to SEQ ID NO: 137411
  Synthetic oligonucleotide

SEQ ID NO: 653369 - DNA, 53 bp, Artificial; identical to SEQ ID NO: 140357
  Synthetic oligonucleotide

SEQ ID NO: 653370 - DNA, 50 bp, Artificial; identical to SEQ ID NO: 138232
  Synthetic oligonucleotide

SEQ ID NO: 653371 - DNA, 55 bp, Artificial; identical to SEQ ID NO: 134353
  Synthetic oligonucleotide

SEQ ID NO: 653372 - DNA, 55 bp, Artificial; identical to SEQ ID NO: 139448
  Synthetic oligonucleotide

SEQ ID NO: 653373 - DNA, 60 bp, Artificial; identical to SEQ ID NO: 138503
  Synthetic oligonucleotide

SEQ ID NO: 653374 - DNA, 50 bp, Artificial; identical to SEQ ID NO: 138403
  Synthetic oligonucleotide

SEQ ID NO: 653375 - DNA, 50 bp, Artificial; identical to SEQ ID NO: 135028
  Synthetic oligonucleotide

SEQ ID NO: 653376 - DNA, 59 bp, Artificial; identical to SEQ ID NO: 138273
  Synthetic oligonucleotide

SEQ ID NO: 653377 - DNA, 57 bp, Artificial; identical to SEQ ID NO: 138638
  Synthetic oligonucleotide

SEQ ID NO: 653378 - DNA, 53 bp, Artificial; identical to SEQ ID NO: 134542
  Synthetic oligonucleotide

SEQ ID NO: 653379 - DNA, 59 bp, Artificial; identical to SEQ ID NO: 138498
  Synthetic oligonucleotide

SEQ ID NO: 653380 - DNA, 53 bp, Artificial; identical to SEQ ID NO: 140756
  Synthetic oligonucleotide

SEQ ID NO: 653381 - DNA, 52 bp, Artificial; identical to SEQ ID NO: 139622
  Synthetic oligonucleotide

SEQ ID NO: 653382 - DNA, 50 bp, Artificial; identical to SEQ ID NO: 138184
  Synthetic oligonucleotide

SEQ ID NO: 653383 - DNA, 53 bp, Artificial; identical to SEQ ID NO: 140347
  Synthetic oligonucleotide

SEQ ID NO: 653384 - DNA, 55 bp, Artificial; identical to SEQ ID NO: 138731
  Synthetic oligonucleotide

SEQ ID NO: 653385 - DNA, 54 bp, Artificial; identical to SEQ ID NO: 136856
  Synthetic oligonucleotide

SEQ ID NO: 653386 - DNA, 55 bp, Artificial; identical to SEQ ID NO: 140729
  Synthetic oligonucleotide

SEQ ID NO: 653387 - DNA, 50 bp, Artificial; identical to SEQ ID NO: 135031
  Synthetic oligonucleotide

SEQ ID NO: 653388 - DNA, 55 bp, Artificial; identical to SEQ ID NO: 141079
  Synthetic oligonucleotide

SEQ ID NO: 653389 - DNA, 51 bp, Artificial; identical to SEQ ID NO: 134708
  Synthetic oligonucleotide

SEQ ID NO: 653390 - DNA, 58 bp, Artificial; identical to SEQ ID NO: 136992
  Synthetic oligonucleotide

SEQ ID NO: 653391 - DNA, 50 bp, Artificial; identical to SEQ ID NO: 135550
  Synthetic oligonucleotide

SEQ ID NO: 653392 - DNA, 53 bp, Artificial; identical to SEQ ID NO: 136566
  Synthetic oligonucleotide

SEQ ID NO: 653393 - DNA, 55 bp, Artificial; identical to SEQ ID NO: 136416
  Synthetic oligonucleotide

SEQ ID NO: 653394 - DNA, 59 bp, Artificial; identical to SEQ ID NO: 138492
  Synthetic oligonucleotide

SEQ ID NO: 653395 - DNA, 57 bp, Artificial; identical to SEQ ID NO: 138489
  Synthetic oligonucleotide

SEQ ID NO: 653396 - DNA, 55 bp, Artificial; identical to SEQ ID NO: 133631
  Synthetic oligonucleotide

SEQ ID NO: 653397 - DNA, 55 bp, Artificial; identical to SEQ ID NO: 135549
  Synthetic oligonucleotide

SEQ ID NO: 653398 - DNA, 54 bp, Artificial; identical to SEQ ID NO: 133630
  Synthetic oligonucleotide

SEQ ID NO: 653399 - DNA, 54 bp, Artificial; identical to SEQ ID NO: 137037
  Synthetic oligonucleotide

SEQ ID NO: 653400 - DNA, 50 bp, Artificial; identical to SEQ ID NO: 139775
  Synthetic oligonucleotide

SEQ ID NO: 653401 - DNA, 55 bp, Artificial; identical to SEQ ID NO: 139452
  Synthetic oligonucleotide

SEQ ID NO: 653402 - DNA, 55 bp, Artificial; identical to SEQ ID NO: 140011
  Synthetic oligonucleotide

SEQ ID NO: 653403 - DNA, 55 bp, Artificial; identical to SEQ ID NO: 134409
  Synthetic oligonucleotide

SEQ ID NO: 653404 - DNA, 55 bp, Artificial; identical to SEQ ID NO: 134425
  Synthetic oligonucleotide

SEQ ID NO: 653405 - DNA, 60 bp, Artificial; identical to SEQ ID NO: 135547
  Synthetic oligonucleotide

SEQ ID NO: 653406 - DNA, 57 bp, Artificial; identical to SEQ ID NO: 135599
  Synthetic oligonucleotide

SEQ ID NO: 653407 - DNA, 60 bp, Artificial; identical to SEQ ID NO: 136646
  Synthetic oligonucleotide

SEQ ID NO: 653408 - DNA, 60 bp, Artificial; identical to SEQ ID NO: 135600
  Synthetic oligonucleotide

SEQ ID NO: 653409 - DNA, 55 bp, Artificial; identical to SEQ ID NO: 140844
  Synthetic oligonucleotide

SEQ ID NO: 653410 - DNA, 55 bp, Artificial; identical to SEQ ID NO: 134244
  Synthetic oligonucleotide

SEQ ID NO: 653411 - DNA, 55 bp, Artificial; identical to SEQ ID NO: 140243
  Synthetic oligonucleotide

SEQ ID NO: 653412 - DNA, 55 bp, Artificial; identical to SEQ ID NO: 137316
  Synthetic oligonucleotide

SEQ ID NO: 653413 - DNA, 58 bp, Artificial; identical to SEQ ID NO: 135603
  Synthetic oligonucleotide

SEQ ID NO: 653414 - DNA, 60 bp, Artificial; identical to SEQ ID NO: 135604
  Synthetic oligonucleotide

SEQ ID NO: 653415 - DNA, 55 bp, Artificial; identical to SEQ ID NO: 134321
  Synthetic oligonucleotide

SEQ ID NO: 653416 - DNA, 55 bp, Artificial; identical to SEQ ID NO: 138733
  Synthetic oligonucleotide

SEQ ID NO: 653417 - DNA, 60 bp, Artificial; identical to SEQ ID NO: 138482
  Synthetic oligonucleotide

SEQ ID NO: 653418 - DNA, 55 bp, Artificial; identical to SEQ ID NO: 134349
  Synthetic oligonucleotide

SEQ ID NO: 653419 - DNA, 51 bp, Artificial; identical to SEQ ID NO: 136911
  Synthetic oligonucleotide

SEQ ID NO: 653420 - DNA, 52 bp, Artificial; identical to SEQ ID NO: 140361
  Synthetic oligonucleotide

SEQ ID NO: 653421 - DNA, 54 bp, Artificial; identical to SEQ ID NO: 139455
  Synthetic oligonucleotide

SEQ ID NO: 653422 - DNA, 55 bp, Artificial; identical to SEQ ID NO: 134295
  Synthetic oligonucleotide

SEQ ID NO: 653423 - DNA, 50 bp, Artificial; identical to SEQ ID NO: 135003
  Synthetic oligonucleotide

SEQ ID NO: 653424 - DNA, 60 bp, Artificial; identical to SEQ ID NO: 138480
  Synthetic oligonucleotide

SEQ ID NO: 653425 - DNA, 52 bp, Artificial; identical to SEQ ID NO: 137198
  Synthetic oligonucleotide

SEQ ID NO: 653426 - DNA, 55 bp, Artificial; identical to SEQ ID NO: 135892
  Synthetic oligonucleotide

SEQ ID NO: 653427 - DNA, 55 bp, Artificial; identical to SEQ ID NO: 135913
  Synthetic oligonucleotide

SEQ ID NO: 653428 - DNA, 51 bp, Artificial; identical to SEQ ID NO: 138165
  Synthetic oligonucleotide

SEQ ID NO: 653429 - DNA, 55 bp, Artificial; identical to SEQ ID NO: 136705
  Synthetic oligonucleotide

SEQ ID NO: 653430 - DNA, 60 bp, Artificial; identical to SEQ ID NO: 138536
  Synthetic oligonucleotide

SEQ ID NO: 653431 - DNA, 55 bp, Artificial; identical to SEQ ID NO: 136419
  Synthetic oligonucleotide

SEQ ID NO: 653432 - DNA, 50 bp, Artificial; identical to SEQ ID NO: 136954
  Synthetic oligonucleotide

SEQ ID NO: 653433 - DNA, 59 bp, Artificial; identical to SEQ ID NO: 136962
  Synthetic oligonucleotide

SEQ ID NO: 653434 - DNA, 60 bp, Artificial; identical to SEQ ID NO: 138533
  Synthetic oligonucleotide

SEQ ID NO: 653435 - DNA, 60 bp, Artificial; identical to SEQ ID NO: 135610
  Synthetic oligonucleotide

SEQ ID NO: 653436 - DNA, 58 bp, Artificial; identical to SEQ ID NO: 138530
  Synthetic oligonucleotide

SEQ ID NO: 653437 - DNA, 60 bp, Artificial; identical to SEQ ID NO: 137254
  Synthetic oligonucleotide

SEQ ID NO: 653438 - DNA, 55 bp, Artificial; identical to SEQ ID NO: 140242
  Synthetic oligonucleotide

SEQ ID NO: 653439 - DNA, 55 bp, Artificial; identical to SEQ ID NO: 136722
  Synthetic oligonucleotide

SEQ ID NO: 653440 - DNA, 55 bp, Artificial; identical to SEQ ID NO: 138141
  Synthetic oligonucleotide

SEQ ID NO: 653441 - DNA, 60 bp, Artificial; identical to SEQ ID NO: 136967
  Synthetic oligonucleotide

SEQ ID NO: 653442 - DNA, 54 bp, Artificial; identical to SEQ ID NO: 136662
  Synthetic oligonucleotide

SEQ ID NO: 653443 - DNA, 59 bp, Artificial; identical to SEQ ID NO: 137687
  Synthetic oligonucleotide

SEQ ID NO: 653444 - DNA, 54 bp, Artificial; identical to SEQ ID NO: 135925
  Synthetic oligonucleotide

SEQ ID NO: 653445 - DNA, 54 bp, Artificial; identical to SEQ ID NO: 140749
  Synthetic oligonucleotide

SEQ ID NO: 653446 - DNA, 60 bp, Artificial; identical to SEQ ID NO: 137255
  Synthetic oligonucleotide

SEQ ID NO: 653447 - DNA, 56 bp, Artificial; identical to SEQ ID NO: 135711
  Synthetic oligonucleotide

SEQ ID NO: 653448 - DNA, 57 bp, Artificial; identical to SEQ ID NO: 139683
  Synthetic oligonucleotide

SEQ ID NO: 653449 - DNA, 55 bp, Artificial; identical to SEQ ID NO: 138284
  Synthetic oligonucleotide

SEQ ID NO: 653450 - DNA, 55 bp, Artificial; identical to SEQ ID NO: 138514
  Synthetic oligonucleotide

SEQ ID NO: 653451 - DNA, 52 bp, Artificial; identical to SEQ ID NO: 134608
  Synthetic oligonucleotide

SEQ ID NO: 653452 - DNA, 60 bp, Artificial; identical to SEQ ID NO: 141072
  Synthetic oligonucleotide

SEQ ID NO: 653453 - DNA, 53 bp, Artificial; identical to SEQ ID NO: 134536
  Synthetic oligonucleotide

SEQ ID NO: 653454 - DNA, 52 bp, Artificial; identical to SEQ ID NO: 136895
  Synthetic oligonucleotide

SEQ ID NO: 653455 - DNA, 55 bp, Artificial; identical to SEQ ID NO: 140732
  Synthetic oligonucleotide

SEQ ID NO: 653456 - DNA, 58 bp, Artificial; identical to SEQ ID NO: 138031
  Synthetic oligonucleotide

SEQ ID NO: 653457 - DNA, 55 bp, Artificial; identical to SEQ ID NO: 138705
  Synthetic oligonucleotide

SEQ ID NO: 653458 - DNA, 51 bp, Artificial; identical to SEQ ID NO: 139118
  Synthetic oligonucleotide

SEQ ID NO: 653459 - DNA, 55 bp, Artificial; identical to SEQ ID NO: 140733
  Synthetic oligonucleotide

SEQ ID NO: 653460 - DNA, 55 bp, Artificial; identical to SEQ ID NO: 136720
  Synthetic oligonucleotide

SEQ ID NO: 653461 - DNA, 55 bp, Artificial; identical to SEQ ID NO: 140146
  Synthetic oligonucleotide

SEQ ID NO: 653462 - DNA, 55 bp, Artificial; identical to SEQ ID NO: 138707
  Synthetic oligonucleotide

SEQ ID NO: 653463 - DNA, 55 bp, Artificial; identical to SEQ ID NO: 138712
  Synthetic oligonucleotide

SEQ ID NO: 653464 - DNA, 57 bp, Artificial; identical to SEQ ID NO: 136650
  Synthetic oligonucleotide

SEQ ID NO: 653465 - DNA, 55 bp, Artificial; identical to SEQ ID NO: 138534
  Synthetic oligonucleotide

SEQ ID NO: 653466 - DNA, 50 bp, Artificial; identical to SEQ ID NO: 137228
  Synthetic oligonucleotide

SEQ ID NO: 653467 - DNA, 52 bp, Artificial; identical to SEQ ID NO: 133319
  Synthetic oligonucleotide

SEQ ID NO: 653468 - DNA, 55 bp, Artificial; identical to SEQ ID NO: 133593
  Synthetic oligonucleotide

SEQ ID NO: 653469 - DNA, 55 bp, Artificial; identical to SEQ ID NO: 137408
  Synthetic oligonucleotide

SEQ ID NO: 653470 - DNA, 55 bp, Artificial; identical to SEQ ID NO: 137793
  Synthetic oligonucleotide

SEQ ID NO: 653471 - DNA, 55 bp, Artificial; identical to SEQ ID NO: 135687
  Synthetic oligonucleotide

SEQ ID NO: 653472 - DNA, 57 bp, Artificial; identical to SEQ ID NO: 135677
  Synthetic oligonucleotide

SEQ ID NO: 653473 - DNA, 55 bp, Artificial; identical to SEQ ID NO: 135770
  Synthetic oligonucleotide

SEQ ID NO: 653474 - DNA, 54 bp, Artificial; identical to SEQ ID NO: 133390
  Synthetic oligonucleotide

SEQ ID NO: 653475 - DNA, 54 bp, Artificial; identical to SEQ ID NO: 135818
  Synthetic oligonucleotide

SEQ ID NO: 653476 - DNA, 52 bp, Artificial; identical to SEQ ID NO: 139623
  Synthetic oligonucleotide

SEQ ID NO: 653477 - DNA, 55 bp, Artificial; identical to SEQ ID NO: 135824
  Synthetic oligonucleotide

SEQ ID NO: 653478 - DNA, 60 bp, Artificial; identical to SEQ ID NO: 135614
  Synthetic oligonucleotide

SEQ ID NO: 653479 - DNA, 51 bp, Artificial; identical to SEQ ID NO: 134813
  Synthetic oligonucleotide

SEQ ID NO: 653480 - DNA, 55 bp, Artificial; identical to SEQ ID NO: 135737
  Synthetic oligonucleotide

SEQ ID NO: 653481 - DNA, 55 bp, Artificial; identical to SEQ ID NO: 138479
  Synthetic oligonucleotide

SEQ ID NO: 653482 - DNA, 56 bp, Artificial; identical to SEQ ID NO: 135616
  Synthetic oligonucleotide

SEQ ID NO: 653483 - DNA, 53 bp, Artificial; identical to SEQ ID NO: 138490
  Synthetic oligonucleotide

SEQ ID NO: 653484 - DNA, 54 bp, Artificial; identical to SEQ ID NO: 137912
  Synthetic oligonucleotide

SEQ ID NO: 653485 - DNA, 55 bp, Artificial; identical to SEQ ID NO: 133628
  Synthetic oligonucleotide

SEQ ID NO: 653486 - DNA, 53 bp, Artificial; identical to SEQ ID NO: 137008
  Synthetic oligonucleotide

SEQ ID NO: 653487 - DNA, 54 bp, Artificial; identical to SEQ ID NO: 133316
  Synthetic oligonucleotide

SEQ ID NO: 653488 - DNA, 54 bp, Artificial; identical to SEQ ID NO: 139573
  Synthetic oligonucleotide

SEQ ID NO: 653489 - DNA, 60 bp, Artificial; identical to SEQ ID NO: 135597
  Synthetic oligonucleotide

SEQ ID NO: 653490 - DNA, 55 bp, Artificial; identical to SEQ ID NO: 136287
  Synthetic oligonucleotide

SEQ ID NO: 653491 - DNA, 53 bp, Artificial; identical to SEQ ID NO: 135685
  Synthetic oligonucleotide

SEQ ID NO: 653492 - DNA, 50 bp, Artificial; identical to SEQ ID NO: 137052
  Synthetic oligonucleotide

SEQ ID NO: 653493 - DNA, 57 bp, Artificial; identical to SEQ ID NO: 135683
  Synthetic oligonucleotide

SEQ ID NO: 653494 - DNA, 55 bp, Artificial; identical to SEQ ID NO: 139459
  Synthetic oligonucleotide

SEQ ID NO: 653495 - DNA, 59 bp, Artificial; identical to SEQ ID NO: 135596
  Synthetic oligonucleotide

SEQ ID NO: 653496 - DNA, 58 bp, Artificial; identical to SEQ ID NO: 139247
  Synthetic oligonucleotide

SEQ ID NO: 653497 - DNA, 60 bp, Artificial; identical to SEQ ID NO: 135595
  Synthetic oligonucleotide

SEQ ID NO: 653498 - DNA, 51 bp, Artificial; identical to SEQ ID NO: 136597
  Synthetic oligonucleotide

SEQ ID NO: 653499 - DNA, 54 bp, Artificial; identical to SEQ ID NO: 137913
  Synthetic oligonucleotide

SEQ ID NO: 653500 - DNA, 55 bp, Artificial; identical to SEQ ID NO: 136420
  Synthetic oligonucleotide

SEQ ID NO: 653501 - DNA, 55 bp, Artificial; identical to SEQ ID NO: 133573
  Synthetic oligonucleotide

SEQ ID NO: 653502 - DNA, 57 bp, Artificial; identical to SEQ ID NO: 136653
  Synthetic oligonucleotide

SEQ ID NO: 653503 - DNA, 53 bp, Artificial; identical to SEQ ID NO: 139067
  Synthetic oligonucleotide

SEQ ID NO: 653504 - DNA, 55 bp, Artificial; identical to SEQ ID NO: 137318
  Synthetic oligonucleotide

SEQ ID NO: 653505 - DNA, 55 bp, Artificial; identical to SEQ ID NO: 137802
  Synthetic oligonucleotide

SEQ ID NO: 653506 - DNA, 51 bp, Artificial; identical to SEQ ID NO: 137206
  Synthetic oligonucleotide

SEQ ID NO: 653507 - DNA, 55 bp, Artificial; identical to SEQ ID NO: 133627
  Synthetic oligonucleotide

SEQ ID NO: 653508 - DNA, 55 bp, Artificial; identical to SEQ ID NO: 139463
  Synthetic oligonucleotide

SEQ ID NO: 653509 - DNA, 52 bp, Artificial; identical to SEQ ID NO: 134610
  Synthetic oligonucleotide

SEQ ID NO: 653510 - DNA, 56 bp, Artificial; identical to SEQ ID NO: 140955
  Synthetic oligonucleotide

SEQ ID NO: 653511 - DNA, 51 bp, Artificial; identical to SEQ ID NO: 140394
  Synthetic oligonucleotide

SEQ ID NO: 653512 - DNA, 55 bp, Artificial; identical to SEQ ID NO: 138722
  Synthetic oligonucleotide

SEQ ID NO: 653513 - DNA, 55 bp, Artificial; identical to SEQ ID NO: 136421
  Synthetic oligonucleotide

SEQ ID NO: 653514 - DNA, 55 bp, Artificial; identical to SEQ ID NO: 139464
  Synthetic oligonucleotide

SEQ ID NO: 653515 - DNA, 55 bp, Artificial; identical to SEQ ID NO: 137320
  Synthetic oligonucleotide

SEQ ID NO: 653516 - DNA, 59 bp, Artificial; identical to SEQ ID NO: 139849
  Synthetic oligonucleotide

SEQ ID NO: 653517 - DNA, 55 bp, Artificial; identical to SEQ ID NO: 136110
  Synthetic oligonucleotide

SEQ ID NO: 653518 - DNA, 55 bp, Artificial; identical to SEQ ID NO: 136108
  Synthetic oligonucleotide

SEQ ID NO: 653519 - DNA, 55 bp, Artificial; identical to SEQ ID NO: 138669
  Synthetic oligonucleotide

SEQ ID NO: 653520 - DNA, 53 bp, Artificial; identical to SEQ ID NO: 139589
  Synthetic oligonucleotide

SEQ ID NO: 653521 - DNA, 51 bp, Artificial; identical to SEQ ID NO: 139696
  Synthetic oligonucleotide

SEQ ID NO: 653522 - DNA, 51 bp, Artificial; identical to SEQ ID NO: 140392
  Synthetic oligonucleotide

SEQ ID NO: 653523 - DNA, 60 bp, Artificial; identical to SEQ ID NO: 135591
  Synthetic oligonucleotide

SEQ ID NO: 653524 - DNA, 60 bp, Artificial; identical to SEQ ID NO: 135589
  Synthetic oligonucleotide

SEQ ID NO: 653525 - DNA, 60 bp, Artificial; identical to SEQ ID NO: 135588
  Synthetic oligonucleotide

SEQ ID NO: 653526 - DNA, 50 bp, Artificial; identical to SEQ ID NO: 136941
  Synthetic oligonucleotide

SEQ ID NO: 653527 - DNA, 55 bp, Artificial; identical to SEQ ID NO: 137931
  Synthetic oligonucleotide

SEQ ID NO: 653528 - DNA, 54 bp, Artificial; identical to SEQ ID NO: 133383
  Synthetic oligonucleotide

SEQ ID NO: 653529 - DNA, 55 bp, Artificial; identical to SEQ ID NO: 136717
  Synthetic oligonucleotide

SEQ ID NO: 653530 - DNA, 54 bp, Artificial; identical to SEQ ID NO: 138217
  Synthetic oligonucleotide

SEQ ID NO: 653531 - DNA, 58 bp, Artificial; identical to SEQ ID NO: 136980
  Synthetic oligonucleotide

SEQ ID NO: 653532 - DNA, 52 bp, Artificial; identical to SEQ ID NO: 134507
  Synthetic oligonucleotide

SEQ ID NO: 653533 - DNA, 55 bp, Artificial; identical to SEQ ID NO: 136050
  Synthetic oligonucleotide

SEQ ID NO: 653534 - DNA, 55 bp, Artificial; identical to SEQ ID NO: 139465
  Synthetic oligonucleotide

SEQ ID NO: 653535 - DNA, 58 bp, Artificial; identical to SEQ ID NO: 138084
  Synthetic oligonucleotide

SEQ ID NO: 653536 - DNA, 55 bp, Artificial; identical to SEQ ID NO: 136262
  Synthetic oligonucleotide

SEQ ID NO: 653537 - DNA, 55 bp, Artificial; identical to SEQ ID NO: 136193
  Synthetic oligonucleotide

SEQ ID NO: 653538 - DNA, 53 bp, Artificial; identical to SEQ ID NO: 138694
  Synthetic oligonucleotide

SEQ ID NO: 653539 - DNA, 55 bp, Artificial; identical to SEQ ID NO: 134027
  Synthetic oligonucleotide

SEQ ID NO: 653540 - DNA, 60 bp, Artificial; identical to SEQ ID NO: 135584
  Synthetic oligonucleotide

SEQ ID NO: 653541 - DNA, 55 bp, Artificial; identical to SEQ ID NO: 135932
  Synthetic oligonucleotide

SEQ ID NO: 653542 - DNA, 53 bp, Artificial; identical to SEQ ID NO: 137042
  Synthetic oligonucleotide

SEQ ID NO: 653543 - DNA, 53 bp, Artificial; identical to SEQ ID NO: 137939
  Synthetic oligonucleotide

SEQ ID NO: 653544 - DNA, 55 bp, Artificial; identical to SEQ ID NO: 140834
  Synthetic oligonucleotide

SEQ ID NO: 653545 - DNA, 51 bp, Artificial; identical to SEQ ID NO: 283659
  Synthetic oligonucleotide

SEQ ID NO: 653546 - DNA, 55 bp, Artificial; identical to SEQ ID NO: 279113
  Synthetic oligonucleotide

SEQ ID NO: 653547 - DNA, 60 bp, Artificial; identical to SEQ ID NO: 279039
  Synthetic oligonucleotide

SEQ ID NO: 653548 - DNA, 54 bp, Artificial; identical to SEQ ID NO: 286304
  Synthetic oligonucleotide

SEQ ID NO: 653549 - DNA, 50 bp, Artificial; identical to SEQ ID NO: 284292
  Synthetic oligonucleotide

SEQ ID NO: 653550 - DNA, 52 bp, Artificial; identical to SEQ ID NO: 278411
  Synthetic oligonucleotide

SEQ ID NO: 653551 - DNA, 50 bp, Artificial; identical to SEQ ID NO: 284298
  Synthetic oligonucleotide

SEQ ID NO: 653552 - DNA, 55 bp, Artificial; identical to SEQ ID NO: 279296
  Synthetic oligonucleotide

SEQ ID NO: 653553 - DNA, 55 bp, Artificial; identical to SEQ ID NO: 281438
  Synthetic oligonucleotide

SEQ ID NO: 653554 - DNA, 51 bp, Artificial; identical to SEQ ID NO: 283641
  Synthetic oligonucleotide

SEQ ID NO: 653555 - DNA, 54 bp, Artificial; identical to SEQ ID NO: 268018
  Synthetic oligonucleotide

SEQ ID NO: 653556 - DNA, 56 bp, Artificial; identical to SEQ ID NO: 278933
  Synthetic oligonucleotide

SEQ ID NO: 653557 - DNA, 55 bp, Artificial; identical to SEQ ID NO: 276751
  Synthetic oligonucleotide

SEQ ID NO: 653558 - DNA, 50 bp, Artificial; identical to SEQ ID NO: 286437
  Synthetic oligonucleotide

SEQ ID NO: 653559 - DNA, 52 bp, Artificial; identical to SEQ ID NO: 268549
  Synthetic oligonucleotide

SEQ ID NO: 653560 - DNA, 51 bp, Artificial; identical to SEQ ID NO: 286393
  Synthetic oligonucleotide

SEQ ID NO: 653561 - DNA, 60 bp, Artificial; identical to SEQ ID NO: 278955
  Synthetic oligonucleotide

SEQ ID NO: 653562 - DNA, 54 bp, Artificial; identical to SEQ ID NO: 282238
  Synthetic oligonucleotide

SEQ ID NO: 653563 - DNA, 55 bp, Artificial; identical to SEQ ID NO: 268378
  Synthetic oligonucleotide

SEQ ID NO: 653564 - DNA, 55 bp, Artificial; identical to SEQ ID NO: 281452
  Synthetic oligonucleotide

SEQ ID NO: 653565 - DNA, 54 bp, Artificial; identical to SEQ ID NO: 282297
  Synthetic oligonucleotide

SEQ ID NO: 653566 - DNA, 54 bp, Artificial; identical to SEQ ID NO: 279078
  Synthetic oligonucleotide

SEQ ID NO: 653567 - DNA, 56 bp, Artificial; identical to SEQ ID NO: 279071
  Synthetic oligonucleotide

SEQ ID NO: 653568 - DNA, 60 bp, Artificial; identical to SEQ ID NO: 279089
  Synthetic oligonucleotide

SEQ ID NO: 653569 - DNA, 54 bp, Artificial; identical to SEQ ID NO: 279058
  Synthetic oligonucleotide

SEQ ID NO: 653570 - DNA, 55 bp, Artificial; identical to SEQ ID NO: 281459
  Synthetic oligonucleotide

SEQ ID NO: 653571 - DNA, 55 bp, Artificial; identical to SEQ ID NO: 281418
  Synthetic oligonucleotide

SEQ ID NO: 653572 - DNA, 54 bp, Artificial; identical to SEQ ID NO: 286306
  Synthetic oligonucleotide

SEQ ID NO: 653573 - DNA, 52 bp, Artificial; identical to SEQ ID NO: 282867
  Synthetic oligonucleotide

SEQ ID NO: 653574 - DNA, 54 bp, Artificial; identical to SEQ ID NO: 282281
  Synthetic oligonucleotide

SEQ ID NO: 653575 - DNA, 55 bp, Artificial; identical to SEQ ID NO: 285671
  Synthetic oligonucleotide

SEQ ID NO: 653576 - DNA, 56 bp, Artificial; identical to SEQ ID NO: 285676
  Synthetic oligonucleotide

SEQ ID NO: 653577 - DNA, 55 bp, Artificial; identical to SEQ ID NO: 269109
  Synthetic oligonucleotide

SEQ ID NO: 653578 - DNA, 55 bp, Artificial; identical to SEQ ID NO: 278417
  Synthetic oligonucleotide

SEQ ID NO: 653579 - DNA, 53 bp, Artificial; identical to SEQ ID NO: 286164
  Synthetic oligonucleotide

SEQ ID NO: 653580 - DNA, 51 bp, Artificial; identical to SEQ ID NO: 270376
  Synthetic oligonucleotide

SEQ ID NO: 653581 - DNA, 53 bp, Artificial; identical to SEQ ID NO: 282561
  Synthetic oligonucleotide

SEQ ID NO: 653582 - DNA, 55 bp, Artificial; identical to SEQ ID NO: 281429
  Synthetic oligonucleotide

SEQ ID NO: 653583 - DNA, 55 bp, Artificial; identical to SEQ ID NO: 281430
  Synthetic oligonucleotide

SEQ ID NO: 653584 - DNA, 51 bp, Artificial; identical to SEQ ID NO: 283717
  Synthetic oligonucleotide

SEQ ID NO: 653585 - DNA, 54 bp, Artificial; identical to SEQ ID NO: 279170
  Synthetic oligonucleotide

SEQ ID NO: 653586 - DNA, 55 bp, Artificial; identical to SEQ ID NO: 269106
  Synthetic oligonucleotide

SEQ ID NO: 653587 - DNA, 50 bp, Artificial; identical to SEQ ID NO: 284174
  Synthetic oligonucleotide

SEQ ID NO: 653588 - DNA, 53 bp, Artificial; identical to SEQ ID NO: 282527
  Synthetic oligonucleotide

SEQ ID NO: 653589 - DNA, 54 bp, Artificial; identical to SEQ ID NO: 285761
  Synthetic oligonucleotide

SEQ ID NO: 653590 - DNA, 54 bp, Artificial; identical to SEQ ID NO: 268534
  Synthetic oligonucleotide

SEQ ID NO: 653591 - DNA, 53 bp, Artificial; identical to SEQ ID NO: 282512
  Synthetic oligonucleotide

SEQ ID NO: 653592 - DNA, 57 bp, Artificial; identical to SEQ ID NO: 285700
  Synthetic oligonucleotide

SEQ ID NO: 653593 - DNA, 60 bp, Artificial; identical to SEQ ID NO: 268315
  Synthetic oligonucleotide

SEQ ID NO: 653594 - DNA, 55 bp, Artificial; identical to SEQ ID NO: 268316
  Synthetic oligonucleotide

SEQ ID NO: 653595 - DNA, 52 bp, Artificial; identical to SEQ ID NO: 268561
  Synthetic oligonucleotide

SEQ ID NO: 653596 - DNA, 54 bp, Artificial; identical to SEQ ID NO: 268317
  Synthetic oligonucleotide

SEQ ID NO: 653597 - DNA, 59 bp, Artificial; identical to SEQ ID NO: 267938
  Synthetic oligonucleotide

SEQ ID NO: 653598 - DNA, 52 bp, Artificial; identical to SEQ ID NO: 282362
  Synthetic oligonucleotide

SEQ ID NO: 653599 - DNA, 53 bp, Artificial; identical to SEQ ID NO: 282467
  Synthetic oligonucleotide

SEQ ID NO: 653600 - DNA, 55 bp, Artificial; identical to SEQ ID NO: 269154
  Synthetic oligonucleotide

SEQ ID NO: 653601 - DNA, 53 bp, Artificial; identical to SEQ ID NO: 285770
  Synthetic oligonucleotide

SEQ ID NO: 653602 - DNA, 52 bp, Artificial; identical to SEQ ID NO: 282885
  Synthetic oligonucleotide

SEQ ID NO: 653603 - DNA, 50 bp, Artificial; identical to SEQ ID NO: 285760
  Synthetic oligonucleotide

SEQ ID NO: 653604 - DNA, 59 bp, Artificial; identical to SEQ ID NO: 285759
  Synthetic oligonucleotide

SEQ ID NO: 653605 - DNA, 53 bp, Artificial; identical to SEQ ID NO: 282444
  Synthetic oligonucleotide

SEQ ID NO: 653606 - DNA, 55 bp, Artificial; identical to SEQ ID NO: 268348
  Synthetic oligonucleotide

SEQ ID NO: 653607 - DNA, 55 bp, Artificial; identical to SEQ ID NO: 278425
  Synthetic oligonucleotide

SEQ ID NO: 653608 - DNA, 50 bp, Artificial; identical to SEQ ID NO: 270393
  Synthetic oligonucleotide

SEQ ID NO: 653609 - DNA, 53 bp, Artificial; identical to SEQ ID NO: 281325
  Synthetic oligonucleotide

SEQ ID NO: 653610 - DNA, 57 bp, Artificial; identical to SEQ ID NO: 285581
  Synthetic oligonucleotide

SEQ ID NO: 653611 - DNA, 59 bp, Artificial; identical to SEQ ID NO: 285579
  Synthetic oligonucleotide

SEQ ID NO: 653612 - DNA, 52 bp, Artificial; identical to SEQ ID NO: 286362
  Synthetic oligonucleotide

SEQ ID NO: 653613 - DNA, 55 bp, Artificial; identical to SEQ ID NO: 281329
  Synthetic oligonucleotide

SEQ ID NO: 653614 - DNA, 51 bp, Artificial; identical to SEQ ID NO: 283539
  Synthetic oligonucleotide

SEQ ID NO: 653615 - DNA, 54 bp, Artificial; identical to SEQ ID NO: 269998
  Synthetic oligonucleotide

SEQ ID NO: 653616 - DNA, 55 bp, Artificial; identical to SEQ ID NO: 281332
  Synthetic oligonucleotide

SEQ ID NO: 653617 - DNA, 54 bp, Artificial; identical to SEQ ID NO: 282301
  Synthetic oligonucleotide

SEQ ID NO: 653618 - DNA, 55 bp, Artificial; identical to SEQ ID NO: 268372
  Synthetic oligonucleotide

SEQ ID NO: 653619 - DNA, 54 bp, Artificial; identical to SEQ ID NO: 270268
  Synthetic oligonucleotide

SEQ ID NO: 653620 - DNA, 58 bp, Artificial; identical to SEQ ID NO: 285550
  Synthetic oligonucleotide

SEQ ID NO: 653621 - DNA, 56 bp, Artificial; identical to SEQ ID NO: 285545
  Synthetic oligonucleotide

SEQ ID NO: 653622 - DNA, 58 bp, Artificial; identical to SEQ ID NO: 285655
  Synthetic oligonucleotide

SEQ ID NO: 653623 - DNA, 55 bp, Artificial; identical to SEQ ID NO: 281339
  Synthetic oligonucleotide

SEQ ID NO: 653624 - DNA, 56 bp, Artificial; identical to SEQ ID NO: 279336
  Synthetic oligonucleotide

SEQ ID NO: 653625 - DNA, 58 bp, Artificial; identical to SEQ ID NO: 268323
  Synthetic oligonucleotide

SEQ ID NO: 653626 - DNA, 60 bp, Artificial; identical to SEQ ID NO: 285677
  Synthetic oligonucleotide

SEQ ID NO: 653627 - DNA, 53 bp, Artificial; identical to SEQ ID NO: 282499
  Synthetic oligonucleotide

SEQ ID NO: 653628 - DNA, 54 bp, Artificial; identical to SEQ ID NO: 282188
  Synthetic oligonucleotide

SEQ ID NO: 653629 - DNA, 51 bp, Artificial; identical to SEQ ID NO: 283462
  Synthetic oligonucleotide

SEQ ID NO: 653630 - DNA, 53 bp, Artificial; identical to SEQ ID NO: 282505
  Synthetic oligonucleotide

SEQ ID NO: 653631 - DNA, 56 bp, Artificial; identical to SEQ ID NO: 285665
  Synthetic oligonucleotide

SEQ ID NO: 653632 - DNA, 55 bp, Artificial; identical to SEQ ID NO: 268017
  Synthetic oligonucleotide

SEQ ID NO: 653633 - DNA, 55 bp, Artificial; identical to SEQ ID NO: 278430
  Synthetic oligonucleotide

SEQ ID NO: 653634 - DNA, 55 bp, Artificial; identical to SEQ ID NO: 286158
  Synthetic oligonucleotide

SEQ ID NO: 653635 - DNA, 55 bp, Artificial; identical to SEQ ID NO: 281400
  Synthetic oligonucleotide

SEQ ID NO: 653636 - DNA, 55 bp, Artificial; identical to SEQ ID NO: 268338
  Synthetic oligonucleotide

SEQ ID NO: 653637 - DNA, 55 bp, Artificial; identical to SEQ ID NO: 268016
  Synthetic oligonucleotide

SEQ ID NO: 653638 - DNA, 51 bp, Artificial; identical to SEQ ID NO: 268526
  Synthetic oligonucleotide

SEQ ID NO: 653639 - DNA, 50 bp, Artificial; identical to SEQ ID NO: 284494
  Synthetic oligonucleotide

SEQ ID NO: 653640 - DNA, 54 bp, Artificial; identical to SEQ ID NO: 282385
  Synthetic oligonucleotide

SEQ ID NO: 653641 - DNA, 53 bp, Artificial; identical to SEQ ID NO: 282478
  Synthetic oligonucleotide

SEQ ID NO: 653642 - DNA, 55 bp, Artificial; identical to SEQ ID NO: 286366
  Synthetic oligonucleotide

SEQ ID NO: 653643 - DNA, 54 bp, Artificial; identical to SEQ ID NO: 279075
  Synthetic oligonucleotide

SEQ ID NO: 653644 - DNA, 55 bp, Artificial; identical to SEQ ID NO: 278388
  Synthetic oligonucleotide

SEQ ID NO: 653645 - DNA, 60 bp, Artificial; identical to SEQ ID NO: 279038
  Synthetic oligonucleotide

SEQ ID NO: 653646 - DNA, 55 bp, Artificial; identical to SEQ ID NO: 281411
  Synthetic oligonucleotide

SEQ ID NO: 653647 - DNA, 60 bp, Artificial; identical to SEQ ID NO: 279116
  Synthetic oligonucleotide

SEQ ID NO: 653648 - DNA, 60 bp, Artificial; identical to SEQ ID NO: 268321
  Synthetic oligonucleotide

SEQ ID NO: 653649 - DNA, 55 bp, Artificial; identical to SEQ ID NO: 281377
  Synthetic oligonucleotide

SEQ ID NO: 653650 - DNA, 59 bp, Artificial; identical to SEQ ID NO: 278942
  Synthetic oligonucleotide

SEQ ID NO: 653651 - DNA, 55 bp, Artificial; identical to SEQ ID NO: 281378
  Synthetic oligonucleotide

SEQ ID NO: 653652 - DNA, 52 bp, Artificial; identical to SEQ ID NO: 282469
  Synthetic oligonucleotide

SEQ ID NO: 653653 - DNA, 51 bp, Artificial; identical to SEQ ID NO: 283673
  Synthetic oligonucleotide

SEQ ID NO: 653654 - DNA, 52 bp, Artificial; identical to SEQ ID NO: 286368
  Synthetic oligonucleotide

SEQ ID NO: 653655 - DNA, 57 bp, Artificial; identical to SEQ ID NO: 279374
  Synthetic oligonucleotide

SEQ ID NO: 653656 - DNA, 58 bp, Artificial; identical to SEQ ID NO: 268339
  Synthetic oligonucleotide

SEQ ID NO: 653657 - DNA, 60 bp, Artificial; identical to SEQ ID NO: 285843
  Synthetic oligonucleotide

SEQ ID NO: 653658 - DNA, 51 bp, Artificial; identical to SEQ ID NO: 269238
  Synthetic oligonucleotide

SEQ ID NO: 653659 - DNA, 60 bp, Artificial; identical to SEQ ID NO: 278926
  Synthetic oligonucleotide

SEQ ID NO: 653660 - DNA, 54 bp, Artificial; identical to SEQ ID NO: 282380
  Synthetic oligonucleotide

SEQ ID NO: 653661 - DNA, 50 bp, Artificial; identical to SEQ ID NO: 286438
  Synthetic oligonucleotide

SEQ ID NO: 653662 - DNA, 50 bp, Artificial; identical to SEQ ID NO: 286435
  Synthetic oligonucleotide

SEQ ID NO: 653663 - DNA, 55 bp, Artificial; identical to SEQ ID NO: 281386
  Synthetic oligonucleotide

SEQ ID NO: 653664 - DNA, 55 bp, Artificial; identical to SEQ ID NO: 279000
  Synthetic oligonucleotide

SEQ ID NO: 653665 - DNA, 53 bp, Artificial; identical to SEQ ID NO: 282543
  Synthetic oligonucleotide

SEQ ID NO: 653666 - DNA, 52 bp, Artificial; identical to SEQ ID NO: 269193
  Synthetic oligonucleotide

SEQ ID NO: 653667 - DNA, 48 bp, Artificial; identical to SEQ ID NO: 270396
  Synthetic oligonucleotide

SEQ ID NO: 653668 - DNA, 50 bp, Artificial; identical to SEQ ID NO: 268602
  Synthetic oligonucleotide

SEQ ID NO: 653669 - DNA, 60 bp, Artificial; identical to SEQ ID NO: 279017
  Synthetic oligonucleotide

SEQ ID NO: 653670 - DNA, 60 bp, Artificial; identical to SEQ ID NO: 279019
  Synthetic oligonucleotide

SEQ ID NO: 653671 - DNA, 55 bp, Artificial; identical to SEQ ID NO: 279026
  Synthetic oligonucleotide

SEQ ID NO: 653672 - DNA, 55 bp, Artificial; identical to SEQ ID NO: 269090
  Synthetic oligonucleotide

SEQ ID NO: 653673 - DNA, 54 bp, Artificial; identical to SEQ ID NO: 282379
  Synthetic oligonucleotide

SEQ ID NO: 653674 - DNA, 52 bp, Artificial; identical to SEQ ID NO: 276780
  Synthetic oligonucleotide

SEQ ID NO: 653675 - DNA, 55 bp, Artificial; identical to SEQ ID NO: 281627
  Synthetic oligonucleotide

SEQ ID NO: 653676 - DNA, 56 bp, Artificial; identical to SEQ ID NO: 278993
  Synthetic oligonucleotide

SEQ ID NO: 653677 - DNA, 55 bp, Artificial; identical to SEQ ID NO: 278997
  Synthetic oligonucleotide

SEQ ID NO: 653678 - DNA, 56 bp, Artificial; identical to SEQ ID NO: 278988
  Synthetic oligonucleotide

SEQ ID NO: 653679 - DNA, 60 bp, Artificial; identical to SEQ ID NO: 278982
  Synthetic oligonucleotide

SEQ ID NO: 653680 - DNA, 60 bp, Artificial; identical to SEQ ID NO: 278979
  Synthetic oligonucleotide

SEQ ID NO: 653681 - DNA, 55 bp, Artificial; identical to SEQ ID NO: 281632
  Synthetic oligonucleotide

SEQ ID NO: 653682 - DNA, 55 bp, Artificial; identical to SEQ ID NO: 281633
  Synthetic oligonucleotide

SEQ ID NO: 653683 - DNA, 55 bp, Artificial; identical to SEQ ID NO: 281635
  Synthetic oligonucleotide

SEQ ID NO: 653684 - DNA, 51 bp, Artificial; identical to SEQ ID NO: 283359
  Synthetic oligonucleotide

SEQ ID NO: 653685 - DNA, 60 bp, Artificial; identical to SEQ ID NO: 285833
  Synthetic oligonucleotide

SEQ ID NO: 653686 - DNA, 55 bp, Artificial; identical to SEQ ID NO: 281640
  Synthetic oligonucleotide

SEQ ID NO: 653687 - DNA, 55 bp, Artificial; identical to SEQ ID NO: 281641
  Synthetic oligonucleotide

SEQ ID NO: 653688 - DNA, 54 bp, Artificial; identical to SEQ ID NO: 282333
  Synthetic oligonucleotide

SEQ ID NO: 653689 - DNA, 59 bp, Artificial; identical to SEQ ID NO: 279111
  Synthetic oligonucleotide

SEQ ID NO: 653690 - DNA, 55 bp, Artificial; identical to SEQ ID NO: 281644
  Synthetic oligonucleotide

SEQ ID NO: 653691 - DNA, 57 bp, Artificial; identical to SEQ ID NO: 279118
  Synthetic oligonucleotide

SEQ ID NO: 653692 - DNA, 55 bp, Artificial; identical to SEQ ID NO: 281603
  Synthetic oligonucleotide

SEQ ID NO: 653693 - DNA, 60 bp, Artificial; identical to SEQ ID NO: 279041
  Synthetic oligonucleotide

SEQ ID NO: 653694 - DNA, 52 bp, Artificial; identical to SEQ ID NO: 283107
  Synthetic oligonucleotide

SEQ ID NO: 653695 - DNA, 50 bp, Artificial; identical to SEQ ID NO: 268603
  Synthetic oligonucleotide

SEQ ID NO: 653696 - DNA, 55 bp, Artificial; identical to SEQ ID NO: 269083
  Synthetic oligonucleotide

SEQ ID NO: 653697 - DNA, 52 bp, Artificial; identical to SEQ ID NO: 283111
  Synthetic oligonucleotide

SEQ ID NO: 653698 - DNA, 50 bp, Artificial; identical to SEQ ID NO: 286429
  Synthetic oligonucleotide

SEQ ID NO: 653699 - DNA, 56 bp, Artificial; identical to SEQ ID NO: 280464
  Synthetic oligonucleotide

SEQ ID NO: 653700 - DNA, 53 bp, Artificial; identical to SEQ ID NO: 282484
  Synthetic oligonucleotide

SEQ ID NO: 653701 - DNA, 60 bp, Artificial; identical to SEQ ID NO: 280431
  Synthetic oligonucleotide

SEQ ID NO: 653702 - DNA, 53 bp, Artificial; identical to SEQ ID NO: 282482
  Synthetic oligonucleotide

SEQ ID NO: 653703 - DNA, 55 bp, Artificial; identical to SEQ ID NO: 269127
  Synthetic oligonucleotide

SEQ ID NO: 653704 - DNA, 60 bp, Artificial; identical to SEQ ID NO: 280365
  Synthetic oligonucleotide

SEQ ID NO: 653705 - DNA, 55 bp, Artificial; identical to SEQ ID NO: 268394
  Synthetic oligonucleotide

SEQ ID NO: 653706 - DNA, 53 bp, Artificial; identical to SEQ ID NO: 280331
  Synthetic oligonucleotide

SEQ ID NO: 653707 - DNA, 54 bp, Artificial; identical to SEQ ID NO: 282402
  Synthetic oligonucleotide

SEQ ID NO: 653708 - DNA, 54 bp, Artificial; identical to SEQ ID NO: 280320
  Synthetic oligonucleotide

SEQ ID NO: 653709 - DNA, 58 bp, Artificial; identical to SEQ ID NO: 280309
  Synthetic oligonucleotide

SEQ ID NO: 653710 - DNA, 59 bp, Artificial; identical to SEQ ID NO: 268865
  Synthetic oligonucleotide

SEQ ID NO: 653711 - DNA, 60 bp, Artificial; identical to SEQ ID NO: 280242
  Synthetic oligonucleotide

SEQ ID NO: 653712 - DNA, 57 bp, Artificial; identical to SEQ ID NO: 268310
  Synthetic oligonucleotide

SEQ ID NO: 653713 - DNA, 52 bp, Artificial; identical to SEQ ID NO: 278762
  Synthetic oligonucleotide

SEQ ID NO: 653714 - DNA, 55 bp, Artificial; identical to SEQ ID NO: 278402
  Synthetic oligonucleotide

SEQ ID NO: 653715 - DNA, 59 bp, Artificial; identical to SEQ ID NO: 280631
  Synthetic oligonucleotide

SEQ ID NO: 653716 - DNA, 54 bp, Artificial; identical to SEQ ID NO: 282194
  Synthetic oligonucleotide

SEQ ID NO: 653717 - DNA, 58 bp, Artificial; identical to SEQ ID NO: 279219
  Synthetic oligonucleotide

SEQ ID NO: 653718 - DNA, 50 bp, Artificial; identical to SEQ ID NO: 284058
  Synthetic oligonucleotide

SEQ ID NO: 653719 - DNA, 55 bp, Artificial; identical to SEQ ID NO: 281615
  Synthetic oligonucleotide

SEQ ID NO: 653720 - DNA, 60 bp, Artificial; identical to SEQ ID NO: 268311
  Synthetic oligonucleotide

SEQ ID NO: 653721 - DNA, 59 bp, Artificial; identical to SEQ ID NO: 279809
  Synthetic oligonucleotide

SEQ ID NO: 653722 - DNA, 57 bp, Artificial; identical to SEQ ID NO: 280231
  Synthetic oligonucleotide

SEQ ID NO: 653723 - DNA, 54 bp, Artificial; identical to SEQ ID NO: 282210
  Synthetic oligonucleotide

SEQ ID NO: 653724 - DNA, 55 bp, Artificial; identical to SEQ ID NO: 281622
  Synthetic oligonucleotide

SEQ ID NO: 653725 - DNA, 55 bp, Artificial; identical to SEQ ID NO: 269126
  Synthetic oligonucleotide

SEQ ID NO: 653726 - DNA, 59 bp, Artificial; identical to SEQ ID NO: 267818
  Synthetic oligonucleotide

SEQ ID NO: 653727 - DNA, 56 bp, Artificial; identical to SEQ ID NO: 270263
  Synthetic oligonucleotide

SEQ ID NO: 653728 - DNA, 55 bp, Artificial; identical to SEQ ID NO: 281670
  Synthetic oligonucleotide

SEQ ID NO: 653729 - DNA, 51 bp, Artificial; identical to SEQ ID NO: 271715
  Synthetic oligonucleotide

SEQ ID NO: 653730 - DNA, 55 bp, Artificial; identical to SEQ ID NO: 268313
  Synthetic oligonucleotide

SEQ ID NO: 653731 - DNA, 57 bp, Artificial; identical to SEQ ID NO: 268320
  Synthetic oligonucleotide

SEQ ID NO: 653732 - DNA, 55 bp, Artificial; identical to SEQ ID NO: 281674
  Synthetic oligonucleotide

SEQ ID NO: 653733 - DNA, 55 bp, Artificial; identical to SEQ ID NO: 281677
  Synthetic oligonucleotide

SEQ ID NO: 653734 - DNA, 52 bp, Artificial; identical to SEQ ID NO: 283002
  Synthetic oligonucleotide

SEQ ID NO: 653735 - DNA, 55 bp, Artificial; identical to SEQ ID NO: 281678
  Synthetic oligonucleotide

SEQ ID NO: 653736 - DNA, 55 bp, Artificial; identical to SEQ ID NO: 281680
  Synthetic oligonucleotide

SEQ ID NO: 653737 - DNA, 55 bp, Artificial; identical to SEQ ID NO: 281681
  Synthetic oligonucleotide

SEQ ID NO: 653738 - DNA, 54 bp, Artificial; identical to SEQ ID NO: 282146
  Synthetic oligonucleotide

SEQ ID NO: 653739 - DNA, 55 bp, Artificial; identical to SEQ ID NO: 268412
  Synthetic oligonucleotide

SEQ ID NO: 653740 - DNA, 55 bp, Artificial; identical to SEQ ID NO: 281682
  Synthetic oligonucleotide

SEQ ID NO: 653741 - DNA, 55 bp, Artificial; identical to SEQ ID NO: 269125
  Synthetic oligonucleotide

SEQ ID NO: 653742 - DNA, 51 bp, Artificial; identical to SEQ ID NO: 283380
  Synthetic oligonucleotide

SEQ ID NO: 653743 - DNA, 60 bp, Artificial; identical to SEQ ID NO: 281564
  Synthetic oligonucleotide

SEQ ID NO: 653744 - DNA, 54 bp, Artificial; identical to SEQ ID NO: 282169
  Synthetic oligonucleotide

SEQ ID NO: 653745 - DNA, 55 bp, Artificial; identical to SEQ ID NO: 281684
  Synthetic oligonucleotide

SEQ ID NO: 653746 - DNA, 58 bp, Artificial; identical to SEQ ID NO: 281509
  Synthetic oligonucleotide

SEQ ID NO: 653747 - DNA, 60 bp, Artificial; identical to SEQ ID NO: 281464
  Synthetic oligonucleotide

SEQ ID NO: 653748 - DNA, 52 bp, Artificial; identical to SEQ ID NO: 271713
  Synthetic oligonucleotide

SEQ ID NO: 653749 - DNA, 53 bp, Artificial; identical to SEQ ID NO: 282562
  Synthetic oligonucleotide

SEQ ID NO: 653750 - DNA, 55 bp, Artificial; identical to SEQ ID NO: 271664
  Synthetic oligonucleotide

SEQ ID NO: 653751 - DNA, 60 bp, Artificial; identical to SEQ ID NO: 280831
  Synthetic oligonucleotide

SEQ ID NO: 653752 - DNA, 55 bp, Artificial; identical to SEQ ID NO: 280786
  Synthetic oligonucleotide

SEQ ID NO: 653753 - DNA, 54 bp, Artificial; identical to SEQ ID NO: 282172
  Synthetic oligonucleotide

SEQ ID NO: 653754 - DNA, 53 bp, Artificial; identical to SEQ ID NO: 280753
  Synthetic oligonucleotide

SEQ ID NO: 653755 - DNA, 53 bp, Artificial; identical to SEQ ID NO: 282528
  Synthetic oligonucleotide

SEQ ID NO: 653756 - DNA, 60 bp, Artificial; identical to SEQ ID NO: 281130
  Synthetic oligonucleotide

SEQ ID NO: 653757 - DNA, 58 bp, Artificial; identical to SEQ ID NO: 281119
  Synthetic oligonucleotide

SEQ ID NO: 653758 - DNA, 50 bp, Artificial; identical to SEQ ID NO: 278407
  Synthetic oligonucleotide

SEQ ID NO: 653759 - DNA, 55 bp, Artificial; identical to SEQ ID NO: 281654
  Synthetic oligonucleotide

SEQ ID NO: 653760 - DNA, 52 bp, Artificial; identical to SEQ ID NO: 281019
  Synthetic oligonucleotide

SEQ ID NO: 653761 - DNA, 58 bp, Artificial; identical to SEQ ID NO: 279222
  Synthetic oligonucleotide

SEQ ID NO: 653762 - DNA, 50 bp, Artificial; identical to SEQ ID NO: 282973
  Synthetic oligonucleotide

SEQ ID NO: 653763 - DNA, 54 bp, Artificial; identical to SEQ ID NO: 278688
  Synthetic oligonucleotide

SEQ ID NO: 653764 - DNA, 55 bp, Artificial; identical to SEQ ID NO: 278460
  Synthetic oligonucleotide

SEQ ID NO: 653765 - DNA, 55 bp, Artificial; identical to SEQ ID NO: 281661
  Synthetic oligonucleotide

SEQ ID NO: 653766 - DNA, 53 bp, Artificial; identical to SEQ ID NO: 282539
  Synthetic oligonucleotide

SEQ ID NO: 653767 - DNA, 50 bp, Artificial; identical to SEQ ID NO: 283907
  Synthetic oligonucleotide

SEQ ID NO: 653768 - DNA, 54 bp, Artificial; identical to SEQ ID NO: 267878
  Synthetic oligonucleotide

SEQ ID NO: 653769 - DNA, 60 bp, Artificial; identical to SEQ ID NO: 268322
  Synthetic oligonucleotide

SEQ ID NO: 653770 - DNA, 51 bp, Artificial; identical to SEQ ID NO: 269242
  Synthetic oligonucleotide

SEQ ID NO: 653771 - DNA, 51 bp, Artificial; identical to SEQ ID NO: 283629
  Synthetic oligonucleotide

SEQ ID NO: 653772 - DNA, 50 bp, Artificial; identical to SEQ ID NO: 277665
  Synthetic oligonucleotide

SEQ ID NO: 653773 - DNA, 55 bp, Artificial; identical to SEQ ID NO: 269118
  Synthetic oligonucleotide

SEQ ID NO: 653774 - DNA, 54 bp, Artificial; identical to SEQ ID NO: 281547
  Synthetic oligonucleotide

SEQ ID NO: 653775 - DNA, 55 bp, Artificial; identical to SEQ ID NO: 281548
  Synthetic oligonucleotide

SEQ ID NO: 653776 - DNA, 52 bp, Artificial; identical to SEQ ID NO: 283069
  Synthetic oligonucleotide

SEQ ID NO: 653777 - DNA, 53 bp, Artificial; identical to SEQ ID NO: 282252
  Synthetic oligonucleotide

SEQ ID NO: 653778 - DNA, 55 bp, Artificial; identical to SEQ ID NO: 281510
  Synthetic oligonucleotide

SEQ ID NO: 653779 - DNA, 55 bp, Artificial; identical to SEQ ID NO: 281513
  Synthetic oligonucleotide

SEQ ID NO: 653780 - DNA, 55 bp, Artificial; identical to SEQ ID NO: 281514
  Synthetic oligonucleotide

SEQ ID NO: 653781 - DNA, 54 bp, Artificial; identical to SEQ ID NO: 282228
  Synthetic oligonucleotide

SEQ ID NO: 653782 - DNA, 52 bp, Artificial; identical to SEQ ID NO: 278768
  Synthetic oligonucleotide

SEQ ID NO: 653783 - DNA, 55 bp, Artificial; identical to SEQ ID NO: 281519
  Synthetic oligonucleotide

SEQ ID NO: 653784 - DNA, 55 bp, Artificial; identical to SEQ ID NO: 281522
  Synthetic oligonucleotide

SEQ ID NO: 653785 - DNA, 54 bp, Artificial; identical to SEQ ID NO: 271263
  Synthetic oligonucleotide

SEQ ID NO: 653786 - DNA, 55 bp, Artificial; identical to SEQ ID NO: 281523
  Synthetic oligonucleotide

SEQ ID NO: 653787 - DNA, 54 bp, Artificial; identical to SEQ ID NO: 268279
  Synthetic oligonucleotide

SEQ ID NO: 653788 - DNA, 55 bp, Artificial; identical to SEQ ID NO: 286146
  Synthetic oligonucleotide

SEQ ID NO: 653789 - DNA, 55 bp, Artificial; identical to SEQ ID NO: 281525
  Synthetic oligonucleotide

SEQ ID NO: 653790 - DNA, 55 bp, Artificial; identical to SEQ ID NO: 278467
  Synthetic oligonucleotide

SEQ ID NO: 653791 - DNA, 55 bp, Artificial; identical to SEQ ID NO: 281528
  Synthetic oligonucleotide

SEQ ID NO: 653792 - DNA, 55 bp, Artificial; identical to SEQ ID NO: 279453
  Synthetic oligonucleotide

SEQ ID NO: 653793 - DNA, 54 bp, Artificial; identical to SEQ ID NO: 286294
  Synthetic oligonucleotide

SEQ ID NO: 653794 - DNA, 55 bp, Artificial; identical to SEQ ID NO: 281581
  Synthetic oligonucleotide

SEQ ID NO: 653795 - DNA, 54 bp, Artificial; identical to SEQ ID NO: 278681
  Synthetic oligonucleotide

SEQ ID NO: 653796 - DNA, 55 bp, Artificial; identical to SEQ ID NO: 281584
  Synthetic oligonucleotide

SEQ ID NO: 653797 - DNA, 53 bp, Artificial; identical to SEQ ID NO: 282432
  Synthetic oligonucleotide

SEQ ID NO: 653798 - DNA, 53 bp, Artificial; identical to SEQ ID NO: 279742
  Synthetic oligonucleotide

SEQ ID NO: 653799 - DNA, 57 bp, Artificial; identical to SEQ ID NO: 279720
  Synthetic oligonucleotide

SEQ ID NO: 653800 - DNA, 55 bp, Artificial; identical to SEQ ID NO: 278468
  Synthetic oligonucleotide

SEQ ID NO: 653801 - DNA, 59 bp, Artificial; identical to SEQ ID NO: 279675
  Synthetic oligonucleotide

SEQ ID NO: 653802 - DNA, 55 bp, Artificial; identical to SEQ ID NO: 278470
  Synthetic oligonucleotide

SEQ ID NO: 653803 - DNA, 54 bp, Artificial; identical to SEQ ID NO: 282242
  Synthetic oligonucleotide

SEQ ID NO: 653804 - DNA, 60 bp, Artificial; identical to SEQ ID NO: 268275
  Synthetic oligonucleotide

SEQ ID NO: 653805 - DNA, 55 bp, Artificial; identical to SEQ ID NO: 268408
  Synthetic oligonucleotide

SEQ ID NO: 653806 - DNA, 55 bp, Artificial; identical to SEQ ID NO: 281602
  Synthetic oligonucleotide

SEQ ID NO: 653807 - DNA, 55 bp, Artificial; identical to SEQ ID NO: 278474
  Synthetic oligonucleotide

SEQ ID NO: 653808 - DNA, 55 bp, Artificial; identical to SEQ ID NO: 281556
  Synthetic oligonucleotide

SEQ ID NO: 653809 - DNA, 55 bp, Artificial; identical to SEQ ID NO: 281558
  Synthetic oligonucleotide

SEQ ID NO: 653810 - DNA, 54 bp, Artificial; identical to SEQ ID NO: 282223
  Synthetic oligonucleotide

SEQ ID NO: 653811 - DNA, 57 bp, Artificial; identical to SEQ ID NO: 268354
  Synthetic oligonucleotide

SEQ ID NO: 653812 - DNA, 55 bp, Artificial; identical to SEQ ID NO: 268406
  Synthetic oligonucleotide

SEQ ID NO: 653813 - DNA, 55 bp, Artificial; identical to SEQ ID NO: 268405
  Synthetic oligonucleotide

SEQ ID NO: 653814 - DNA, 54 bp, Artificial; identical to SEQ ID NO: 278480
  Synthetic oligonucleotide

SEQ ID NO: 653815 - DNA, 53 bp, Artificial; identical to SEQ ID NO: 278679
  Synthetic oligonucleotide

SEQ ID NO: 653816 - DNA, 54 bp, Artificial; identical to SEQ ID NO: 267849
  Synthetic oligonucleotide

SEQ ID NO: 653817 - DNA, 55 bp, Artificial; identical to SEQ ID NO: 284330
  Synthetic oligonucleotide

SEQ ID NO: 653818 - DNA, 57 bp, Artificial; identical to SEQ ID NO: 279273
  Synthetic oligonucleotide

SEQ ID NO: 653819 - DNA, 57 bp, Artificial; identical to SEQ ID NO: 284297
  Synthetic oligonucleotide

SEQ ID NO: 653820 - DNA, 60 bp, Artificial; identical to SEQ ID NO: 284164
  Synthetic oligonucleotide

SEQ ID NO: 653821 - DNA, 55 bp, Artificial; identical to SEQ ID NO: 281571
  Synthetic oligonucleotide

SEQ ID NO: 653822 - DNA, 52 bp, Artificial; identical to SEQ ID NO: 284553
  Synthetic oligonucleotide

SEQ ID NO: 653823 - DNA, 53 bp, Artificial; identical to SEQ ID NO: 268403
  Synthetic oligonucleotide

SEQ ID NO: 653824 - DNA, 52 bp, Artificial; identical to SEQ ID NO: 283078
  Synthetic oligonucleotide

SEQ ID NO: 653825 - DNA, 60 bp, Artificial; identical to SEQ ID NO: 278143
  Synthetic oligonucleotide

SEQ ID NO: 653826 - DNA, 53 bp, Artificial; identical to SEQ ID NO: 281579
  Synthetic oligonucleotide

SEQ ID NO: 653827 - DNA, 60 bp, Artificial; identical to SEQ ID NO: 284408
  Synthetic oligonucleotide

SEQ ID NO: 653828 - DNA, 55 bp, Artificial; identical to SEQ ID NO: 281074
  Synthetic oligonucleotide

SEQ ID NO: 653829 - DNA, 51 bp, Artificial; identical to SEQ ID NO: 268577
  Synthetic oligonucleotide

SEQ ID NO: 653830 - DNA, 53 bp, Artificial; identical to SEQ ID NO: 282729
  Synthetic oligonucleotide

SEQ ID NO: 653831 - DNA, 55 bp, Artificial; identical to SEQ ID NO: 281077
  Synthetic oligonucleotide

SEQ ID NO: 653832 - DNA, 54 bp, Artificial; identical to SEQ ID NO: 268270
  Synthetic oligonucleotide

SEQ ID NO: 653833 - DNA, 55 bp, Artificial; identical to SEQ ID NO: 268402
  Synthetic oligonucleotide

SEQ ID NO: 653834 - DNA, 60 bp, Artificial; identical to SEQ ID NO: 286044
  Synthetic oligonucleotide

SEQ ID NO: 653835 - DNA, 59 bp, Artificial; identical to SEQ ID NO: 283809
  Synthetic oligonucleotide

SEQ ID NO: 653836 - DNA, 52 bp, Artificial; identical to SEQ ID NO: 282969
  Synthetic oligonucleotide

SEQ ID NO: 653837 - DNA, 55 bp, Artificial; identical to SEQ ID NO: 286510
  Synthetic oligonucleotide

SEQ ID NO: 653838 - DNA, 55 bp, Artificial; identical to SEQ ID NO: 281083
  Synthetic oligonucleotide

SEQ ID NO: 653839 - DNA, 50 bp, Artificial; identical to SEQ ID NO: 286467
  Synthetic oligonucleotide

SEQ ID NO: 653840 - DNA, 56 bp, Artificial; identical to SEQ ID NO: 279150
  Synthetic oligonucleotide

SEQ ID NO: 653841 - DNA, 55 bp, Artificial; identical to SEQ ID NO: 281084
  Synthetic oligonucleotide

SEQ ID NO: 653842 - DNA, 54 bp, Artificial; identical to SEQ ID NO: 282278
  Synthetic oligonucleotide

SEQ ID NO: 653843 - DNA, 60 bp, Artificial; identical to SEQ ID NO: 268269
  Synthetic oligonucleotide

SEQ ID NO: 653844 - DNA, 54 bp, Artificial; identical to SEQ ID NO: 282282
  Synthetic oligonucleotide

SEQ ID NO: 653845 - DNA, 55 bp, Artificial; identical to SEQ ID NO: 278444
  Synthetic oligonucleotide

SEQ ID NO: 653846 - DNA, 55 bp, Artificial; identical to SEQ ID NO: 268401
  Synthetic oligonucleotide

SEQ ID NO: 653847 - DNA, 51 bp, Artificial; identical to SEQ ID NO: 276783
  Synthetic oligonucleotide

SEQ ID NO: 653848 - DNA, 52 bp, Artificial; identical to SEQ ID NO: 278758
  Synthetic oligonucleotide

SEQ ID NO: 653849 - DNA, 55 bp, Artificial; identical to SEQ ID NO: 281092
  Synthetic oligonucleotide

SEQ ID NO: 653850 - DNA, 54 bp, Artificial; identical to SEQ ID NO: 283986
  Synthetic oligonucleotide

SEQ ID NO: 653851 - DNA, 51 bp, Artificial; identical to SEQ ID NO: 283360
  Synthetic oligonucleotide

SEQ ID NO: 653852 - DNA, 60 bp, Artificial; identical to SEQ ID NO: 283942
  Synthetic oligonucleotide

SEQ ID NO: 653853 - DNA, 60 bp, Artificial; identical to SEQ ID NO: 283931
  Synthetic oligonucleotide

SEQ ID NO: 653854 - DNA, 51 bp, Artificial; identical to SEQ ID NO: 283410
  Synthetic oligonucleotide

SEQ ID NO: 653855 - DNA, 55 bp, Artificial; identical to SEQ ID NO: 271670
  Synthetic oligonucleotide

SEQ ID NO: 653856 - DNA, 55 bp, Artificial; identical to SEQ ID NO: 268015
  Synthetic oligonucleotide

SEQ ID NO: 653857 - DNA, 55 bp, Artificial; identical to SEQ ID NO: 285330
  Synthetic oligonucleotide

SEQ ID NO: 653858 - DNA, 51 bp, Artificial; identical to SEQ ID NO: 285319
  Synthetic oligonucleotide

SEQ ID NO: 653859 - DNA, 55 bp, Artificial; identical to SEQ ID NO: 278450
  Synthetic oligonucleotide

SEQ ID NO: 653860 - DNA, 59 bp, Artificial; identical to SEQ ID NO: 279200
  Synthetic oligonucleotide

SEQ ID NO: 653861 - DNA, 55 bp, Artificial; identical to SEQ ID NO: 268268
  Synthetic oligonucleotide

SEQ ID NO: 653862 - DNA, 60 bp, Artificial; identical to SEQ ID NO: 285275
  Synthetic oligonucleotide

SEQ ID NO: 653863 - DNA, 53 bp, Artificial; identical to SEQ ID NO: 282584
  Synthetic oligonucleotide

SEQ ID NO: 653864 - DNA, 60 bp, Artificial; identical to SEQ ID NO: 285241
  Synthetic oligonucleotide

SEQ ID NO: 653865 - DNA, 57 bp, Artificial; identical to SEQ ID NO: 285230
  Synthetic oligonucleotide

SEQ ID NO: 653866 - DNA, 55 bp, Artificial; identical to SEQ ID NO: 268400
  Synthetic oligonucleotide

SEQ ID NO: 653867 - DNA, 50 bp, Artificial; identical to SEQ ID NO: 268597
  Synthetic oligonucleotide

SEQ ID NO: 653868 - DNA, 53 bp, Artificial; identical to SEQ ID NO: 282650
  Synthetic oligonucleotide

SEQ ID NO: 653869 - DNA, 55 bp, Artificial; identical to SEQ ID NO: 281058
  Synthetic oligonucleotide

SEQ ID NO: 653870 - DNA, 53 bp, Artificial; identical to SEQ ID NO: 285153
  Synthetic oligonucleotide

SEQ ID NO: 653871 - DNA, 55 bp, Artificial; identical to SEQ ID NO: 285521
  Synthetic oligonucleotide

SEQ ID NO: 653872 - DNA, 51 bp, Artificial; identical to SEQ ID NO: 286404
  Synthetic oligonucleotide

SEQ ID NO: 653873 - DNA, 56 bp, Artificial; identical to SEQ ID NO: 285475
  Synthetic oligonucleotide

SEQ ID NO: 653874 - DNA, 55 bp, Artificial; identical to SEQ ID NO: 286182
  Synthetic oligonucleotide

SEQ ID NO: 653875 - DNA, 60 bp, Artificial; identical to SEQ ID NO: 285386
  Synthetic oligonucleotide

SEQ ID NO: 653876 - DNA, 53 bp, Artificial; identical to SEQ ID NO: 282663
  Synthetic oligonucleotide

SEQ ID NO: 653877 - DNA, 59 bp, Artificial; identical to SEQ ID NO: 284875
  Synthetic oligonucleotide

SEQ ID NO: 653878 - DNA, 52 bp, Artificial; identical to SEQ ID NO: 283003
  Synthetic oligonucleotide

SEQ ID NO: 653879 - DNA, 55 bp, Artificial; identical to SEQ ID NO: 268397
  Synthetic oligonucleotide

SEQ ID NO: 653880 - DNA, 60 bp, Artificial; identical to SEQ ID NO: 284809
  Synthetic oligonucleotide

SEQ ID NO: 653881 - DNA, 55 bp, Artificial; identical to SEQ ID NO: 281066
  Synthetic oligonucleotide

SEQ ID NO: 653882 - DNA, 54 bp, Artificial; identical to SEQ ID NO: 282201
  Synthetic oligonucleotide

SEQ ID NO: 653883 - DNA, 60 bp, Artificial; identical to SEQ ID NO: 284709
  Synthetic oligonucleotide

SEQ ID NO: 653884 - DNA, 53 bp, Artificial; identical to SEQ ID NO: 282676
  Synthetic oligonucleotide

SEQ ID NO: 653885 - DNA, 53 bp, Artificial; identical to SEQ ID NO: 282626
  Synthetic oligonucleotide

SEQ ID NO: 653886 - DNA, 56 bp, Artificial; identical to SEQ ID NO: 268264
  Synthetic oligonucleotide

SEQ ID NO: 653887 - DNA, 59 bp, Artificial; identical to SEQ ID NO: 268262
  Synthetic oligonucleotide

SEQ ID NO: 653888 - DNA, 55 bp, Artificial; identical to SEQ ID NO: 269111
  Synthetic oligonucleotide

SEQ ID NO: 653889 - DNA, 50 bp, Artificial; identical to SEQ ID NO: 285129
  Synthetic oligonucleotide

SEQ ID NO: 653890 - DNA, 50 bp, Artificial; identical to SEQ ID NO: 285134
  Synthetic oligonucleotide

SEQ ID NO: 653891 - DNA, 57 bp, Artificial; identical to SEQ ID NO: 284997
  Synthetic oligonucleotide

SEQ ID NO: 653892 - DNA, 55 bp, Artificial; identical to SEQ ID NO: 278315
  Synthetic oligonucleotide

SEQ ID NO: 653893 - DNA, 55 bp, Artificial; identical to SEQ ID NO: 278317
  Synthetic oligonucleotide

SEQ ID NO: 653894 - DNA, 60 bp, Artificial; identical to SEQ ID NO: 284975
  Synthetic oligonucleotide

SEQ ID NO: 653895 - DNA, 54 bp, Artificial; identical to SEQ ID NO: 282217
  Synthetic oligonucleotide

SEQ ID NO: 653896 - DNA, 51 bp, Artificial; identical to SEQ ID NO: 284953
  Synthetic oligonucleotide

SEQ ID NO: 653897 - DNA, 53 bp, Artificial; identical to SEQ ID NO: 282638
  Synthetic oligonucleotide

SEQ ID NO: 653898 - DNA, 60 bp, Artificial; identical to SEQ ID NO: 284908
  Synthetic oligonucleotide

SEQ ID NO: 653899 - DNA, 56 bp, Artificial; identical to SEQ ID NO: 270385
  Synthetic oligonucleotide

SEQ ID NO: 653900 - DNA, 52 bp, Artificial; identical to SEQ ID NO: 282996
  Synthetic oligonucleotide

SEQ ID NO: 653901 - DNA, 53 bp, Artificial; identical to SEQ ID NO: 279482
  Synthetic oligonucleotide

SEQ ID NO: 653902 - DNA, 55 bp, Artificial; identical to SEQ ID NO: 281126
  Synthetic oligonucleotide

SEQ ID NO: 653903 - DNA, 58 bp, Artificial; identical to SEQ ID NO: 282230
  Synthetic oligonucleotide

SEQ ID NO: 653904 - DNA, 55 bp, Artificial; identical to SEQ ID NO: 282219
  Synthetic oligonucleotide

SEQ ID NO: 653905 - DNA, 55 bp, Artificial; identical to SEQ ID NO: 281127
  Synthetic oligonucleotide

SEQ ID NO: 653906 - DNA, 55 bp, Artificial; identical to SEQ ID NO: 281128
  Synthetic oligonucleotide

SEQ ID NO: 653907 - DNA, 55 bp, Artificial; identical to SEQ ID NO: 281131
  Synthetic oligonucleotide

SEQ ID NO: 653908 - DNA, 52 bp, Artificial; identical to SEQ ID NO: 286180
  Synthetic oligonucleotide

SEQ ID NO: 653909 - DNA, 52 bp, Artificial; identical to SEQ ID NO: 281135
  Synthetic oligonucleotide

SEQ ID NO: 653910 - DNA, 54 bp, Artificial; identical to SEQ ID NO: 282192
  Synthetic oligonucleotide

SEQ ID NO: 653911 - DNA, 50 bp, Artificial; identical to SEQ ID NO: 285449
  Synthetic oligonucleotide

SEQ ID NO: 653912 - DNA, 55 bp, Artificial; identical to SEQ ID NO: 286179
  Synthetic oligonucleotide

SEQ ID NO: 653913 - DNA, 53 bp, Artificial; identical to SEQ ID NO: 282637
  Synthetic oligonucleotide

SEQ ID NO: 653914 - DNA, 55 bp, Artificial; identical to SEQ ID NO: 281140
  Synthetic oligonucleotide

SEQ ID NO: 653915 - DNA, 56 bp, Artificial; identical to SEQ ID NO: 279161
  Synthetic oligonucleotide

SEQ ID NO: 653916 - DNA, 50 bp, Artificial; identical to SEQ ID NO: 285398
  Synthetic oligonucleotide

SEQ ID NO: 653917 - DNA, 55 bp, Artificial; identical to SEQ ID NO: 281099
  Synthetic oligonucleotide

SEQ ID NO: 653918 - DNA, 55 bp, Artificial; identical to SEQ ID NO: 268013
  Synthetic oligonucleotide

SEQ ID NO: 653919 - DNA, 55 bp, Artificial; identical to SEQ ID NO: 281101
  Synthetic oligonucleotide

SEQ ID NO: 653920 - DNA, 51 bp, Artificial; identical to SEQ ID NO: 283523
  Synthetic oligonucleotide

SEQ ID NO: 653921 - DNA, 53 bp, Artificial; identical to SEQ ID NO: 282622
  Synthetic oligonucleotide

SEQ ID NO: 653922 - DNA, 60 bp, Artificial; identical to SEQ ID NO: 281908
  Synthetic oligonucleotide

SEQ ID NO: 653923 - DNA, 55 bp, Artificial; identical to SEQ ID NO: 281105
  Synthetic oligonucleotide

SEQ ID NO: 653924 - DNA, 55 bp, Artificial; identical to SEQ ID NO: 269997
  Synthetic oligonucleotide

SEQ ID NO: 653925 - DNA, 55 bp, Artificial; identical to SEQ ID NO: 281113
  Synthetic oligonucleotide

SEQ ID NO: 653926 - DNA, 55 bp, Artificial; identical to SEQ ID NO: 281120
  Synthetic oligonucleotide

SEQ ID NO: 653927 - DNA, 55 bp, Artificial; identical to SEQ ID NO: 280992
  Synthetic oligonucleotide

SEQ ID NO: 653928 - DNA, 57 bp, Artificial; identical to SEQ ID NO: 279297
  Synthetic oligonucleotide

SEQ ID NO: 653929 - DNA, 55 bp, Artificial; identical to SEQ ID NO: 280993
  Synthetic oligonucleotide

SEQ ID NO: 653930 - DNA, 50 bp, Artificial; identical to SEQ ID NO: 285424
  Synthetic oligonucleotide

SEQ ID NO: 653931 - DNA, 51 bp, Artificial; identical to SEQ ID NO: 278791
  Synthetic oligonucleotide

SEQ ID NO: 653932 - DNA, 58 bp, Artificial; identical to SEQ ID NO: 268327
  Synthetic oligonucleotide

SEQ ID NO: 653933 - DNA, 53 bp, Artificial; identical to SEQ ID NO: 282612
  Synthetic oligonucleotide

SEQ ID NO: 653934 - DNA, 54 bp, Artificial; identical to SEQ ID NO: 268259
  Synthetic oligonucleotide

SEQ ID NO: 653935 - DNA, 55 bp, Artificial; identical to SEQ ID NO: 281004
  Synthetic oligonucleotide

SEQ ID NO: 653936 - DNA, 50 bp, Artificial; identical to SEQ ID NO: 285507
  Synthetic oligonucleotide

SEQ ID NO: 653937 - DNA, 53 bp, Artificial; identical to SEQ ID NO: 282727
  Synthetic oligonucleotide

SEQ ID NO: 653938 - DNA, 52 bp, Artificial; identical to SEQ ID NO: 283146
  Synthetic oligonucleotide

SEQ ID NO: 653939 - DNA, 55 bp, Artificial; identical to SEQ ID NO: 280973
  Synthetic oligonucleotide

SEQ ID NO: 653940 - DNA, 55 bp, Artificial; identical to SEQ ID NO: 269047
  Synthetic oligonucleotide

SEQ ID NO: 653941 - DNA, 55 bp, Artificial; identical to SEQ ID NO: 280976
  Synthetic oligonucleotide

SEQ ID NO: 653942 - DNA, 53 bp, Artificial; identical to SEQ ID NO: 282714
  Synthetic oligonucleotide

SEQ ID NO: 653943 - DNA, 55 bp, Artificial; identical to SEQ ID NO: 280978
  Synthetic oligonucleotide

SEQ ID NO: 653944 - DNA, 55 bp, Artificial; identical to SEQ ID NO: 278338
  Synthetic oligonucleotide

SEQ ID NO: 653945 - DNA, 55 bp, Artificial; identical to SEQ ID NO: 280983
  Synthetic oligonucleotide

SEQ ID NO: 653946 - DNA, 53 bp, Artificial; identical to SEQ ID NO: 282735
  Synthetic oligonucleotide

SEQ ID NO: 653947 - DNA, 55 bp, Artificial; identical to SEQ ID NO: 281034
  Synthetic oligonucleotide

SEQ ID NO: 653948 - DNA, 54 bp, Artificial; identical to SEQ ID NO: 268258
  Synthetic oligonucleotide

SEQ ID NO: 653949 - DNA, 55 bp, Artificial; identical to SEQ ID NO: 281038
  Synthetic oligonucleotide

SEQ ID NO: 653950 - DNA, 55 bp, Artificial; identical to SEQ ID NO: 281040
  Synthetic oligonucleotide

SEQ ID NO: 653951 - DNA, 55 bp, Artificial; identical to SEQ ID NO: 281041
  Synthetic oligonucleotide

SEQ ID NO: 653952 - DNA, 53 bp, Artificial; identical to SEQ ID NO: 282708
  Synthetic oligonucleotide

SEQ ID NO: 653953 - DNA, 60 bp, Artificial; identical to SEQ ID NO: 282709
  Synthetic oligonucleotide

SEQ ID NO: 653954 - DNA, 55 bp, Artificial; identical to SEQ ID NO: 269038
  Synthetic oligonucleotide

SEQ ID NO: 653955 - DNA, 56 bp, Artificial; identical to SEQ ID NO: 282686
  Synthetic oligonucleotide

SEQ ID NO: 653956 - DNA, 55 bp, Artificial; identical to SEQ ID NO: 269037
  Synthetic oligonucleotide

SEQ ID NO: 653957 - DNA, 55 bp, Artificial; identical to SEQ ID NO: 281046
  Synthetic oligonucleotide

SEQ ID NO: 653958 - DNA, 54 bp, Artificial; identical to SEQ ID NO: 282414
  Synthetic oligonucleotide

SEQ ID NO: 653959 - DNA, 53 bp, Artificial; identical to SEQ ID NO: 286353
  Synthetic oligonucleotide

SEQ ID NO: 653960 - DNA, 52 bp, Artificial; identical to SEQ ID NO: 282803
  Synthetic oligonucleotide

SEQ ID NO: 653961 - DNA, 55 bp, Artificial; identical to SEQ ID NO: 281050
  Synthetic oligonucleotide

SEQ ID NO: 653962 - DNA, 53 bp, Artificial; identical to SEQ ID NO: 286351
  Synthetic oligonucleotide

SEQ ID NO: 653963 - DNA, 56 bp, Artificial; identical to SEQ ID NO: 279393
  Synthetic oligonucleotide

SEQ ID NO: 653964 - DNA, 51 bp, Artificial; identical to SEQ ID NO: 283743
  Synthetic oligonucleotide

SEQ ID NO: 653965 - DNA, 59 bp, Artificial; identical to SEQ ID NO: 282942
  Synthetic oligonucleotide

SEQ ID NO: 653966 - DNA, 55 bp, Artificial; identical to SEQ ID NO: 281013
  Synthetic oligonucleotide

SEQ ID NO: 653967 - DNA, 57 bp, Artificial; identical to SEQ ID NO: 269110
  Synthetic oligonucleotide

SEQ ID NO: 653968 - DNA, 53 bp, Artificial; identical to SEQ ID NO: 282696
  Synthetic oligonucleotide

SEQ ID NO: 653969 - DNA, 55 bp, Artificial; identical to SEQ ID NO: 282820
  Synthetic oligonucleotide

SEQ ID NO: 653970 - DNA, 55 bp, Artificial; identical to SEQ ID NO: 286175
  Synthetic oligonucleotide

SEQ ID NO: 653971 - DNA, 60 bp, Artificial; identical to SEQ ID NO: 283520
  Synthetic oligonucleotide

SEQ ID NO: 653972 - DNA, 51 bp, Artificial; identical to SEQ ID NO: 283614
  Synthetic oligonucleotide

SEQ ID NO: 653973 - DNA, 59 bp, Artificial; identical to SEQ ID NO: 283319
  Synthetic oligonucleotide

SEQ ID NO: 653974 - DNA, 53 bp, Artificial; identical to SEQ ID NO: 269167
  Synthetic oligonucleotide

SEQ ID NO: 653975 - DNA, 54 bp, Artificial; identical to SEQ ID NO: 268255
  Synthetic oligonucleotide

SEQ ID NO: 653976 - DNA, 55 bp, Artificial; identical to SEQ ID NO: 269035
  Synthetic oligonucleotide

SEQ ID NO: 653977 - DNA, 58 bp, Artificial; identical to SEQ ID NO: 279240
  Synthetic oligonucleotide

SEQ ID NO: 653978 - DNA, 55 bp, Artificial; identical to SEQ ID NO: 286173
  Synthetic oligonucleotide

SEQ ID NO: 653979 - DNA, 55 bp, Artificial; identical to SEQ ID NO: 281022
  Synthetic oligonucleotide

SEQ ID NO: 653980 - DNA, 55 bp, Artificial; identical to SEQ ID NO: 281023
  Synthetic oligonucleotide

SEQ ID NO: 653981 - DNA, 57 bp, Artificial; identical to SEQ ID NO: 268306
  Synthetic oligonucleotide

SEQ ID NO: 653982 - DNA, 50 bp, Artificial; identical to SEQ ID NO: 286463
  Synthetic oligonucleotide

SEQ ID NO: 653983 - DNA, 53 bp, Artificial; identical to SEQ ID NO: 268340
  Synthetic oligonucleotide

SEQ ID NO: 653984 - DNA, 54 bp, Artificial; identical to SEQ ID NO: 282369
  Synthetic oligonucleotide

SEQ ID NO: 653985 - DNA, 56 bp, Artificial; identical to SEQ ID NO: 268304
  Synthetic oligonucleotide

SEQ ID NO: 653986 - DNA, 58 bp, Artificial; identical to SEQ ID NO: 282398
  Synthetic oligonucleotide

SEQ ID NO: 653987 - DNA, 55 bp, Artificial; identical to SEQ ID NO: 281261
  Synthetic oligonucleotide

SEQ ID NO: 653988 - DNA, 51 bp, Artificial; identical to SEQ ID NO: 269252
  Synthetic oligonucleotide

SEQ ID NO: 653989 - DNA, 60 bp, Artificial; identical to SEQ ID NO: 285308
  Synthetic oligonucleotide

SEQ ID NO: 653990 - DNA, 54 bp, Artificial; identical to SEQ ID NO: 282408
  Synthetic oligonucleotide

SEQ ID NO: 653991 - DNA, 51 bp, Artificial; identical to SEQ ID NO: 283655
  Synthetic oligonucleotide

SEQ ID NO: 653992 - DNA, 50 bp, Artificial; identical to SEQ ID NO: 285382
  Synthetic oligonucleotide

SEQ ID NO: 653993 - DNA, 52 bp, Artificial; identical to SEQ ID NO: 281272
  Synthetic oligonucleotide

SEQ ID NO: 653994 - DNA, 55 bp, Artificial; identical to SEQ ID NO: 286172
  Synthetic oligonucleotide

SEQ ID NO: 653995 - DNA, 59 bp, Artificial; identical to SEQ ID NO: 284620
  Synthetic oligonucleotide

SEQ ID NO: 653996 - DNA, 55 bp, Artificial; identical to SEQ ID NO: 286171
  Synthetic oligonucleotide

SEQ ID NO: 653997 - DNA, 50 bp, Artificial; identical to SEQ ID NO: 267934
  Synthetic oligonucleotide

SEQ ID NO: 653998 - DNA, 53 bp, Artificial; identical to SEQ ID NO: 269065
  Synthetic oligonucleotide

SEQ ID NO: 653999 - DNA, 50 bp, Artificial; identical to SEQ ID NO: 286462
  Synthetic oligonucleotide

SEQ ID NO: 654000 - DNA, 52 bp, Artificial; identical to SEQ ID NO: 268423
  Synthetic oligonucleotide

SEQ ID NO: 654001 - DNA, 60 bp, Artificial; identical to SEQ ID NO: 279109
  Synthetic oligonucleotide

SEQ ID NO: 654002 - DNA, 55 bp, Artificial; identical to SEQ ID NO: 278370
  Synthetic oligonucleotide

SEQ ID NO: 654003 - DNA, 57 bp, Artificial; identical to SEQ ID NO: 279598
  Synthetic oligonucleotide

SEQ ID NO: 654004 - DNA, 55 bp, Artificial; identical to SEQ ID NO: 267851
  Synthetic oligonucleotide

SEQ ID NO: 654005 - DNA, 60 bp, Artificial; identical to SEQ ID NO: 279609
  Synthetic oligonucleotide

SEQ ID NO: 654006 - DNA, 60 bp, Artificial; identical to SEQ ID NO: 268300
  Synthetic oligonucleotide

SEQ ID NO: 654007 - DNA, 55 bp, Artificial; identical to SEQ ID NO: 281239
  Synthetic oligonucleotide

SEQ ID NO: 654008 - DNA, 52 bp, Artificial; identical to SEQ ID NO: 282752
  Synthetic oligonucleotide

SEQ ID NO: 654009 - DNA, 50 bp, Artificial; identical to SEQ ID NO: 285396
  Synthetic oligonucleotide

SEQ ID NO: 654010 - DNA, 55 bp, Artificial; identical to SEQ ID NO: 281243
  Synthetic oligonucleotide

SEQ ID NO: 654011 - DNA, 59 bp, Artificial; identical to SEQ ID NO: 281919
  Synthetic oligonucleotide

SEQ ID NO: 654012 - DNA, 60 bp, Artificial; identical to SEQ ID NO: 279142
  Synthetic oligonucleotide

SEQ ID NO: 654013 - DNA, 55 bp, Artificial; identical to SEQ ID NO: 278375
  Synthetic oligonucleotide

SEQ ID NO: 654014 - DNA, 54 bp, Artificial; identical to SEQ ID NO: 282224
  Synthetic oligonucleotide

SEQ ID NO: 654015 - DNA, 55 bp, Artificial; identical to SEQ ID NO: 281246
  Synthetic oligonucleotide

SEQ ID NO: 654016 - DNA, 53 bp, Artificial; identical to SEQ ID NO: 282644
  Synthetic oligonucleotide

SEQ ID NO: 654017 - DNA, 55 bp, Artificial; identical to SEQ ID NO: 268415
  Synthetic oligonucleotide

SEQ ID NO: 654018 - DNA, 54 bp, Artificial; identical to SEQ ID NO: 268532
  Synthetic oligonucleotide

SEQ ID NO: 654019 - DNA, 55 bp, Artificial; identical to SEQ ID NO: 281248
  Synthetic oligonucleotide

SEQ ID NO: 654020 - DNA, 55 bp, Artificial; identical to SEQ ID NO: 281252
  Synthetic oligonucleotide

SEQ ID NO: 654021 - DNA, 60 bp, Artificial; identical to SEQ ID NO: 278020
  Synthetic oligonucleotide

SEQ ID NO: 654022 - DNA, 57 bp, Artificial; identical to SEQ ID NO: 269043
  Synthetic oligonucleotide

SEQ ID NO: 654023 - DNA, 58 bp, Artificial; identical to SEQ ID NO: 269032
  Synthetic oligonucleotide

SEQ ID NO: 654024 - DNA, 55 bp, Artificial; identical to SEQ ID NO: 281299
  Synthetic oligonucleotide

SEQ ID NO: 654025 - DNA, 52 bp, Artificial; identical to SEQ ID NO: 268555
  Synthetic oligonucleotide

SEQ ID NO: 654026 - DNA, 54 bp, Artificial; identical to SEQ ID NO: 278379
  Synthetic oligonucleotide

SEQ ID NO: 654027 - DNA, 55 bp, Artificial; identical to SEQ ID NO: 281304
  Synthetic oligonucleotide

SEQ ID NO: 654028 - DNA, 59 bp, Artificial; identical to SEQ ID NO: 286189
  Synthetic oligonucleotide

SEQ ID NO: 654029 - DNA, 55 bp, Artificial; identical to SEQ ID NO: 281306
  Synthetic oligonucleotide

SEQ ID NO: 654030 - DNA, 55 bp, Artificial; identical to SEQ ID NO: 281307
  Synthetic oligonucleotide

SEQ ID NO: 654031 - DNA, 57 bp, Artificial; identical to SEQ ID NO: 281587
  Synthetic oligonucleotide

SEQ ID NO: 654032 - DNA, 58 bp, Artificial; identical to SEQ ID NO: 279281
  Synthetic oligonucleotide

SEQ ID NO: 654033 - DNA, 60 bp, Artificial; identical to SEQ ID NO: 281686
  Synthetic oligonucleotide

SEQ ID NO: 654034 - DNA, 57 bp, Artificial; identical to SEQ ID NO: 281353
  Synthetic oligonucleotide

SEQ ID NO: 654035 - DNA, 55 bp, Artificial; identical to SEQ ID NO: 281312
  Synthetic oligonucleotide

SEQ ID NO: 654036 - DNA, 50 bp, Artificial; identical to SEQ ID NO: 285360
  Synthetic oligonucleotide

SEQ ID NO: 654037 - DNA, 54 bp, Artificial; identical to SEQ ID NO: 279997
  Synthetic oligonucleotide

SEQ ID NO: 654038 - DNA, 60 bp, Artificial; identical to SEQ ID NO: 280564
  Synthetic oligonucleotide

SEQ ID NO: 654039 - DNA, 52 bp, Artificial; identical to SEQ ID NO: 282883
  Synthetic oligonucleotide

SEQ ID NO: 654040 - DNA, 60 bp, Artificial; identical to SEQ ID NO: 280265
  Synthetic oligonucleotide

SEQ ID NO: 654041 - DNA, 55 bp, Artificial; identical to SEQ ID NO: 268375
  Synthetic oligonucleotide

SEQ ID NO: 654042 - DNA, 58 bp, Artificial; identical to SEQ ID NO: 268292
  Synthetic oligonucleotide

SEQ ID NO: 654043 - DNA, 55 bp, Artificial; identical to SEQ ID NO: 281321
  Synthetic oligonucleotide

SEQ ID NO: 654044 - DNA, 54 bp, Artificial; identical to SEQ ID NO: 269144
  Synthetic oligonucleotide

SEQ ID NO: 654045 - DNA, 60 bp, Artificial; identical to SEQ ID NO: 279037
  Synthetic oligonucleotide

SEQ ID NO: 654046 - DNA, 55 bp, Artificial; identical to SEQ ID NO: 281278
  Synthetic oligonucleotide

SEQ ID NO: 654047 - DNA, 55 bp, Artificial; identical to SEQ ID NO: 281279
  Synthetic oligonucleotide

SEQ ID NO: 654048 - DNA, 53 bp, Artificial; identical to SEQ ID NO: 282659
  Synthetic oligonucleotide

SEQ ID NO: 654049 - DNA, 59 bp, Artificial; identical to SEQ ID NO: 278925
  Synthetic oligonucleotide

SEQ ID NO: 654050 - DNA, 56 bp, Artificial; identical to SEQ ID NO: 278999
  Synthetic oligonucleotide

SEQ ID NO: 654051 - DNA, 55 bp, Artificial; identical to SEQ ID NO: 281281
  Synthetic oligonucleotide

SEQ ID NO: 654052 - DNA, 56 bp, Artificial; identical to SEQ ID NO: 279438
  Synthetic oligonucleotide

SEQ ID NO: 654053 - DNA, 51 bp, Artificial; identical to SEQ ID NO: 283613
  Synthetic oligonucleotide

SEQ ID NO: 654054 - DNA, 50 bp, Artificial; identical to SEQ ID NO: 286460
  Synthetic oligonucleotide

SEQ ID NO: 654055 - DNA, 55 bp, Artificial; identical to SEQ ID NO: 281283
  Synthetic oligonucleotide

SEQ ID NO: 654056 - DNA, 50 bp, Artificial; identical to SEQ ID NO: 284759
  Synthetic oligonucleotide

SEQ ID NO: 654057 - DNA, 58 bp, Artificial; identical to SEQ ID NO: 279202
  Synthetic oligonucleotide

SEQ ID NO: 654058 - DNA, 57 bp, Artificial; identical to SEQ ID NO: 279355
  Synthetic oligonucleotide

SEQ ID NO: 654059 - DNA, 55 bp, Artificial; identical to SEQ ID NO: 281286
  Synthetic oligonucleotide

SEQ ID NO: 654060 - DNA, 55 bp, Artificial; identical to SEQ ID NO: 281289
  Synthetic oligonucleotide

SEQ ID NO: 654061 - DNA, 50 bp, Artificial; identical to SEQ ID NO: 284767
  Synthetic oligonucleotide

SEQ ID NO: 654062 - DNA, 56 bp, Artificial; identical to SEQ ID NO: 279048
  Synthetic oligonucleotide

SEQ ID NO: 654063 - DNA, 53 bp, Artificial; identical to SEQ ID NO: 286319
  Synthetic oligonucleotide

SEQ ID NO: 654064 - DNA, 54 bp, Artificial; identical to SEQ ID NO: 271826
  Synthetic oligonucleotide

SEQ ID NO: 654065 - DNA, 51 bp, Artificial; identical to SEQ ID NO: 268010
  Synthetic oligonucleotide

SEQ ID NO: 654066 - DNA, 57 bp, Artificial; identical to SEQ ID NO: 268291
  Synthetic oligonucleotide

SEQ ID NO: 654067 - DNA, 56 bp, Artificial; identical to SEQ ID NO: 268999
  Synthetic oligonucleotide

SEQ ID NO: 654068 - DNA, 56 bp, Artificial; identical to SEQ ID NO: 285632
  Synthetic oligonucleotide

SEQ ID NO: 654069 - DNA, 56 bp, Artificial; identical to SEQ ID NO: 285634
  Synthetic oligonucleotide

SEQ ID NO: 654070 - DNA, 55 bp, Artificial; identical to SEQ ID NO: 281293
  Synthetic oligonucleotide

SEQ ID NO: 654071 - DNA, 57 bp, Artificial; identical to SEQ ID NO: 279345
  Synthetic oligonucleotide

SEQ ID NO: 654072 - DNA, 55 bp, Artificial; identical to SEQ ID NO: 279333
  Synthetic oligonucleotide

SEQ ID NO: 654073 - DNA, 51 bp, Artificial; identical to SEQ ID NO: 283741
  Synthetic oligonucleotide

SEQ ID NO: 654074 - DNA, 60 bp, Artificial; identical to SEQ ID NO: 268287
  Synthetic oligonucleotide

SEQ ID NO: 654075 - DNA, 55 bp, Artificial; identical to SEQ ID NO: 281169
  Synthetic oligonucleotide

SEQ ID NO: 654076 - DNA, 55 bp, Artificial; identical to SEQ ID NO: 281170
  Synthetic oligonucleotide

SEQ ID NO: 654077 - DNA, 55 bp, Artificial; identical to SEQ ID NO: 278349
  Synthetic oligonucleotide

SEQ ID NO: 654078 - DNA, 60 bp, Artificial; identical to SEQ ID NO: 268284
  Synthetic oligonucleotide

SEQ ID NO: 654079 - DNA, 51 bp, Artificial; identical to SEQ ID NO: 283765
  Synthetic oligonucleotide

SEQ ID NO: 654080 - DNA, 51 bp, Artificial; identical to SEQ ID NO: 268977
  Synthetic oligonucleotide

SEQ ID NO: 654081 - DNA, 51 bp, Artificial; identical to SEQ ID NO: 278784
  Synthetic oligonucleotide

SEQ ID NO: 654082 - DNA, 60 bp, Artificial; identical to SEQ ID NO: 285558
  Synthetic oligonucleotide

SEQ ID NO: 654083 - DNA, 52 bp, Artificial; identical to SEQ ID NO: 282948
  Synthetic oligonucleotide

SEQ ID NO: 654084 - DNA, 60 bp, Artificial; identical to SEQ ID NO: 285560
  Synthetic oligonucleotide

SEQ ID NO: 654085 - DNA, 52 bp, Artificial; identical to SEQ ID NO: 282951
  Synthetic oligonucleotide

SEQ ID NO: 654086 - DNA, 55 bp, Artificial; identical to SEQ ID NO: 281175
  Synthetic oligonucleotide

SEQ ID NO: 654087 - DNA, 56 bp, Artificial; identical to SEQ ID NO: 279467
  Synthetic oligonucleotide

SEQ ID NO: 654088 - DNA, 50 bp, Artificial; identical to SEQ ID NO: 284771
  Synthetic oligonucleotide

SEQ ID NO: 654089 - DNA, 54 bp, Artificial; identical to SEQ ID NO: 269148
  Synthetic oligonucleotide

SEQ ID NO: 654090 - DNA, 54 bp, Artificial; identical to SEQ ID NO: 269149
  Synthetic oligonucleotide

SEQ ID NO: 654091 - DNA, 59 bp, Artificial; identical to SEQ ID NO: 285575
  Synthetic oligonucleotide

SEQ ID NO: 654092 - DNA, 60 bp, Artificial; identical to SEQ ID NO: 285771
  Synthetic oligonucleotide

SEQ ID NO: 654093 - DNA, 60 bp, Artificial; identical to SEQ ID NO: 285778
  Synthetic oligonucleotide

SEQ ID NO: 654094 - DNA, 51 bp, Artificial; identical to SEQ ID NO: 286424
  Synthetic oligonucleotide

SEQ ID NO: 654095 - DNA, 50 bp, Artificial; identical to SEQ ID NO: 284773
  Synthetic oligonucleotide

SEQ ID NO: 654096 - DNA, 55 bp, Artificial; identical to SEQ ID NO: 281180
  Synthetic oligonucleotide

SEQ ID NO: 654097 - DNA, 55 bp, Artificial; identical to SEQ ID NO: 286116
  Synthetic oligonucleotide

SEQ ID NO: 654098 - DNA, 52 bp, Artificial; identical to SEQ ID NO: 268550
  Synthetic oligonucleotide

SEQ ID NO: 654099 - DNA, 60 bp, Artificial; identical to SEQ ID NO: 285815
  Synthetic oligonucleotide

SEQ ID NO: 654100 - DNA, 60 bp, Artificial; identical to SEQ ID NO: 285826
  Synthetic oligonucleotide

SEQ ID NO: 654101 - DNA, 55 bp, Artificial; identical to SEQ ID NO: 281185
  Synthetic oligonucleotide

SEQ ID NO: 654102 - DNA, 51 bp, Artificial; identical to SEQ ID NO: 283701
  Synthetic oligonucleotide

SEQ ID NO: 654103 - DNA, 50 bp, Artificial; identical to SEQ ID NO: 284776
  Synthetic oligonucleotide

SEQ ID NO: 654104 - DNA, 54 bp, Artificial; identical to SEQ ID NO: 269150
  Synthetic oligonucleotide

SEQ ID NO: 654105 - DNA, 55 bp, Artificial; identical to SEQ ID NO: 281147
  Synthetic oligonucleotide

SEQ ID NO: 654106 - DNA, 58 bp, Artificial; identical to SEQ ID NO: 285678
  Synthetic oligonucleotide

SEQ ID NO: 654107 - DNA, 55 bp, Artificial; identical to SEQ ID NO: 281148
  Synthetic oligonucleotide

SEQ ID NO: 654108 - DNA, 55 bp, Artificial; identical to SEQ ID NO: 281151
  Synthetic oligonucleotide

SEQ ID NO: 654109 - DNA, 60 bp, Artificial; identical to SEQ ID NO: 285729
  Synthetic oligonucleotide

SEQ ID NO: 654110 - DNA, 51 bp, Artificial; identical to SEQ ID NO: 283722
  Synthetic oligonucleotide

SEQ ID NO: 654111 - DNA, 51 bp, Artificial; identical to SEQ ID NO: 283705
  Synthetic oligonucleotide

SEQ ID NO: 654112 - DNA, 52 bp, Artificial; identical to SEQ ID NO: 282830
  Synthetic oligonucleotide

SEQ ID NO: 654113 - DNA, 57 bp, Artificial; identical to SEQ ID NO: 279286
  Synthetic oligonucleotide

SEQ ID NO: 654114 - DNA, 55 bp, Artificial; identical to SEQ ID NO: 278360
  Synthetic oligonucleotide

SEQ ID NO: 654115 - DNA, 55 bp, Artificial; identical to SEQ ID NO: 286113
  Synthetic oligonucleotide

SEQ ID NO: 654116 - DNA, 55 bp, Artificial; identical to SEQ ID NO: 281162
  Synthetic oligonucleotide

SEQ ID NO: 654117 - DNA, 55 bp, Artificial; identical to SEQ ID NO: 281163
  Synthetic oligonucleotide

SEQ ID NO: 654118 - DNA, 51 bp, Artificial; identical to SEQ ID NO: 283759
  Synthetic oligonucleotide

SEQ ID NO: 654119 - DNA, 60 bp, Artificial; identical to SEQ ID NO: 285552
  Synthetic oligonucleotide

SEQ ID NO: 654120 - DNA, 57 bp, Artificial; identical to SEQ ID NO: 268283
  Synthetic oligonucleotide

SEQ ID NO: 654121 - DNA, 57 bp, Artificial; identical to SEQ ID NO: 285672
  Synthetic oligonucleotide

SEQ ID NO: 654122 - DNA, 55 bp, Artificial; identical to SEQ ID NO: 269020
  Synthetic oligonucleotide

SEQ ID NO: 654123 - DNA, 52 bp, Artificial; identical to SEQ ID NO: 282844
  Synthetic oligonucleotide

SEQ ID NO: 654124 - DNA, 59 bp, Artificial; identical to SEQ ID NO: 279145
  Synthetic oligonucleotide

SEQ ID NO: 654125 - DNA, 54 bp, Artificial; identical to SEQ ID NO: 282214
  Synthetic oligonucleotide

SEQ ID NO: 654126 - DNA, 54 bp, Artificial; identical to SEQ ID NO: 278660
  Synthetic oligonucleotide

SEQ ID NO: 654127 - DNA, 55 bp, Artificial; identical to SEQ ID NO: 278607
  Synthetic oligonucleotide

SEQ ID NO: 654128 - DNA, 54 bp, Artificial; identical to SEQ ID NO: 282206
  Synthetic oligonucleotide

SEQ ID NO: 654129 - DNA, 54 bp, Artificial; identical to SEQ ID NO: 282204
  Synthetic oligonucleotide

SEQ ID NO: 654130 - DNA, 55 bp, Artificial; identical to SEQ ID NO: 278610
  Synthetic oligonucleotide

SEQ ID NO: 654131 - DNA, 54 bp, Artificial; identical to SEQ ID NO: 268382
  Synthetic oligonucleotide

SEQ ID NO: 654132 - DNA, 58 bp, Artificial; identical to SEQ ID NO: 278951
  Synthetic oligonucleotide

SEQ ID NO: 654133 - DNA, 55 bp, Artificial; identical to SEQ ID NO: 278613
  Synthetic oligonucleotide

SEQ ID NO: 654134 - DNA, 53 bp, Artificial; identical to SEQ ID NO: 282728
  Synthetic oligonucleotide

SEQ ID NO: 654135 - DNA, 58 bp, Artificial; identical to SEQ ID NO: 279090
  Synthetic oligonucleotide

SEQ ID NO: 654136 - DNA, 51 bp, Artificial; identical to SEQ ID NO: 283422
  Synthetic oligonucleotide

SEQ ID NO: 654137 - DNA, 55 bp, Artificial; identical to SEQ ID NO: 281214
  Synthetic oligonucleotide

SEQ ID NO: 654138 - DNA, 52 bp, Artificial; identical to SEQ ID NO: 282826
  Synthetic oligonucleotide

SEQ ID NO: 654139 - DNA, 52 bp, Artificial; identical to SEQ ID NO: 282827
  Synthetic oligonucleotide

SEQ ID NO: 654140 - DNA, 50 bp, Artificial; identical to SEQ ID NO: 284741
  Synthetic oligonucleotide

SEQ ID NO: 654141 - DNA, 51 bp, Artificial; identical to SEQ ID NO: 270319
  Synthetic oligonucleotide

SEQ ID NO: 654142 - DNA, 55 bp, Artificial; identical to SEQ ID NO: 281217
  Synthetic oligonucleotide

SEQ ID NO: 654143 - DNA, 51 bp, Artificial; identical to SEQ ID NO: 283416
  Synthetic oligonucleotide

SEQ ID NO: 654144 - DNA, 50 bp, Artificial; identical to SEQ ID NO: 269314
  Synthetic oligonucleotide

SEQ ID NO: 654145 - DNA, 56 bp, Artificial; identical to SEQ ID NO: 270295
  Synthetic oligonucleotide

SEQ ID NO: 654146 - DNA, 55 bp, Artificial; identical to SEQ ID NO: 269079
  Synthetic oligonucleotide

SEQ ID NO: 654147 - DNA, 60 bp, Artificial; identical to SEQ ID NO: 285609
  Synthetic oligonucleotide

SEQ ID NO: 654148 - DNA, 60 bp, Artificial; identical to SEQ ID NO: 269415
  Synthetic oligonucleotide

SEQ ID NO: 654149 - DNA, 51 bp, Artificial; identical to SEQ ID NO: 286420
  Synthetic oligonucleotide

SEQ ID NO: 654150 - DNA, 55 bp, Artificial; identical to SEQ ID NO: 269072
  Synthetic oligonucleotide

SEQ ID NO: 654151 - DNA, 55 bp, Artificial; identical to SEQ ID NO: 269067
  Synthetic oligonucleotide

SEQ ID NO: 654152 - DNA, 55 bp, Artificial; identical to SEQ ID NO: 278618
  Synthetic oligonucleotide

SEQ ID NO: 654153 - DNA, 55 bp, Artificial; identical to SEQ ID NO: 269682
  Synthetic oligonucleotide

SEQ ID NO: 654154 - DNA, 55 bp, Artificial; identical to SEQ ID NO: 281229
  Synthetic oligonucleotide

SEQ ID NO: 654155 - DNA, 60 bp, Artificial; identical to SEQ ID NO: 285750
  Synthetic oligonucleotide

SEQ ID NO: 654156 - DNA, 50 bp, Artificial; identical to SEQ ID NO: 268588
  Synthetic oligonucleotide

SEQ ID NO: 654157 - DNA, 59 bp, Artificial; identical to SEQ ID NO: 285767
  Synthetic oligonucleotide

SEQ ID NO: 654158 - DNA, 60 bp, Artificial; identical to SEQ ID NO: 285788
  Synthetic oligonucleotide

SEQ ID NO: 654159 - DNA, 55 bp, Artificial; identical to SEQ ID NO: 270181
  Synthetic oligonucleotide

SEQ ID NO: 654160 - DNA, 60 bp, Artificial; identical to SEQ ID NO: 285546
  Synthetic oligonucleotide

SEQ ID NO: 654161 - DNA, 60 bp, Artificial; identical to SEQ ID NO: 285657
  Synthetic oligonucleotide

SEQ ID NO: 654162 - DNA, 58 bp, Artificial; identical to SEQ ID NO: 285656
  Synthetic oligonucleotide

SEQ ID NO: 654163 - DNA, 50 bp, Artificial; identical to SEQ ID NO: 284751
  Synthetic oligonucleotide

SEQ ID NO: 654164 - DNA, 50 bp, Artificial; identical to SEQ ID NO: 284752
  Synthetic oligonucleotide

SEQ ID NO: 654165 - DNA, 54 bp, Artificial; identical to SEQ ID NO: 282225
  Synthetic oligonucleotide

SEQ ID NO: 654166 - DNA, 52 bp, Artificial; identical to SEQ ID NO: 269208
  Synthetic oligonucleotide

SEQ ID NO: 654167 - DNA, 55 bp, Artificial; identical to SEQ ID NO: 281204
  Synthetic oligonucleotide

SEQ ID NO: 654168 - DNA, 50 bp, Artificial; identical to SEQ ID NO: 284755
  Synthetic oligonucleotide

SEQ ID NO: 654169 - DNA, 52 bp, Artificial; identical to SEQ ID NO: 282850
  Synthetic oligonucleotide

SEQ ID NO: 654170 - DNA, 53 bp, Artificial; identical to SEQ ID NO: 282693
  Synthetic oligonucleotide

SEQ ID NO: 654171 - DNA, 50 bp, Artificial; identical to SEQ ID NO: 269345
  Synthetic oligonucleotide

SEQ ID NO: 654172 - DNA, 54 bp, Artificial; identical to SEQ ID NO: 282260
  Synthetic oligonucleotide

SEQ ID NO: 654173 - DNA, 59 bp, Artificial; identical to SEQ ID NO: 279028
  Synthetic oligonucleotide

SEQ ID NO: 654174 - DNA, 54 bp, Artificial; identical to SEQ ID NO: 282259
  Synthetic oligonucleotide

SEQ ID NO: 654175 - DNA, 60 bp, Artificial; identical to SEQ ID NO: 278142
  Synthetic oligonucleotide

SEQ ID NO: 654176 - DNA, 55 bp, Artificial; identical to SEQ ID NO: 281206
  Synthetic oligonucleotide

SEQ ID NO: 654177 - DNA, 56 bp, Artificial; identical to SEQ ID NO: 279395
  Synthetic oligonucleotide

SEQ ID NO: 654178 - DNA, 60 bp, Artificial; identical to SEQ ID NO: 279052
  Synthetic oligonucleotide

SEQ ID NO: 654179 - DNA, 52 bp, Artificial; identical to SEQ ID NO: 278755
  Synthetic oligonucleotide

SEQ ID NO: 654180 - DNA, 52 bp, Artificial; identical to SEQ ID NO: 282246
  Synthetic oligonucleotide

SEQ ID NO: 654181 - DNA, 50 bp, Artificial; identical to SEQ ID NO: 269344
  Synthetic oligonucleotide

SEQ ID NO: 654182 - DNA, 50 bp, Artificial; identical to SEQ ID NO: 284815
  Synthetic oligonucleotide

SEQ ID NO: 654183 - DNA, 55 bp, Artificial; identical to SEQ ID NO: 282084
  Synthetic oligonucleotide

SEQ ID NO: 654184 - DNA, 59 bp, Artificial; identical to SEQ ID NO: 279169
  Synthetic oligonucleotide

SEQ ID NO: 654185 - DNA, 54 bp, Artificial; identical to SEQ ID NO: 284475
  Synthetic oligonucleotide

SEQ ID NO: 654186 - DNA, 50 bp, Artificial; identical to SEQ ID NO: 284822
  Synthetic oligonucleotide

SEQ ID NO: 654187 - DNA, 55 bp, Artificial; identical to SEQ ID NO: 270323
  Synthetic oligonucleotide

SEQ ID NO: 654188 - DNA, 55 bp, Artificial; identical to SEQ ID NO: 282071
  Synthetic oligonucleotide

SEQ ID NO: 654189 - DNA, 55 bp, Artificial; identical to SEQ ID NO: 282070
  Synthetic oligonucleotide

SEQ ID NO: 654190 - DNA, 50 bp, Artificial; identical to SEQ ID NO: 278867
  Synthetic oligonucleotide

SEQ ID NO: 654191 - DNA, 60 bp, Artificial; identical to SEQ ID NO: 285562
  Synthetic oligonucleotide

SEQ ID NO: 654192 - DNA, 52 bp, Artificial; identical to SEQ ID NO: 282873
  Synthetic oligonucleotide

SEQ ID NO: 654193 - DNA, 60 bp, Artificial; identical to SEQ ID NO: 279364
  Synthetic oligonucleotide

SEQ ID NO: 654194 - DNA, 50 bp, Artificial; identical to SEQ ID NO: 267926
  Synthetic oligonucleotide

SEQ ID NO: 654195 - DNA, 56 bp, Artificial; identical to SEQ ID NO: 276739
  Synthetic oligonucleotide

SEQ ID NO: 654196 - DNA, 51 bp, Artificial; identical to SEQ ID NO: 283392
  Synthetic oligonucleotide

SEQ ID NO: 654197 - DNA, 55 bp, Artificial; identical to SEQ ID NO: 278588
  Synthetic oligonucleotide

SEQ ID NO: 654198 - DNA, 53 bp, Artificial; identical to SEQ ID NO: 279431
  Synthetic oligonucleotide

SEQ ID NO: 654199 - DNA, 51 bp, Artificial; identical to SEQ ID NO: 283391
  Synthetic oligonucleotide

SEQ ID NO: 654200 - DNA, 56 bp, Artificial; identical to SEQ ID NO: 279449
  Synthetic oligonucleotide

SEQ ID NO: 654201 - DNA, 50 bp, Artificial; identical to SEQ ID NO: 269341
  Synthetic oligonucleotide

SEQ ID NO: 654202 - DNA, 53 bp, Artificial; identical to SEQ ID NO: 282688
  Synthetic oligonucleotide

SEQ ID NO: 654203 - DNA, 57 bp, Artificial; identical to SEQ ID NO: 279310
  Synthetic oligonucleotide

SEQ ID NO: 654204 - DNA, 56 bp, Artificial; identical to SEQ ID NO: 284197
  Synthetic oligonucleotide

SEQ ID NO: 654205 - DNA, 55 bp, Artificial; identical to SEQ ID NO: 282059
  Synthetic oligonucleotide

SEQ ID NO: 654206 - DNA, 57 bp, Artificial; identical to SEQ ID NO: 283886
  Synthetic oligonucleotide

SEQ ID NO: 654207 - DNA, 52 bp, Artificial; identical to SEQ ID NO: 282869
  Synthetic oligonucleotide

SEQ ID NO: 654208 - DNA, 55 bp, Artificial; identical to SEQ ID NO: 282114
  Synthetic oligonucleotide

SEQ ID NO: 654209 - DNA, 53 bp, Artificial; identical to SEQ ID NO: 282745
  Synthetic oligonucleotide

SEQ ID NO: 654210 - DNA, 59 bp, Artificial; identical to SEQ ID NO: 284086
  Synthetic oligonucleotide

SEQ ID NO: 654211 - DNA, 53 bp, Artificial; identical to SEQ ID NO: 282722
  Synthetic oligonucleotide

SEQ ID NO: 654212 - DNA, 56 bp, Artificial; identical to SEQ ID NO: 279456
  Synthetic oligonucleotide

SEQ ID NO: 654213 - DNA, 55 bp, Artificial; identical to SEQ ID NO: 268489
  Synthetic oligonucleotide

SEQ ID NO: 654214 - DNA, 55 bp, Artificial; identical to SEQ ID NO: 269060
  Synthetic oligonucleotide

SEQ ID NO: 654215 - DNA, 55 bp, Artificial; identical to SEQ ID NO: 282102
  Synthetic oligonucleotide

SEQ ID NO: 654216 - DNA, 55 bp, Artificial; identical to SEQ ID NO: 282099
  Synthetic oligonucleotide

SEQ ID NO: 654217 - DNA, 59 bp, Artificial; identical to SEQ ID NO: 282442
  Synthetic oligonucleotide

SEQ ID NO: 654218 - DNA, 60 bp, Artificial; identical to SEQ ID NO: 281731
  Synthetic oligonucleotide

SEQ ID NO: 654219 - DNA, 60 bp, Artificial; identical to SEQ ID NO: 282175
  Synthetic oligonucleotide

SEQ ID NO: 654220 - DNA, 60 bp, Artificial; identical to SEQ ID NO: 282119
  Synthetic oligonucleotide

SEQ ID NO: 654221 - DNA, 54 bp, Artificial; identical to SEQ ID NO: 282155
  Synthetic oligonucleotide

SEQ ID NO: 654222 - DNA, 60 bp, Artificial; identical to SEQ ID NO: 282064
  Synthetic oligonucleotide

SEQ ID NO: 654223 - DNA, 54 bp, Artificial; identical to SEQ ID NO: 268290
  Synthetic oligonucleotide

SEQ ID NO: 654224 - DNA, 55 bp, Artificial; identical to SEQ ID NO: 281953
  Synthetic oligonucleotide

SEQ ID NO: 654225 - DNA, 55 bp, Artificial; identical to SEQ ID NO: 282091
  Synthetic oligonucleotide

SEQ ID NO: 654226 - DNA, 60 bp, Artificial; identical to SEQ ID NO: 283219
  Synthetic oligonucleotide

SEQ ID NO: 654227 - DNA, 57 bp, Artificial; identical to SEQ ID NO: 276737
  Synthetic oligonucleotide

SEQ ID NO: 654228 - DNA, 50 bp, Artificial; identical to SEQ ID NO: 284832
  Synthetic oligonucleotide

SEQ ID NO: 654229 - DNA, 52 bp, Artificial; identical to SEQ ID NO: 282935
  Synthetic oligonucleotide

SEQ ID NO: 654230 - DNA, 52 bp, Artificial; identical to SEQ ID NO: 268293
  Synthetic oligonucleotide

SEQ ID NO: 654231 - DNA, 55 bp, Artificial; identical to SEQ ID NO: 282023
  Synthetic oligonucleotide

SEQ ID NO: 654232 - DNA, 58 bp, Artificial; identical to SEQ ID NO: 282953
  Synthetic oligonucleotide

SEQ ID NO: 654233 - DNA, 55 bp, Artificial; identical to SEQ ID NO: 282021
  Synthetic oligonucleotide

SEQ ID NO: 654234 - DNA, 55 bp, Artificial; identical to SEQ ID NO: 286105
  Synthetic oligonucleotide

SEQ ID NO: 654235 - DNA, 54 bp, Artificial; identical to SEQ ID NO: 270183
  Synthetic oligonucleotide

SEQ ID NO: 654236 - DNA, 54 bp, Artificial; identical to SEQ ID NO: 282016
  Synthetic oligonucleotide

SEQ ID NO: 654237 - DNA, 57 bp, Artificial; identical to SEQ ID NO: 283108
  Synthetic oligonucleotide

SEQ ID NO: 654238 - DNA, 55 bp, Artificial; identical to SEQ ID NO: 278597
  Synthetic oligonucleotide

SEQ ID NO: 654239 - DNA, 53 bp, Artificial; identical to SEQ ID NO: 282616
  Synthetic oligonucleotide

SEQ ID NO: 654240 - DNA, 55 bp, Artificial; identical to SEQ ID NO: 269056
  Synthetic oligonucleotide

SEQ ID NO: 654241 - DNA, 55 bp, Artificial; identical to SEQ ID NO: 282013
  Synthetic oligonucleotide

SEQ ID NO: 654242 - DNA, 55 bp, Artificial; identical to SEQ ID NO: 282011
  Synthetic oligonucleotide

SEQ ID NO: 654243 - DNA, 53 bp, Artificial; identical to SEQ ID NO: 268294
  Synthetic oligonucleotide

SEQ ID NO: 654244 - DNA, 55 bp, Artificial; identical to SEQ ID NO: 268517
  Synthetic oligonucleotide

SEQ ID NO: 654245 - DNA, 55 bp, Artificial; identical to SEQ ID NO: 282007
  Synthetic oligonucleotide

SEQ ID NO: 654246 - DNA, 56 bp, Artificial; identical to SEQ ID NO: 283409
  Synthetic oligonucleotide

SEQ ID NO: 654247 - DNA, 54 bp, Artificial; identical to SEQ ID NO: 278602
  Synthetic oligonucleotide

SEQ ID NO: 654248 - DNA, 55 bp, Artificial; identical to SEQ ID NO: 282003
  Synthetic oligonucleotide

SEQ ID NO: 654249 - DNA, 58 bp, Artificial; identical to SEQ ID NO: 283453
  Synthetic oligonucleotide

SEQ ID NO: 654250 - DNA, 55 bp, Artificial; identical to SEQ ID NO: 282002
  Synthetic oligonucleotide

SEQ ID NO: 654251 - DNA, 55 bp, Artificial; identical to SEQ ID NO: 268514
  Synthetic oligonucleotide

SEQ ID NO: 654252 - DNA, 55 bp, Artificial; identical to SEQ ID NO: 282056
  Synthetic oligonucleotide

SEQ ID NO: 654253 - DNA, 59 bp, Artificial; identical to SEQ ID NO: 268297
  Synthetic oligonucleotide

SEQ ID NO: 654254 - DNA, 57 bp, Artificial; identical to SEQ ID NO: 279303
  Synthetic oligonucleotide

SEQ ID NO: 654255 - DNA, 55 bp, Artificial; identical to SEQ ID NO: 282054
  Synthetic oligonucleotide

SEQ ID NO: 654256 - DNA, 60 bp, Artificial; identical to SEQ ID NO: 283197
  Synthetic oligonucleotide

SEQ ID NO: 654257 - DNA, 54 bp, Artificial; identical to SEQ ID NO: 282051
  Synthetic oligonucleotide

SEQ ID NO: 654258 - DNA, 51 bp, Artificial; identical to SEQ ID NO: 283530
  Synthetic oligonucleotide

SEQ ID NO: 654259 - DNA, 60 bp, Artificial; identical to SEQ ID NO: 268298
  Synthetic oligonucleotide

SEQ ID NO: 654260 - DNA, 58 bp, Artificial; identical to SEQ ID NO: 283230
  Synthetic oligonucleotide

SEQ ID NO: 654261 - DNA, 55 bp, Artificial; identical to SEQ ID NO: 282048
  Synthetic oligonucleotide

SEQ ID NO: 654262 - DNA, 55 bp, Artificial; identical to SEQ ID NO: 282047
  Synthetic oligonucleotide

SEQ ID NO: 654263 - DNA, 53 bp, Artificial; identical to SEQ ID NO: 268511
  Synthetic oligonucleotide

SEQ ID NO: 654264 - DNA, 55 bp, Artificial; identical to SEQ ID NO: 282039
  Synthetic oligonucleotide

SEQ ID NO: 654265 - DNA, 55 bp, Artificial; identical to SEQ ID NO: 282038
  Synthetic oligonucleotide

SEQ ID NO: 654266 - DNA, 55 bp, Artificial; identical to SEQ ID NO: 282035
  Synthetic oligonucleotide

SEQ ID NO: 654267 - DNA, 55 bp, Artificial; identical to SEQ ID NO: 282034
  Synthetic oligonucleotide

SEQ ID NO: 654268 - DNA, 55 bp, Artificial; identical to SEQ ID NO: 282028
  Synthetic oligonucleotide

SEQ ID NO: 654269 - DNA, 55 bp, Artificial; identical to SEQ ID NO: 269050
  Synthetic oligonucleotide

SEQ ID NO: 654270 - DNA, 60 bp, Artificial; identical to SEQ ID NO: 282130
  Synthetic oligonucleotide

SEQ ID NO: 654271 - DNA, 59 bp, Artificial; identical to SEQ ID NO: 282142
  Synthetic oligonucleotide

SEQ ID NO: 654272 - DNA, 55 bp, Artificial; identical to SEQ ID NO: 282132
  Synthetic oligonucleotide

SEQ ID NO: 654273 - DNA, 55 bp, Artificial; identical to SEQ ID NO: 269049
  Synthetic oligonucleotide

SEQ ID NO: 654274 - DNA, 55 bp, Artificial; identical to SEQ ID NO: 268012
  Synthetic oligonucleotide

SEQ ID NO: 654275 - DNA, 57 bp, Artificial; identical to SEQ ID NO: 279294
  Synthetic oligonucleotide

SEQ ID NO: 654276 - DNA, 55 bp, Artificial; identical to SEQ ID NO: 282126
  Synthetic oligonucleotide

SEQ ID NO: 654277 - DNA, 55 bp, Artificial; identical to SEQ ID NO: 282139
  Synthetic oligonucleotide

SEQ ID NO: 654278 - DNA, 55 bp, Artificial; identical to SEQ ID NO: 282131
  Synthetic oligonucleotide

SEQ ID NO: 654279 - DNA, 60 bp, Artificial; identical to SEQ ID NO: 281886
  Synthetic oligonucleotide

SEQ ID NO: 654280 - DNA, 55 bp, Artificial; identical to SEQ ID NO: 282122
  Synthetic oligonucleotide

SEQ ID NO: 654281 - DNA, 60 bp, Artificial; identical to SEQ ID NO: 282431
  Synthetic oligonucleotide

SEQ ID NO: 654282 - DNA, 55 bp, Artificial; identical to SEQ ID NO: 278633
  Synthetic oligonucleotide

SEQ ID NO: 654283 - DNA, 57 bp, Artificial; identical to SEQ ID NO: 268302
  Synthetic oligonucleotide

SEQ ID NO: 654284 - DNA, 55 bp, Artificial; identical to SEQ ID NO: 270331
  Synthetic oligonucleotide

SEQ ID NO: 654285 - DNA, 50 bp, Artificial; identical to SEQ ID NO: 284792
  Synthetic oligonucleotide

SEQ ID NO: 654286 - DNA, 55 bp, Artificial; identical to SEQ ID NO: 269048
  Synthetic oligonucleotide

SEQ ID NO: 654287 - DNA, 60 bp, Artificial; identical to SEQ ID NO: 282464
  Synthetic oligonucleotide

SEQ ID NO: 654288 - DNA, 55 bp, Artificial; identical to SEQ ID NO: 282127
  Synthetic oligonucleotide

SEQ ID NO: 654289 - DNA, 55 bp, Artificial; identical to SEQ ID NO: 281787
  Synthetic oligonucleotide

SEQ ID NO: 654290 - DNA, 51 bp, Artificial; identical to SEQ ID NO: 269268
  Synthetic oligonucleotide

SEQ ID NO: 654291 - DNA, 55 bp, Artificial; identical to SEQ ID NO: 278635
  Synthetic oligonucleotide

SEQ ID NO: 654292 - DNA, 57 bp, Artificial; identical to SEQ ID NO: 282609
  Synthetic oligonucleotide

SEQ ID NO: 654293 - DNA, 55 bp, Artificial; identical to SEQ ID NO: 268011
  Synthetic oligonucleotide

SEQ ID NO: 654294 - DNA, 51 bp, Artificial; identical to SEQ ID NO: 283572
  Synthetic oligonucleotide

SEQ ID NO: 654295 - DNA, 60 bp, Artificial; identical to SEQ ID NO: 282186
  Synthetic oligonucleotide

SEQ ID NO: 654296 - DNA, 55 bp, Artificial; identical to SEQ ID NO: 281793
  Synthetic oligonucleotide

SEQ ID NO: 654297 - DNA, 55 bp, Artificial; identical to SEQ ID NO: 278645
  Synthetic oligonucleotide

SEQ ID NO: 654298 - DNA, 55 bp, Artificial; identical to SEQ ID NO: 281794
  Synthetic oligonucleotide

SEQ ID NO: 654299 - DNA, 55 bp, Artificial; identical to SEQ ID NO: 270284
  Synthetic oligonucleotide

SEQ ID NO: 654300 - DNA, 54 bp, Artificial; identical to SEQ ID NO: 269152
  Synthetic oligonucleotide

SEQ ID NO: 654301 - DNA, 55 bp, Artificial; identical to SEQ ID NO: 270294
  Synthetic oligonucleotide

SEQ ID NO: 654302 - DNA, 55 bp, Artificial; identical to SEQ ID NO: 286138
  Synthetic oligonucleotide

SEQ ID NO: 654303 - DNA, 55 bp, Artificial; identical to SEQ ID NO: 281777
  Synthetic oligonucleotide

SEQ ID NO: 654304 - DNA, 51 bp, Artificial; identical to SEQ ID NO: 283556
  Synthetic oligonucleotide

SEQ ID NO: 654305 - DNA, 55 bp, Artificial; identical to SEQ ID NO: 281780
  Synthetic oligonucleotide

SEQ ID NO: 654306 - DNA, 59 bp, Artificial; identical to SEQ ID NO: 285408
  Synthetic oligonucleotide

SEQ ID NO: 654307 - DNA, 55 bp, Artificial; identical to SEQ ID NO: 281784
  Synthetic oligonucleotide

SEQ ID NO: 654308 - DNA, 55 bp, Artificial; identical to SEQ ID NO: 281825
  Synthetic oligonucleotide

SEQ ID NO: 654309 - DNA, 58 bp, Artificial; identical to SEQ ID NO: 285515
  Synthetic oligonucleotide

SEQ ID NO: 654310 - DNA, 59 bp, Artificial; identical to SEQ ID NO: 268303
  Synthetic oligonucleotide

SEQ ID NO: 654311 - DNA, 55 bp, Artificial; identical to SEQ ID NO: 281832
  Synthetic oligonucleotide

SEQ ID NO: 654312 - DNA, 55 bp, Artificial; identical to SEQ ID NO: 278517
  Synthetic oligonucleotide

SEQ ID NO: 654313 - DNA, 55 bp, Artificial; identical to SEQ ID NO: 269051
  Synthetic oligonucleotide

SEQ ID NO: 654314 - DNA, 55 bp, Artificial; identical to SEQ ID NO: 286136
  Synthetic oligonucleotide

SEQ ID NO: 654315 - DNA, 60 bp, Artificial; identical to SEQ ID NO: 284053
  Synthetic oligonucleotide

SEQ ID NO: 654316 - DNA, 55 bp, Artificial; identical to SEQ ID NO: 281841
  Synthetic oligonucleotide

SEQ ID NO: 654317 - DNA, 55 bp, Artificial; identical to SEQ ID NO: 268009
  Synthetic oligonucleotide

SEQ ID NO: 654318 - DNA, 55 bp, Artificial; identical to SEQ ID NO: 270335
  Synthetic oligonucleotide

SEQ ID NO: 654319 - DNA, 53 bp, Artificial; identical to SEQ ID NO: 282692
  Synthetic oligonucleotide

SEQ ID NO: 654320 - DNA, 55 bp, Artificial; identical to SEQ ID NO: 270166
  Synthetic oligonucleotide

SEQ ID NO: 654321 - DNA, 60 bp, Artificial; identical to SEQ ID NO: 283675
  Synthetic oligonucleotide

SEQ ID NO: 654322 - DNA, 55 bp, Artificial; identical to SEQ ID NO: 281815
  Synthetic oligonucleotide

SEQ ID NO: 654323 - DNA, 55 bp, Artificial; identical to SEQ ID NO: 268305
  Synthetic oligonucleotide

SEQ ID NO: 654324 - DNA, 58 bp, Artificial; identical to SEQ ID NO: 279268
  Synthetic oligonucleotide

SEQ ID NO: 654325 - DNA, 53 bp, Artificial; identical to SEQ ID NO: 283731
  Synthetic oligonucleotide

SEQ ID NO: 654326 - DNA, 55 bp, Artificial; identical to SEQ ID NO: 281818
  Synthetic oligonucleotide

SEQ ID NO: 654327 - DNA, 54 bp, Artificial; identical to SEQ ID NO: 278649
  Synthetic oligonucleotide

SEQ ID NO: 654328 - DNA, 54 bp, Artificial; identical to SEQ ID NO: 281712
  Synthetic oligonucleotide

SEQ ID NO: 654329 - DNA, 55 bp, Artificial; identical to SEQ ID NO: 269059
  Synthetic oligonucleotide

SEQ ID NO: 654330 - DNA, 55 bp, Artificial; identical to SEQ ID NO: 269061
  Synthetic oligonucleotide

SEQ ID NO: 654331 - DNA, 55 bp, Artificial; identical to SEQ ID NO: 281718
  Synthetic oligonucleotide

SEQ ID NO: 654332 - DNA, 55 bp, Artificial; identical to SEQ ID NO: 286131
  Synthetic oligonucleotide

SEQ ID NO: 654333 - DNA, 55 bp, Artificial; identical to SEQ ID NO: 281723
  Synthetic oligonucleotide

SEQ ID NO: 654334 - DNA, 55 bp, Artificial; identical to SEQ ID NO: 281724
  Synthetic oligonucleotide

SEQ ID NO: 654335 - DNA, 55 bp, Artificial; identical to SEQ ID NO: 281728
  Synthetic oligonucleotide

SEQ ID NO: 654336 - DNA, 59 bp, Artificial; identical to SEQ ID NO: 284186
  Synthetic oligonucleotide

SEQ ID NO: 654337 - DNA, 55 bp, Artificial; identical to SEQ ID NO: 281695
  Synthetic oligonucleotide

SEQ ID NO: 654338 - DNA, 55 bp, Artificial; identical to SEQ ID NO: 281699
  Synthetic oligonucleotide

SEQ ID NO: 654339 - DNA, 55 bp, Artificial; identical to SEQ ID NO: 268008
  Synthetic oligonucleotide

SEQ ID NO: 654340 - DNA, 55 bp, Artificial; identical to SEQ ID NO: 281706
  Synthetic oligonucleotide

SEQ ID NO: 654341 - DNA, 55 bp, Artificial; identical to SEQ ID NO: 281707
  Synthetic oligonucleotide

SEQ ID NO: 654342 - DNA, 55 bp, Artificial; identical to SEQ ID NO: 278526
  Synthetic oligonucleotide

SEQ ID NO: 654343 - DNA, 52 bp, Artificial; identical to SEQ ID NO: 283143
  Synthetic oligonucleotide

SEQ ID NO: 654344 - DNA, 54 bp, Artificial; identical to SEQ ID NO: 278684
  Synthetic oligonucleotide

SEQ ID NO: 654345 - DNA, 55 bp, Artificial; identical to SEQ ID NO: 278527
  Synthetic oligonucleotide

SEQ ID NO: 654346 - DNA, 55 bp, Artificial; identical to SEQ ID NO: 281750
  Synthetic oligonucleotide

SEQ ID NO: 654347 - DNA, 55 bp, Artificial; identical to SEQ ID NO: 281751
  Synthetic oligonucleotide

SEQ ID NO: 654348 - DNA, 51 bp, Artificial; identical to SEQ ID NO: 283474
  Synthetic oligonucleotide

SEQ ID NO: 654349 - DNA, 55 bp, Artificial; identical to SEQ ID NO: 278528
  Synthetic oligonucleotide

SEQ ID NO: 654350 - DNA, 54 bp, Artificial; identical to SEQ ID NO: 279242
  Synthetic oligonucleotide

SEQ ID NO: 654351 - DNA, 54 bp, Artificial; identical to SEQ ID NO: 286303
  Synthetic oligonucleotide

SEQ ID NO: 654352 - DNA, 55 bp, Artificial; identical to SEQ ID NO: 281761
  Synthetic oligonucleotide

SEQ ID NO: 654353 - DNA, 54 bp, Artificial; identical to SEQ ID NO: 270286
  Synthetic oligonucleotide

SEQ ID NO: 654354 - DNA, 58 bp, Artificial; identical to SEQ ID NO: 285728
  Synthetic oligonucleotide

SEQ ID NO: 654355 - DNA, 53 bp, Artificial; identical to SEQ ID NO: 276752
  Synthetic oligonucleotide

SEQ ID NO: 654356 - DNA, 56 bp, Artificial; identical to SEQ ID NO: 279308
  Synthetic oligonucleotide

SEQ ID NO: 654357 - DNA, 51 bp, Artificial; identical to SEQ ID NO: 283471
  Synthetic oligonucleotide

SEQ ID NO: 654358 - DNA, 52 bp, Artificial; identical to SEQ ID NO: 276781
  Synthetic oligonucleotide

SEQ ID NO: 654359 - DNA, 60 bp, Artificial; identical to SEQ ID NO: 285751
  Synthetic oligonucleotide

SEQ ID NO: 654360 - DNA, 52 bp, Artificial; identical to SEQ ID NO: 283094
  Synthetic oligonucleotide

SEQ ID NO: 654361 - DNA, 55 bp, Artificial; identical to SEQ ID NO: 281729
  Synthetic oligonucleotide

SEQ ID NO: 654362 - DNA, 52 bp, Artificial; identical to SEQ ID NO: 283095
  Synthetic oligonucleotide

SEQ ID NO: 654363 - DNA, 60 bp, Artificial; identical to SEQ ID NO: 279531
  Synthetic oligonucleotide

SEQ ID NO: 654364 - DNA, 55 bp, Artificial; identical to SEQ ID NO: 278485
  Synthetic oligonucleotide

SEQ ID NO: 654365 - DNA, 55 bp, Artificial; identical to SEQ ID NO: 278486
  Synthetic oligonucleotide

SEQ ID NO: 654366 - DNA, 52 bp, Artificial; identical to SEQ ID NO: 269207
  Synthetic oligonucleotide

SEQ ID NO: 654367 - DNA, 53 bp, Artificial; identical to SEQ ID NO: 270177
  Synthetic oligonucleotide

SEQ ID NO: 654368 - DNA, 56 bp, Artificial; identical to SEQ ID NO: 279564
  Synthetic oligonucleotide

SEQ ID NO: 654369 - DNA, 55 bp, Artificial; identical to SEQ ID NO: 281739
  Synthetic oligonucleotide

SEQ ID NO: 654370 - DNA, 55 bp, Artificial; identical to SEQ ID NO: 281744
  Synthetic oligonucleotide

SEQ ID NO: 654371 - DNA, 50 bp, Artificial; identical to SEQ ID NO: 284649
  Synthetic oligonucleotide

SEQ ID NO: 654372 - DNA, 52 bp, Artificial; identical to SEQ ID NO: 283114
  Synthetic oligonucleotide

SEQ ID NO: 654373 - DNA, 51 bp, Artificial; identical to SEQ ID NO: 283516
  Synthetic oligonucleotide

SEQ ID NO: 654374 - DNA, 55 bp, Artificial; identical to SEQ ID NO: 281943
  Synthetic oligonucleotide

SEQ ID NO: 654375 - DNA, 55 bp, Artificial; identical to SEQ ID NO: 281944
  Synthetic oligonucleotide

SEQ ID NO: 654376 - DNA, 55 bp, Artificial; identical to SEQ ID NO: 281946
  Synthetic oligonucleotide

SEQ ID NO: 654377 - DNA, 57 bp, Artificial; identical to SEQ ID NO: 268356
  Synthetic oligonucleotide

SEQ ID NO: 654378 - DNA, 55 bp, Artificial; identical to SEQ ID NO: 281949
  Synthetic oligonucleotide

SEQ ID NO: 654379 - DNA, 60 bp, Artificial; identical to SEQ ID NO: 279487
  Synthetic oligonucleotide

SEQ ID NO: 654380 - DNA, 55 bp, Artificial; identical to SEQ ID NO: 281956
  Synthetic oligonucleotide

SEQ ID NO: 654381 - DNA, 59 bp, Artificial; identical to SEQ ID NO: 279164
  Synthetic oligonucleotide

SEQ ID NO: 654382 - DNA, 55 bp, Artificial; identical to SEQ ID NO: 278493
  Synthetic oligonucleotide

SEQ ID NO: 654383 - DNA, 55 bp, Artificial; identical to SEQ ID NO: 281959
  Synthetic oligonucleotide

SEQ ID NO: 654384 - DNA, 55 bp, Artificial; identical to SEQ ID NO: 278495
  Synthetic oligonucleotide

SEQ ID NO: 654385 - DNA, 54 bp, Artificial; identical to SEQ ID NO: 286126
  Synthetic oligonucleotide

SEQ ID NO: 654386 - DNA, 55 bp, Artificial; identical to SEQ ID NO: 278497
  Synthetic oligonucleotide

SEQ ID NO: 654387 - DNA, 55 bp, Artificial; identical to SEQ ID NO: 281935
  Synthetic oligonucleotide

SEQ ID NO: 654388 - DNA, 55 bp, Artificial; identical to SEQ ID NO: 281984
  Synthetic oligonucleotide

SEQ ID NO: 654389 - DNA, 55 bp, Artificial; identical to SEQ ID NO: 281989
  Synthetic oligonucleotide

SEQ ID NO: 654390 - DNA, 55 bp, Artificial; identical to SEQ ID NO: 269681
  Synthetic oligonucleotide

SEQ ID NO: 654391 - DNA, 55 bp, Artificial; identical to SEQ ID NO: 281990
  Synthetic oligonucleotide

SEQ ID NO: 654392 - DNA, 56 bp, Artificial; identical to SEQ ID NO: 279432
  Synthetic oligonucleotide

SEQ ID NO: 654393 - DNA, 52 bp, Artificial; identical to SEQ ID NO: 278757
  Synthetic oligonucleotide

SEQ ID NO: 654394 - DNA, 55 bp, Artificial; identical to SEQ ID NO: 281992
  Synthetic oligonucleotide

SEQ ID NO: 654395 - DNA, 52 bp, Artificial; identical to SEQ ID NO: 285617
  Synthetic oligonucleotide

SEQ ID NO: 654396 - DNA, 55 bp, Artificial; identical to SEQ ID NO: 278503
  Synthetic oligonucleotide

SEQ ID NO: 654397 - DNA, 60 bp, Artificial; identical to SEQ ID NO: 285684
  Synthetic oligonucleotide

SEQ ID NO: 654398 - DNA, 53 bp, Artificial; identical to SEQ ID NO: 282658
  Synthetic oligonucleotide

SEQ ID NO: 654399 - DNA, 55 bp, Artificial; identical to SEQ ID NO: 281963
  Synthetic oligonucleotide

SEQ ID NO: 654400 - DNA, 55 bp, Artificial; identical to SEQ ID NO: 269068
  Synthetic oligonucleotide

SEQ ID NO: 654401 - DNA, 55 bp, Artificial; identical to SEQ ID NO: 281969
  Synthetic oligonucleotide

SEQ ID NO: 654402 - DNA, 55 bp, Artificial; identical to SEQ ID NO: 278558
  Synthetic oligonucleotide

SEQ ID NO: 654403 - DNA, 54 bp, Artificial; identical to SEQ ID NO: 278559
  Synthetic oligonucleotide

SEQ ID NO: 654404 - DNA, 55 bp, Artificial; identical to SEQ ID NO: 281862
  Synthetic oligonucleotide

SEQ ID NO: 654405 - DNA, 55 bp, Artificial; identical to SEQ ID NO: 268445
  Synthetic oligonucleotide

SEQ ID NO: 654406 - DNA, 55 bp, Artificial; identical to SEQ ID NO: 269069
  Synthetic oligonucleotide

SEQ ID NO: 654407 - DNA, 57 bp, Artificial; identical to SEQ ID NO: 279314
  Synthetic oligonucleotide

SEQ ID NO: 654408 - DNA, 52 bp, Artificial; identical to SEQ ID NO: 282618
  Synthetic oligonucleotide

SEQ ID NO: 654409 - DNA, 55 bp, Artificial; identical to SEQ ID NO: 268006
  Synthetic oligonucleotide

SEQ ID NO: 654410 - DNA, 54 bp, Artificial; identical to SEQ ID NO: 278690
  Synthetic oligonucleotide

SEQ ID NO: 654411 - DNA, 55 bp, Artificial; identical to SEQ ID NO: 268444
  Synthetic oligonucleotide

SEQ ID NO: 654412 - DNA, 55 bp, Artificial; identical to SEQ ID NO: 278560
  Synthetic oligonucleotide

SEQ ID NO: 654413 - DNA, 60 bp, Artificial; identical to SEQ ID NO: 281086
  Synthetic oligonucleotide

SEQ ID NO: 654414 - DNA, 55 bp, Artificial; identical to SEQ ID NO: 281872
  Synthetic oligonucleotide

SEQ ID NO: 654415 - DNA, 59 bp, Artificial; identical to SEQ ID NO: 281143
  Synthetic oligonucleotide

SEQ ID NO: 654416 - DNA, 55 bp, Artificial; identical to SEQ ID NO: 278563
  Synthetic oligonucleotide

SEQ ID NO: 654417 - DNA, 55 bp, Artificial; identical to SEQ ID NO: 268442
  Synthetic oligonucleotide

SEQ ID NO: 654418 - DNA, 55 bp, Artificial; identical to SEQ ID NO: 281844
  Synthetic oligonucleotide

SEQ ID NO: 654419 - DNA, 55 bp, Artificial; identical to SEQ ID NO: 269071
  Synthetic oligonucleotide

SEQ ID NO: 654420 - DNA, 55 bp, Artificial; identical to SEQ ID NO: 268260
  Synthetic oligonucleotide

SEQ ID NO: 654421 - DNA, 50 bp, Artificial; identical to SEQ ID NO: 284669
  Synthetic oligonucleotide

SEQ ID NO: 654422 - DNA, 51 bp, Artificial; identical to SEQ ID NO: 283517
  Synthetic oligonucleotide

SEQ ID NO: 654423 - DNA, 55 bp, Artificial; identical to SEQ ID NO: 281903
  Synthetic oligonucleotide

SEQ ID NO: 654424 - DNA, 58 bp, Artificial; identical to SEQ ID NO: 268261
  Synthetic oligonucleotide

SEQ ID NO: 654425 - DNA, 59 bp, Artificial; identical to SEQ ID NO: 281231
  Synthetic oligonucleotide

SEQ ID NO: 654426 - DNA, 55 bp, Artificial; identical to SEQ ID NO: 286124
  Synthetic oligonucleotide

SEQ ID NO: 654427 - DNA, 52 bp, Artificial; identical to SEQ ID NO: 283028
  Synthetic oligonucleotide

SEQ ID NO: 654428 - DNA, 51 bp, Artificial; identical to SEQ ID NO: 268569
  Synthetic oligonucleotide

SEQ ID NO: 654429 - DNA, 60 bp, Artificial; identical to SEQ ID NO: 281298
  Synthetic oligonucleotide

SEQ ID NO: 654430 - DNA, 55 bp, Artificial; identical to SEQ ID NO: 278567
  Synthetic oligonucleotide

SEQ ID NO: 654431 - DNA, 55 bp, Artificial; identical to SEQ ID NO: 281911
  Synthetic oligonucleotide

SEQ ID NO: 654432 - DNA, 55 bp, Artificial; identical to SEQ ID NO: 278568
  Synthetic oligonucleotide

SEQ ID NO: 654433 - DNA, 55 bp, Artificial; identical to SEQ ID NO: 271680
  Synthetic oligonucleotide

SEQ ID NO: 654434 - DNA, 55 bp, Artificial; identical to SEQ ID NO: 281917
  Synthetic oligonucleotide

SEQ ID NO: 654435 - DNA, 55 bp, Artificial; identical to SEQ ID NO: 281881
  Synthetic oligonucleotide

SEQ ID NO: 654436 - DNA, 55 bp, Artificial; identical to SEQ ID NO: 268005
  Synthetic oligonucleotide

SEQ ID NO: 654437 - DNA, 54 bp, Artificial; identical to SEQ ID NO: 282263
  Synthetic oligonucleotide

SEQ ID NO: 654438 - DNA, 56 bp, Artificial; identical to SEQ ID NO: 280154
  Synthetic oligonucleotide

SEQ ID NO: 654439 - DNA, 51 bp, Artificial; identical to SEQ ID NO: 283522
  Synthetic oligonucleotide

SEQ ID NO: 654440 - DNA, 59 bp, Artificial; identical to SEQ ID NO: 279764
  Synthetic oligonucleotide

SEQ ID NO: 654441 - DNA, 54 bp, Artificial; identical to SEQ ID NO: 270364
  Synthetic oligonucleotide

SEQ ID NO: 654442 - DNA, 56 bp, Artificial; identical to SEQ ID NO: 279429
  Synthetic oligonucleotide

SEQ ID NO: 654443 - DNA, 55 bp, Artificial; identical to SEQ ID NO: 281894
  Synthetic oligonucleotide

SEQ ID NO: 654444 - DNA, 50 bp, Artificial; identical to SEQ ID NO: 284673
  Synthetic oligonucleotide

SEQ ID NO: 654445 - DNA, 54 bp, Artificial; identical to SEQ ID NO: 282249
  Synthetic oligonucleotide

SEQ ID NO: 654446 - DNA, 54 bp, Artificial; identical to SEQ ID NO: 282248
  Synthetic oligonucleotide

SEQ ID NO: 654447 - DNA, 60 bp, Artificial; identical to SEQ ID NO: 268266
  Synthetic oligonucleotide

SEQ ID NO: 654448 - DNA, 55 bp, Artificial; identical to SEQ ID NO: 281898
  Synthetic oligonucleotide

SEQ ID NO: 654449 - DNA, 60 bp, Artificial; identical to SEQ ID NO: 280620
  Synthetic oligonucleotide

SEQ ID NO: 654450 - DNA, 60 bp, Artificial; identical to SEQ ID NO: 280675
  Synthetic oligonucleotide

SEQ ID NO: 654451 - DNA, 55 bp, Artificial; identical to SEQ ID NO: 281892
  Synthetic oligonucleotide

SEQ ID NO: 654452 - DNA, 50 bp, Artificial; identical to SEQ ID NO: 284674
  Synthetic oligonucleotide

SEQ ID NO: 654453 - DNA, 50 bp, Artificial; identical to SEQ ID NO: 268595
  Synthetic oligonucleotide

SEQ ID NO: 654454 - DNA, 60 bp, Artificial; identical to SEQ ID NO: 280720
  Synthetic oligonucleotide

SEQ ID NO: 654455 - DNA, 55 bp, Artificial; identical to SEQ ID NO: 268267
  Synthetic oligonucleotide

SEQ ID NO: 654456 - DNA, 55 bp, Artificial; identical to SEQ ID NO: 281889
  Synthetic oligonucleotide

SEQ ID NO: 654457 - DNA, 55 bp, Artificial; identical to SEQ ID NO: 281885
  Synthetic oligonucleotide

SEQ ID NO: 654458 - DNA, 55 bp, Artificial; identical to SEQ ID NO: 281884
  Synthetic oligonucleotide

SEQ ID NO: 654459 - DNA, 55 bp, Artificial; identical to SEQ ID NO: 286251
  Synthetic oligonucleotide

SEQ ID NO: 654460 - DNA, 56 bp, Artificial; identical to SEQ ID NO: 279381
  Synthetic oligonucleotide

SEQ ID NO: 654461 - DNA, 55 bp, Artificial; identical to SEQ ID NO: 281915
  Synthetic oligonucleotide

SEQ ID NO: 654462 - DNA, 60 bp, Artificial; identical to SEQ ID NO: 276763
  Synthetic oligonucleotide

SEQ ID NO: 654463 - DNA, 60 bp, Artificial; identical to SEQ ID NO: 280420
  Synthetic oligonucleotide

SEQ ID NO: 654464 - DNA, 55 bp, Artificial; identical to SEQ ID NO: 267856
  Synthetic oligonucleotide

SEQ ID NO: 654465 - DNA, 60 bp, Artificial; identical to SEQ ID NO: 280442
  Synthetic oligonucleotide

SEQ ID NO: 654466 - DNA, 57 bp, Artificial; identical to SEQ ID NO: 279370
  Synthetic oligonucleotide

SEQ ID NO: 654467 - DNA, 51 bp, Artificial; identical to SEQ ID NO: 278777
  Synthetic oligonucleotide

SEQ ID NO: 654468 - DNA, 55 bp, Artificial; identical to SEQ ID NO: 281912
  Synthetic oligonucleotide

SEQ ID NO: 654469 - DNA, 56 bp, Artificial; identical to SEQ ID NO: 279382
  Synthetic oligonucleotide

SEQ ID NO: 654470 - DNA, 51 bp, Artificial; identical to SEQ ID NO: 283469
  Synthetic oligonucleotide

SEQ ID NO: 654471 - DNA, 55 bp, Artificial; identical to SEQ ID NO: 269073
  Synthetic oligonucleotide

SEQ ID NO: 654472 - DNA, 55 bp, Artificial; identical to SEQ ID NO: 281905
  Synthetic oligonucleotide

SEQ ID NO: 654473 - DNA, 51 bp, Artificial; identical to SEQ ID NO: 283470
  Synthetic oligonucleotide

SEQ ID NO: 654474 - DNA, 52 bp, Artificial; identical to SEQ ID NO: 268565
  Synthetic oligonucleotide

SEQ ID NO: 654475 - DNA, 60 bp, Artificial; identical to SEQ ID NO: 279128
  Synthetic oligonucleotide

SEQ ID NO: 654476 - DNA, 55 bp, Artificial; identical to SEQ ID NO: 281900
  Synthetic oligonucleotide

SEQ ID NO: 654477 - DNA, 60 bp, Artificial; identical to SEQ ID NO: 279097
  Synthetic oligonucleotide

SEQ ID NO: 654478 - DNA, 55 bp, Artificial; identical to SEQ ID NO: 281859
  Synthetic oligonucleotide

SEQ ID NO: 654479 - DNA, 52 bp, Artificial; identical to SEQ ID NO: 268566
  Synthetic oligonucleotide

SEQ ID NO: 654480 - DNA, 56 bp, Artificial; identical to SEQ ID NO: 267822
  Synthetic oligonucleotide

SEQ ID NO: 654481 - DNA, 55 bp, Artificial; identical to SEQ ID NO: 270282
  Synthetic oligonucleotide

SEQ ID NO: 654482 - DNA, 55 bp, Artificial; identical to SEQ ID NO: 281857
  Synthetic oligonucleotide

SEQ ID NO: 654483 - DNA, 50 bp, Artificial; identical to SEQ ID NO: 284623
  Synthetic oligonucleotide

SEQ ID NO: 654484 - DNA, 55 bp, Artificial; identical to SEQ ID NO: 268004
  Synthetic oligonucleotide

SEQ ID NO: 654485 - DNA, 59 bp, Artificial; identical to SEQ ID NO: 279005
  Synthetic oligonucleotide

SEQ ID NO: 654486 - DNA, 55 bp, Artificial; identical to SEQ ID NO: 281851
  Synthetic oligonucleotide

SEQ ID NO: 654487 - DNA, 51 bp, Artificial; identical to SEQ ID NO: 268573
  Synthetic oligonucleotide

SEQ ID NO: 654488 - DNA, 55 bp, Artificial; identical to SEQ ID NO: 281877
  Synthetic oligonucleotide

SEQ ID NO: 654489 - DNA, 60 bp, Artificial; identical to SEQ ID NO: 278972
  Synthetic oligonucleotide

SEQ ID NO: 654490 - DNA, 55 bp, Artificial; identical to SEQ ID NO: 281876
  Synthetic oligonucleotide

SEQ ID NO: 654491 - DNA, 56 bp, Artificial; identical to SEQ ID NO: 278968
  Synthetic oligonucleotide

SEQ ID NO: 654492 - DNA, 53 bp, Artificial; identical to SEQ ID NO: 281874
  Synthetic oligonucleotide

SEQ ID NO: 654493 - DNA, 59 bp, Artificial; identical to SEQ ID NO: 278967
  Synthetic oligonucleotide

SEQ ID NO: 654494 - DNA, 55 bp, Artificial; identical to SEQ ID NO: 278530
  Synthetic oligonucleotide

SEQ ID NO: 654495 - DNA, 54 bp, Artificial; identical to SEQ ID NO: 282283
  Synthetic oligonucleotide

SEQ ID NO: 654496 - DNA, 55 bp, Artificial; identical to SEQ ID NO: 281866
  Synthetic oligonucleotide

SEQ ID NO: 654497 - DNA, 57 bp, Artificial; identical to SEQ ID NO: 271802
  Synthetic oligonucleotide

SEQ ID NO: 654498 - DNA, 55 bp, Artificial; identical to SEQ ID NO: 278533
  Synthetic oligonucleotide

SEQ ID NO: 654499 - DNA, 53 bp, Artificial; identical to SEQ ID NO: 282571
  Synthetic oligonucleotide

SEQ ID NO: 654500 - DNA, 55 bp, Artificial; identical to SEQ ID NO: 269016
  Synthetic oligonucleotide

SEQ ID NO: 654501 - DNA, 56 bp, Artificial; identical to SEQ ID NO: 279410
  Synthetic oligonucleotide

SEQ ID NO: 654502 - DNA, 55 bp, Artificial; identical to SEQ ID NO: 281971
  Synthetic oligonucleotide

SEQ ID NO: 654503 - DNA, 55 bp, Artificial; identical to SEQ ID NO: 281967
  Synthetic oligonucleotide

SEQ ID NO: 654504 - DNA, 57 bp, Artificial; identical to SEQ ID NO: 268271
  Synthetic oligonucleotide

SEQ ID NO: 654505 - DNA, 55 bp, Artificial; identical to SEQ ID NO: 281995
  Synthetic oligonucleotide

SEQ ID NO: 654506 - DNA, 55 bp, Artificial; identical to SEQ ID NO: 281994
  Synthetic oligonucleotide

SEQ ID NO: 654507 - DNA, 55 bp, Artificial; identical to SEQ ID NO: 281991
  Synthetic oligonucleotide

SEQ ID NO: 654508 - DNA, 50 bp, Artificial; identical to SEQ ID NO: 284629
  Synthetic oligonucleotide

SEQ ID NO: 654509 - DNA, 55 bp, Artificial; identical to SEQ ID NO: 281985
  Synthetic oligonucleotide

SEQ ID NO: 654510 - DNA, 55 bp, Artificial; identical to SEQ ID NO: 269019
  Synthetic oligonucleotide

SEQ ID NO: 654511 - DNA, 52 bp, Artificial; identical to SEQ ID NO: 269216
  Synthetic oligonucleotide

SEQ ID NO: 654512 - DNA, 55 bp, Artificial; identical to SEQ ID NO: 281979
  Synthetic oligonucleotide

SEQ ID NO: 654513 - DNA, 55 bp, Artificial; identical to SEQ ID NO: 281937
  Synthetic oligonucleotide

SEQ ID NO: 654514 - DNA, 55 bp, Artificial; identical to SEQ ID NO: 269023
  Synthetic oligonucleotide

SEQ ID NO: 654515 - DNA, 55 bp, Artificial; identical to SEQ ID NO: 281921
  Synthetic oligonucleotide

SEQ ID NO: 654516 - DNA, 55 bp, Artificial; identical to SEQ ID NO: 269025
  Synthetic oligonucleotide

SEQ ID NO: 654517 - DNA, 53 bp, Artificial; identical to SEQ ID NO: 282507
  Synthetic oligonucleotide

SEQ ID NO: 654518 - DNA, 55 bp, Artificial; identical to SEQ ID NO: 278550
  Synthetic oligonucleotide

SEQ ID NO: 654519 - DNA, 54 bp, Artificial; identical to SEQ ID NO: 279405
  Synthetic oligonucleotide

SEQ ID NO: 654520 - DNA, 55 bp, Artificial; identical to SEQ ID NO: 281940
  Synthetic oligonucleotide

SEQ ID NO: 654521 - DNA, 53 bp, Artificial; identical to SEQ ID NO: 281741
  Synthetic oligonucleotide

SEQ ID NO: 654522 - DNA, 55 bp, Artificial; identical to SEQ ID NO: 281737
  Synthetic oligonucleotide

SEQ ID NO: 654523 - DNA, 55 bp, Artificial; identical to SEQ ID NO: 268001
  Synthetic oligonucleotide

SEQ ID NO: 654524 - DNA, 55 bp, Artificial; identical to SEQ ID NO: 271818
  Synthetic oligonucleotide

SEQ ID NO: 654525 - DNA, 55 bp, Artificial; identical to SEQ ID NO: 267858
  Synthetic oligonucleotide

SEQ ID NO: 654526 - DNA, 55 bp, Artificial; identical to SEQ ID NO: 281730
  Synthetic oligonucleotide

SEQ ID NO: 654527 - DNA, 55 bp, Artificial; identical to SEQ ID NO: 268464
  Synthetic oligonucleotide

SEQ ID NO: 654528 - DNA, 55 bp, Artificial; identical to SEQ ID NO: 268000
  Synthetic oligonucleotide

SEQ ID NO: 654529 - DNA, 60 bp, Artificial; identical to SEQ ID NO: 285626
  Synthetic oligonucleotide

SEQ ID NO: 654530 - DNA, 55 bp, Artificial; identical to SEQ ID NO: 286237
  Synthetic oligonucleotide

SEQ ID NO: 654531 - DNA, 60 bp, Artificial; identical to SEQ ID NO: 285627
  Synthetic oligonucleotide

SEQ ID NO: 654532 - DNA, 55 bp, Artificial; identical to SEQ ID NO: 281766
  Synthetic oligonucleotide

SEQ ID NO: 654533 - DNA, 55 bp, Artificial; identical to SEQ ID NO: 268475
  Synthetic oligonucleotide

SEQ ID NO: 654534 - DNA, 55 bp, Artificial; identical to SEQ ID NO: 267859
  Synthetic oligonucleotide

SEQ ID NO: 654535 - DNA, 55 bp, Artificial; identical to SEQ ID NO: 281763
  Synthetic oligonucleotide

SEQ ID NO: 654536 - DNA, 55 bp, Artificial; identical to SEQ ID NO: 278554
  Synthetic oligonucleotide

SEQ ID NO: 654537 - DNA, 55 bp, Artificial; identical to SEQ ID NO: 281760
  Synthetic oligonucleotide

SEQ ID NO: 654538 - DNA, 55 bp, Artificial; identical to SEQ ID NO: 281756
  Synthetic oligonucleotide

SEQ ID NO: 654539 - DNA, 55 bp, Artificial; identical to SEQ ID NO: 281755
  Synthetic oligonucleotide

SEQ ID NO: 654540 - DNA, 55 bp, Artificial; identical to SEQ ID NO: 277991
  Synthetic oligonucleotide

SEQ ID NO: 654541 - DNA, 51 bp, Artificial; identical to SEQ ID NO: 268582
  Synthetic oligonucleotide

SEQ ID NO: 654542 - DNA, 55 bp, Artificial; identical to SEQ ID NO: 286248
  Synthetic oligonucleotide

SEQ ID NO: 654543 - DNA, 55 bp, Artificial; identical to SEQ ID NO: 269680
  Synthetic oligonucleotide

SEQ ID NO: 654544 - DNA, 55 bp, Artificial; identical to SEQ ID NO: 286250
  Synthetic oligonucleotide

SEQ ID NO: 654545 - DNA, 55 bp, Artificial; identical to SEQ ID NO: 281710
  Synthetic oligonucleotide

SEQ ID NO: 654546 - DNA, 55 bp, Artificial; identical to SEQ ID NO: 277995
  Synthetic oligonucleotide

SEQ ID NO: 654547 - DNA, 53 bp, Artificial; identical to SEQ ID NO: 282361
  Synthetic oligonucleotide

SEQ ID NO: 654548 - DNA, 55 bp, Artificial; identical to SEQ ID NO: 281702
  Synthetic oligonucleotide

SEQ ID NO: 654549 - DNA, 55 bp, Artificial; identical to SEQ ID NO: 281696
  Synthetic oligonucleotide

SEQ ID NO: 654550 - DNA, 55 bp, Artificial; identical to SEQ ID NO: 281694
  Synthetic oligonucleotide

SEQ ID NO: 654551 - DNA, 58 bp, Artificial; identical to SEQ ID NO: 279227
  Synthetic oligonucleotide

SEQ ID NO: 654552 - DNA, 55 bp, Artificial; identical to SEQ ID NO: 281692
  Synthetic oligonucleotide

SEQ ID NO: 654553 - DNA, 55 bp, Artificial; identical to SEQ ID NO: 286249
  Synthetic oligonucleotide

SEQ ID NO: 654554 - DNA, 55 bp, Artificial; identical to SEQ ID NO: 281726
  Synthetic oligonucleotide

SEQ ID NO: 654555 - DNA, 52 bp, Artificial; identical to SEQ ID NO: 268277
  Synthetic oligonucleotide

SEQ ID NO: 654556 - DNA, 55 bp, Artificial; identical to SEQ ID NO: 281714
  Synthetic oligonucleotide

SEQ ID NO: 654557 - DNA, 51 bp, Artificial; identical to SEQ ID NO: 270373
  Synthetic oligonucleotide

SEQ ID NO: 654558 - DNA, 60 bp, Artificial; identical to SEQ ID NO: 268278
  Synthetic oligonucleotide

SEQ ID NO: 654559 - DNA, 54 bp, Artificial; identical to SEQ ID NO: 268533
  Synthetic oligonucleotide

SEQ ID NO: 654560 - DNA, 55 bp, Artificial; identical to SEQ ID NO: 278000
  Synthetic oligonucleotide

SEQ ID NO: 654561 - DNA, 60 bp, Artificial; identical to SEQ ID NO: 285596
  Synthetic oligonucleotide

SEQ ID NO: 654562 - DNA, 55 bp, Artificial; identical to SEQ ID NO: 281812
  Synthetic oligonucleotide

SEQ ID NO: 654563 - DNA, 55 bp, Artificial; identical to SEQ ID NO: 281811
  Synthetic oligonucleotide

SEQ ID NO: 654564 - DNA, 55 bp, Artificial; identical to SEQ ID NO: 281840
  Synthetic oligonucleotide

SEQ ID NO: 654565 - DNA, 51 bp, Artificial; identical to SEQ ID NO: 278793
  Synthetic oligonucleotide

SEQ ID NO: 654566 - DNA, 55 bp, Artificial; identical to SEQ ID NO: 281835
  Synthetic oligonucleotide

SEQ ID NO: 654567 - DNA, 55 bp, Artificial; identical to SEQ ID NO: 281833
  Synthetic oligonucleotide

SEQ ID NO: 654568 - DNA, 59 bp, Artificial; identical to SEQ ID NO: 279203
  Synthetic oligonucleotide

SEQ ID NO: 654569 - DNA, 55 bp, Artificial; identical to SEQ ID NO: 269990
  Synthetic oligonucleotide

SEQ ID NO: 654570 - DNA, 55 bp, Artificial; identical to SEQ ID NO: 269034
  Synthetic oligonucleotide

SEQ ID NO: 654571 - DNA, 52 bp, Artificial; identical to SEQ ID NO: 270371
  Synthetic oligonucleotide

SEQ ID NO: 654572 - DNA, 49 bp, Artificial; identical to SEQ ID NO: 285776
  Synthetic oligonucleotide

SEQ ID NO: 654573 - DNA, 55 bp, Artificial; identical to SEQ ID NO: 270188
  Synthetic oligonucleotide

SEQ ID NO: 654574 - DNA, 54 bp, Artificial; identical to SEQ ID NO: 270199
  Synthetic oligonucleotide

SEQ ID NO: 654575 - DNA, 55 bp, Artificial; identical to SEQ ID NO: 267998
  Synthetic oligonucleotide

SEQ ID NO: 654576 - DNA, 55 bp, Artificial; identical to SEQ ID NO: 281783
  Synthetic oligonucleotide

SEQ ID NO: 654577 - DNA, 55 bp, Artificial; identical to SEQ ID NO: 267860
  Synthetic oligonucleotide

SEQ ID NO: 654578 - DNA, 55 bp, Artificial; identical to SEQ ID NO: 279463
  Synthetic oligonucleotide

SEQ ID NO: 654579 - DNA, 55 bp, Artificial; identical to SEQ ID NO: 281782
  Synthetic oligonucleotide

SEQ ID NO: 654580 - DNA, 55 bp, Artificial; identical to SEQ ID NO: 269036
  Synthetic oligonucleotide

SEQ ID NO: 654581 - DNA, 50 bp, Artificial; identical to SEQ ID NO: 284705
  Synthetic oligonucleotide

SEQ ID NO: 654582 - DNA, 60 bp, Artificial; identical to SEQ ID NO: 285756
  Synthetic oligonucleotide

SEQ ID NO: 654583 - DNA, 55 bp, Artificial; identical to SEQ ID NO: 281778
  Synthetic oligonucleotide

SEQ ID NO: 654584 - DNA, 55 bp, Artificial; identical to SEQ ID NO: 278015
  Synthetic oligonucleotide

SEQ ID NO: 654585 - DNA, 52 bp, Artificial; identical to SEQ ID NO: 268564
  Synthetic oligonucleotide

SEQ ID NO: 654586 - DNA, 55 bp, Artificial; identical to SEQ ID NO: 278018
  Synthetic oligonucleotide

SEQ ID NO: 654587 - DNA, 59 bp, Artificial; identical to SEQ ID NO: 285810
  Synthetic oligonucleotide

SEQ ID NO: 654588 - DNA, 55 bp, Artificial; identical to SEQ ID NO: 281805
  Synthetic oligonucleotide

SEQ ID NO: 654589 - DNA, 58 bp, Artificial; identical to SEQ ID NO: 285813
  Synthetic oligonucleotide

SEQ ID NO: 654590 - DNA, 51 bp, Artificial; identical to SEQ ID NO: 283560
  Synthetic oligonucleotide

SEQ ID NO: 654591 - DNA, 55 bp, Artificial; identical to SEQ ID NO: 281802
  Synthetic oligonucleotide

SEQ ID NO: 654592 - DNA, 55 bp, Artificial; identical to SEQ ID NO: 281801
  Synthetic oligonucleotide

SEQ ID NO: 654593 - DNA, 55 bp, Artificial; identical to SEQ ID NO: 281799
  Synthetic oligonucleotide

SEQ ID NO: 654594 - DNA, 55 bp, Artificial; identical to SEQ ID NO: 281795
  Synthetic oligonucleotide

SEQ ID NO: 654595 - DNA, 55 bp, Artificial; identical to SEQ ID NO: 281791
  Synthetic oligonucleotide

SEQ ID NO: 654596 - DNA, 51 bp, Artificial; identical to SEQ ID NO: 268568
  Synthetic oligonucleotide

SEQ ID NO: 654597 - DNA, 55 bp, Artificial; identical to SEQ ID NO: 286243
  Synthetic oligonucleotide

SEQ ID NO: 654598 - DNA, 57 bp, Artificial; identical to SEQ ID NO: 268324
  Synthetic oligonucleotide

SEQ ID NO: 654599 - DNA, 55 bp, Artificial; identical to SEQ ID NO: 277966
  Synthetic oligonucleotide

SEQ ID NO: 654600 - DNA, 53 bp, Artificial; identical to SEQ ID NO: 270281
  Synthetic oligonucleotide

SEQ ID NO: 654601 - DNA, 57 bp, Artificial; identical to SEQ ID NO: 268342
  Synthetic oligonucleotide

SEQ ID NO: 654602 - DNA, 55 bp, Artificial; identical to SEQ ID NO: 277968
  Synthetic oligonucleotide

SEQ ID NO: 654603 - DNA, 54 bp, Artificial; identical to SEQ ID NO: 278646
  Synthetic oligonucleotide

SEQ ID NO: 654604 - DNA, 54 bp, Artificial; identical to SEQ ID NO: 269039
  Synthetic oligonucleotide

SEQ ID NO: 654605 - DNA, 59 bp, Artificial; identical to SEQ ID NO: 286055
  Synthetic oligonucleotide

SEQ ID NO: 654606 - DNA, 51 bp, Artificial; identical to SEQ ID NO: 283566
  Synthetic oligonucleotide

SEQ ID NO: 654607 - DNA, 56 bp, Artificial; identical to SEQ ID NO: 285710
  Synthetic oligonucleotide

SEQ ID NO: 654608 - DNA, 55 bp, Artificial; identical to SEQ ID NO: 277970
  Synthetic oligonucleotide

SEQ ID NO: 654609 - DNA, 51 bp, Artificial; identical to SEQ ID NO: 283567
  Synthetic oligonucleotide

SEQ ID NO: 654610 - DNA, 55 bp, Artificial; identical to SEQ ID NO: 285689
  Synthetic oligonucleotide

SEQ ID NO: 654611 - DNA, 55 bp, Artificial; identical to SEQ ID NO: 282124
  Synthetic oligonucleotide

SEQ ID NO: 654612 - DNA, 52 bp, Artificial; identical to SEQ ID NO: 282914
  Synthetic oligonucleotide

SEQ ID NO: 654613 - DNA, 54 bp, Artificial; identical to SEQ ID NO: 282318
  Synthetic oligonucleotide

SEQ ID NO: 654614 - DNA, 60 bp, Artificial; identical to SEQ ID NO: 285741
  Synthetic oligonucleotide

SEQ ID NO: 654615 - DNA, 54 bp, Artificial; identical to SEQ ID NO: 279377
  Synthetic oligonucleotide

SEQ ID NO: 654616 - DNA, 51 bp, Artificial; identical to SEQ ID NO: 283569
  Synthetic oligonucleotide

SEQ ID NO: 654617 - DNA, 55 bp, Artificial; identical to SEQ ID NO: 282144
  Synthetic oligonucleotide

SEQ ID NO: 654618 - DNA, 55 bp, Artificial; identical to SEQ ID NO: 277972
  Synthetic oligonucleotide

SEQ ID NO: 654619 - DNA, 54 bp, Artificial; identical to SEQ ID NO: 282027
  Synthetic oligonucleotide

SEQ ID NO: 654620 - DNA, 54 bp, Artificial; identical to SEQ ID NO: 282430
  Synthetic oligonucleotide

SEQ ID NO: 654621 - DNA, 53 bp, Artificial; identical to SEQ ID NO: 269040
  Synthetic oligonucleotide

SEQ ID NO: 654622 - DNA, 54 bp, Artificial; identical to SEQ ID NO: 285727
  Synthetic oligonucleotide

SEQ ID NO: 654623 - DNA, 52 bp, Artificial; identical to SEQ ID NO: 282894
  Synthetic oligonucleotide

SEQ ID NO: 654624 - DNA, 53 bp, Artificial; identical to SEQ ID NO: 282437
  Synthetic oligonucleotide

SEQ ID NO: 654625 - DNA, 54 bp, Artificial; identical to SEQ ID NO: 277973
  Synthetic oligonucleotide

SEQ ID NO: 654626 - DNA, 53 bp, Artificial; identical to SEQ ID NO: 267882
  Synthetic oligonucleotide

SEQ ID NO: 654627 - DNA, 54 bp, Artificial; identical to SEQ ID NO: 282032
  Synthetic oligonucleotide

SEQ ID NO: 654628 - DNA, 56 bp, Artificial; identical to SEQ ID NO: 268364
  Synthetic oligonucleotide

SEQ ID NO: 654629 - DNA, 54 bp, Artificial; identical to SEQ ID NO: 282383
  Synthetic oligonucleotide

SEQ ID NO: 654630 - DNA, 55 bp, Artificial; identical to SEQ ID NO: 282041
  Synthetic oligonucleotide

SEQ ID NO: 654631 - DNA, 55 bp, Artificial; identical to SEQ ID NO: 282043
  Synthetic oligonucleotide

SEQ ID NO: 654632 - DNA, 55 bp, Artificial; identical to SEQ ID NO: 282045
  Synthetic oligonucleotide

SEQ ID NO: 654633 - DNA, 55 bp, Artificial; identical to SEQ ID NO: 267861
  Synthetic oligonucleotide

SEQ ID NO: 654634 - DNA, 55 bp, Artificial; identical to SEQ ID NO: 282050
  Synthetic oligonucleotide

SEQ ID NO: 654635 - DNA, 52 bp, Artificial; identical to SEQ ID NO: 276779
  Synthetic oligonucleotide

SEQ ID NO: 654636 - DNA, 54 bp, Artificial; identical to SEQ ID NO: 282345
  Synthetic oligonucleotide

SEQ ID NO: 654637 - DNA, 55 bp, Artificial; identical to SEQ ID NO: 282006
  Synthetic oligonucleotide

SEQ ID NO: 654638 - DNA, 55 bp, Artificial; identical to SEQ ID NO: 282009
  Synthetic oligonucleotide

SEQ ID NO: 654639 - DNA, 53 bp, Artificial; identical to SEQ ID NO: 282555
  Synthetic oligonucleotide

SEQ ID NO: 654640 - DNA, 53 bp, Artificial; identical to SEQ ID NO: 282490
  Synthetic oligonucleotide

SEQ ID NO: 654641 - DNA, 55 bp, Artificial; identical to SEQ ID NO: 269042
  Synthetic oligonucleotide

SEQ ID NO: 654642 - DNA, 55 bp, Artificial; identical to SEQ ID NO: 267862
  Synthetic oligonucleotide

SEQ ID NO: 654643 - DNA, 57 bp, Artificial; identical to SEQ ID NO: 285536
  Synthetic oligonucleotide

SEQ ID NO: 654644 - DNA, 55 bp, Artificial; identical to SEQ ID NO: 269044
  Synthetic oligonucleotide

SEQ ID NO: 654645 - DNA, 59 bp, Artificial; identical to SEQ ID NO: 268617
  Synthetic oligonucleotide

SEQ ID NO: 654646 - DNA, 58 bp, Artificial; identical to SEQ ID NO: 285548
  Synthetic oligonucleotide

SEQ ID NO: 654647 - DNA, 55 bp, Artificial; identical to SEQ ID NO: 282093
  Synthetic oligonucleotide

SEQ ID NO: 654648 - DNA, 55 bp, Artificial; identical to SEQ ID NO: 282095
  Synthetic oligonucleotide

SEQ ID NO: 654649 - DNA, 55 bp, Artificial; identical to SEQ ID NO: 277982
  Synthetic oligonucleotide

SEQ ID NO: 654650 - DNA, 55 bp, Artificial; identical to SEQ ID NO: 277983
  Synthetic oligonucleotide

SEQ ID NO: 654651 - DNA, 53 bp, Artificial; identical to SEQ ID NO: 282504
  Synthetic oligonucleotide

SEQ ID NO: 654652 - DNA, 55 bp, Artificial; identical to SEQ ID NO: 269045
  Synthetic oligonucleotide

SEQ ID NO: 654653 - DNA, 55 bp, Artificial; identical to SEQ ID NO: 270337
  Synthetic oligonucleotide

SEQ ID NO: 654654 - DNA, 55 bp, Artificial; identical to SEQ ID NO: 269046
  Synthetic oligonucleotide

SEQ ID NO: 654655 - DNA, 52 bp, Artificial; identical to SEQ ID NO: 282818
  Synthetic oligonucleotide

SEQ ID NO: 654656 - DNA, 52 bp, Artificial; identical to SEQ ID NO: 285600
  Synthetic oligonucleotide

SEQ ID NO: 654657 - DNA, 55 bp, Artificial; identical to SEQ ID NO: 282101
  Synthetic oligonucleotide

SEQ ID NO: 654658 - DNA, 60 bp, Artificial; identical to SEQ ID NO: 285622
  Synthetic oligonucleotide

SEQ ID NO: 654659 - DNA, 53 bp, Artificial; identical to SEQ ID NO: 282106
  Synthetic oligonucleotide

SEQ ID NO: 654660 - DNA, 55 bp, Artificial; identical to SEQ ID NO: 282110
  Synthetic oligonucleotide

SEQ ID NO: 654661 - DNA, 51 bp, Artificial; identical to SEQ ID NO: 283580
  Synthetic oligonucleotide

SEQ ID NO: 654662 - DNA, 55 bp, Artificial; identical to SEQ ID NO: 282111
  Synthetic oligonucleotide

SEQ ID NO: 654663 - DNA, 53 bp, Artificial; identical to SEQ ID NO: 277990
  Synthetic oligonucleotide

SEQ ID NO: 654664 - DNA, 55 bp, Artificial; identical to SEQ ID NO: 268616
  Synthetic oligonucleotide

SEQ ID NO: 654665 - DNA, 55 bp, Artificial; identical to SEQ ID NO: 278049
  Synthetic oligonucleotide

SEQ ID NO: 654666 - DNA, 60 bp, Artificial; identical to SEQ ID NO: 279062
  Synthetic oligonucleotide

SEQ ID NO: 654667 - DNA, 60 bp, Artificial; identical to SEQ ID NO: 279122
  Synthetic oligonucleotide

SEQ ID NO: 654668 - DNA, 55 bp, Artificial; identical to SEQ ID NO: 286264
  Synthetic oligonucleotide

SEQ ID NO: 654669 - DNA, 55 bp, Artificial; identical to SEQ ID NO: 282061
  Synthetic oligonucleotide

SEQ ID NO: 654670 - DNA, 55 bp, Artificial; identical to SEQ ID NO: 269123
  Synthetic oligonucleotide

SEQ ID NO: 654671 - DNA, 55 bp, Artificial; identical to SEQ ID NO: 282063
  Synthetic oligonucleotide

SEQ ID NO: 654672 - DNA, 55 bp, Artificial; identical to SEQ ID NO: 278055
  Synthetic oligonucleotide

SEQ ID NO: 654673 - DNA, 55 bp, Artificial; identical to SEQ ID NO: 278056
  Synthetic oligonucleotide

SEQ ID NO: 654674 - DNA, 55 bp, Artificial; identical to SEQ ID NO: 268457
  Synthetic oligonucleotide

SEQ ID NO: 654675 - DNA, 55 bp, Artificial; identical to SEQ ID NO: 286262
  Synthetic oligonucleotide

SEQ ID NO: 654676 - DNA, 55 bp, Artificial; identical to SEQ ID NO: 282068
  Synthetic oligonucleotide

SEQ ID NO: 654677 - DNA, 58 bp, Artificial; identical to SEQ ID NO: 285844
  Synthetic oligonucleotide

SEQ ID NO: 654678 - DNA, 55 bp, Artificial; identical to SEQ ID NO: 282074
  Synthetic oligonucleotide

SEQ ID NO: 654679 - DNA, 54 bp, Artificial; identical to SEQ ID NO: 271678
  Synthetic oligonucleotide

SEQ ID NO: 654680 - DNA, 55 bp, Artificial; identical to SEQ ID NO: 282079
  Synthetic oligonucleotide

SEQ ID NO: 654681 - DNA, 55 bp, Artificial; identical to SEQ ID NO: 282080
  Synthetic oligonucleotide

SEQ ID NO: 654682 - DNA, 50 bp, Artificial; identical to SEQ ID NO: 268591
  Synthetic oligonucleotide

SEQ ID NO: 654683 - DNA, 55 bp, Artificial; identical to SEQ ID NO: 282082
  Synthetic oligonucleotide

SEQ ID NO: 654684 - DNA, 55 bp, Artificial; identical to SEQ ID NO: 282083
  Synthetic oligonucleotide

SEQ ID NO: 654685 - DNA, 55 bp, Artificial; identical to SEQ ID NO: 282085
  Synthetic oligonucleotide

SEQ ID NO: 654686 - DNA, 55 bp, Artificial; identical to SEQ ID NO: 279729
  Synthetic oligonucleotide

SEQ ID NO: 654687 - DNA, 55 bp, Artificial; identical to SEQ ID NO: 278060
  Synthetic oligonucleotide

SEQ ID NO: 654688 - DNA, 55 bp, Artificial; identical to SEQ ID NO: 279730
  Synthetic oligonucleotide

SEQ ID NO: 654689 - DNA, 55 bp, Artificial; identical to SEQ ID NO: 286259
  Synthetic oligonucleotide

SEQ ID NO: 654690 - DNA, 55 bp, Artificial; identical to SEQ ID NO: 279733
  Synthetic oligonucleotide

SEQ ID NO: 654691 - DNA, 55 bp, Artificial; identical to SEQ ID NO: 279735
  Synthetic oligonucleotide

SEQ ID NO: 654692 - DNA, 55 bp, Artificial; identical to SEQ ID NO: 279736
  Synthetic oligonucleotide

SEQ ID NO: 654693 - DNA, 54 bp, Artificial; identical to SEQ ID NO: 286312
  Synthetic oligonucleotide

SEQ ID NO: 654694 - DNA, 54 bp, Artificial; identical to SEQ ID NO: 282290
  Synthetic oligonucleotide

SEQ ID NO: 654695 - DNA, 55 bp, Artificial; identical to SEQ ID NO: 267863
  Synthetic oligonucleotide

SEQ ID NO: 654696 - DNA, 50 bp, Artificial; identical to SEQ ID NO: 279738
  Synthetic oligonucleotide

SEQ ID NO: 654697 - DNA, 55 bp, Artificial; identical to SEQ ID NO: 279740
  Synthetic oligonucleotide

SEQ ID NO: 654698 - DNA, 57 bp, Artificial; identical to SEQ ID NO: 267809
  Synthetic oligonucleotide

SEQ ID NO: 654699 - DNA, 55 bp, Artificial; identical to SEQ ID NO: 279741
  Synthetic oligonucleotide

SEQ ID NO: 654700 - DNA, 55 bp, Artificial; identical to SEQ ID NO: 279743
  Synthetic oligonucleotide

SEQ ID NO: 654701 - DNA, 55 bp, Artificial; identical to SEQ ID NO: 279745
  Synthetic oligonucleotide

SEQ ID NO: 654702 - DNA, 60 bp, Artificial; identical to SEQ ID NO: 279055
  Synthetic oligonucleotide

SEQ ID NO: 654703 - DNA, 53 bp, Artificial; identical to SEQ ID NO: 279117
  Synthetic oligonucleotide

SEQ ID NO: 654704 - DNA, 55 bp, Artificial; identical to SEQ ID NO: 279749
  Synthetic oligonucleotide

SEQ ID NO: 654705 - DNA, 55 bp, Artificial; identical to SEQ ID NO: 268486
  Synthetic oligonucleotide

SEQ ID NO: 654706 - DNA, 55 bp, Artificial; identical to SEQ ID NO: 279750
  Synthetic oligonucleotide

SEQ ID NO: 654707 - DNA, 55 bp, Artificial; identical to SEQ ID NO: 286252
  Synthetic oligonucleotide

SEQ ID NO: 654708 - DNA, 55 bp, Artificial; identical to SEQ ID NO: 279702
  Synthetic oligonucleotide

SEQ ID NO: 654709 - DNA, 55 bp, Artificial; identical to SEQ ID NO: 279704
  Synthetic oligonucleotide

SEQ ID NO: 654710 - DNA, 55 bp, Artificial; identical to SEQ ID NO: 270336
  Synthetic oligonucleotide

SEQ ID NO: 654711 - DNA, 55 bp, Artificial; identical to SEQ ID NO: 279705
  Synthetic oligonucleotide

SEQ ID NO: 654712 - DNA, 58 bp, Artificial; identical to SEQ ID NO: 268615
  Synthetic oligonucleotide

SEQ ID NO: 654713 - DNA, 58 bp, Artificial; identical to SEQ ID NO: 285586
  Synthetic oligonucleotide

SEQ ID NO: 654714 - DNA, 55 bp, Artificial; identical to SEQ ID NO: 286455
  Synthetic oligonucleotide

SEQ ID NO: 654715 - DNA, 55 bp, Artificial; identical to SEQ ID NO: 279713
  Synthetic oligonucleotide

SEQ ID NO: 654716 - DNA, 60 bp, Artificial; identical to SEQ ID NO: 285775
  Synthetic oligonucleotide

SEQ ID NO: 654717 - DNA, 52 bp, Artificial; identical to SEQ ID NO: 282929
  Synthetic oligonucleotide

SEQ ID NO: 654718 - DNA, 55 bp, Artificial; identical to SEQ ID NO: 279715
  Synthetic oligonucleotide

SEQ ID NO: 654719 - DNA, 55 bp, Artificial; identical to SEQ ID NO: 279716
  Synthetic oligonucleotide

SEQ ID NO: 654720 - DNA, 55 bp, Artificial; identical to SEQ ID NO: 279717
  Synthetic oligonucleotide

SEQ ID NO: 654721 - DNA, 54 bp, Artificial; identical to SEQ ID NO: 268528
  Synthetic oligonucleotide

SEQ ID NO: 654722 - DNA, 53 bp, Artificial; identical to SEQ ID NO: 279725
  Synthetic oligonucleotide

SEQ ID NO: 654723 - DNA, 55 bp, Artificial; identical to SEQ ID NO: 286208
  Synthetic oligonucleotide

SEQ ID NO: 654724 - DNA, 54 bp, Artificial; identical to SEQ ID NO: 279779
  Synthetic oligonucleotide

SEQ ID NO: 654725 - DNA, 53 bp, Artificial; identical to SEQ ID NO: 279780
  Synthetic oligonucleotide

SEQ ID NO: 654726 - DNA, 55 bp, Artificial; identical to SEQ ID NO: 267993
  Synthetic oligonucleotide

SEQ ID NO: 654727 - DNA, 55 bp, Artificial; identical to SEQ ID NO: 279781
  Synthetic oligonucleotide

SEQ ID NO: 654728 - DNA, 55 bp, Artificial; identical to SEQ ID NO: 279782
  Synthetic oligonucleotide

SEQ ID NO: 654729 - DNA, 55 bp, Artificial; identical to SEQ ID NO: 279783
  Synthetic oligonucleotide

SEQ ID NO: 654730 - DNA, 55 bp, Artificial; identical to SEQ ID NO: 279784
  Synthetic oligonucleotide

SEQ ID NO: 654731 - DNA, 55 bp, Artificial; identical to SEQ ID NO: 279785
  Synthetic oligonucleotide

SEQ ID NO: 654732 - DNA, 55 bp, Artificial; identical to SEQ ID NO: 279787
  Synthetic oligonucleotide

SEQ ID NO: 654733 - DNA, 59 bp, Artificial; identical to SEQ ID NO: 285722
  Synthetic oligonucleotide

SEQ ID NO: 654734 - DNA, 55 bp, Artificial; identical to SEQ ID NO: 269112
  Synthetic oligonucleotide

SEQ ID NO: 654735 - DNA, 59 bp, Artificial; identical to SEQ ID NO: 285714
  Synthetic oligonucleotide

SEQ ID NO: 654736 - DNA, 55 bp, Artificial; identical to SEQ ID NO: 279789
  Synthetic oligonucleotide

SEQ ID NO: 654737 - DNA, 55 bp, Artificial; identical to SEQ ID NO: 276749
  Synthetic oligonucleotide

SEQ ID NO: 654738 - DNA, 55 bp, Artificial; identical to SEQ ID NO: 279790
  Synthetic oligonucleotide

SEQ ID NO: 654739 - DNA, 54 bp, Artificial; identical to SEQ ID NO: 279792
  Synthetic oligonucleotide

SEQ ID NO: 654740 - DNA, 55 bp, Artificial; identical to SEQ ID NO: 279793
  Synthetic oligonucleotide

SEQ ID NO: 654741 - DNA, 55 bp, Artificial; identical to SEQ ID NO: 278075
  Synthetic oligonucleotide

SEQ ID NO: 654742 - DNA, 58 bp, Artificial; identical to SEQ ID NO: 268331
  Synthetic oligonucleotide

SEQ ID NO: 654743 - DNA, 55 bp, Artificial; identical to SEQ ID NO: 267865
  Synthetic oligonucleotide

SEQ ID NO: 654744 - DNA, 55 bp, Artificial; identical to SEQ ID NO: 278077
  Synthetic oligonucleotide

SEQ ID NO: 654745 - DNA, 55 bp, Artificial; identical to SEQ ID NO: 278021
  Synthetic oligonucleotide

SEQ ID NO: 654746 - DNA, 54 bp, Artificial; identical to SEQ ID NO: 268479
  Synthetic oligonucleotide

SEQ ID NO: 654747 - DNA, 55 bp, Artificial; identical to SEQ ID NO: 279769
  Synthetic oligonucleotide

SEQ ID NO: 654748 - DNA, 56 bp, Artificial; identical to SEQ ID NO: 285786
  Synthetic oligonucleotide

SEQ ID NO: 654749 - DNA, 54 bp, Artificial; identical to SEQ ID NO: 285780
  Synthetic oligonucleotide

SEQ ID NO: 654750 - DNA, 55 bp, Artificial; identical to SEQ ID NO: 279773
  Synthetic oligonucleotide

SEQ ID NO: 654751 - DNA, 55 bp, Artificial; identical to SEQ ID NO: 271676
  Synthetic oligonucleotide

SEQ ID NO: 654752 - DNA, 55 bp, Artificial; identical to SEQ ID NO: 278027
  Synthetic oligonucleotide

SEQ ID NO: 654753 - DNA, 55 bp, Artificial; identical to SEQ ID NO: 279777
  Synthetic oligonucleotide

SEQ ID NO: 654754 - DNA, 55 bp, Artificial; identical to SEQ ID NO: 279626
  Synthetic oligonucleotide

SEQ ID NO: 654755 - DNA, 60 bp, Artificial; identical to SEQ ID NO: 285561
  Synthetic oligonucleotide

SEQ ID NO: 654756 - DNA, 56 bp, Artificial; identical to SEQ ID NO: 285598
  Synthetic oligonucleotide

SEQ ID NO: 654757 - DNA, 55 bp, Artificial; identical to SEQ ID NO: 279628
  Synthetic oligonucleotide

SEQ ID NO: 654758 - DNA, 55 bp, Artificial; identical to SEQ ID NO: 279634
  Synthetic oligonucleotide

SEQ ID NO: 654759 - DNA, 55 bp, Artificial; identical to SEQ ID NO: 279636
  Synthetic oligonucleotide

SEQ ID NO: 654760 - DNA, 54 bp, Artificial; identical to SEQ ID NO: 285556
  Synthetic oligonucleotide

SEQ ID NO: 654761 - DNA, 54 bp, Artificial; identical to SEQ ID NO: 285553
  Synthetic oligonucleotide

SEQ ID NO: 654762 - DNA, 54 bp, Artificial; identical to SEQ ID NO: 279638
  Synthetic oligonucleotide

SEQ ID NO: 654763 - DNA, 55 bp, Artificial; identical to SEQ ID NO: 279640
  Synthetic oligonucleotide

SEQ ID NO: 654764 - DNA, 55 bp, Artificial; identical to SEQ ID NO: 279644
  Synthetic oligonucleotide

SEQ ID NO: 654765 - DNA, 55 bp, Artificial; identical to SEQ ID NO: 279599
  Synthetic oligonucleotide

SEQ ID NO: 654766 - DNA, 54 bp, Artificial; identical to SEQ ID NO: 279600
  Synthetic oligonucleotide

SEQ ID NO: 654767 - DNA, 55 bp, Artificial; identical to SEQ ID NO: 286206
  Synthetic oligonucleotide

SEQ ID NO: 654768 - DNA, 55 bp, Artificial; identical to SEQ ID NO: 268476
  Synthetic oligonucleotide

SEQ ID NO: 654769 - DNA, 54 bp, Artificial; identical to SEQ ID NO: 278658
  Synthetic oligonucleotide

SEQ ID NO: 654770 - DNA, 55 bp, Artificial; identical to SEQ ID NO: 278034
  Synthetic oligonucleotide

SEQ ID NO: 654771 - DNA, 56 bp, Artificial; identical to SEQ ID NO: 285599
  Synthetic oligonucleotide

SEQ ID NO: 654772 - DNA, 52 bp, Artificial; identical to SEQ ID NO: 278774
  Synthetic oligonucleotide

SEQ ID NO: 654773 - DNA, 56 bp, Artificial; identical to SEQ ID NO: 279430
  Synthetic oligonucleotide

SEQ ID NO: 654774 - DNA, 55 bp, Artificial; identical to SEQ ID NO: 269080
  Synthetic oligonucleotide

SEQ ID NO: 654775 - DNA, 55 bp, Artificial; identical to SEQ ID NO: 279608
  Synthetic oligonucleotide

SEQ ID NO: 654776 - DNA, 53 bp, Artificial; identical to SEQ ID NO: 279614
  Synthetic oligonucleotide

SEQ ID NO: 654777 - DNA, 58 bp, Artificial; identical to SEQ ID NO: 279072
  Synthetic oligonucleotide

SEQ ID NO: 654778 - DNA, 55 bp, Artificial; identical to SEQ ID NO: 278037
  Synthetic oligonucleotide

SEQ ID NO: 654779 - DNA, 53 bp, Artificial; identical to SEQ ID NO: 282399
  Synthetic oligonucleotide

SEQ ID NO: 654780 - DNA, 60 bp, Artificial; identical to SEQ ID NO: 279070
  Synthetic oligonucleotide

SEQ ID NO: 654781 - DNA, 50 bp, Artificial; identical to SEQ ID NO: 270399
  Synthetic oligonucleotide

SEQ ID NO: 654782 - DNA, 60 bp, Artificial; identical to SEQ ID NO: 279130
  Synthetic oligonucleotide

SEQ ID NO: 654783 - DNA, 54 bp, Artificial; identical to SEQ ID NO: 268470
  Synthetic oligonucleotide

SEQ ID NO: 654784 - DNA, 58 bp, Artificial; identical to SEQ ID NO: 279103
  Synthetic oligonucleotide

SEQ ID NO: 654785 - DNA, 55 bp, Artificial; identical to SEQ ID NO: 268469
  Synthetic oligonucleotide

SEQ ID NO: 654786 - DNA, 55 bp, Artificial; identical to SEQ ID NO: 268467
  Synthetic oligonucleotide

SEQ ID NO: 654787 - DNA, 60 bp, Artificial; identical to SEQ ID NO: 279110
  Synthetic oligonucleotide

SEQ ID NO: 654788 - DNA, 60 bp, Artificial; identical to SEQ ID NO: 278935
  Synthetic oligonucleotide

SEQ ID NO: 654789 - DNA, 54 bp, Artificial; identical to SEQ ID NO: 279676
  Synthetic oligonucleotide

SEQ ID NO: 654790 - DNA, 55 bp, Artificial; identical to SEQ ID NO: 279677
  Synthetic oligonucleotide

SEQ ID NO: 654791 - DNA, 53 bp, Artificial; identical to SEQ ID NO: 282497
  Synthetic oligonucleotide

SEQ ID NO: 654792 - DNA, 55 bp, Artificial; identical to SEQ ID NO: 270280
  Synthetic oligonucleotide

SEQ ID NO: 654793 - DNA, 59 bp, Artificial; identical to SEQ ID NO: 278963
  Synthetic oligonucleotide

SEQ ID NO: 654794 - DNA, 59 bp, Artificial; identical to SEQ ID NO: 278966
  Synthetic oligonucleotide

SEQ ID NO: 654795 - DNA, 55 bp, Artificial; identical to SEQ ID NO: 279682
  Synthetic oligonucleotide

SEQ ID NO: 654796 - DNA, 52 bp, Artificial; identical to SEQ ID NO: 282966
  Synthetic oligonucleotide

SEQ ID NO: 654797 - DNA, 55 bp, Artificial; identical to SEQ ID NO: 267898
  Synthetic oligonucleotide

SEQ ID NO: 654798 - DNA, 55 bp, Artificial; identical to SEQ ID NO: 279685
  Synthetic oligonucleotide

SEQ ID NO: 654799 - DNA, 55 bp, Artificial; identical to SEQ ID NO: 279687
  Synthetic oligonucleotide

SEQ ID NO: 654800 - DNA, 54 bp, Artificial; identical to SEQ ID NO: 286203
  Synthetic oligonucleotide

SEQ ID NO: 654801 - DNA, 55 bp, Artificial; identical to SEQ ID NO: 269081
  Synthetic oligonucleotide

SEQ ID NO: 654802 - DNA, 50 bp, Artificial; identical to SEQ ID NO: 268599
  Synthetic oligonucleotide

SEQ ID NO: 654803 - DNA, 60 bp, Artificial; identical to SEQ ID NO: 278924
  Synthetic oligonucleotide

SEQ ID NO: 654804 - DNA, 55 bp, Artificial; identical to SEQ ID NO: 279689
  Synthetic oligonucleotide

SEQ ID NO: 654805 - DNA, 54 bp, Artificial; identical to SEQ ID NO: 282167
  Synthetic oligonucleotide

SEQ ID NO: 654806 - DNA, 55 bp, Artificial; identical to SEQ ID NO: 278047
  Synthetic oligonucleotide

SEQ ID NO: 654807 - DNA, 53 bp, Artificial; identical to SEQ ID NO: 282567
  Synthetic oligonucleotide

SEQ ID NO: 654808 - DNA, 55 bp, Artificial; identical to SEQ ID NO: 278575
  Synthetic oligonucleotide

SEQ ID NO: 654809 - DNA, 52 bp, Artificial; identical to SEQ ID NO: 282954
  Synthetic oligonucleotide

SEQ ID NO: 654810 - DNA, 55 bp, Artificial; identical to SEQ ID NO: 279690
  Synthetic oligonucleotide

SEQ ID NO: 654811 - DNA, 54 bp, Artificial; identical to SEQ ID NO: 279691
  Synthetic oligonucleotide

SEQ ID NO: 654812 - DNA, 53 bp, Artificial; identical to SEQ ID NO: 282530
  Synthetic oligonucleotide

SEQ ID NO: 654813 - DNA, 55 bp, Artificial; identical to SEQ ID NO: 279694
  Synthetic oligonucleotide

SEQ ID NO: 654814 - DNA, 55 bp, Artificial; identical to SEQ ID NO: 279696
  Synthetic oligonucleotide

SEQ ID NO: 654815 - DNA, 51 bp, Artificial; identical to SEQ ID NO: 278620
  Synthetic oligonucleotide

SEQ ID NO: 654816 - DNA, 55 bp, Artificial; identical to SEQ ID NO: 279699
  Synthetic oligonucleotide

SEQ ID NO: 654817 - DNA, 55 bp, Artificial; identical to SEQ ID NO: 286201
  Synthetic oligonucleotide

SEQ ID NO: 654818 - DNA, 54 bp, Artificial; identical to SEQ ID NO: 278631
  Synthetic oligonucleotide

SEQ ID NO: 654819 - DNA, 55 bp, Artificial; identical to SEQ ID NO: 286198
  Synthetic oligonucleotide

SEQ ID NO: 654820 - DNA, 55 bp, Artificial; identical to SEQ ID NO: 279648
  Synthetic oligonucleotide

SEQ ID NO: 654821 - DNA, 55 bp, Artificial; identical to SEQ ID NO: 286197
  Synthetic oligonucleotide

SEQ ID NO: 654822 - DNA, 55 bp, Artificial; identical to SEQ ID NO: 269084
  Synthetic oligonucleotide

SEQ ID NO: 654823 - DNA, 50 bp, Artificial; identical to SEQ ID NO: 284984
  Synthetic oligonucleotide

SEQ ID NO: 654824 - DNA, 55 bp, Artificial; identical to SEQ ID NO: 279652
  Synthetic oligonucleotide

SEQ ID NO: 654825 - DNA, 55 bp, Artificial; identical to SEQ ID NO: 268614
  Synthetic oligonucleotide

SEQ ID NO: 654826 - DNA, 55 bp, Artificial; identical to SEQ ID NO: 279655
  Synthetic oligonucleotide

SEQ ID NO: 654827 - DNA, 51 bp, Artificial; identical to SEQ ID NO: 283395
  Synthetic oligonucleotide

SEQ ID NO: 654828 - DNA, 55 bp, Artificial; identical to SEQ ID NO: 279656
  Synthetic oligonucleotide

SEQ ID NO: 654829 - DNA, 55 bp, Artificial; identical to SEQ ID NO: 286196
  Synthetic oligonucleotide

SEQ ID NO: 654830 - DNA, 55 bp, Artificial; identical to SEQ ID NO: 269089
  Synthetic oligonucleotide

SEQ ID NO: 654831 - DNA, 57 bp, Artificial; identical to SEQ ID NO: 279115
  Synthetic oligonucleotide

SEQ ID NO: 654832 - DNA, 57 bp, Artificial; identical to SEQ ID NO: 279060
  Synthetic oligonucleotide

SEQ ID NO: 654833 - DNA, 55 bp, Artificial; identical to SEQ ID NO: 279659
  Synthetic oligonucleotide

SEQ ID NO: 654834 - DNA, 55 bp, Artificial; identical to SEQ ID NO: 278664
  Synthetic oligonucleotide

SEQ ID NO: 654835 - DNA, 55 bp, Artificial; identical to SEQ ID NO: 270328
  Synthetic oligonucleotide

SEQ ID NO: 654836 - DNA, 55 bp, Artificial; identical to SEQ ID NO: 279660
  Synthetic oligonucleotide

SEQ ID NO: 654837 - DNA, 55 bp, Artificial; identical to SEQ ID NO: 279662
  Synthetic oligonucleotide

SEQ ID NO: 654838 - DNA, 55 bp, Artificial; identical to SEQ ID NO: 279663
  Synthetic oligonucleotide

SEQ ID NO: 654839 - DNA, 55 bp, Artificial; identical to SEQ ID NO: 278675
  Synthetic oligonucleotide

SEQ ID NO: 654840 - DNA, 52 bp, Artificial; identical to SEQ ID NO: 283024
  Synthetic oligonucleotide

SEQ ID NO: 654841 - DNA, 55 bp, Artificial; identical to SEQ ID NO: 278686
  Synthetic oligonucleotide

SEQ ID NO: 654842 - DNA, 55 bp, Artificial; identical to SEQ ID NO: 279666
  Synthetic oligonucleotide

SEQ ID NO: 654843 - DNA, 55 bp, Artificial; identical to SEQ ID NO: 279667
  Synthetic oligonucleotide

SEQ ID NO: 654844 - DNA, 55 bp, Artificial; identical to SEQ ID NO: 279670
  Synthetic oligonucleotide

SEQ ID NO: 654845 - DNA, 55 bp, Artificial; identical to SEQ ID NO: 279671
  Synthetic oligonucleotide

SEQ ID NO: 654846 - DNA, 58 bp, Artificial; identical to SEQ ID NO: 280298
  Synthetic oligonucleotide

SEQ ID NO: 654847 - DNA, 55 bp, Artificial; identical to SEQ ID NO: 279672
  Synthetic oligonucleotide

SEQ ID NO: 654848 - DNA, 55 bp, Artificial; identical to SEQ ID NO: 279674
  Synthetic oligonucleotide

SEQ ID NO: 654849 - DNA, 55 bp, Artificial; identical to SEQ ID NO: 269091
  Synthetic oligonucleotide

SEQ ID NO: 654850 - DNA, 55 bp, Artificial; identical to SEQ ID NO: 279938
  Synthetic oligonucleotide

SEQ ID NO: 654851 - DNA, 50 bp, Artificial; identical to SEQ ID NO: 286449
  Synthetic oligonucleotide

SEQ ID NO: 654852 - DNA, 55 bp, Artificial; identical to SEQ ID NO: 279940
  Synthetic oligonucleotide

SEQ ID NO: 654853 - DNA, 52 bp, Artificial; identical to SEQ ID NO: 267910
  Synthetic oligonucleotide

SEQ ID NO: 654854 - DNA, 55 bp, Artificial; identical to SEQ ID NO: 279941
  Synthetic oligonucleotide

SEQ ID NO: 654855 - DNA, 55 bp, Artificial; identical to SEQ ID NO: 279944
  Synthetic oligonucleotide

SEQ ID NO: 654856 - DNA, 60 bp, Artificial; identical to SEQ ID NO: 279920
  Synthetic oligonucleotide

SEQ ID NO: 654857 - DNA, 50 bp, Artificial; identical to SEQ ID NO: 284991
  Synthetic oligonucleotide

SEQ ID NO: 654858 - DNA, 56 bp, Artificial; identical to SEQ ID NO: 280198
  Synthetic oligonucleotide

SEQ ID NO: 654859 - DNA, 53 bp, Artificial; identical to SEQ ID NO: 268024
  Synthetic oligonucleotide

SEQ ID NO: 654860 - DNA, 55 bp, Artificial; identical to SEQ ID NO: 279948
  Synthetic oligonucleotide

SEQ ID NO: 654861 - DNA, 55 bp, Artificial; identical to SEQ ID NO: 269094
  Synthetic oligonucleotide

SEQ ID NO: 654862 - DNA, 55 bp, Artificial; identical to SEQ ID NO: 278720
  Synthetic oligonucleotide

SEQ ID NO: 654863 - DNA, 55 bp, Artificial; identical to SEQ ID NO: 279954
  Synthetic oligonucleotide

SEQ ID NO: 654864 - DNA, 50 bp, Artificial; identical to SEQ ID NO: 284992
  Synthetic oligonucleotide

SEQ ID NO: 654865 - DNA, 55 bp, Artificial; identical to SEQ ID NO: 279955
  Synthetic oligonucleotide

SEQ ID NO: 654866 - DNA, 55 bp, Artificial; identical to SEQ ID NO: 286192
  Synthetic oligonucleotide

SEQ ID NO: 654867 - DNA, 55 bp, Artificial; identical to SEQ ID NO: 278731
  Synthetic oligonucleotide

SEQ ID NO: 654868 - DNA, 55 bp, Artificial; identical to SEQ ID NO: 279958
  Synthetic oligonucleotide

SEQ ID NO: 654869 - DNA, 55 bp, Artificial; identical to SEQ ID NO: 279959
  Synthetic oligonucleotide

SEQ ID NO: 654870 - DNA, 55 bp, Artificial; identical to SEQ ID NO: 278753
  Synthetic oligonucleotide

SEQ ID NO: 654871 - DNA, 60 bp, Artificial; identical to SEQ ID NO: 281487
  Synthetic oligonucleotide

SEQ ID NO: 654872 - DNA, 55 bp, Artificial; identical to SEQ ID NO: 279909
  Synthetic oligonucleotide

SEQ ID NO: 654873 - DNA, 55 bp, Artificial; identical to SEQ ID NO: 279910
  Synthetic oligonucleotide

SEQ ID NO: 654874 - DNA, 55 bp, Artificial; identical to SEQ ID NO: 279912
  Synthetic oligonucleotide

SEQ ID NO: 654875 - DNA, 55 bp, Artificial; identical to SEQ ID NO: 270324
  Synthetic oligonucleotide

SEQ ID NO: 654876 - DNA, 56 bp, Artificial; identical to SEQ ID NO: 268366
  Synthetic oligonucleotide

SEQ ID NO: 654877 - DNA, 52 bp, Artificial; identical to SEQ ID NO: 283062
  Synthetic oligonucleotide

SEQ ID NO: 654878 - DNA, 55 bp, Artificial; identical to SEQ ID NO: 286190
  Synthetic oligonucleotide

SEQ ID NO: 654879 - DNA, 53 bp, Artificial; identical to SEQ ID NO: 282613
  Synthetic oligonucleotide

SEQ ID NO: 654880 - DNA, 55 bp, Artificial; identical to SEQ ID NO: 279915
  Synthetic oligonucleotide

SEQ ID NO: 654881 - DNA, 53 bp, Artificial; identical to SEQ ID NO: 279916
  Synthetic oligonucleotide

SEQ ID NO: 654882 - DNA, 55 bp, Artificial; identical to SEQ ID NO: 281042
  Synthetic oligonucleotide

SEQ ID NO: 654883 - DNA, 55 bp, Artificial; identical to SEQ ID NO: 279917
  Synthetic oligonucleotide

SEQ ID NO: 654884 - DNA, 53 bp, Artificial; identical to SEQ ID NO: 284697
  Synthetic oligonucleotide

SEQ ID NO: 654885 - DNA, 55 bp, Artificial; identical to SEQ ID NO: 269097
  Synthetic oligonucleotide

SEQ ID NO: 654886 - DNA, 55 bp, Artificial; identical to SEQ ID NO: 268465
  Synthetic oligonucleotide

SEQ ID NO: 654887 - DNA, 55 bp, Artificial; identical to SEQ ID NO: 279918
  Synthetic oligonucleotide

SEQ ID NO: 654888 - DNA, 55 bp, Artificial; identical to SEQ ID NO: 277714
  Synthetic oligonucleotide

SEQ ID NO: 654889 - DNA, 55 bp, Artificial; identical to SEQ ID NO: 279921
  Synthetic oligonucleotide

SEQ ID NO: 654890 - DNA, 55 bp, Artificial; identical to SEQ ID NO: 279923
  Synthetic oligonucleotide

SEQ ID NO: 654891 - DNA, 55 bp, Artificial; identical to SEQ ID NO: 277736
  Synthetic oligonucleotide

SEQ ID NO: 654892 - DNA, 55 bp, Artificial; identical to SEQ ID NO: 279924
  Synthetic oligonucleotide

SEQ ID NO: 654893 - DNA, 55 bp, Artificial; identical to SEQ ID NO: 269101
  Synthetic oligonucleotide

SEQ ID NO: 654894 - DNA, 55 bp, Artificial; identical to SEQ ID NO: 279928
  Synthetic oligonucleotide

SEQ ID NO: 654895 - DNA, 55 bp, Artificial; identical to SEQ ID NO: 279930
  Synthetic oligonucleotide

SEQ ID NO: 654896 - DNA, 53 bp, Artificial; identical to SEQ ID NO: 279932
  Synthetic oligonucleotide

SEQ ID NO: 654897 - DNA, 52 bp, Artificial; identical to SEQ ID NO: 283013
  Synthetic oligonucleotide

SEQ ID NO: 654898 - DNA, 50 bp, Artificial; identical to SEQ ID NO: 284996
  Synthetic oligonucleotide

SEQ ID NO: 654899 - DNA, 55 bp, Artificial; identical to SEQ ID NO: 279987
  Synthetic oligonucleotide

SEQ ID NO: 654900 - DNA, 54 bp, Artificial; identical to SEQ ID NO: 282180
  Synthetic oligonucleotide

SEQ ID NO: 654901 - DNA, 55 bp, Artificial; identical to SEQ ID NO: 277792
  Synthetic oligonucleotide

SEQ ID NO: 654902 - DNA, 55 bp, Artificial; identical to SEQ ID NO: 279990
  Synthetic oligonucleotide

SEQ ID NO: 654903 - DNA, 59 bp, Artificial; identical to SEQ ID NO: 279697
  Synthetic oligonucleotide

SEQ ID NO: 654904 - DNA, 55 bp, Artificial; identical to SEQ ID NO: 268023
  Synthetic oligonucleotide

SEQ ID NO: 654905 - DNA, 51 bp, Artificial; identical to SEQ ID NO: 283358
  Synthetic oligonucleotide

SEQ ID NO: 654906 - DNA, 55 bp, Artificial; identical to SEQ ID NO: 277803
  Synthetic oligonucleotide

SEQ ID NO: 654907 - DNA, 55 bp, Artificial; identical to SEQ ID NO: 279992
  Synthetic oligonucleotide

SEQ ID NO: 654908 - DNA, 55 bp, Artificial; identical to SEQ ID NO: 279993
  Synthetic oligonucleotide

SEQ ID NO: 654909 - DNA, 55 bp, Artificial; identical to SEQ ID NO: 286230
  Synthetic oligonucleotide

SEQ ID NO: 654910 - DNA, 52 bp, Artificial; identical to SEQ ID NO: 269213
  Synthetic oligonucleotide

SEQ ID NO: 654911 - DNA, 55 bp, Artificial; identical to SEQ ID NO: 277814
  Synthetic oligonucleotide

SEQ ID NO: 654912 - DNA, 55 bp, Artificial; identical to SEQ ID NO: 279994
  Synthetic oligonucleotide

SEQ ID NO: 654913 - DNA, 55 bp, Artificial; identical to SEQ ID NO: 277836
  Synthetic oligonucleotide

SEQ ID NO: 654914 - DNA, 60 bp, Artificial; identical to SEQ ID NO: 282364
  Synthetic oligonucleotide

SEQ ID NO: 654915 - DNA, 54 bp, Artificial; identical to SEQ ID NO: 282187
  Synthetic oligonucleotide

SEQ ID NO: 654916 - DNA, 55 bp, Artificial; identical to SEQ ID NO: 279995
  Synthetic oligonucleotide

SEQ ID NO: 654917 - DNA, 55 bp, Artificial; identical to SEQ ID NO: 279996
  Synthetic oligonucleotide

SEQ ID NO: 654918 - DNA, 50 bp, Artificial; identical to SEQ ID NO: 271267
  Synthetic oligonucleotide

SEQ ID NO: 654919 - DNA, 55 bp, Artificial; identical to SEQ ID NO: 277869
  Synthetic oligonucleotide

SEQ ID NO: 654920 - DNA, 55 bp, Artificial; identical to SEQ ID NO: 277880
  Synthetic oligonucleotide

SEQ ID NO: 654921 - DNA, 55 bp, Artificial; identical to SEQ ID NO: 277891
  Synthetic oligonucleotide

SEQ ID NO: 654922 - DNA, 55 bp, Artificial; identical to SEQ ID NO: 280004
  Synthetic oligonucleotide

SEQ ID NO: 654923 - DNA, 53 bp, Artificial; identical to SEQ ID NO: 280005
  Synthetic oligonucleotide

SEQ ID NO: 654924 - DNA, 55 bp, Artificial; identical to SEQ ID NO: 280006
  Synthetic oligonucleotide

SEQ ID NO: 654925 - DNA, 55 bp, Artificial; identical to SEQ ID NO: 280010
  Synthetic oligonucleotide

SEQ ID NO: 654926 - DNA, 55 bp, Artificial; identical to SEQ ID NO: 269105
  Synthetic oligonucleotide

SEQ ID NO: 654927 - DNA, 55 bp, Artificial; identical to SEQ ID NO: 268371
  Synthetic oligonucleotide

SEQ ID NO: 654928 - DNA, 55 bp, Artificial; identical to SEQ ID NO: 277903
  Synthetic oligonucleotide

SEQ ID NO: 654929 - DNA, 55 bp, Artificial; identical to SEQ ID NO: 280012
  Synthetic oligonucleotide

SEQ ID NO: 654930 - DNA, 55 bp, Artificial; identical to SEQ ID NO: 277914
  Synthetic oligonucleotide

SEQ ID NO: 654931 - DNA, 55 bp, Artificial; identical to SEQ ID NO: 269107
  Synthetic oligonucleotide

SEQ ID NO: 654932 - DNA, 54 bp, Artificial; identical to SEQ ID NO: 282403
  Synthetic oligonucleotide

SEQ ID NO: 654933 - DNA, 55 bp, Artificial; identical to SEQ ID NO: 277936
  Synthetic oligonucleotide

SEQ ID NO: 654934 - DNA, 58 bp, Artificial; identical to SEQ ID NO: 279353
  Synthetic oligonucleotide

SEQ ID NO: 654935 - DNA, 60 bp, Artificial; identical to SEQ ID NO: 279753
  Synthetic oligonucleotide

SEQ ID NO: 654936 - DNA, 55 bp, Artificial; identical to SEQ ID NO: 279960
  Synthetic oligonucleotide

SEQ ID NO: 654937 - DNA, 55 bp, Artificial; identical to SEQ ID NO: 279962
  Synthetic oligonucleotide

SEQ ID NO: 654938 - DNA, 55 bp, Artificial; identical to SEQ ID NO: 279965
  Synthetic oligonucleotide

SEQ ID NO: 654939 - DNA, 55 bp, Artificial; identical to SEQ ID NO: 279966
  Synthetic oligonucleotide

SEQ ID NO: 654940 - DNA, 55 bp, Artificial; identical to SEQ ID NO: 271288
  Synthetic oligonucleotide

SEQ ID NO: 654941 - DNA, 55 bp, Artificial; identical to SEQ ID NO: 277961
  Synthetic oligonucleotide

SEQ ID NO: 654942 - DNA, 54 bp, Artificial; identical to SEQ ID NO: 269159
  Synthetic oligonucleotide

SEQ ID NO: 654943 - DNA, 55 bp, Artificial; identical to SEQ ID NO: 279968
  Synthetic oligonucleotide

SEQ ID NO: 654944 - DNA, 54 bp, Artificial; identical to SEQ ID NO: 278656
  Synthetic oligonucleotide

SEQ ID NO: 654945 - DNA, 55 bp, Artificial; identical to SEQ ID NO: 279970
  Synthetic oligonucleotide

SEQ ID NO: 654946 - DNA, 55 bp, Artificial; identical to SEQ ID NO: 270321
  Synthetic oligonucleotide

SEQ ID NO: 654947 - DNA, 55 bp, Artificial; identical to SEQ ID NO: 279971
  Synthetic oligonucleotide

SEQ ID NO: 654948 - DNA, 55 bp, Artificial; identical to SEQ ID NO: 286226
  Synthetic oligonucleotide

SEQ ID NO: 654949 - DNA, 53 bp, Artificial; identical to SEQ ID NO: 282608
  Synthetic oligonucleotide

SEQ ID NO: 654950 - DNA, 52 bp, Artificial; identical to SEQ ID NO: 268611
  Synthetic oligonucleotide

SEQ ID NO: 654951 - DNA, 55 bp, Artificial; identical to SEQ ID NO: 279973
  Synthetic oligonucleotide

SEQ ID NO: 654952 - DNA, 53 bp, Artificial; identical to SEQ ID NO: 282602
  Synthetic oligonucleotide

SEQ ID NO: 654953 - DNA, 55 bp, Artificial; identical to SEQ ID NO: 270221
  Synthetic oligonucleotide

SEQ ID NO: 654954 - DNA, 54 bp, Artificial; identical to SEQ ID NO: 282314
  Synthetic oligonucleotide

SEQ ID NO: 654955 - DNA, 55 bp, Artificial; identical to SEQ ID NO: 278820
  Synthetic oligonucleotide

SEQ ID NO: 654956 - DNA, 55 bp, Artificial; identical to SEQ ID NO: 279977
  Synthetic oligonucleotide

SEQ ID NO: 654957 - DNA, 54 bp, Artificial; identical to SEQ ID NO: 282368
  Synthetic oligonucleotide

SEQ ID NO: 654958 - DNA, 57 bp, Artificial; identical to SEQ ID NO: 279087
  Synthetic oligonucleotide

SEQ ID NO: 654959 - DNA, 54 bp, Artificial; identical to SEQ ID NO: 282351
  Synthetic oligonucleotide

SEQ ID NO: 654960 - DNA, 55 bp, Artificial; identical to SEQ ID NO: 279981
  Synthetic oligonucleotide

SEQ ID NO: 654961 - DNA, 55 bp, Artificial; identical to SEQ ID NO: 279983
  Synthetic oligonucleotide

SEQ ID NO: 654962 - DNA, 54 bp, Artificial; identical to SEQ ID NO: 279833
  Synthetic oligonucleotide

SEQ ID NO: 654963 - DNA, 59 bp, Artificial; identical to SEQ ID NO: 279184
  Synthetic oligonucleotide

SEQ ID NO: 654964 - DNA, 54 bp, Artificial; identical to SEQ ID NO: 269143
  Synthetic oligonucleotide

SEQ ID NO: 654965 - DNA, 60 bp, Artificial; identical to SEQ ID NO: 284498
  Synthetic oligonucleotide

SEQ ID NO: 654966 - DNA, 55 bp, Artificial; identical to SEQ ID NO: 279836
  Synthetic oligonucleotide

SEQ ID NO: 654967 - DNA, 54 bp, Artificial; identical to SEQ ID NO: 279837
  Synthetic oligonucleotide

SEQ ID NO: 654968 - DNA, 55 bp, Artificial; identical to SEQ ID NO: 279840
  Synthetic oligonucleotide

SEQ ID NO: 654969 - DNA, 55 bp, Artificial; identical to SEQ ID NO: 279841
  Synthetic oligonucleotide

SEQ ID NO: 654970 - DNA, 52 bp, Artificial; identical to SEQ ID NO: 282810
  Synthetic oligonucleotide

SEQ ID NO: 654971 - DNA, 54 bp, Artificial; identical to SEQ ID NO: 268449
  Synthetic oligonucleotide

SEQ ID NO: 654972 - DNA, 55 bp, Artificial; identical to SEQ ID NO: 270228
  Synthetic oligonucleotide

SEQ ID NO: 654973 - DNA, 55 bp, Artificial; identical to SEQ ID NO: 278842
  Synthetic oligonucleotide

SEQ ID NO: 654974 - DNA, 55 bp, Artificial; identical to SEQ ID NO: 268876
  Synthetic oligonucleotide

SEQ ID NO: 654975 - DNA, 55 bp, Artificial; identical to SEQ ID NO: 279844
  Synthetic oligonucleotide

SEQ ID NO: 654976 - DNA, 60 bp, Artificial; identical to SEQ ID NO: 283775
  Synthetic oligonucleotide

SEQ ID NO: 654977 - DNA, 60 bp, Artificial; identical to SEQ ID NO: 283709
  Synthetic oligonucleotide

SEQ ID NO: 654978 - DNA, 58 bp, Artificial; identical to SEQ ID NO: 283686
  Synthetic oligonucleotide

SEQ ID NO: 654979 - DNA, 55 bp, Artificial; identical to SEQ ID NO: 279847
  Synthetic oligonucleotide

SEQ ID NO: 654980 - DNA, 55 bp, Artificial; identical to SEQ ID NO: 268875
  Synthetic oligonucleotide

SEQ ID NO: 654981 - DNA, 55 bp, Artificial; identical to SEQ ID NO: 278864
  Synthetic oligonucleotide

SEQ ID NO: 654982 - DNA, 55 bp, Artificial; identical to SEQ ID NO: 278875
  Synthetic oligonucleotide

SEQ ID NO: 654983 - DNA, 55 bp, Artificial; identical to SEQ ID NO: 279852
  Synthetic oligonucleotide

SEQ ID NO: 654984 - DNA, 55 bp, Artificial; identical to SEQ ID NO: 279854
  Synthetic oligonucleotide

SEQ ID NO: 654985 - DNA, 55 bp, Artificial; identical to SEQ ID NO: 278897
  Synthetic oligonucleotide

SEQ ID NO: 654986 - DNA, 55 bp, Artificial; identical to SEQ ID NO: 278908
  Synthetic oligonucleotide

SEQ ID NO: 654987 - DNA, 55 bp, Artificial; identical to SEQ ID NO: 270229
  Synthetic oligonucleotide

SEQ ID NO: 654988 - DNA, 55 bp, Artificial; identical to SEQ ID NO: 277603
  Synthetic oligonucleotide

SEQ ID NO: 654989 - DNA, 53 bp, Artificial; identical to SEQ ID NO: 282597
  Synthetic oligonucleotide

SEQ ID NO: 654990 - DNA, 55 bp, Artificial; identical to SEQ ID NO: 268509
  Synthetic oligonucleotide

SEQ ID NO: 654991 - DNA, 55 bp, Artificial; identical to SEQ ID NO: 270318
  Synthetic oligonucleotide

SEQ ID NO: 654992 - DNA, 60 bp, Artificial; identical to SEQ ID NO: 285516
  Synthetic oligonucleotide

SEQ ID NO: 654993 - DNA, 60 bp, Artificial; identical to SEQ ID NO: 285452
  Synthetic oligonucleotide

SEQ ID NO: 654994 - DNA, 55 bp, Artificial; identical to SEQ ID NO: 268874
  Synthetic oligonucleotide

SEQ ID NO: 654995 - DNA, 55 bp, Artificial; identical to SEQ ID NO: 268492
  Synthetic oligonucleotide

SEQ ID NO: 654996 - DNA, 55 bp, Artificial; identical to SEQ ID NO: 279813
  Synthetic oligonucleotide

SEQ ID NO: 654997 - DNA, 55 bp, Artificial; identical to SEQ ID NO: 279814
  Synthetic oligonucleotide

SEQ ID NO: 654998 - DNA, 54 bp, Artificial; identical to SEQ ID NO: 269221
  Synthetic oligonucleotide

SEQ ID NO: 654999 - DNA, 55 bp, Artificial; identical to SEQ ID NO: 277658
  Synthetic oligonucleotide

SEQ ID NO: 655000 - DNA, 55 bp, Artificial; identical to SEQ ID NO: 279815
  Synthetic oligonucleotide

SEQ ID NO: 655001 - DNA, 55 bp, Artificial; identical to SEQ ID NO: 271674
  Synthetic oligonucleotide

SEQ ID NO: 655002 - DNA, 60 bp, Artificial; identical to SEQ ID NO: 284753
  Synthetic oligonucleotide

SEQ ID NO: 655003 - DNA, 55 bp, Artificial; identical to SEQ ID NO: 279819
  Synthetic oligonucleotide

SEQ ID NO: 655004 - DNA, 60 bp, Artificial; identical to SEQ ID NO: 282420
  Synthetic oligonucleotide

SEQ ID NO: 655005 - DNA, 60 bp, Artificial; identical to SEQ ID NO: 268610
  Synthetic oligonucleotide

SEQ ID NO: 655006 - DNA, 55 bp, Artificial; identical to SEQ ID NO: 279821
  Synthetic oligonucleotide

SEQ ID NO: 655007 - DNA, 55 bp, Artificial; identical to SEQ ID NO: 268872
  Synthetic oligonucleotide

SEQ ID NO: 655008 - DNA, 55 bp, Artificial; identical to SEQ ID NO: 268871
  Synthetic oligonucleotide

SEQ ID NO: 655009 - DNA, 54 bp, Artificial; identical to SEQ ID NO: 268527
  Synthetic oligonucleotide

SEQ ID NO: 655010 - DNA, 55 bp, Artificial; identical to SEQ ID NO: 279822
  Synthetic oligonucleotide

SEQ ID NO: 655011 - DNA, 55 bp, Artificial; identical to SEQ ID NO: 278213
  Synthetic oligonucleotide

SEQ ID NO: 655012 - DNA, 55 bp, Artificial; identical to SEQ ID NO: 279826
  Synthetic oligonucleotide

SEQ ID NO: 655013 - DNA, 55 bp, Artificial; identical to SEQ ID NO: 278215
  Synthetic oligonucleotide

SEQ ID NO: 655014 - DNA, 55 bp, Artificial; identical to SEQ ID NO: 279827
  Synthetic oligonucleotide

SEQ ID NO: 655015 - DNA, 55 bp, Artificial; identical to SEQ ID NO: 279828
  Synthetic oligonucleotide

SEQ ID NO: 655016 - DNA, 53 bp, Artificial; identical to SEQ ID NO: 282648
  Synthetic oligonucleotide

SEQ ID NO: 655017 - DNA, 54 bp, Artificial; identical to SEQ ID NO: 282520
  Synthetic oligonucleotide

SEQ ID NO: 655018 - DNA, 55 bp, Artificial; identical to SEQ ID NO: 279882
  Synthetic oligonucleotide

SEQ ID NO: 655019 - DNA, 55 bp, Artificial; identical to SEQ ID NO: 268607
  Synthetic oligonucleotide

SEQ ID NO: 655020 - DNA, 52 bp, Artificial; identical to SEQ ID NO: 268365
  Synthetic oligonucleotide

SEQ ID NO: 655021 - DNA, 55 bp, Artificial; identical to SEQ ID NO: 279885
  Synthetic oligonucleotide

SEQ ID NO: 655022 - DNA, 54 bp, Artificial; identical to SEQ ID NO: 278222
  Synthetic oligonucleotide

SEQ ID NO: 655023 - DNA, 55 bp, Artificial; identical to SEQ ID NO: 279891
  Synthetic oligonucleotide

SEQ ID NO: 655024 - DNA, 54 bp, Artificial; identical to SEQ ID NO: 282191
  Synthetic oligonucleotide

SEQ ID NO: 655025 - DNA, 55 bp, Artificial; identical to SEQ ID NO: 279893
  Synthetic oligonucleotide

SEQ ID NO: 655026 - DNA, 52 bp, Artificial; identical to SEQ ID NO: 270000
  Synthetic oligonucleotide

SEQ ID NO: 655027 - DNA, 55 bp, Artificial; identical to SEQ ID NO: 279895
  Synthetic oligonucleotide

SEQ ID NO: 655028 - DNA, 55 bp, Artificial; identical to SEQ ID NO: 278224
  Synthetic oligonucleotide

SEQ ID NO: 655029 - DNA, 55 bp, Artificial; identical to SEQ ID NO: 279898
  Synthetic oligonucleotide

SEQ ID NO: 655030 - DNA, 55 bp, Artificial; identical to SEQ ID NO: 279900
  Synthetic oligonucleotide

SEQ ID NO: 655031 - DNA, 55 bp, Artificial; identical to SEQ ID NO: 267872
  Synthetic oligonucleotide

SEQ ID NO: 655032 - DNA, 55 bp, Artificial; identical to SEQ ID NO: 271673
  Synthetic oligonucleotide

SEQ ID NO: 655033 - DNA, 55 bp, Artificial; identical to SEQ ID NO: 278225
  Synthetic oligonucleotide

SEQ ID NO: 655034 - DNA, 59 bp, Artificial; identical to SEQ ID NO: 279162
  Synthetic oligonucleotide

SEQ ID NO: 655035 - DNA, 55 bp, Artificial; identical to SEQ ID NO: 270023
  Synthetic oligonucleotide

SEQ ID NO: 655036 - DNA, 55 bp, Artificial; identical to SEQ ID NO: 279903
  Synthetic oligonucleotide

SEQ ID NO: 655037 - DNA, 55 bp, Artificial; identical to SEQ ID NO: 268869
  Synthetic oligonucleotide

SEQ ID NO: 655038 - DNA, 55 bp, Artificial; identical to SEQ ID NO: 279905
  Synthetic oligonucleotide

SEQ ID NO: 655039 - DNA, 55 bp, Artificial; identical to SEQ ID NO: 270034
  Synthetic oligonucleotide

SEQ ID NO: 655040 - DNA, 55 bp, Artificial; identical to SEQ ID NO: 279906
  Synthetic oligonucleotide

SEQ ID NO: 655041 - DNA, 55 bp, Artificial; identical to SEQ ID NO: 279856
  Synthetic oligonucleotide

SEQ ID NO: 655042 - DNA, 55 bp, Artificial; identical to SEQ ID NO: 279859
  Synthetic oligonucleotide

SEQ ID NO: 655043 - DNA, 55 bp, Artificial; identical to SEQ ID NO: 278229
  Synthetic oligonucleotide

SEQ ID NO: 655044 - DNA, 55 bp, Artificial; identical to SEQ ID NO: 279861
  Synthetic oligonucleotide

SEQ ID NO: 655045 - DNA, 55 bp, Artificial; identical to SEQ ID NO: 279862
  Synthetic oligonucleotide

SEQ ID NO: 655046 - DNA, 60 bp, Artificial; identical to SEQ ID NO: 283297
  Synthetic oligonucleotide

SEQ ID NO: 655047 - DNA, 53 bp, Artificial; identical to SEQ ID NO: 282593
  Synthetic oligonucleotide

SEQ ID NO: 655048 - DNA, 58 bp, Artificial; identical to SEQ ID NO: 283609
  Synthetic oligonucleotide

SEQ ID NO: 655049 - DNA, 58 bp, Artificial; identical to SEQ ID NO: 283531
  Synthetic oligonucleotide

SEQ ID NO: 655050 - DNA, 55 bp, Artificial; identical to SEQ ID NO: 268516
  Synthetic oligonucleotide

SEQ ID NO: 655051 - DNA, 57 bp, Artificial; identical to SEQ ID NO: 283498
  Synthetic oligonucleotide

SEQ ID NO: 655052 - DNA, 55 bp, Artificial; identical to SEQ ID NO: 279870
  Synthetic oligonucleotide

SEQ ID NO: 655053 - DNA, 55 bp, Artificial; identical to SEQ ID NO: 278233
  Synthetic oligonucleotide

SEQ ID NO: 655054 - DNA, 60 bp, Artificial; identical to SEQ ID NO: 282886
  Synthetic oligonucleotide

SEQ ID NO: 655055 - DNA, 55 bp, Artificial; identical to SEQ ID NO: 279873
  Synthetic oligonucleotide

SEQ ID NO: 655056 - DNA, 55 bp, Artificial; identical to SEQ ID NO: 279874
  Synthetic oligonucleotide

SEQ ID NO: 655057 - DNA, 55 bp, Artificial; identical to SEQ ID NO: 279876
  Synthetic oligonucleotide

SEQ ID NO: 655058 - DNA, 55 bp, Artificial; identical to SEQ ID NO: 279878
  Synthetic oligonucleotide

SEQ ID NO: 655059 - DNA, 54 bp, Artificial; identical to SEQ ID NO: 283119
  Synthetic oligonucleotide

SEQ ID NO: 655060 - DNA, 55 bp, Artificial; identical to SEQ ID NO: 279879
  Synthetic oligonucleotide

SEQ ID NO: 655061 - DNA, 55 bp, Artificial; identical to SEQ ID NO: 270279
  Synthetic oligonucleotide

SEQ ID NO: 655062 - DNA, 52 bp, Artificial; identical to SEQ ID NO: 268585
  Synthetic oligonucleotide

SEQ ID NO: 655063 - DNA, 55 bp, Artificial; identical to SEQ ID NO: 279880
  Synthetic oligonucleotide

SEQ ID NO: 655064 - DNA, 53 bp, Artificial; identical to SEQ ID NO: 282786
  Synthetic oligonucleotide

SEQ ID NO: 655065 - DNA, 55 bp, Artificial; identical to SEQ ID NO: 278186
  Synthetic oligonucleotide

SEQ ID NO: 655066 - DNA, 52 bp, Artificial; identical to SEQ ID NO: 282836
  Synthetic oligonucleotide

SEQ ID NO: 655067 - DNA, 55 bp, Artificial; identical to SEQ ID NO: 279548
  Synthetic oligonucleotide

SEQ ID NO: 655068 - DNA, 55 bp, Artificial; identical to SEQ ID NO: 279552
  Synthetic oligonucleotide

SEQ ID NO: 655069 - DNA, 55 bp, Artificial; identical to SEQ ID NO: 279525
  Synthetic oligonucleotide

SEQ ID NO: 655070 - DNA, 59 bp, Artificial; identical to SEQ ID NO: 284031
  Synthetic oligonucleotide

SEQ ID NO: 655071 - DNA, 55 bp, Artificial; identical to SEQ ID NO: 279503
  Synthetic oligonucleotide

SEQ ID NO: 655072 - DNA, 55 bp, Artificial; identical to SEQ ID NO: 271672
  Synthetic oligonucleotide

SEQ ID NO: 655073 - DNA, 55 bp, Artificial; identical to SEQ ID NO: 279566
  Synthetic oligonucleotide

SEQ ID NO: 655074 - DNA, 55 bp, Artificial; identical to SEQ ID NO: 279573
  Synthetic oligonucleotide

SEQ ID NO: 655075 - DNA, 51 bp, Artificial; identical to SEQ ID NO: 267945
  Synthetic oligonucleotide

SEQ ID NO: 655076 - DNA, 60 bp, Artificial; identical to SEQ ID NO: 284542
  Synthetic oligonucleotide

SEQ ID NO: 655077 - DNA, 55 bp, Artificial; identical to SEQ ID NO: 269435
  Synthetic oligonucleotide

SEQ ID NO: 655078 - DNA, 55 bp, Artificial; identical to SEQ ID NO: 279551
  Synthetic oligonucleotide

SEQ ID NO: 655079 - DNA, 60 bp, Artificial; identical to SEQ ID NO: 285706
  Synthetic oligonucleotide

SEQ ID NO: 655080 - DNA, 55 bp, Artificial; identical to SEQ ID NO: 279570
  Synthetic oligonucleotide

SEQ ID NO: 655081 - DNA, 55 bp, Artificial; identical to SEQ ID NO: 268026
  Synthetic oligonucleotide

SEQ ID NO: 655082 - DNA, 55 bp, Artificial; identical to SEQ ID NO: 279565
  Synthetic oligonucleotide

SEQ ID NO: 655083 - DNA, 55 bp, Artificial; identical to SEQ ID NO: 279506
  Synthetic oligonucleotide

SEQ ID NO: 655084 - DNA, 55 bp, Artificial; identical to SEQ ID NO: 279494
  Synthetic oligonucleotide

SEQ ID NO: 655085 - DNA, 55 bp, Artificial; identical to SEQ ID NO: 279534
  Synthetic oligonucleotide

SEQ ID NO: 655086 - DNA, 55 bp, Artificial; identical to SEQ ID NO: 279519
  Synthetic oligonucleotide

SEQ ID NO: 655087 - DNA, 55 bp, Artificial; identical to SEQ ID NO: 279514
  Synthetic oligonucleotide

SEQ ID NO: 655088 - DNA, 55 bp, Artificial; identical to SEQ ID NO: 279517
  Synthetic oligonucleotide

SEQ ID NO: 655089 - DNA, 50 bp, Artificial; identical to SEQ ID NO: 284969
  Synthetic oligonucleotide

SEQ ID NO: 655090 - DNA, 54 bp, Artificial; identical to SEQ ID NO: 279532
  Synthetic oligonucleotide

SEQ ID NO: 655091 - DNA, 55 bp, Artificial; identical to SEQ ID NO: 279495
  Synthetic oligonucleotide

SEQ ID NO: 655092 - DNA, 55 bp, Artificial; identical to SEQ ID NO: 279567
  Synthetic oligonucleotide

SEQ ID NO: 655093 - DNA, 55 bp, Artificial; identical to SEQ ID NO: 279568
  Synthetic oligonucleotide

SEQ ID NO: 655094 - DNA, 53 bp, Artificial; identical to SEQ ID NO: 279577
  Synthetic oligonucleotide

SEQ ID NO: 655095 - DNA, 55 bp, Artificial; identical to SEQ ID NO: 279583
  Synthetic oligonucleotide

SEQ ID NO: 655096 - DNA, 51 bp, Artificial; identical to SEQ ID NO: 269235
  Synthetic oligonucleotide

SEQ ID NO: 655097 - DNA, 54 bp, Artificial; identical to SEQ ID NO: 285645
  Synthetic oligonucleotide

SEQ ID NO: 655098 - DNA, 54 bp, Artificial; identical to SEQ ID NO: 279560
  Synthetic oligonucleotide

SEQ ID NO: 655099 - DNA, 57 bp, Artificial; identical to SEQ ID NO: 285572
  Synthetic oligonucleotide

SEQ ID NO: 655100 - DNA, 53 bp, Artificial; identical to SEQ ID NO: 282703
  Synthetic oligonucleotide

SEQ ID NO: 655101 - DNA, 55 bp, Artificial; identical to SEQ ID NO: 286218
  Synthetic oligonucleotide

SEQ ID NO: 655102 - DNA, 52 bp, Artificial; identical to SEQ ID NO: 282876
  Synthetic oligonucleotide

SEQ ID NO: 655103 - DNA, 55 bp, Artificial; identical to SEQ ID NO: 271653
  Synthetic oligonucleotide

SEQ ID NO: 655104 - DNA, 55 bp, Artificial; identical to SEQ ID NO: 279499
  Synthetic oligonucleotide

SEQ ID NO: 655105 - DNA, 55 bp, Artificial; identical to SEQ ID NO: 279504
  Synthetic oligonucleotide

SEQ ID NO: 655106 - DNA, 54 bp, Artificial; identical to SEQ ID NO: 279363
  Synthetic oligonucleotide

SEQ ID NO: 655107 - DNA, 52 bp, Artificial; identical to SEQ ID NO: 282870
  Synthetic oligonucleotide

SEQ ID NO: 655108 - DNA, 53 bp, Artificial; identical to SEQ ID NO: 282690
  Synthetic oligonucleotide

SEQ ID NO: 655109 - DNA, 55 bp, Artificial; identical to SEQ ID NO: 279508
  Synthetic oligonucleotide

SEQ ID NO: 655110 - DNA, 53 bp, Artificial; identical to SEQ ID NO: 279582
  Synthetic oligonucleotide

SEQ ID NO: 655111 - DNA, 53 bp, Artificial; identical to SEQ ID NO: 282736
  Synthetic oligonucleotide

SEQ ID NO: 655112 - DNA, 55 bp, Artificial; identical to SEQ ID NO: 279540
  Synthetic oligonucleotide

SEQ ID NO: 655113 - DNA, 55 bp, Artificial; identical to SEQ ID NO: 279556
  Synthetic oligonucleotide

SEQ ID NO: 655114 - DNA, 54 bp, Artificial; identical to SEQ ID NO: 282174
  Synthetic oligonucleotide

SEQ ID NO: 655115 - DNA, 55 bp, Artificial; identical to SEQ ID NO: 286217
  Synthetic oligonucleotide

SEQ ID NO: 655116 - DNA, 55 bp, Artificial; identical to SEQ ID NO: 285607
  Synthetic oligonucleotide

SEQ ID NO: 655117 - DNA, 55 bp, Artificial; identical to SEQ ID NO: 269431
  Synthetic oligonucleotide

SEQ ID NO: 655118 - DNA, 54 bp, Artificial; identical to SEQ ID NO: 279114
  Synthetic oligonucleotide

SEQ ID NO: 655119 - DNA, 57 bp, Artificial; identical to SEQ ID NO: 268358
  Synthetic oligonucleotide

SEQ ID NO: 655120 - DNA, 54 bp, Artificial; identical to SEQ ID NO: 282176
  Synthetic oligonucleotide

SEQ ID NO: 655121 - DNA, 55 bp, Artificial; identical to SEQ ID NO: 285832
  Synthetic oligonucleotide

SEQ ID NO: 655122 - DNA, 59 bp, Artificial; identical to SEQ ID NO: 279199
  Synthetic oligonucleotide

SEQ ID NO: 655123 - DNA, 53 bp, Artificial; identical to SEQ ID NO: 267874
  Synthetic oligonucleotide

SEQ ID NO: 655124 - DNA, 55 bp, Artificial; identical to SEQ ID NO: 279518
  Synthetic oligonucleotide

SEQ ID NO: 655125 - DNA, 55 bp, Artificial; identical to SEQ ID NO: 279513
  Synthetic oligonucleotide

SEQ ID NO: 655126 - DNA, 52 bp, Artificial; identical to SEQ ID NO: 282821
  Synthetic oligonucleotide

SEQ ID NO: 655127 - DNA, 55 bp, Artificial; identical to SEQ ID NO: 278210
  Synthetic oligonucleotide

SEQ ID NO: 655128 - DNA, 55 bp, Artificial; identical to SEQ ID NO: 280644
  Synthetic oligonucleotide

SEQ ID NO: 655129 - DNA, 55 bp, Artificial; identical to SEQ ID NO: 280646
  Synthetic oligonucleotide

SEQ ID NO: 655130 - DNA, 55 bp, Artificial; identical to SEQ ID NO: 280647
  Synthetic oligonucleotide

SEQ ID NO: 655131 - DNA, 55 bp, Artificial; identical to SEQ ID NO: 280648
  Synthetic oligonucleotide

SEQ ID NO: 655132 - DNA, 54 bp, Artificial; identical to SEQ ID NO: 282215
  Synthetic oligonucleotide

SEQ ID NO: 655133 - DNA, 55 bp, Artificial; identical to SEQ ID NO: 280651
  Synthetic oligonucleotide

SEQ ID NO: 655134 - DNA, 55 bp, Artificial; identical to SEQ ID NO: 280654
  Synthetic oligonucleotide

SEQ ID NO: 655135 - DNA, 52 bp, Artificial; identical to SEQ ID NO: 278267
  Synthetic oligonucleotide

SEQ ID NO: 655136 - DNA, 52 bp, Artificial; identical to SEQ ID NO: 282837
  Synthetic oligonucleotide

SEQ ID NO: 655137 - DNA, 60 bp, Artificial; identical to SEQ ID NO: 285522
  Synthetic oligonucleotide

SEQ ID NO: 655138 - DNA, 55 bp, Artificial; identical to SEQ ID NO: 280658
  Synthetic oligonucleotide

SEQ ID NO: 655139 - DNA, 52 bp, Artificial; identical to SEQ ID NO: 282835
  Synthetic oligonucleotide

SEQ ID NO: 655140 - DNA, 55 bp, Artificial; identical to SEQ ID NO: 268029
  Synthetic oligonucleotide

SEQ ID NO: 655141 - DNA, 54 bp, Artificial; identical to SEQ ID NO: 268899
  Synthetic oligonucleotide

SEQ ID NO: 655142 - DNA, 58 bp, Artificial; identical to SEQ ID NO: 267895
  Synthetic oligonucleotide

SEQ ID NO: 655143 - DNA, 55 bp, Artificial; identical to SEQ ID NO: 278268
  Synthetic oligonucleotide

SEQ ID NO: 655144 - DNA, 55 bp, Artificial; identical to SEQ ID NO: 268446
  Synthetic oligonucleotide

SEQ ID NO: 655145 - DNA, 55 bp, Artificial; identical to SEQ ID NO: 280663
  Synthetic oligonucleotide

SEQ ID NO: 655146 - DNA, 55 bp, Artificial; identical to SEQ ID NO: 280665
  Synthetic oligonucleotide

SEQ ID NO: 655147 - DNA, 55 bp, Artificial; identical to SEQ ID NO: 286212
  Synthetic oligonucleotide

SEQ ID NO: 655148 - DNA, 54 bp, Artificial; identical to SEQ ID NO: 271808
  Synthetic oligonucleotide

SEQ ID NO: 655149 - DNA, 60 bp, Artificial; identical to SEQ ID NO: 285821
  Synthetic oligonucleotide

SEQ ID NO: 655150 - DNA, 55 bp, Artificial; identical to SEQ ID NO: 278270
  Synthetic oligonucleotide

SEQ ID NO: 655151 - DNA, 58 bp, Artificial; identical to SEQ ID NO: 285789
  Synthetic oligonucleotide

SEQ ID NO: 655152 - DNA, 55 bp, Artificial; identical to SEQ ID NO: 280667
  Synthetic oligonucleotide

SEQ ID NO: 655153 - DNA, 55 bp, Artificial; identical to SEQ ID NO: 280668
  Synthetic oligonucleotide

SEQ ID NO: 655154 - DNA, 55 bp, Artificial; identical to SEQ ID NO: 269429
  Synthetic oligonucleotide

SEQ ID NO: 655155 - DNA, 54 bp, Artificial; identical to SEQ ID NO: 268563
  Synthetic oligonucleotide

SEQ ID NO: 655156 - DNA, 55 bp, Artificial; identical to SEQ ID NO: 280611
  Synthetic oligonucleotide

SEQ ID NO: 655157 - DNA, 55 bp, Artificial; identical to SEQ ID NO: 278272
  Synthetic oligonucleotide

SEQ ID NO: 655158 - DNA, 60 bp, Artificial; identical to SEQ ID NO: 285692
  Synthetic oligonucleotide

SEQ ID NO: 655159 - DNA, 53 bp, Artificial; identical to SEQ ID NO: 285726
  Synthetic oligonucleotide

SEQ ID NO: 655160 - DNA, 55 bp, Artificial; identical to SEQ ID NO: 278274
  Synthetic oligonucleotide

SEQ ID NO: 655161 - DNA, 55 bp, Artificial; identical to SEQ ID NO: 280614
  Synthetic oligonucleotide

SEQ ID NO: 655162 - DNA, 55 bp, Artificial; identical to SEQ ID NO: 280615
  Synthetic oligonucleotide

SEQ ID NO: 655163 - DNA, 60 bp, Artificial; identical to SEQ ID NO: 268552
  Synthetic oligonucleotide

SEQ ID NO: 655164 - DNA, 55 bp, Artificial; identical to SEQ ID NO: 280616
  Synthetic oligonucleotide

SEQ ID NO: 655165 - DNA, 52 bp, Artificial; identical to SEQ ID NO: 285705
  Synthetic oligonucleotide

SEQ ID NO: 655166 - DNA, 55 bp, Artificial; identical to SEQ ID NO: 280618
  Synthetic oligonucleotide

SEQ ID NO: 655167 - DNA, 50 bp, Artificial; identical to SEQ ID NO: 269389
  Synthetic oligonucleotide

SEQ ID NO: 655168 - DNA, 55 bp, Artificial; identical to SEQ ID NO: 280619
  Synthetic oligonucleotide

SEQ ID NO: 655169 - DNA, 55 bp, Artificial; identical to SEQ ID NO: 280622
  Synthetic oligonucleotide

SEQ ID NO: 655170 - DNA, 50 bp, Artificial; identical to SEQ ID NO: 285044
  Synthetic oligonucleotide

SEQ ID NO: 655171 - DNA, 55 bp, Artificial; identical to SEQ ID NO: 280623
  Synthetic oligonucleotide

SEQ ID NO: 655172 - DNA, 55 bp, Artificial; identical to SEQ ID NO: 280624
  Synthetic oligonucleotide

SEQ ID NO: 655173 - DNA, 55 bp, Artificial; identical to SEQ ID NO: 278279
  Synthetic oligonucleotide

SEQ ID NO: 655174 - DNA, 53 bp, Artificial; identical to SEQ ID NO: 269166
  Synthetic oligonucleotide

SEQ ID NO: 655175 - DNA, 55 bp, Artificial; identical to SEQ ID NO: 280628
  Synthetic oligonucleotide

SEQ ID NO: 655176 - DNA, 56 bp, Artificial; identical to SEQ ID NO: 285757
  Synthetic oligonucleotide

SEQ ID NO: 655177 - DNA, 55 bp, Artificial; identical to SEQ ID NO: 286210
  Synthetic oligonucleotide

SEQ ID NO: 655178 - DNA, 60 bp, Artificial; identical to SEQ ID NO: 268541
  Synthetic oligonucleotide

SEQ ID NO: 655179 - DNA, 55 bp, Artificial; identical to SEQ ID NO: 280632
  Synthetic oligonucleotide

SEQ ID NO: 655180 - DNA, 55 bp, Artificial; identical to SEQ ID NO: 280635
  Synthetic oligonucleotide

SEQ ID NO: 655181 - DNA, 55 bp, Artificial; identical to SEQ ID NO: 269428
  Synthetic oligonucleotide

SEQ ID NO: 655182 - DNA, 55 bp, Artificial; identical to SEQ ID NO: 280701
  Synthetic oligonucleotide

SEQ ID NO: 655183 - DNA, 55 bp, Artificial; identical to SEQ ID NO: 280702
  Synthetic oligonucleotide

SEQ ID NO: 655184 - DNA, 55 bp, Artificial; identical to SEQ ID NO: 268912
  Synthetic oligonucleotide

SEQ ID NO: 655185 - DNA, 55 bp, Artificial; identical to SEQ ID NO: 280704
  Synthetic oligonucleotide

SEQ ID NO: 655186 - DNA, 55 bp, Artificial; identical to SEQ ID NO: 268484
  Synthetic oligonucleotide

SEQ ID NO: 655187 - DNA, 55 bp, Artificial; identical to SEQ ID NO: 280705
  Synthetic oligonucleotide

SEQ ID NO: 655188 - DNA, 53 bp, Artificial; identical to SEQ ID NO: 282591
  Synthetic oligonucleotide

SEQ ID NO: 655189 - DNA, 55 bp, Artificial; identical to SEQ ID NO: 280714
  Synthetic oligonucleotide

SEQ ID NO: 655190 - DNA, 55 bp, Artificial; identical to SEQ ID NO: 280715
  Synthetic oligonucleotide

SEQ ID NO: 655191 - DNA, 55 bp, Artificial; identical to SEQ ID NO: 280717
  Synthetic oligonucleotide

SEQ ID NO: 655192 - DNA, 60 bp, Artificial; identical to SEQ ID NO: 279126
  Synthetic oligonucleotide

SEQ ID NO: 655193 - DNA, 55 bp, Artificial; identical to SEQ ID NO: 280721
  Synthetic oligonucleotide

SEQ ID NO: 655194 - DNA, 55 bp, Artificial; identical to SEQ ID NO: 280723
  Synthetic oligonucleotide

SEQ ID NO: 655195 - DNA, 55 bp, Artificial; identical to SEQ ID NO: 280724
  Synthetic oligonucleotide

SEQ ID NO: 655196 - DNA, 51 bp, Artificial; identical to SEQ ID NO: 270339
  Synthetic oligonucleotide

SEQ ID NO: 655197 - DNA, 55 bp, Artificial; identical to SEQ ID NO: 278286
  Synthetic oligonucleotide

SEQ ID NO: 655198 - DNA, 55 bp, Artificial; identical to SEQ ID NO: 278288
  Synthetic oligonucleotide

SEQ ID NO: 655199 - DNA, 55 bp, Artificial; identical to SEQ ID NO: 286012
  Synthetic oligonucleotide

SEQ ID NO: 655200 - DNA, 56 bp, Artificial; identical to SEQ ID NO: 267951
  Synthetic oligonucleotide

SEQ ID NO: 655201 - DNA, 60 bp, Artificial; identical to SEQ ID NO: 285849
  Synthetic oligonucleotide

SEQ ID NO: 655202 - DNA, 55 bp, Artificial; identical to SEQ ID NO: 280670
  Synthetic oligonucleotide

SEQ ID NO: 655203 - DNA, 55 bp, Artificial; identical to SEQ ID NO: 280671
  Synthetic oligonucleotide

SEQ ID NO: 655204 - DNA, 55 bp, Artificial; identical to SEQ ID NO: 280672
  Synthetic oligonucleotide

SEQ ID NO: 655205 - DNA, 53 bp, Artificial; identical to SEQ ID NO: 282656
  Synthetic oligonucleotide

SEQ ID NO: 655206 - DNA, 54 bp, Artificial; identical to SEQ ID NO: 286291
  Synthetic oligonucleotide

SEQ ID NO: 655207 - DNA, 55 bp, Artificial; identical to SEQ ID NO: 280676
  Synthetic oligonucleotide

SEQ ID NO: 655208 - DNA, 55 bp, Artificial; identical to SEQ ID NO: 278290
  Synthetic oligonucleotide

SEQ ID NO: 655209 - DNA, 55 bp, Artificial; identical to SEQ ID NO: 280677
  Synthetic oligonucleotide

SEQ ID NO: 655210 - DNA, 51 bp, Artificial; identical to SEQ ID NO: 269223
  Synthetic oligonucleotide

SEQ ID NO: 655211 - DNA, 53 bp, Artificial; identical to SEQ ID NO: 269164
  Synthetic oligonucleotide

SEQ ID NO: 655212 - DNA, 54 bp, Artificial; identical to SEQ ID NO: 280681
  Synthetic oligonucleotide

SEQ ID NO: 655213 - DNA, 55 bp, Artificial; identical to SEQ ID NO: 280682
  Synthetic oligonucleotide

SEQ ID NO: 655214 - DNA, 56 bp, Artificial; identical to SEQ ID NO: 279212
  Synthetic oligonucleotide

SEQ ID NO: 655215 - DNA, 53 bp, Artificial; identical to SEQ ID NO: 268518
  Synthetic oligonucleotide

SEQ ID NO: 655216 - DNA, 60 bp, Artificial; identical to SEQ ID NO: 280376
  Synthetic oligonucleotide

SEQ ID NO: 655217 - DNA, 55 bp, Artificial; identical to SEQ ID NO: 280683
  Synthetic oligonucleotide

SEQ ID NO: 655218 - DNA, 56 bp, Artificial; identical to SEQ ID NO: 279397
  Synthetic oligonucleotide

SEQ ID NO: 655219 - DNA, 53 bp, Artificial; identical to SEQ ID NO: 280684
  Synthetic oligonucleotide

SEQ ID NO: 655220 - DNA, 55 bp, Artificial; identical to SEQ ID NO: 280685
  Synthetic oligonucleotide

SEQ ID NO: 655221 - DNA, 55 bp, Artificial; identical to SEQ ID NO: 278237
  Synthetic oligonucleotide

SEQ ID NO: 655222 - DNA, 53 bp, Artificial; identical to SEQ ID NO: 282670
  Synthetic oligonucleotide

SEQ ID NO: 655223 - DNA, 60 bp, Artificial; identical to SEQ ID NO: 280709
  Synthetic oligonucleotide

SEQ ID NO: 655224 - DNA, 50 bp, Artificial; identical to SEQ ID NO: 267891
  Synthetic oligonucleotide

SEQ ID NO: 655225 - DNA, 55 bp, Artificial; identical to SEQ ID NO: 286008
  Synthetic oligonucleotide

SEQ ID NO: 655226 - DNA, 54 bp, Artificial; identical to SEQ ID NO: 280687
  Synthetic oligonucleotide

SEQ ID NO: 655227 - DNA, 53 bp, Artificial; identical to SEQ ID NO: 282624
  Synthetic oligonucleotide

SEQ ID NO: 655228 - DNA, 51 bp, Artificial; identical to SEQ ID NO: 283433
  Synthetic oligonucleotide

SEQ ID NO: 655229 - DNA, 58 bp, Artificial; identical to SEQ ID NO: 268507
  Synthetic oligonucleotide

SEQ ID NO: 655230 - DNA, 55 bp, Artificial; identical to SEQ ID NO: 271819
  Synthetic oligonucleotide

SEQ ID NO: 655231 - DNA, 55 bp, Artificial; identical to SEQ ID NO: 280688
  Synthetic oligonucleotide

SEQ ID NO: 655232 - DNA, 53 bp, Artificial; identical to SEQ ID NO: 282629
  Synthetic oligonucleotide

SEQ ID NO: 655233 - DNA, 60 bp, Artificial; identical to SEQ ID NO: 279875
  Synthetic oligonucleotide

SEQ ID NO: 655234 - DNA, 59 bp, Artificial; identical to SEQ ID NO: 280087
  Synthetic oligonucleotide

SEQ ID NO: 655235 - DNA, 60 bp, Artificial; identical to SEQ ID NO: 281431
  Synthetic oligonucleotide

SEQ ID NO: 655236 - DNA, 55 bp, Artificial; identical to SEQ ID NO: 286007
  Synthetic oligonucleotide

SEQ ID NO: 655237 - DNA, 57 bp, Artificial; identical to SEQ ID NO: 281342
  Synthetic oligonucleotide

SEQ ID NO: 655238 - DNA, 55 bp, Artificial; identical to SEQ ID NO: 278238
  Synthetic oligonucleotide

SEQ ID NO: 655239 - DNA, 52 bp, Artificial; identical to SEQ ID NO: 282909
  Synthetic oligonucleotide

SEQ ID NO: 655240 - DNA, 56 bp, Artificial; identical to SEQ ID NO: 280886
  Synthetic oligonucleotide

SEQ ID NO: 655241 - DNA, 54 bp, Artificial; identical to SEQ ID NO: 280694
  Synthetic oligonucleotide

SEQ ID NO: 655242 - DNA, 60 bp, Artificial; identical to SEQ ID NO: 281053
  Synthetic oligonucleotide

SEQ ID NO: 655243 - DNA, 58 bp, Artificial; identical to SEQ ID NO: 268496
  Synthetic oligonucleotide

SEQ ID NO: 655244 - DNA, 60 bp, Artificial; identical to SEQ ID NO: 284808
  Synthetic oligonucleotide

SEQ ID NO: 655245 - DNA, 55 bp, Artificial; identical to SEQ ID NO: 270278
  Synthetic oligonucleotide

SEQ ID NO: 655246 - DNA, 58 bp, Artificial; identical to SEQ ID NO: 279243
  Synthetic oligonucleotide

SEQ ID NO: 655247 - DNA, 53 bp, Artificial; identical to SEQ ID NO: 282643
  Synthetic oligonucleotide

SEQ ID NO: 655248 - DNA, 55 bp, Artificial; identical to SEQ ID NO: 280521
  Synthetic oligonucleotide

SEQ ID NO: 655249 - DNA, 55 bp, Artificial; identical to SEQ ID NO: 280522
  Synthetic oligonucleotide

SEQ ID NO: 655250 - DNA, 55 bp, Artificial; identical to SEQ ID NO: 280523
  Synthetic oligonucleotide

SEQ ID NO: 655251 - DNA, 60 bp, Artificial; identical to SEQ ID NO: 285662
  Synthetic oligonucleotide

SEQ ID NO: 655252 - DNA, 53 bp, Artificial; identical to SEQ ID NO: 282646
  Synthetic oligonucleotide

SEQ ID NO: 655253 - DNA, 53 bp, Artificial; identical to SEQ ID NO: 285573
  Synthetic oligonucleotide

SEQ ID NO: 655254 - DNA, 53 bp, Artificial; identical to SEQ ID NO: 282649
  Synthetic oligonucleotide

SEQ ID NO: 655255 - DNA, 52 bp, Artificial; identical to SEQ ID NO: 282750
  Synthetic oligonucleotide

SEQ ID NO: 655256 - DNA, 55 bp, Artificial; identical to SEQ ID NO: 280525
  Synthetic oligonucleotide

SEQ ID NO: 655257 - DNA, 55 bp, Artificial; identical to SEQ ID NO: 278241
  Synthetic oligonucleotide

SEQ ID NO: 655258 - DNA, 55 bp, Artificial; identical to SEQ ID NO: 278243
  Synthetic oligonucleotide

SEQ ID NO: 655259 - DNA, 52 bp, Artificial; identical to SEQ ID NO: 282762
  Synthetic oligonucleotide

SEQ ID NO: 655260 - DNA, 55 bp, Artificial; identical to SEQ ID NO: 280528
  Synthetic oligonucleotide

SEQ ID NO: 655261 - DNA, 56 bp, Artificial; identical to SEQ ID NO: 279392
  Synthetic oligonucleotide

SEQ ID NO: 655262 - DNA, 55 bp, Artificial; identical to SEQ ID NO: 280529
  Synthetic oligonucleotide

SEQ ID NO: 655263 - DNA, 53 bp, Artificial; identical to SEQ ID NO: 282635
  Synthetic oligonucleotide

SEQ ID NO: 655264 - DNA, 60 bp, Artificial; identical to SEQ ID NO: 281697
  Synthetic oligonucleotide

SEQ ID NO: 655265 - DNA, 55 bp, Artificial; identical to SEQ ID NO: 268906
  Synthetic oligonucleotide

SEQ ID NO: 655266 - DNA, 55 bp, Artificial; identical to SEQ ID NO: 269677
  Synthetic oligonucleotide

SEQ ID NO: 655267 - DNA, 50 bp, Artificial; identical to SEQ ID NO: 285052
  Synthetic oligonucleotide

SEQ ID NO: 655268 - DNA, 55 bp, Artificial; identical to SEQ ID NO: 268905
  Synthetic oligonucleotide

SEQ ID NO: 655269 - DNA, 57 bp, Artificial; identical to SEQ ID NO: 279334
  Synthetic oligonucleotide

SEQ ID NO: 655270 - DNA, 55 bp, Artificial; identical to SEQ ID NO: 280533
  Synthetic oligonucleotide

SEQ ID NO: 655271 - DNA, 50 bp, Artificial; identical to SEQ ID NO: 285054
  Synthetic oligonucleotide

SEQ ID NO: 655272 - DNA, 55 bp, Artificial; identical to SEQ ID NO: 285997
  Synthetic oligonucleotide

SEQ ID NO: 655273 - DNA, 52 bp, Artificial; identical to SEQ ID NO: 282766
  Synthetic oligonucleotide

SEQ ID NO: 655274 - DNA, 53 bp, Artificial; identical to SEQ ID NO: 282623
  Synthetic oligonucleotide

SEQ ID NO: 655275 - DNA, 55 bp, Artificial; identical to SEQ ID NO: 270334
  Synthetic oligonucleotide

SEQ ID NO: 655276 - DNA, 55 bp, Artificial; identical to SEQ ID NO: 271730
  Synthetic oligonucleotide

SEQ ID NO: 655277 - DNA, 55 bp, Artificial; identical to SEQ ID NO: 280537
  Synthetic oligonucleotide

SEQ ID NO: 655278 - DNA, 54 bp, Artificial; identical to SEQ ID NO: 282274
  Synthetic oligonucleotide

SEQ ID NO: 655279 - DNA, 55 bp, Artificial; identical to SEQ ID NO: 280538
  Synthetic oligonucleotide

SEQ ID NO: 655280 - DNA, 56 bp, Artificial; identical to SEQ ID NO: 268639
  Synthetic oligonucleotide

SEQ ID NO: 655281 - DNA, 55 bp, Artificial; identical to SEQ ID NO: 280539
  Synthetic oligonucleotide

SEQ ID NO: 655282 - DNA, 55 bp, Artificial; identical to SEQ ID NO: 279206
  Synthetic oligonucleotide

SEQ ID NO: 655283 - DNA, 59 bp, Artificial; identical to SEQ ID NO: 284275
  Synthetic oligonucleotide

SEQ ID NO: 655284 - DNA, 55 bp, Artificial; identical to SEQ ID NO: 267870
  Synthetic oligonucleotide

SEQ ID NO: 655285 - DNA, 55 bp, Artificial; identical to SEQ ID NO: 280540
  Synthetic oligonucleotide

SEQ ID NO: 655286 - DNA, 55 bp, Artificial; identical to SEQ ID NO: 268903
  Synthetic oligonucleotide

SEQ ID NO: 655287 - DNA, 55 bp, Artificial; identical to SEQ ID NO: 280543
  Synthetic oligonucleotide

SEQ ID NO: 655288 - DNA, 60 bp, Artificial; identical to SEQ ID NO: 284441
  Synthetic oligonucleotide

SEQ ID NO: 655289 - DNA, 52 bp, Artificial; identical to SEQ ID NO: 282804
  Synthetic oligonucleotide

SEQ ID NO: 655290 - DNA, 55 bp, Artificial; identical to SEQ ID NO: 270046
  Synthetic oligonucleotide

SEQ ID NO: 655291 - DNA, 52 bp, Artificial; identical to SEQ ID NO: 282807
  Synthetic oligonucleotide

SEQ ID NO: 655292 - DNA, 55 bp, Artificial; identical to SEQ ID NO: 278248
  Synthetic oligonucleotide

SEQ ID NO: 655293 - DNA, 60 bp, Artificial; identical to SEQ ID NO: 283764
  Synthetic oligonucleotide

SEQ ID NO: 655294 - DNA, 55 bp, Artificial; identical to SEQ ID NO: 271719
  Synthetic oligonucleotide

SEQ ID NO: 655295 - DNA, 55 bp, Artificial; identical to SEQ ID NO: 271311
  Synthetic oligonucleotide

SEQ ID NO: 655296 - DNA, 55 bp, Artificial; identical to SEQ ID NO: 284130
  Synthetic oligonucleotide

SEQ ID NO: 655297 - DNA, 55 bp, Artificial; identical to SEQ ID NO: 286028
  Synthetic oligonucleotide

SEQ ID NO: 655298 - DNA, 55 bp, Artificial; identical to SEQ ID NO: 268901
  Synthetic oligonucleotide

SEQ ID NO: 655299 - DNA, 55 bp, Artificial; identical to SEQ ID NO: 286027
  Synthetic oligonucleotide

SEQ ID NO: 655300 - DNA, 55 bp, Artificial; identical to SEQ ID NO: 280497
  Synthetic oligonucleotide

SEQ ID NO: 655301 - DNA, 55 bp, Artificial; identical to SEQ ID NO: 286026
  Synthetic oligonucleotide

SEQ ID NO: 655302 - DNA, 55 bp, Artificial; identical to SEQ ID NO: 278255
  Synthetic oligonucleotide

SEQ ID NO: 655303 - DNA, 55 bp, Artificial; identical to SEQ ID NO: 286024
  Synthetic oligonucleotide

SEQ ID NO: 655304 - DNA, 53 bp, Artificial; identical to SEQ ID NO: 278696
  Synthetic oligonucleotide

SEQ ID NO: 655305 - DNA, 56 bp, Artificial; identical to SEQ ID NO: 284864
  Synthetic oligonucleotide

SEQ ID NO: 655306 - DNA, 54 bp, Artificial; identical to SEQ ID NO: 268638
  Synthetic oligonucleotide

SEQ ID NO: 655307 - DNA, 55 bp, Artificial; identical to SEQ ID NO: 280501
  Synthetic oligonucleotide

SEQ ID NO: 655308 - DNA, 55 bp, Artificial; identical to SEQ ID NO: 280502
  Synthetic oligonucleotide

SEQ ID NO: 655309 - DNA, 56 bp, Artificial; identical to SEQ ID NO: 268637
  Synthetic oligonucleotide

SEQ ID NO: 655310 - DNA, 55 bp, Artificial; identical to SEQ ID NO: 286021
  Synthetic oligonucleotide

SEQ ID NO: 655311 - DNA, 55 bp, Artificial; identical to SEQ ID NO: 278258
  Synthetic oligonucleotide

SEQ ID NO: 655312 - DNA, 60 bp, Artificial; identical to SEQ ID NO: 282353
  Synthetic oligonucleotide

SEQ ID NO: 655313 - DNA, 60 bp, Artificial; identical to SEQ ID NO: 268636
  Synthetic oligonucleotide

SEQ ID NO: 655314 - DNA, 55 bp, Artificial; identical to SEQ ID NO: 270277
  Synthetic oligonucleotide

SEQ ID NO: 655315 - DNA, 55 bp, Artificial; identical to SEQ ID NO: 286019
  Synthetic oligonucleotide

SEQ ID NO: 655316 - DNA, 55 bp, Artificial; identical to SEQ ID NO: 280503
  Synthetic oligonucleotide

SEQ ID NO: 655317 - DNA, 55 bp, Artificial; identical to SEQ ID NO: 268334
  Synthetic oligonucleotide

SEQ ID NO: 655318 - DNA, 55 bp, Artificial; identical to SEQ ID NO: 270325
  Synthetic oligonucleotide

SEQ ID NO: 655319 - DNA, 55 bp, Artificial; identical to SEQ ID NO: 286018
  Synthetic oligonucleotide

SEQ ID NO: 655320 - DNA, 60 bp, Artificial; identical to SEQ ID NO: 282620
  Synthetic oligonucleotide

SEQ ID NO: 655321 - DNA, 54 bp, Artificial; identical to SEQ ID NO: 282354
  Synthetic oligonucleotide

SEQ ID NO: 655322 - DNA, 55 bp, Artificial; identical to SEQ ID NO: 280505
  Synthetic oligonucleotide

SEQ ID NO: 655323 - DNA, 51 bp, Artificial; identical to SEQ ID NO: 283756
  Synthetic oligonucleotide

SEQ ID NO: 655324 - DNA, 55 bp, Artificial; identical to SEQ ID NO: 280508
  Synthetic oligonucleotide

SEQ ID NO: 655325 - DNA, 57 bp, Artificial; identical to SEQ ID NO: 268635
  Synthetic oligonucleotide

SEQ ID NO: 655326 - DNA, 55 bp, Artificial; identical to SEQ ID NO: 286017
  Synthetic oligonucleotide

SEQ ID NO: 655327 - DNA, 55 bp, Artificial; identical to SEQ ID NO: 268898
  Synthetic oligonucleotide

SEQ ID NO: 655328 - DNA, 55 bp, Artificial; identical to SEQ ID NO: 280511
  Synthetic oligonucleotide

SEQ ID NO: 655329 - DNA, 55 bp, Artificial; identical to SEQ ID NO: 278262
  Synthetic oligonucleotide

SEQ ID NO: 655330 - DNA, 55 bp, Artificial; identical to SEQ ID NO: 280513
  Synthetic oligonucleotide

SEQ ID NO: 655331 - DNA, 52 bp, Artificial; identical to SEQ ID NO: 278761
  Synthetic oligonucleotide

SEQ ID NO: 655332 - DNA, 56 bp, Artificial; identical to SEQ ID NO: 268633
  Synthetic oligonucleotide

SEQ ID NO: 655333 - DNA, 60 bp, Artificial; identical to SEQ ID NO: 281720
  Synthetic oligonucleotide

SEQ ID NO: 655334 - DNA, 55 bp, Artificial; identical to SEQ ID NO: 280516
  Synthetic oligonucleotide

SEQ ID NO: 655335 - DNA, 55 bp, Artificial; identical to SEQ ID NO: 271708
  Synthetic oligonucleotide

SEQ ID NO: 655336 - DNA, 55 bp, Artificial; identical to SEQ ID NO: 278105
  Synthetic oligonucleotide

SEQ ID NO: 655337 - DNA, 55 bp, Artificial; identical to SEQ ID NO: 280580
  Synthetic oligonucleotide

SEQ ID NO: 655338 - DNA, 59 bp, Artificial; identical to SEQ ID NO: 282075
  Synthetic oligonucleotide

SEQ ID NO: 655339 - DNA, 55 bp, Artificial; identical to SEQ ID NO: 280585
  Synthetic oligonucleotide

SEQ ID NO: 655340 - DNA, 55 bp, Artificial; identical to SEQ ID NO: 268896
  Synthetic oligonucleotide

SEQ ID NO: 655341 - DNA, 55 bp, Artificial; identical to SEQ ID NO: 280593
  Synthetic oligonucleotide

SEQ ID NO: 655342 - DNA, 58 bp, Artificial; identical to SEQ ID NO: 279210
  Synthetic oligonucleotide

SEQ ID NO: 655343 - DNA, 55 bp, Artificial; identical to SEQ ID NO: 278111
  Synthetic oligonucleotide

SEQ ID NO: 655344 - DNA, 55 bp, Artificial; identical to SEQ ID NO: 280594
  Synthetic oligonucleotide

SEQ ID NO: 655345 - DNA, 55 bp, Artificial; identical to SEQ ID NO: 278112
  Synthetic oligonucleotide

SEQ ID NO: 655346 - DNA, 55 bp, Artificial; identical to SEQ ID NO: 280595
  Synthetic oligonucleotide

SEQ ID NO: 655347 - DNA, 55 bp, Artificial; identical to SEQ ID NO: 280596
  Synthetic oligonucleotide

SEQ ID NO: 655348 - DNA, 57 bp, Artificial; identical to SEQ ID NO: 268632
  Synthetic oligonucleotide

SEQ ID NO: 655349 - DNA, 52 bp, Artificial; identical to SEQ ID NO: 282814
  Synthetic oligonucleotide

SEQ ID NO: 655350 - DNA, 60 bp, Artificial; identical to SEQ ID NO: 282975
  Synthetic oligonucleotide

SEQ ID NO: 655351 - DNA, 55 bp, Artificial; identical to SEQ ID NO: 280599
  Synthetic oligonucleotide

SEQ ID NO: 655352 - DNA, 52 bp, Artificial; identical to SEQ ID NO: 282806
  Synthetic oligonucleotide

SEQ ID NO: 655353 - DNA, 55 bp, Artificial; identical to SEQ ID NO: 278114
  Synthetic oligonucleotide

SEQ ID NO: 655354 - DNA, 55 bp, Artificial; identical to SEQ ID NO: 271686
  Synthetic oligonucleotide

SEQ ID NO: 655355 - DNA, 51 bp, Artificial; identical to SEQ ID NO: 286425
  Synthetic oligonucleotide

SEQ ID NO: 655356 - DNA, 51 bp, Artificial; identical to SEQ ID NO: 283769
  Synthetic oligonucleotide

SEQ ID NO: 655357 - DNA, 55 bp, Artificial; identical to SEQ ID NO: 286518
  Synthetic oligonucleotide

SEQ ID NO: 655358 - DNA, 54 bp, Artificial; identical to SEQ ID NO: 278115
  Synthetic oligonucleotide

SEQ ID NO: 655359 - DNA, 55 bp, Artificial; identical to SEQ ID NO: 271817
  Synthetic oligonucleotide

SEQ ID NO: 655360 - DNA, 60 bp, Artificial; identical to SEQ ID NO: 283130
  Synthetic oligonucleotide

SEQ ID NO: 655361 - DNA, 55 bp, Artificial; identical to SEQ ID NO: 278118
  Synthetic oligonucleotide

SEQ ID NO: 655362 - DNA, 59 bp, Artificial; identical to SEQ ID NO: 282698
  Synthetic oligonucleotide

SEQ ID NO: 655363 - DNA, 55 bp, Artificial; identical to SEQ ID NO: 268481
  Synthetic oligonucleotide

SEQ ID NO: 655364 - DNA, 55 bp, Artificial; identical to SEQ ID NO: 268031
  Synthetic oligonucleotide

SEQ ID NO: 655365 - DNA, 60 bp, Artificial; identical to SEQ ID NO: 282731
  Synthetic oligonucleotide

SEQ ID NO: 655366 - DNA, 55 bp, Artificial; identical to SEQ ID NO: 280607
  Synthetic oligonucleotide

SEQ ID NO: 655367 - DNA, 55 bp, Artificial; identical to SEQ ID NO: 278119
  Synthetic oligonucleotide

SEQ ID NO: 655368 - DNA, 57 bp, Artificial; identical to SEQ ID NO: 279300
  Synthetic oligonucleotide

SEQ ID NO: 655369 - DNA, 55 bp, Artificial; identical to SEQ ID NO: 280608
  Synthetic oligonucleotide

SEQ ID NO: 655370 - DNA, 55 bp, Artificial; identical to SEQ ID NO: 278121
  Synthetic oligonucleotide

SEQ ID NO: 655371 - DNA, 55 bp, Artificial; identical to SEQ ID NO: 280549
  Synthetic oligonucleotide

SEQ ID NO: 655372 - DNA, 55 bp, Artificial; identical to SEQ ID NO: 280550
  Synthetic oligonucleotide

SEQ ID NO: 655373 - DNA, 57 bp, Artificial; identical to SEQ ID NO: 282864
  Synthetic oligonucleotide

SEQ ID NO: 655374 - DNA, 59 bp, Artificial; identical to SEQ ID NO: 282897
  Synthetic oligonucleotide

SEQ ID NO: 655375 - DNA, 60 bp, Artificial; identical to SEQ ID NO: 282908
  Synthetic oligonucleotide

SEQ ID NO: 655376 - DNA, 52 bp, Artificial; identical to SEQ ID NO: 282747
  Synthetic oligonucleotide

SEQ ID NO: 655377 - DNA, 52 bp, Artificial; identical to SEQ ID NO: 283117
  Synthetic oligonucleotide

SEQ ID NO: 655378 - DNA, 55 bp, Artificial; identical to SEQ ID NO: 268630
  Synthetic oligonucleotide

SEQ ID NO: 655379 - DNA, 55 bp, Artificial; identical to SEQ ID NO: 285969
  Synthetic oligonucleotide

SEQ ID NO: 655380 - DNA, 52 bp, Artificial; identical to SEQ ID NO: 283120
  Synthetic oligonucleotide

SEQ ID NO: 655381 - DNA, 55 bp, Artificial; identical to SEQ ID NO: 267899
  Synthetic oligonucleotide

SEQ ID NO: 655382 - DNA, 55 bp, Artificial; identical to SEQ ID NO: 280559
  Synthetic oligonucleotide

SEQ ID NO: 655383 - DNA, 55 bp, Artificial; identical to SEQ ID NO: 278127
  Synthetic oligonucleotide

SEQ ID NO: 655384 - DNA, 52 bp, Artificial; identical to SEQ ID NO: 283124
  Synthetic oligonucleotide

SEQ ID NO: 655385 - DNA, 55 bp, Artificial; identical to SEQ ID NO: 280561
  Synthetic oligonucleotide

SEQ ID NO: 655386 - DNA, 58 bp, Artificial; identical to SEQ ID NO: 283487
  Synthetic oligonucleotide

SEQ ID NO: 655387 - DNA, 55 bp, Artificial; identical to SEQ ID NO: 280562
  Synthetic oligonucleotide

SEQ ID NO: 655388 - DNA, 51 bp, Artificial; identical to SEQ ID NO: 283700
  Synthetic oligonucleotide

SEQ ID NO: 655389 - DNA, 54 bp, Artificial; identical to SEQ ID NO: 282349
  Synthetic oligonucleotide

SEQ ID NO: 655390 - DNA, 55 bp, Artificial; identical to SEQ ID NO: 280566
  Synthetic oligonucleotide

SEQ ID NO: 655391 - DNA, 52 bp, Artificial; identical to SEQ ID NO: 283553
  Synthetic oligonucleotide

SEQ ID NO: 655392 - DNA, 55 bp, Artificial; identical to SEQ ID NO: 285974
  Synthetic oligonucleotide

SEQ ID NO: 655393 - DNA, 52 bp, Artificial; identical to SEQ ID NO: 268629
  Synthetic oligonucleotide

SEQ ID NO: 655394 - DNA, 51 bp, Artificial; identical to SEQ ID NO: 283695
  Synthetic oligonucleotide

SEQ ID NO: 655395 - DNA, 55 bp, Artificial; identical to SEQ ID NO: 285977
  Synthetic oligonucleotide

SEQ ID NO: 655396 - DNA, 55 bp, Artificial; identical to SEQ ID NO: 280570
  Synthetic oligonucleotide

SEQ ID NO: 655397 - DNA, 51 bp, Artificial; identical to SEQ ID NO: 286392
  Synthetic oligonucleotide

SEQ ID NO: 655398 - DNA, 55 bp, Artificial; identical to SEQ ID NO: 280571
  Synthetic oligonucleotide

SEQ ID NO: 655399 - DNA, 60 bp, Artificial; identical to SEQ ID NO: 283642
  Synthetic oligonucleotide

SEQ ID NO: 655400 - DNA, 55 bp, Artificial; identical to SEQ ID NO: 280573
  Synthetic oligonucleotide

SEQ ID NO: 655401 - DNA, 50 bp, Artificial; identical to SEQ ID NO: 285015
  Synthetic oligonucleotide

SEQ ID NO: 655402 - DNA, 55 bp, Artificial; identical to SEQ ID NO: 280574
  Synthetic oligonucleotide

SEQ ID NO: 655403 - DNA, 55 bp, Artificial; identical to SEQ ID NO: 280579
  Synthetic oligonucleotide

SEQ ID NO: 655404 - DNA, 55 bp, Artificial; identical to SEQ ID NO: 280877
  Synthetic oligonucleotide

SEQ ID NO: 655405 - DNA, 55 bp, Artificial; identical to SEQ ID NO: 280878
  Synthetic oligonucleotide

SEQ ID NO: 655406 - DNA, 55 bp, Artificial; identical to SEQ ID NO: 280879
  Synthetic oligonucleotide

SEQ ID NO: 655407 - DNA, 55 bp, Artificial; identical to SEQ ID NO: 278081
  Synthetic oligonucleotide

SEQ ID NO: 655408 - DNA, 55 bp, Artificial; identical to SEQ ID NO: 280883
  Synthetic oligonucleotide

SEQ ID NO: 655409 - DNA, 54 bp, Artificial; identical to SEQ ID NO: 268891
  Synthetic oligonucleotide

SEQ ID NO: 655410 - DNA, 54 bp, Artificial; identical to SEQ ID NO: 282311
  Synthetic oligonucleotide

SEQ ID NO: 655411 - DNA, 60 bp, Artificial; identical to SEQ ID NO: 281964
  Synthetic oligonucleotide

SEQ ID NO: 655412 - DNA, 60 bp, Artificial; identical to SEQ ID NO: 281986
  Synthetic oligonucleotide

SEQ ID NO: 655413 - DNA, 60 bp, Artificial; identical to SEQ ID NO: 281997
  Synthetic oligonucleotide

SEQ ID NO: 655414 - DNA, 51 bp, Artificial; identical to SEQ ID NO: 268572
  Synthetic oligonucleotide

SEQ ID NO: 655415 - DNA, 55 bp, Artificial; identical to SEQ ID NO: 278082
  Synthetic oligonucleotide

SEQ ID NO: 655416 - DNA, 60 bp, Artificial; identical to SEQ ID NO: 282031
  Synthetic oligonucleotide

SEQ ID NO: 655417 - DNA, 51 bp, Artificial; identical to SEQ ID NO: 280889
  Synthetic oligonucleotide

SEQ ID NO: 655418 - DNA, 60 bp, Artificial; identical to SEQ ID NO: 282053
  Synthetic oligonucleotide

SEQ ID NO: 655419 - DNA, 55 bp, Artificial; identical to SEQ ID NO: 280892
  Synthetic oligonucleotide

SEQ ID NO: 655420 - DNA, 56 bp, Artificial; identical to SEQ ID NO: 267930
  Synthetic oligonucleotide

SEQ ID NO: 655421 - DNA, 55 bp, Artificial; identical to SEQ ID NO: 285985
  Synthetic oligonucleotide

SEQ ID NO: 655422 - DNA, 56 bp, Artificial; identical to SEQ ID NO: 279394
  Synthetic oligonucleotide

SEQ ID NO: 655423 - DNA, 60 bp, Artificial; identical to SEQ ID NO: 282108
  Synthetic oligonucleotide

SEQ ID NO: 655424 - DNA, 55 bp, Artificial; identical to SEQ ID NO: 280895
  Synthetic oligonucleotide

SEQ ID NO: 655425 - DNA, 52 bp, Artificial; identical to SEQ ID NO: 283101
  Synthetic oligonucleotide

SEQ ID NO: 655426 - DNA, 55 bp, Artificial; identical to SEQ ID NO: 280896
  Synthetic oligonucleotide

SEQ ID NO: 655427 - DNA, 55 bp, Artificial; identical to SEQ ID NO: 285986
  Synthetic oligonucleotide

SEQ ID NO: 655428 - DNA, 55 bp, Artificial; identical to SEQ ID NO: 280898
  Synthetic oligonucleotide

SEQ ID NO: 655429 - DNA, 55 bp, Artificial; identical to SEQ ID NO: 285987
  Synthetic oligonucleotide

SEQ ID NO: 655430 - DNA, 55 bp, Artificial; identical to SEQ ID NO: 280901
  Synthetic oligonucleotide

SEQ ID NO: 655431 - DNA, 60 bp, Artificial; identical to SEQ ID NO: 268628
  Synthetic oligonucleotide

SEQ ID NO: 655432 - DNA, 55 bp, Artificial; identical to SEQ ID NO: 280903
  Synthetic oligonucleotide

SEQ ID NO: 655433 - DNA, 55 bp, Artificial; identical to SEQ ID NO: 280904
  Synthetic oligonucleotide

SEQ ID NO: 655434 - DNA, 50 bp, Artificial; identical to SEQ ID NO: 285022
  Synthetic oligonucleotide

SEQ ID NO: 655435 - DNA, 55 bp, Artificial; identical to SEQ ID NO: 268889
  Synthetic oligonucleotide

SEQ ID NO: 655436 - DNA, 56 bp, Artificial; identical to SEQ ID NO: 279477
  Synthetic oligonucleotide

SEQ ID NO: 655437 - DNA, 55 bp, Artificial; identical to SEQ ID NO: 278084
  Synthetic oligonucleotide

SEQ ID NO: 655438 - DNA, 55 bp, Artificial; identical to SEQ ID NO: 278085
  Synthetic oligonucleotide

SEQ ID NO: 655439 - DNA, 55 bp, Artificial; identical to SEQ ID NO: 280848
  Synthetic oligonucleotide

SEQ ID NO: 655440 - DNA, 51 bp, Artificial; identical to SEQ ID NO: 286395
  Synthetic oligonucleotide

SEQ ID NO: 655441 - DNA, 53 bp, Artificial; identical to SEQ ID NO: 281775
  Synthetic oligonucleotide

SEQ ID NO: 655442 - DNA, 57 bp, Artificial; identical to SEQ ID NO: 281786
  Synthetic oligonucleotide

SEQ ID NO: 655443 - DNA, 51 bp, Artificial; identical to SEQ ID NO: 279180
  Synthetic oligonucleotide

SEQ ID NO: 655444 - DNA, 53 bp, Artificial; identical to SEQ ID NO: 271246
  Synthetic oligonucleotide

SEQ ID NO: 655445 - DNA, 52 bp, Artificial; identical to SEQ ID NO: 283115
  Synthetic oligonucleotide

SEQ ID NO: 655446 - DNA, 60 bp, Artificial; identical to SEQ ID NO: 281797
  Synthetic oligonucleotide

SEQ ID NO: 655447 - DNA, 55 bp, Artificial; identical to SEQ ID NO: 280851
  Synthetic oligonucleotide

SEQ ID NO: 655448 - DNA, 55 bp, Artificial; identical to SEQ ID NO: 278089
  Synthetic oligonucleotide

SEQ ID NO: 655449 - DNA, 52 bp, Artificial; identical to SEQ ID NO: 269676
  Synthetic oligonucleotide

SEQ ID NO: 655450 - DNA, 58 bp, Artificial; identical to SEQ ID NO: 281820
  Synthetic oligonucleotide

SEQ ID NO: 655451 - DNA, 52 bp, Artificial; identical to SEQ ID NO: 269177
  Synthetic oligonucleotide

SEQ ID NO: 655452 - DNA, 60 bp, Artificial; identical to SEQ ID NO: 268627
  Synthetic oligonucleotide

SEQ ID NO: 655453 - DNA, 52 bp, Artificial; identical to SEQ ID NO: 276774
  Synthetic oligonucleotide

SEQ ID NO: 655454 - DNA, 55 bp, Artificial; identical to SEQ ID NO: 280854
  Synthetic oligonucleotide

SEQ ID NO: 655455 - DNA, 56 bp, Artificial; identical to SEQ ID NO: 279486
  Synthetic oligonucleotide

SEQ ID NO: 655456 - DNA, 52 bp, Artificial; identical to SEQ ID NO: 283154
  Synthetic oligonucleotide

SEQ ID NO: 655457 - DNA, 51 bp, Artificial; identical to SEQ ID NO: 283719
  Synthetic oligonucleotide

SEQ ID NO: 655458 - DNA, 57 bp, Artificial; identical to SEQ ID NO: 268626
  Synthetic oligonucleotide

SEQ ID NO: 655459 - DNA, 55 bp, Artificial; identical to SEQ ID NO: 278091
  Synthetic oligonucleotide

SEQ ID NO: 655460 - DNA, 56 bp, Artificial; identical to SEQ ID NO: 279448
  Synthetic oligonucleotide

SEQ ID NO: 655461 - DNA, 55 bp, Artificial; identical to SEQ ID NO: 285995
  Synthetic oligonucleotide

SEQ ID NO: 655462 - DNA, 55 bp, Artificial; identical to SEQ ID NO: 280858
  Synthetic oligonucleotide

SEQ ID NO: 655463 - DNA, 55 bp, Artificial; identical to SEQ ID NO: 280859
  Synthetic oligonucleotide

SEQ ID NO: 655464 - DNA, 60 bp, Artificial; identical to SEQ ID NO: 282476
  Synthetic oligonucleotide

SEQ ID NO: 655465 - DNA, 55 bp, Artificial; identical to SEQ ID NO: 278093
  Synthetic oligonucleotide

SEQ ID NO: 655466 - DNA, 53 bp, Artificial; identical to SEQ ID NO: 282632
  Synthetic oligonucleotide

SEQ ID NO: 655467 - DNA, 56 bp, Artificial; identical to SEQ ID NO: 282509
  Synthetic oligonucleotide

SEQ ID NO: 655468 - DNA, 55 bp, Artificial; identical to SEQ ID NO: 278095
  Synthetic oligonucleotide

SEQ ID NO: 655469 - DNA, 57 bp, Artificial; identical to SEQ ID NO: 279289
  Synthetic oligonucleotide

SEQ ID NO: 655470 - DNA, 60 bp, Artificial; identical to SEQ ID NO: 282564
  Synthetic oligonucleotide

SEQ ID NO: 655471 - DNA, 60 bp, Artificial; identical to SEQ ID NO: 282575
  Synthetic oligonucleotide

SEQ ID NO: 655472 - DNA, 55 bp, Artificial; identical to SEQ ID NO: 280869
  Synthetic oligonucleotide

SEQ ID NO: 655473 - DNA, 51 bp, Artificial; identical to SEQ ID NO: 285991
  Synthetic oligonucleotide

SEQ ID NO: 655474 - DNA, 55 bp, Artificial; identical to SEQ ID NO: 268447
  Synthetic oligonucleotide

SEQ ID NO: 655475 - DNA, 55 bp, Artificial; identical to SEQ ID NO: 280872
  Synthetic oligonucleotide

SEQ ID NO: 655476 - DNA, 55 bp, Artificial; identical to SEQ ID NO: 280873
  Synthetic oligonucleotide

SEQ ID NO: 655477 - DNA, 50 bp, Artificial; identical to SEQ ID NO: 285026
  Synthetic oligonucleotide

SEQ ID NO: 655478 - DNA, 55 bp, Artificial; identical to SEQ ID NO: 280876
  Synthetic oligonucleotide

SEQ ID NO: 655479 - DNA, 58 bp, Artificial; identical to SEQ ID NO: 268624
  Synthetic oligonucleotide

SEQ ID NO: 655480 - DNA, 56 bp, Artificial; identical to SEQ ID NO: 279458
  Synthetic oligonucleotide

SEQ ID NO: 655481 - DNA, 57 bp, Artificial; identical to SEQ ID NO: 282197
  Synthetic oligonucleotide

SEQ ID NO: 655482 - DNA, 55 bp, Artificial; identical to SEQ ID NO: 280938
  Synthetic oligonucleotide

SEQ ID NO: 655483 - DNA, 55 bp, Artificial; identical to SEQ ID NO: 280941
  Synthetic oligonucleotide

SEQ ID NO: 655484 - DNA, 55 bp, Artificial; identical to SEQ ID NO: 280943
  Synthetic oligonucleotide

SEQ ID NO: 655485 - DNA, 53 bp, Artificial; identical to SEQ ID NO: 268884
  Synthetic oligonucleotide

SEQ ID NO: 655486 - DNA, 59 bp, Artificial; identical to SEQ ID NO: 282320
  Synthetic oligonucleotide

SEQ ID NO: 655487 - DNA, 55 bp, Artificial; identical to SEQ ID NO: 280944
  Synthetic oligonucleotide

SEQ ID NO: 655488 - DNA, 55 bp, Artificial; identical to SEQ ID NO: 278099
  Synthetic oligonucleotide

SEQ ID NO: 655489 - DNA, 55 bp, Artificial; identical to SEQ ID NO: 285988
  Synthetic oligonucleotide

SEQ ID NO: 655490 - DNA, 53 bp, Artificial; identical to SEQ ID NO: 268622
  Synthetic oligonucleotide

SEQ ID NO: 655491 - DNA, 60 bp, Artificial; identical to SEQ ID NO: 282365
  Synthetic oligonucleotide

SEQ ID NO: 655492 - DNA, 55 bp, Artificial; identical to SEQ ID NO: 280946
  Synthetic oligonucleotide

SEQ ID NO: 655493 - DNA, 55 bp, Artificial; identical to SEQ ID NO: 280947
  Synthetic oligonucleotide

SEQ ID NO: 655494 - DNA, 52 bp, Artificial; identical to SEQ ID NO: 268558
  Synthetic oligonucleotide

SEQ ID NO: 655495 - DNA, 55 bp, Artificial; identical to SEQ ID NO: 280948
  Synthetic oligonucleotide

SEQ ID NO: 655496 - DNA, 56 bp, Artificial; identical to SEQ ID NO: 270293
  Synthetic oligonucleotide

SEQ ID NO: 655497 - DNA, 55 bp, Artificial; identical to SEQ ID NO: 280949
  Synthetic oligonucleotide

SEQ ID NO: 655498 - DNA, 53 bp, Artificial; identical to SEQ ID NO: 271264
  Synthetic oligonucleotide

SEQ ID NO: 655499 - DNA, 51 bp, Artificial; identical to SEQ ID NO: 283736
  Synthetic oligonucleotide

SEQ ID NO: 655500 - DNA, 55 bp, Artificial; identical to SEQ ID NO: 268450
  Synthetic oligonucleotide

SEQ ID NO: 655501 - DNA, 55 bp, Artificial; identical to SEQ ID NO: 280955
  Synthetic oligonucleotide

SEQ ID NO: 655502 - DNA, 55 bp, Artificial; identical to SEQ ID NO: 280956
  Synthetic oligonucleotide

SEQ ID NO: 655503 - DNA, 56 bp, Artificial; identical to SEQ ID NO: 285008
  Synthetic oligonucleotide

SEQ ID NO: 655504 - DNA, 60 bp, Artificial; identical to SEQ ID NO: 285031
  Synthetic oligonucleotide

SEQ ID NO: 655505 - DNA, 53 bp, Artificial; identical to SEQ ID NO: 269171
  Synthetic oligonucleotide

SEQ ID NO: 655506 - DNA, 60 bp, Artificial; identical to SEQ ID NO: 285064
  Synthetic oligonucleotide

SEQ ID NO: 655507 - DNA, 57 bp, Artificial; identical to SEQ ID NO: 269076
  Synthetic oligonucleotide

SEQ ID NO: 655508 - DNA, 54 bp, Artificial; identical to SEQ ID NO: 282207
  Synthetic oligonucleotide

SEQ ID NO: 655509 - DNA, 51 bp, Artificial; identical to SEQ ID NO: 283693
  Synthetic oligonucleotide

SEQ ID NO: 655510 - DNA, 58 bp, Artificial; identical to SEQ ID NO: 268621
  Synthetic oligonucleotide

SEQ ID NO: 655511 - DNA, 55 bp, Artificial; identical to SEQ ID NO: 285086
  Synthetic oligonucleotide

SEQ ID NO: 655512 - DNA, 52 bp, Artificial; identical to SEQ ID NO: 269396
  Synthetic oligonucleotide

SEQ ID NO: 655513 - DNA, 53 bp, Artificial; identical to SEQ ID NO: 282627
  Synthetic oligonucleotide

SEQ ID NO: 655514 - DNA, 58 bp, Artificial; identical to SEQ ID NO: 268620
  Synthetic oligonucleotide

SEQ ID NO: 655515 - DNA, 57 bp, Artificial; identical to SEQ ID NO: 284742
  Synthetic oligonucleotide

SEQ ID NO: 655516 - DNA, 55 bp, Artificial; identical to SEQ ID NO: 280963
  Synthetic oligonucleotide

SEQ ID NO: 655517 - DNA, 60 bp, Artificial; identical to SEQ ID NO: 284775
  Synthetic oligonucleotide

SEQ ID NO: 655518 - DNA, 54 bp, Artificial; identical to SEQ ID NO: 276740
  Synthetic oligonucleotide

SEQ ID NO: 655519 - DNA, 55 bp, Artificial; identical to SEQ ID NO: 269397
  Synthetic oligonucleotide

SEQ ID NO: 655520 - DNA, 54 bp, Artificial; identical to SEQ ID NO: 284820
  Synthetic oligonucleotide

SEQ ID NO: 655521 - DNA, 52 bp, Artificial; identical to SEQ ID NO: 283005
  Synthetic oligonucleotide

SEQ ID NO: 655522 - DNA, 51 bp, Artificial; identical to SEQ ID NO: 283703
  Synthetic oligonucleotide

SEQ ID NO: 655523 - DNA, 52 bp, Artificial; identical to SEQ ID NO: 283004
  Synthetic oligonucleotide

SEQ ID NO: 655524 - DNA, 56 bp, Artificial; identical to SEQ ID NO: 268619
  Synthetic oligonucleotide

SEQ ID NO: 655525 - DNA, 57 bp, Artificial; identical to SEQ ID NO: 285375
  Synthetic oligonucleotide

SEQ ID NO: 655526 - DNA, 50 bp, Artificial; identical to SEQ ID NO: 284872
  Synthetic oligonucleotide

SEQ ID NO: 655527 - DNA, 55 bp, Artificial; identical to SEQ ID NO: 280910
  Synthetic oligonucleotide

SEQ ID NO: 655528 - DNA, 58 bp, Artificial; identical to SEQ ID NO: 285463
  Synthetic oligonucleotide

SEQ ID NO: 655529 - DNA, 55 bp, Artificial; identical to SEQ ID NO: 269402
  Synthetic oligonucleotide

SEQ ID NO: 655530 - DNA, 60 bp, Artificial; identical to SEQ ID NO: 285508
  Synthetic oligonucleotide

SEQ ID NO: 655531 - DNA, 55 bp, Artificial; identical to SEQ ID NO: 280911
  Synthetic oligonucleotide

SEQ ID NO: 655532 - DNA, 53 bp, Artificial; identical to SEQ ID NO: 280912
  Synthetic oligonucleotide

SEQ ID NO: 655533 - DNA, 55 bp, Artificial; identical to SEQ ID NO: 280913
  Synthetic oligonucleotide

SEQ ID NO: 655534 - DNA, 55 bp, Artificial; identical to SEQ ID NO: 280914
  Synthetic oligonucleotide

SEQ ID NO: 655535 - DNA, 59 bp, Artificial; identical to SEQ ID NO: 285519
  Synthetic oligonucleotide

SEQ ID NO: 655536 - DNA, 55 bp, Artificial; identical to SEQ ID NO: 278162
  Synthetic oligonucleotide

SEQ ID NO: 655537 - DNA, 55 bp, Artificial; identical to SEQ ID NO: 280916
  Synthetic oligonucleotide

SEQ ID NO: 655538 - DNA, 54 bp, Artificial; identical to SEQ ID NO: 282168
  Synthetic oligonucleotide

SEQ ID NO: 655539 - DNA, 52 bp, Artificial; identical to SEQ ID NO: 282962
  Synthetic oligonucleotide

SEQ ID NO: 655540 - DNA, 60 bp, Artificial; identical to SEQ ID NO: 285175
  Synthetic oligonucleotide

SEQ ID NO: 655541 - DNA, 57 bp, Artificial; identical to SEQ ID NO: 279361
  Synthetic oligonucleotide

SEQ ID NO: 655542 - DNA, 55 bp, Artificial; identical to SEQ ID NO: 280917
  Synthetic oligonucleotide

SEQ ID NO: 655543 - DNA, 55 bp, Artificial; identical to SEQ ID NO: 280918
  Synthetic oligonucleotide

SEQ ID NO: 655544 - DNA, 53 bp, Artificial; identical to SEQ ID NO: 282590
  Synthetic oligonucleotide

SEQ ID NO: 655545 - DNA, 55 bp, Artificial; identical to SEQ ID NO: 268453
  Synthetic oligonucleotide

SEQ ID NO: 655546 - DNA, 50 bp, Artificial; identical to SEQ ID NO: 284876
  Synthetic oligonucleotide

SEQ ID NO: 655547 - DNA, 54 bp, Artificial; identical to SEQ ID NO: 282170
  Synthetic oligonucleotide

SEQ ID NO: 655548 - DNA, 60 bp, Artificial; identical to SEQ ID NO: 285208
  Synthetic oligonucleotide

SEQ ID NO: 655549 - DNA, 52 bp, Artificial; identical to SEQ ID NO: 282955
  Synthetic oligonucleotide

SEQ ID NO: 655550 - DNA, 51 bp, Artificial; identical to SEQ ID NO: 283740
  Synthetic oligonucleotide

SEQ ID NO: 655551 - DNA, 57 bp, Artificial; identical to SEQ ID NO: 279368
  Synthetic oligonucleotide

SEQ ID NO: 655552 - DNA, 58 bp, Artificial; identical to SEQ ID NO: 285364
  Synthetic oligonucleotide

SEQ ID NO: 655553 - DNA, 60 bp, Artificial; identical to SEQ ID NO: 283964
  Synthetic oligonucleotide

SEQ ID NO: 655554 - DNA, 60 bp, Artificial; identical to SEQ ID NO: 283975
  Synthetic oligonucleotide

SEQ ID NO: 655555 - DNA, 55 bp, Artificial; identical to SEQ ID NO: 280925
  Synthetic oligonucleotide

SEQ ID NO: 655556 - DNA, 56 bp, Artificial; identical to SEQ ID NO: 284008
  Synthetic oligonucleotide

SEQ ID NO: 655557 - DNA, 54 bp, Artificial; identical to SEQ ID NO: 280926
  Synthetic oligonucleotide

SEQ ID NO: 655558 - DNA, 55 bp, Artificial; identical to SEQ ID NO: 268454
  Synthetic oligonucleotide

SEQ ID NO: 655559 - DNA, 52 bp, Artificial; identical to SEQ ID NO: 282980
  Synthetic oligonucleotide

SEQ ID NO: 655560 - DNA, 55 bp, Artificial; identical to SEQ ID NO: 268455
  Synthetic oligonucleotide

SEQ ID NO: 655561 - DNA, 53 bp, Artificial; identical to SEQ ID NO: 268618
  Synthetic oligonucleotide

SEQ ID NO: 655562 - DNA, 60 bp, Artificial; identical to SEQ ID NO: 267942
  Synthetic oligonucleotide

SEQ ID NO: 655563 - DNA, 60 bp, Artificial; identical to SEQ ID NO: 284108
  Synthetic oligonucleotide

SEQ ID NO: 655564 - DNA, 55 bp, Artificial; identical to SEQ ID NO: 280935
  Synthetic oligonucleotide

SEQ ID NO: 655565 - DNA, 60 bp, Artificial; identical to SEQ ID NO: 284119
  Synthetic oligonucleotide

SEQ ID NO: 655566 - DNA, 55 bp, Artificial; identical to SEQ ID NO: 280757
  Synthetic oligonucleotide

SEQ ID NO: 655567 - DNA, 51 bp, Artificial; identical to SEQ ID NO: 283746
  Synthetic oligonucleotide

SEQ ID NO: 655568 - DNA, 55 bp, Artificial; identical to SEQ ID NO: 280765
  Synthetic oligonucleotide

SEQ ID NO: 655569 - DNA, 55 bp, Artificial; identical to SEQ ID NO: 280766
  Synthetic oligonucleotide

SEQ ID NO: 655570 - DNA, 57 bp, Artificial; identical to SEQ ID NO: 283742
  Synthetic oligonucleotide

SEQ ID NO: 655571 - DNA, 58 bp, Artificial; identical to SEQ ID NO: 268274
  Synthetic oligonucleotide

SEQ ID NO: 655572 - DNA, 55 bp, Artificial; identical to SEQ ID NO: 269420
  Synthetic oligonucleotide

SEQ ID NO: 655573 - DNA, 55 bp, Artificial; identical to SEQ ID NO: 269418
  Synthetic oligonucleotide

SEQ ID NO: 655574 - DNA, 58 bp, Artificial; identical to SEQ ID NO: 279264
  Synthetic oligonucleotide

SEQ ID NO: 655575 - DNA, 55 bp, Artificial; identical to SEQ ID NO: 269417
  Synthetic oligonucleotide

SEQ ID NO: 655576 - DNA, 55 bp, Artificial; identical to SEQ ID NO: 280771
  Synthetic oligonucleotide

SEQ ID NO: 655577 - DNA, 55 bp, Artificial; identical to SEQ ID NO: 280773
  Synthetic oligonucleotide

SEQ ID NO: 655578 - DNA, 53 bp, Artificial; identical to SEQ ID NO: 282600
  Synthetic oligonucleotide

SEQ ID NO: 655579 - DNA, 52 bp, Artificial; identical to SEQ ID NO: 270369
  Synthetic oligonucleotide

SEQ ID NO: 655580 - DNA, 51 bp, Artificial; identical to SEQ ID NO: 283752
  Synthetic oligonucleotide

SEQ ID NO: 655581 - DNA, 57 bp, Artificial; identical to SEQ ID NO: 279325
  Synthetic oligonucleotide

SEQ ID NO: 655582 - DNA, 60 bp, Artificial; identical to SEQ ID NO: 284419
  Synthetic oligonucleotide

SEQ ID NO: 655583 - DNA, 55 bp, Artificial; identical to SEQ ID NO: 280780
  Synthetic oligonucleotide

SEQ ID NO: 655584 - DNA, 55 bp, Artificial; identical to SEQ ID NO: 271704
  Synthetic oligonucleotide

SEQ ID NO: 655585 - DNA, 50 bp, Artificial; identical to SEQ ID NO: 268589
  Synthetic oligonucleotide

SEQ ID NO: 655586 - DNA, 55 bp, Artificial; identical to SEQ ID NO: 269416
  Synthetic oligonucleotide

SEQ ID NO: 655587 - DNA, 55 bp, Artificial; identical to SEQ ID NO: 269413
  Synthetic oligonucleotide

SEQ ID NO: 655588 - DNA, 52 bp, Artificial; identical to SEQ ID NO: 283079
  Synthetic oligonucleotide

SEQ ID NO: 655589 - DNA, 57 bp, Artificial; identical to SEQ ID NO: 268263
  Synthetic oligonucleotide

SEQ ID NO: 655590 - DNA, 55 bp, Artificial; identical to SEQ ID NO: 280783
  Synthetic oligonucleotide

SEQ ID NO: 655591 - DNA, 54 bp, Artificial; identical to SEQ ID NO: 282302
  Synthetic oligonucleotide

SEQ ID NO: 655592 - DNA, 54 bp, Artificial; identical to SEQ ID NO: 282300
  Synthetic oligonucleotide

SEQ ID NO: 655593 - DNA, 55 bp, Artificial; identical to SEQ ID NO: 278173
  Synthetic oligonucleotide

SEQ ID NO: 655594 - DNA, 55 bp, Artificial; identical to SEQ ID NO: 286083
  Synthetic oligonucleotide

SEQ ID NO: 655595 - DNA, 58 bp, Artificial; identical to SEQ ID NO: 279256
  Synthetic oligonucleotide

SEQ ID NO: 655596 - DNA, 55 bp, Artificial; identical to SEQ ID NO: 280785
  Synthetic oligonucleotide

SEQ ID NO: 655597 - DNA, 55 bp, Artificial; identical to SEQ ID NO: 268459
  Synthetic oligonucleotide

SEQ ID NO: 655598 - DNA, 52 bp, Artificial; identical to SEQ ID NO: 283074
  Synthetic oligonucleotide

SEQ ID NO: 655599 - DNA, 55 bp, Artificial; identical to SEQ ID NO: 280732
  Synthetic oligonucleotide

SEQ ID NO: 655600 - DNA, 53 bp, Artificial; identical to SEQ ID NO: 282744
  Synthetic oligonucleotide

SEQ ID NO: 655601 - DNA, 55 bp, Artificial; identical to SEQ ID NO: 280733
  Synthetic oligonucleotide

SEQ ID NO: 655602 - DNA, 55 bp, Artificial; identical to SEQ ID NO: 286079
  Synthetic oligonucleotide

SEQ ID NO: 655603 - DNA, 55 bp, Artificial; identical to SEQ ID NO: 280736
  Synthetic oligonucleotide

SEQ ID NO: 655604 - DNA, 55 bp, Artificial; identical to SEQ ID NO: 280738
  Synthetic oligonucleotide

SEQ ID NO: 655605 - DNA, 53 bp, Artificial; identical to SEQ ID NO: 282687
  Synthetic oligonucleotide

SEQ ID NO: 655606 - DNA, 56 bp, Artificial; identical to SEQ ID NO: 284319
  Synthetic oligonucleotide

SEQ ID NO: 655607 - DNA, 55 bp, Artificial; identical to SEQ ID NO: 280739
  Synthetic oligonucleotide

SEQ ID NO: 655608 - DNA, 59 bp, Artificial; identical to SEQ ID NO: 279032
  Synthetic oligonucleotide

SEQ ID NO: 655609 - DNA, 55 bp, Artificial; identical to SEQ ID NO: 286075
  Synthetic oligonucleotide

SEQ ID NO: 655610 - DNA, 53 bp, Artificial; identical to SEQ ID NO: 282683
  Synthetic oligonucleotide

SEQ ID NO: 655611 - DNA, 55 bp, Artificial; identical to SEQ ID NO: 280743
  Synthetic oligonucleotide

SEQ ID NO: 655612 - DNA, 54 bp, Artificial; identical to SEQ ID NO: 268252
  Synthetic oligonucleotide

SEQ ID NO: 655613 - DNA, 55 bp, Artificial; identical to SEQ ID NO: 269409
  Synthetic oligonucleotide

SEQ ID NO: 655614 - DNA, 54 bp, Artificial; identical to SEQ ID NO: 278180
  Synthetic oligonucleotide

SEQ ID NO: 655615 - DNA, 55 bp, Artificial; identical to SEQ ID NO: 278181
  Synthetic oligonucleotide

SEQ ID NO: 655616 - DNA, 53 bp, Artificial; identical to SEQ ID NO: 286349
  Synthetic oligonucleotide

SEQ ID NO: 655617 - DNA, 53 bp, Artificial; identical to SEQ ID NO: 279120
  Synthetic oligonucleotide

SEQ ID NO: 655618 - DNA, 56 bp, Artificial; identical to SEQ ID NO: 279143
  Synthetic oligonucleotide

SEQ ID NO: 655619 - DNA, 52 bp, Artificial; identical to SEQ ID NO: 271801
  Synthetic oligonucleotide

SEQ ID NO: 655620 - DNA, 55 bp, Artificial; identical to SEQ ID NO: 269408
  Synthetic oligonucleotide

SEQ ID NO: 655621 - DNA, 59 bp, Artificial; identical to SEQ ID NO: 279209
  Synthetic oligonucleotide

SEQ ID NO: 655622 - DNA, 55 bp, Artificial; identical to SEQ ID NO: 278130
  Synthetic oligonucleotide

SEQ ID NO: 655623 - DNA, 50 bp, Artificial; identical to SEQ ID NO: 269347
  Synthetic oligonucleotide

SEQ ID NO: 655624 - DNA, 55 bp, Artificial; identical to SEQ ID NO: 280750
  Synthetic oligonucleotide

SEQ ID NO: 655625 - DNA, 54 bp, Artificial; identical to SEQ ID NO: 282222
  Synthetic oligonucleotide

SEQ ID NO: 655626 - DNA, 55 bp, Artificial; identical to SEQ ID NO: 280755
  Synthetic oligonucleotide

SEQ ID NO: 655627 - DNA, 55 bp, Artificial; identical to SEQ ID NO: 280756
  Synthetic oligonucleotide

SEQ ID NO: 655628 - DNA, 56 bp, Artificial; identical to SEQ ID NO: 285717
  Synthetic oligonucleotide

SEQ ID NO: 655629 - DNA, 56 bp, Artificial; identical to SEQ ID NO: 279452
  Synthetic oligonucleotide

SEQ ID NO: 655630 - DNA, 55 bp, Artificial; identical to SEQ ID NO: 268460
  Synthetic oligonucleotide

SEQ ID NO: 655631 - DNA, 55 bp, Artificial; identical to SEQ ID NO: 269411
  Synthetic oligonucleotide

SEQ ID NO: 655632 - DNA, 55 bp, Artificial; identical to SEQ ID NO: 280822
  Synthetic oligonucleotide

SEQ ID NO: 655633 - DNA, 55 bp, Artificial; identical to SEQ ID NO: 271262
  Synthetic oligonucleotide

SEQ ID NO: 655634 - DNA, 55 bp, Artificial; identical to SEQ ID NO: 278134
  Synthetic oligonucleotide

SEQ ID NO: 655635 - DNA, 55 bp, Artificial; identical to SEQ ID NO: 280823
  Synthetic oligonucleotide

SEQ ID NO: 655636 - DNA, 59 bp, Artificial; identical to SEQ ID NO: 286011
  Synthetic oligonucleotide

SEQ ID NO: 655637 - DNA, 57 bp, Artificial; identical to SEQ ID NO: 279347
  Synthetic oligonucleotide

SEQ ID NO: 655638 - DNA, 55 bp, Artificial; identical to SEQ ID NO: 280827
  Synthetic oligonucleotide

SEQ ID NO: 655639 - DNA, 55 bp, Artificial; identical to SEQ ID NO: 280828
  Synthetic oligonucleotide

SEQ ID NO: 655640 - DNA, 55 bp, Artificial; identical to SEQ ID NO: 278136
  Synthetic oligonucleotide

SEQ ID NO: 655641 - DNA, 55 bp, Artificial; identical to SEQ ID NO: 280829
  Synthetic oligonucleotide

SEQ ID NO: 655642 - DNA, 55 bp, Artificial; identical to SEQ ID NO: 280830
  Synthetic oligonucleotide

SEQ ID NO: 655643 - DNA, 55 bp, Artificial; identical to SEQ ID NO: 267965
  Synthetic oligonucleotide

SEQ ID NO: 655644 - DNA, 55 bp, Artificial; identical to SEQ ID NO: 280833
  Synthetic oligonucleotide

SEQ ID NO: 655645 - DNA, 55 bp, Artificial; identical to SEQ ID NO: 280834
  Synthetic oligonucleotide

SEQ ID NO: 655646 - DNA, 55 bp, Artificial; identical to SEQ ID NO: 280836
  Synthetic oligonucleotide

SEQ ID NO: 655647 - DNA, 56 bp, Artificial; identical to SEQ ID NO: 279653
  Synthetic oligonucleotide

SEQ ID NO: 655648 - DNA, 56 bp, Artificial; identical to SEQ ID NO: 279664
  Synthetic oligonucleotide

SEQ ID NO: 655649 - DNA, 55 bp, Artificial; identical to SEQ ID NO: 280839
  Synthetic oligonucleotide

SEQ ID NO: 655650 - DNA, 55 bp, Artificial; identical to SEQ ID NO: 280840
  Synthetic oligonucleotide

SEQ ID NO: 655651 - DNA, 53 bp, Artificial; identical to SEQ ID NO: 282446
  Synthetic oligonucleotide

SEQ ID NO: 655652 - DNA, 60 bp, Artificial; identical to SEQ ID NO: 279287
  Synthetic oligonucleotide

SEQ ID NO: 655653 - DNA, 55 bp, Artificial; identical to SEQ ID NO: 280845
  Synthetic oligonucleotide

SEQ ID NO: 655654 - DNA, 51 bp, Artificial; identical to SEQ ID NO: 283617
  Synthetic oligonucleotide

SEQ ID NO: 655655 - DNA, 51 bp, Artificial; identical to SEQ ID NO: 283618
  Synthetic oligonucleotide

SEQ ID NO: 655656 - DNA, 55 bp, Artificial; identical to SEQ ID NO: 280791
  Synthetic oligonucleotide

SEQ ID NO: 655657 - DNA, 55 bp, Artificial; identical to SEQ ID NO: 280793
  Synthetic oligonucleotide

SEQ ID NO: 655658 - DNA, 55 bp, Artificial; identical to SEQ ID NO: 280794
  Synthetic oligonucleotide

SEQ ID NO: 655659 - DNA, 56 bp, Artificial; identical to SEQ ID NO: 267823
  Synthetic oligonucleotide

SEQ ID NO: 655660 - DNA, 55 bp, Artificial; identical to SEQ ID NO: 280798
  Synthetic oligonucleotide

SEQ ID NO: 655661 - DNA, 52 bp, Artificial; identical to SEQ ID NO: 283015
  Synthetic oligonucleotide

SEQ ID NO: 655662 - DNA, 55 bp, Artificial; identical to SEQ ID NO: 280799
  Synthetic oligonucleotide

SEQ ID NO: 655663 - DNA, 60 bp, Artificial; identical to SEQ ID NO: 280475
  Synthetic oligonucleotide

SEQ ID NO: 655664 - DNA, 51 bp, Artificial; identical to SEQ ID NO: 283623
  Synthetic oligonucleotide

SEQ ID NO: 655665 - DNA, 55 bp, Artificial; identical to SEQ ID NO: 270320
  Synthetic oligonucleotide

SEQ ID NO: 655666 - DNA, 55 bp, Artificial; identical to SEQ ID NO: 286067
  Synthetic oligonucleotide

SEQ ID NO: 655667 - DNA, 51 bp, Artificial; identical to SEQ ID NO: 283624
  Synthetic oligonucleotide

SEQ ID NO: 655668 - DNA, 51 bp, Artificial; identical to SEQ ID NO: 283625
  Synthetic oligonucleotide

SEQ ID NO: 655669 - DNA, 55 bp, Artificial; identical to SEQ ID NO: 280803
  Synthetic oligonucleotide

SEQ ID NO: 655670 - DNA, 60 bp, Artificial; identical to SEQ ID NO: 269087
  Synthetic oligonucleotide

SEQ ID NO: 655671 - DNA, 54 bp, Artificial; identical to SEQ ID NO: 281586
  Synthetic oligonucleotide

SEQ ID NO: 655672 - DNA, 55 bp, Artificial; identical to SEQ ID NO: 286102
  Synthetic oligonucleotide

SEQ ID NO: 655673 - DNA, 55 bp, Artificial; identical to SEQ ID NO: 280804
  Synthetic oligonucleotide

SEQ ID NO: 655674 - DNA, 55 bp, Artificial; identical to SEQ ID NO: 280805
  Synthetic oligonucleotide

SEQ ID NO: 655675 - DNA, 60 bp, Artificial; identical to SEQ ID NO: 267919
  Synthetic oligonucleotide

SEQ ID NO: 655676 - DNA, 53 bp, Artificial; identical to SEQ ID NO: 282454
  Synthetic oligonucleotide

SEQ ID NO: 655677 - DNA, 57 bp, Artificial; identical to SEQ ID NO: 279343
  Synthetic oligonucleotide

SEQ ID NO: 655678 - DNA, 55 bp, Artificial; identical to SEQ ID NO: 280810
  Synthetic oligonucleotide

SEQ ID NO: 655679 - DNA, 55 bp, Artificial; identical to SEQ ID NO: 269424
  Synthetic oligonucleotide

SEQ ID NO: 655680 - DNA, 55 bp, Artificial; identical to SEQ ID NO: 280812
  Synthetic oligonucleotide

SEQ ID NO: 655681 - DNA, 51 bp, Artificial; identical to SEQ ID NO: 283628
  Synthetic oligonucleotide

SEQ ID NO: 655682 - DNA, 55 bp, Artificial; identical to SEQ ID NO: 278146
  Synthetic oligonucleotide

SEQ ID NO: 655683 - DNA, 60 bp, Artificial; identical to SEQ ID NO: 278919
  Synthetic oligonucleotide

SEQ ID NO: 655684 - DNA, 60 bp, Artificial; identical to SEQ ID NO: 280030
  Synthetic oligonucleotide

SEQ ID NO: 655685 - DNA, 60 bp, Artificial; identical to SEQ ID NO: 284474
  Synthetic oligonucleotide

SEQ ID NO: 655686 - DNA, 55 bp, Artificial; identical to SEQ ID NO: 280814
  Synthetic oligonucleotide

SEQ ID NO: 655687 - DNA, 55 bp, Artificial; identical to SEQ ID NO: 278147
  Synthetic oligonucleotide

SEQ ID NO: 655688 - DNA, 55 bp, Artificial; identical to SEQ ID NO: 280815
  Synthetic oligonucleotide

SEQ ID NO: 655689 - DNA, 60 bp, Artificial; identical to SEQ ID NO: 279253
  Synthetic oligonucleotide

SEQ ID NO: 655690 - DNA, 55 bp, Artificial; identical to SEQ ID NO: 280164
  Synthetic oligonucleotide

SEQ ID NO: 655691 - DNA, 59 bp, Artificial; identical to SEQ ID NO: 279586
  Synthetic oligonucleotide

SEQ ID NO: 655692 - DNA, 55 bp, Artificial; identical to SEQ ID NO: 276762
  Synthetic oligonucleotide

SEQ ID NO: 655693 - DNA, 55 bp, Artificial; identical to SEQ ID NO: 280166
  Synthetic oligonucleotide

SEQ ID NO: 655694 - DNA, 55 bp, Artificial; identical to SEQ ID NO: 280167
  Synthetic oligonucleotide

SEQ ID NO: 655695 - DNA, 58 bp, Artificial; identical to SEQ ID NO: 268219
  Synthetic oligonucleotide

SEQ ID NO: 655696 - DNA, 55 bp, Artificial; identical to SEQ ID NO: 280172
  Synthetic oligonucleotide

SEQ ID NO: 655697 - DNA, 55 bp, Artificial; identical to SEQ ID NO: 268512
  Synthetic oligonucleotide

SEQ ID NO: 655698 - DNA, 55 bp, Artificial; identical to SEQ ID NO: 280173
  Synthetic oligonucleotide

SEQ ID NO: 655699 - DNA, 55 bp, Artificial; identical to SEQ ID NO: 280174
  Synthetic oligonucleotide

SEQ ID NO: 655700 - DNA, 60 bp, Artificial; identical to SEQ ID NO: 285540
  Synthetic oligonucleotide

SEQ ID NO: 655701 - DNA, 55 bp, Artificial; identical to SEQ ID NO: 280181
  Synthetic oligonucleotide

SEQ ID NO: 655702 - DNA, 55 bp, Artificial; identical to SEQ ID NO: 280182
  Synthetic oligonucleotide

SEQ ID NO: 655703 - DNA, 50 bp, Artificial; identical to SEQ ID NO: 286468
  Synthetic oligonucleotide

SEQ ID NO: 655704 - DNA, 55 bp, Artificial; identical to SEQ ID NO: 269419
  Synthetic oligonucleotide

SEQ ID NO: 655705 - DNA, 53 bp, Artificial; identical to SEQ ID NO: 278157
  Synthetic oligonucleotide

SEQ ID NO: 655706 - DNA, 52 bp, Artificial; identical to SEQ ID NO: 283082
  Synthetic oligonucleotide

SEQ ID NO: 655707 - DNA, 54 bp, Artificial; identical to SEQ ID NO: 280188
  Synthetic oligonucleotide

SEQ ID NO: 655708 - DNA, 53 bp, Artificial; identical to SEQ ID NO: 267881
  Synthetic oligonucleotide

SEQ ID NO: 655709 - DNA, 51 bp, Artificial; identical to SEQ ID NO: 283630
  Synthetic oligonucleotide

SEQ ID NO: 655710 - DNA, 55 bp, Artificial; identical to SEQ ID NO: 280191
  Synthetic oligonucleotide

SEQ ID NO: 655711 - DNA, 52 bp, Artificial; identical to SEQ ID NO: 283052
  Synthetic oligonucleotide

SEQ ID NO: 655712 - DNA, 55 bp, Artificial; identical to SEQ ID NO: 278153
  Synthetic oligonucleotide

SEQ ID NO: 655713 - DNA, 55 bp, Artificial; identical to SEQ ID NO: 286092
  Synthetic oligonucleotide

SEQ ID NO: 655714 - DNA, 54 bp, Artificial; identical to SEQ ID NO: 282268
  Synthetic oligonucleotide

SEQ ID NO: 655715 - DNA, 55 bp, Artificial; identical to SEQ ID NO: 278150
  Synthetic oligonucleotide

SEQ ID NO: 655716 - DNA, 55 bp, Artificial; identical to SEQ ID NO: 286090
  Synthetic oligonucleotide

SEQ ID NO: 655717 - DNA, 55 bp, Artificial; identical to SEQ ID NO: 270362
  Synthetic oligonucleotide

SEQ ID NO: 655718 - DNA, 55 bp, Artificial; identical to SEQ ID NO: 280144
  Synthetic oligonucleotide

SEQ ID NO: 655719 - DNA, 55 bp, Artificial; identical to SEQ ID NO: 286088
  Synthetic oligonucleotide

SEQ ID NO: 655720 - DNA, 55 bp, Artificial; identical to SEQ ID NO: 286048
  Synthetic oligonucleotide

SEQ ID NO: 655721 - DNA, 54 bp, Artificial; identical to SEQ ID NO: 283919
  Synthetic oligonucleotide

SEQ ID NO: 655722 - DNA, 53 bp, Artificial; identical to SEQ ID NO: 282538
  Synthetic oligonucleotide

SEQ ID NO: 655723 - DNA, 58 bp, Artificial; identical to SEQ ID NO: 284030
  Synthetic oligonucleotide

SEQ ID NO: 655724 - DNA, 54 bp, Artificial; identical to SEQ ID NO: 270274
  Synthetic oligonucleotide

SEQ ID NO: 655725 - DNA, 56 bp, Artificial; identical to SEQ ID NO: 268368
  Synthetic oligonucleotide

SEQ ID NO: 655726 - DNA, 55 bp, Artificial; identical to SEQ ID NO: 271261
  Synthetic oligonucleotide

SEQ ID NO: 655727 - DNA, 54 bp, Artificial; identical to SEQ ID NO: 282275
  Synthetic oligonucleotide

SEQ ID NO: 655728 - DNA, 58 bp, Artificial; identical to SEQ ID NO: 279247
  Synthetic oligonucleotide

SEQ ID NO: 655729 - DNA, 55 bp, Artificial; identical to SEQ ID NO: 280151
  Synthetic oligonucleotide

SEQ ID NO: 655730 - DNA, 57 bp, Artificial; identical to SEQ ID NO: 279317
  Synthetic oligonucleotide

SEQ ID NO: 655731 - DNA, 60 bp, Artificial; identical to SEQ ID NO: 280975
  Synthetic oligonucleotide

SEQ ID NO: 655732 - DNA, 60 bp, Artificial; identical to SEQ ID NO: 280997
  Synthetic oligonucleotide

SEQ ID NO: 655733 - DNA, 56 bp, Artificial; identical to SEQ ID NO: 279414
  Synthetic oligonucleotide

SEQ ID NO: 655734 - DNA, 55 bp, Artificial; identical to SEQ ID NO: 280153
  Synthetic oligonucleotide

SEQ ID NO: 655735 - DNA, 52 bp, Artificial; identical to SEQ ID NO: 278746
  Synthetic oligonucleotide

SEQ ID NO: 655736 - DNA, 55 bp, Artificial; identical to SEQ ID NO: 280155
  Synthetic oligonucleotide

SEQ ID NO: 655737 - DNA, 55 bp, Artificial; identical to SEQ ID NO: 281075
  Synthetic oligonucleotide

SEQ ID NO: 655738 - DNA, 55 bp, Artificial; identical to SEQ ID NO: 286045
  Synthetic oligonucleotide

SEQ ID NO: 655739 - DNA, 56 bp, Artificial; identical to SEQ ID NO: 279419
  Synthetic oligonucleotide

SEQ ID NO: 655740 - DNA, 51 bp, Artificial; identical to SEQ ID NO: 283633
  Synthetic oligonucleotide

SEQ ID NO: 655741 - DNA, 55 bp, Artificial; identical to SEQ ID NO: 280160
  Synthetic oligonucleotide

SEQ ID NO: 655742 - DNA, 60 bp, Artificial; identical to SEQ ID NO: 281154
  Synthetic oligonucleotide

SEQ ID NO: 655743 - DNA, 55 bp, Artificial; identical to SEQ ID NO: 271816
  Synthetic oligonucleotide

SEQ ID NO: 655744 - DNA, 55 bp, Artificial; identical to SEQ ID NO: 280161
  Synthetic oligonucleotide

SEQ ID NO: 655745 - DNA, 60 bp, Artificial; identical to SEQ ID NO: 281198
  Synthetic oligonucleotide

SEQ ID NO: 655746 - DNA, 55 bp, Artificial; identical to SEQ ID NO: 280162
  Synthetic oligonucleotide

SEQ ID NO: 655747 - DNA, 53 bp, Artificial; identical to SEQ ID NO: 286345
  Synthetic oligonucleotide

SEQ ID NO: 655748 - DNA, 60 bp, Artificial; identical to SEQ ID NO: 280797
  Synthetic oligonucleotide

SEQ ID NO: 655749 - DNA, 60 bp, Artificial; identical to SEQ ID NO: 280809
  Synthetic oligonucleotide

SEQ ID NO: 655750 - DNA, 60 bp, Artificial; identical to SEQ ID NO: 280842
  Synthetic oligonucleotide

SEQ ID NO: 655751 - DNA, 55 bp, Artificial; identical to SEQ ID NO: 278138
  Synthetic oligonucleotide

SEQ ID NO: 655752 - DNA, 52 bp, Artificial; identical to SEQ ID NO: 282958
  Synthetic oligonucleotide

SEQ ID NO: 655753 - DNA, 53 bp, Artificial; identical to SEQ ID NO: 282565
  Synthetic oligonucleotide

SEQ ID NO: 655754 - DNA, 60 bp, Artificial; identical to SEQ ID NO: 280897
  Synthetic oligonucleotide

SEQ ID NO: 655755 - DNA, 55 bp, Artificial; identical to SEQ ID NO: 267826
  Synthetic oligonucleotide

SEQ ID NO: 655756 - DNA, 55 bp, Artificial; identical to SEQ ID NO: 267824
  Synthetic oligonucleotide

SEQ ID NO: 655757 - DNA, 55 bp, Artificial; identical to SEQ ID NO: 278137
  Synthetic oligonucleotide

SEQ ID NO: 655758 - DNA, 60 bp, Artificial; identical to SEQ ID NO: 280931
  Synthetic oligonucleotide

SEQ ID NO: 655759 - DNA, 55 bp, Artificial; identical to SEQ ID NO: 280227
  Synthetic oligonucleotide

SEQ ID NO: 655760 - DNA, 55 bp, Artificial; identical to SEQ ID NO: 269410
  Synthetic oligonucleotide

SEQ ID NO: 655761 - DNA, 55 bp, Artificial; identical to SEQ ID NO: 280228
  Synthetic oligonucleotide

SEQ ID NO: 655762 - DNA, 55 bp, Artificial; identical to SEQ ID NO: 269982
  Synthetic oligonucleotide

SEQ ID NO: 655763 - DNA, 55 bp, Artificial; identical to SEQ ID NO: 280232
  Synthetic oligonucleotide

SEQ ID NO: 655764 - DNA, 56 bp, Artificial; identical to SEQ ID NO: 281553
  Synthetic oligonucleotide

SEQ ID NO: 655765 - DNA, 50 bp, Artificial; identical to SEQ ID NO: 286469
  Synthetic oligonucleotide

SEQ ID NO: 655766 - DNA, 52 bp, Artificial; identical to SEQ ID NO: 269693
  Synthetic oligonucleotide

SEQ ID NO: 655767 - DNA, 53 bp, Artificial; identical to SEQ ID NO: 269691
  Synthetic oligonucleotide

SEQ ID NO: 655768 - DNA, 60 bp, Artificial; identical to SEQ ID NO: 281620
  Synthetic oligonucleotide

SEQ ID NO: 655769 - DNA, 56 bp, Artificial; identical to SEQ ID NO: 279416
  Synthetic oligonucleotide

SEQ ID NO: 655770 - DNA, 60 bp, Artificial; identical to SEQ ID NO: 268197
  Synthetic oligonucleotide

SEQ ID NO: 655771 - DNA, 58 bp, Artificial; identical to SEQ ID NO: 279280
  Synthetic oligonucleotide

SEQ ID NO: 655772 - DNA, 55 bp, Artificial; identical to SEQ ID NO: 278172
  Synthetic oligonucleotide

SEQ ID NO: 655773 - DNA, 55 bp, Artificial; identical to SEQ ID NO: 280238
  Synthetic oligonucleotide

SEQ ID NO: 655774 - DNA, 60 bp, Artificial; identical to SEQ ID NO: 281254
  Synthetic oligonucleotide

SEQ ID NO: 655775 - DNA, 59 bp, Artificial; identical to SEQ ID NO: 279196
  Synthetic oligonucleotide

SEQ ID NO: 655776 - DNA, 57 bp, Artificial; identical to SEQ ID NO: 279356
  Synthetic oligonucleotide

SEQ ID NO: 655777 - DNA, 60 bp, Artificial; identical to SEQ ID NO: 281309
  Synthetic oligonucleotide

SEQ ID NO: 655778 - DNA, 55 bp, Artificial; identical to SEQ ID NO: 280243
  Synthetic oligonucleotide

SEQ ID NO: 655779 - DNA, 55 bp, Artificial; identical to SEQ ID NO: 267967
  Synthetic oligonucleotide

SEQ ID NO: 655780 - DNA, 58 bp, Artificial; identical to SEQ ID NO: 281331
  Synthetic oligonucleotide

SEQ ID NO: 655781 - DNA, 54 bp, Artificial; identical to SEQ ID NO: 282199
  Synthetic oligonucleotide

SEQ ID NO: 655782 - DNA, 57 bp, Artificial; identical to SEQ ID NO: 281387
  Synthetic oligonucleotide

SEQ ID NO: 655783 - DNA, 59 bp, Artificial; identical to SEQ ID NO: 279135
  Synthetic oligonucleotide

SEQ ID NO: 655784 - DNA, 59 bp, Artificial; identical to SEQ ID NO: 267977
  Synthetic oligonucleotide

SEQ ID NO: 655785 - DNA, 60 bp, Artificial; identical to SEQ ID NO: 268656
  Synthetic oligonucleotide

SEQ ID NO: 655786 - DNA, 53 bp, Artificial; identical to SEQ ID NO: 268547
  Synthetic oligonucleotide

SEQ ID NO: 655787 - DNA, 52 bp, Artificial; identical to SEQ ID NO: 270370
  Synthetic oligonucleotide

SEQ ID NO: 655788 - DNA, 60 bp, Artificial; identical to SEQ ID NO: 281398
  Synthetic oligonucleotide

SEQ ID NO: 655789 - DNA, 55 bp, Artificial; identical to SEQ ID NO: 268515
  Synthetic oligonucleotide

SEQ ID NO: 655790 - DNA, 55 bp, Artificial; identical to SEQ ID NO: 280248
  Synthetic oligonucleotide

SEQ ID NO: 655791 - DNA, 60 bp, Artificial; identical to SEQ ID NO: 281409
  Synthetic oligonucleotide

SEQ ID NO: 655792 - DNA, 55 bp, Artificial; identical to SEQ ID NO: 278166
  Synthetic oligonucleotide

SEQ ID NO: 655793 - DNA, 55 bp, Artificial; identical to SEQ ID NO: 280251
  Synthetic oligonucleotide

SEQ ID NO: 655794 - DNA, 58 bp, Artificial; identical to SEQ ID NO: 280131
  Synthetic oligonucleotide

SEQ ID NO: 655795 - DNA, 55 bp, Artificial; identical to SEQ ID NO: 280176
  Synthetic oligonucleotide

SEQ ID NO: 655796 - DNA, 60 bp, Artificial; identical to SEQ ID NO: 280187
  Synthetic oligonucleotide

SEQ ID NO: 655797 - DNA, 59 bp, Artificial; identical to SEQ ID NO: 280209
  Synthetic oligonucleotide

SEQ ID NO: 655798 - DNA, 57 bp, Artificial; identical to SEQ ID NO: 280220
  Synthetic oligonucleotide

SEQ ID NO: 655799 - DNA, 55 bp, Artificial; identical to SEQ ID NO: 280196
  Synthetic oligonucleotide

SEQ ID NO: 655800 - DNA, 60 bp, Artificial; identical to SEQ ID NO: 279820
  Synthetic oligonucleotide

SEQ ID NO: 655801 - DNA, 55 bp, Artificial; identical to SEQ ID NO: 286038
  Synthetic oligonucleotide

SEQ ID NO: 655802 - DNA, 55 bp, Artificial; identical to SEQ ID NO: 280197
  Synthetic oligonucleotide

SEQ ID NO: 655803 - DNA, 60 bp, Artificial; identical to SEQ ID NO: 279842
  Synthetic oligonucleotide

SEQ ID NO: 655804 - DNA, 51 bp, Artificial; identical to SEQ ID NO: 283585
  Synthetic oligonucleotide

SEQ ID NO: 655805 - DNA, 57 bp, Artificial; identical to SEQ ID NO: 279953
  Synthetic oligonucleotide

SEQ ID NO: 655806 - DNA, 55 bp, Artificial; identical to SEQ ID NO: 278159
  Synthetic oligonucleotide

SEQ ID NO: 655807 - DNA, 55 bp, Artificial; identical to SEQ ID NO: 271701
  Synthetic oligonucleotide

SEQ ID NO: 655808 - DNA, 51 bp, Artificial; identical to SEQ ID NO: 283588
  Synthetic oligonucleotide

SEQ ID NO: 655809 - DNA, 50 bp, Artificial; identical to SEQ ID NO: 277764
  Synthetic oligonucleotide

SEQ ID NO: 655810 - DNA, 55 bp, Artificial; identical to SEQ ID NO: 280205
  Synthetic oligonucleotide

SEQ ID NO: 655811 - DNA, 55 bp, Artificial; identical to SEQ ID NO: 280206
  Synthetic oligonucleotide

SEQ ID NO: 655812 - DNA, 55 bp, Artificial; identical to SEQ ID NO: 271700
  Synthetic oligonucleotide

SEQ ID NO: 655813 - DNA, 55 bp, Artificial; identical to SEQ ID NO: 280208
  Synthetic oligonucleotide

SEQ ID NO: 655814 - DNA, 55 bp, Artificial; identical to SEQ ID NO: 280210
  Synthetic oligonucleotide

SEQ ID NO: 655815 - DNA, 55 bp, Artificial; identical to SEQ ID NO: 269423
  Synthetic oligonucleotide

SEQ ID NO: 655816 - DNA, 55 bp, Artificial; identical to SEQ ID NO: 276743
  Synthetic oligonucleotide

SEQ ID NO: 655817 - DNA, 55 bp, Artificial; identical to SEQ ID NO: 280218
  Synthetic oligonucleotide

SEQ ID NO: 655818 - DNA, 55 bp, Artificial; identical to SEQ ID NO: 280221
  Synthetic oligonucleotide

SEQ ID NO: 655819 - DNA, 55 bp, Artificial; identical to SEQ ID NO: 269427
  Synthetic oligonucleotide

SEQ ID NO: 655820 - DNA, 55 bp, Artificial; identical to SEQ ID NO: 269398
  Synthetic oligonucleotide

SEQ ID NO: 655821 - DNA, 55 bp, Artificial; identical to SEQ ID NO: 280223
  Synthetic oligonucleotide

SEQ ID NO: 655822 - DNA, 55 bp, Artificial; identical to SEQ ID NO: 280044
  Synthetic oligonucleotide

SEQ ID NO: 655823 - DNA, 55 bp, Artificial; identical to SEQ ID NO: 269400
  Synthetic oligonucleotide

SEQ ID NO: 655824 - DNA, 56 bp, Artificial; identical to SEQ ID NO: 279399
  Synthetic oligonucleotide

SEQ ID NO: 655825 - DNA, 55 bp, Artificial; identical to SEQ ID NO: 280045
  Synthetic oligonucleotide

SEQ ID NO: 655826 - DNA, 50 bp, Artificial; identical to SEQ ID NO: 286470
  Synthetic oligonucleotide

SEQ ID NO: 655827 - DNA, 55 bp, Artificial; identical to SEQ ID NO: 278079
  Synthetic oligonucleotide

SEQ ID NO: 655828 - DNA, 60 bp, Artificial; identical to SEQ ID NO: 280409
  Synthetic oligonucleotide

SEQ ID NO: 655829 - DNA, 58 bp, Artificial; identical to SEQ ID NO: 270311
  Synthetic oligonucleotide

SEQ ID NO: 655830 - DNA, 58 bp, Artificial; identical to SEQ ID NO: 279213
  Synthetic oligonucleotide

SEQ ID NO: 655831 - DNA, 55 bp, Artificial; identical to SEQ ID NO: 270361
  Synthetic oligonucleotide

SEQ ID NO: 655832 - DNA, 55 bp, Artificial; identical to SEQ ID NO: 267946
  Synthetic oligonucleotide

SEQ ID NO: 655833 - DNA, 55 bp, Artificial; identical to SEQ ID NO: 280053
  Synthetic oligonucleotide

SEQ ID NO: 655834 - DNA, 55 bp, Artificial; identical to SEQ ID NO: 280055
  Synthetic oligonucleotide

SEQ ID NO: 655835 - DNA, 55 bp, Artificial; identical to SEQ ID NO: 280056
  Synthetic oligonucleotide

SEQ ID NO: 655836 - DNA, 55 bp, Artificial; identical to SEQ ID NO: 280059
  Synthetic oligonucleotide

SEQ ID NO: 655837 - DNA, 55 bp, Artificial; identical to SEQ ID NO: 280060
  Synthetic oligonucleotide

SEQ ID NO: 655838 - DNA, 55 bp, Artificial; identical to SEQ ID NO: 280062
  Synthetic oligonucleotide

SEQ ID NO: 655839 - DNA, 60 bp, Artificial; identical to SEQ ID NO: 279081
  Synthetic oligonucleotide

SEQ ID NO: 655840 - DNA, 54 bp, Artificial; identical to SEQ ID NO: 282418
  Synthetic oligonucleotide

SEQ ID NO: 655841 - DNA, 55 bp, Artificial; identical to SEQ ID NO: 280066
  Synthetic oligonucleotide

SEQ ID NO: 655842 - DNA, 60 bp, Artificial; identical to SEQ ID NO: 276807
  Synthetic oligonucleotide

SEQ ID NO: 655843 - DNA, 60 bp, Artificial; identical to SEQ ID NO: 279050
  Synthetic oligonucleotide

SEQ ID NO: 655844 - DNA, 55 bp, Artificial; identical to SEQ ID NO: 278123
  Synthetic oligonucleotide

SEQ ID NO: 655845 - DNA, 55 bp, Artificial; identical to SEQ ID NO: 268989
  Synthetic oligonucleotide

SEQ ID NO: 655846 - DNA, 54 bp, Artificial; identical to SEQ ID NO: 271707
  Synthetic oligonucleotide

SEQ ID NO: 655847 - DNA, 57 bp, Artificial; identical to SEQ ID NO: 279217
  Synthetic oligonucleotide

SEQ ID NO: 655848 - DNA, 58 bp, Artificial; identical to SEQ ID NO: 268336
  Synthetic oligonucleotide

SEQ ID NO: 655849 - DNA, 54 bp, Artificial; identical to SEQ ID NO: 282328
  Synthetic oligonucleotide

SEQ ID NO: 655850 - DNA, 55 bp, Artificial; identical to SEQ ID NO: 280070
  Synthetic oligonucleotide

SEQ ID NO: 655851 - DNA, 55 bp, Artificial; identical to SEQ ID NO: 280071
  Synthetic oligonucleotide

SEQ ID NO: 655852 - DNA, 52 bp, Artificial; identical to SEQ ID NO: 283096
  Synthetic oligonucleotide

SEQ ID NO: 655853 - DNA, 55 bp, Artificial; identical to SEQ ID NO: 286034
  Synthetic oligonucleotide

SEQ ID NO: 655854 - DNA, 55 bp, Artificial; identical to SEQ ID NO: 280015
  Synthetic oligonucleotide

SEQ ID NO: 655855 - DNA, 55 bp, Artificial; identical to SEQ ID NO: 280016
  Synthetic oligonucleotide

SEQ ID NO: 655856 - DNA, 55 bp, Artificial; identical to SEQ ID NO: 280017
  Synthetic oligonucleotide

SEQ ID NO: 655857 - DNA, 54 bp, Artificial; identical to SEQ ID NO: 282341
  Synthetic oligonucleotide

SEQ ID NO: 655858 - DNA, 55 bp, Artificial; identical to SEQ ID NO: 280023
  Synthetic oligonucleotide

SEQ ID NO: 655859 - DNA, 55 bp, Artificial; identical to SEQ ID NO: 280024
  Synthetic oligonucleotide

SEQ ID NO: 655860 - DNA, 55 bp, Artificial; identical to SEQ ID NO: 280025
  Synthetic oligonucleotide

SEQ ID NO: 655861 - DNA, 55 bp, Artificial; identical to SEQ ID NO: 278113
  Synthetic oligonucleotide

SEQ ID NO: 655862 - DNA, 55 bp, Artificial; identical to SEQ ID NO: 268987
  Synthetic oligonucleotide

SEQ ID NO: 655863 - DNA, 55 bp, Artificial; identical to SEQ ID NO: 286065
  Synthetic oligonucleotide

SEQ ID NO: 655864 - DNA, 54 bp, Artificial; identical to SEQ ID NO: 286295
  Synthetic oligonucleotide

SEQ ID NO: 655865 - DNA, 55 bp, Artificial; identical to SEQ ID NO: 278107
  Synthetic oligonucleotide

SEQ ID NO: 655866 - DNA, 60 bp, Artificial; identical to SEQ ID NO: 278990
  Synthetic oligonucleotide

SEQ ID NO: 655867 - DNA, 55 bp, Artificial; identical to SEQ ID NO: 270169
  Synthetic oligonucleotide

SEQ ID NO: 655868 - DNA, 53 bp, Artificial; identical to SEQ ID NO: 282533
  Synthetic oligonucleotide

SEQ ID NO: 655869 - DNA, 58 bp, Artificial; identical to SEQ ID NO: 278981
  Synthetic oligonucleotide

SEQ ID NO: 655870 - DNA, 55 bp, Artificial; identical to SEQ ID NO: 280038
  Synthetic oligonucleotide

SEQ ID NO: 655871 - DNA, 55 bp, Artificial; identical to SEQ ID NO: 280040
  Synthetic oligonucleotide

SEQ ID NO: 655872 - DNA, 55 bp, Artificial; identical to SEQ ID NO: 280041
  Synthetic oligonucleotide

SEQ ID NO: 655873 - DNA, 55 bp, Artificial; identical to SEQ ID NO: 278104
  Synthetic oligonucleotide

SEQ ID NO: 655874 - DNA, 55 bp, Artificial; identical to SEQ ID NO: 280105
  Synthetic oligonucleotide

SEQ ID NO: 655875 - DNA, 55 bp, Artificial; identical to SEQ ID NO: 280107
  Synthetic oligonucleotide

SEQ ID NO: 655876 - DNA, 55 bp, Artificial; identical to SEQ ID NO: 280108
  Synthetic oligonucleotide

SEQ ID NO: 655877 - DNA, 58 bp, Artificial; identical to SEQ ID NO: 268337
  Synthetic oligonucleotide

SEQ ID NO: 655878 - DNA, 55 bp, Artificial; identical to SEQ ID NO: 280113
  Synthetic oligonucleotide

SEQ ID NO: 655879 - DNA, 55 bp, Artificial; identical to SEQ ID NO: 278260
  Synthetic oligonucleotide

SEQ ID NO: 655880 - DNA, 55 bp, Artificial; identical to SEQ ID NO: 280115
  Synthetic oligonucleotide

SEQ ID NO: 655881 - DNA, 54 bp, Artificial; identical to SEQ ID NO: 280116
  Synthetic oligonucleotide

SEQ ID NO: 655882 - DNA, 59 bp, Artificial; identical to SEQ ID NO: 268329
  Synthetic oligonucleotide

SEQ ID NO: 655883 - DNA, 55 bp, Artificial; identical to SEQ ID NO: 280117
  Synthetic oligonucleotide

SEQ ID NO: 655884 - DNA, 55 bp, Artificial; identical to SEQ ID NO: 279418
  Synthetic oligonucleotide

SEQ ID NO: 655885 - DNA, 55 bp, Artificial; identical to SEQ ID NO: 280123
  Synthetic oligonucleotide

SEQ ID NO: 655886 - DNA, 55 bp, Artificial; identical to SEQ ID NO: 278257
  Synthetic oligonucleotide

SEQ ID NO: 655887 - DNA, 55 bp, Artificial; identical to SEQ ID NO: 278252
  Synthetic oligonucleotide

SEQ ID NO: 655888 - DNA, 55 bp, Artificial; identical to SEQ ID NO: 280125
  Synthetic oligonucleotide

SEQ ID NO: 655889 - DNA, 54 bp, Artificial; identical to SEQ ID NO: 282367
  Synthetic oligonucleotide

SEQ ID NO: 655890 - DNA, 55 bp, Artificial; identical to SEQ ID NO: 269983
  Synthetic oligonucleotide

SEQ ID NO: 655891 - DNA, 60 bp, Artificial; identical to SEQ ID NO: 278957
  Synthetic oligonucleotide

SEQ ID NO: 655892 - DNA, 55 bp, Artificial; identical to SEQ ID NO: 280129
  Synthetic oligonucleotide

SEQ ID NO: 655893 - DNA, 55 bp, Artificial; identical to SEQ ID NO: 280132
  Synthetic oligonucleotide

SEQ ID NO: 655894 - DNA, 54 bp, Artificial; identical to SEQ ID NO: 278940
  Synthetic oligonucleotide

SEQ ID NO: 655895 - DNA, 54 bp, Artificial; identical to SEQ ID NO: 278250
  Synthetic oligonucleotide

SEQ ID NO: 655896 - DNA, 55 bp, Artificial; identical to SEQ ID NO: 286056
  Synthetic oligonucleotide

SEQ ID NO: 655897 - DNA, 55 bp, Artificial; identical to SEQ ID NO: 278246
  Synthetic oligonucleotide

SEQ ID NO: 655898 - DNA, 52 bp, Artificial; identical to SEQ ID NO: 282796
  Synthetic oligonucleotide

SEQ ID NO: 655899 - DNA, 55 bp, Artificial; identical to SEQ ID NO: 280077
  Synthetic oligonucleotide

SEQ ID NO: 655900 - DNA, 59 bp, Artificial; identical to SEQ ID NO: 279106
  Synthetic oligonucleotide

SEQ ID NO: 655901 - DNA, 55 bp, Artificial; identical to SEQ ID NO: 280079
  Synthetic oligonucleotide

SEQ ID NO: 655902 - DNA, 60 bp, Artificial; identical to SEQ ID NO: 268623
  Synthetic oligonucleotide

SEQ ID NO: 655903 - DNA, 54 bp, Artificial; identical to SEQ ID NO: 278239
  Synthetic oligonucleotide

SEQ ID NO: 655904 - DNA, 60 bp, Artificial; identical to SEQ ID NO: 286078
  Synthetic oligonucleotide

SEQ ID NO: 655905 - DNA, 55 bp, Artificial; identical to SEQ ID NO: 280083
  Synthetic oligonucleotide

SEQ ID NO: 655906 - DNA, 55 bp, Artificial; identical to SEQ ID NO: 280084
  Synthetic oligonucleotide

SEQ ID NO: 655907 - DNA, 55 bp, Artificial; identical to SEQ ID NO: 280086
  Synthetic oligonucleotide

SEQ ID NO: 655908 - DNA, 55 bp, Artificial; identical to SEQ ID NO: 286051
  Synthetic oligonucleotide

SEQ ID NO: 655909 - DNA, 55 bp, Artificial; identical to SEQ ID NO: 280088
  Synthetic oligonucleotide

SEQ ID NO: 655910 - DNA, 54 bp, Artificial; identical to SEQ ID NO: 280089
  Synthetic oligonucleotide

SEQ ID NO: 655911 - DNA, 55 bp, Artificial; identical to SEQ ID NO: 278269
  Synthetic oligonucleotide

SEQ ID NO: 655912 - DNA, 55 bp, Artificial; identical to SEQ ID NO: 280092
  Synthetic oligonucleotide

SEQ ID NO: 655913 - DNA, 55 bp, Artificial; identical to SEQ ID NO: 280095
  Synthetic oligonucleotide

SEQ ID NO: 655914 - DNA, 53 bp, Artificial; identical to SEQ ID NO: 280096
  Synthetic oligonucleotide

SEQ ID NO: 655915 - DNA, 55 bp, Artificial; identical to SEQ ID NO: 280097
  Synthetic oligonucleotide

SEQ ID NO: 655916 - DNA, 55 bp, Artificial; identical to SEQ ID NO: 286050
  Synthetic oligonucleotide

SEQ ID NO: 655917 - DNA, 55 bp, Artificial; identical to SEQ ID NO: 280101
  Synthetic oligonucleotide

SEQ ID NO: 655918 - DNA, 55 bp, Artificial; identical to SEQ ID NO: 280102
  Synthetic oligonucleotide

SEQ ID NO: 655919 - DNA, 55 bp, Artificial; identical to SEQ ID NO: 280403
  Synthetic oligonucleotide

SEQ ID NO: 655920 - DNA, 55 bp, Artificial; identical to SEQ ID NO: 280404
  Synthetic oligonucleotide

SEQ ID NO: 655921 - DNA, 55 bp, Artificial; identical to SEQ ID NO: 280406
  Synthetic oligonucleotide

SEQ ID NO: 655922 - DNA, 55 bp, Artificial; identical to SEQ ID NO: 280407
  Synthetic oligonucleotide

SEQ ID NO: 655923 - DNA, 55 bp, Artificial; identical to SEQ ID NO: 280408
  Synthetic oligonucleotide

SEQ ID NO: 655924 - DNA, 55 bp, Artificial; identical to SEQ ID NO: 280410
  Synthetic oligonucleotide

SEQ ID NO: 655925 - DNA, 55 bp, Artificial; identical to SEQ ID NO: 280411
  Synthetic oligonucleotide

SEQ ID NO: 655926 - DNA, 55 bp, Artificial; identical to SEQ ID NO: 278202
  Synthetic oligonucleotide

SEQ ID NO: 655927 - DNA, 55 bp, Artificial; identical to SEQ ID NO: 286049
  Synthetic oligonucleotide

SEQ ID NO: 655928 - DNA, 55 bp, Artificial; identical to SEQ ID NO: 280415
  Synthetic oligonucleotide

SEQ ID NO: 655929 - DNA, 55 bp, Artificial; identical to SEQ ID NO: 280416
  Synthetic oligonucleotide

SEQ ID NO: 655930 - DNA, 55 bp, Artificial; identical to SEQ ID NO: 280417
  Synthetic oligonucleotide

SEQ ID NO: 655931 - DNA, 55 bp, Artificial; identical to SEQ ID NO: 280418
  Synthetic oligonucleotide

SEQ ID NO: 655932 - DNA, 53 bp, Artificial; identical to SEQ ID NO: 282559
  Synthetic oligonucleotide

SEQ ID NO: 655933 - DNA, 55 bp, Artificial; identical to SEQ ID NO: 278194
  Synthetic oligonucleotide

SEQ ID NO: 655934 - DNA, 55 bp, Artificial; identical to SEQ ID NO: 278193
  Synthetic oligonucleotide

SEQ ID NO: 655935 - DNA, 55 bp, Artificial; identical to SEQ ID NO: 280424
  Synthetic oligonucleotide

SEQ ID NO: 655936 - DNA, 55 bp, Artificial; identical to SEQ ID NO: 268520
  Synthetic oligonucleotide

SEQ ID NO: 655937 - DNA, 51 bp, Artificial; identical to SEQ ID NO: 276782
  Synthetic oligonucleotide

SEQ ID NO: 655938 - DNA, 55 bp, Artificial; identical to SEQ ID NO: 280426
  Synthetic oligonucleotide

SEQ ID NO: 655939 - DNA, 58 bp, Artificial; identical to SEQ ID NO: 279250
  Synthetic oligonucleotide

SEQ ID NO: 655940 - DNA, 55 bp, Artificial; identical to SEQ ID NO: 278190
  Synthetic oligonucleotide

SEQ ID NO: 655941 - DNA, 53 bp, Artificial; identical to SEQ ID NO: 267952
  Synthetic oligonucleotide

SEQ ID NO: 655942 - DNA, 55 bp, Artificial; identical to SEQ ID NO: 278184
  Synthetic oligonucleotide

SEQ ID NO: 655943 - DNA, 55 bp, Artificial; identical to SEQ ID NO: 280430
  Synthetic oligonucleotide

SEQ ID NO: 655944 - DNA, 54 bp, Artificial; identical to SEQ ID NO: 282162
  Synthetic oligonucleotide

SEQ ID NO: 655945 - DNA, 60 bp, Artificial; identical to SEQ ID NO: 285649
  Synthetic oligonucleotide

SEQ ID NO: 655946 - DNA, 55 bp, Artificial; identical to SEQ ID NO: 280373
  Synthetic oligonucleotide

SEQ ID NO: 655947 - DNA, 55 bp, Artificial; identical to SEQ ID NO: 280374
  Synthetic oligonucleotide

SEQ ID NO: 655948 - DNA, 55 bp, Artificial; identical to SEQ ID NO: 280378
  Synthetic oligonucleotide

SEQ ID NO: 655949 - DNA, 55 bp, Artificial; identical to SEQ ID NO: 280382
  Synthetic oligonucleotide

SEQ ID NO: 655950 - DNA, 55 bp, Artificial; identical to SEQ ID NO: 280385
  Synthetic oligonucleotide

SEQ ID NO: 655951 - DNA, 55 bp, Artificial; identical to SEQ ID NO: 278227
  Synthetic oligonucleotide

SEQ ID NO: 655952 - DNA, 55 bp, Artificial; identical to SEQ ID NO: 278223
  Synthetic oligonucleotide

SEQ ID NO: 655953 - DNA, 55 bp, Artificial; identical to SEQ ID NO: 280389
  Synthetic oligonucleotide

SEQ ID NO: 655954 - DNA, 55 bp, Artificial; identical to SEQ ID NO: 280390
  Synthetic oligonucleotide

SEQ ID NO: 655955 - DNA, 55 bp, Artificial; identical to SEQ ID NO: 280391
  Synthetic oligonucleotide

SEQ ID NO: 655956 - DNA, 55 bp, Artificial; identical to SEQ ID NO: 280393
  Synthetic oligonucleotide

SEQ ID NO: 655957 - DNA, 55 bp, Artificial; identical to SEQ ID NO: 280394
  Synthetic oligonucleotide

SEQ ID NO: 655958 - DNA, 50 bp, Artificial; identical to SEQ ID NO: 284944
  Synthetic oligonucleotide

SEQ ID NO: 655959 - DNA, 55 bp, Artificial; identical to SEQ ID NO: 268523
  Synthetic oligonucleotide

SEQ ID NO: 655960 - DNA, 55 bp, Artificial; identical to SEQ ID NO: 268521
  Synthetic oligonucleotide

SEQ ID NO: 655961 - DNA, 55 bp, Artificial; identical to SEQ ID NO: 280395
  Synthetic oligonucleotide

SEQ ID NO: 655962 - DNA, 58 bp, Artificial; identical to SEQ ID NO: 285534
  Synthetic oligonucleotide

SEQ ID NO: 655963 - DNA, 55 bp, Artificial; identical to SEQ ID NO: 278218
  Synthetic oligonucleotide

SEQ ID NO: 655964 - DNA, 55 bp, Artificial; identical to SEQ ID NO: 280397
  Synthetic oligonucleotide

SEQ ID NO: 655965 - DNA, 55 bp, Artificial; identical to SEQ ID NO: 280399
  Synthetic oligonucleotide

SEQ ID NO: 655966 - DNA, 60 bp, Artificial; identical to SEQ ID NO: 285587
  Synthetic oligonucleotide

SEQ ID NO: 655967 - DNA, 55 bp, Artificial; identical to SEQ ID NO: 280400
  Synthetic oligonucleotide

SEQ ID NO: 655968 - DNA, 55 bp, Artificial; identical to SEQ ID NO: 280463
  Synthetic oligonucleotide

SEQ ID NO: 655969 - DNA, 55 bp, Artificial; identical to SEQ ID NO: 269985
  Synthetic oligonucleotide

SEQ ID NO: 655970 - DNA, 55 bp, Artificial; identical to SEQ ID NO: 280466
  Synthetic oligonucleotide

SEQ ID NO: 655971 - DNA, 55 bp, Artificial; identical to SEQ ID NO: 280467
  Synthetic oligonucleotide

SEQ ID NO: 655972 - DNA, 55 bp, Artificial; identical to SEQ ID NO: 280468
  Synthetic oligonucleotide

SEQ ID NO: 655973 - DNA, 55 bp, Artificial; identical to SEQ ID NO: 278212
  Synthetic oligonucleotide

SEQ ID NO: 655974 - DNA, 60 bp, Artificial; identical to SEQ ID NO: 285577
  Synthetic oligonucleotide

SEQ ID NO: 655975 - DNA, 55 bp, Artificial; identical to SEQ ID NO: 280474
  Synthetic oligonucleotide

SEQ ID NO: 655976 - DNA, 55 bp, Artificial; identical to SEQ ID NO: 280478
  Synthetic oligonucleotide

SEQ ID NO: 655977 - DNA, 55 bp, Artificial; identical to SEQ ID NO: 269986
  Synthetic oligonucleotide

SEQ ID NO: 655978 - DNA, 55 bp, Artificial; identical to SEQ ID NO: 280483
  Synthetic oligonucleotide

SEQ ID NO: 655979 - DNA, 55 bp, Artificial; identical to SEQ ID NO: 280485
  Synthetic oligonucleotide

SEQ ID NO: 655980 - DNA, 60 bp, Artificial; identical to SEQ ID NO: 285787
  Synthetic oligonucleotide

SEQ ID NO: 655981 - DNA, 55 bp, Artificial; identical to SEQ ID NO: 280486
  Synthetic oligonucleotide

SEQ ID NO: 655982 - DNA, 55 bp, Artificial; identical to SEQ ID NO: 267827
  Synthetic oligonucleotide

SEQ ID NO: 655983 - DNA, 55 bp, Artificial; identical to SEQ ID NO: 280488
  Synthetic oligonucleotide

SEQ ID NO: 655984 - DNA, 55 bp, Artificial; identical to SEQ ID NO: 280489
  Synthetic oligonucleotide

SEQ ID NO: 655985 - DNA, 55 bp, Artificial; identical to SEQ ID NO: 280490
  Synthetic oligonucleotide

SEQ ID NO: 655986 - DNA, 60 bp, Artificial; identical to SEQ ID NO: 268612
  Synthetic oligonucleotide

SEQ ID NO: 655987 - DNA, 55 bp, Artificial; identical to SEQ ID NO: 280433
  Synthetic oligonucleotide

SEQ ID NO: 655988 - DNA, 51 bp, Artificial; identical to SEQ ID NO: 268578
  Synthetic oligonucleotide

SEQ ID NO: 655989 - DNA, 51 bp, Artificial; identical to SEQ ID NO: 280435
  Synthetic oligonucleotide

SEQ ID NO: 655990 - DNA, 55 bp, Artificial; identical to SEQ ID NO: 277636
  Synthetic oligonucleotide

SEQ ID NO: 655991 - DNA, 53 bp, Artificial; identical to SEQ ID NO: 282472
  Synthetic oligonucleotide

SEQ ID NO: 655992 - DNA, 55 bp, Artificial; identical to SEQ ID NO: 286052
  Synthetic oligonucleotide

SEQ ID NO: 655993 - DNA, 55 bp, Artificial; identical to SEQ ID NO: 280441
  Synthetic oligonucleotide

SEQ ID NO: 655994 - DNA, 53 bp, Artificial; identical to SEQ ID NO: 279266
  Synthetic oligonucleotide

SEQ ID NO: 655995 - DNA, 53 bp, Artificial; identical to SEQ ID NO: 286342
  Synthetic oligonucleotide

SEQ ID NO: 655996 - DNA, 55 bp, Artificial; identical to SEQ ID NO: 280445
  Synthetic oligonucleotide

SEQ ID NO: 655997 - DNA, 60 bp, Artificial; identical to SEQ ID NO: 285819
  Synthetic oligonucleotide

SEQ ID NO: 655998 - DNA, 55 bp, Artificial; identical to SEQ ID NO: 280446
  Synthetic oligonucleotide

SEQ ID NO: 655999 - DNA, 55 bp, Artificial; identical to SEQ ID NO: 285823
  Synthetic oligonucleotide

SEQ ID NO: 656000 - DNA, 55 bp, Artificial; identical to SEQ ID NO: 280447
  Synthetic oligonucleotide

SEQ ID NO: 656001 - DNA, 55 bp, Artificial; identical to SEQ ID NO: 280450
  Synthetic oligonucleotide

SEQ ID NO: 656002 - DNA, 55 bp, Artificial; identical to SEQ ID NO: 277625
  Synthetic oligonucleotide

SEQ ID NO: 656003 - DNA, 55 bp, Artificial; identical to SEQ ID NO: 280451
  Synthetic oligonucleotide

SEQ ID NO: 656004 - DNA, 54 bp, Artificial; identical to SEQ ID NO: 268983
  Synthetic oligonucleotide

SEQ ID NO: 656005 - DNA, 55 bp, Artificial; identical to SEQ ID NO: 277614
  Synthetic oligonucleotide

SEQ ID NO: 656006 - DNA, 58 bp, Artificial; identical to SEQ ID NO: 285698
  Synthetic oligonucleotide

SEQ ID NO: 656007 - DNA, 51 bp, Artificial; identical to SEQ ID NO: 268579
  Synthetic oligonucleotide

SEQ ID NO: 656008 - DNA, 55 bp, Artificial; identical to SEQ ID NO: 280456
  Synthetic oligonucleotide

SEQ ID NO: 656009 - DNA, 55 bp, Artificial; identical to SEQ ID NO: 280457
  Synthetic oligonucleotide

SEQ ID NO: 656010 - DNA, 55 bp, Artificial; identical to SEQ ID NO: 280459
  Synthetic oligonucleotide

SEQ ID NO: 656011 - DNA, 55 bp, Artificial; identical to SEQ ID NO: 280460
  Synthetic oligonucleotide

SEQ ID NO: 656012 - DNA, 60 bp, Artificial; identical to SEQ ID NO: 285707
  Synthetic oligonucleotide

SEQ ID NO: 656013 - DNA, 55 bp, Artificial; identical to SEQ ID NO: 280285
  Synthetic oligonucleotide

SEQ ID NO: 656014 - DNA, 55 bp, Artificial; identical to SEQ ID NO: 280286
  Synthetic oligonucleotide

SEQ ID NO: 656015 - DNA, 55 bp, Artificial; identical to SEQ ID NO: 280288
  Synthetic oligonucleotide

SEQ ID NO: 656016 - DNA, 60 bp, Artificial; identical to SEQ ID NO: 285682
  Synthetic oligonucleotide

SEQ ID NO: 656017 - DNA, 55 bp, Artificial; identical to SEQ ID NO: 280290
  Synthetic oligonucleotide

SEQ ID NO: 656018 - DNA, 55 bp, Artificial; identical to SEQ ID NO: 278853
  Synthetic oligonucleotide

SEQ ID NO: 656019 - DNA, 55 bp, Artificial; identical to SEQ ID NO: 280291
  Synthetic oligonucleotide

SEQ ID NO: 656020 - DNA, 58 bp, Artificial; identical to SEQ ID NO: 279214
  Synthetic oligonucleotide

SEQ ID NO: 656021 - DNA, 55 bp, Artificial; identical to SEQ ID NO: 280292
  Synthetic oligonucleotide

SEQ ID NO: 656022 - DNA, 55 bp, Artificial; identical to SEQ ID NO: 268418
  Synthetic oligonucleotide

SEQ ID NO: 656023 - DNA, 55 bp, Artificial; identical to SEQ ID NO: 267958
  Synthetic oligonucleotide

SEQ ID NO: 656024 - DNA, 60 bp, Artificial; identical to SEQ ID NO: 285746
  Synthetic oligonucleotide

SEQ ID NO: 656025 - DNA, 55 bp, Artificial; identical to SEQ ID NO: 280297
  Synthetic oligonucleotide

SEQ ID NO: 656026 - DNA, 55 bp, Artificial; identical to SEQ ID NO: 271260
  Synthetic oligonucleotide

SEQ ID NO: 656027 - DNA, 54 bp, Artificial; identical to SEQ ID NO: 268328
  Synthetic oligonucleotide

SEQ ID NO: 656028 - DNA, 55 bp, Artificial; identical to SEQ ID NO: 277947
  Synthetic oligonucleotide

SEQ ID NO: 656029 - DNA, 52 bp, Artificial; identical to SEQ ID NO: 282927
  Synthetic oligonucleotide

SEQ ID NO: 656030 - DNA, 52 bp, Artificial; identical to SEQ ID NO: 268551
  Synthetic oligonucleotide

SEQ ID NO: 656031 - DNA, 55 bp, Artificial; identical to SEQ ID NO: 280307
  Synthetic oligonucleotide

SEQ ID NO: 656032 - DNA, 55 bp, Artificial; identical to SEQ ID NO: 280308
  Synthetic oligonucleotide

SEQ ID NO: 656033 - DNA, 52 bp, Artificial; identical to SEQ ID NO: 278749
  Synthetic oligonucleotide

SEQ ID NO: 656034 - DNA, 55 bp, Artificial; identical to SEQ ID NO: 277725
  Synthetic oligonucleotide

SEQ ID NO: 656035 - DNA, 55 bp, Artificial; identical to SEQ ID NO: 278520
  Synthetic oligonucleotide

SEQ ID NO: 656036 - DNA, 55 bp, Artificial; identical to SEQ ID NO: 278531
  Synthetic oligonucleotide

SEQ ID NO: 656037 - DNA, 55 bp, Artificial; identical to SEQ ID NO: 280312
  Synthetic oligonucleotide

SEQ ID NO: 656038 - DNA, 55 bp, Artificial; identical to SEQ ID NO: 271259
  Synthetic oligonucleotide

SEQ ID NO: 656039 - DNA, 55 bp, Artificial; identical to SEQ ID NO: 280313
  Synthetic oligonucleotide

SEQ ID NO: 656040 - DNA, 55 bp, Artificial; identical to SEQ ID NO: 280256
  Synthetic oligonucleotide

SEQ ID NO: 656041 - DNA, 60 bp, Artificial; identical to SEQ ID NO: 269199
  Synthetic oligonucleotide

SEQ ID NO: 656042 - DNA, 55 bp, Artificial; identical to SEQ ID NO: 286058
  Synthetic oligonucleotide

SEQ ID NO: 656043 - DNA, 55 bp, Artificial; identical to SEQ ID NO: 280259
  Synthetic oligonucleotide

SEQ ID NO: 656044 - DNA, 55 bp, Artificial; identical to SEQ ID NO: 280261
  Synthetic oligonucleotide

SEQ ID NO: 656045 - DNA, 55 bp, Artificial; identical to SEQ ID NO: 280262
  Synthetic oligonucleotide

SEQ ID NO: 656046 - DNA, 55 bp, Artificial; identical to SEQ ID NO: 280264
  Synthetic oligonucleotide

SEQ ID NO: 656047 - DNA, 53 bp, Artificial; identical to SEQ ID NO: 282521
  Synthetic oligonucleotide

SEQ ID NO: 656048 - DNA, 55 bp, Artificial; identical to SEQ ID NO: 280268
  Synthetic oligonucleotide

SEQ ID NO: 656049 - DNA, 57 bp, Artificial; identical to SEQ ID NO: 286177
  Synthetic oligonucleotide

SEQ ID NO: 656050 - DNA, 50 bp, Artificial; identical to SEQ ID NO: 286432
  Synthetic oligonucleotide

SEQ ID NO: 656051 - DNA, 50 bp, Artificial; identical to SEQ ID NO: 284905
  Synthetic oligonucleotide

SEQ ID NO: 656052 - DNA, 55 bp, Artificial; identical to SEQ ID NO: 280270
  Synthetic oligonucleotide

SEQ ID NO: 656053 - DNA, 55 bp, Artificial; identical to SEQ ID NO: 280274
  Synthetic oligonucleotide

SEQ ID NO: 656054 - DNA, 55 bp, Artificial; identical to SEQ ID NO: 280275
  Synthetic oligonucleotide

SEQ ID NO: 656055 - DNA, 52 bp, Artificial; identical to SEQ ID NO: 286375
  Synthetic oligonucleotide

SEQ ID NO: 656056 - DNA, 55 bp, Artificial; identical to SEQ ID NO: 268494
  Synthetic oligonucleotide

SEQ ID NO: 656057 - DNA, 60 bp, Artificial; identical to SEQ ID NO: 285779
  Synthetic oligonucleotide

SEQ ID NO: 656058 - DNA, 55 bp, Artificial; identical to SEQ ID NO: 280277
  Synthetic oligonucleotide

SEQ ID NO: 656059 - DNA, 55 bp, Artificial; identical to SEQ ID NO: 280278
  Synthetic oligonucleotide

SEQ ID NO: 656060 - DNA, 55 bp, Artificial; identical to SEQ ID NO: 280280
  Synthetic oligonucleotide

SEQ ID NO: 656061 - DNA, 55 bp, Artificial; identical to SEQ ID NO: 280281
  Synthetic oligonucleotide

SEQ ID NO: 656062 - DNA, 55 bp, Artificial; identical to SEQ ID NO: 278598
  Synthetic oligonucleotide

SEQ ID NO: 656063 - DNA, 55 bp, Artificial; identical to SEQ ID NO: 278046
  Synthetic oligonucleotide

SEQ ID NO: 656064 - DNA, 55 bp, Artificial; identical to SEQ ID NO: 280345
  Synthetic oligonucleotide

SEQ ID NO: 656065 - DNA, 55 bp, Artificial; identical to SEQ ID NO: 280346
  Synthetic oligonucleotide

SEQ ID NO: 656066 - DNA, 55 bp, Artificial; identical to SEQ ID NO: 278045
  Synthetic oligonucleotide

SEQ ID NO: 656067 - DNA, 55 bp, Artificial; identical to SEQ ID NO: 280347
  Synthetic oligonucleotide

SEQ ID NO: 656068 - DNA, 60 bp, Artificial; identical to SEQ ID NO: 285557
  Synthetic oligonucleotide

SEQ ID NO: 656069 - DNA, 55 bp, Artificial; identical to SEQ ID NO: 280348
  Synthetic oligonucleotide

SEQ ID NO: 656070 - DNA, 55 bp, Artificial; identical to SEQ ID NO: 280350
  Synthetic oligonucleotide

SEQ ID NO: 656071 - DNA, 55 bp, Artificial; identical to SEQ ID NO: 280351
  Synthetic oligonucleotide

SEQ ID NO: 656072 - DNA, 55 bp, Artificial; identical to SEQ ID NO: 280352
  Synthetic oligonucleotide

SEQ ID NO: 656073 - DNA, 55 bp, Artificial; identical to SEQ ID NO: 268980
  Synthetic oligonucleotide

SEQ ID NO: 656074 - DNA, 55 bp, Artificial; identical to SEQ ID NO: 278042
  Synthetic oligonucleotide

SEQ ID NO: 656075 - DNA, 60 bp, Artificial; identical to SEQ ID NO: 285616
  Synthetic oligonucleotide

SEQ ID NO: 656076 - DNA, 50 bp, Artificial; identical to SEQ ID NO: 284909
  Synthetic oligonucleotide

SEQ ID NO: 656077 - DNA, 55 bp, Artificial; identical to SEQ ID NO: 280357
  Synthetic oligonucleotide

SEQ ID NO: 656078 - DNA, 55 bp, Artificial; identical to SEQ ID NO: 286043
  Synthetic oligonucleotide

SEQ ID NO: 656079 - DNA, 51 bp, Artificial; identical to SEQ ID NO: 283647
  Synthetic oligonucleotide

SEQ ID NO: 656080 - DNA, 55 bp, Artificial; identical to SEQ ID NO: 280363
  Synthetic oligonucleotide

SEQ ID NO: 656081 - DNA, 55 bp, Artificial; identical to SEQ ID NO: 280367
  Synthetic oligonucleotide

SEQ ID NO: 656082 - DNA, 55 bp, Artificial; identical to SEQ ID NO: 280368
  Synthetic oligonucleotide

SEQ ID NO: 656083 - DNA, 55 bp, Artificial; identical to SEQ ID NO: 268497
  Synthetic oligonucleotide

SEQ ID NO: 656084 - DNA, 55 bp, Artificial; identical to SEQ ID NO: 280369
  Synthetic oligonucleotide

SEQ ID NO: 656085 - DNA, 51 bp, Artificial; identical to SEQ ID NO: 283649
  Synthetic oligonucleotide

SEQ ID NO: 656086 - DNA, 58 bp, Artificial; identical to SEQ ID NO: 279101
  Synthetic oligonucleotide

SEQ ID NO: 656087 - DNA, 60 bp, Artificial; identical to SEQ ID NO: 279061
  Synthetic oligonucleotide

SEQ ID NO: 656088 - DNA, 55 bp, Artificial; identical to SEQ ID NO: 280372
  Synthetic oligonucleotide

SEQ ID NO: 656089 - DNA, 55 bp, Artificial; identical to SEQ ID NO: 280315
  Synthetic oligonucleotide

SEQ ID NO: 656090 - DNA, 60 bp, Artificial; identical to SEQ ID NO: 279080
  Synthetic oligonucleotide

SEQ ID NO: 656091 - DNA, 58 bp, Artificial; identical to SEQ ID NO: 279040
  Synthetic oligonucleotide

SEQ ID NO: 656092 - DNA, 55 bp, Artificial; identical to SEQ ID NO: 280317
  Synthetic oligonucleotide

SEQ ID NO: 656093 - DNA, 55 bp, Artificial; identical to SEQ ID NO: 278036
  Synthetic oligonucleotide

SEQ ID NO: 656094 - DNA, 55 bp, Artificial; identical to SEQ ID NO: 268498
  Synthetic oligonucleotide

SEQ ID NO: 656095 - DNA, 55 bp, Artificial; identical to SEQ ID NO: 280318
  Synthetic oligonucleotide

SEQ ID NO: 656096 - DNA, 52 bp, Artificial; identical to SEQ ID NO: 286376
  Synthetic oligonucleotide

SEQ ID NO: 656097 - DNA, 55 bp, Artificial; identical to SEQ ID NO: 280322
  Synthetic oligonucleotide

SEQ ID NO: 656098 - DNA, 55 bp, Artificial; identical to SEQ ID NO: 268975
  Synthetic oligonucleotide

SEQ ID NO: 656099 - DNA, 58 bp, Artificial; identical to SEQ ID NO: 279225
  Synthetic oligonucleotide

SEQ ID NO: 656100 - DNA, 60 bp, Artificial; identical to SEQ ID NO: 285830
  Synthetic oligonucleotide

SEQ ID NO: 656101 - DNA, 50 bp, Artificial; identical to SEQ ID NO: 284912
  Synthetic oligonucleotide

SEQ ID NO: 656102 - DNA, 55 bp, Artificial; identical to SEQ ID NO: 278035
  Synthetic oligonucleotide

SEQ ID NO: 656103 - DNA, 55 bp, Artificial; identical to SEQ ID NO: 280327
  Synthetic oligonucleotide

SEQ ID NO: 656104 - DNA, 55 bp, Artificial; identical to SEQ ID NO: 280328
  Synthetic oligonucleotide

SEQ ID NO: 656105 - DNA, 55 bp, Artificial; identical to SEQ ID NO: 278033
  Synthetic oligonucleotide

SEQ ID NO: 656106 - DNA, 55 bp, Artificial; identical to SEQ ID NO: 280329
  Synthetic oligonucleotide

SEQ ID NO: 656107 - DNA, 57 bp, Artificial; identical to SEQ ID NO: 279033
  Synthetic oligonucleotide

SEQ ID NO: 656108 - DNA, 56 bp, Artificial; identical to SEQ ID NO: 278969
  Synthetic oligonucleotide

SEQ ID NO: 656109 - DNA, 55 bp, Artificial; identical to SEQ ID NO: 286093
  Synthetic oligonucleotide

SEQ ID NO: 656110 - DNA, 59 bp, Artificial; identical to SEQ ID NO: 278984
  Synthetic oligonucleotide

SEQ ID NO: 656111 - DNA, 55 bp, Artificial; identical to SEQ ID NO: 280332
  Synthetic oligonucleotide

SEQ ID NO: 656112 - DNA, 55 bp, Artificial; identical to SEQ ID NO: 268974
  Synthetic oligonucleotide

SEQ ID NO: 656113 - DNA, 52 bp, Artificial; identical to SEQ ID NO: 270368
  Synthetic oligonucleotide

SEQ ID NO: 656114 - DNA, 55 bp, Artificial; identical to SEQ ID NO: 268499
  Synthetic oligonucleotide

SEQ ID NO: 656115 - DNA, 57 bp, Artificial; identical to SEQ ID NO: 279283
  Synthetic oligonucleotide

SEQ ID NO: 656116 - DNA, 55 bp, Artificial; identical to SEQ ID NO: 280336
  Synthetic oligonucleotide

SEQ ID NO: 656117 - DNA, 53 bp, Artificial; identical to SEQ ID NO: 267903
  Synthetic oligonucleotide

SEQ ID NO: 656118 - DNA, 55 bp, Artificial; identical to SEQ ID NO: 278026
  Synthetic oligonucleotide

SEQ ID NO: 656119 - DNA, 55 bp, Artificial; identical to SEQ ID NO: 278024
  Synthetic oligonucleotide

SEQ ID NO: 656120 - DNA, 56 bp, Artificial; identical to SEQ ID NO: 286299
  Synthetic oligonucleotide

SEQ ID NO: 656121 - DNA, 60 bp, Artificial; identical to SEQ ID NO: 279102
  Synthetic oligonucleotide

SEQ ID NO: 656122 - DNA, 59 bp, Artificial; identical to SEQ ID NO: 279093
  Synthetic oligonucleotide

SEQ ID NO: 656123 - DNA, 53 bp, Artificial; identical to SEQ ID NO: 280339
  Synthetic oligonucleotide

SEQ ID NO: 656124 - DNA, 60 bp, Artificial; identical to SEQ ID NO: 279042
  Synthetic oligonucleotide

SEQ ID NO: 656125 - DNA, 55 bp, Artificial; identical to SEQ ID NO: 280341
  Synthetic oligonucleotide

SEQ ID NO: 656126 - DNA, 55 bp, Artificial; identical to SEQ ID NO: 268502
  Synthetic oligonucleotide

SEQ ID NO: 656127 - DNA, 55 bp, Artificial; identical to SEQ ID NO: 280343
  Synthetic oligonucleotide

SEQ ID NO: 656128 - DNA, 52 bp, Artificial; identical to SEQ ID NO: 282863
  Synthetic oligonucleotide

SEQ ID NO: 656129 - DNA, 54 bp, Artificial; identical to SEQ ID NO: 278670
  Synthetic oligonucleotide

SEQ ID NO: 656130 - DNA, 55 bp, Artificial; identical to SEQ ID NO: 280330
  Synthetic oligonucleotide

SEQ ID NO: 656131 - DNA, 55 bp, Artificial; identical to SEQ ID NO: 268971
  Synthetic oligonucleotide

SEQ ID NO: 656132 - DNA, 55 bp, Artificial; identical to SEQ ID NO: 268970
  Synthetic oligonucleotide

SEQ ID NO: 656133 - DNA, 55 bp, Artificial; identical to SEQ ID NO: 280361
  Synthetic oligonucleotide

SEQ ID NO: 656134 - DNA, 55 bp, Artificial; identical to SEQ ID NO: 270358
  Synthetic oligonucleotide

SEQ ID NO: 656135 - DNA, 55 bp, Artificial; identical to SEQ ID NO: 286099
  Synthetic oligonucleotide

SEQ ID NO: 656136 - DNA, 55 bp, Artificial; identical to SEQ ID NO: 268969
  Synthetic oligonucleotide

SEQ ID NO: 656137 - DNA, 51 bp, Artificial; identical to SEQ ID NO: 283311
  Synthetic oligonucleotide

SEQ ID NO: 656138 - DNA, 55 bp, Artificial; identical to SEQ ID NO: 280260
  Synthetic oligonucleotide

SEQ ID NO: 656139 - DNA, 58 bp, Artificial; identical to SEQ ID NO: 285715
  Synthetic oligonucleotide

SEQ ID NO: 656140 - DNA, 54 bp, Artificial; identical to SEQ ID NO: 286314
  Synthetic oligonucleotide

SEQ ID NO: 656141 - DNA, 55 bp, Artificial; identical to SEQ ID NO: 280299
  Synthetic oligonucleotide

SEQ ID NO: 656142 - DNA, 53 bp, Artificial; identical to SEQ ID NO: 278061
  Synthetic oligonucleotide

SEQ ID NO: 656143 - DNA, 55 bp, Artificial; identical to SEQ ID NO: 280454
  Synthetic oligonucleotide

SEQ ID NO: 656144 - DNA, 60 bp, Artificial; identical to SEQ ID NO: 285801
  Synthetic oligonucleotide

SEQ ID NO: 656145 - DNA, 55 bp, Artificial; identical to SEQ ID NO: 280448
  Synthetic oligonucleotide

SEQ ID NO: 656146 - DNA, 55 bp, Artificial; identical to SEQ ID NO: 280444
  Synthetic oligonucleotide

SEQ ID NO: 656147 - DNA, 54 bp, Artificial; identical to SEQ ID NO: 280440
  Synthetic oligonucleotide

SEQ ID NO: 656148 - DNA, 54 bp, Artificial; identical to SEQ ID NO: 268463
  Synthetic oligonucleotide

SEQ ID NO: 656149 - DNA, 55 bp, Artificial; identical to SEQ ID NO: 278057
  Synthetic oligonucleotide

SEQ ID NO: 656150 - DNA, 55 bp, Artificial; identical to SEQ ID NO: 278052
  Synthetic oligonucleotide

SEQ ID NO: 656151 - DNA, 55 bp, Artificial; identical to SEQ ID NO: 280482
  Synthetic oligonucleotide

SEQ ID NO: 656152 - DNA, 55 bp, Artificial; identical to SEQ ID NO: 280480
  Synthetic oligonucleotide

SEQ ID NO: 656153 - DNA, 56 bp, Artificial; identical to SEQ ID NO: 285576
  Synthetic oligonucleotide

SEQ ID NO: 656154 - DNA, 58 bp, Artificial; identical to SEQ ID NO: 279274
  Synthetic oligonucleotide

SEQ ID NO: 656155 - DNA, 52 bp, Artificial; identical to SEQ ID NO: 268441
  Synthetic oligonucleotide

SEQ ID NO: 656156 - DNA, 50 bp, Artificial; identical to SEQ ID NO: 277960
  Synthetic oligonucleotide

SEQ ID NO: 656157 - DNA, 55 bp, Artificial; identical to SEQ ID NO: 276753
  Synthetic oligonucleotide

SEQ ID NO: 656158 - DNA, 60 bp, Artificial; identical to SEQ ID NO: 285523
  Synthetic oligonucleotide

SEQ ID NO: 656159 - DNA, 55 bp, Artificial; identical to SEQ ID NO: 280377
  Synthetic oligonucleotide

SEQ ID NO: 656160 - DNA, 60 bp, Artificial; identical to SEQ ID NO: 285666
  Synthetic oligonucleotide

SEQ ID NO: 656161 - DNA, 55 bp, Artificial; identical to SEQ ID NO: 280419
  Synthetic oligonucleotide

SEQ ID NO: 656162 - DNA, 60 bp, Artificial; identical to SEQ ID NO: 285604
  Synthetic oligonucleotide

SEQ ID NO: 656163 - DNA, 55 bp, Artificial; identical to SEQ ID NO: 267991
  Synthetic oligonucleotide

SEQ ID NO: 656164 - DNA, 55 bp, Artificial; identical to SEQ ID NO: 280414
  Synthetic oligonucleotide

SEQ ID NO: 656165 - DNA, 55 bp, Artificial; identical to SEQ ID NO: 280093
  Synthetic oligonucleotide

SEQ ID NO: 656166 - DNA, 55 bp, Artificial; identical to SEQ ID NO: 280091
  Synthetic oligonucleotide

SEQ ID NO: 656167 - DNA, 52 bp, Artificial; identical to SEQ ID NO: 282772
  Synthetic oligonucleotide

SEQ ID NO: 656168 - DNA, 57 bp, Artificial; identical to SEQ ID NO: 279319
  Synthetic oligonucleotide

SEQ ID NO: 656169 - DNA, 55 bp, Artificial; identical to SEQ ID NO: 280128
  Synthetic oligonucleotide

SEQ ID NO: 656170 - DNA, 55 bp, Artificial; identical to SEQ ID NO: 268966
  Synthetic oligonucleotide

SEQ ID NO: 656171 - DNA, 55 bp, Artificial; identical to SEQ ID NO: 280124
  Synthetic oligonucleotide

SEQ ID NO: 656172 - DNA, 55 bp, Artificial; identical to SEQ ID NO: 280119
  Synthetic oligonucleotide

SEQ ID NO: 656173 - DNA, 55 bp, Artificial; identical to SEQ ID NO: 280118
  Synthetic oligonucleotide

SEQ ID NO: 656174 - DNA, 55 bp, Artificial; identical to SEQ ID NO: 280112
  Synthetic oligonucleotide

SEQ ID NO: 656175 - DNA, 55 bp, Artificial; identical to SEQ ID NO: 277986
  Synthetic oligonucleotide

SEQ ID NO: 656176 - DNA, 55 bp, Artificial; identical to SEQ ID NO: 271256
  Synthetic oligonucleotide

SEQ ID NO: 656177 - DNA, 60 bp, Artificial; identical to SEQ ID NO: 268954
  Synthetic oligonucleotide

SEQ ID NO: 656178 - DNA, 55 bp, Artificial; identical to SEQ ID NO: 280028
  Synthetic oligonucleotide

SEQ ID NO: 656179 - DNA, 52 bp, Artificial; identical to SEQ ID NO: 283099
  Synthetic oligonucleotide

SEQ ID NO: 656180 - DNA, 55 bp, Artificial; identical to SEQ ID NO: 277981
  Synthetic oligonucleotide

SEQ ID NO: 656181 - DNA, 55 bp, Artificial; identical to SEQ ID NO: 277980
  Synthetic oligonucleotide

SEQ ID NO: 656182 - DNA, 50 bp, Artificial; identical to SEQ ID NO: 284865
  Synthetic oligonucleotide

SEQ ID NO: 656183 - DNA, 55 bp, Artificial; identical to SEQ ID NO: 280047
  Synthetic oligonucleotide

SEQ ID NO: 656184 - DNA, 60 bp, Artificial; identical to SEQ ID NO: 280609
  Synthetic oligonucleotide

SEQ ID NO: 656185 - DNA, 55 bp, Artificial; identical to SEQ ID NO: 280200
  Synthetic oligonucleotide

SEQ ID NO: 656186 - DNA, 55 bp, Artificial; identical to SEQ ID NO: 279797
  Synthetic oligonucleotide

SEQ ID NO: 656187 - DNA, 58 bp, Artificial; identical to SEQ ID NO: 279269
  Synthetic oligonucleotide

SEQ ID NO: 656188 - DNA, 55 bp, Artificial; identical to SEQ ID NO: 286073
  Synthetic oligonucleotide

SEQ ID NO: 656189 - DNA, 55 bp, Artificial; identical to SEQ ID NO: 280249
  Synthetic oligonucleotide

SEQ ID NO: 656190 - DNA, 60 bp, Artificial; identical to SEQ ID NO: 281709
  Synthetic oligonucleotide

SEQ ID NO: 656191 - DNA, 60 bp, Artificial; identical to SEQ ID NO: 280853
  Synthetic oligonucleotide

SEQ ID NO: 656192 - DNA, 56 bp, Artificial; identical to SEQ ID NO: 279435
  Synthetic oligonucleotide

SEQ ID NO: 656193 - DNA, 55 bp, Artificial; identical to SEQ ID NO: 280170
  Synthetic oligonucleotide

SEQ ID NO: 656194 - DNA, 55 bp, Artificial; identical to SEQ ID NO: 277969
  Synthetic oligonucleotide

SEQ ID NO: 656195 - DNA, 55 bp, Artificial; identical to SEQ ID NO: 280169
  Synthetic oligonucleotide

SEQ ID NO: 656196 - DNA, 55 bp, Artificial; identical to SEQ ID NO: 280811
  Synthetic oligonucleotide

SEQ ID NO: 656197 - DNA, 55 bp, Artificial; identical to SEQ ID NO: 268963
  Synthetic oligonucleotide

SEQ ID NO: 656198 - DNA, 56 bp, Artificial; identical to SEQ ID NO: 282141
  Synthetic oligonucleotide

SEQ ID NO: 656199 - DNA, 55 bp, Artificial; identical to SEQ ID NO: 267989
  Synthetic oligonucleotide

SEQ ID NO: 656200 - DNA, 55 bp, Artificial; identical to SEQ ID NO: 280792
  Synthetic oligonucleotide

SEQ ID NO: 656201 - DNA, 55 bp, Artificial; identical to SEQ ID NO: 280789
  Synthetic oligonucleotide

SEQ ID NO: 656202 - DNA, 54 bp, Artificial; identical to SEQ ID NO: 282256
  Synthetic oligonucleotide

SEQ ID NO: 656203 - DNA, 55 bp, Artificial; identical to SEQ ID NO: 280841
  Synthetic oligonucleotide

SEQ ID NO: 656204 - DNA, 55 bp, Artificial; identical to SEQ ID NO: 280835
  Synthetic oligonucleotide

SEQ ID NO: 656205 - DNA, 55 bp, Artificial; identical to SEQ ID NO: 278016
  Synthetic oligonucleotide

SEQ ID NO: 656206 - DNA, 56 bp, Artificial; identical to SEQ ID NO: 279231
  Synthetic oligonucleotide

SEQ ID NO: 656207 - DNA, 55 bp, Artificial; identical to SEQ ID NO: 280744
  Synthetic oligonucleotide

SEQ ID NO: 656208 - DNA, 55 bp, Artificial; identical to SEQ ID NO: 278014
  Synthetic oligonucleotide

SEQ ID NO: 656209 - DNA, 54 bp, Artificial; identical to SEQ ID NO: 286308
  Synthetic oligonucleotide

SEQ ID NO: 656210 - DNA, 55 bp, Artificial; identical to SEQ ID NO: 280777
  Synthetic oligonucleotide

SEQ ID NO: 656211 - DNA, 54 bp, Artificial; identical to SEQ ID NO: 283875
  Synthetic oligonucleotide

SEQ ID NO: 656212 - DNA, 55 bp, Artificial; identical to SEQ ID NO: 278013
  Synthetic oligonucleotide

SEQ ID NO: 656213 - DNA, 55 bp, Artificial; identical to SEQ ID NO: 278010
  Synthetic oligonucleotide

SEQ ID NO: 656214 - DNA, 55 bp, Artificial; identical to SEQ ID NO: 280769
  Synthetic oligonucleotide

SEQ ID NO: 656215 - DNA, 55 bp, Artificial; identical to SEQ ID NO: 280768
  Synthetic oligonucleotide

SEQ ID NO: 656216 - DNA, 55 bp, Artificial; identical to SEQ ID NO: 278008
  Synthetic oligonucleotide

SEQ ID NO: 656217 - DNA, 55 bp, Artificial; identical to SEQ ID NO: 276754
  Synthetic oligonucleotide

SEQ ID NO: 656218 - DNA, 53 bp, Artificial; identical to SEQ ID NO: 269015
  Synthetic oligonucleotide

SEQ ID NO: 656219 - DNA, 55 bp, Artificial; identical to SEQ ID NO: 280933
  Synthetic oligonucleotide

SEQ ID NO: 656220 - DNA, 53 bp, Artificial; identical to SEQ ID NO: 282581
  Synthetic oligonucleotide

SEQ ID NO: 656221 - DNA, 55 bp, Artificial; identical to SEQ ID NO: 280922
  Synthetic oligonucleotide

SEQ ID NO: 656222 - DNA, 50 bp, Artificial; identical to SEQ ID NO: 284877
  Synthetic oligonucleotide

SEQ ID NO: 656223 - DNA, 55 bp, Artificial; identical to SEQ ID NO: 286081
  Synthetic oligonucleotide

SEQ ID NO: 656224 - DNA, 55 bp, Artificial; identical to SEQ ID NO: 278005
  Synthetic oligonucleotide

SEQ ID NO: 656225 - DNA, 55 bp, Artificial; identical to SEQ ID NO: 280921
  Synthetic oligonucleotide

SEQ ID NO: 656226 - DNA, 55 bp, Artificial; identical to SEQ ID NO: 278001
  Synthetic oligonucleotide

SEQ ID NO: 656227 - DNA, 51 bp, Artificial; identical to SEQ ID NO: 283305
  Synthetic oligonucleotide

SEQ ID NO: 656228 - DNA, 55 bp, Artificial; identical to SEQ ID NO: 285981
  Synthetic oligonucleotide

SEQ ID NO: 656229 - DNA, 55 bp, Artificial; identical to SEQ ID NO: 280965
  Synthetic oligonucleotide

SEQ ID NO: 656230 - DNA, 60 bp, Artificial; identical to SEQ ID NO: 268419
  Synthetic oligonucleotide

SEQ ID NO: 656231 - DNA, 55 bp, Artificial; identical to SEQ ID NO: 280959
  Synthetic oligonucleotide

SEQ ID NO: 656232 - DNA, 59 bp, Artificial; identical to SEQ ID NO: 268407
  Synthetic oligonucleotide

SEQ ID NO: 656233 - DNA, 54 bp, Artificial; identical to SEQ ID NO: 282216
  Synthetic oligonucleotide

SEQ ID NO: 656234 - DNA, 55 bp, Artificial; identical to SEQ ID NO: 267987
  Synthetic oligonucleotide

SEQ ID NO: 656235 - DNA, 55 bp, Artificial; identical to SEQ ID NO: 280952
  Synthetic oligonucleotide

SEQ ID NO: 656236 - DNA, 53 bp, Artificial; identical to SEQ ID NO: 279468
  Synthetic oligonucleotide

SEQ ID NO: 656237 - DNA, 50 bp, Artificial; identical to SEQ ID NO: 284866
  Synthetic oligonucleotide

SEQ ID NO: 656238 - DNA, 55 bp, Artificial; identical to SEQ ID NO: 285990
  Synthetic oligonucleotide

SEQ ID NO: 656239 - DNA, 55 bp, Artificial; identical to SEQ ID NO: 280874
  Synthetic oligonucleotide

SEQ ID NO: 656240 - DNA, 55 bp, Artificial; identical to SEQ ID NO: 277993
  Synthetic oligonucleotide

SEQ ID NO: 656241 - DNA, 55 bp, Artificial; identical to SEQ ID NO: 280862
  Synthetic oligonucleotide

SEQ ID NO: 656242 - DNA, 55 bp, Artificial; identical to SEQ ID NO: 280856
  Synthetic oligonucleotide

SEQ ID NO: 656243 - DNA, 55 bp, Artificial; identical to SEQ ID NO: 267986
  Synthetic oligonucleotide

SEQ ID NO: 656244 - DNA, 54 bp, Artificial; identical to SEQ ID NO: 282393
  Synthetic oligonucleotide

SEQ ID NO: 656245 - DNA, 54 bp, Artificial; identical to SEQ ID NO: 280849
  Synthetic oligonucleotide

SEQ ID NO: 656246 - DNA, 54 bp, Artificial; identical to SEQ ID NO: 279295
  Synthetic oligonucleotide

SEQ ID NO: 656247 - DNA, 55 bp, Artificial; identical to SEQ ID NO: 280905
  Synthetic oligonucleotide

SEQ ID NO: 656248 - DNA, 55 bp, Artificial; identical to SEQ ID NO: 280900
  Synthetic oligonucleotide

SEQ ID NO: 656249 - DNA, 55 bp, Artificial; identical to SEQ ID NO: 269013
  Synthetic oligonucleotide

SEQ ID NO: 656250 - DNA, 55 bp, Artificial; identical to SEQ ID NO: 280882
  Synthetic oligonucleotide

SEQ ID NO: 656251 - DNA, 53 bp, Artificial; identical to SEQ ID NO: 286335
  Synthetic oligonucleotide

SEQ ID NO: 656252 - DNA, 55 bp, Artificial; identical to SEQ ID NO: 280880
  Synthetic oligonucleotide

SEQ ID NO: 656253 - DNA, 55 bp, Artificial; identical to SEQ ID NO: 276755
  Synthetic oligonucleotide

SEQ ID NO: 656254 - DNA, 54 bp, Artificial; identical to SEQ ID NO: 282359
  Synthetic oligonucleotide

SEQ ID NO: 656255 - DNA, 55 bp, Artificial; identical to SEQ ID NO: 268373
  Synthetic oligonucleotide

SEQ ID NO: 656256 - DNA, 50 bp, Artificial; identical to SEQ ID NO: 268593
  Synthetic oligonucleotide

SEQ ID NO: 656257 - DNA, 57 bp, Artificial; identical to SEQ ID NO: 283464
  Synthetic oligonucleotide

SEQ ID NO: 656258 - DNA, 60 bp, Artificial; identical to SEQ ID NO: 267831
  Synthetic oligonucleotide

SEQ ID NO: 656259 - DNA, 57 bp, Artificial; identical to SEQ ID NO: 283153
  Synthetic oligonucleotide

SEQ ID NO: 656260 - DNA, 55 bp, Artificial; identical to SEQ ID NO: 280600
  Synthetic oligonucleotide

SEQ ID NO: 656261 - DNA, 55 bp, Artificial; identical to SEQ ID NO: 268380
  Synthetic oligonucleotide

SEQ ID NO: 656262 - DNA, 55 bp, Artificial; identical to SEQ ID NO: 268387
  Synthetic oligonucleotide

SEQ ID NO: 656263 - DNA, 55 bp, Artificial; identical to SEQ ID NO: 280592
  Synthetic oligonucleotide

SEQ ID NO: 656264 - DNA, 55 bp, Artificial; identical to SEQ ID NO: 280582
  Synthetic oligonucleotide

SEQ ID NO: 656265 - DNA, 55 bp, Artificial; identical to SEQ ID NO: 269989
  Synthetic oligonucleotide

SEQ ID NO: 656266 - DNA, 55 bp, Artificial; identical to SEQ ID NO: 280507
  Synthetic oligonucleotide

SEQ ID NO: 656267 - DNA, 52 bp, Artificial; identical to SEQ ID NO: 282779
  Synthetic oligonucleotide

SEQ ID NO: 656268 - DNA, 55 bp, Artificial; identical to SEQ ID NO: 280496
  Synthetic oligonucleotide

SEQ ID NO: 656269 - DNA, 58 bp, Artificial; identical to SEQ ID NO: 283786
  Synthetic oligonucleotide

SEQ ID NO: 656270 - DNA, 58 bp, Artificial; identical to SEQ ID NO: 268385
  Synthetic oligonucleotide

SEQ ID NO: 656271 - DNA, 59 bp, Artificial; identical to SEQ ID NO: 268374
  Synthetic oligonucleotide

SEQ ID NO: 656272 - DNA, 55 bp, Artificial; identical to SEQ ID NO: 280544
  Synthetic oligonucleotide

SEQ ID NO: 656273 - DNA, 55 bp, Artificial; identical to SEQ ID NO: 278551
  Synthetic oligonucleotide

SEQ ID NO: 656274 - DNA, 55 bp, Artificial; identical to SEQ ID NO: 276756
  Synthetic oligonucleotide

SEQ ID NO: 656275 - DNA, 54 bp, Artificial; identical to SEQ ID NO: 282292
  Synthetic oligonucleotide

SEQ ID NO: 656276 - DNA, 55 bp, Artificial; identical to SEQ ID NO: 280692
  Synthetic oligonucleotide

SEQ ID NO: 656277 - DNA, 55 bp, Artificial; identical to SEQ ID NO: 269011
  Synthetic oligonucleotide

SEQ ID NO: 656278 - DNA, 53 bp, Artificial; identical to SEQ ID NO: 282672
  Synthetic oligonucleotide

SEQ ID NO: 656279 - DNA, 55 bp, Artificial; identical to SEQ ID NO: 286519
  Synthetic oligonucleotide

SEQ ID NO: 656280 - DNA, 55 bp, Artificial; identical to SEQ ID NO: 269722
  Synthetic oligonucleotide

SEQ ID NO: 656281 - DNA, 55 bp, Artificial; identical to SEQ ID NO: 280673
  Synthetic oligonucleotide

SEQ ID NO: 656282 - DNA, 55 bp, Artificial; identical to SEQ ID NO: 280718
  Synthetic oligonucleotide

SEQ ID NO: 656283 - DNA, 54 bp, Artificial; identical to SEQ ID NO: 270312
  Synthetic oligonucleotide

SEQ ID NO: 656284 - DNA, 55 bp, Artificial; identical to SEQ ID NO: 278547
  Synthetic oligonucleotide

SEQ ID NO: 656285 - DNA, 50 bp, Artificial; identical to SEQ ID NO: 268384
  Synthetic oligonucleotide

SEQ ID NO: 656286 - DNA, 55 bp, Artificial; identical to SEQ ID NO: 280700
  Synthetic oligonucleotide

SEQ ID NO: 656287 - DNA, 55 bp, Artificial; identical to SEQ ID NO: 280637
  Synthetic oligonucleotide

SEQ ID NO: 656288 - DNA, 55 bp, Artificial; identical to SEQ ID NO: 280636
  Synthetic oligonucleotide

SEQ ID NO: 656289 - DNA, 55 bp, Artificial; identical to SEQ ID NO: 280630
  Synthetic oligonucleotide

SEQ ID NO: 656290 - DNA, 60 bp, Artificial; identical to SEQ ID NO: 285799
  Synthetic oligonucleotide

SEQ ID NO: 656291 - DNA, 55 bp, Artificial; identical to SEQ ID NO: 280612
  Synthetic oligonucleotide

SEQ ID NO: 656292 - DNA, 55 bp, Artificial; identical to SEQ ID NO: 280656
  Synthetic oligonucleotide

SEQ ID NO: 656293 - DNA, 55 bp, Artificial; identical to SEQ ID NO: 278541
  Synthetic oligonucleotide

SEQ ID NO: 656294 - DNA, 55 bp, Artificial; identical to SEQ ID NO: 278540
  Synthetic oligonucleotide

SEQ ID NO: 656295 - DNA, 55 bp, Artificial; identical to SEQ ID NO: 278538
  Synthetic oligonucleotide

SEQ ID NO: 656296 - DNA, 55 bp, Artificial; identical to SEQ ID NO: 279521
  Synthetic oligonucleotide

SEQ ID NO: 656297 - DNA, 52 bp, Artificial; identical to SEQ ID NO: 282865
  Synthetic oligonucleotide

SEQ ID NO: 656298 - DNA, 55 bp, Artificial; identical to SEQ ID NO: 278537
  Synthetic oligonucleotide

SEQ ID NO: 656299 - DNA, 55 bp, Artificial; identical to SEQ ID NO: 279571
  Synthetic oligonucleotide

SEQ ID NO: 656300 - DNA, 55 bp, Artificial; identical to SEQ ID NO: 286016
  Synthetic oligonucleotide

SEQ ID NO: 656301 - DNA, 55 bp, Artificial; identical to SEQ ID NO: 279523
  Synthetic oligonucleotide

SEQ ID NO: 656302 - DNA, 55 bp, Artificial; identical to SEQ ID NO: 286025
  Synthetic oligonucleotide

SEQ ID NO: 656303 - DNA, 55 bp, Artificial; identical to SEQ ID NO: 279524
  Synthetic oligonucleotide

SEQ ID NO: 656304 - DNA, 55 bp, Artificial; identical to SEQ ID NO: 269008
  Synthetic oligonucleotide

SEQ ID NO: 656305 - DNA, 55 bp, Artificial; identical to SEQ ID NO: 268379
  Synthetic oligonucleotide

SEQ ID NO: 656306 - DNA, 51 bp, Artificial; identical to SEQ ID NO: 278787
  Synthetic oligonucleotide

SEQ ID NO: 656307 - DNA, 55 bp, Artificial; identical to SEQ ID NO: 279589
  Synthetic oligonucleotide

SEQ ID NO: 656308 - DNA, 55 bp, Artificial; identical to SEQ ID NO: 279554
  Synthetic oligonucleotide

SEQ ID NO: 656309 - DNA, 55 bp, Artificial; identical to SEQ ID NO: 279562
  Synthetic oligonucleotide

SEQ ID NO: 656310 - DNA, 55 bp, Artificial; identical to SEQ ID NO: 279594
  Synthetic oligonucleotide

SEQ ID NO: 656311 - DNA, 55 bp, Artificial; identical to SEQ ID NO: 268386
  Synthetic oligonucleotide

SEQ ID NO: 656312 - DNA, 55 bp, Artificial; identical to SEQ ID NO: 279533
  Synthetic oligonucleotide

SEQ ID NO: 656313 - DNA, 60 bp, Artificial; identical to SEQ ID NO: 278921
  Synthetic oligonucleotide

SEQ ID NO: 656314 - DNA, 55 bp, Artificial; identical to SEQ ID NO: 268389
  Synthetic oligonucleotide

SEQ ID NO: 656315 - DNA, 55 bp, Artificial; identical to SEQ ID NO: 279501
  Synthetic oligonucleotide

SEQ ID NO: 656316 - DNA, 55 bp, Artificial; identical to SEQ ID NO: 279511
  Synthetic oligonucleotide

SEQ ID NO: 656317 - DNA, 55 bp, Artificial; identical to SEQ ID NO: 279585
  Synthetic oligonucleotide

SEQ ID NO: 656318 - DNA, 55 bp, Artificial; identical to SEQ ID NO: 278577
  Synthetic oligonucleotide

SEQ ID NO: 656319 - DNA, 55 bp, Artificial; identical to SEQ ID NO: 278576
  Synthetic oligonucleotide

SEQ ID NO: 656320 - DNA, 55 bp, Artificial; identical to SEQ ID NO: 271253
  Synthetic oligonucleotide

SEQ ID NO: 656321 - DNA, 55 bp, Artificial; identical to SEQ ID NO: 279557
  Synthetic oligonucleotide

SEQ ID NO: 656322 - DNA, 53 bp, Artificial; identical to SEQ ID NO: 279896
  Synthetic oligonucleotide

SEQ ID NO: 656323 - DNA, 60 bp, Artificial; identical to SEQ ID NO: 282664
  Synthetic oligonucleotide

SEQ ID NO: 656324 - DNA, 55 bp, Artificial; identical to SEQ ID NO: 278573
  Synthetic oligonucleotide

SEQ ID NO: 656325 - DNA, 52 bp, Artificial; identical to SEQ ID NO: 282276
  Synthetic oligonucleotide

SEQ ID NO: 656326 - DNA, 60 bp, Artificial; identical to SEQ ID NO: 284731
  Synthetic oligonucleotide

SEQ ID NO: 656327 - DNA, 55 bp, Artificial; identical to SEQ ID NO: 278572
  Synthetic oligonucleotide

SEQ ID NO: 656328 - DNA, 55 bp, Artificial; identical to SEQ ID NO: 279805
  Synthetic oligonucleotide

SEQ ID NO: 656329 - DNA, 55 bp, Artificial; identical to SEQ ID NO: 279849
  Synthetic oligonucleotide

SEQ ID NO: 656330 - DNA, 55 bp, Artificial; identical to SEQ ID NO: 279845
  Synthetic oligonucleotide

SEQ ID NO: 656331 - DNA, 55 bp, Artificial; identical to SEQ ID NO: 270357
  Synthetic oligonucleotide

SEQ ID NO: 656332 - DNA, 55 bp, Artificial; identical to SEQ ID NO: 279839
  Synthetic oligonucleotide

SEQ ID NO: 656333 - DNA, 51 bp, Artificial; identical to SEQ ID NO: 283167
  Synthetic oligonucleotide

SEQ ID NO: 656334 - DNA, 55 bp, Artificial; identical to SEQ ID NO: 279976
  Synthetic oligonucleotide

SEQ ID NO: 656335 - DNA, 54 bp, Artificial; identical to SEQ ID NO: 269006
  Synthetic oligonucleotide

SEQ ID NO: 656336 - DNA, 55 bp, Artificial; identical to SEQ ID NO: 279963
  Synthetic oligonucleotide

SEQ ID NO: 656337 - DNA, 52 bp, Artificial; identical to SEQ ID NO: 279341
  Synthetic oligonucleotide

SEQ ID NO: 656338 - DNA, 51 bp, Artificial; identical to SEQ ID NO: 283335
  Synthetic oligonucleotide

SEQ ID NO: 656339 - DNA, 52 bp, Artificial; identical to SEQ ID NO: 283162
  Synthetic oligonucleotide

SEQ ID NO: 656340 - DNA, 55 bp, Artificial; identical to SEQ ID NO: 268392
  Synthetic oligonucleotide

SEQ ID NO: 656341 - DNA, 51 bp, Artificial; identical to SEQ ID NO: 283187
  Synthetic oligonucleotide

SEQ ID NO: 656342 - DNA, 51 bp, Artificial; identical to SEQ ID NO: 269258
  Synthetic oligonucleotide

SEQ ID NO: 656343 - DNA, 60 bp, Artificial; identical to SEQ ID NO: 285673
  Synthetic oligonucleotide

SEQ ID NO: 656344 - DNA, 55 bp, Artificial; identical to SEQ ID NO: 279929
  Synthetic oligonucleotide

SEQ ID NO: 656345 - DNA, 52 bp, Artificial; identical to SEQ ID NO: 282959
  Synthetic oligonucleotide

SEQ ID NO: 656346 - DNA, 55 bp, Artificial; identical to SEQ ID NO: 278502
  Synthetic oligonucleotide

SEQ ID NO: 656347 - DNA, 55 bp, Artificial; identical to SEQ ID NO: 279922
  Synthetic oligonucleotide

SEQ ID NO: 656348 - DNA, 55 bp, Artificial; identical to SEQ ID NO: 286003
  Synthetic oligonucleotide

SEQ ID NO: 656349 - DNA, 50 bp, Artificial; identical to SEQ ID NO: 286439
  Synthetic oligonucleotide

SEQ ID NO: 656350 - DNA, 54 bp, Artificial; identical to SEQ ID NO: 279947
  Synthetic oligonucleotide

SEQ ID NO: 656351 - DNA, 55 bp, Artificial; identical to SEQ ID NO: 279945
  Synthetic oligonucleotide

SEQ ID NO: 656352 - DNA, 55 bp, Artificial; identical to SEQ ID NO: 279939
  Synthetic oligonucleotide

SEQ ID NO: 656353 - DNA, 53 bp, Artificial; identical to SEQ ID NO: 282465
  Synthetic oligonucleotide

SEQ ID NO: 656354 - DNA, 55 bp, Artificial; identical to SEQ ID NO: 279937
  Synthetic oligonucleotide

SEQ ID NO: 656355 - DNA, 52 bp, Artificial; identical to SEQ ID NO: 286387
  Synthetic oligonucleotide

SEQ ID NO: 656356 - DNA, 54 bp, Artificial; identical to SEQ ID NO: 268341
  Synthetic oligonucleotide

SEQ ID NO: 656357 - DNA, 50 bp, Artificial; identical to SEQ ID NO: 268544
  Synthetic oligonucleotide

SEQ ID NO: 656358 - DNA, 55 bp, Artificial; identical to SEQ ID NO: 279651
  Synthetic oligonucleotide

SEQ ID NO: 656359 - DNA, 51 bp, Artificial; identical to SEQ ID NO: 283185
  Synthetic oligonucleotide

SEQ ID NO: 656360 - DNA, 55 bp, Artificial; identical to SEQ ID NO: 279650
  Synthetic oligonucleotide

SEQ ID NO: 656361 - DNA, 54 bp, Artificial; identical to SEQ ID NO: 282296
  Synthetic oligonucleotide

SEQ ID NO: 656362 - DNA, 50 bp, Artificial; identical to SEQ ID NO: 284980
  Synthetic oligonucleotide

SEQ ID NO: 656363 - DNA, 55 bp, Artificial; identical to SEQ ID NO: 279695
  Synthetic oligonucleotide

SEQ ID NO: 656364 - DNA, 55 bp, Artificial; identical to SEQ ID NO: 278492
  Synthetic oligonucleotide

SEQ ID NO: 656365 - DNA, 55 bp, Artificial; identical to SEQ ID NO: 279683
  Synthetic oligonucleotide

SEQ ID NO: 656366 - DNA, 53 bp, Artificial; identical to SEQ ID NO: 276818
  Synthetic oligonucleotide

SEQ ID NO: 656367 - DNA, 55 bp, Artificial; identical to SEQ ID NO: 278490
  Synthetic oligonucleotide

SEQ ID NO: 656368 - DNA, 55 bp, Artificial; identical to SEQ ID NO: 279616
  Synthetic oligonucleotide

SEQ ID NO: 656369 - DNA, 55 bp, Artificial; identical to SEQ ID NO: 279606
  Synthetic oligonucleotide

SEQ ID NO: 656370 - DNA, 55 bp, Artificial; identical to SEQ ID NO: 279646
  Synthetic oligonucleotide

SEQ ID NO: 656371 - DNA, 55 bp, Artificial; identical to SEQ ID NO: 271691
  Synthetic oligonucleotide

SEQ ID NO: 656372 - DNA, 58 bp, Artificial; identical to SEQ ID NO: 279226
  Synthetic oligonucleotide

SEQ ID NO: 656373 - DNA, 55 bp, Artificial; identical to SEQ ID NO: 279774
  Synthetic oligonucleotide

SEQ ID NO: 656374 - DNA, 55 bp, Artificial; identical to SEQ ID NO: 279772
  Synthetic oligonucleotide

SEQ ID NO: 656375 - DNA, 55 bp, Artificial; identical to SEQ ID NO: 279763
  Synthetic oligonucleotide

SEQ ID NO: 656376 - DNA, 55 bp, Artificial; identical to SEQ ID NO: 279759
  Synthetic oligonucleotide

SEQ ID NO: 656377 - DNA, 57 bp, Artificial; identical to SEQ ID NO: 285793
  Synthetic oligonucleotide

SEQ ID NO: 656378 - DNA, 55 bp, Artificial; identical to SEQ ID NO: 279756
  Synthetic oligonucleotide

SEQ ID NO: 656379 - DNA, 55 bp, Artificial; identical to SEQ ID NO: 268388
  Synthetic oligonucleotide

SEQ ID NO: 656380 - DNA, 55 bp, Artificial; identical to SEQ ID NO: 279800
  Synthetic oligonucleotide

SEQ ID NO: 656381 - DNA, 55 bp, Artificial; identical to SEQ ID NO: 279799
  Synthetic oligonucleotide

SEQ ID NO: 656382 - DNA, 55 bp, Artificial; identical to SEQ ID NO: 279788
  Synthetic oligonucleotide

SEQ ID NO: 656383 - DNA, 57 bp, Artificial; identical to SEQ ID NO: 285738
  Synthetic oligonucleotide

SEQ ID NO: 656384 - DNA, 55 bp, Artificial; identical to SEQ ID NO: 271814
  Synthetic oligonucleotide

SEQ ID NO: 656385 - DNA, 55 bp, Artificial; identical to SEQ ID NO: 278524
  Synthetic oligonucleotide

SEQ ID NO: 656386 - DNA, 54 bp, Artificial; identical to SEQ ID NO: 268355
  Synthetic oligonucleotide

SEQ ID NO: 656387 - DNA, 51 bp, Artificial; identical to SEQ ID NO: 278516
  Synthetic oligonucleotide

SEQ ID NO: 656388 - DNA, 55 bp, Artificial; identical to SEQ ID NO: 279732
  Synthetic oligonucleotide

SEQ ID NO: 656389 - DNA, 55 bp, Artificial; identical to SEQ ID NO: 282072
  Synthetic oligonucleotide

SEQ ID NO: 656390 - DNA, 55 bp, Artificial; identical to SEQ ID NO: 278512
  Synthetic oligonucleotide

SEQ ID NO: 656391 - DNA, 56 bp, Artificial; identical to SEQ ID NO: 268330
  Synthetic oligonucleotide

SEQ ID NO: 656392 - DNA, 55 bp, Artificial; identical to SEQ ID NO: 267837
  Synthetic oligonucleotide

SEQ ID NO: 656393 - DNA, 55 bp, Artificial; identical to SEQ ID NO: 282065
  Synthetic oligonucleotide

SEQ ID NO: 656394 - DNA, 54 bp, Artificial; identical to SEQ ID NO: 278510
  Synthetic oligonucleotide

SEQ ID NO: 656395 - DNA, 60 bp, Artificial; identical to SEQ ID NO: 268319
  Synthetic oligonucleotide

SEQ ID NO: 656396 - DNA, 55 bp, Artificial; identical to SEQ ID NO: 278508
  Synthetic oligonucleotide

SEQ ID NO: 656397 - DNA, 55 bp, Artificial; identical to SEQ ID NO: 282105
  Synthetic oligonucleotide

SEQ ID NO: 656398 - DNA, 55 bp, Artificial; identical to SEQ ID NO: 268383
  Synthetic oligonucleotide

SEQ ID NO: 656399 - DNA, 53 bp, Artificial; identical to SEQ ID NO: 268545
  Synthetic oligonucleotide

SEQ ID NO: 656400 - DNA, 58 bp, Artificial; identical to SEQ ID NO: 267955
  Synthetic oligonucleotide

SEQ ID NO: 656401 - DNA, 55 bp, Artificial; identical to SEQ ID NO: 282088
  Synthetic oligonucleotide

SEQ ID NO: 656402 - DNA, 53 bp, Artificial; identical to SEQ ID NO: 276776
  Synthetic oligonucleotide

SEQ ID NO: 656403 - DNA, 60 bp, Artificial; identical to SEQ ID NO: 285688
  Synthetic oligonucleotide

SEQ ID NO: 656404 - DNA, 54 bp, Artificial; identical to SEQ ID NO: 282334
  Synthetic oligonucleotide

SEQ ID NO: 656405 - DNA, 55 bp, Artificial; identical to SEQ ID NO: 282136
  Synthetic oligonucleotide

SEQ ID NO: 656406 - DNA, 59 bp, Artificial; identical to SEQ ID NO: 285709
  Synthetic oligonucleotide

SEQ ID NO: 656407 - DNA, 55 bp, Artificial; identical to SEQ ID NO: 278636
  Synthetic oligonucleotide

SEQ ID NO: 656408 - DNA, 55 bp, Artificial; identical to SEQ ID NO: 282118
  Synthetic oligonucleotide

SEQ ID NO: 656409 - DNA, 55 bp, Artificial; identical to SEQ ID NO: 278641
  Synthetic oligonucleotide

SEQ ID NO: 656410 - DNA, 52 bp, Artificial; identical to SEQ ID NO: 268554
  Synthetic oligonucleotide

SEQ ID NO: 656411 - DNA, 53 bp, Artificial; identical to SEQ ID NO: 279155
  Synthetic oligonucleotide

SEQ ID NO: 656412 - DNA, 55 bp, Artificial; identical to SEQ ID NO: 281767
  Synthetic oligonucleotide

SEQ ID NO: 656413 - DNA, 55 bp, Artificial; identical to SEQ ID NO: 278637
  Synthetic oligonucleotide

SEQ ID NO: 656414 - DNA, 55 bp, Artificial; identical to SEQ ID NO: 281774
  Synthetic oligonucleotide

SEQ ID NO: 656415 - DNA, 57 bp, Artificial; identical to SEQ ID NO: 279132
  Synthetic oligonucleotide

SEQ ID NO: 656416 - DNA, 55 bp, Artificial; identical to SEQ ID NO: 278603
  Synthetic oligonucleotide

SEQ ID NO: 656417 - DNA, 55 bp, Artificial; identical to SEQ ID NO: 281781
  Synthetic oligonucleotide

SEQ ID NO: 656418 - DNA, 55 bp, Artificial; identical to SEQ ID NO: 269002
  Synthetic oligonucleotide

SEQ ID NO: 656419 - DNA, 55 bp, Artificial; identical to SEQ ID NO: 281827
  Synthetic oligonucleotide

SEQ ID NO: 656420 - DNA, 55 bp, Artificial; identical to SEQ ID NO: 269001
  Synthetic oligonucleotide

SEQ ID NO: 656421 - DNA, 55 bp, Artificial; identical to SEQ ID NO: 281806
  Synthetic oligonucleotide

SEQ ID NO: 656422 - DNA, 55 bp, Artificial; identical to SEQ ID NO: 281813
  Synthetic oligonucleotide

SEQ ID NO: 656423 - DNA, 55 bp, Artificial; identical to SEQ ID NO: 269000
  Synthetic oligonucleotide

SEQ ID NO: 656424 - DNA, 50 bp, Artificial; identical to SEQ ID NO: 278876
  Synthetic oligonucleotide

SEQ ID NO: 656425 - DNA, 55 bp, Artificial; identical to SEQ ID NO: 278599
  Synthetic oligonucleotide

SEQ ID NO: 656426 - DNA, 55 bp, Artificial; identical to SEQ ID NO: 278596
  Synthetic oligonucleotide

SEQ ID NO: 656427 - DNA, 55 bp, Artificial; identical to SEQ ID NO: 268998
  Synthetic oligonucleotide

SEQ ID NO: 656428 - DNA, 55 bp, Artificial; identical to SEQ ID NO: 281725
  Synthetic oligonucleotide

SEQ ID NO: 656429 - DNA, 51 bp, Artificial; identical to SEQ ID NO: 283224
  Synthetic oligonucleotide

SEQ ID NO: 656430 - DNA, 54 bp, Artificial; identical to SEQ ID NO: 282360
  Synthetic oligonucleotide

SEQ ID NO: 656431 - DNA, 55 bp, Artificial; identical to SEQ ID NO: 281759
  Synthetic oligonucleotide

SEQ ID NO: 656432 - DNA, 60 bp, Artificial; identical to SEQ ID NO: 285625
  Synthetic oligonucleotide

SEQ ID NO: 656433 - DNA, 55 bp, Artificial; identical to SEQ ID NO: 281740
  Synthetic oligonucleotide

SEQ ID NO: 656434 - DNA, 55 bp, Artificial; identical to SEQ ID NO: 267838
  Synthetic oligonucleotide

SEQ ID NO: 656435 - DNA, 55 bp, Artificial; identical to SEQ ID NO: 271813
  Synthetic oligonucleotide

SEQ ID NO: 656436 - DNA, 53 bp, Artificial; identical to SEQ ID NO: 282493
  Synthetic oligonucleotide

SEQ ID NO: 656437 - DNA, 57 bp, Artificial; identical to SEQ ID NO: 279004
  Synthetic oligonucleotide

SEQ ID NO: 656438 - DNA, 60 bp, Artificial; identical to SEQ ID NO: 279006
  Synthetic oligonucleotide

SEQ ID NO: 656439 - DNA, 60 bp, Artificial; identical to SEQ ID NO: 279018
  Synthetic oligonucleotide

SEQ ID NO: 656440 - DNA, 55 bp, Artificial; identical to SEQ ID NO: 278591
  Synthetic oligonucleotide

SEQ ID NO: 656441 - DNA, 52 bp, Artificial; identical to SEQ ID NO: 281847
  Synthetic oligonucleotide

SEQ ID NO: 656442 - DNA, 54 bp, Artificial; identical to SEQ ID NO: 278922
  Synthetic oligonucleotide

SEQ ID NO: 656443 - DNA, 54 bp, Artificial; identical to SEQ ID NO: 282294
  Synthetic oligonucleotide

SEQ ID NO: 656444 - DNA, 55 bp, Artificial; identical to SEQ ID NO: 270270
  Synthetic oligonucleotide

SEQ ID NO: 656445 - DNA, 55 bp, Artificial; identical to SEQ ID NO: 280698
  Synthetic oligonucleotide

SEQ ID NO: 656446 - DNA, 55 bp, Artificial; identical to SEQ ID NO: 268367
  Synthetic oligonucleotide

SEQ ID NO: 656447 - DNA, 55 bp, Artificial; identical to SEQ ID NO: 281887
  Synthetic oligonucleotide

SEQ ID NO: 656448 - DNA, 53 bp, Artificial; identical to SEQ ID NO: 282712
  Synthetic oligonucleotide

SEQ ID NO: 656449 - DNA, 53 bp, Artificial; identical to SEQ ID NO: 282717
  Synthetic oligonucleotide

SEQ ID NO: 656450 - DNA, 51 bp, Artificial; identical to SEQ ID NO: 283195
  Synthetic oligonucleotide

SEQ ID NO: 656451 - DNA, 55 bp, Artificial; identical to SEQ ID NO: 281846
  Synthetic oligonucleotide

SEQ ID NO: 656452 - DNA, 55 bp, Artificial; identical to SEQ ID NO: 278589
  Synthetic oligonucleotide

SEQ ID NO: 656453 - DNA, 60 bp, Artificial; identical to SEQ ID NO: 280920
  Synthetic oligonucleotide

SEQ ID NO: 656454 - DNA, 53 bp, Artificial; identical to SEQ ID NO: 269688
  Synthetic oligonucleotide

SEQ ID NO: 656455 - DNA, 55 bp, Artificial; identical to SEQ ID NO: 285968
  Synthetic oligonucleotide

SEQ ID NO: 656456 - DNA, 55 bp, Artificial; identical to SEQ ID NO: 268996
  Synthetic oligonucleotide

SEQ ID NO: 656457 - DNA, 60 bp, Artificial; identical to SEQ ID NO: 283141
  Synthetic oligonucleotide

SEQ ID NO: 656458 - DNA, 55 bp, Artificial; identical to SEQ ID NO: 281961
  Synthetic oligonucleotide

SEQ ID NO: 656459 - DNA, 55 bp, Artificial; identical to SEQ ID NO: 278584
  Synthetic oligonucleotide

SEQ ID NO: 656460 - DNA, 51 bp, Artificial; identical to SEQ ID NO: 268308
  Synthetic oligonucleotide

SEQ ID NO: 656461 - DNA, 54 bp, Artificial; identical to SEQ ID NO: 280142
  Synthetic oligonucleotide

SEQ ID NO: 656462 - DNA, 57 bp, Artificial; identical to SEQ ID NO: 268349
  Synthetic oligonucleotide

SEQ ID NO: 656463 - DNA, 55 bp, Artificial; identical to SEQ ID NO: 286076
  Synthetic oligonucleotide

SEQ ID NO: 656464 - DNA, 55 bp, Artificial; identical to SEQ ID NO: 281928
  Synthetic oligonucleotide

SEQ ID NO: 656465 - DNA, 55 bp, Artificial; identical to SEQ ID NO: 270269
  Synthetic oligonucleotide

SEQ ID NO: 656466 - DNA, 50 bp, Artificial; identical to SEQ ID NO: 284652
  Synthetic oligonucleotide

SEQ ID NO: 656467 - DNA, 54 bp, Artificial; identical to SEQ ID NO: 276769
  Synthetic oligonucleotide

SEQ ID NO: 656468 - DNA, 56 bp, Artificial; identical to SEQ ID NO: 279246
  Synthetic oligonucleotide

SEQ ID NO: 656469 - DNA, 54 bp, Artificial; identical to SEQ ID NO: 279329
  Synthetic oligonucleotide

SEQ ID NO: 656470 - DNA, 53 bp, Artificial; identical to SEQ ID NO: 281954
  Synthetic oligonucleotide

SEQ ID NO: 656471 - DNA, 55 bp, Artificial; identical to SEQ ID NO: 269365
  Synthetic oligonucleotide

SEQ ID NO: 656472 - DNA, 54 bp, Artificial; identical to SEQ ID NO: 268296
  Synthetic oligonucleotide

SEQ ID NO: 656473 - DNA, 60 bp, Artificial; identical to SEQ ID NO: 279342
  Synthetic oligonucleotide

SEQ ID NO: 656474 - DNA, 60 bp, Artificial; identical to SEQ ID NO: 279276
  Synthetic oligonucleotide

SEQ ID NO: 656475 - DNA, 55 bp, Artificial; identical to SEQ ID NO: 281735
  Synthetic oligonucleotide

SEQ ID NO: 656476 - DNA, 55 bp, Artificial; identical to SEQ ID NO: 281765
  Synthetic oligonucleotide

SEQ ID NO: 656477 - DNA, 55 bp, Artificial; identical to SEQ ID NO: 281757
  Synthetic oligonucleotide

SEQ ID NO: 656478 - DNA, 55 bp, Artificial; identical to SEQ ID NO: 268991
  Synthetic oligonucleotide

SEQ ID NO: 656479 - DNA, 57 bp, Artificial; identical to SEQ ID NO: 279312
  Synthetic oligonucleotide

SEQ ID NO: 656480 - DNA, 50 bp, Artificial; identical to SEQ ID NO: 269378
  Synthetic oligonucleotide

SEQ ID NO: 656481 - DNA, 55 bp, Artificial; identical to SEQ ID NO: 267840
  Synthetic oligonucleotide

SEQ ID NO: 656482 - DNA, 55 bp, Artificial; identical to SEQ ID NO: 269719
  Synthetic oligonucleotide

SEQ ID NO: 656483 - DNA, 55 bp, Artificial; identical to SEQ ID NO: 281816
  Synthetic oligonucleotide

SEQ ID NO: 656484 - DNA, 55 bp, Artificial; identical to SEQ ID NO: 281836
  Synthetic oligonucleotide

SEQ ID NO: 656485 - DNA, 51 bp, Artificial; identical to SEQ ID NO: 283310
  Synthetic oligonucleotide

SEQ ID NO: 656486 - DNA, 55 bp, Artificial; identical to SEQ ID NO: 278581
  Synthetic oligonucleotide

SEQ ID NO: 656487 - DNA, 60 bp, Artificial; identical to SEQ ID NO: 285512
  Synthetic oligonucleotide

SEQ ID NO: 656488 - DNA, 55 bp, Artificial; identical to SEQ ID NO: 268936
  Synthetic oligonucleotide

SEQ ID NO: 656489 - DNA, 54 bp, Artificial; identical to SEQ ID NO: 271811
  Synthetic oligonucleotide

SEQ ID NO: 656490 - DNA, 59 bp, Artificial; identical to SEQ ID NO: 268285
  Synthetic oligonucleotide

SEQ ID NO: 656491 - DNA, 56 bp, Artificial; identical to SEQ ID NO: 285097
  Synthetic oligonucleotide

SEQ ID NO: 656492 - DNA, 55 bp, Artificial; identical to SEQ ID NO: 281770
  Synthetic oligonucleotide

SEQ ID NO: 656493 - DNA, 52 bp, Artificial; identical to SEQ ID NO: 282754
  Synthetic oligonucleotide

SEQ ID NO: 656494 - DNA, 53 bp, Artificial; identical to SEQ ID NO: 286337
  Synthetic oligonucleotide

SEQ ID NO: 656495 - DNA, 55 bp, Artificial; identical to SEQ ID NO: 282140
  Synthetic oligonucleotide

SEQ ID NO: 656496 - DNA, 55 bp, Artificial; identical to SEQ ID NO: 270176
  Synthetic oligonucleotide

SEQ ID NO: 656497 - DNA, 55 bp, Artificial; identical to SEQ ID NO: 282125
  Synthetic oligonucleotide

SEQ ID NO: 656498 - DNA, 55 bp, Artificial; identical to SEQ ID NO: 282046
  Synthetic oligonucleotide

SEQ ID NO: 656499 - DNA, 55 bp, Artificial; identical to SEQ ID NO: 282000
  Synthetic oligonucleotide

SEQ ID NO: 656500 - DNA, 55 bp, Artificial; identical to SEQ ID NO: 282004
  Synthetic oligonucleotide

SEQ ID NO: 656501 - DNA, 55 bp, Artificial; identical to SEQ ID NO: 283420
  Synthetic oligonucleotide

SEQ ID NO: 656502 - DNA, 55 bp, Artificial; identical to SEQ ID NO: 268934
  Synthetic oligonucleotide

SEQ ID NO: 656503 - DNA, 52 bp, Artificial; identical to SEQ ID NO: 282928
  Synthetic oligonucleotide

SEQ ID NO: 656504 - DNA, 60 bp, Artificial; identical to SEQ ID NO: 282831
  Synthetic oligonucleotide

SEQ ID NO: 656505 - DNA, 53 bp, Artificial; identical to SEQ ID NO: 282617
  Synthetic oligonucleotide

SEQ ID NO: 656506 - DNA, 55 bp, Artificial; identical to SEQ ID NO: 268232
  Synthetic oligonucleotide

SEQ ID NO: 656507 - DNA, 59 bp, Artificial; identical to SEQ ID NO: 282753
  Synthetic oligonucleotide

SEQ ID NO: 656508 - DNA, 57 bp, Artificial; identical to SEQ ID NO: 268231
  Synthetic oligonucleotide

SEQ ID NO: 656509 - DNA, 55 bp, Artificial; identical to SEQ ID NO: 278625
  Synthetic oligonucleotide

SEQ ID NO: 656510 - DNA, 55 bp, Artificial; identical to SEQ ID NO: 268933
  Synthetic oligonucleotide

SEQ ID NO: 656511 - DNA, 60 bp, Artificial; identical to SEQ ID NO: 282931
  Synthetic oligonucleotide

SEQ ID NO: 656512 - DNA, 50 bp, Artificial; identical to SEQ ID NO: 268587
  Synthetic oligonucleotide

SEQ ID NO: 656513 - DNA, 55 bp, Artificial; identical to SEQ ID NO: 271252
  Synthetic oligonucleotide

SEQ ID NO: 656514 - DNA, 60 bp, Artificial; identical to SEQ ID NO: 268229
  Synthetic oligonucleotide

SEQ ID NO: 656515 - DNA, 55 bp, Artificial; identical to SEQ ID NO: 276731
  Synthetic oligonucleotide

SEQ ID NO: 656516 - DNA, 60 bp, Artificial; identical to SEQ ID NO: 282531
  Synthetic oligonucleotide

SEQ ID NO: 656517 - DNA, 60 bp, Artificial; identical to SEQ ID NO: 280364
  Synthetic oligonucleotide

SEQ ID NO: 656518 - DNA, 53 bp, Artificial; identical to SEQ ID NO: 282679
  Synthetic oligonucleotide

SEQ ID NO: 656519 - DNA, 55 bp, Artificial; identical to SEQ ID NO: 286039
  Synthetic oligonucleotide

SEQ ID NO: 656520 - DNA, 55 bp, Artificial; identical to SEQ ID NO: 282073
  Synthetic oligonucleotide

SEQ ID NO: 656521 - DNA, 55 bp, Artificial; identical to SEQ ID NO: 282081
  Synthetic oligonucleotide

SEQ ID NO: 656522 - DNA, 55 bp, Artificial; identical to SEQ ID NO: 270354
  Synthetic oligonucleotide

SEQ ID NO: 656523 - DNA, 60 bp, Artificial; identical to SEQ ID NO: 278958
  Synthetic oligonucleotide

SEQ ID NO: 656524 - DNA, 58 bp, Artificial; identical to SEQ ID NO: 279129
  Synthetic oligonucleotide

SEQ ID NO: 656525 - DNA, 60 bp, Artificial; identical to SEQ ID NO: 279068
  Synthetic oligonucleotide

SEQ ID NO: 656526 - DNA, 55 bp, Artificial; identical to SEQ ID NO: 281202
  Synthetic oligonucleotide

SEQ ID NO: 656527 - DNA, 55 bp, Artificial; identical to SEQ ID NO: 269991
  Synthetic oligonucleotide

SEQ ID NO: 656528 - DNA, 57 bp, Artificial; identical to SEQ ID NO: 268227
  Synthetic oligonucleotide

SEQ ID NO: 656529 - DNA, 50 bp, Artificial; identical to SEQ ID NO: 286434
  Synthetic oligonucleotide

SEQ ID NO: 656530 - DNA, 55 bp, Artificial; identical to SEQ ID NO: 286061
  Synthetic oligonucleotide

SEQ ID NO: 656531 - DNA, 55 bp, Artificial; identical to SEQ ID NO: 285527
  Synthetic oligonucleotide

SEQ ID NO: 656532 - DNA, 55 bp, Artificial; identical to SEQ ID NO: 281197
  Synthetic oligonucleotide

SEQ ID NO: 656533 - DNA, 55 bp, Artificial; identical to SEQ ID NO: 268930
  Synthetic oligonucleotide

SEQ ID NO: 656534 - DNA, 55 bp, Artificial; identical to SEQ ID NO: 278612
  Synthetic oligonucleotide

SEQ ID NO: 656535 - DNA, 51 bp, Artificial; identical to SEQ ID NO: 283237
  Synthetic oligonucleotide

SEQ ID NO: 656536 - DNA, 55 bp, Artificial; identical to SEQ ID NO: 281192
  Synthetic oligonucleotide

SEQ ID NO: 656537 - DNA, 55 bp, Artificial; identical to SEQ ID NO: 278611
  Synthetic oligonucleotide

SEQ ID NO: 656538 - DNA, 51 bp, Artificial; identical to SEQ ID NO: 268576
  Synthetic oligonucleotide

SEQ ID NO: 656539 - DNA, 55 bp, Artificial; identical to SEQ ID NO: 286059
  Synthetic oligonucleotide

SEQ ID NO: 656540 - DNA, 55 bp, Artificial; identical to SEQ ID NO: 278608
  Synthetic oligonucleotide

SEQ ID NO: 656541 - DNA, 55 bp, Artificial; identical to SEQ ID NO: 281218
  Synthetic oligonucleotide

SEQ ID NO: 656542 - DNA, 55 bp, Artificial; identical to SEQ ID NO: 278605
  Synthetic oligonucleotide

SEQ ID NO: 656543 - DNA, 55 bp, Artificial; identical to SEQ ID NO: 278604
  Synthetic oligonucleotide

SEQ ID NO: 656544 - DNA, 55 bp, Artificial; identical to SEQ ID NO: 278359
  Synthetic oligonucleotide

SEQ ID NO: 656545 - DNA, 55 bp, Artificial; identical to SEQ ID NO: 270353
  Synthetic oligonucleotide

SEQ ID NO: 656546 - DNA, 54 bp, Artificial; identical to SEQ ID NO: 282158
  Synthetic oligonucleotide

SEQ ID NO: 656547 - DNA, 52 bp, Artificial; identical to SEQ ID NO: 282846
  Synthetic oligonucleotide

SEQ ID NO: 656548 - DNA, 55 bp, Artificial; identical to SEQ ID NO: 268929
  Synthetic oligonucleotide

SEQ ID NO: 656549 - DNA, 55 bp, Artificial; identical to SEQ ID NO: 278358
  Synthetic oligonucleotide

SEQ ID NO: 656550 - DNA, 60 bp, Artificial; identical to SEQ ID NO: 279049
  Synthetic oligonucleotide

SEQ ID NO: 656551 - DNA, 55 bp, Artificial; identical to SEQ ID NO: 281158
  Synthetic oligonucleotide

SEQ ID NO: 656552 - DNA, 51 bp, Artificial; identical to SEQ ID NO: 270289
  Synthetic oligonucleotide

SEQ ID NO: 656553 - DNA, 55 bp, Artificial; identical to SEQ ID NO: 278357
  Synthetic oligonucleotide

SEQ ID NO: 656554 - DNA, 55 bp, Artificial; identical to SEQ ID NO: 286064
  Synthetic oligonucleotide

SEQ ID NO: 656555 - DNA, 59 bp, Artificial; identical to SEQ ID NO: 285791
  Synthetic oligonucleotide

SEQ ID NO: 656556 - DNA, 55 bp, Artificial; identical to SEQ ID NO: 268417
  Synthetic oligonucleotide

SEQ ID NO: 656557 - DNA, 54 bp, Artificial; identical to SEQ ID NO: 282391
  Synthetic oligonucleotide

SEQ ID NO: 656558 - DNA, 55 bp, Artificial; identical to SEQ ID NO: 286040
  Synthetic oligonucleotide

SEQ ID NO: 656559 - DNA, 55 bp, Artificial; identical to SEQ ID NO: 286042
  Synthetic oligonucleotide

SEQ ID NO: 656560 - DNA, 54 bp, Artificial; identical to SEQ ID NO: 281186
  Synthetic oligonucleotide

SEQ ID NO: 656561 - DNA, 52 bp, Artificial; identical to SEQ ID NO: 286373
  Synthetic oligonucleotide

SEQ ID NO: 656562 - DNA, 54 bp, Artificial; identical to SEQ ID NO: 286272
  Synthetic oligonucleotide

SEQ ID NO: 656563 - DNA, 55 bp, Artificial; identical to SEQ ID NO: 278348
  Synthetic oligonucleotide

SEQ ID NO: 656564 - DNA, 55 bp, Artificial; identical to SEQ ID NO: 281177
  Synthetic oligonucleotide

SEQ ID NO: 656565 - DNA, 55 bp, Artificial; identical to SEQ ID NO: 281173
  Synthetic oligonucleotide

SEQ ID NO: 656566 - DNA, 58 bp, Artificial; identical to SEQ ID NO: 279230
  Synthetic oligonucleotide

SEQ ID NO: 656567 - DNA, 60 bp, Artificial; identical to SEQ ID NO: 268226
  Synthetic oligonucleotide

SEQ ID NO: 656568 - DNA, 55 bp, Artificial; identical to SEQ ID NO: 268927
  Synthetic oligonucleotide

SEQ ID NO: 656569 - DNA, 51 bp, Artificial; identical to SEQ ID NO: 283300
  Synthetic oligonucleotide

SEQ ID NO: 656570 - DNA, 54 bp, Artificial; identical to SEQ ID NO: 281291
  Synthetic oligonucleotide

SEQ ID NO: 656571 - DNA, 55 bp, Artificial; identical to SEQ ID NO: 278346
  Synthetic oligonucleotide

SEQ ID NO: 656572 - DNA, 60 bp, Artificial; identical to SEQ ID NO: 285829
  Synthetic oligonucleotide

SEQ ID NO: 656573 - DNA, 53 bp, Artificial; identical to SEQ ID NO: 278995
  Synthetic oligonucleotide

SEQ ID NO: 656574 - DNA, 53 bp, Artificial; identical to SEQ ID NO: 279021
  Synthetic oligonucleotide

SEQ ID NO: 656575 - DNA, 58 bp, Artificial; identical to SEQ ID NO: 279014
  Synthetic oligonucleotide

SEQ ID NO: 656576 - DNA, 58 bp, Artificial; identical to SEQ ID NO: 279112
  Synthetic oligonucleotide

SEQ ID NO: 656577 - DNA, 55 bp, Artificial; identical to SEQ ID NO: 281277
  Synthetic oligonucleotide

SEQ ID NO: 656578 - DNA, 55 bp, Artificial; identical to SEQ ID NO: 281318
  Synthetic oligonucleotide

SEQ ID NO: 656579 - DNA, 51 bp, Artificial; identical to SEQ ID NO: 283329
  Synthetic oligonucleotide

SEQ ID NO: 656580 - DNA, 52 bp, Artificial; identical to SEQ ID NO: 282911
  Synthetic oligonucleotide

SEQ ID NO: 656581 - DNA, 55 bp, Artificial; identical to SEQ ID NO: 278339
  Synthetic oligonucleotide

SEQ ID NO: 656582 - DNA, 55 bp, Artificial; identical to SEQ ID NO: 281305
  Synthetic oligonucleotide

SEQ ID NO: 656583 - DNA, 55 bp, Artificial; identical to SEQ ID NO: 281303
  Synthetic oligonucleotide

SEQ ID NO: 656584 - DNA, 55 bp, Artificial; identical to SEQ ID NO: 268925
  Synthetic oligonucleotide

SEQ ID NO: 656585 - DNA, 53 bp, Artificial; identical to SEQ ID NO: 282641
  Synthetic oligonucleotide

SEQ ID NO: 656586 - DNA, 55 bp, Artificial; identical to SEQ ID NO: 281251
  Synthetic oligonucleotide

SEQ ID NO: 656587 - DNA, 56 bp, Artificial; identical to SEQ ID NO: 279433
  Synthetic oligonucleotide

SEQ ID NO: 656588 - DNA, 55 bp, Artificial; identical to SEQ ID NO: 281241
  Synthetic oligonucleotide

SEQ ID NO: 656589 - DNA, 55 bp, Artificial; identical to SEQ ID NO: 278384
  Synthetic oligonucleotide

SEQ ID NO: 656590 - DNA, 55 bp, Artificial; identical to SEQ ID NO: 278382
  Synthetic oligonucleotide

SEQ ID NO: 656591 - DNA, 55 bp, Artificial; identical to SEQ ID NO: 281238
  Synthetic oligonucleotide

SEQ ID NO: 656592 - DNA, 55 bp, Artificial; identical to SEQ ID NO: 286095
  Synthetic oligonucleotide

SEQ ID NO: 656593 - DNA, 57 bp, Artificial; identical to SEQ ID NO: 268224
  Synthetic oligonucleotide

SEQ ID NO: 656594 - DNA, 53 bp, Artificial; identical to SEQ ID NO: 282669
  Synthetic oligonucleotide

SEQ ID NO: 656595 - DNA, 59 bp, Artificial; identical to SEQ ID NO: 279168
  Synthetic oligonucleotide

SEQ ID NO: 656596 - DNA, 53 bp, Artificial; identical to SEQ ID NO: 282661
  Synthetic oligonucleotide

SEQ ID NO: 656597 - DNA, 52 bp, Artificial; identical to SEQ ID NO: 282800
  Synthetic oligonucleotide

SEQ ID NO: 656598 - DNA, 51 bp, Artificial; identical to SEQ ID NO: 269228
  Synthetic oligonucleotide

SEQ ID NO: 656599 - DNA, 57 bp, Artificial; identical to SEQ ID NO: 267947
  Synthetic oligonucleotide

SEQ ID NO: 656600 - DNA, 57 bp, Artificial; identical to SEQ ID NO: 284520
  Synthetic oligonucleotide

SEQ ID NO: 656601 - DNA, 54 bp, Artificial; identical to SEQ ID NO: 282154
  Synthetic oligonucleotide

SEQ ID NO: 656602 - DNA, 57 bp, Artificial; identical to SEQ ID NO: 268932
  Synthetic oligonucleotide

SEQ ID NO: 656603 - DNA, 55 bp, Artificial; identical to SEQ ID NO: 268425
  Synthetic oligonucleotide

SEQ ID NO: 656604 - DNA, 52 bp, Artificial; identical to SEQ ID NO: 282811
  Synthetic oligonucleotide

SEQ ID NO: 656605 - DNA, 55 bp, Artificial; identical to SEQ ID NO: 281269
  Synthetic oligonucleotide

SEQ ID NO: 656606 - DNA, 58 bp, Artificial; identical to SEQ ID NO: 283698
  Synthetic oligonucleotide

SEQ ID NO: 656607 - DNA, 55 bp, Artificial; identical to SEQ ID NO: 281267
  Synthetic oligonucleotide

SEQ ID NO: 656608 - DNA, 58 bp, Artificial; identical to SEQ ID NO: 268921
  Synthetic oligonucleotide

SEQ ID NO: 656609 - DNA, 55 bp, Artificial; identical to SEQ ID NO: 281266
  Synthetic oligonucleotide

SEQ ID NO: 656610 - DNA, 60 bp, Artificial; identical to SEQ ID NO: 284097
  Synthetic oligonucleotide

SEQ ID NO: 656611 - DNA, 55 bp, Artificial; identical to SEQ ID NO: 281264
  Synthetic oligonucleotide

SEQ ID NO: 656612 - DNA, 55 bp, Artificial; identical to SEQ ID NO: 278378
  Synthetic oligonucleotide

SEQ ID NO: 656613 - DNA, 60 bp, Artificial; identical to SEQ ID NO: 285130
  Synthetic oligonucleotide

SEQ ID NO: 656614 - DNA, 56 bp, Artificial; identical to SEQ ID NO: 279450
  Synthetic oligonucleotide

SEQ ID NO: 656615 - DNA, 57 bp, Artificial; identical to SEQ ID NO: 268223
  Synthetic oligonucleotide

SEQ ID NO: 656616 - DNA, 53 bp, Artificial; identical to SEQ ID NO: 282577
  Synthetic oligonucleotide

SEQ ID NO: 656617 - DNA, 53 bp, Artificial; identical to SEQ ID NO: 278716
  Synthetic oligonucleotide

SEQ ID NO: 656618 - DNA, 54 bp, Artificial; identical to SEQ ID NO: 282375
  Synthetic oligonucleotide

SEQ ID NO: 656619 - DNA, 55 bp, Artificial; identical to SEQ ID NO: 281259
  Synthetic oligonucleotide

SEQ ID NO: 656620 - DNA, 51 bp, Artificial; identical to SEQ ID NO: 269694
  Synthetic oligonucleotide

SEQ ID NO: 656621 - DNA, 55 bp, Artificial; identical to SEQ ID NO: 268923
  Synthetic oligonucleotide

SEQ ID NO: 656622 - DNA, 60 bp, Artificial; identical to SEQ ID NO: 281875
  Synthetic oligonucleotide

SEQ ID NO: 656623 - DNA, 58 bp, Artificial; identical to SEQ ID NO: 279229
  Synthetic oligonucleotide

SEQ ID NO: 656624 - DNA, 55 bp, Artificial; identical to SEQ ID NO: 268922
  Synthetic oligonucleotide

SEQ ID NO: 656625 - DNA, 55 bp, Artificial; identical to SEQ ID NO: 281257
  Synthetic oligonucleotide

SEQ ID NO: 656626 - DNA, 55 bp, Artificial; identical to SEQ ID NO: 281032
  Synthetic oligonucleotide

SEQ ID NO: 656627 - DNA, 55 bp, Artificial; identical to SEQ ID NO: 281028
  Synthetic oligonucleotide

SEQ ID NO: 656628 - DNA, 55 bp, Artificial; identical to SEQ ID NO: 281027
  Synthetic oligonucleotide

SEQ ID NO: 656629 - DNA, 51 bp, Artificial; identical to SEQ ID NO: 283321
  Synthetic oligonucleotide

SEQ ID NO: 656630 - DNA, 55 bp, Artificial; identical to SEQ ID NO: 270178
  Synthetic oligonucleotide

SEQ ID NO: 656631 - DNA, 55 bp, Artificial; identical to SEQ ID NO: 281024
  Synthetic oligonucleotide

SEQ ID NO: 656632 - DNA, 55 bp, Artificial; identical to SEQ ID NO: 278371
  Synthetic oligonucleotide

SEQ ID NO: 656633 - DNA, 55 bp, Artificial; identical to SEQ ID NO: 278369
  Synthetic oligonucleotide

SEQ ID NO: 656634 - DNA, 60 bp, Artificial; identical to SEQ ID NO: 282086
  Synthetic oligonucleotide

SEQ ID NO: 656635 - DNA, 55 bp, Artificial; identical to SEQ ID NO: 268920
  Synthetic oligonucleotide

SEQ ID NO: 656636 - DNA, 55 bp, Artificial; identical to SEQ ID NO: 281021
  Synthetic oligonucleotide

SEQ ID NO: 656637 - DNA, 55 bp, Artificial; identical to SEQ ID NO: 281020
  Synthetic oligonucleotide

SEQ ID NO: 656638 - DNA, 60 bp, Artificial; identical to SEQ ID NO: 283264
  Synthetic oligonucleotide

SEQ ID NO: 656639 - DNA, 55 bp, Artificial; identical to SEQ ID NO: 281017
  Synthetic oligonucleotide

SEQ ID NO: 656640 - DNA, 55 bp, Artificial; identical to SEQ ID NO: 278368
  Synthetic oligonucleotide

SEQ ID NO: 656641 - DNA, 55 bp, Artificial; identical to SEQ ID NO: 286082
  Synthetic oligonucleotide

SEQ ID NO: 656642 - DNA, 55 bp, Artificial; identical to SEQ ID NO: 276759
  Synthetic oligonucleotide

SEQ ID NO: 656643 - DNA, 58 bp, Artificial; identical to SEQ ID NO: 282797
  Synthetic oligonucleotide

SEQ ID NO: 656644 - DNA, 55 bp, Artificial; identical to SEQ ID NO: 281014
  Synthetic oligonucleotide

SEQ ID NO: 656645 - DNA, 55 bp, Artificial; identical to SEQ ID NO: 285980
  Synthetic oligonucleotide

SEQ ID NO: 656646 - DNA, 58 bp, Artificial; identical to SEQ ID NO: 282986
  Synthetic oligonucleotide

SEQ ID NO: 656647 - DNA, 55 bp, Artificial; identical to SEQ ID NO: 278362
  Synthetic oligonucleotide

SEQ ID NO: 656648 - DNA, 55 bp, Artificial; identical to SEQ ID NO: 268426
  Synthetic oligonucleotide

SEQ ID NO: 656649 - DNA, 59 bp, Artificial; identical to SEQ ID NO: 268222
  Synthetic oligonucleotide

SEQ ID NO: 656650 - DNA, 52 bp, Artificial; identical to SEQ ID NO: 282792
  Synthetic oligonucleotide

SEQ ID NO: 656651 - DNA, 51 bp, Artificial; identical to SEQ ID NO: 286396
  Synthetic oligonucleotide

SEQ ID NO: 656652 - DNA, 55 bp, Artificial; identical to SEQ ID NO: 278314
  Synthetic oligonucleotide

SEQ ID NO: 656653 - DNA, 59 bp, Artificial; identical to SEQ ID NO: 282775
  Synthetic oligonucleotide

SEQ ID NO: 656654 - DNA, 55 bp, Artificial; identical to SEQ ID NO: 281039
  Synthetic oligonucleotide

SEQ ID NO: 656655 - DNA, 55 bp, Artificial; identical to SEQ ID NO: 281037
  Synthetic oligonucleotide

SEQ ID NO: 656656 - DNA, 60 bp, Artificial; identical to SEQ ID NO: 282842
  Synthetic oligonucleotide

SEQ ID NO: 656657 - DNA, 53 bp, Artificial; identical to SEQ ID NO: 282691
  Synthetic oligonucleotide

SEQ ID NO: 656658 - DNA, 55 bp, Artificial; identical to SEQ ID NO: 285994
  Synthetic oligonucleotide

SEQ ID NO: 656659 - DNA, 55 bp, Artificial; identical to SEQ ID NO: 280988
  Synthetic oligonucleotide

SEQ ID NO: 656660 - DNA, 55 bp, Artificial; identical to SEQ ID NO: 280985
  Synthetic oligonucleotide

SEQ ID NO: 656661 - DNA, 55 bp, Artificial; identical to SEQ ID NO: 278312
  Synthetic oligonucleotide

SEQ ID NO: 656662 - DNA, 58 bp, Artificial; identical to SEQ ID NO: 278364
  Synthetic oligonucleotide

SEQ ID NO: 656663 - DNA, 60 bp, Artificial; identical to SEQ ID NO: 283542
  Synthetic oligonucleotide

SEQ ID NO: 656664 - DNA, 55 bp, Artificial; identical to SEQ ID NO: 280980
  Synthetic oligonucleotide

SEQ ID NO: 656665 - DNA, 55 bp, Artificial; identical to SEQ ID NO: 280977
  Synthetic oligonucleotide

SEQ ID NO: 656666 - DNA, 57 bp, Artificial; identical to SEQ ID NO: 279305
  Synthetic oligonucleotide

SEQ ID NO: 656667 - DNA, 54 bp, Artificial; identical to SEQ ID NO: 286284
  Synthetic oligonucleotide

SEQ ID NO: 656668 - DNA, 52 bp, Artificial; identical to SEQ ID NO: 269192
  Synthetic oligonucleotide

SEQ ID NO: 656669 - DNA, 60 bp, Artificial; identical to SEQ ID NO: 283253
  Synthetic oligonucleotide

SEQ ID NO: 656670 - DNA, 55 bp, Artificial; identical to SEQ ID NO: 278311
  Synthetic oligonucleotide

SEQ ID NO: 656671 - DNA, 55 bp, Artificial; identical to SEQ ID NO: 280971
  Synthetic oligonucleotide

SEQ ID NO: 656672 - DNA, 55 bp, Artificial; identical to SEQ ID NO: 280970
  Synthetic oligonucleotide

SEQ ID NO: 656673 - DNA, 55 bp, Artificial; identical to SEQ ID NO: 280969
  Synthetic oligonucleotide

SEQ ID NO: 656674 - DNA, 53 bp, Artificial; identical to SEQ ID NO: 282733
  Synthetic oligonucleotide

SEQ ID NO: 656675 - DNA, 58 bp, Artificial; identical to SEQ ID NO: 283341
  Synthetic oligonucleotide

SEQ ID NO: 656676 - DNA, 53 bp, Artificial; identical to SEQ ID NO: 282734
  Synthetic oligonucleotide

SEQ ID NO: 656677 - DNA, 59 bp, Artificial; identical to SEQ ID NO: 267966
  Synthetic oligonucleotide

SEQ ID NO: 656678 - DNA, 52 bp, Artificial; identical to SEQ ID NO: 283087
  Synthetic oligonucleotide

SEQ ID NO: 656679 - DNA, 59 bp, Artificial; identical to SEQ ID NO: 283398
  Synthetic oligonucleotide

SEQ ID NO: 656680 - DNA, 55 bp, Artificial; identical to SEQ ID NO: 281009
  Synthetic oligonucleotide

SEQ ID NO: 656681 - DNA, 59 bp, Artificial; identical to SEQ ID NO: 281975
  Synthetic oligonucleotide

SEQ ID NO: 656682 - DNA, 57 bp, Artificial; identical to SEQ ID NO: 279282
  Synthetic oligonucleotide

SEQ ID NO: 656683 - DNA, 59 bp, Artificial; identical to SEQ ID NO: 282042
  Synthetic oligonucleotide

SEQ ID NO: 656684 - DNA, 51 bp, Artificial; identical to SEQ ID NO: 268218
  Synthetic oligonucleotide

SEQ ID NO: 656685 - DNA, 60 bp, Artificial; identical to SEQ ID NO: 282097
  Synthetic oligonucleotide

SEQ ID NO: 656686 - DNA, 55 bp, Artificial; identical to SEQ ID NO: 281002
  Synthetic oligonucleotide

SEQ ID NO: 656687 - DNA, 54 bp, Artificial; identical to SEQ ID NO: 282332
  Synthetic oligonucleotide

SEQ ID NO: 656688 - DNA, 60 bp, Artificial; identical to SEQ ID NO: 268216
  Synthetic oligonucleotide

SEQ ID NO: 656689 - DNA, 54 bp, Artificial; identical to SEQ ID NO: 285976
  Synthetic oligonucleotide

SEQ ID NO: 656690 - DNA, 55 bp, Artificial; identical to SEQ ID NO: 285973
  Synthetic oligonucleotide

SEQ ID NO: 656691 - DNA, 54 bp, Artificial; identical to SEQ ID NO: 282327
  Synthetic oligonucleotide

SEQ ID NO: 656692 - DNA, 55 bp, Artificial; identical to SEQ ID NO: 268917
  Synthetic oligonucleotide

SEQ ID NO: 656693 - DNA, 52 bp, Artificial; identical to SEQ ID NO: 283105
  Synthetic oligonucleotide

SEQ ID NO: 656694 - DNA, 55 bp, Artificial; identical to SEQ ID NO: 280996
  Synthetic oligonucleotide

SEQ ID NO: 656695 - DNA, 55 bp, Artificial; identical to SEQ ID NO: 268916
  Synthetic oligonucleotide

SEQ ID NO: 656696 - DNA, 55 bp, Artificial; identical to SEQ ID NO: 267844
  Synthetic oligonucleotide

SEQ ID NO: 656697 - DNA, 55 bp, Artificial; identical to SEQ ID NO: 280990
  Synthetic oligonucleotide

SEQ ID NO: 656698 - DNA, 55 bp, Artificial; identical to SEQ ID NO: 280989
  Synthetic oligonucleotide

SEQ ID NO: 656699 - DNA, 55 bp, Artificial; identical to SEQ ID NO: 281117
  Synthetic oligonucleotide

SEQ ID NO: 656700 - DNA, 55 bp, Artificial; identical to SEQ ID NO: 281116
  Synthetic oligonucleotide

SEQ ID NO: 656701 - DNA, 55 bp, Artificial; identical to SEQ ID NO: 268914
  Synthetic oligonucleotide

SEQ ID NO: 656702 - DNA, 55 bp, Artificial; identical to SEQ ID NO: 281115
  Synthetic oligonucleotide

SEQ ID NO: 656703 - DNA, 55 bp, Artificial; identical to SEQ ID NO: 281114
  Synthetic oligonucleotide

SEQ ID NO: 656704 - DNA, 55 bp, Artificial; identical to SEQ ID NO: 278306
  Synthetic oligonucleotide

SEQ ID NO: 656705 - DNA, 56 bp, Artificial; identical to SEQ ID NO: 279493
  Synthetic oligonucleotide

SEQ ID NO: 656706 - DNA, 60 bp, Artificial; identical to SEQ ID NO: 281842
  Synthetic oligonucleotide

SEQ ID NO: 656707 - DNA, 51 bp, Artificial; identical to SEQ ID NO: 278782
  Synthetic oligonucleotide

SEQ ID NO: 656708 - DNA, 52 bp, Artificial; identical to SEQ ID NO: 283158
  Synthetic oligonucleotide

SEQ ID NO: 656709 - DNA, 55 bp, Artificial; identical to SEQ ID NO: 281111
  Synthetic oligonucleotide

SEQ ID NO: 656710 - DNA, 55 bp, Artificial; identical to SEQ ID NO: 281110
  Synthetic oligonucleotide

SEQ ID NO: 656711 - DNA, 55 bp, Artificial; identical to SEQ ID NO: 267979
  Synthetic oligonucleotide

SEQ ID NO: 656712 - DNA, 55 bp, Artificial; identical to SEQ ID NO: 281106
  Synthetic oligonucleotide

SEQ ID NO: 656713 - DNA, 54 bp, Artificial; identical to SEQ ID NO: 281104
  Synthetic oligonucleotide

SEQ ID NO: 656714 - DNA, 55 bp, Artificial; identical to SEQ ID NO: 270180
  Synthetic oligonucleotide

SEQ ID NO: 656715 - DNA, 55 bp, Artificial; identical to SEQ ID NO: 281102
  Synthetic oligonucleotide

SEQ ID NO: 656716 - DNA, 51 bp, Artificial; identical to SEQ ID NO: 286418
  Synthetic oligonucleotide

SEQ ID NO: 656717 - DNA, 59 bp, Artificial; identical to SEQ ID NO: 282498
  Synthetic oligonucleotide

SEQ ID NO: 656718 - DNA, 53 bp, Artificial; identical to SEQ ID NO: 281098
  Synthetic oligonucleotide

SEQ ID NO: 656719 - DNA, 56 bp, Artificial; identical to SEQ ID NO: 270315
  Synthetic oligonucleotide

SEQ ID NO: 656720 - DNA, 54 bp, Artificial; identical to SEQ ID NO: 282195
  Synthetic oligonucleotide

SEQ ID NO: 656721 - DNA, 50 bp, Artificial; identical to SEQ ID NO: 269357
  Synthetic oligonucleotide

SEQ ID NO: 656722 - DNA, 54 bp, Artificial; identical to SEQ ID NO: 268435
  Synthetic oligonucleotide

SEQ ID NO: 656723 - DNA, 55 bp, Artificial; identical to SEQ ID NO: 281145
  Synthetic oligonucleotide

SEQ ID NO: 656724 - DNA, 54 bp, Artificial; identical to SEQ ID NO: 281144
  Synthetic oligonucleotide

SEQ ID NO: 656725 - DNA, 55 bp, Artificial; identical to SEQ ID NO: 281139
  Synthetic oligonucleotide

SEQ ID NO: 656726 - DNA, 55 bp, Artificial; identical to SEQ ID NO: 286214
  Synthetic oligonucleotide

SEQ ID NO: 656727 - DNA, 60 bp, Artificial; identical to SEQ ID NO: 268215
  Synthetic oligonucleotide

SEQ ID NO: 656728 - DNA, 55 bp, Artificial; identical to SEQ ID NO: 281133
  Synthetic oligonucleotide

SEQ ID NO: 656729 - DNA, 55 bp, Artificial; identical to SEQ ID NO: 268436
  Synthetic oligonucleotide

SEQ ID NO: 656730 - DNA, 55 bp, Artificial; identical to SEQ ID NO: 281129
  Synthetic oligonucleotide

SEQ ID NO: 656731 - DNA, 52 bp, Artificial; identical to SEQ ID NO: 267949
  Synthetic oligonucleotide

SEQ ID NO: 656732 - DNA, 57 bp, Artificial; identical to SEQ ID NO: 268214
  Synthetic oligonucleotide

SEQ ID NO: 656733 - DNA, 54 bp, Artificial; identical to SEQ ID NO: 282184
  Synthetic oligonucleotide

SEQ ID NO: 656734 - DNA, 55 bp, Artificial; identical to SEQ ID NO: 281124
  Synthetic oligonucleotide

SEQ ID NO: 656735 - DNA, 60 bp, Artificial; identical to SEQ ID NO: 282331
  Synthetic oligonucleotide

SEQ ID NO: 656736 - DNA, 56 bp, Artificial; identical to SEQ ID NO: 267988
  Synthetic oligonucleotide

SEQ ID NO: 656737 - DNA, 55 bp, Artificial; identical to SEQ ID NO: 281123
  Synthetic oligonucleotide

SEQ ID NO: 656738 - DNA, 57 bp, Artificial; identical to SEQ ID NO: 268213
  Synthetic oligonucleotide

SEQ ID NO: 656739 - DNA, 60 bp, Artificial; identical to SEQ ID NO: 267999
  Synthetic oligonucleotide

SEQ ID NO: 656740 - DNA, 55 bp, Artificial; identical to SEQ ID NO: 286220
  Synthetic oligonucleotide

SEQ ID NO: 656741 - DNA, 55 bp, Artificial; identical to SEQ ID NO: 281121
  Synthetic oligonucleotide

SEQ ID NO: 656742 - DNA, 52 bp, Artificial; identical to SEQ ID NO: 282994
  Synthetic oligonucleotide

SEQ ID NO: 656743 - DNA, 58 bp, Artificial; identical to SEQ ID NO: 284931
  Synthetic oligonucleotide

SEQ ID NO: 656744 - DNA, 53 bp, Artificial; identical to SEQ ID NO: 281073
  Synthetic oligonucleotide

SEQ ID NO: 656745 - DNA, 51 bp, Artificial; identical to SEQ ID NO: 283179
  Synthetic oligonucleotide

SEQ ID NO: 656746 - DNA, 53 bp, Artificial; identical to SEQ ID NO: 270186
  Synthetic oligonucleotide

SEQ ID NO: 656747 - DNA, 55 bp, Artificial; identical to SEQ ID NO: 269994
  Synthetic oligonucleotide

SEQ ID NO: 656748 - DNA, 55 bp, Artificial; identical to SEQ ID NO: 281069
  Synthetic oligonucleotide

SEQ ID NO: 656749 - DNA, 59 bp, Artificial; identical to SEQ ID NO: 284720
  Synthetic oligonucleotide

SEQ ID NO: 656750 - DNA, 51 bp, Artificial; identical to SEQ ID NO: 284764
  Synthetic oligonucleotide

SEQ ID NO: 656751 - DNA, 60 bp, Artificial; identical to SEQ ID NO: 284786
  Synthetic oligonucleotide

SEQ ID NO: 656752 - DNA, 57 bp, Artificial; identical to SEQ ID NO: 268253
  Synthetic oligonucleotide

SEQ ID NO: 656753 - DNA, 55 bp, Artificial; identical to SEQ ID NO: 281065
  Synthetic oligonucleotide

SEQ ID NO: 656754 - DNA, 55 bp, Artificial; identical to SEQ ID NO: 285430
  Synthetic oligonucleotide

SEQ ID NO: 656755 - DNA, 55 bp, Artificial; identical to SEQ ID NO: 278302
  Synthetic oligonucleotide

SEQ ID NO: 656756 - DNA, 53 bp, Artificial; identical to SEQ ID NO: 282660
  Synthetic oligonucleotide

SEQ ID NO: 656757 - DNA, 55 bp, Artificial; identical to SEQ ID NO: 281060
  Synthetic oligonucleotide

SEQ ID NO: 656758 - DNA, 54 bp, Artificial; identical to SEQ ID NO: 285513
  Synthetic oligonucleotide

SEQ ID NO: 656759 - DNA, 56 bp, Artificial; identical to SEQ ID NO: 269404
  Synthetic oligonucleotide

SEQ ID NO: 656760 - DNA, 55 bp, Artificial; identical to SEQ ID NO: 281059
  Synthetic oligonucleotide

SEQ ID NO: 656761 - DNA, 53 bp, Artificial; identical to SEQ ID NO: 282651
  Synthetic oligonucleotide

SEQ ID NO: 656762 - DNA, 55 bp, Artificial; identical to SEQ ID NO: 268250
  Synthetic oligonucleotide

SEQ ID NO: 656763 - DNA, 54 bp, Artificial; identical to SEQ ID NO: 281056
  Synthetic oligonucleotide

SEQ ID NO: 656764 - DNA, 52 bp, Artificial; identical to SEQ ID NO: 269195
  Synthetic oligonucleotide

SEQ ID NO: 656765 - DNA, 55 bp, Artificial; identical to SEQ ID NO: 281055
  Synthetic oligonucleotide

SEQ ID NO: 656766 - DNA, 50 bp, Artificial; identical to SEQ ID NO: 285154
  Synthetic oligonucleotide

SEQ ID NO: 656767 - DNA, 60 bp, Artificial; identical to SEQ ID NO: 278031
  Synthetic oligonucleotide

SEQ ID NO: 656768 - DNA, 50 bp, Artificial; identical to SEQ ID NO: 285151
  Synthetic oligonucleotide

SEQ ID NO: 656769 - DNA, 60 bp, Artificial; identical to SEQ ID NO: 285297
  Synthetic oligonucleotide

SEQ ID NO: 656770 - DNA, 55 bp, Artificial; identical to SEQ ID NO: 281096
  Synthetic oligonucleotide

SEQ ID NO: 656771 - DNA, 60 bp, Artificial; identical to SEQ ID NO: 285352
  Synthetic oligonucleotide

SEQ ID NO: 656772 - DNA, 55 bp, Artificial; identical to SEQ ID NO: 286228
  Synthetic oligonucleotide

SEQ ID NO: 656773 - DNA, 55 bp, Artificial; identical to SEQ ID NO: 281095
  Synthetic oligonucleotide

SEQ ID NO: 656774 - DNA, 55 bp, Artificial; identical to SEQ ID NO: 281094
  Synthetic oligonucleotide

SEQ ID NO: 656775 - DNA, 59 bp, Artificial; identical to SEQ ID NO: 269393
  Synthetic oligonucleotide

SEQ ID NO: 656776 - DNA, 55 bp, Artificial; identical to SEQ ID NO: 283920
  Synthetic oligonucleotide

SEQ ID NO: 656777 - DNA, 50 bp, Artificial; identical to SEQ ID NO: 267925
  Synthetic oligonucleotide

SEQ ID NO: 656778 - DNA, 55 bp, Artificial; identical to SEQ ID NO: 278299
  Synthetic oligonucleotide

SEQ ID NO: 656779 - DNA, 55 bp, Artificial; identical to SEQ ID NO: 281093
  Synthetic oligonucleotide

SEQ ID NO: 656780 - DNA, 55 bp, Artificial; identical to SEQ ID NO: 268961
  Synthetic oligonucleotide

SEQ ID NO: 656781 - DNA, 51 bp, Artificial; identical to SEQ ID NO: 283270
  Synthetic oligonucleotide

SEQ ID NO: 656782 - DNA, 56 bp, Artificial; identical to SEQ ID NO: 279473
  Synthetic oligonucleotide

SEQ ID NO: 656783 - DNA, 53 bp, Artificial; identical to SEQ ID NO: 284075
  Synthetic oligonucleotide

SEQ ID NO: 656784 - DNA, 53 bp, Artificial; identical to SEQ ID NO: 282619
  Synthetic oligonucleotide

SEQ ID NO: 656785 - DNA, 55 bp, Artificial; identical to SEQ ID NO: 281089
  Synthetic oligonucleotide

SEQ ID NO: 656786 - DNA, 55 bp, Artificial; identical to SEQ ID NO: 281088
  Synthetic oligonucleotide

SEQ ID NO: 656787 - DNA, 55 bp, Artificial; identical to SEQ ID NO: 269708
  Synthetic oligonucleotide

SEQ ID NO: 656788 - DNA, 55 bp, Artificial; identical to SEQ ID NO: 278296
  Synthetic oligonucleotide

SEQ ID NO: 656789 - DNA, 51 bp, Artificial; identical to SEQ ID NO: 283340
  Synthetic oligonucleotide

SEQ ID NO: 656790 - DNA, 55 bp, Artificial; identical to SEQ ID NO: 281080
  Synthetic oligonucleotide

SEQ ID NO: 656791 - DNA, 52 bp, Artificial; identical to SEQ ID NO: 282968
  Synthetic oligonucleotide

SEQ ID NO: 656792 - DNA, 55 bp, Artificial; identical to SEQ ID NO: 281079
  Synthetic oligonucleotide

SEQ ID NO: 656793 - DNA, 55 bp, Artificial; identical to SEQ ID NO: 281076
  Synthetic oligonucleotide

SEQ ID NO: 656794 - DNA, 55 bp, Artificial; identical to SEQ ID NO: 278295
  Synthetic oligonucleotide

SEQ ID NO: 656795 - DNA, 60 bp, Artificial; identical to SEQ ID NO: 284386
  Synthetic oligonucleotide

SEQ ID NO: 656796 - DNA, 54 bp, Artificial; identical to SEQ ID NO: 286285
  Synthetic oligonucleotide

SEQ ID NO: 656797 - DNA, 57 bp, Artificial; identical to SEQ ID NO: 279324
  Synthetic oligonucleotide

SEQ ID NO: 656798 - DNA, 55 bp, Artificial; identical to SEQ ID NO: 278294
  Synthetic oligonucleotide

SEQ ID NO: 656799 - DNA, 54 bp, Artificial; identical to SEQ ID NO: 268249
  Synthetic oligonucleotide

SEQ ID NO: 656800 - DNA, 55 bp, Artificial; identical to SEQ ID NO: 284564
  Synthetic oligonucleotide

SEQ ID NO: 656801 - DNA, 58 bp, Artificial; identical to SEQ ID NO: 279186
  Synthetic oligonucleotide

SEQ ID NO: 656802 - DNA, 50 bp, Artificial; identical to SEQ ID NO: 285091
  Synthetic oligonucleotide

SEQ ID NO: 656803 - DNA, 60 bp, Artificial; identical to SEQ ID NO: 284575
  Synthetic oligonucleotide

SEQ ID NO: 656804 - DNA, 50 bp, Artificial; identical to SEQ ID NO: 268592
  Synthetic oligonucleotide

SEQ ID NO: 656805 - DNA, 56 bp, Artificial; identical to SEQ ID NO: 279462
  Synthetic oligonucleotide

SEQ ID NO: 656806 - DNA, 54 bp, Artificial; identical to SEQ ID NO: 282299
  Synthetic oligonucleotide

SEQ ID NO: 656807 - DNA, 50 bp, Artificial; identical to SEQ ID NO: 284587
  Synthetic oligonucleotide

SEQ ID NO: 656808 - DNA, 60 bp, Artificial; identical to SEQ ID NO: 284609
  Synthetic oligonucleotide

SEQ ID NO: 656809 - DNA, 55 bp, Artificial; identical to SEQ ID NO: 268248
  Synthetic oligonucleotide

SEQ ID NO: 656810 - DNA, 55 bp, Artificial; identical to SEQ ID NO: 281572
  Synthetic oligonucleotide

SEQ ID NO: 656811 - DNA, 55 bp, Artificial; identical to SEQ ID NO: 284142
  Synthetic oligonucleotide

SEQ ID NO: 656812 - DNA, 55 bp, Artificial; identical to SEQ ID NO: 278293
  Synthetic oligonucleotide

SEQ ID NO: 656813 - DNA, 51 bp, Artificial; identical to SEQ ID NO: 268570
  Synthetic oligonucleotide

SEQ ID NO: 656814 - DNA, 53 bp, Artificial; identical to SEQ ID NO: 282739
  Synthetic oligonucleotide

SEQ ID NO: 656815 - DNA, 50 bp, Artificial; identical to SEQ ID NO: 285256
  Synthetic oligonucleotide

SEQ ID NO: 656816 - DNA, 52 bp, Artificial; identical to SEQ ID NO: 276733
  Synthetic oligonucleotide

SEQ ID NO: 656817 - DNA, 55 bp, Artificial; identical to SEQ ID NO: 281570
  Synthetic oligonucleotide

SEQ ID NO: 656818 - DNA, 55 bp, Artificial; identical to SEQ ID NO: 284230
  Synthetic oligonucleotide

SEQ ID NO: 656819 - DNA, 51 bp, Artificial; identical to SEQ ID NO: 283176
  Synthetic oligonucleotide

SEQ ID NO: 656820 - DNA, 50 bp, Artificial; identical to SEQ ID NO: 285249
  Synthetic oligonucleotide

SEQ ID NO: 656821 - DNA, 55 bp, Artificial; identical to SEQ ID NO: 281567
  Synthetic oligonucleotide

SEQ ID NO: 656822 - DNA, 56 bp, Artificial; identical to SEQ ID NO: 284308
  Synthetic oligonucleotide

SEQ ID NO: 656823 - DNA, 52 bp, Artificial; identical to SEQ ID NO: 283027
  Synthetic oligonucleotide

SEQ ID NO: 656824 - DNA, 54 bp, Artificial; identical to SEQ ID NO: 282234
  Synthetic oligonucleotide

SEQ ID NO: 656825 - DNA, 54 bp, Artificial; identical to SEQ ID NO: 269147
  Synthetic oligonucleotide

SEQ ID NO: 656826 - DNA, 52 bp, Artificial; identical to SEQ ID NO: 283026
  Synthetic oligonucleotide

SEQ ID NO: 656827 - DNA, 60 bp, Artificial; identical to SEQ ID NO: 279043
  Synthetic oligonucleotide

SEQ ID NO: 656828 - DNA, 60 bp, Artificial; identical to SEQ ID NO: 279054
  Synthetic oligonucleotide

SEQ ID NO: 656829 - DNA, 51 bp, Artificial; identical to SEQ ID NO: 283232
  Synthetic oligonucleotide

SEQ ID NO: 656830 - DNA, 51 bp, Artificial; identical to SEQ ID NO: 283234
  Synthetic oligonucleotide

SEQ ID NO: 656831 - DNA, 53 bp, Artificial; identical to SEQ ID NO: 282713
  Synthetic oligonucleotide

SEQ ID NO: 656832 - DNA, 51 bp, Artificial; identical to SEQ ID NO: 268571
  Synthetic oligonucleotide

SEQ ID NO: 656833 - DNA, 60 bp, Artificial; identical to SEQ ID NO: 267897
  Synthetic oligonucleotide

SEQ ID NO: 656834 - DNA, 59 bp, Artificial; identical to SEQ ID NO: 279165
  Synthetic oligonucleotide

SEQ ID NO: 656835 - DNA, 50 bp, Artificial; identical to SEQ ID NO: 285284
  Synthetic oligonucleotide

SEQ ID NO: 656836 - DNA, 52 bp, Artificial; identical to SEQ ID NO: 278738
  Synthetic oligonucleotide

SEQ ID NO: 656837 - DNA, 55 bp, Artificial; identical to SEQ ID NO: 286265
  Synthetic oligonucleotide

SEQ ID NO: 656838 - DNA, 53 bp, Artificial; identical to SEQ ID NO: 282704
  Synthetic oligonucleotide

SEQ ID NO: 656839 - DNA, 52 bp, Artificial; identical to SEQ ID NO: 269197
  Synthetic oligonucleotide

SEQ ID NO: 656840 - DNA, 53 bp, Artificial; identical to SEQ ID NO: 282701
  Synthetic oligonucleotide

SEQ ID NO: 656841 - DNA, 55 bp, Artificial; identical to SEQ ID NO: 281561
  Synthetic oligonucleotide

SEQ ID NO: 656842 - DNA, 55 bp, Artificial; identical to SEQ ID NO: 281557
  Synthetic oligonucleotide

SEQ ID NO: 656843 - DNA, 60 bp, Artificial; identical to SEQ ID NO: 285773
  Synthetic oligonucleotide

SEQ ID NO: 656844 - DNA, 50 bp, Artificial; identical to SEQ ID NO: 269368
  Synthetic oligonucleotide

SEQ ID NO: 656845 - DNA, 52 bp, Artificial; identical to SEQ ID NO: 269200
  Synthetic oligonucleotide

SEQ ID NO: 656846 - DNA, 54 bp, Artificial; identical to SEQ ID NO: 282257
  Synthetic oligonucleotide

SEQ ID NO: 656847 - DNA, 53 bp, Artificial; identical to SEQ ID NO: 286330
  Synthetic oligonucleotide

SEQ ID NO: 656848 - DNA, 55 bp, Artificial; identical to SEQ ID NO: 278332
  Synthetic oligonucleotide

SEQ ID NO: 656849 - DNA, 50 bp, Artificial; identical to SEQ ID NO: 286446
  Synthetic oligonucleotide

SEQ ID NO: 656850 - DNA, 55 bp, Artificial; identical to SEQ ID NO: 268959
  Synthetic oligonucleotide

SEQ ID NO: 656851 - DNA, 60 bp, Artificial; identical to SEQ ID NO: 278987
  Synthetic oligonucleotide

SEQ ID NO: 656852 - DNA, 55 bp, Artificial; identical to SEQ ID NO: 286232
  Synthetic oligonucleotide

SEQ ID NO: 656853 - DNA, 60 bp, Artificial; identical to SEQ ID NO: 279020
  Synthetic oligonucleotide

SEQ ID NO: 656854 - DNA, 54 bp, Artificial; identical to SEQ ID NO: 282250
  Synthetic oligonucleotide

SEQ ID NO: 656855 - DNA, 54 bp, Artificial; identical to SEQ ID NO: 268247
  Synthetic oligonucleotide

SEQ ID NO: 656856 - DNA, 53 bp, Artificial; identical to SEQ ID NO: 267909
  Synthetic oligonucleotide

SEQ ID NO: 656857 - DNA, 55 bp, Artificial; identical to SEQ ID NO: 281594
  Synthetic oligonucleotide

SEQ ID NO: 656858 - DNA, 56 bp, Artificial; identical to SEQ ID NO: 268976
  Synthetic oligonucleotide

SEQ ID NO: 656859 - DNA, 55 bp, Artificial; identical to SEQ ID NO: 281593
  Synthetic oligonucleotide

SEQ ID NO: 656860 - DNA, 53 bp, Artificial; identical to SEQ ID NO: 281592
  Synthetic oligonucleotide

SEQ ID NO: 656861 - DNA, 55 bp, Artificial; identical to SEQ ID NO: 281590
  Synthetic oligonucleotide

SEQ ID NO: 656862 - DNA, 55 bp, Artificial; identical to SEQ ID NO: 267821
  Synthetic oligonucleotide

SEQ ID NO: 656863 - DNA, 56 bp, Artificial; identical to SEQ ID NO: 279631
  Synthetic oligonucleotide

SEQ ID NO: 656864 - DNA, 54 bp, Artificial; identical to SEQ ID NO: 279344
  Synthetic oligonucleotide

SEQ ID NO: 656865 - DNA, 53 bp, Artificial; identical to SEQ ID NO: 282438
  Synthetic oligonucleotide

SEQ ID NO: 656866 - DNA, 58 bp, Artificial; identical to SEQ ID NO: 268246
  Synthetic oligonucleotide

SEQ ID NO: 656867 - DNA, 58 bp, Artificial; identical to SEQ ID NO: 268332
  Synthetic oligonucleotide

SEQ ID NO: 656868 - DNA, 55 bp, Artificial; identical to SEQ ID NO: 268958
  Synthetic oligonucleotide

SEQ ID NO: 656869 - DNA, 57 bp, Artificial; identical to SEQ ID NO: 279698
  Synthetic oligonucleotide

SEQ ID NO: 656870 - DNA, 60 bp, Artificial; identical to SEQ ID NO: 279709
  Synthetic oligonucleotide

SEQ ID NO: 656871 - DNA, 59 bp, Artificial; identical to SEQ ID NO: 279731
  Synthetic oligonucleotide

SEQ ID NO: 656872 - DNA, 50 bp, Artificial; identical to SEQ ID NO: 286445
  Synthetic oligonucleotide

SEQ ID NO: 656873 - DNA, 56 bp, Artificial; identical to SEQ ID NO: 279480
  Synthetic oligonucleotide

SEQ ID NO: 656874 - DNA, 60 bp, Artificial; identical to SEQ ID NO: 279331
  Synthetic oligonucleotide

SEQ ID NO: 656875 - DNA, 55 bp, Artificial; identical to SEQ ID NO: 286241
  Synthetic oligonucleotide

SEQ ID NO: 656876 - DNA, 55 bp, Artificial; identical to SEQ ID NO: 281583
  Synthetic oligonucleotide

SEQ ID NO: 656877 - DNA, 52 bp, Artificial; identical to SEQ ID NO: 283043
  Synthetic oligonucleotide

SEQ ID NO: 656878 - DNA, 49 bp, Artificial; identical to SEQ ID NO: 281580
  Synthetic oligonucleotide

SEQ ID NO: 656879 - DNA, 55 bp, Artificial; identical to SEQ ID NO: 281532
  Synthetic oligonucleotide

SEQ ID NO: 656880 - DNA, 51 bp, Artificial; identical to SEQ ID NO: 283254
  Synthetic oligonucleotide

SEQ ID NO: 656881 - DNA, 56 bp, Artificial; identical to SEQ ID NO: 278287
  Synthetic oligonucleotide

SEQ ID NO: 656882 - DNA, 52 bp, Artificial; identical to SEQ ID NO: 283049
  Synthetic oligonucleotide

SEQ ID NO: 656883 - DNA, 55 bp, Artificial; identical to SEQ ID NO: 281524
  Synthetic oligonucleotide

SEQ ID NO: 656884 - DNA, 60 bp, Artificial; identical to SEQ ID NO: 268245
  Synthetic oligonucleotide

SEQ ID NO: 656885 - DNA, 59 bp, Artificial; identical to SEQ ID NO: 279163
  Synthetic oligonucleotide

SEQ ID NO: 656886 - DNA, 51 bp, Artificial; identical to SEQ ID NO: 286407
  Synthetic oligonucleotide

SEQ ID NO: 656887 - DNA, 59 bp, Artificial; identical to SEQ ID NO: 280697
  Synthetic oligonucleotide

SEQ ID NO: 656888 - DNA, 60 bp, Artificial; identical to SEQ ID NO: 281253
  Synthetic oligonucleotide

SEQ ID NO: 656889 - DNA, 53 bp, Artificial; identical to SEQ ID NO: 282459
  Synthetic oligonucleotide

SEQ ID NO: 656890 - DNA, 58 bp, Artificial; identical to SEQ ID NO: 281808
  Synthetic oligonucleotide

SEQ ID NO: 656891 - DNA, 55 bp, Artificial; identical to SEQ ID NO: 281517
  Synthetic oligonucleotide

SEQ ID NO: 656892 - DNA, 53 bp, Artificial; identical to SEQ ID NO: 269170
  Synthetic oligonucleotide

SEQ ID NO: 656893 - DNA, 55 bp, Artificial; identical to SEQ ID NO: 267974
  Synthetic oligonucleotide

SEQ ID NO: 656894 - DNA, 52 bp, Artificial; identical to SEQ ID NO: 269203
  Synthetic oligonucleotide

SEQ ID NO: 656895 - DNA, 53 bp, Artificial; identical to SEQ ID NO: 268543
  Synthetic oligonucleotide

SEQ ID NO: 656896 - DNA, 54 bp, Artificial; identical to SEQ ID NO: 282229
  Synthetic oligonucleotide

SEQ ID NO: 656897 - DNA, 55 bp, Artificial; identical to SEQ ID NO: 278323
  Synthetic oligonucleotide

SEQ ID NO: 656898 - DNA, 55 bp, Artificial; identical to SEQ ID NO: 270350
  Synthetic oligonucleotide

SEQ ID NO: 656899 - DNA, 55 bp, Artificial; identical to SEQ ID NO: 281515
  Synthetic oligonucleotide

SEQ ID NO: 656900 - DNA, 55 bp, Artificial; identical to SEQ ID NO: 281512
  Synthetic oligonucleotide

SEQ ID NO: 656901 - DNA, 55 bp, Artificial; identical to SEQ ID NO: 281511
  Synthetic oligonucleotide

SEQ ID NO: 656902 - DNA, 60 bp, Artificial; identical to SEQ ID NO: 282697
  Synthetic oligonucleotide

SEQ ID NO: 656903 - DNA, 56 bp, Artificial; identical to SEQ ID NO: 268370
  Synthetic oligonucleotide

SEQ ID NO: 656904 - DNA, 54 bp, Artificial; identical to SEQ ID NO: 268244
  Synthetic oligonucleotide

SEQ ID NO: 656905 - DNA, 52 bp, Artificial; identical to SEQ ID NO: 283032
  Synthetic oligonucleotide

SEQ ID NO: 656906 - DNA, 55 bp, Artificial; identical to SEQ ID NO: 278321
  Synthetic oligonucleotide

SEQ ID NO: 656907 - DNA, 55 bp, Artificial; identical to SEQ ID NO: 281551
  Synthetic oligonucleotide

SEQ ID NO: 656908 - DNA, 55 bp, Artificial; identical to SEQ ID NO: 278319
  Synthetic oligonucleotide

SEQ ID NO: 656909 - DNA, 60 bp, Artificial; identical to SEQ ID NO: 279919
  Synthetic oligonucleotide

SEQ ID NO: 656910 - DNA, 52 bp, Artificial; identical to SEQ ID NO: 283070
  Synthetic oligonucleotide

SEQ ID NO: 656911 - DNA, 60 bp, Artificial; identical to SEQ ID NO: 280253
  Synthetic oligonucleotide

SEQ ID NO: 656912 - DNA, 55 bp, Artificial; identical to SEQ ID NO: 281545
  Synthetic oligonucleotide

SEQ ID NO: 656913 - DNA, 52 bp, Artificial; identical to SEQ ID NO: 278748
  Synthetic oligonucleotide

SEQ ID NO: 656914 - DNA, 60 bp, Artificial; identical to SEQ ID NO: 285252
  Synthetic oligonucleotide

SEQ ID NO: 656915 - DNA, 57 bp, Artificial; identical to SEQ ID NO: 279352
  Synthetic oligonucleotide

SEQ ID NO: 656916 - DNA, 55 bp, Artificial; identical to SEQ ID NO: 286247
  Synthetic oligonucleotide

SEQ ID NO: 656917 - DNA, 55 bp, Artificial; identical to SEQ ID NO: 281543
  Synthetic oligonucleotide

SEQ ID NO: 656918 - DNA, 58 bp, Artificial; identical to SEQ ID NO: 279239
  Synthetic oligonucleotide

SEQ ID NO: 656919 - DNA, 60 bp, Artificial; identical to SEQ ID NO: 285989
  Synthetic oligonucleotide

SEQ ID NO: 656920 - DNA, 60 bp, Artificial; identical to SEQ ID NO: 268242
  Synthetic oligonucleotide

SEQ ID NO: 656921 - DNA, 55 bp, Artificial; identical to SEQ ID NO: 286235
  Synthetic oligonucleotide

SEQ ID NO: 656922 - DNA, 56 bp, Artificial; identical to SEQ ID NO: 285584
  Synthetic oligonucleotide

SEQ ID NO: 656923 - DNA, 58 bp, Artificial; identical to SEQ ID NO: 279238
  Synthetic oligonucleotide

SEQ ID NO: 656924 - DNA, 55 bp, Artificial; identical to SEQ ID NO: 267973
  Synthetic oligonucleotide

SEQ ID NO: 656925 - DNA, 53 bp, Artificial; identical to SEQ ID NO: 267907
  Synthetic oligonucleotide

SEQ ID NO: 656926 - DNA, 51 bp, Artificial; identical to SEQ ID NO: 283323
  Synthetic oligonucleotide

SEQ ID NO: 656927 - DNA, 52 bp, Artificial; identical to SEQ ID NO: 278743
  Synthetic oligonucleotide

SEQ ID NO: 656928 - DNA, 53 bp, Artificial; identical to SEQ ID NO: 269172
  Synthetic oligonucleotide

SEQ ID NO: 656929 - DNA, 60 bp, Artificial; identical to SEQ ID NO: 286244
  Synthetic oligonucleotide

SEQ ID NO: 656930 - DNA, 60 bp, Artificial; identical to SEQ ID NO: 268239
  Synthetic oligonucleotide

SEQ ID NO: 656931 - DNA, 60 bp, Artificial; identical to SEQ ID NO: 286233
  Synthetic oligonucleotide

SEQ ID NO: 656932 - DNA, 53 bp, Artificial; identical to SEQ ID NO: 268542
  Synthetic oligonucleotide

SEQ ID NO: 656933 - DNA, 55 bp, Artificial; identical to SEQ ID NO: 281666
  Synthetic oligonucleotide

SEQ ID NO: 656934 - DNA, 52 bp, Artificial; identical to SEQ ID NO: 283058
  Synthetic oligonucleotide

SEQ ID NO: 656935 - DNA, 60 bp, Artificial; identical to SEQ ID NO: 268238
  Synthetic oligonucleotide

SEQ ID NO: 656936 - DNA, 51 bp, Artificial; identical to SEQ ID NO: 269219
  Synthetic oligonucleotide

SEQ ID NO: 656937 - DNA, 51 bp, Artificial; identical to SEQ ID NO: 283351
  Synthetic oligonucleotide

SEQ ID NO: 656938 - DNA, 55 bp, Artificial; identical to SEQ ID NO: 281662
  Synthetic oligonucleotide

SEQ ID NO: 656939 - DNA, 52 bp, Artificial; identical to SEQ ID NO: 278741
  Synthetic oligonucleotide

SEQ ID NO: 656940 - DNA, 54 bp, Artificial; identical to SEQ ID NO: 282271
  Synthetic oligonucleotide

SEQ ID NO: 656941 - DNA, 52 bp, Artificial; identical to SEQ ID NO: 282967
  Synthetic oligonucleotide

SEQ ID NO: 656942 - DNA, 50 bp, Artificial; identical to SEQ ID NO: 283902
  Synthetic oligonucleotide

SEQ ID NO: 656943 - DNA, 55 bp, Artificial; identical to SEQ ID NO: 281659
  Synthetic oligonucleotide

SEQ ID NO: 656944 - DNA, 51 bp, Artificial; identical to SEQ ID NO: 283338
  Synthetic oligonucleotide

SEQ ID NO: 656945 - DNA, 55 bp, Artificial; identical to SEQ ID NO: 281658
  Synthetic oligonucleotide

SEQ ID NO: 656946 - DNA, 57 bp, Artificial; identical to SEQ ID NO: 284919
  Synthetic oligonucleotide

SEQ ID NO: 656947 - DNA, 55 bp, Artificial; identical to SEQ ID NO: 278451
  Synthetic oligonucleotide

SEQ ID NO: 656948 - DNA, 55 bp, Artificial; identical to SEQ ID NO: 281657
  Synthetic oligonucleotide

SEQ ID NO: 656949 - DNA, 56 bp, Artificial; identical to SEQ ID NO: 268237
  Synthetic oligonucleotide

SEQ ID NO: 656950 - DNA, 55 bp, Artificial; identical to SEQ ID NO: 281656
  Synthetic oligonucleotide

SEQ ID NO: 656951 - DNA, 56 bp, Artificial; identical to SEQ ID NO: 279415
  Synthetic oligonucleotide

SEQ ID NO: 656952 - DNA, 51 bp, Artificial; identical to SEQ ID NO: 283280
  Synthetic oligonucleotide

SEQ ID NO: 656953 - DNA, 55 bp, Artificial; identical to SEQ ID NO: 268956
  Synthetic oligonucleotide

SEQ ID NO: 656954 - DNA, 58 bp, Artificial; identical to SEQ ID NO: 268345
  Synthetic oligonucleotide

SEQ ID NO: 656955 - DNA, 59 bp, Artificial; identical to SEQ ID NO: 279181
  Synthetic oligonucleotide

SEQ ID NO: 656956 - DNA, 53 bp, Artificial; identical to SEQ ID NO: 282529
  Synthetic oligonucleotide

SEQ ID NO: 656957 - DNA, 55 bp, Artificial; identical to SEQ ID NO: 281650
  Synthetic oligonucleotide

SEQ ID NO: 656958 - DNA, 51 bp, Artificial; identical to SEQ ID NO: 283269
  Synthetic oligonucleotide

SEQ ID NO: 656959 - DNA, 55 bp, Artificial; identical to SEQ ID NO: 281646
  Synthetic oligonucleotide

SEQ ID NO: 656960 - DNA, 55 bp, Artificial; identical to SEQ ID NO: 278447
  Synthetic oligonucleotide

SEQ ID NO: 656961 - DNA, 50 bp, Artificial; identical to SEQ ID NO: 283928
  Synthetic oligonucleotide

SEQ ID NO: 656962 - DNA, 55 bp, Artificial; identical to SEQ ID NO: 278446
  Synthetic oligonucleotide

SEQ ID NO: 656963 - DNA, 60 bp, Artificial; identical to SEQ ID NO: 280875
  Synthetic oligonucleotide

SEQ ID NO: 656964 - DNA, 55 bp, Artificial; identical to SEQ ID NO: 281689
  Synthetic oligonucleotide

SEQ ID NO: 656965 - DNA, 55 bp, Artificial; identical to SEQ ID NO: 279328
  Synthetic oligonucleotide

SEQ ID NO: 656966 - DNA, 57 bp, Artificial; identical to SEQ ID NO: 280953
  Synthetic oligonucleotide

SEQ ID NO: 656967 - DNA, 55 bp, Artificial; identical to SEQ ID NO: 278441
  Synthetic oligonucleotide

SEQ ID NO: 656968 - DNA, 55 bp, Artificial; identical to SEQ ID NO: 281685
  Synthetic oligonucleotide

SEQ ID NO: 656969 - DNA, 60 bp, Artificial; identical to SEQ ID NO: 281531
  Synthetic oligonucleotide

SEQ ID NO: 656970 - DNA, 57 bp, Artificial; identical to SEQ ID NO: 281542
  Synthetic oligonucleotide

SEQ ID NO: 656971 - DNA, 59 bp, Artificial; identical to SEQ ID NO: 281631
  Synthetic oligonucleotide

SEQ ID NO: 656972 - DNA, 59 bp, Artificial; identical to SEQ ID NO: 281653
  Synthetic oligonucleotide

SEQ ID NO: 656973 - DNA, 55 bp, Artificial; identical to SEQ ID NO: 286139
  Synthetic oligonucleotide

SEQ ID NO: 656974 - DNA, 55 bp, Artificial; identical to SEQ ID NO: 267846
  Synthetic oligonucleotide

SEQ ID NO: 656975 - DNA, 55 bp, Artificial; identical to SEQ ID NO: 278439
  Synthetic oligonucleotide

SEQ ID NO: 656976 - DNA, 57 bp, Artificial; identical to SEQ ID NO: 281698
  Synthetic oligonucleotide

SEQ ID NO: 656977 - DNA, 60 bp, Artificial; identical to SEQ ID NO: 281242
  Synthetic oligonucleotide

SEQ ID NO: 656978 - DNA, 51 bp, Artificial; identical to SEQ ID NO: 278789
  Synthetic oligonucleotide

SEQ ID NO: 656979 - DNA, 58 bp, Artificial; identical to SEQ ID NO: 279278
  Synthetic oligonucleotide

SEQ ID NO: 656980 - DNA, 53 bp, Artificial; identical to SEQ ID NO: 282503
  Synthetic oligonucleotide

SEQ ID NO: 656981 - DNA, 53 bp, Artificial; identical to SEQ ID NO: 282501
  Synthetic oligonucleotide

SEQ ID NO: 656982 - DNA, 51 bp, Artificial; identical to SEQ ID NO: 283333
  Synthetic oligonucleotide

SEQ ID NO: 656983 - DNA, 55 bp, Artificial; identical to SEQ ID NO: 281672
  Synthetic oligonucleotide

SEQ ID NO: 656984 - DNA, 57 bp, Artificial; identical to SEQ ID NO: 268236
  Synthetic oligonucleotide

SEQ ID NO: 656985 - DNA, 55 bp, Artificial; identical to SEQ ID NO: 281671
  Synthetic oligonucleotide

SEQ ID NO: 656986 - DNA, 58 bp, Artificial; identical to SEQ ID NO: 268235
  Synthetic oligonucleotide

SEQ ID NO: 656987 - DNA, 54 bp, Artificial; identical to SEQ ID NO: 282203
  Synthetic oligonucleotide

SEQ ID NO: 656988 - DNA, 52 bp, Artificial; identical to SEQ ID NO: 268234
  Synthetic oligonucleotide

SEQ ID NO: 656989 - DNA, 60 bp, Artificial; identical to SEQ ID NO: 281442
  Synthetic oligonucleotide

SEQ ID NO: 656990 - DNA, 56 bp, Artificial; identical to SEQ ID NO: 280032
  Synthetic oligonucleotide

SEQ ID NO: 656991 - DNA, 60 bp, Artificial; identical to SEQ ID NO: 280054
  Synthetic oligonucleotide

SEQ ID NO: 656992 - DNA, 54 bp, Artificial; identical to SEQ ID NO: 280076
  Synthetic oligonucleotide

SEQ ID NO: 656993 - DNA, 50 bp, Artificial; identical to SEQ ID NO: 284041
  Synthetic oligonucleotide

SEQ ID NO: 656994 - DNA, 57 bp, Artificial; identical to SEQ ID NO: 280143
  Synthetic oligonucleotide

SEQ ID NO: 656995 - DNA, 58 bp, Artificial; identical to SEQ ID NO: 280165
  Synthetic oligonucleotide

SEQ ID NO: 656996 - DNA, 55 bp, Artificial; identical to SEQ ID NO: 267847
  Synthetic oligonucleotide

SEQ ID NO: 656997 - DNA, 54 bp, Artificial; identical to SEQ ID NO: 268233
  Synthetic oligonucleotide

SEQ ID NO: 656998 - DNA, 52 bp, Artificial; identical to SEQ ID NO: 282989
  Synthetic oligonucleotide

SEQ ID NO: 656999 - DNA, 53 bp, Artificial; identical to SEQ ID NO: 269689
  Synthetic oligonucleotide

SEQ ID NO: 657000 - DNA, 60 bp, Artificial; identical to SEQ ID NO: 279775
  Synthetic oligonucleotide

SEQ ID NO: 657001 - DNA, 57 bp, Artificial; identical to SEQ ID NO: 267940
  Synthetic oligonucleotide

SEQ ID NO: 657002 - DNA, 55 bp, Artificial; identical to SEQ ID NO: 281619
  Synthetic oligonucleotide

SEQ ID NO: 657003 - DNA, 51 bp, Artificial; identical to SEQ ID NO: 283235
  Synthetic oligonucleotide

SEQ ID NO: 657004 - DNA, 51 bp, Artificial; identical to SEQ ID NO: 283222
  Synthetic oligonucleotide

SEQ ID NO: 657005 - DNA, 52 bp, Artificial; identical to SEQ ID NO: 283159
  Synthetic oligonucleotide

SEQ ID NO: 657006 - DNA, 55 bp, Artificial; identical to SEQ ID NO: 281616
  Synthetic oligonucleotide

SEQ ID NO: 657007 - DNA, 60 bp, Artificial; identical to SEQ ID NO: 280542
  Synthetic oligonucleotide

SEQ ID NO: 657008 - DNA, 56 bp, Artificial; identical to SEQ ID NO: 286516
  Synthetic oligonucleotide

SEQ ID NO: 657009 - DNA, 51 bp, Artificial; identical to SEQ ID NO: 269225
  Synthetic oligonucleotide

SEQ ID NO: 657010 - DNA, 55 bp, Artificial; identical to SEQ ID NO: 281612
  Synthetic oligonucleotide

SEQ ID NO: 657011 - DNA, 55 bp, Artificial; identical to SEQ ID NO: 281611
  Synthetic oligonucleotide

SEQ ID NO: 657012 - DNA, 55 bp, Artificial; identical to SEQ ID NO: 276767
  Synthetic oligonucleotide

SEQ ID NO: 657013 - DNA, 50 bp, Artificial; identical to SEQ ID NO: 283772
  Synthetic oligonucleotide

SEQ ID NO: 657014 - DNA, 58 bp, Artificial; identical to SEQ ID NO: 280731
  Synthetic oligonucleotide

SEQ ID NO: 657015 - DNA, 53 bp, Artificial; identical to SEQ ID NO: 278706
  Synthetic oligonucleotide

SEQ ID NO: 657016 - DNA, 53 bp, Artificial; identical to SEQ ID NO: 278481
  Synthetic oligonucleotide

SEQ ID NO: 657017 - DNA, 55 bp, Artificial; identical to SEQ ID NO: 281610
  Synthetic oligonucleotide

SEQ ID NO: 657018 - DNA, 57 bp, Artificial; identical to SEQ ID NO: 268659
  Synthetic oligonucleotide

SEQ ID NO: 657019 - DNA, 55 bp, Artificial; identical to SEQ ID NO: 286110
  Synthetic oligonucleotide

SEQ ID NO: 657020 - DNA, 55 bp, Artificial; identical to SEQ ID NO: 281604
  Synthetic oligonucleotide

SEQ ID NO: 657021 - DNA, 55 bp, Artificial; identical to SEQ ID NO: 268951
  Synthetic oligonucleotide

SEQ ID NO: 657022 - DNA, 51 bp, Artificial; identical to SEQ ID NO: 283342
  Synthetic oligonucleotide

SEQ ID NO: 657023 - DNA, 55 bp, Artificial; identical to SEQ ID NO: 281643
  Synthetic oligonucleotide

SEQ ID NO: 657024 - DNA, 60 bp, Artificial; identical to SEQ ID NO: 278945
  Synthetic oligonucleotide

SEQ ID NO: 657025 - DNA, 60 bp, Artificial; identical to SEQ ID NO: 285837
  Synthetic oligonucleotide

SEQ ID NO: 657026 - DNA, 60 bp, Artificial; identical to SEQ ID NO: 285848
  Synthetic oligonucleotide

SEQ ID NO: 657027 - DNA, 60 bp, Artificial; identical to SEQ ID NO: 268657
  Synthetic oligonucleotide

SEQ ID NO: 657028 - DNA, 52 bp, Artificial; identical to SEQ ID NO: 283091
  Synthetic oligonucleotide

SEQ ID NO: 657029 - DNA, 55 bp, Artificial; identical to SEQ ID NO: 281637
  Synthetic oligonucleotide

SEQ ID NO: 657030 - DNA, 60 bp, Artificial; identical to SEQ ID NO: 279002
  Synthetic oligonucleotide

SEQ ID NO: 657031 - DNA, 60 bp, Artificial; identical to SEQ ID NO: 279010
  Synthetic oligonucleotide

SEQ ID NO: 657032 - DNA, 54 bp, Artificial; identical to SEQ ID NO: 282315
  Synthetic oligonucleotide

SEQ ID NO: 657033 - DNA, 52 bp, Artificial; identical to SEQ ID NO: 283148
  Synthetic oligonucleotide

SEQ ID NO: 657034 - DNA, 55 bp, Artificial; identical to SEQ ID NO: 268409
  Synthetic oligonucleotide

SEQ ID NO: 657035 - DNA, 56 bp, Artificial; identical to SEQ ID NO: 267941
  Synthetic oligonucleotide

SEQ ID NO: 657036 - DNA, 60 bp, Artificial; identical to SEQ ID NO: 279035
  Synthetic oligonucleotide

SEQ ID NO: 657037 - DNA, 59 bp, Artificial; identical to SEQ ID NO: 277976
  Synthetic oligonucleotide

SEQ ID NO: 657038 - DNA, 55 bp, Artificial; identical to SEQ ID NO: 268410
  Synthetic oligonucleotide

SEQ ID NO: 657039 - DNA, 58 bp, Artificial; identical to SEQ ID NO: 278989
  Synthetic oligonucleotide

SEQ ID NO: 657040 - DNA, 60 bp, Artificial; identical to SEQ ID NO: 278986
  Synthetic oligonucleotide

SEQ ID NO: 657041 - DNA, 60 bp, Artificial; identical to SEQ ID NO: 278983
  Synthetic oligonucleotide

SEQ ID NO: 657042 - DNA, 55 bp, Artificial; identical to SEQ ID NO: 278980
  Synthetic oligonucleotide

SEQ ID NO: 657043 - DNA, 53 bp, Artificial; identical to SEQ ID NO: 278726
  Synthetic oligonucleotide

SEQ ID NO: 657044 - DNA, 60 bp, Artificial; identical to SEQ ID NO: 278975
  Synthetic oligonucleotide

SEQ ID NO: 657045 - DNA, 50 bp, Artificial; identical to SEQ ID NO: 283863
  Synthetic oligonucleotide

SEQ ID NO: 657046 - DNA, 55 bp, Artificial; identical to SEQ ID NO: 278465
  Synthetic oligonucleotide

SEQ ID NO: 657047 - DNA, 55 bp, Artificial; identical to SEQ ID NO: 281626
  Synthetic oligonucleotide

SEQ ID NO: 657048 - DNA, 54 bp, Artificial; identical to SEQ ID NO: 286283
  Synthetic oligonucleotide

SEQ ID NO: 657049 - DNA, 54 bp, Artificial; identical to SEQ ID NO: 282377
  Synthetic oligonucleotide

SEQ ID NO: 657050 - DNA, 55 bp, Artificial; identical to SEQ ID NO: 278463
  Synthetic oligonucleotide

SEQ ID NO: 657051 - DNA, 51 bp, Artificial; identical to SEQ ID NO: 283166
  Synthetic oligonucleotide

SEQ ID NO: 657052 - DNA, 55 bp, Artificial; identical to SEQ ID NO: 281624
  Synthetic oligonucleotide

SEQ ID NO: 657053 - DNA, 53 bp, Artificial; identical to SEQ ID NO: 267905
  Synthetic oligonucleotide

SEQ ID NO: 657054 - DNA, 55 bp, Artificial; identical to SEQ ID NO: 268654
  Synthetic oligonucleotide

SEQ ID NO: 657055 - DNA, 55 bp, Artificial; identical to SEQ ID NO: 270348
  Synthetic oligonucleotide

SEQ ID NO: 657056 - DNA, 60 bp, Artificial; identical to SEQ ID NO: 278928
  Synthetic oligonucleotide

SEQ ID NO: 657057 - DNA, 53 bp, Artificial; identical to SEQ ID NO: 282466
  Synthetic oligonucleotide

SEQ ID NO: 657058 - DNA, 50 bp, Artificial; identical to SEQ ID NO: 283814
  Synthetic oligonucleotide

SEQ ID NO: 657059 - DNA, 60 bp, Artificial; identical to SEQ ID NO: 285847
  Synthetic oligonucleotide

SEQ ID NO: 657060 - DNA, 58 bp, Artificial; identical to SEQ ID NO: 279237
  Synthetic oligonucleotide

SEQ ID NO: 657061 - DNA, 58 bp, Artificial; identical to SEQ ID NO: 285842
  Synthetic oligonucleotide

SEQ ID NO: 657062 - DNA, 59 bp, Artificial; identical to SEQ ID NO: 285831
  Synthetic oligonucleotide

SEQ ID NO: 657063 - DNA, 54 bp, Artificial; identical to SEQ ID NO: 278964
  Synthetic oligonucleotide

SEQ ID NO: 657064 - DNA, 56 bp, Artificial; identical to SEQ ID NO: 267950
  Synthetic oligonucleotide

SEQ ID NO: 657065 - DNA, 60 bp, Artificial; identical to SEQ ID NO: 268653
  Synthetic oligonucleotide

SEQ ID NO: 657066 - DNA, 50 bp, Artificial; identical to SEQ ID NO: 283868
  Synthetic oligonucleotide

SEQ ID NO: 657067 - DNA, 51 bp, Artificial; identical to SEQ ID NO: 286423
  Synthetic oligonucleotide

SEQ ID NO: 657068 - DNA, 52 bp, Artificial; identical to SEQ ID NO: 278740
  Synthetic oligonucleotide

SEQ ID NO: 657069 - DNA, 59 bp, Artificial; identical to SEQ ID NO: 279171
  Synthetic oligonucleotide

SEQ ID NO: 657070 - DNA, 55 bp, Artificial; identical to SEQ ID NO: 286121
  Synthetic oligonucleotide

SEQ ID NO: 657071 - DNA, 52 bp, Artificial; identical to SEQ ID NO: 286359
  Synthetic oligonucleotide

SEQ ID NO: 657072 - DNA, 59 bp, Artificial; identical to SEQ ID NO: 268335
  Synthetic oligonucleotide

SEQ ID NO: 657073 - DNA, 55 bp, Artificial; identical to SEQ ID NO: 281379
  Synthetic oligonucleotide

SEQ ID NO: 657074 - DNA, 58 bp, Artificial; identical to SEQ ID NO: 278953
  Synthetic oligonucleotide

SEQ ID NO: 657075 - DNA, 60 bp, Artificial; identical to SEQ ID NO: 278950
  Synthetic oligonucleotide

SEQ ID NO: 657076 - DNA, 59 bp, Artificial; identical to SEQ ID NO: 278948
  Synthetic oligonucleotide

SEQ ID NO: 657077 - DNA, 60 bp, Artificial; identical to SEQ ID NO: 268652
  Synthetic oligonucleotide

SEQ ID NO: 657078 - DNA, 55 bp, Artificial; identical to SEQ ID NO: 268414
  Synthetic oligonucleotide

SEQ ID NO: 657079 - DNA, 60 bp, Artificial; identical to SEQ ID NO: 278941
  Synthetic oligonucleotide

SEQ ID NO: 657080 - DNA, 50 bp, Artificial; identical to SEQ ID NO: 277661
  Synthetic oligonucleotide

SEQ ID NO: 657081 - DNA, 55 bp, Artificial; identical to SEQ ID NO: 268949
  Synthetic oligonucleotide

SEQ ID NO: 657082 - DNA, 53 bp, Artificial; identical to SEQ ID NO: 282458
  Synthetic oligonucleotide

SEQ ID NO: 657083 - DNA, 53 bp, Artificial; identical to SEQ ID NO: 286315
  Synthetic oligonucleotide

SEQ ID NO: 657084 - DNA, 58 bp, Artificial; identical to SEQ ID NO: 268651
  Synthetic oligonucleotide

SEQ ID NO: 657085 - DNA, 53 bp, Artificial; identical to SEQ ID NO: 281373
  Synthetic oligonucleotide

SEQ ID NO: 657086 - DNA, 51 bp, Artificial; identical to SEQ ID NO: 286394
  Synthetic oligonucleotide

SEQ ID NO: 657087 - DNA, 55 bp, Artificial; identical to SEQ ID NO: 281372
  Synthetic oligonucleotide

SEQ ID NO: 657088 - DNA, 60 bp, Artificial; identical to SEQ ID NO: 279104
  Synthetic oligonucleotide

SEQ ID NO: 657089 - DNA, 53 bp, Artificial; identical to SEQ ID NO: 282448
  Synthetic oligonucleotide

SEQ ID NO: 657090 - DNA, 59 bp, Artificial; identical to SEQ ID NO: 279123
  Synthetic oligonucleotide

SEQ ID NO: 657091 - DNA, 57 bp, Artificial; identical to SEQ ID NO: 268650
  Synthetic oligonucleotide

SEQ ID NO: 657092 - DNA, 60 bp, Artificial; identical to SEQ ID NO: 279124
  Synthetic oligonucleotide

SEQ ID NO: 657093 - DNA, 57 bp, Artificial; identical to SEQ ID NO: 268649
  Synthetic oligonucleotide

SEQ ID NO: 657094 - DNA, 55 bp, Artificial; identical to SEQ ID NO: 281408
  Synthetic oligonucleotide

SEQ ID NO: 657095 - DNA, 55 bp, Artificial; identical to SEQ ID NO: 267970
  Synthetic oligonucleotide

SEQ ID NO: 657096 - DNA, 55 bp, Artificial; identical to SEQ ID NO: 281406
  Synthetic oligonucleotide

SEQ ID NO: 657097 - DNA, 55 bp, Artificial; identical to SEQ ID NO: 281405
  Synthetic oligonucleotide

SEQ ID NO: 657098 - DNA, 55 bp, Artificial; identical to SEQ ID NO: 281404
  Synthetic oligonucleotide

SEQ ID NO: 657099 - DNA, 55 bp, Artificial; identical to SEQ ID NO: 268411
  Synthetic oligonucleotide

SEQ ID NO: 657100 - DNA, 60 bp, Artificial; identical to SEQ ID NO: 279077
  Synthetic oligonucleotide

SEQ ID NO: 657101 - DNA, 57 bp, Artificial; identical to SEQ ID NO: 279082
  Synthetic oligonucleotide

SEQ ID NO: 657102 - DNA, 60 bp, Artificial; identical to SEQ ID NO: 279085
  Synthetic oligonucleotide

SEQ ID NO: 657103 - DNA, 55 bp, Artificial; identical to SEQ ID NO: 269996
  Synthetic oligonucleotide

SEQ ID NO: 657104 - DNA, 54 bp, Artificial; identical to SEQ ID NO: 267969
  Synthetic oligonucleotide

SEQ ID NO: 657105 - DNA, 53 bp, Artificial; identical to SEQ ID NO: 276772
  Synthetic oligonucleotide

SEQ ID NO: 657106 - DNA, 51 bp, Artificial; identical to SEQ ID NO: 269267
  Synthetic oligonucleotide

SEQ ID NO: 657107 - DNA, 51 bp, Artificial; identical to SEQ ID NO: 283315
  Synthetic oligonucleotide

SEQ ID NO: 657108 - DNA, 59 bp, Artificial; identical to SEQ ID NO: 286477
  Synthetic oligonucleotide

SEQ ID NO: 657109 - DNA, 57 bp, Artificial; identical to SEQ ID NO: 279108
  Synthetic oligonucleotide

SEQ ID NO: 657110 - DNA, 52 bp, Artificial; identical to SEQ ID NO: 282789
  Synthetic oligonucleotide

SEQ ID NO: 657111 - DNA, 54 bp, Artificial; identical to SEQ ID NO: 286281
  Synthetic oligonucleotide

SEQ ID NO: 657112 - DNA, 54 bp, Artificial; identical to SEQ ID NO: 278689
  Synthetic oligonucleotide

SEQ ID NO: 657113 - DNA, 52 bp, Artificial; identical to SEQ ID NO: 282788
  Synthetic oligonucleotide

SEQ ID NO: 657114 - DNA, 55 bp, Artificial; identical to SEQ ID NO: 281401
  Synthetic oligonucleotide

SEQ ID NO: 657115 - DNA, 51 bp, Artificial; identical to SEQ ID NO: 278790
  Synthetic oligonucleotide

SEQ ID NO: 657116 - DNA, 53 bp, Artificial; identical to SEQ ID NO: 282468
  Synthetic oligonucleotide

SEQ ID NO: 657117 - DNA, 53 bp, Artificial; identical to SEQ ID NO: 282433
  Synthetic oligonucleotide

SEQ ID NO: 657118 - DNA, 60 bp, Artificial; identical to SEQ ID NO: 285631
  Synthetic oligonucleotide

SEQ ID NO: 657119 - DNA, 54 bp, Artificial; identical to SEQ ID NO: 282343
  Synthetic oligonucleotide

SEQ ID NO: 657120 - DNA, 58 bp, Artificial; identical to SEQ ID NO: 285636
  Synthetic oligonucleotide

SEQ ID NO: 657121 - DNA, 60 bp, Artificial; identical to SEQ ID NO: 285637
  Synthetic oligonucleotide

SEQ ID NO: 657122 - DNA, 52 bp, Artificial; identical to SEQ ID NO: 269185
  Synthetic oligonucleotide

SEQ ID NO: 657123 - DNA, 55 bp, Artificial; identical to SEQ ID NO: 268948
  Synthetic oligonucleotide

SEQ ID NO: 657124 - DNA, 58 bp, Artificial; identical to SEQ ID NO: 268648
  Synthetic oligonucleotide

SEQ ID NO: 657125 - DNA, 53 bp, Artificial; identical to SEQ ID NO: 282532
  Synthetic oligonucleotide

SEQ ID NO: 657126 - DNA, 57 bp, Artificial; identical to SEQ ID NO: 279348
  Synthetic oligonucleotide

SEQ ID NO: 657127 - DNA, 55 bp, Artificial; identical to SEQ ID NO: 281397
  Synthetic oligonucleotide

SEQ ID NO: 657128 - DNA, 60 bp, Artificial; identical to SEQ ID NO: 285605
  Synthetic oligonucleotide

SEQ ID NO: 657129 - DNA, 57 bp, Artificial; identical to SEQ ID NO: 279346
  Synthetic oligonucleotide

SEQ ID NO: 657130 - DNA, 60 bp, Artificial; identical to SEQ ID NO: 285611
  Synthetic oligonucleotide

SEQ ID NO: 657131 - DNA, 57 bp, Artificial; identical to SEQ ID NO: 276738
  Synthetic oligonucleotide

SEQ ID NO: 657132 - DNA, 53 bp, Artificial; identical to SEQ ID NO: 282489
  Synthetic oligonucleotide

SEQ ID NO: 657133 - DNA, 57 bp, Artificial; identical to SEQ ID NO: 285658
  Synthetic oligonucleotide

SEQ ID NO: 657134 - DNA, 60 bp, Artificial; identical to SEQ ID NO: 285661
  Synthetic oligonucleotide

SEQ ID NO: 657135 - DNA, 55 bp, Artificial; identical to SEQ ID NO: 281391
  Synthetic oligonucleotide

SEQ ID NO: 657136 - DNA, 57 bp, Artificial; identical to SEQ ID NO: 279340
  Synthetic oligonucleotide

SEQ ID NO: 657137 - DNA, 52 bp, Artificial; identical to SEQ ID NO: 278737
  Synthetic oligonucleotide

SEQ ID NO: 657138 - DNA, 59 bp, Artificial; identical to SEQ ID NO: 285667
  Synthetic oligonucleotide

SEQ ID NO: 657139 - DNA, 52 bp, Artificial; identical to SEQ ID NO: 282812
  Synthetic oligonucleotide

SEQ ID NO: 657140 - DNA, 55 bp, Artificial; identical to SEQ ID NO: 281345
  Synthetic oligonucleotide

SEQ ID NO: 657141 - DNA, 56 bp, Artificial; identical to SEQ ID NO: 279401
  Synthetic oligonucleotide

SEQ ID NO: 657142 - DNA, 58 bp, Artificial; identical to SEQ ID NO: 285639
  Synthetic oligonucleotide

SEQ ID NO: 657143 - DNA, 53 bp, Artificial; identical to SEQ ID NO: 269161
  Synthetic oligonucleotide

SEQ ID NO: 657144 - DNA, 54 bp, Artificial; identical to SEQ ID NO: 268644
  Synthetic oligonucleotide

SEQ ID NO: 657145 - DNA, 55 bp, Artificial; identical to SEQ ID NO: 268399
  Synthetic oligonucleotide

SEQ ID NO: 657146 - DNA, 60 bp, Artificial; identical to SEQ ID NO: 285646
  Synthetic oligonucleotide

SEQ ID NO: 657147 - DNA, 60 bp, Artificial; identical to SEQ ID NO: 285647
  Synthetic oligonucleotide

SEQ ID NO: 657148 - DNA, 53 bp, Artificial; identical to SEQ ID NO: 278718
  Synthetic oligonucleotide

SEQ ID NO: 657149 - DNA, 55 bp, Artificial; identical to SEQ ID NO: 268395
  Synthetic oligonucleotide

SEQ ID NO: 657150 - DNA, 55 bp, Artificial; identical to SEQ ID NO: 281338
  Synthetic oligonucleotide

SEQ ID NO: 657151 - DNA, 60 bp, Artificial; identical to SEQ ID NO: 285541
  Synthetic oligonucleotide

SEQ ID NO: 657152 - DNA, 58 bp, Artificial; identical to SEQ ID NO: 285549
  Synthetic oligonucleotide

SEQ ID NO: 657153 - DNA, 59 bp, Artificial; identical to SEQ ID NO: 279182
  Synthetic oligonucleotide

SEQ ID NO: 657154 - DNA, 60 bp, Artificial; identical to SEQ ID NO: 285554
  Synthetic oligonucleotide

SEQ ID NO: 657155 - DNA, 60 bp, Artificial; identical to SEQ ID NO: 268642
  Synthetic oligonucleotide

SEQ ID NO: 657156 - DNA, 57 bp, Artificial; identical to SEQ ID NO: 267948
  Synthetic oligonucleotide

SEQ ID NO: 657157 - DNA, 56 bp, Artificial; identical to SEQ ID NO: 285525
  Synthetic oligonucleotide

SEQ ID NO: 657158 - DNA, 55 bp, Artificial; identical to SEQ ID NO: 281328
  Synthetic oligonucleotide

SEQ ID NO: 657159 - DNA, 51 bp, Artificial; identical to SEQ ID NO: 278779
  Synthetic oligonucleotide

SEQ ID NO: 657160 - DNA, 60 bp, Artificial; identical to SEQ ID NO: 285537
  Synthetic oligonucleotide

SEQ ID NO: 657161 - DNA, 60 bp, Artificial; identical to SEQ ID NO: 285580
  Synthetic oligonucleotide

SEQ ID NO: 657162 - DNA, 58 bp, Artificial; identical to SEQ ID NO: 267816
  Synthetic oligonucleotide

SEQ ID NO: 657163 - DNA, 50 bp, Artificial; identical to SEQ ID NO: 284576
  Synthetic oligonucleotide

SEQ ID NO: 657164 - DNA, 60 bp, Artificial; identical to SEQ ID NO: 285583
  Synthetic oligonucleotide

SEQ ID NO: 657165 - DNA, 51 bp, Artificial; identical to SEQ ID NO: 283211
  Synthetic oligonucleotide

SEQ ID NO: 657166 - DNA, 60 bp, Artificial; identical to SEQ ID NO: 285588
  Synthetic oligonucleotide

SEQ ID NO: 657167 - DNA, 55 bp, Artificial; identical to SEQ ID NO: 281326
  Synthetic oligonucleotide

SEQ ID NO: 657168 - DNA, 55 bp, Artificial; identical to SEQ ID NO: 271684
  Synthetic oligonucleotide

SEQ ID NO: 657169 - DNA, 51 bp, Artificial; identical to SEQ ID NO: 285597
  Synthetic oligonucleotide

SEQ ID NO: 657170 - DNA, 55 bp, Artificial; identical to SEQ ID NO: 281323
  Synthetic oligonucleotide

SEQ ID NO: 657171 - DNA, 55 bp, Artificial; identical to SEQ ID NO: 281368
  Synthetic oligonucleotide

SEQ ID NO: 657172 - DNA, 50 bp, Artificial; identical to SEQ ID NO: 277574
  Synthetic oligonucleotide

SEQ ID NO: 657173 - DNA, 55 bp, Artificial; identical to SEQ ID NO: 278397
  Synthetic oligonucleotide

SEQ ID NO: 657174 - DNA, 55 bp, Artificial; identical to SEQ ID NO: 270347
  Synthetic oligonucleotide

SEQ ID NO: 657175 - DNA, 60 bp, Artificial; identical to SEQ ID NO: 285563
  Synthetic oligonucleotide

SEQ ID NO: 657176 - DNA, 51 bp, Artificial; identical to SEQ ID NO: 283210
  Synthetic oligonucleotide

SEQ ID NO: 657177 - DNA, 58 bp, Artificial; identical to SEQ ID NO: 285567
  Synthetic oligonucleotide

SEQ ID NO: 657178 - DNA, 55 bp, Artificial; identical to SEQ ID NO: 286183
  Synthetic oligonucleotide

SEQ ID NO: 657179 - DNA, 50 bp, Artificial; identical to SEQ ID NO: 284616
  Synthetic oligonucleotide

SEQ ID NO: 657180 - DNA, 54 bp, Artificial; identical to SEQ ID NO: 270184
  Synthetic oligonucleotide

SEQ ID NO: 657181 - DNA, 55 bp, Artificial; identical to SEQ ID NO: 281363
  Synthetic oligonucleotide

SEQ ID NO: 657182 - DNA, 55 bp, Artificial; identical to SEQ ID NO: 281362
  Synthetic oligonucleotide

SEQ ID NO: 657183 - DNA, 54 bp, Artificial; identical to SEQ ID NO: 282270
  Synthetic oligonucleotide

SEQ ID NO: 657184 - DNA, 58 bp, Artificial; identical to SEQ ID NO: 279272
  Synthetic oligonucleotide

SEQ ID NO: 657185 - DNA, 60 bp, Artificial; identical to SEQ ID NO: 285772
  Synthetic oligonucleotide

SEQ ID NO: 657186 - DNA, 58 bp, Artificial; identical to SEQ ID NO: 279275
  Synthetic oligonucleotide

SEQ ID NO: 657187 - DNA, 53 bp, Artificial; identical to SEQ ID NO: 282516
  Synthetic oligonucleotide

SEQ ID NO: 657188 - DNA, 55 bp, Artificial; identical to SEQ ID NO: 281359
  Synthetic oligonucleotide

SEQ ID NO: 657189 - DNA, 52 bp, Artificial; identical to SEQ ID NO: 278745
  Synthetic oligonucleotide

SEQ ID NO: 657190 - DNA, 51 bp, Artificial; identical to SEQ ID NO: 283196
  Synthetic oligonucleotide

SEQ ID NO: 657191 - DNA, 60 bp, Artificial; identical to SEQ ID NO: 285781
  Synthetic oligonucleotide

SEQ ID NO: 657192 - DNA, 59 bp, Artificial; identical to SEQ ID NO: 285783
  Synthetic oligonucleotide

SEQ ID NO: 657193 - DNA, 55 bp, Artificial; identical to SEQ ID NO: 281357
  Synthetic oligonucleotide

SEQ ID NO: 657194 - DNA, 55 bp, Artificial; identical to SEQ ID NO: 281355
  Synthetic oligonucleotide

SEQ ID NO: 657195 - DNA, 55 bp, Artificial; identical to SEQ ID NO: 278395
  Synthetic oligonucleotide

SEQ ID NO: 657196 - DNA, 51 bp, Artificial; identical to SEQ ID NO: 283353
  Synthetic oligonucleotide

SEQ ID NO: 657197 - DNA, 55 bp, Artificial; identical to SEQ ID NO: 281351
  Synthetic oligonucleotide

SEQ ID NO: 657198 - DNA, 50 bp, Artificial; identical to SEQ ID NO: 284517
  Synthetic oligonucleotide

SEQ ID NO: 657199 - DNA, 55 bp, Artificial; identical to SEQ ID NO: 270346
  Synthetic oligonucleotide

SEQ ID NO: 657200 - DNA, 59 bp, Artificial; identical to SEQ ID NO: 285758
  Synthetic oligonucleotide

SEQ ID NO: 657201 - DNA, 58 bp, Artificial; identical to SEQ ID NO: 268211
  Synthetic oligonucleotide

SEQ ID NO: 657202 - DNA, 55 bp, Artificial; identical to SEQ ID NO: 281349
  Synthetic oligonucleotide

SEQ ID NO: 657203 - DNA, 55 bp, Artificial; identical to SEQ ID NO: 269686
  Synthetic oligonucleotide

SEQ ID NO: 657204 - DNA, 60 bp, Artificial; identical to SEQ ID NO: 285768
  Synthetic oligonucleotide

SEQ ID NO: 657205 - DNA, 52 bp, Artificial; identical to SEQ ID NO: 282890
  Synthetic oligonucleotide

SEQ ID NO: 657206 - DNA, 57 bp, Artificial; identical to SEQ ID NO: 268209
  Synthetic oligonucleotide

SEQ ID NO: 657207 - DNA, 55 bp, Artificial; identical to SEQ ID NO: 278394
  Synthetic oligonucleotide

SEQ ID NO: 657208 - DNA, 52 bp, Artificial; identical to SEQ ID NO: 270272
  Synthetic oligonucleotide

SEQ ID NO: 657209 - DNA, 51 bp, Artificial; identical to SEQ ID NO: 283258
  Synthetic oligonucleotide

SEQ ID NO: 657210 - DNA, 60 bp, Artificial; identical to SEQ ID NO: 285814
  Synthetic oligonucleotide

SEQ ID NO: 657211 - DNA, 55 bp, Artificial; identical to SEQ ID NO: 281484
  Synthetic oligonucleotide

SEQ ID NO: 657212 - DNA, 53 bp, Artificial; identical to SEQ ID NO: 286347
  Synthetic oligonucleotide

SEQ ID NO: 657213 - DNA, 50 bp, Artificial; identical to SEQ ID NO: 284557
  Synthetic oligonucleotide

SEQ ID NO: 657214 - DNA, 55 bp, Artificial; identical to SEQ ID NO: 268429
  Synthetic oligonucleotide

SEQ ID NO: 657215 - DNA, 55 bp, Artificial; identical to SEQ ID NO: 268947
  Synthetic oligonucleotide

SEQ ID NO: 657216 - DNA, 55 bp, Artificial; identical to SEQ ID NO: 281482
  Synthetic oligonucleotide

SEQ ID NO: 657217 - DNA, 60 bp, Artificial; identical to SEQ ID NO: 285820
  Synthetic oligonucleotide

SEQ ID NO: 657218 - DNA, 53 bp, Artificial; identical to SEQ ID NO: 282447
  Synthetic oligonucleotide

SEQ ID NO: 657219 - DNA, 53 bp, Artificial; identical to SEQ ID NO: 278725
  Synthetic oligonucleotide

SEQ ID NO: 657220 - DNA, 60 bp, Artificial; identical to SEQ ID NO: 285794
  Synthetic oligonucleotide

SEQ ID NO: 657221 - DNA, 55 bp, Artificial; identical to SEQ ID NO: 281474
  Synthetic oligonucleotide

SEQ ID NO: 657222 - DNA, 60 bp, Artificial; identical to SEQ ID NO: 285803
  Synthetic oligonucleotide

SEQ ID NO: 657223 - DNA, 54 bp, Artificial; identical to SEQ ID NO: 282421
  Synthetic oligonucleotide

SEQ ID NO: 657224 - DNA, 60 bp, Artificial; identical to SEQ ID NO: 285805
  Synthetic oligonucleotide

SEQ ID NO: 657225 - DNA, 55 bp, Artificial; identical to SEQ ID NO: 281473
  Synthetic oligonucleotide

SEQ ID NO: 657226 - DNA, 60 bp, Artificial; identical to SEQ ID NO: 285697
  Synthetic oligonucleotide

SEQ ID NO: 657227 - DNA, 55 bp, Artificial; identical to SEQ ID NO: 286186
  Synthetic oligonucleotide

SEQ ID NO: 657228 - DNA, 51 bp, Artificial; identical to SEQ ID NO: 269239
  Synthetic oligonucleotide

SEQ ID NO: 657229 - DNA, 53 bp, Artificial; identical to SEQ ID NO: 282449
  Synthetic oligonucleotide

SEQ ID NO: 657230 - DNA, 55 bp, Artificial; identical to SEQ ID NO: 281469
  Synthetic oligonucleotide

SEQ ID NO: 657231 - DNA, 59 bp, Artificial; identical to SEQ ID NO: 285708
  Synthetic oligonucleotide

SEQ ID NO: 657232 - DNA, 55 bp, Artificial; identical to SEQ ID NO: 281468
  Synthetic oligonucleotide

SEQ ID NO: 657233 - DNA, 55 bp, Artificial; identical to SEQ ID NO: 281466
  Synthetic oligonucleotide

SEQ ID NO: 657234 - DNA, 59 bp, Artificial; identical to SEQ ID NO: 285680
  Synthetic oligonucleotide

SEQ ID NO: 657235 - DNA, 57 bp, Artificial; identical to SEQ ID NO: 279366
  Synthetic oligonucleotide

SEQ ID NO: 657236 - DNA, 55 bp, Artificial; identical to SEQ ID NO: 281465
  Synthetic oligonucleotide

SEQ ID NO: 657237 - DNA, 55 bp, Artificial; identical to SEQ ID NO: 278391
  Synthetic oligonucleotide

SEQ ID NO: 657238 - DNA, 55 bp, Artificial; identical to SEQ ID NO: 281463
  Synthetic oligonucleotide

SEQ ID NO: 657239 - DNA, 55 bp, Artificial; identical to SEQ ID NO: 268946
  Synthetic oligonucleotide

SEQ ID NO: 657240 - DNA, 51 bp, Artificial; identical to SEQ ID NO: 283256
  Synthetic oligonucleotide

SEQ ID NO: 657241 - DNA, 55 bp, Artificial; identical to SEQ ID NO: 281462
  Synthetic oligonucleotide

SEQ ID NO: 657242 - DNA, 57 bp, Artificial; identical to SEQ ID NO: 271804
  Synthetic oligonucleotide

SEQ ID NO: 657243 - DNA, 60 bp, Artificial; identical to SEQ ID NO: 268207
  Synthetic oligonucleotide

SEQ ID NO: 657244 - DNA, 57 bp, Artificial; identical to SEQ ID NO: 279360
  Synthetic oligonucleotide

SEQ ID NO: 657245 - DNA, 60 bp, Artificial; identical to SEQ ID NO: 285732
  Synthetic oligonucleotide

SEQ ID NO: 657246 - DNA, 59 bp, Artificial; identical to SEQ ID NO: 285733
  Synthetic oligonucleotide

SEQ ID NO: 657247 - DNA, 54 bp, Artificial; identical to SEQ ID NO: 267901
  Synthetic oligonucleotide

SEQ ID NO: 657248 - DNA, 59 bp, Artificial; identical to SEQ ID NO: 268206
  Synthetic oligonucleotide

SEQ ID NO: 657249 - DNA, 57 bp, Artificial; identical to SEQ ID NO: 279174
  Synthetic oligonucleotide

SEQ ID NO: 657250 - DNA, 57 bp, Artificial; identical to SEQ ID NO: 285735
  Synthetic oligonucleotide

SEQ ID NO: 657251 - DNA, 55 bp, Artificial; identical to SEQ ID NO: 281460
  Synthetic oligonucleotide

SEQ ID NO: 657252 - DNA, 55 bp, Artificial; identical to SEQ ID NO: 281508
  Synthetic oligonucleotide

SEQ ID NO: 657253 - DNA, 53 bp, Artificial; identical to SEQ ID NO: 282568
  Synthetic oligonucleotide

SEQ ID NO: 657254 - DNA, 54 bp, Artificial; identical to SEQ ID NO: 282317
  Synthetic oligonucleotide

SEQ ID NO: 657255 - DNA, 60 bp, Artificial; identical to SEQ ID NO: 268205
  Synthetic oligonucleotide

SEQ ID NO: 657256 - DNA, 55 bp, Artificial; identical to SEQ ID NO: 270345
  Synthetic oligonucleotide

SEQ ID NO: 657257 - DNA, 56 bp, Artificial; identical to SEQ ID NO: 285744
  Synthetic oligonucleotide

SEQ ID NO: 657258 - DNA, 59 bp, Artificial; identical to SEQ ID NO: 279166
  Synthetic oligonucleotide

SEQ ID NO: 657259 - DNA, 51 bp, Artificial; identical to SEQ ID NO: 283268
  Synthetic oligonucleotide

SEQ ID NO: 657260 - DNA, 54 bp, Artificial; identical to SEQ ID NO: 269176
  Synthetic oligonucleotide

SEQ ID NO: 657261 - DNA, 51 bp, Artificial; identical to SEQ ID NO: 283271
  Synthetic oligonucleotide

SEQ ID NO: 657262 - DNA, 50 bp, Artificial; identical to SEQ ID NO: 284244
  Synthetic oligonucleotide

SEQ ID NO: 657263 - DNA, 55 bp, Artificial; identical to SEQ ID NO: 281507
  Synthetic oligonucleotide

SEQ ID NO: 657264 - DNA, 56 bp, Artificial; identical to SEQ ID NO: 279483
  Synthetic oligonucleotide

SEQ ID NO: 657265 - DNA, 50 bp, Artificial; identical to SEQ ID NO: 270397
  Synthetic oligonucleotide

SEQ ID NO: 657266 - DNA, 50 bp, Artificial; identical to SEQ ID NO: 284237
  Synthetic oligonucleotide

SEQ ID NO: 657267 - DNA, 58 bp, Artificial; identical to SEQ ID NO: 271821
  Synthetic oligonucleotide

SEQ ID NO: 657268 - DNA, 59 bp, Artificial; identical to SEQ ID NO: 279201
  Synthetic oligonucleotide

SEQ ID NO: 657269 - DNA, 51 bp, Artificial; identical to SEQ ID NO: 269700
  Synthetic oligonucleotide

SEQ ID NO: 657270 - DNA, 54 bp, Artificial; identical to SEQ ID NO: 278671
  Synthetic oligonucleotide

SEQ ID NO: 657271 - DNA, 51 bp, Artificial; identical to SEQ ID NO: 269253
  Synthetic oligonucleotide

SEQ ID NO: 657272 - DNA, 55 bp, Artificial; identical to SEQ ID NO: 278386
  Synthetic oligonucleotide

SEQ ID NO: 657273 - DNA, 55 bp, Artificial; identical to SEQ ID NO: 270265
  Synthetic oligonucleotide

SEQ ID NO: 657274 - DNA, 57 bp, Artificial; identical to SEQ ID NO: 285721
  Synthetic oligonucleotide

SEQ ID NO: 657275 - DNA, 51 bp, Artificial; identical to SEQ ID NO: 283279
  Synthetic oligonucleotide

SEQ ID NO: 657276 - DNA, 55 bp, Artificial; identical to SEQ ID NO: 271810
  Synthetic oligonucleotide

SEQ ID NO: 657277 - DNA, 55 bp, Artificial; identical to SEQ ID NO: 281503
  Synthetic oligonucleotide

SEQ ID NO: 657278 - DNA, 60 bp, Artificial; identical to SEQ ID NO: 268202
  Synthetic oligonucleotide

SEQ ID NO: 657279 - DNA, 53 bp, Artificial; identical to SEQ ID NO: 285730
  Synthetic oligonucleotide

SEQ ID NO: 657280 - DNA, 55 bp, Artificial; identical to SEQ ID NO: 281502
  Synthetic oligonucleotide

SEQ ID NO: 657281 - DNA, 55 bp, Artificial; identical to SEQ ID NO: 278433
  Synthetic oligonucleotide

SEQ ID NO: 657282 - DNA, 55 bp, Artificial; identical to SEQ ID NO: 281500
  Synthetic oligonucleotide

SEQ ID NO: 657283 - DNA, 60 bp, Artificial; identical to SEQ ID NO: 285749
  Synthetic oligonucleotide

SEQ ID NO: 657284 - DNA, 55 bp, Artificial; identical to SEQ ID NO: 281499
  Synthetic oligonucleotide

SEQ ID NO: 657285 - DNA, 55 bp, Artificial; identical to SEQ ID NO: 281497
  Synthetic oligonucleotide

SEQ ID NO: 657286 - DNA, 60 bp, Artificial; identical to SEQ ID NO: 285737
  Synthetic oligonucleotide

SEQ ID NO: 657287 - DNA, 60 bp, Artificial; identical to SEQ ID NO: 267939
  Synthetic oligonucleotide

SEQ ID NO: 657288 - DNA, 53 bp, Artificial; identical to SEQ ID NO: 282513
  Synthetic oligonucleotide

SEQ ID NO: 657289 - DNA, 55 bp, Artificial; identical to SEQ ID NO: 286151
  Synthetic oligonucleotide

SEQ ID NO: 657290 - DNA, 54 bp, Artificial; identical to SEQ ID NO: 282412
  Synthetic oligonucleotide

SEQ ID NO: 657291 - DNA, 60 bp, Artificial; identical to SEQ ID NO: 285681
  Synthetic oligonucleotide

SEQ ID NO: 657292 - DNA, 58 bp, Artificial; identical to SEQ ID NO: 268343
  Synthetic oligonucleotide

SEQ ID NO: 657293 - DNA, 60 bp, Artificial; identical to SEQ ID NO: 268199
  Synthetic oligonucleotide

SEQ ID NO: 657294 - DNA, 55 bp, Artificial; identical to SEQ ID NO: 281494
  Synthetic oligonucleotide

SEQ ID NO: 657295 - DNA, 51 bp, Artificial; identical to SEQ ID NO: 286406
  Synthetic oligonucleotide

SEQ ID NO: 657296 - DNA, 55 bp, Artificial; identical to SEQ ID NO: 281493
  Synthetic oligonucleotide

SEQ ID NO: 657297 - DNA, 57 bp, Artificial; identical to SEQ ID NO: 285800
  Synthetic oligonucleotide

SEQ ID NO: 657298 - DNA, 53 bp, Artificial; identical to SEQ ID NO: 282511
  Synthetic oligonucleotide

SEQ ID NO: 657299 - DNA, 54 bp, Artificial; identical to SEQ ID NO: 286153
  Synthetic oligonucleotide

SEQ ID NO: 657300 - DNA, 55 bp, Artificial; identical to SEQ ID NO: 281491
  Synthetic oligonucleotide

SEQ ID NO: 657301 - DNA, 54 bp, Artificial; identical to SEQ ID NO: 281490
  Synthetic oligonucleotide

SEQ ID NO: 657302 - DNA, 60 bp, Artificial; identical to SEQ ID NO: 285825
  Synthetic oligonucleotide

SEQ ID NO: 657303 - DNA, 60 bp, Artificial; identical to SEQ ID NO: 285816
  Synthetic oligonucleotide

SEQ ID NO: 657304 - DNA, 50 bp, Artificial; identical to SEQ ID NO: 277617
  Synthetic oligonucleotide

SEQ ID NO: 657305 - DNA, 56 bp, Artificial; identical to SEQ ID NO: 286508
  Synthetic oligonucleotide

SEQ ID NO: 657306 - DNA, 55 bp, Artificial; identical to SEQ ID NO: 286159
  Synthetic oligonucleotide

SEQ ID NO: 657307 - DNA, 51 bp, Artificial; identical to SEQ ID NO: 283312
  Synthetic oligonucleotide

SEQ ID NO: 657308 - DNA, 50 bp, Artificial; identical to SEQ ID NO: 284181
  Synthetic oligonucleotide

SEQ ID NO: 657309 - DNA, 55 bp, Artificial; identical to SEQ ID NO: 281489
  Synthetic oligonucleotide

SEQ ID NO: 657310 - DNA, 55 bp, Artificial; identical to SEQ ID NO: 281488
  Synthetic oligonucleotide

SEQ ID NO: 657311 - DNA, 55 bp, Artificial; identical to SEQ ID NO: 281486
  Synthetic oligonucleotide

SEQ ID NO: 657312 - DNA, 54 bp, Artificial; identical to SEQ ID NO: 285753
  Synthetic oligonucleotide

SEQ ID NO: 657313 - DNA, 55 bp, Artificial; identical to SEQ ID NO: 281485
  Synthetic oligonucleotide

SEQ ID NO: 657314 - DNA, 55 bp, Artificial; identical to SEQ ID NO: 281435
  Synthetic oligonucleotide

SEQ ID NO: 657315 - DNA, 60 bp, Artificial; identical to SEQ ID NO: 285565
  Synthetic oligonucleotide

SEQ ID NO: 657316 - DNA, 55 bp, Artificial; identical to SEQ ID NO: 281432
  Synthetic oligonucleotide

SEQ ID NO: 657317 - DNA, 52 bp, Artificial; identical to SEQ ID NO: 282823
  Synthetic oligonucleotide

SEQ ID NO: 657318 - DNA, 53 bp, Artificial; identical to SEQ ID NO: 278695
  Synthetic oligonucleotide

SEQ ID NO: 657319 - DNA, 55 bp, Artificial; identical to SEQ ID NO: 271250
  Synthetic oligonucleotide

SEQ ID NO: 657320 - DNA, 51 bp, Artificial; identical to SEQ ID NO: 283171
  Synthetic oligonucleotide

SEQ ID NO: 657321 - DNA, 52 bp, Artificial; identical to SEQ ID NO: 267884
  Synthetic oligonucleotide

SEQ ID NO: 657322 - DNA, 54 bp, Artificial; identical to SEQ ID NO: 268198
  Synthetic oligonucleotide

SEQ ID NO: 657323 - DNA, 54 bp, Artificial; identical to SEQ ID NO: 278669
  Synthetic oligonucleotide

SEQ ID NO: 657324 - DNA, 51 bp, Artificial; identical to SEQ ID NO: 283168
  Synthetic oligonucleotide

SEQ ID NO: 657325 - DNA, 56 bp, Artificial; identical to SEQ ID NO: 268666
  Synthetic oligonucleotide

SEQ ID NO: 657326 - DNA, 51 bp, Artificial; identical to SEQ ID NO: 283200
  Synthetic oligonucleotide

SEQ ID NO: 657327 - DNA, 60 bp, Artificial; identical to SEQ ID NO: 285531
  Synthetic oligonucleotide

SEQ ID NO: 657328 - DNA, 54 bp, Artificial; identical to SEQ ID NO: 281426
  Synthetic oligonucleotide

SEQ ID NO: 657329 - DNA, 58 bp, Artificial; identical to SEQ ID NO: 279228
  Synthetic oligonucleotide

SEQ ID NO: 657330 - DNA, 55 bp, Artificial; identical to SEQ ID NO: 268945
  Synthetic oligonucleotide

SEQ ID NO: 657331 - DNA, 60 bp, Artificial; identical to SEQ ID NO: 268665
  Synthetic oligonucleotide

SEQ ID NO: 657332 - DNA, 59 bp, Artificial; identical to SEQ ID NO: 279179
  Synthetic oligonucleotide

SEQ ID NO: 657333 - DNA, 54 bp, Artificial; identical to SEQ ID NO: 278666
  Synthetic oligonucleotide

SEQ ID NO: 657334 - DNA, 52 bp, Artificial; identical to SEQ ID NO: 278747
  Synthetic oligonucleotide

SEQ ID NO: 657335 - DNA, 56 bp, Artificial; identical to SEQ ID NO: 285674
  Synthetic oligonucleotide

SEQ ID NO: 657336 - DNA, 60 bp, Artificial; identical to SEQ ID NO: 270261
  Synthetic oligonucleotide

SEQ ID NO: 657337 - DNA, 50 bp, Artificial; identical to SEQ ID NO: 284380
  Synthetic oligonucleotide

SEQ ID NO: 657338 - DNA, 60 bp, Artificial; identical to SEQ ID NO: 285659
  Synthetic oligonucleotide

SEQ ID NO: 657339 - DNA, 50 bp, Artificial; identical to SEQ ID NO: 284378
  Synthetic oligonucleotide

SEQ ID NO: 657340 - DNA, 59 bp, Artificial; identical to SEQ ID NO: 268664
  Synthetic oligonucleotide

SEQ ID NO: 657341 - DNA, 55 bp, Artificial; identical to SEQ ID NO: 286161
  Synthetic oligonucleotide

SEQ ID NO: 657342 - DNA, 52 bp, Artificial; identical to SEQ ID NO: 268556
  Synthetic oligonucleotide

SEQ ID NO: 657343 - DNA, 56 bp, Artificial; identical to SEQ ID NO: 279386
  Synthetic oligonucleotide

SEQ ID NO: 657344 - DNA, 51 bp, Artificial; identical to SEQ ID NO: 283170
  Synthetic oligonucleotide

SEQ ID NO: 657345 - DNA, 55 bp, Artificial; identical to SEQ ID NO: 281416
  Synthetic oligonucleotide

SEQ ID NO: 657346 - DNA, 55 bp, Artificial; identical to SEQ ID NO: 268944
  Synthetic oligonucleotide

SEQ ID NO: 657347 - DNA, 55 bp, Artificial; identical to SEQ ID NO: 281415
  Synthetic oligonucleotide

SEQ ID NO: 657348 - DNA, 55 bp, Artificial; identical to SEQ ID NO: 281414
  Synthetic oligonucleotide

SEQ ID NO: 657349 - DNA, 53 bp, Artificial; identical to SEQ ID NO: 282550
  Synthetic oligonucleotide

SEQ ID NO: 657350 - DNA, 50 bp, Artificial; identical to SEQ ID NO: 286436
  Synthetic oligonucleotide

SEQ ID NO: 657351 - DNA, 51 bp, Artificial; identical to SEQ ID NO: 283231
  Synthetic oligonucleotide

SEQ ID NO: 657352 - DNA, 60 bp, Artificial; identical to SEQ ID NO: 279044
  Synthetic oligonucleotide

SEQ ID NO: 657353 - DNA, 55 bp, Artificial; identical to SEQ ID NO: 270342
  Synthetic oligonucleotide

SEQ ID NO: 657354 - DNA, 55 bp, Artificial; identical to SEQ ID NO: 281455
  Synthetic oligonucleotide

SEQ ID NO: 657355 - DNA, 60 bp, Artificial; identical to SEQ ID NO: 279069
  Synthetic oligonucleotide

SEQ ID NO: 657356 - DNA, 51 bp, Artificial; identical to SEQ ID NO: 283240
  Synthetic oligonucleotide

SEQ ID NO: 657357 - DNA, 51 bp, Artificial; identical to SEQ ID NO: 286413
  Synthetic oligonucleotide

SEQ ID NO: 657358 - DNA, 53 bp, Artificial; identical to SEQ ID NO: 269321
  Synthetic oligonucleotide

SEQ ID NO: 657359 - DNA, 55 bp, Artificial; identical to SEQ ID NO: 281449
  Synthetic oligonucleotide

SEQ ID NO: 657360 - DNA, 54 bp, Artificial; identical to SEQ ID NO: 278662
  Synthetic oligonucleotide

SEQ ID NO: 657361 - DNA, 55 bp, Artificial; identical to SEQ ID NO: 281448
  Synthetic oligonucleotide

SEQ ID NO: 657362 - DNA, 59 bp, Artificial; identical to SEQ ID NO: 279175
  Synthetic oligonucleotide

SEQ ID NO: 657363 - DNA, 50 bp, Artificial; identical to SEQ ID NO: 284276
  Synthetic oligonucleotide

SEQ ID NO: 657364 - DNA, 54 bp, Artificial; identical to SEQ ID NO: 282231
  Synthetic oligonucleotide

SEQ ID NO: 657365 - DNA, 52 bp, Artificial; identical to SEQ ID NO: 282881
  Synthetic oligonucleotide

SEQ ID NO: 657366 - DNA, 52 bp, Artificial; identical to SEQ ID NO: 271799
  Synthetic oligonucleotide

SEQ ID NO: 657367 - DNA, 54 bp, Artificial; identical to SEQ ID NO: 286271
  Synthetic oligonucleotide

SEQ ID NO: 657368 - DNA, 55 bp, Artificial; identical to SEQ ID NO: 267968
  Synthetic oligonucleotide

SEQ ID NO: 657369 - DNA, 55 bp, Artificial; identical to SEQ ID NO: 268390
  Synthetic oligonucleotide

SEQ ID NO: 657370 - DNA, 55 bp, Artificial; identical to SEQ ID NO: 281446
  Synthetic oligonucleotide

SEQ ID NO: 657371 - DNA, 55 bp, Artificial; identical to SEQ ID NO: 281445
  Synthetic oligonucleotide

SEQ ID NO: 657372 - DNA, 52 bp, Artificial; identical to SEQ ID NO: 267814
  Synthetic oligonucleotide

SEQ ID NO: 657373 - DNA, 56 bp, Artificial; identical to SEQ ID NO: 279008
  Synthetic oligonucleotide

SEQ ID NO: 657374 - DNA, 55 bp, Artificial; identical to SEQ ID NO: 278418
  Synthetic oligonucleotide

SEQ ID NO: 657375 - DNA, 55 bp, Artificial; identical to SEQ ID NO: 278416
  Synthetic oligonucleotide

SEQ ID NO: 657376 - DNA, 50 bp, Artificial; identical to SEQ ID NO: 270288
  Synthetic oligonucleotide

SEQ ID NO: 657377 - DNA, 57 bp, Artificial; identical to SEQ ID NO: 269392
  Synthetic oligonucleotide

SEQ ID NO: 657378 - DNA, 52 bp, Artificial; identical to SEQ ID NO: 282855
  Synthetic oligonucleotide

SEQ ID NO: 657379 - DNA, 56 bp, Artificial; identical to SEQ ID NO: 268662
  Synthetic oligonucleotide

SEQ ID NO: 657380 - DNA, 58 bp, Artificial; identical to SEQ ID NO: 279022
  Synthetic oligonucleotide

SEQ ID NO: 657381 - DNA, 48 bp, Artificial; identical to SEQ ID NO: 279015
  Synthetic oligonucleotide

SEQ ID NO: 657382 - DNA, 54 bp, Artificial; identical to SEQ ID NO: 278659
  Synthetic oligonucleotide

SEQ ID NO: 657383 - DNA, 55 bp, Artificial; identical to SEQ ID NO: 267848
  Synthetic oligonucleotide

SEQ ID NO: 657384 - DNA, 53 bp, Artificial; identical to SEQ ID NO: 282479
  Synthetic oligonucleotide

SEQ ID NO: 657385 - DNA, 55 bp, Artificial; identical to SEQ ID NO: 281437
  Synthetic oligonucleotide

SEQ ID NO: 657386 - DNA, 54 bp, Artificial; identical to SEQ ID NO: 282244
  Synthetic oligonucleotide

SEQ ID NO: 657387 - DNA, 60 bp, Artificial; identical to SEQ ID NO: 279121
  Synthetic oligonucleotide

SEQ ID NO: 657388 - DNA, 51 bp, Artificial; identical to SEQ ID NO: 283226
  Synthetic oligonucleotide

SEQ ID NO: 657389 - DNA, 55 bp, Artificial; identical to SEQ ID NO: 278414
  Synthetic oligonucleotide

SEQ ID NO: 657390 - DNA, 60 bp, Artificial; identical to SEQ ID NO: 279083
  Synthetic oligonucleotide

SEQ ID NO: 657391 - DNA, 51 bp, Artificial; identical to SEQ ID NO: 269247
  Synthetic oligonucleotide

SEQ ID NO: 657392 - DNA, 53 bp, Artificial; identical to SEQ ID NO: 286334
  Synthetic oligonucleotide

SEQ ID NO: 657393 - DNA, 51 bp, Artificial; identical to SEQ ID NO: 283228
  Synthetic oligonucleotide

SEQ ID NO: 657394 - DNA, 55 bp, Artificial; identical to SEQ ID NO: 281436
  Synthetic oligonucleotide

SEQ ID NO: 657395 - DNA, 55 bp, Artificial; identical to SEQ ID NO: 271249
  Synthetic oligonucleotide

SEQ ID NO: 657396 - DNA, 53 bp, Artificial; identical to SEQ ID NO: 276734
  Synthetic oligonucleotide

SEQ ID NO: 657397 - DNA, 52 bp, Artificial; identical to SEQ ID NO: 293930
  Synthetic oligonucleotide

SEQ ID NO: 657398 - DNA, 54 bp, Artificial; identical to SEQ ID NO: 296604
  Synthetic oligonucleotide

SEQ ID NO: 657399 - DNA, 49 bp, Artificial; identical to SEQ ID NO: 293627
  Synthetic oligonucleotide

SEQ ID NO: 657400 - DNA, 51 bp, Artificial; identical to SEQ ID NO: 294983
  Synthetic oligonucleotide

SEQ ID NO: 657401 - DNA, 55 bp, Artificial; identical to SEQ ID NO: 292145
  Synthetic oligonucleotide

SEQ ID NO: 657402 - DNA, 53 bp, Artificial; identical to SEQ ID NO: 293822
  Synthetic oligonucleotide

SEQ ID NO: 657403 - DNA, 54 bp, Artificial; identical to SEQ ID NO: 293283
  Synthetic oligonucleotide

SEQ ID NO: 657404 - DNA, 52 bp, Artificial; identical to SEQ ID NO: 293928
  Synthetic oligonucleotide

SEQ ID NO: 657405 - DNA, 51 bp, Artificial; identical to SEQ ID NO: 294852
  Synthetic oligonucleotide

SEQ ID NO: 657406 - DNA, 55 bp, Artificial; identical to SEQ ID NO: 292146
  Synthetic oligonucleotide

SEQ ID NO: 657407 - DNA, 57 bp, Artificial; identical to SEQ ID NO: 293294
  Synthetic oligonucleotide

SEQ ID NO: 657408 - DNA, 55 bp, Artificial; identical to SEQ ID NO: 292148
  Synthetic oligonucleotide

SEQ ID NO: 657409 - DNA, 55 bp, Artificial; identical to SEQ ID NO: 292150
  Synthetic oligonucleotide

SEQ ID NO: 657410 - DNA, 53 bp, Artificial; identical to SEQ ID NO: 293834
  Synthetic oligonucleotide

SEQ ID NO: 657411 - DNA, 59 bp, Artificial; identical to SEQ ID NO: 293382
  Synthetic oligonucleotide

SEQ ID NO: 657412 - DNA, 53 bp, Artificial; identical to SEQ ID NO: 293829
  Synthetic oligonucleotide

SEQ ID NO: 657413 - DNA, 55 bp, Artificial; identical to SEQ ID NO: 292152
  Synthetic oligonucleotide

SEQ ID NO: 657414 - DNA, 47 bp, Artificial; identical to SEQ ID NO: 292153
  Synthetic oligonucleotide

SEQ ID NO: 657415 - DNA, 53 bp, Artificial; identical to SEQ ID NO: 293785
  Synthetic oligonucleotide

SEQ ID NO: 657416 - DNA, 54 bp, Artificial; identical to SEQ ID NO: 293318
  Synthetic oligonucleotide

SEQ ID NO: 657417 - DNA, 52 bp, Artificial; identical to SEQ ID NO: 293965
  Synthetic oligonucleotide

SEQ ID NO: 657418 - DNA, 54 bp, Artificial; identical to SEQ ID NO: 295715
  Synthetic oligonucleotide

SEQ ID NO: 657419 - DNA, 55 bp, Artificial; identical to SEQ ID NO: 292216
  Synthetic oligonucleotide

SEQ ID NO: 657420 - DNA, 55 bp, Artificial; identical to SEQ ID NO: 292158
  Synthetic oligonucleotide

SEQ ID NO: 657421 - DNA, 55 bp, Artificial; identical to SEQ ID NO: 292161
  Synthetic oligonucleotide

SEQ ID NO: 657422 - DNA, 55 bp, Artificial; identical to SEQ ID NO: 292162
  Synthetic oligonucleotide

SEQ ID NO: 657423 - DNA, 55 bp, Artificial; identical to SEQ ID NO: 292164
  Synthetic oligonucleotide

SEQ ID NO: 657424 - DNA, 53 bp, Artificial; identical to SEQ ID NO: 293691
  Synthetic oligonucleotide

SEQ ID NO: 657425 - DNA, 53 bp, Artificial; identical to SEQ ID NO: 293686
  Synthetic oligonucleotide

SEQ ID NO: 657426 - DNA, 54 bp, Artificial; identical to SEQ ID NO: 293178
  Synthetic oligonucleotide

SEQ ID NO: 657427 - DNA, 55 bp, Artificial; identical to SEQ ID NO: 292165
  Synthetic oligonucleotide

SEQ ID NO: 657428 - DNA, 55 bp, Artificial; identical to SEQ ID NO: 292167
  Synthetic oligonucleotide

SEQ ID NO: 657429 - DNA, 52 bp, Artificial; identical to SEQ ID NO: 292169
  Synthetic oligonucleotide

SEQ ID NO: 657430 - DNA, 55 bp, Artificial; identical to SEQ ID NO: 292170
  Synthetic oligonucleotide

SEQ ID NO: 657431 - DNA, 56 bp, Artificial; identical to SEQ ID NO: 292194
  Synthetic oligonucleotide

SEQ ID NO: 657432 - DNA, 55 bp, Artificial; identical to SEQ ID NO: 292172
  Synthetic oligonucleotide

SEQ ID NO: 657433 - DNA, 55 bp, Artificial; identical to SEQ ID NO: 292173
  Synthetic oligonucleotide

SEQ ID NO: 657434 - DNA, 59 bp, Artificial; identical to SEQ ID NO: 294682
  Synthetic oligonucleotide

SEQ ID NO: 657435 - DNA, 56 bp, Artificial; identical to SEQ ID NO: 293072
  Synthetic oligonucleotide

SEQ ID NO: 657436 - DNA, 53 bp, Artificial; identical to SEQ ID NO: 293634
  Synthetic oligonucleotide

SEQ ID NO: 657437 - DNA, 54 bp, Artificial; identical to SEQ ID NO: 293195
  Synthetic oligonucleotide
